United States Patent Application Publication US 2011/0183924 A1 - sequence listing, part 290

SEQ ID NO: 925569 - protein, 389 aa, Homo sapiens
MLYNKDSEQLRIKEEECGKVVETKQQLKWNLRRLVKELRTVRNNLDLISHRHQKEKDLFHENCMLQEEIALLRLEIDTIKNQNKQKEKKYFEDIEVVKEKNDNLQKIIKRNEETLTETILQYSGQLNNLTAENKMLNSELENGKENQERLEIEMESYRCRLAAAVHDCDQSQTARDLKLDFQRTRQEWVRLHDKMKVDMSGLQAKNEILSEKLSNAESKINSLQIQLHNTRDALGRESLILERVQRDLSQTQCQKKETEQMYQSKLKKYIAKQESVEERLSQLQSENMLLRQQLDDVHKKANSQEKTISTIQDQFHSAAKNLQAESEKQILSLQEKNKELMDEYNHLKERMDQCEKEKAGRKPLIPTVLLSTSVNVFLNFSSHMSENIQ

SEQ ID NO: 925570 - protein, 161 aa, Homo sapiens
MQSSSSGENRLLESGVREEENHPLLGSYEKKEATAVTATATSSARQCRWQCSPHGTPNLPPATSISDVTTNHSEASHGGTGSSLQHVAVPLPSSPPAWQEKLLLLTALLLLYRHYQPQRGSDPGSRLHPSSTLQQVEGCGFFQFSKLDTELLLRWTQKSLK

SEQ ID NO: 925571 - protein, 382 aa, Homo sapiens
MSWGPGEEAPDITPEEALPELPPGEPEFRCPERVMDLGLSEDHFSRPVLRQVIEECKQVILELPEQSEKQKDAVEKSKSVKQTCDKCNTIIWGLIQTWYTCTGCYYCCHSKCLNLISKPCVSSKVSHQAEYELNICPETGLDSQDYRCAECQAPISLQGVPSEARQCDYTGQYYCSHCHWNDLAVIPACIVRNWDFAPRKVSRCSMCYLALMVSRPVLRLREINLLLFNYVEELVEICKLRQDILLMKRYFITCREAMEARLLLQLQDQQHFVENDEMYSVQDLLDVHAGHLGCSLTETHTLFTKHIKLERERCQAKGFVCELCREGDVLFPFDSHTSVCTDCSTVFHRDCYYDNSTTCPKCAQLSLRKQSLFQEPGPDVEA

SEQ ID NO: 925572 - protein, 167 aa, Homo sapiens
MPPVIILRLLLDTGATWESDCSQQQERGTEAGQSLLPHLHGAPVSNCIQSSLAFCHFEANVMLGLLVAIYLGHHVLRPHLAPGEPSCWLLGSLPGPGCRASSDLLVPLLGQGGQAASAPSLRGVACTLHVHARVLSSFVPTSCWVQRHPSVQIGGINFIHEGRALMT

SEQ ID NO: 925573 - protein, 152 aa, Homo sapiens
MEKRRNGTRLHCWWECKLVEPQWKTVWKFLKELKVELLLDPAIPLLGIHREEKKSKKMLYTHVYSSTIHNCKIMEPTQMPINQLVDKATVVYLYVMEYYSSIKRNELIAFAVTWMRLETIILSEVTQEWKNRMSCVLTNMWELSYEDTKAKE

SEQ ID NO: 925574 - protein, 172 aa, Homo sapiens
MLNPEKRGLRFEIATTFAKQKTHGDCKLYSTLKRWCQLGCRAKHSVVGKLSALSRHGAGEDEMGQIEAPAVCKGNEREQARGLSWRRGFPTETTVNVKGPGGSVTSLLKETKETGSLQIFALLETPSTCLCLALCPKKLAYEEIFGVLLCPMASRGKHCPALVAAEILQEEE

SEQ ID NO: 925575 - protein, 204 aa, Homo sapiens
MEATHTTLPSSQRPIPSFAILTKPLYKLTKGNLADPIDPKSFPHSSFHSLKTALETAPTLVLPDSSQPFSLHTAEVPGCAVRILTQGPGLCPVAFLSKQLDLTVLGWPSCLRAAAAAALILLEALKITSYAQLTLYSSHNFQNLFSSSHLTHILSAPRLLQLYSLFVESLTITIVPGPDFNPASHIIPDTTPDPHDCISLIHLT

SEQ ID NO: 925576 - protein, 157 aa, Homo sapiens
MYLQERVDYAVFPKFDGGNALTSPVGMLSPRQWECSPLPSGNALTSPVGMFTSLVGMLPPQWECSHLSSGNALTSPVGMLSPPQWECSPPQWECSHLPSGNVPLPSGNALTSPVGMFSPPQWECSHLPSGNVHLPSGNVLTSPVGMFSPPQWECSPP

SEQ ID NO: 925577 - protein, 133 aa, Homo sapiens
MGNPVGDEEPVGGGEPVGDEKLEGDGEPMGDGEPVGDEKLEGDEEPMGDGEPIGDGEPVGDEKLEGDGEPVGDGKPMGDGEPVGDEEPVGDGEPTGANHTRLANNNTPQADNNTPQADNNTPQADNTPRADNT

SEQ ID NO: 925578 - protein, 128 aa, Homo sapiens
MLSCESSTWGSITPTDSGTSAGTGWQAGSQAQPSQSTRTPEPELRLEGPPAFPHSSMSRMRSLGPAPPPPSQLPLLLCVLQTFPLGNPQFPVAGPQAAARAKGTPIQLLRPPGGLPEEFKPSCVALGK

SEQ ID NO: 925579 - protein, 133 aa, Homo sapiens
MCPTIGSNVEEIILPKTHFFMWDIVRPEALSFIWNTYYSNTEFIILVIDSTDRDRLLTTREELYKMLAHEALQDASVLIFANKQDVKDSMRMVEISHFLTLSTIKDHSWHIQGCCALTREGLVAALPGSLGPG

SEQ ID NO: 925580 - protein, 159 aa, Homo sapiens
MLAAAGHTAGWAVAGLAAAGSTALVEATRQADSRGVVAGSSAVHRCTGAALATAGPTAGLATAAGPTADGLVAGCAAAGRLAAAGHTGGLAAGGPAAGVLTASWVAVRLAAAGHTAGGLAAGCAAAGGHNGGLPAGSPAASGPAADTSHIESEAQFIPI

SEQ ID NO: 925581 - protein, 399 aa, Homo sapiens
MRSQDKPGGKAEGPRNKVSTSTMADGCCPGNTTAIPAVPTITTYPVKGGFRHALCLPSSCHSRMWQLVTCQESCQPSIGAPSGCDPASCQPTRLPATSCVGFVCQPMCSHAACYQSGTGQSPCLVSSCQPSCSESTCCQEKCCDASPCQQSSCQESVCMSGSCQAACGQSVCCDAGSCQPSCSEVTSCPETSCLPTICTASPCQPTWCQGSSCQPVSGEGQPCKSTYYQPICYIFKPCQSALYMPVPCQPSTCVFSSCNTTCCVPSHCQPPHCQLVPSTCFIYQPVANCQAPCSTKNCCKPASCDTVISGQPTCDGPPSYNQSGCKSACCVTGLGTSPSSGSNCLPTSCQPSCEACNGGVARFFRAPLLTLLGEACRWAGFGALTPRQRLGRVYTIYPI

SEQ ID NO: 925582 - protein, 139 aa, Homo sapiens
MLGTRLAPGSIEVGLDFWFAEAGPLAPGAMGINLKPLAGLVLRQCGVGLKSGAMEASLVLGTIWSLGFCLAVCQALRPSLPGMCEAQGCGIWPGTRIDRAACGDSLYKLLLQELLQKHFRKAKRIHRPFKGSSWLLQAP

SEQ ID NO: 925583 - protein, 140 aa, Homo sapiens
MSEHQKEQTLDTPSLRTVTLTARVHGFILEVRETKNPPILDTILHLLTKDPLGPEYPGSTPGALGYETCWLQGKPSTFSVVLAMVKASCLRKAEGKVKGTLPCTLAFLDFLWARGKPTSLKDESQAWHHLPYADGRDLGL

SEQ ID NO: 925584 - protein, 176 aa, Homo sapiens
MYALNQCPIYETVSFTARIHRSRNQGVKVEVAPLTIFPSDPLAKFLLPFTVTFCSAGLEVLVPERGMLPPGDTTKIPLNWKFRVPLGHFGLLLPLNQQAKKGVTVFAGVINPDYQDEISVLLHNGGRNTNDPDPSGIKVSVSPPGKKEKKKEKKPAEVLAEGKENTEWVVEEDTKA

SEQ ID NO: 925585 - protein, 221 aa, Homo sapiens
MSPLSSQCGIGLSRIEPSQQQGTTQGVGCTFISSGAKGLLEFFGGPCETCLPGYHQWNLQISKHCCLFLPLEALSQRGTRQMPSGALLYEVSVDTCWQVTPSQEAWGACRQERLSLLKLRPQPPLPPGALSQGDGSFIYKPLNGAAFFLLEKLCPERRNLERQSSYSGYAESCGSISLPSPPEQVFYNTVLYGKMGLHSSPADLSRDKEHYALEVAESRDF

SEQ ID NO: 925586 - protein, 172 aa, Homo sapiens
MPQSRQGLRGDENLDQSFKLRDDPTMAAEEAALPQDCCFQLFFAQMPPSAHCVPEANKTARFPALPESKEVSAPILHPAPHPHPIPGINRKVGHNPYSDFRQGALEPRHSAGVGGHLDAVLSCAEITEMLARLTPGVQELAAPPILGQQGDMLQSAKPASHKRSPLSYFNVR

SEQ ID NO: 925587 - protein, 144 aa, Homo sapiens
MKRPRIGTCSSKEVPREGRVSQSPGSPPWSQPMLSASCLFFKRDSRHVQIHLSIRRRALEEHHEAQQKNGLLFLVPEFNSCSQDTAASSVWETQWKLHITDIAKVPSNGHPWFYTLSPRGNHYYEFEDVKNPSCYYESSNNHVT

SEQ ID NO: 925588 - protein, 131 aa, Homo sapiens
MTSCQKSKLHSARVISRIIHADVPWSIPLSVSKGTVSHPNPRASRLHQNENWDHGAHPDGHWALTLFLGTLSYDGAQAASSGAGWDEMKGEGQRGTASPRQFIASSPLSGMEQRESILSEEEQGCFQCHIN

SEQ ID NO: 925589 - protein, 176 aa, Homo sapiens
MSSRCSGLSGERASPCLPPFILLSTSPAPHCPLAVPCVHQKRLASPTVRVHQSPDIPSLFLAHDEVSFAACPFSPVSDPWDPDLGSNLDAYLLLEVGRRDVPPARTSQKRPGSQVPAGAGENLAWFGQWFLGRGVASALGVQGSHGVVGRVMGTVAEDARWEAEEPCLGAGDEGCW

SEQ ID NO: 925590 - protein, 131 aa, Homo sapiens
MLGRPRAPGASDSDAPEVKDGDLHLGAGKKGSTWSPTPDLQNWNGHLNKIPPPEFRCTWKFEKHRSTGVNKPFASLWEEDIIPVWNKNAVERKVTQRSINWHRTSFLFCKNASILVTADIKAAKDISVFNK

SEQ ID NO: 925591 - protein, 360 aa, Homo sapiens
MNGIVMKSESLVHPSPSLTALPPLKSYILPGRSKTLHKNGESRGIRIQLDFHRNASGVSNTLPMLSQKKSTGGRKEGRFQEGWRAQDDFAPRWTWRAGRVILSPETGEPYEGVPEKTHGSRIPPRPAATGWRAQPAEPQGDIQLRAAKGIGAWTSPGFSFAGSAGVPPFPSPHWLSLRACDFAQPLRGVESGVQQAVRSGFARNSHWSVKQESHPPGLPIGCCPTAALSFPAAGDLGFLGVEGCSTLLEARFSFHRCVPRARGQRGWTRFRTLQSGSCPRGGLWDSTALRGKWREAGGGVFFALKTWIPCCGLNGRLGWSPGSGYGRGGDHAGRVGGSPSQGLEDQVPDLQGPSCTRIPQ

SEQ ID NO: 925592 - protein, 321 aa, Homo sapiens; identical to SEQ ID NO: 747421

SEQ ID NO: 925593 - protein, 313 aa, Homo sapiens; identical to SEQ ID NO: 747121

SEQ ID NO: 925594 - protein, 315 aa, Homo sapiens
MEPEAGTNRTAVAEFILLGLVQTEEMQPVVFVLLLFAYLVTTGGNLSILAAVLVEPKLHAPMYFFLGNLSVLDVGCITVTVPAMLGRLLSHKSTISYDACLSQLFFFHLLAGMDCFLLTAMAYDRLLAICQPLTYSTRMSQTVQRMLVAASWACAFTNALTHTVAMSTLNFCGPNEVNHFYCDLPQLFQLSCSSTQLNELLLFVAAAFMAVAPLVFISVSYAHVVAAVLQIRSAEGRKKAFSTCGSHLTVVGIFYGTGVFSYMRLGSVESSDKDKGVGVFMTVINPMLNPLIYSLRNTDVQGALCQLLVGKRSLT

SEQ ID NO: 925595 - protein, 322 aa, Homo sapiens; identical to SEQ ID NO: 746095

SEQ ID NO: 925596 - protein, 176 aa, Homo sapiens
MAREKEAAGLSSLASLIEKCPKDNKDCSSYGSFSDAVLELFKLTIGLGDLNIQQNSKYPILFLFLLITYVILTFVLLLNMLIALMGETVENVSKESERIWRLQRARTILEFEKMLPEWLRSRFRMGELCKVAEDDFRLCLRINEVKWTEWKTHVSFLNEDPGPVRRTADPGSNRVL

SEQ ID NO: 925597 - protein, 171 aa, Homo sapiens [sequence omitted]

SEQ ID NO: 925598 - protein, 172 aa, Homo sapiens
MLQRVGEMDGGNQSEGSEFLLLGISESPEQQQMLFWMFLVRYLVTVLGNVLIILAISSDSRLHTPMYFFLANLSFTDLFFVTNTIPKMLVNLQSQNKAISYTGCLTQLYFLVSLVALDNLNLAVMAYDRYVAICRPLHYVTAMIPGLCILLLSLCWVFSALYGLIHILLMTR

SEQ ID NO: 925599 - protein, 160 aa, Homo sapiens
MSEHNITKECQQENQSIEQWGTITHNDSKKVSWLHEVIKTYLKAKNIKLDLMKKLKELSSQPSRKPKPFIPSQEGIGDSDVICDMKKFQGRTNHSPHLSYCYPDASELPFLLTTGIALIVLWCPPASSTFSNRCSSDPLTCIRAPMNGHHLLRPGRLERP

SEQ ID NO: 925600 - protein, 147 aa, Homo sapiens
MLCSGNGHLTLKHSVLYSGNGHCLLKHGVLCSGNGHLLLKHSFHHKRVYGSECGGTLLSFRCRRPLTRTGFKPVNYWIKSDPGPGLFSAITSKTSSQSWLDSSLEQKFAQRNSELKTQIHGALKSERKFTMIPSCCKRSKDTSVRES

SEQ ID NO: 925601 - protein, 704 aa, Homo sapiens
MVQTDMLLPEPAPQTVPPCELPCKEYDLVVWFQNCYARYHQAFADCNQSERELQGHKSQQLAAEIQALAQPTQQDSKCRVGERLQDMHSWNSELQGEVEALAAETDLLLAQKQRLEHALDAMEVPFSIATDNMQCNQRHQHANLVRDHVETELLKVPAALGGQDFPGTVILTLCSPETFPGWDSCSRGGNPGLGQHCGCGQAYPPAPSQCLKNCCSSRKPSASNKGVCEVMETLTVQEEANPGTEGCRTRALAHKEEAELIRNIQELLKRVIVQAVSQIRLQHGGSPAGPSLATHQDPAPPRPRLNREHMEICEMDWSDKVEAYNLDETCGRHRSQSTEVQAHPALHHLPREGGPSSAPVLALAVVLPPSAWGPQRRCFPQPGPEALAPEDTWATVCPWHEKACKTSSSAQRPRSASTPETRTKFTQDNLCRAQRERLDSANLWVLVDCILRDTSEDLGLQCDAVNLAFGRRCEELEDARHKLQHHLQKGHWSGPPSGHSPRTWVGPDWSLHSICPGMGAQAQGALSCRQMLREITDQEHNMVALKEAIKDKEAPLHIAQTRLYLLSHRPNMELCRDAAQFRYRHDTGQVMGRGPPSARDLCPRGLTPPSATSSSQEEAPSDKPQLTPPNTPKLVSELEELYKSITALWEKLLQAEQSLHNLEDIHMSLEKDVTAMTNSLFLDRQNCMAHHTCYPTILQLAGYQ

SEQ ID NO: 925602 - protein, 144 aa, Homo sapiens
MRCGGEDDVIPHIAGGVQPPRILFIISTWGGDDVTTHIARVNNITEGVYTPCDIDSNIFSPPPDIRSNITEALYTPCDIDSNILSPPDIRNNITEEEQYHGGVYTPCDIDSNIILSPPDISNNITEGVIVDEMVKRKGKNGISC

SEQ ID NO: 925603 - protein, 199 aa, Homo sapiens
MAEEETGGGRVWQALSPGVPAIQRPPRVCSTNWVPSYRRRATLKLAGGPSLAEPGLDVAVAATKPGGLPGGGCTGAGTDPQPHPRWLQTAPGVAPISLRRRRGAGVTARRALRQEGMRACDSGTSRASPGEPASQRRLFLWIMAQVAVSTLPMEDEESMEDEESIEDEESVEDDSVESRMVVTLLISAIESTDTILTLN

SEQ ID NO: 925604 - protein, 148 aa, Homo sapiens
MRAPLPQPHCHLAVRSQTAVLAMKVVSGQSMKSSAGHGGSRQLTKSSAIACAKLCKASTYINWEDNAVIFLLVQSMVVDLKIFLVQNSHSTFHYVLVNSLHQIITNALLVLRQLDSIDLWNPDAPGETFWEIRFQCGYYCDFNRFSQF

SEQ ID NO: 925605 - protein, 152 aa, Homo sapiens
MELRCVTSLMQNRFYLMHCSWTHGYWAELCGGCSAMESLRSSVDLGPGLTLQKLGKVVVELLPHDLSPQLTVHKLQVETLVCLPLIGLLVGLMVLLRLVQSVRGQLCEKHQILLLSSQEWTWVLNPCCSLPSPWASWAARLRIPTLTPSEGH

SEQ ID NO: 925606 - protein, 138 aa, Homo sapiens
MKMESSSYPLRLYDQLICDHRRDRSVCPGNSLNNYPHYTTQKQEGATGRTTDRKEQVSYFSSILMVFLYIPFGSGVNVQGFYIGQLHVTGVGVQIISPFRKKTKMPLIELLKAKISRVPEKGKYMKGAAKYLLPQRTH

SEQ ID NO: 925607 - protein, 134 aa, Homo sapiens
MGGRSEALVDKIHARRRRNLNKFTRKKTNNPIKKWMKDMNGHFSKENIYAANKDTKKSSSSLVITEMQIKTTVRYHLTPVRMAIIKKSGNNRCWRGCGEIEKLLHCWSEHKLVQSTIVEDNVVIPQGSRTRNTI

SEQ ID NO: 925608 - protein, 143 aa, Homo sapiens
MIFPPIQIIKINWEEGRNPSNKELKCLLRFFANSNKVRGCMMTHRLGKRLRPIQAAACGCWVFQGHCGEGSCPASAQQLREGPPRRWLLEGFCCMTPSENLGFARKNGEGPHCSPAAVHAAWGHICLWREQFFHSHQNSRPIE

SEQ ID NO: 925609 - protein, 188 aa, Homo sapiens
MLSEGSHWKSACCYPGLTYLSLYSLDTAICGPNTVQNELPKALDGDPVIDGAKPVTPEQGPEAKATRCTHGGPGMPGALKGALVLSVTGAASAQPGLDQGPAAPGQGTFWQQLSLLQAGCRKLYKLPLRHFVVYVLNTKIRKLAKQQETHFFNLLHLINRVNTIPVKSPESYFEDVNKLIPEFLWKSR

SEQ ID NO: 925610 - protein, 148 aa, Homo sapiens
MKLKPEFASASGISAPSPLHFQSHMQPSQGANHPLELRAKTSYPGRYKEEGVKFANLSGHCPAAQETRHLHLKQTFPKSRECRLPHASQEQNTLWCCDGTDRSRGLIWSQRPSKHLILFGLKQIYDLDRGKIRKVQRESSTKKCDRQK

SEQ ID NO: 925611 - protein, 499 aa, Homo sapiens
MPFTIWSSRGFVGWGQCGEMKLGCGGSENPASYLNLASYLNDASYLNNASYLNLASYLNLASYLNLASYQNLAFYLNLAFCLNDASCLNLASYLNLASYLNHASYLNLAFYLNHASYLNLASYLNQASYLNHASYQNLASYLNLASYLNLASYLNLASYQNLAFYLNLAFCLNDASCLNLASYLNLASYLNLASYLNHASYQNLASYLNLAFCLNDASCLNLASYLNHASYLNLASYLNLASYLNLASYLNHASYLNLASYLNNASYLNLASYLNLASYLNLASYLNHASYLNNASYLNLPSCLNLASYLNLASYLNLAFYLNLAFCLNDASCLNLASYLNLAFYLNHASYLNHASYQNLASYLNLAFYLNHASYLNLASYLNLASYLNLAFCLNDASCLNLASYLNHASYLNHASYLNHASYQNLASYLNLASYLNHASYLNLASYLNLASYLNLASYLNLASYLNLASYLNLTFYLNLKSYLNFTSYANLTSYLKIH

SEQ ID NO: 925612 - protein, 137 aa, Homo sapiens
MPALPPSPLRGTQKPEPVVAEGSCGRWQQTLELSAGHLCPREPSLRHVPAHASAIAGLHLQAGKAAARKKQGAAVPKSLKMQNWVMDRGQKVGARKTDAAVNGLLNLLGSIISSFFPISSFWNAYPMPVPPLDLGST

SEQ ID NO: 925613 - protein, 151 aa, Homo sapiens
MEKLRPRKGQWLNWGQSQVNPLTSAPNPGPSSALRDHLAELSPSQGDNLSLSSVTLAWAQTLSPLPVPAHTLAVLAQALPEKSPSPLVSSRQTLRAPGLPTLSPGLELPPSPSPRPPSRPTFLPHCPSYPRPRAHIDLGGVWFFSAPHVEL

SEQ ID NO: 925614 - protein, 156 aa, Homo sapiens
MPPPTKLKDSPLPAPTCTASPFFAANLRESGKATAVGSWCQDLLRAGDTGLGLCPWGAHCAKGLAPVLRELRVQKELTAPILSGVCPELEARALSVGAHGPKAPVYLALFWGSSQLHSCDSPLLRATTVTTEKTSDFQNEPGIKLLTGAVYVCGVR

SEQ ID NO: 925615 - protein, 175 aa, Homo sapiens
MQYQQSHGGWWKPTVTERLVLGAAHAVIHPPPCPLGAGTGIKPVVRGLPRRAQRWPSKKALARYGPPTFNFPTSRTVGNKSLFFINYPGSGQRLAPGLVPKCTLELLVRGGSSRRDRYGELTINSWPSLFSSAEMVAVAKQPGLGLGGRVEKLGKCLWPRTDLSLASSRATVANV

SEQ ID NO: 925616 - protein, 163 aa, Homo sapiens
MPPPPASGWPSKKALARYGPPTFNFPTSRTVGNKSLFFINYPGSGQRLAPGLVPKCTLELLVRGGSSRRDRYGELTINSWPSLFSSAEMVAVAKQPGLGLGGRVEKLGATEEMGGSYPVPISPSLHFVHFSGHDWEILGSRMWQEFSAMKQNQVLSGPCREIR

SEQ ID NO: 925617 - protein, 254 aa, Homo sapiens
MDSSLSTRSLSPIEGGFCSHCCLCQERVTVASITSGPSWQDPLLGTRMMSGHTEYMFMTQTVQFPNQLCPTGSQQGLVEAAPTWGKWPCSGCGGGGGGGGGGDGGGGDGGDGGIGGGGGGGGTDGGGGGGGGGGGGGGGTDGGGGGGVGGGGVGGVGGGGCDGGGTGGVGGGGVGGGGVGGGGCDGGGGGGIGGIGGGGGGGGTDGGGGVGGGGVGGGGGGGGGTGGGGGGGVGGGGVGGVGGGGGGGGGGWWW

SEQ ID NO: 925618 - protein, 174 aa, Homo sapiens
MVLNYCLDRSLLSYSQLQCTSFQGRPEVAGFPQWLTTQVPPVICLFCQKLISDYLCTECSPYIHPNMPKPNACEYGDYHGSLHWQPLGPMSSQGSLTVEDRGTGGQRETRLPTKGATSPRIWAASERRWKRQINSPRASRRMQPYWHLGFSPERLLSSGTSALYIPDTNLFAIL

SEQ ID NO: 925619 - protein, 150 aa, Homo sapiens
MMWAGSQGSREHREDPNPNHQTHLCHARWRTALEEPGPAGNLCSERFMTCAGFFGRQLGVCWGRPFLLANTARQPRSPSVSGGGDSWLQAEEPWYQVKSEAPDRLSKARCKQGLPISYPSLPDVAAPCSTHGCSGSFFSSLFQSRPSEII

SEQ ID NO: 925620 - protein, 129 aa, Homo sapiens
MVLFSRDDNHGRRDPRGPSSYSRSLKDHDELSFPAKLCGMHRVNENQCRCVKPLGEWRSYCSMTQPILTKEVCGHRALGGQEQRKCFTNGTLPPGDRIKFITYRGKAVIFPALVKTKTYVQSCQLGVWQ

SEQ ID NO: 925621 - protein, 146 aa, Homo sapiens
MLQGTLKIWGKYGSVCALGGPQPAWGDGYSQPFDPQCKTGVALGPGCQFQGAKRSLTPYLRHSHIFQEDPGERQPGLRGSRVPKTITFFKLLLAFPDPLPQARKWQVISKWQRLAMTLKGVISIPISQGLPLHTMPFCFPPPPPAH

SEQ ID NO: 925622 - protein, 141 aa, Homo sapiens
MRAACCLEVEWLPCPANPGLLHAARVPIWKLRLWLSRLGKGHSFLRLCGLPVRWASPLCISGDEWVLAKRLARSLAMQQGPSPLEASQPTFESCASSPGPWRQSALVIGTHVLISAENILSLGREPQCPPIVMRIKNKRNY

SEQ ID NO: 925623 - protein, 204 aa, Homo sapiens
MIRSKCPEQGSKAFVAWPQWPSGPPPPPKLHAVLEVGVSSGVCVVWISPLHTTMCHQGELRSQMPKQWIGGTGSALVLLKHLEQVSGTGARDCRNLETPSQQGQQGIFQSNDRKQQKVVGRARTPEFHPASALIEAQTAGGLQAGAMHLLLFPLHVQETPMGSEVSLFPFRSLRLDGFLKNTMELLGWRCSVGQKAVGCSGPTV

SEQ ID NO: 925624 - protein, 216 aa, Homo sapiens
MQGSGLEKKKKKRGRGRGRRRRRRRRRRRRGRRTEEEEDEEERRKKKEKEKEKEKEEGEGEEEEEEEEEEEEEEEEEEEEEEEEEEEEEGGGEEKRREEKRKICQIVQTEGLISTPNPCSDCSGGLAEPEQAQPGSVCQGPGHQEGSGTHTPTPCAACPAPPCAAGDGLPASCGSSVIPQLLDPSLLLHQPKFHGHPTQAISKATRSTDVLPLGHL

SEQ ID NO: 925625 - protein, 148 aa, Homo sapiens
MHGIYIFLWVCQQFLVLTPFVAGPFSPSPMGGQCPVETQMTSCNDERVEVQEKWTQHASASTYDQGPWSRALVIYEMWRRRDRRRTLDQTQRHPLEKEKLPFKANRIETCFRAKEITFKKQGPQPVSKFMMSQFMIFLTSLSLKSICG

SEQ ID NO: 925626 - protein, 128 aa, Homo sapiens
MDARGQRLVASGGGLTVAETPALPHQLLGTSPCCCHMKKDVFASPSAMIETPGWVCNGNDRGGNTGLEAYAKHLSTKFCQCTLVLGNLSKDGTKNPPKTQGSFDEHQPMEGYGMQPTAGHSYCQLSAG

SEQ ID NO: 925627 - protein, 140 aa, Homo sapiens
MTSDKSSGLDFGICNGGVNICRQMQQYRSKKALETASQFRASCNPHLLWLLDKSFCSSGPLFPHLWGKGETSLDLPGWWCLEAHHRPPISGRMPDPPSTRSLHRKVGFPCKSDSFQKVSSFFFSSQMCPGRDMGTSNIAQ

SEQ ID NO: 925628 - protein, 141 aa, Homo sapiens
MGHSLQPYSQVTAQHPPWVVSQATLRCVDSDILYVGETEGSVTRCKAKGNEDCGWDEGFPRADLKMETILGDPGGPNVITRVLKTESRRWGRRPQCCPRRQACPTSAGCEDGGRGPELRDVGHLQKPGKIGIQALFCSMYL

SEQ ID NO: 925629 - protein, 138 aa, Homo sapiens
MYTGTSLLAAKIPKFFSTKLERLGSQVGRSHRDTDLWSNGRNAFRGDWGYPKLEWATYQLGIWFLALRRVEVKKDPGPGLECGSGRGPSLGRFLVKVPLVCLPPLFLVFFCLETDHQFNFHNYLSELERTFPFCLSRK

SEQ ID NO: 925630 - protein, 157 aa, Homo sapiens
MITALLQCTPAQLAAVLLRDRLCAVSQGAPSGLASRCVHRKHLHRNDLVLGHLQEVSLDHPPNYVLAHNPLSQHLLLRGLKSRPTVFSFSLSPILMQKLGVSMPTPKWSFQCNFSTELPESESKCHCTCICLPINRRGSTGPESRLFVRFTKVITIM

SEQ ID NO: 925631 - protein, 141 aa, Homo sapiens
MAAGDRISASRGNARCLKKPSDLLMIMRLTHYHEKSMKETATMIKLPPPGSTFDMWELQFKLHKTVNMLEIMMMMMMMIMMVRIMMMVVMMMVMMMMVILVMMMIIVMVMMIIAMTTVMIVMEQEMHHSSSPLFLREEAEK

SEQ ID NO: 925632 - protein, 219 aa, Homo sapiens
MWLFGLSPNEALGETLQDERDGGRTLLDYTRPGDPQGQRSKPGQRQGPQMSGTNKGWDESYQMRELLRCKAVVNSPQLHVKGCPCLQTIPRLPVNVISLQPVPGTMEMILDKKQIRVISLFELKLGCKVVETTRNINNACGPGAANKRILHWWCQKFCKGEESLEDEEHSNWPSEVDNDQLRAIIDTDPLTTTQEDIRRYVSDFKQFLMHNIKKLRTVW

SEQ ID NO: 925633 - protein, 171 aa, Homo sapiens
MPDAVARLHGGDGEKQMGTYPHGASDLVVETSKAAEGRMESCRGQRRTNPPWGGWGQGRLPEEMTSEDRSYRLLSGRNLIWRENSLSGMEDLIVGSPEPLALWPGSPSCCWDSRRESIRIACPRIEPCGLEPETGLQHSFILEGGPGLGPIAQDRFTCDKNTMEGPMADSW

SEQ ID NO: 925634 - protein, 135 aa, Homo sapiens
MKKNQAKMVQGTQGFHAATETTLGHLSPHRRNTETPPEGGSQGLLIPRPAGDADAMHNGQKFEKTLWYLNSKQKITNRPFYNHSTWKGQGPLGGPPTGCQTQRAAATCIQPQHCTRQTEGICKHLQKQTRRLQTT

SEQ ID NO: 925635 - protein, 171 aa, Homo sapiens
MRKSSDDSTSSQMLDYHWPGLHKSNMKPDPSLPPVFRPSLLLVLGVFSALVFSTTISLAGMLFNRIWSVALSSDVIEVVFSEKISGGRTGQITPNSVSCVTVKWAGVYCHLAQSQNALALGRTGELQAEQFSAGRVEAEGADSQMLFTDHTPYSWAGKSGLQGEGQRLSLL

SEQ ID NO: 925636 - protein, 173 aa, Homo sapiens [sequence omitted]

SEQ ID NO: 925637 - protein, 157 aa, Homo sapiens
MHEDVCSIETYHFTQIDDFYHLLPDRGLLQGLVNFCDPGPLVLHSNLGKFLAAKNRQAQKSGMQVLPTELIVQQHSLAVPQRTSGLSKEVSPLLVGEVSGMELLITFYVRMPVFREKFSFHSEGSRRLPQVVLERSCIWALEEQGPDTPLQSPSSKS

SEQ ID NO: 925638 - protein, 191 aa, Homo sapiens
MWQMLDQGIYVSRESAVSAGLSGNGSTHCQWGSFRPRTGILKRLHTYSYPSLHNWRVVESSPKSLSPKPLTPHPGLRCFFHIPGKEGNQGEKRYKPQKTLLSPALLLYPNPVKKTGQTTGGESPHTGVPLPMANKNGRPVCGAFLATATLAMFLAEGGSQGTKEPPNRALHKWLNYTDVSYSCGGLFHSKT

SEQ ID NO: 925639 - protein, 136 aa, Homo sapiens
MSMKAMAALLKMYGTGMGRMGLGDVDGFQNLEQMKTDFHQQPTTPGACLYKSVVAGHSQCPGNDQNYCWVHALRDAQSPSSPPGAAHLTPVSRLTKCYQFILKFTLASSLCSHQTLWNILSSVLKQKNGPCVPPRW

SEQ ID NO: 925640 - protein, 177 aa, Homo sapiens
MVIPSDLKTCNAEVSIVLHPHLSDTCLSEYQGLKEAWMCSLESRSQQREVRTSSLLCVLVLVGFAASTHLPLSFVGSINRSQDRDKVTFDESHTAILSHTGQPLAFYLVHVLQRGVRKEKSLGVIDKIKALKSGLWELSALEPCGHVDANQQAAVLASQQSQGVGGNTDCAMCEGCS

SEQ ID NO: 925641 - protein, 147 aa, Homo sapiens
MLQIRGHHEAGCELLLLHEPVLARHVGEKMRRIAGRTETQPIEARKPPDWCRYFWSPEEKPETHTLGKGAAWQVLISPSRFDALDLWKDHTEGKSGYWNHLWLPGIPSTGPWRISEKRTTNKHCKETRFLHQQVGASRYHDLDVDEL

SEQ ID NO: 925642 - protein, 139 aa, Homo sapiens
MGCGCLNGVNDGGSGHDDDGSSGCGGISVDDGDSCGSDNSTGRCGCDCVDSGGGGFGCVSGSCFDGDSECDDGNGSSCDGGCGGDDVVVVVMLVMEVMVAMIILVDVAVLVLMVVVMMVMMVVVMVLMVLMVGIWVKEI

SEQ ID NO: 925643 - protein, 143 aa, Homo sapiens
MPIQMLPEIGNIYMVSRLHRFVEQRWDLYVRQYGEFQVRNMYCRFTFMNVFHPYNSERGICFSVEPPSIAVPLNLEIVFTLNPEAGLSGASGVTDFTQLQPISLFSLTGHINQNSSSGSIGSPPLKGSSSLTSITISGSTMVS

SEQ ID NO: 925644 - protein, 143 aa, Homo sapiens
MDPLQWWEEEKKLESIRAVKLAFALLRELLQTCPDLEALQLLFPLPGLLFSQIYAGLAPTCSEQESADEMQGKAQNEAWQEDPKLLHIGGLLRNWWDLRNASSNGGWRKWKEKRTTYRKAYPEVTDGQRVVQAMTTPSSRGMT

SEQ ID NO: 925645 - protein, 159 aa, Homo sapiens
MQVHVTNGVRTDRTPRHFPWAPVSNSSFSFFPVGASGLSYSKRNPVRPHGPLRRSWSTSGLTATWPSSLCLAIRQDPFISILRGKIPYWDAEVGQFVLAQLSSDSFSGLAIKQDLKALWNDFPWQILLKCERVFLVYMVALHRIIPAECLKWKKSMLCW

SEQ ID NO: 925646 - protein, 142 aa, Homo sapiens
MHSVQTNEPRQRSGQEKQHCSITYSRNTFIKAYTHSGNRCKSTVLSLTVMVLGEELCNVIPASQECDGCWVGVKSRLCALRYPLPFESPPRTESTAPRKLVLEFYYLHGQKCSLSNQNQYYLELKSTSSYLGFEGVGQCLSP

SEQ ID NO: 925647 - protein, 172 aa, Homo sapiens
MHYTGSHVTSHMTTGGHVTSLSSSVLIYVIIFWVSRKINKQNAMTIPQNFAITFAFDQSTFALTGPLPSLVAIALIVLCLRDRTGKAMFHLLLQFFEEMLQNLGPTCLKFPFKALLFSAVDLGRTTYLLTLFTLMVILLLSPLLLSLTYPVPWSVPNLWASKVSSLRMTNGN

SEQ ID NO: 925648 - protein, 179 aa, Homo sapiens
MAQFLQGACFLFPVIGPAWYKSACFSLTIPLKAPGLGLPPLHWHHLSIIPSSPLPPVCDCACWKCSSLLVGRRMTPHAQGAGAGRQRAGGVLAAVQATSSPGGLTADPSVKEKNDFLFSSFTSYLAGQSQRDPQFWFYPTRAAEEPPTVLCVRVTQQVLRPAKIDITNSMDAGDQLYGC

SEQ ID NO: 925649 - protein, 154 aa, Homo sapiens
MVKKANTSMSLMVQTDFLIWVAKGENNISTELIDEGHGTAVGHKAAAKGAASSDTAQEMKALPCLLTEKGEPDTALGLWGSSPPPSSGGTAHENLPEHTGARHRGTVQLGSGLFGISSDLKGPVDSEEFGSQHSPGGIYPRPRNACFTPGSATH

SEQ ID NO: 925650 - protein, 134 aa, Homo sapiens
MKDEVPCDVGRRERAQKPLGTLPCEGQGPETLEEAVSSVTAFLLASLQRELTVQWEEKGAEQTCAALQCSATDQSHVTHKQRAVSFQRGHSMWLGDLNSPSQRRKGFIWSWRENNRKQRQEWTGCTSGTQTHQI

SEQ ID NO: 925651 - protein, 210 aa, Homo sapiens
MSPKFNPNKIKVVYLRCTSGEVSTTSALVPKISPLGLSPKKANEDITKTSDWKGQRIPVKLTVLAPYLSSLESSVLVTAPESSSQRLPPHPLLSTQSSGCATGSRERRRHPAFKELPWELGLPRCISGDVCEAHSWAAQTAPHRRRWAHQLRVGAPPGQILLQVTFKIAVQALGTGLPEACLIQGLISWLCFSSTQLMRGVLGEGGKTEI

SEQ ID NO: 925652 - protein, 122 aa, Homo sapiens
MRQLFKHIPSLPSCGNTVGASSGHTWVQDQTPQLCRPGFLTYDIPPRRFAGKIEPAGHSQCLELNCSQLAAWLNDSPLPEGCLCQPSSFIQVNAYSLSTRARDLDLNGSQRTYGEKAVYEKD

SEQ ID NO: 925653 - protein, 170 aa, Homo sapiens
MTQKTPVWASVLAFSGQQGRDHTLLSQPQEAPRERTKGQGHLLSLYPATVQHPDHLLSRGKARTALRASGRARLRPPRTSFGERVSWWVFADGPGRNVRRWEQPTLHSPTLTPFRSRSLMQKDQQGTKKDGPDSRRHWQWDSWLILSSWEKRGTGTQNAIGSLAGLAGAE

SEQ ID NO: 925654 - protein, 194 aa, Homo sapiens
MNQYQVVLTLYPLKLYNLTFMVAAPGEKKRWQREGEDHGKSHSSYEKFWQLLKMAVRSGIPGRTLDPPRAAEADCETQAHSFWLNPHQTMRLLQSSYPFVVNCKQEARWACLVNATCGSEYLMLILLAQRPPFEYLCSRICIIPDVALHIDIAGSDSNGCHWDAPGGPLGYKISFRLPRSNRTYWLKACAVQPD

SEQ ID NO: 925655 - protein, 153 aa, Homo sapiens
MWDSFLKVRPHMVHVETTLPQSPGSPQHEDSGSKGKGEEKRVSRDRKGVLRWEGQPRSRQRFLPPSRAWSTLNSFIDSIQGSLSRRLVLCQLLATLLHRGFPGPSIPKKGALPCRLGFNLRQACAPLGCWCVVLLTHVPQQLEIVRREGGRRA

SEQ ID NO: 925656 - protein, 193 aa, Homo sapiens
MWVGPDKRIKAGCLSWRWQCFPVSFCTVEALLFYSAINLAAANCLGPRYLYKLFIPEASETTNPAGGTNNSRRAALRAVNTHRKVCSFTPEARETTNPAGGMNNSRCAALRAVTLTAKVCSLTPEPARPRTHQKEETPNTSEPRKEETPNTSKHQKEQTLHTPPLRTVTLTTRVRGFILEVSETKKPPIPDTI

SEQ ID NO: 925657 - protein, 158 aa, Homo sapiens
MRSRQKTGCLAFSCAVRNGLIWLVGESNGLESNEQRGRTGSSWDFRLPFFRSLRQSLAPETVCTETSHKAPSVCGYKPEQLRNPPSPLRPGQGSGAQRRRLERMHFDPPKGSCPHLRHPSPKLLKPIPPPPRLLCASRVSFVSMAMTMAFKVPLPILL

SEQ ID NO: 925658 - protein, 202 aa, Homo sapiens
MKTPCLKQRKCDVNVYVKEGGKLGGDLGALASEIRMFGWMASCLTSRCLSVSSAGSSFSPRRPLEDPTTNPAVTPDGFTSKADPEVTAPQHLTFPLSPGATSSPGPAAAADPCPTCPLLTELGGLTEVKKLPSVNQEGPSPDTDHAGALILDFPSSRKRGFPGPPGSTPACFPSFTFTKQHDLSVHEGSLAKRHVPPAASTV

SEQ ID NO: 925659 - protein, 164 aa, Homo sapiens
MPKSVCSRLLWSLGAALDREEYRTFPSHQHPEFQFVSGLCTKLRNRERGWKVAKEEGKMIFNCLLKRVTIKVKQGSKVGTDYQLGSWRPHQPSESPRVWTVSGRSGTSISPSVLKVAPTIKLDPHPPRPHITLSCPDPQAHLKLSRPTYWQKGDLRATPDWGAI

SEQ ID NO: 925660 - protein, 134 aa, Homo sapiens
MAVDEPGSRPSPGTESAGTLILDFPASRIPGGWQPSLAFFVAASLHSFFLFTWPLIWFGSVSLPKSPVLEEGPVGGDWIMEVHFPLGAILVTSCSSHEDSCFCFAFCQEQKLPEASPEADAAMLPVQPAEPRAS

SEQ ID NO: 925661 - protein, 184 aa, Homo sapiens
MVEEERLENLTWAFHYPCPEVSDIIPSQVHGLELTTGPNLPARKLRNGDPEATDPAERCSHFPARGPLKPYHGSHLQVQAPHPMRPRERKPPPSLNFLSKGGPVCGSTNSENSCSQGGIALPSDPRRTGAPESMGPASVLGQKKKHPQTRKQNSPQTRKKMFCSKIIQRCKFGVCELEKFWRIQ

SEQ ID NO: 925662 - protein, 206 aa, Homo sapiens
MIVRPPQPCGTWMLSCLLSLSIGISHHDGHMEVLGGLLTNHSIESLLNQYPRIPGSMFKNSQGQGLSPKFCNSFLRGETFMEHRNAVDTEHSALLGAPGKEHFLDKAMSKLLTEGTWLGLPLVFVSAVDYDSRVLHLAESTMAVTQAGLSGTSDELVLRDTACFLFCTQKVVIPPLTMPRPGTMQEDPSGLKSMLACHLIDNRRNL

SEQ ID NO: 925663 - protein, 136 aa, Homo sapiens
MLEDVRICQGLPGGRNLEKQLIQSISLADFPFFPSLLYEKFILAIKRQWEGGFGQSSIQETGLACWIHEAQKEGNVTQRKSLMIMYSGDTCNGRLLTSHWQSLECFPVRNDISLSQYPCVIHSFSKLPVNFMNTED

SEQ ID NO: 925664 - protein, 145 aa, Homo sapiens
MRGILRNLNILLEFSLILPRYYHGIAWRFSWNPGNDCQGTYCIPGSLYVTIQFTSHNPGVDVVGEKRQHVQGQELVWVGQNLTQIQCSCAILSTRLLMDYYCHTHTYTHGKKNQCNLNFSSPDESLINCCGELLISYCDVIFKQH

SEQ ID NO: 925665 - protein, 133 aa, Homo sapiens
MTPTPTEKHIRQQLLLKCESPVVCCVPGLMDSCRKGCLGSKTSHTEPEVSKQAESSASNAVSQTPAVRGRLTNASCPRIPCLKPSVAFHHLLAVAWTTRHLGSPHPSLQGPLPIGAFPSMLWIAILKVCPEDP

SEQ ID NO: 925666 - protein, 642 aa, Homo sapiens
MCELDILHDSLYQFCPELHLKRLNSLTLACHALLDCKTLTLTELGRNLPTKARTKHNIKRIDRLLGNRHLHKERLAVYRWHASFICSGNTMPIVLVDWSDIREQKRLMVLRASVALHGRSVTLYEKAFPLSEQCSKKAHDQFLADLASILPSNTTPLIVSDAGFKVPWYKSVEKLGWYWLSRVRGKVQYADLGAENWKPISNLHDMSSSHSKTLGYKRLTKSNPISCQILLYKSRSKGRKNQRSTRTHCHHPSPKIYSASAKEPWVLATNLPVEIRTPKQLVNIYSKRMQIEETFRDLKSPAYGLGLRHSRTSSSERFDIMLLIALMLQLTCWLAGVHAQKQGWDKHFQANTVRNRNSLPFDDGGGGGDDDGDGSGGGGDGDGDGDGDGGGGGGGDGDGGDGDGGGGDGDGGDGGDGDGGAGGGDSGCDDDDGDGDGGDIGGGGGNDAGGGGDGGDIGGGGGNDAGGGGDGDDDDDAGGGGDDYDLVVVMVVMMVVVVMMVVVAVMMMVVVVVVIMLVVVMMMMVMMMVVVMMMVVVGGDNAGGGNDDDGDDDGGGDDDGVVVMMVIGGGDDDGGGGGGGDDVGNDDGGGNDGGDDDGGGGGGGGDGGGGGGDGGGGDDGGDGGGDDAGDGGDDDGVYQGMN

SEQ ID NO: 925667 - protein, 136 aa, Homo sapiens
MPGGLACAMVNFRHQFIWVTRCPDISSDIILDVLVCISICGGHGTLGCNISTRLVYTGTPFTQQEHPTPLGHPFFSPPSVYLRHRIQRSVTCNRNCSSEKPDSLTYPQLHTTLPRHETGSFQQANCMQLTIARSSH

SEQ ID NO: 925668 - protein, 208 aa, Homo sapiens
MTKPQIIGLEKRRGGGRGKKRGYQQSNNATTNACFSTCISLKLVENDLKTGFKLSGGQREGGNMFRSIRSIVESIASAPLESSFIQVQARTPSSCQVRHISSLCRVAEALGLSQRPGAKSPVSLMAASSGLVEKWKGGPRDSGLEKYHVHTEQQKSELKATVVRMTENYLKVWLYTPVQNNAHRVHLSEVACIKSWVHYLAQGWKICR

SEQ ID NO: 925669 - protein, 142 aa, Homo sapiens
MRNKLFLPHVLLPVKKKSVLEEKPINSNIFHLDVDSGSFHLVTLLSSAQLVGRRRPWRRCTSFLTTTYMSLEATGHMDTPRWEGAWATESLSGQWLLDDSSPHWKKELTFWKTCLCHDTSSNSILLYHRQLRQEDSASGPSS

SEQ ID NO: 925670 - protein, 138 aa, Homo sapiens
MRTILTAFVLIPLSTVAQNQLKDSLAIWKVYRNKIKQKSGSKVSTENSRNSISPEFLSSLLFPSNKPLHCSPIFLCKNGMWKRVIAAAFKYENSCCRQGPPDMQPGVSSRADSTWRGAAEAMMLRTWHWTTCPTSVGS

SEQ ID NO: 925671 - protein, 158 aa, Homo sapiens
MWASWVFTASARMRGLGCCFVCTEERCRNARARWHLIYQLPLCWGFGRFCWNLKDRLSYRGPAADSEIEKLGRYANNIQGIDLQLPRQGSLALSCLHFVEVDLTRRSGRHLLSDEPCARFWKGAGDTEMNESSPFPQEVHTLSLGEMDMPFIYVLSIY

SEQ ID NO: 925672 - protein, 140 aa, Homo sapiens
MNMQTPLVILLSTEVQEPLAQSNASSFLCLPEFPTTLPLLSSYTQWLTSTVIKPHSSCGFFWLTLLIFGTGAMHCPLLMRFERTKWVNISRDLRTWPSHSKNWADVSHFPHCYSYSPEMSHIQEAEKLGTISLHLLEILR

SEQ ID NO: 925673 - protein, 145 aa, Homo sapiens
MLLLLLTTVMIMFDDDGDGDDSNDGDNDDNDDNDDDGSDDGDDDHDDEEDDDESDDNDDDDDDDSDMRMLAIMITMMVVMMTMMKVTTDDDDGDNNDDDEDGDGRDDSTDKGTGLGHSRVCLANYKCFWILNAGRGKQLQGVGLS

SEQ ID NO: 925674 - protein, 216 aa, Homo sapiens
MGEKNLDYLSVRRKKAEANRSKTGCSNSRNLGNISSISGDGQAAFFCWLADSAGAAGAAGTTEPVFSNVDASSMGKELRGHRSFKIGHYAKGPEPAEEDFSKPSCHYGGTVSCCWACISLSSSCDEEWLHCLTHGGLYAVSIQYAVSRCRPRFWIMVPASGVGVGLLTASSHSGRQKGKGGANTVPSYHRRAEVSGSTPTSPFNNGNNPFMRAEPS

SEQ ID NO: 925675 - protein, 214 aa, Homo sapiens
MAIIKKTKNNRCWALERDVKANCMLQGFDIQIILSPAKVLHCVVATGSMMVCVFQQQRQHGEVHTHQLRLGTGRHSCASLHKYVCIGGSGSVALVVGGEAAIFCACIHAGRGGIPAGHPGLYSKQAPPGWHPTRGQQMGLLRSYQPHLMGKIALFFSGPSSAGLLQLAGGPLQALFAWVSPAEAAEQQRLLLASSSGSFVPEGHRPDASRGSSV

SEQ ID NO: 925676 - protein, 136 aa, Homo sapiens
MRIKTNPKNPKLLTQQQQEEALDTYLANEYGGSLEIYALEESLYGKLTLEKPQSFRVIFGLAFLLFVQLATKIGQLTSEMTHHFLPLISPELISRGISFVGLLLSSTATTSILAILTLSTLILIPTPHPSLPLSDS

SEQ ID NO: 925677 - protein, 155 aa, Homo sapiens
MRKNQCIKAENSKNQNASSPPKDHNSSPAREQNWMENEFDKLIEVGFRRWVITNSSELKEHVLTQCKEAKNLENRILYPAKLSSMSEGEIKSFTDKQMLTDFVTTRPALQEVLKEALNWKGKTGTSHCKNIPNCKDHRHYEEIASTNGQNNQLAS

SEQ ID NO: 925678 - protein, 134 aa, Homo sapiens
MAHLYLCNKPACSTHHHSSEVDEMSLHTRHTFSSQEAACYTEGCLQRIPFSSCSLLRDMDPAQITYSSLSNSSESVPSNLKRNSQVKRFELIYRLSALPYNPFSHLEVQFPDLAHKQDKAVFGASSHLDTSAFT

SEQ ID NO: 925679 - protein, 179 aa, Homo sapiens
MDSILWWSHQIIRKLKKFYPYDIIAEVFQKKVLLSQANSSMHILVPEDLSEGQDMEMEDSDINDRDSSVAEGSRAHGKPLVKDLAEEAMFEQRPEQSRASESSPWLLTLYSTLLGVCKPPGLSAGLTSGVSVSVYVTHPSLGQGLRDGPPQCTVKQLPRSPLQEKRGLFGGEIELEAPY

SEQ ID NO: 925680 - protein, 169 aa, Homo sapiens
MLEGFSDKAKCGRDARYFLDPFTGLATGVPHLLNPPRANPCGREHTGERVRDPASCFWAPTGANSLWASWQHPGGGMAGSRNSKSCKNSLSFYPYFNLDSLSDRCGPIQQQVSQATVNLHVPWRLTCKKNKSMCFAKWLQCKTQPRFLLTQFGSYTDLWTNYLSMNGEL

SEQ ID NO: 925681 - protein, 124 aa, Homo sapiens
MCKVRCSWLPASIGCGWMERRVLSSLNSIQEMNTESLGRDTKLIGNMWPIYMIFAQHAIHPYRGHMNPLRTELGLLAVIPFCLLLSLVPLASKGNDSEKEVKSCFINVIYSRADKNQEMVRQLD

SEQ ID NO: 925682 - protein, 148 aa, Homo sapiens
MIISIDAEKAFNKIQHPFLIKTLNKLEGMRCRLRLIRCFIAPYLLCETGTPDEAEDWIFPSPPMKDSALEPKKQFFLACVCEILVEFLEVKSMSQNDHVSVQFVDPDASAPEQWPNDRKYNMNIFLNESNEEELDLIGLWSLRRWVSK

SEQ ID NO: 925683 - protein, 186 aa, Homo sapiens
MYTMAHMQAKHADNRFLTIPHVGPRPLFLKSCDDKASAVCGDHKAADKFIDDENLTLEQAYNADETSLFGHYCLGQTLTAADETAFTGIKHVKDRITVLVSNKCANATGKHKCKLATIEVDAEEVFKINNKCPFAHSLTDGEIAKMLLNQGDNDNRDDEDNGVITAEKAPRDNDIFCIFVPTQISC

SEQ ID NO: 925684 - protein, 141 aa, Homo sapiens
MREADQVYPPYNASYWALLTLVGGEGWLSHSKSQDEIEGQHQIQDIKTLLMKQVAGKKWLKPTKSKMAMRVTAGCPHCYTPISAMTVYKCHGNIRKLLPAGQILGIQKLFAFYHLHVLIVNSQCLVNVIVFKFLSFHSKCH

SEQ ID NO: 925685 - protein, 143 aa, Homo sapiens
MRSLILRKEIWTVRNMGSSTQQNRRNSKNKDKGAFPYGRFQHEKQATWLKWIDRMESFKRLTYNDFALCACHQRFGYNSASCLPSAQEVFNSCVFPLTLLLHKLSSLGTLDRVSCGRKFQAAKHSRGDLGAAKGIQFHKGSRV

SEQ ID NO: 925686 - protein, 169 aa, Homo sapiens
MQFILTNGKSRQTLSNAPSETGIHWITVTCPDFLASTWGKGRLSGHSYSRLKHSCLPALKRAADFPAQCSSSAKGQTASSSGSLTPVPPDWETSPSRGRQTPYTGELWLASGRCPSGIKLPEEGTGSNHCCSAASAGEILRQTGSEVDLQQTPADLHQRGLTVRRKTNK

SEQ ID NO: 925687 - protein, 143 aa, Homo sapiens
MRKGYVGLKPPSRVPTGALPSGTVRRRSLYSRTQNGRSTDSLHRSPGKAADTQCQPVKADRREAAPCKATGAELPKTMETHPLHQHDLEVNLESKEIIFGALRFDFSRILHLHGFCNPFVLANCSHLERLYLPNTCTRIVPRK

SEQ ID NO: 925688 - protein, 133 aa, Homo sapiens
MILLPISQGLYTLLVILFLISRAEDDNITPNSAGGVHLPVMLFLVFRGREDNIASNIPGGVHPPVILFLISSKTKDDITPNITGNVHSPCDIVSNIQRAEDDITSYIAGGVESTCDIVNNIQVLEALSCRSSQ

SEQ ID NO: 925689 - protein, 159 aa, Homo sapiens
MPYIYLAFYTLHNTSTFHESFNHHLNSVRCVHPSAILFIIFKGRENDITLDISGDVNNPAILFVISREGEGDITPHITEENVRMILPPISQGVYTPPPPHDIVSNIRRGEEDISPYIAGDIHSPFDIVKISKGNDDITVNIGGGVNHLCDIVPNIQWKG

SEQ ID NO: 925690 - protein, 146 aa, Homo sapiens
MINKYKKKKKKSILWAQSNHFLVNLKQTEKCEKERWASPPSLHLSPVLAAFCPQTSDSKFFSFGTRTGSPCSSACRQPIAVLVIMPTVAIPWLLLMFAHLPGALPTISRWQSQPGLCASFQGGEVPQAQGTCAQRAGMFHVLTRSM

SEQ ID NO: 925691 - protein, 139 aa, Homo sapiens
MNTCAEESLSMAILTPSPWRVLLSYCQYSVKAQELLSQFVVNAASPESVPSGQWASQGPESQPFLGSGSKNLELRYCSQPCRLHGVTLELQGSLGSANDDTLEEFLGRHAGPVYNSLFLALCVNNQGCTCLITEKRIEK

SEQ ID NO: 925692 - protein, 283 aa, Homo sapiens
MGLEEDRKIWESLKLPRDLLNGFDQNANSDMDNEVQGEVVSDGHKELIGNWSKGHSCYALVKRLVAFCLCPRVLWNFELERGDLGYLAEEISKQQSIQEVTCFFLEVYSHMCSQRDDLKWKLMFKREEEHESLKNLLPDHVVEKKNPFSGEKFKPAAEICTSNKELNVNSQENVEYTSRAFQGSSWQLLRSQAWRPSRKEWFFWWIPEPYHFVQPWDIAPCISATPALAMAKRSQGTAQAVAPEGASPKYWWFPCGVGSVGMQKRRVEDWEPPPRFQRMYGHA

SEQ ID NO: 925693 - protein, 189 aa, Homo sapiens
MVYAGIFLSGGGGSQQDGWGAGKGMKWKDYLPLEFGRLLQPISLAVPSGTPLDIQMLLLFSSFSTTPLCCSSAPLLDHSWNLGAAVSRLEGRAFASEPPSSTQYFPASCPYQHCLSKHDNLAAKPGIDNLLMVYRCHIKVLIESRHQGEATSQIKTLEIDNKISGIGWDTGETGMNETDKVPVVTELVA

SEQ ID NO: 925694 - protein, 143 aa, Homo sapiens
MGFLPSAMVVRPPLSCGTSDNAIEKKNPLPEEKFKLAAEICISNEEPNVNGKDNGENVSRECQRSSHQPLPSQPGGLGEHDGFVGRAQGPPAVSSLGTWCSVLQLLQPWLKGVKAQLGPWLQEAQAPRLGSFHVVLDLQVHGS

SEQ ID NO: 925695 - protein, 157 aa, Homo sapiens
MASTSYGIRSKLPQRDTQGLSPVLTLAPGLQCDALLSPNKHRESLQGRTRCPPVTARPQGDRAPSGPVGSPIPELDPWMAFLDLRWGRQEPIVLKGLKGILVVVWQHSLWACGSSSYKVFDSVSDSLMAPLNLRGAVLVGFATCQLQTPRALSKLKQ

SEQ ID NO: 925696 - protein, 183 aa, Homo sapiens
MNALGETNNSRHTTFKSCNTHCEDTEKNKKQDIKTHYQSKSLLHKGRQEGRKDERTNQTTRKRITNWQYGQRHKRLDVERNILVEEHVDRHQQMPARWQAINRWNDLEFGQGSWRRVQLLSGPTPGENFPIPSPFWLPHLLRATSIKKLALILQAQIVLMKDTIVGMNTEEFTGKDVAQTYWI

SEQ ID NO: 925697 - protein, 152 aa, Homo sapiens
MKNLLTYSQGTYIIEIAQYGIAFRNTLFNEEGLTFKKTPETDQQRLSKILGVGRSNARSWKRREMKLLQTQTDTPPVTRENLFTKVEEKENNFITEYALNQNVVCIPCNPLRDCKDNLYDRRSVLNEPTLCLRKLISYELKHHQINDPGKGY

SEQ ID NO: 925698 - protein, 171 aa, Homo sapiens
MLPLLQVLLHQTLWAPHWLACFPYHFSKQLSLQTRAPMVVKWSPPAGIPEAFGKSRLLLNSTLQLIDQDYYRHQTALDFLLVDKTESAQSLENLAVPGLMLWTKSLGTHSIWGVSWVLQEQSASFRGLWIFSEWFPNLSILYLMILVDEKIKNGKSYPPLAGANELMILPT

SEQ ID NO: 925699 - protein, 232 aa, Homo sapiens
MVLWQLTVSQIWDTSVVLSVDNGRTSALLRLAISSDCALTFAMMLSKHSRAEAESMYQIKYEELQTLAGKHGDDLQLTKTEISKMNRNISQLQAETEGLKCQRASLEASITVAEQRRELAVKDAKAKLSELELMNIKLALDIEIATYRKLLEGEESLLESGLQNRSIHGKTTSGYADALISAYGDLTTPGLSYARAPALALAGLQLLQLHQLHQGLGCEDGDPRWEASVRVL

SEQ ID NO: 925700 - protein, 151 aa, Homo sapiens
MVRYIGDIMVIGPSKQEVATTLDLLAAVQAALPLGPHNPADPVMIEVSVVNRDAVWSLWQVPIGESQWRPLGFWSNALPSSADNYSPLERQLLACYWAIVETEHLTMGHQVTKQSKPPFMNWVLSDPPTNKIGHAQKHSIIKWKWYICDQA

SEQ ID NO: 925701 - protein, 178 aa, Homo sapiens
MYVHLNADLWKLTMNIIPFPYLHFFMPGFAPLTSQGSQQYQALTVAELTQQMFDTKNITAACDTSPHYGCYLTVPAIFRGHMSTWEVDEQMLDVQNKNSCYFAYWLPNHVKTAVCDIPPQGLKMSDTFISNNTASQELFRPHLGAVHSHVQVQGLPALLYELLQLTIGSIIYNTEIWP

SEQ ID NO: 925702 - protein, 197 aa, Homo sapiens
MWNCESVNPLSFINYPVLGMSLWKHKDGQIPIPLCVWLPHLAVGLLQTLVTLVFSVPGDICSQVCETAKNSFLWRLLPLEALSQGVLMCCQPEHICKRWLEPLLGSLTESGGMGSWTQLKKQSGRFLVQQVAETPSGRSCQVMMNESWSHLKMQSSYNLATQLCFVVGGLSLSGPLVFPKVQAGPTKSTKLQTVATH

SEQ ID NO: 925703 - protein, 173 aa, Homo sapiens
MLLQLSRPVIRLWLASLVPAAQTSSGSMQTGRTEDFLYPGFLPWCTGRIGSHMGLENERKVLLSGHSSQQMDGEPEGRASGKVVFSWSQASQQLGSLLQPHQPNSKSFCQSMACQRLPVPVGVLLWLPVQETGKVIVLFKLITEATGIRPDTEDVDEDVEKGERWYTVCRNVN

SEQ ID NO: 925704 - protein, 141 aa, Homo sapiens
MEKDYTLVAVLNDDAEAGTCIPGQDLKDGILELEPVLNASEASSTKKPALSALFAGNLIAESLQILQCLQVLQFLALQSTAVSTQLPAASSAPDPMTRKLSSIPLAPASHLVSPVFCSCGVRQPAAHDSKQLSLALCKEDF

SEQ ID NO: 925705 - protein, 153 aa, Homo sapiens
MAATGKLSIILGTQGSLPLNRVQCCEASAQRERQDVSKKSSVWNLLRKLILLRASYLKGVVENRGDLYWKAIKKRLVALIKAKQQSNQKKSGEKLSKNTFPGFRVKFGCQENCVHMLSRAHFRGNQNKNLGRLESILQHMYRFISAKRKPRPH

SEQ ID NO: 925706 - protein, 160 aa, Homo sapiens
MTPDIQGGDFEWATGYWRSNKGYWKQRATSEIAPRSPKPWARLNCKEAERRKSSEKPSSKGKEGYAESRQCGPDKAVRNNGNRKLNKNPEVKDVLRTMTESPLMFWGSYHQKNLSLGQVPIPTPIKMVLNLEPLLQAPDSSRKGCWHQIIITQVERRLLS

SEQ ID NO: 925707 - protein, 120 aa, Homo sapiens
MLKEDMTLCGQKHRTLLLRAQQEACASAYLPPSLTGAIWGAQMDVPQAAGRLFTKDVDIEVQAGQRDLPDWTVLPSSGGIRGLASVPSSCGCPGENSNFFGGNIIHDSQKVEKIQTLMNG

SEQ ID NO: 925708 - protein, 138 aa, Homo sapiens
MLKSSEEKNQFSEEKFKPAAEICISNKKPYVSQQENGKNVSRASQRPLWQPHPLQAQRSRREKWFYGPGPGPPAVCSLGTWCRVSQLLKSWLKEAKDNVKTIATLKVKMGHPAMNYYPTQSPRFGSLSAQLHKEEMNY

SEQ ID NO: 925709 - protein, 148 aa, Homo sapiens
MPVTQSSLSSSYKEHISNTLCSSLEPPSLDAGLEGDSPHPPRPTPNGKGTYTCLTNIWKLGKTSEQVKNVQIYRDHPETCGLHVDEQCELNYCCIWRNSIKESNQSIWIPTAFSCPQRAGTSVGGKTQCIPRQSCLLKRPPGQAPGGL

SEQ ID NO: 925710 - protein, 143 aa, Homo sapiens
MGVGPSEPGAGYNLLVCRFLSPSEKLSIPVGGRTYLKGSCENSICEAYLERGEGNRASVMGKMKKTAAGWNGSRVRRATAVHKPKTPVSLGSEQGPKFWYQDDAGLIKWGNINRSHCIYIQSDNQQNNKEGWGEGTGGGVAGD

SEQ ID NO: 925711 - protein, 151 aa, Homo sapiens
MLLLLLLLLLFGTAATALACSAYRAATLLYTATLGNSAYGRAPLCLWTAILLYTVVFHQLDSLSSIKTPQVSRCFYSSNPYVSSDMDETGNHHSQQTIARTKNQTPHILTHRWELSNENTWTQEGEHHTLGTVVGWGEGGGIALGDIPNAK

SEQ ID NO: 925712 - protein, 128 aa, Homo sapiens
MISTRSVPRVQDDSFPPLASPQLFPGKVEKGGTGSRQTNAPRPEGWGLLESPFPETLKPVLSLAATLVAFKWLTGALCFPPISSEKIERIARERGPMLLTTLEKSQMGSQKGDEKSSSIKGFSRSRAL

SEQ ID NO: 925713 - protein, 135 aa, Homo sapiens
MPLGWNPWENCMFPPLRSLFPFTEFRILCLETCVPHFPATSKGNNHNLPSCDELEKPTLSWFSSYDTSYSFCLTFSGSASFLTLNITQYLGDLIQSHGFKYAADTQIRISSSCLSPLNTKCLYRCSSIYDRVMSQ

SEQ ID NO: 925714 - protein, 204 aa, Homo sapiens
MSVNQVINGYLWYTSHWVGSIGNAEYKIRSPSIGNSHLLQDIQQSSSCAPFVLALSQGAACVLVYKRRVGQGPDLRQTLNFTLLTIRNLIVGDLWPRILLYSEDVTGKSVSPATGRLSARYQSLQKANPMTLRPIGSKIHLKRQKGVLVFDPVLFKKAKEFYEEMQMTDSCVFLEGYLWHFKESPGIKKARHNVKNSQQMTMLQ

SEQ ID NO: 925715 - protein, 142 aa, Homo sapiens
MGPHSLEQLHSCGFAWYSPILAAFTGWCWVSKAFPSPLCKLAVDVPFWGLEEGSGHVMGEAAVKKPMKPHQLHQETFSQLMNDTCFGNSGSFSLIYIASYFQNVFYICMFFIVKALVKILEMSESRSSYVNELCMSFTLKIS

SEQ ID NO: 925716 - protein, 138 aa, Homo sapiens
MCYVRDRKPPAEKASRLMGFQCLRELAEVIQFLQRVCGFSWLFWYVPAAVLGEKVHDKCEEARGKGERHEEELQGIKGRGGQYRGVLGECQQYQEAFWGSLSLKVVKGVDLLGFQSPVVTGGCSLPVQLTCYPGAVVV

SEQ ID NO: 925717 - protein, 155 aa, Homo sapiens
MHRFLVERMTPVVFQKSLDQARVLRARFLERGPGHPWGFSFCCPVPPQVSAPHIPEQHFSTAPAMAQEGPSAALTTTGDGTAVNVGRIHMVITLERCRVHELWDCGGLNLGFKGCIEQSLDSDENMPQGNSCQRESPLELCLLEPWGWRQPTPEQ

SEQ ID NO: 925718 - protein, 173 aa, Homo sapiens
MQQSLDSDIFFLKYNQIYFHLVKKEKQICSISFRGQDSTDVDFKHKCKQQRNGRVKCIGAQTLEHCTDSKPSFAISQKIITGDEIFQLERILEMIQLDSLVFQRRKLEHRESDLLKDTLQSEIAKFYAIQVPLASGTLLVQVHLFQRDHGVWSQALRLRTDSKDFSTLKYHAH

SEQ ID NO: 925719 - protein, 197 aa, Homo sapiens
MLVLESNGGWRQTIGSMMLLVMDPLPTAEPTTFGTLLATSVLPNFSAAIPWSIAFMPGALLRVSLAKADCPSTMAPPKELGAISLFFMAGDDGGQFPGPLAILQGVWVQVSAVGTEALSQATDAQERQDDQEDDDEDPQGAREELVLLAAAREYFKLFPIQYYVGCGYVIDGFYYIKLPLLALGVHLQEISFSIPLL

SEQ ID NO: 925720 - protein, 136 aa, Homo sapiens
MEEPGVTPQPYLGLLLEELRRVSPGAMSVTWPRGRGSRRGKEAVDRLWGLSRRGQRSRSQSSSAARLPPVFEAVVRLVGRLSGFCVMEEDLGLWEGEESTCLAGLCKDVNVSRFLKLISLSAMLFILSRDTWFLRL

SEQ ID NO: 925721 - protein, 472 aa, Homo sapiens
MIFADPWHYIGPTKIILDAFSVLRSFITPGHSGEQNIDIFGQYEGYEVESSLKDASFEKEATEAQSLEATCEKLNRSNSELEDEILCLEKELKEEKSKHSEQDELAKMTFKIFQMNEERLKIAIKDALNENSQLQESQKQLLQEAEVWKEQVSELNKQKVTFEDSKVHAEQVLNDKESHIKTLTERLLKMKDWAAMLGEDITDDDNLELEMNSESENGAYLEHIKNLQTEQASLQSENTHFENENQKLQQKLKVMTELYQENEMKLHRLTETELKFELLEKDPYALDVPNTAFGRGSRGPGNPLDHQITNERGESSCDRLTDPHRAPSDTGSLSPPWDQDRRMMFPPPGGNARLPSSPPAVQTVPNSPRKDGSMPSEMESSRNDTKDDLGNLNVPDSSLPAENEATGPGFVPPPLAPIRGPLFPVDARGPFLRRGPPFPPPPPGAMFGASRDYFPPGDFPGPPPAPFASMLF

SEQ ID NO: 925722 - protein, 156 aa, Homo sapiens
MLLLMASLLNSLQCRPSAAGLLEFAGSPLQTLFAWVSAAEAAEQQILQNNKCCCLILPLKALPERGTWLYEVSDGLYWEVSPRRDDTSTPVATTTGTVLDQTQSQHSTGPGPRPVPPHIFGWIIKWESQALHSWMVYGQGILIERLATRILNHSGP

SEQ ID NO: 925723 - protein, 402 aa, Homo sapiens
MCELDILHDSLYQFCPELHLKRLNSLTLACHALLDCKTLTLTELGRNLPTKARTKHNIKRIDRLLGNRHLHKERLAVYRWHASFICSGNTMPIVLVDWSDIREQKRLMVLRASVALHGRSVTLYEKAFPLSEQCSKKAHDQFLADLASILPSNTTPLIVSDAGFKVPWYKSVEKLGWYWLSRVRGKVQYADLGAENWKPISNLHDMSSSHSKTLGYKRLTKSNPISCQILLYKSRSKGRKNQRSTRTHCHHPSPKIYSASAKEPWVLATNLPVEIRTPKQLVNIYSKRMQIEETFRDLKSPAYGLGLRHSRTSSSERFDIMLLIALMLQLTCWLAGVHAQKQGWDKHFQANTVRNRNVLSTVRLGMEVLRHSGYTITREDLLVAATLLAQNLFTHGYALGKL

SEQ ID NO: 925724 - protein, 158 aa, Homo sapiens
MPPRYLLECLRRRETATSNGKIDVDGYLIEGSVPYLLIKAPRTERWWTDHSRCFTAPWQMSLYGSNELREAKLANGDCSPNSISDFVISKQESDYVVATNMDFSTATYLSTCLRQCLAPQIPEPSLSLPVKEASLQTPKSSASAFLGQVLLLLRKKLL

SEQ ID NO: 925725 - protein, 141 aa, Homo sapiens
MFENWEKFSTARGRELGKGMRQEMCIGPNHLELYSHINSFAFYFKGDGKGEDNICINFLGLPKCHGLVGLNNRNLFSHSSGGWKSNIKMLQAWFLWRSLSLACRWPPSYCLFIWSFLCVFFSQFELFKNKFLELVLLNHQV

SEQ ID NO: 925726 - protein, 139 aa, Homo sapiens [sequence omitted]

SEQ ID NO: 925727 - protein, 143 aa, Homo sapiens
MRVPGGRRLGRPHTQSLRPALPALGSEGLSTRASSCRQGAGYPSTNGPPALHSNSHWVSAASPQGRAQTCSPPCLSPPCHPHPVVGSRGARASQRGAVPCSAAPGSIDRPRAEECRRALEGCICTNRHSVSSSGLVDAPISTL

SEQ ID NO: 925728 - protein, 144 aa, Homo sapiens
MPYFLDDCLFFAESHHFSAFKVFSGHTRSVMDASICFLWGFKLLPLIVEGVCQLQVCWSLLEVPYRPSLPGITSGGSVGNAEITHLLRQSHWELQTGTVLIRPSYNIAGTERSLIDSQFYMIGRPDNHGRRPNEEQSHILHGSQ

SEQ ID NO: 925729 - protein, 152 aa, Homo sapiens
MLNMSYHSLLACKDSNEVCYQTYWSSTAEEPLPVATTSNNPQRVLPGTADVHLMPKDSSVMAQPSALMRKADDVGSSNGMPLCGWDRGGEHCDLRKLVKRPMHLNQSQICSPTGTSTYAFPAPSQFYFWLVVFLMGHERLTPTQPHLCEELE

SEQ ID NO: 925730 - protein, 202 aa, Homo sapiens
MAIWDWFSTHFILYIEDENSCLFRSLLQFTRGPLQTLFAWVSPVEAAEQPRLLPASSSGSFVPEGHQADASWSSPQSLSTMLGEYSLSGSAALFRASRQESLSLLKLSPQPPLPPGALSQGDGSFIYKPLTGISFRDALLSDEESREAVRPQPLCHAVLSSAQSKLPGPLSTIRGKPPTQASVMVDAPPPTKLYHSRLTSDC

SEQ ID NO: 925731 - protein, 147 aa, Homo sapiens
MAAPLGSAPVGTLCGALSPTFPLDTAQLEVLHEGTTPAAGFCLDNGHLLVFAHGPPSVHIFLYALKSSYKDTSQTGLEPTTNGFILTSLPLQRPYLQMSSHSESVDEHKQIKMSSNSEDNQNSSILVEIQKKQISVMSSSNLKLEEQ

SEQ ID NO: 925732 - protein, 244 aa, Homo sapiens
MDEYSKLVPVKWGGAENVEATMELGTGRGWNGLEGSEEDRKMWESLELPRDLSNGFDQNADSDMDNKVQADVVSDGDEELVGNWNKGFKRETEHKSSENLLTDDAIENKNLFSEKKFKPAVEICISNGEPNVNCQDNGENVTTACQRPSQQPLASQAQGRALMEKLCQGKVEGKCGIEAPHKVLTGALPSGAVRRAPLSSRPQNGRSSDGLHCVPGKAKDTQLQPVKAAGGRLYPAKPQGLPNS

SEQ ID NO: 925733 - protein, 156 aa, Homo sapiens
MTSQLGRSSCFLGPLTARWPREDMAARHGSIFRGSLTPALWDLHPTMGKPFLTWFAPQSLGLIPSACGRTAMAANSTSDLHTPGTQLSVADIIVITVYFALNVAVGIWAGPAGSGWQESSEHIQKRSEPDREDAGDASHREKQTEQARQVQPCKDV

SEQ ID NO: 925734 - protein, 148 aa, Homo sapiens
MAKVEQEGLSNDTEKNSHEDRRQVRGISETQKARKQFQEGESEGPTGPNGTPTLAFWFSLSRLLLHHYKIAMAPIDITNAPGWKKKESPPSASIPLLIRTICQRPLSTDFAYIPYEHPKLQRKPKNKYAVLQTLRLDHDKKEGTRNGC

SEQ ID NO: 925735 - protein, 134 aa, Homo sapiens
MDSDSSDGSGQSKVKSFWKVFTILDAIKNICDLREEVKISTLTGVWKKLIPTLLDNFEGFKTIVEEVTADVVNTRELELKVKPADVTALPQSHDQTLKDEIAAATPTFSNHLLDQSAAINIEARPSTSKMIMTY

SEQ ID NO: 925736 - protein, 159 aa, Homo sapiens
MGCFSKPGPCPSLKDHVCNVTEEKSPFGGGLNPMIYLSNNRELASMANTNWPAPAMDLDTSYSTPTSGLKSLRVLCPLASPQSVKPSTQRPLPLAFRVAWTFCDLTLLLTYSKIADVMPSLADLPDLMTCDLPMPQHDWNAQTVTKQEDKPWVIISIET

SEQ ID NO: 925737 - protein, 157 aa, Homo sapiens
MGEEEHGSFTSGLWSSGKEEDKLSRQAGAQAAEAPEVGAVVKRRQRTCKAGISAAIAFKERRSNGRSFSRRPLPPAPGVSFCQPPSSLYREIRCFCTPKRNMSDPQMTRATGYSSGRLLCSIFSRNIDWLCFPIHVGENGHLRLLLNFLFQSHFQNS

SEQ ID NO: 925738 - protein, 137 aa, Homo sapiens
MWLQHIVYCNQVSFSKSTDAFAFEEDSSSDGLSPDQTRSEDPQNSAGSPPDAKASDTPSTGSLGTNQRMQRCPWLPQHFDASSHSIQRRPLCGVTKAPENTEREPPELHPLTYPLSICSAKQIPFISIFMDKLAKTQ

SEQ ID NO: 925739 - protein, 186 aa, Homo sapiens
MFMSTWHSPCISASFSLYGGGNGETKVGLKHVNRMENTGLDHWMWMVKEREVLDLEEEELNFECMLVPFTEVKTRMRKSYLIGKIMNLIFDQLVSEGHSSQKSSLERSGAQSAFNGDIDMKGVSIQMLTEIMRIAMTYTVCGVRIKEDPEECQHLRTVGTEDSRTARVEGGEDREELLEYPDRRPE

SEQ ID NO: 925740 - protein, 165 aa, Homo sapiens
MLPALDRIPFLILPSWKSLNFFKILIQDLVHLSVHQGLSTASRTLEECLETRVCVCVSVLNESMNECLCGESQRVFQTGSQSMCPLVRSPDLGDRRNCPSFVEALQFHFILLEADHHSEKLSLTTECGQSTWMERQWEMNQSTPSRASTQDPHLKSRDTFLFQTL

SEQ ID NO: 925741 - protein, 177 aa, Homo sapiens
MPILAWPSSLKFLHKPLLNLHAIKGRYKYDCKTALSCYPDCGVALLCRSSHGAVTLPELCVTELLKPRIVAVTRLWDWWIGEHEFFSVTLRLQREESSFPLGIERAPVERESWDLIQGRRAEEDSVSPSVNGDNDELTSYFYFIVARAKGVKLAIDKWCLIPYTLRGHTKGHSTLSS

SEQ ID NO: 925742 - protein, 140 aa, Homo sapiens
MQGVLSAREVQAGPWCPQFVLRPKPILPAWLTVMVNTECQLDWIKGCEVLFLGVSVCQYGHNKSRQENVERLDWFSLLAYIFLPCWMLAALEHQTPSSSALGLGLALLLLSFQTAYCGTSPCDHGYRSSSVAKKKGQNLL

SEQ ID NO: 925743 - protein, 143 aa, Homo sapiens
MKQSFSRIAVLLFPRSPEAGNLALPLNHLKSSFLVPTPELPDQRIIGAGPENTYFPKKLSHGFLDNQSRNWHFGKAKKVFPLDRSFTLFISLKEMQCVKSPALFLADLKPSVQENCLPILCESSGHSENMNSLQLLQEQDPGI

SEQ ID NO: 925744 - protein, 175 aa, Homo sapiens
MNNKKLITFLEDRARSCEEEEEEEEEGEGEGEGEGEEGEGEGEGEEGEGEGEEEGEEEEEEEEAPGRQSKILSQKTEEEEEGEGEGGGGEGRGERGGGGEEEEEEEEEEEGGGGGGGGGGEEEEEEEEGRGERGGGGEEEEEEEEGGGGGGGGEGEEKDLTDYLATSLYFYVLKL

SEQ ID NO: 925745 - protein, 150 aa, Homo sapiens
MFLKVSDFQAQFSASALALRHSEYVDDFVKEDIFQVTLTGKGYHLERALQNDLAGFLLKLGNGQGWSLKPKVKAQLRRGLRGALLKFGFLLKLGDGQGWTVKPKVKVQLRRGLRGFLLKFGQGDSLHQNPPFTVLGKHNPPLASAGRYAL

SEQ ID NO: 925746 - protein, 174 aa, Homo sapiens
MLISSENILTERTQNNAFPRGFGLKDASKSSQAQRFNSRTLLQLLKKKCSSPWAAGLAGCKPELLVIMFSSLIESTQECGGKDDGKYCIICKITEGLVHSWVTENEVDSGYQEEKFYFLCPMRFLFQGDATLSPTLSPTVCPRVARKWKNPQTFWSSRAKLARAPIPYHSDQTT

SEQ ID NO: 925747 - protein, 140 aa, Homo sapiens
MTVMCLEELPEYVKTLAAQCLPEQLLTGAAAMGLPSFVLGIQGPGSVGTRGNLLIHRLQKSVGSVEPWAGTWMKLETIILSKLRGTENQTLHVLIRKWELNNENTWTQGGEHHMLGPVQGIPLYGYTIDYLPVGGHRSHF

SEQ ID NO: 925748 - protein, 137 aa, Homo sapiens
MIGEVEHRFWCGPSGFHMKDVLRRNWKTGVAHSAGRPAWWQQRLVRVAGGGHDVNTSRGVGKWSEKASGGVTDVDVQSQEIAMAGADWMCWNQQCSSYQAQRRCAPQFLRPETKGEQEKPAENKRFRHDWLPTYWVG

SEQ ID NO: 925749 - protein, 184 aa, Homo sapiens
MGGSAAAPACGQLRLPNSHPLGPSSSIPSAAPQSRHFLGQPEPVAQSPSSCHRNPDLPPAPLASEAAPRGAVGAAAAPMPARKGALWPRPRSCGTAGSGAEGSRGQLSPQRTGKGTLSRPGLPLYLCWGLVVRLRSSELLGVAGAAIPSSRRRAQGAARGAGTPGQRRALAQPRGCCWPSRLQG

SEQ ID NO: 925750 - protein, 150 aa, Homo sapiens
MNFEYWTGIFATSQNCADSSFQCLIKYKGRSHVYVLQAECLGGPKCYANLPDGRNLENLEESMSSLPHSLTPNTDHVNQAFDQQNNQPVAGGQLLGCAKALNLGPQLLWIKEENQKWEYKVDPGIVLRNVPQMTMDLIHSFLTAFKKRKP

SEQ ID NO: 925751 - protein, 201 aa, Homo sapiens
MTLLPREEPWVRTTSSGALGSSSQVEPAFGPWSGVQDPGPWLLSLGIAWPLWGRANNSVPENPLSSPSMCLEHGKEKGNTHSGKPVRSKPYPSLSMEGNPDAACRIPSWSQSLKNTDTTHRVYWHSAFHTREPSHLGKLPHFKTQPNQVQPMTTISPTLGGVAGDALAPPEKLRGPESEEYEETGQPQGRRGGPMKQSKSA

SEQ ID NO: 925752 - protein, 141 aa, Homo sapiens
MAVSLASSHFSLGTQPKCHFPLLQAQFGWPDPLLHHRTYHIGLYLNCPRCLLVYKLCNGESCGYNIHVECWMFYCEKAMHGTKAAIFLSWGENLRMKSEYAKDAEWKERKNYILEDTWEPVGQSQDSLSDLEEGTYPKSLP

SEQ ID NO: 925753 - protein, 226 aa, Homo sapiens
MGSQKCWFLKGPEKARRWKMSMELGNKIVGYMPFMSGLGTLLHVITYTGPQLMEQLPQGTLAVALEAEEEGTWPTDLFLLGHTYGAATAASGLGVLASDTKAPEVTQPSMGPNILQSLQVFTELVVQTVGQDLVIFSILYILLSVQKPVGDLVLAWILHNGDHTFHLILNELSRPLGEVNVCFPQYHMSISSAHTLNGSDGKGYFPPPIDVGVEYSQNMLELFRDH

SEQ ID NO: 925754 - protein, 142 aa, Homo sapiens
MAGPCAHSLTTPCCSLPGLPLAGLDILATIDGKRAKAQAPGLEAYSATPGRHLYSYARDLKSTTWLHWTRSQPIPLLGKERGEWAHCVLEAAPQASICVLPTCLQSFLSPQTTTTLLKLAHKLASCFQETAEKAWKGLPPLS

SEQ ID NO: 925755 - protein, 145 aa, Homo sapiens
MGVLSSYLFVGSFAQHYLYNQILSFAKEEIIPYSVSQILRKFMEVPNFSHIFLSSEPSKSLGSSKLSHIFLSSSELSKLFQPLPVTKVVSTFFGYPYSSTPLYQYQFTVLVHSHAAMKKYLKLDSITSNQVPPTTCGDYRNYNSR

SEQ ID NO: 925756 - protein, 161 aa, Homo sapiens
MPLRPHSLALTYQLFDAPNTGAPKFIKQLLIDLRNEIDSNTIIVEDFNTPLTALDRSSRQKVNKEAMDLNYVQEQMDLTDTYRTFHPTTAEYTFYSTMHGTFSKIDHMIGHKMSLNKFKKIEIILSTLSEHSGIKLEMNAKRNLQNHTNTWKLNNLLLNQH

SEQ ID NO: 925757 - protein, 159 aa, Homo sapiens
MGDPPTASKQLWSRGCIKMSTMALVIPSLQMIQLHADVENQHCSAEQSFPNCSTTPSSPDPYRKLTHRVAFGGLDWLNDDDRDDDDDDSLSTISSSMSLALGRVDKKDTSPPGEEARSKKNQLLTSDFLCSRSNGTIIREGFPSHSPPATVMAPLEAGR

SEQ ID NO: 925758 - protein, 146 aa, Homo sapiens
MSEGVLLREPWVSLSMHPKPLGLDYQLMGKVAKEDIAKNPQQLQPDCCSGLLSADNRSEWQNLGTTTQLGGEGSRIAVKLSLKGSDTCVCLGNTDLTVYCENVEFPASAPTPGQPAGILEQSVYLSQRITMKQLLRVQGICPPSFI

SEQ ID NO: 925759 - protein, 233 aa, Homo sapiens
MLTQQPGRKDQNLPCRALTICHSLLYNGGDGKKMSPSPLVPRRRDEGKIHKITQKYRDSAQGIPHSKSPVFHKASWCHSVYQTVLAFLHLPNGSIYPVDPFSFFLLPGRLIPMDCITWAPLTSDFPLDLTDGSHKQETGEWTSPRSEEDPKDGTGGEEMGNHSRQWGHKNKACGRKKRGASQDLAGDRSSTRRMPEKKLSKADTESKLTWEKSILASVQKMDSSRKKVETVEP

SEQ ID NO: 925760 - protein, 147 aa, Homo sapiens
MGMQRHKNDTMDFGYLRARVGGGAILNPALEDCLKEFHRVNVVQRGQPEIQGLRVSPRGTAKRDVQGLKLARPHSSSISAEPQMPSLEQEPAFVLLRTRAKPSCDNISQARNHSTSLFLSSCVPALEGTNAKVSRMLVEINQKERKS

SEQ ID NO: 925761 - protein, 194 aa, Homo sapiens
MKRLDRWMEDHEVTQPGARRKRIGCFSVASLLKSARPRTHWKEETPDTSEHLKEQTPDTPSLRAVTLTTRVRGFILEVIETKNPPEGINSGHKSAGRTAIYKTIRSPSGKFQKENDSYLKSKGIQPHWDKGQKATNSAVSQQVASTNSSAMYVKPCWKWILLPLLRPPQLMPHGMQVNCVYIFKGFCSKETQIR

SEQ ID NO: 925762 - protein, 186 aa, Homo sapiens
MICVHFYFVKEKAKQTRKKLASAKGFLRSADRQAARLLDLRTALFHQCQTRFTADLPRMWILLQDTQSETARSSRKRESPFPLIQCDEKGASRLWLRSQKSITRIELGEKYNRQTQTGGHEGLQLHSRSQQDQNPSEGRNSGYVGTSEGTNSGHTIFKNCSTHCQAFPQLPKEPSTIITFSFRDLE

SEQ ID NO: 925763 - protein, 147 aa, Homo sapiens
MPKTTNIYYLTVLEIRGLKWVHWAKIKVSSSTWANNIIWGLAIRTPPSTQLWKFFQSKVHSLASLPGGTLQDVLIPSSAYPGTPNKMLGSHKMQADASSKGEGSRKEMDTKCATSECPQLPANPNLFPNHHCTPESQTGYTHFWPNY

SEQ ID NO: 925764 - protein, 165 aa, Homo sapiens
MSPRTCVDRTEKDDNSLPWEEARMALCQLSYPMNEFPSVAKSVLTETINLTVNKVQEFKLEEVVPPNPPHDPTCPLLLFIAADVIKVPLNIGFRPSTSRSPKAVGRRCRYSSLVENNCSRRFQQLALCGIDFVTSSSDSQLQVKEGMVQYFSSNREGLRLKWSSG

SEQ ID NO: 925765 - protein, 138 aa, Homo sapiens
MVGCTLYSKMASRSFDNNYTTHSSSKKETPSLSSANKWGMNGNESPELSRKWGRKEMHCYSPSFFLGKLSGAGSTEGLAKRVCNGEWASTTGLDFHQETWLLQSDLSELPTSFILYFHSWKFVYWDPTPSSQTQPHRP

SEQ ID NO: 925766 - protein, 181 aa, Homo sapiens
MVQERGPDPDIKRGFLDLMQERIQDESIDSWTAPTQVKPVVYMLPAAELNLDKQRHSLMKGRWRMRIKPAKREATCPPFSTLKIQGSLMGTLAPWPTLHSLPCSSKSTKRQNPPEGRRKRRETFGLMGGRCLVGGRRLDERVFRAEGKATRGDDTRSAGFSSYSHTFCRSTPTQYCFFRKH

SEQ ID NO: 925767 - protein, 160 aa, Homo sapiens
MLWCEEVEPLGELRRKGPGFIISLSRCGAQGVEEGRRYKSRQQLNTRKWIQILCYNYVDIRENKDDAILQSDYCGKLEVLQEAKTKTRSNVQGLLRKMPAGRKYLWEGIAVQTIAGFGQGAELQGVTRKVTHIPTASKSLFLFKTHLSLIRMLLLGSESS

SEQ ID NO: 925768 - protein, 158 aa, Homo sapiens
MIHRVVREGFHERMMFQFRSEGRLQPVSSYYQLYPHVLIVNHASEQMQTGGSRAVTQKAPTQGFAVPEQPADDTMPPSPILKAIKAPARKMVSTLDLHCALLEIGESYTSCLLQVLALNSELHSQQPSGNEAGELNSSGEDALKRVSLRPGILQCRSQ

SEQ ID NO: 925769 - protein, 146 aa, Homo sapiens
MAHGTLSSLKMSSTFCPRERAVKCKGIDSALLQRMSEDHMKDVVIKDGILDTDMQVERRACDDEDRDWGDASTSQETPKIASKPPEVRDEDGEPHEGSILMGRIGAIIKGRISAFIYGGAEDDEVKEDSVHQIELLRGANDNFRGA

SEQ ID NO: 925770 - protein, 150 aa, Homo sapiens
MLLAAGPPLYLLLLLLLLLLLLLLLLLLLLLVLTNLSTFLVFMLSPFVSYLKNLCLPQGHEDVFLEKFYLSHFEYKSEEASLHLLVIFFPGLSESTAGLRGNKSIMVGARSQNQTSGSSSYQLFNVRQLFKLAVPQFPRGNNPAFFIVFW

SEQ ID NO: 925771 - protein, 332 aa, Homo sapiens
MVPGQLTPVSRDEEAATAAVECSYNLLPSLHQTLPIGLTHQTVLKMSFGGASRKDEAWRTYRSQRKVMEVIEVVVMVVEVEVLMEMKVVVEMEVMVEMVVVVEVEVMVVVEMKVMVEMEVVVVEIEVMVEMKVVVEMKVMVEMVMVVVEVEVMVEMVMVVVEAEVMVEMEAVVVVEVEVMVVVEMKVMVEMVMVVVEVEVMVEMEAVVVEVEVMVEMEAVVVVEVEVMVVVEMKVMVEMVMVVVEVEVMVEMEAVVVVEIEAMVEIVVEVLEAVKLKAGGHAGCGCEGRADRGRSGCSGDEGGDDEESRDCGGGYSVGSGHFPASFLELHLE

SEQ ID NO: 925772 - protein, 129 aa, Homo sapiens
MESGFSRGCPGTHPHSPVMLTRCFGLVVEGVLVSPPDFCFHSERENGMAERAVGQESESVCSSPALWPRYDRLPLVLWVLLVISAISHGDEVVRNVDLIIMANLTLNSFENNRFIALESGGLMSSNSVP

SEQ ID NO: 925773 - protein, 168 aa, Homo sapiens
MVLGGLRPTRTDGSFHFHGGKCSPGKVHREGGQICVQWLSSKGAVKKITVGYIQGGNGDIITRFRFKIGFQSTTFVLSYSHVGLKKLQVTTCTRQQLNLMESVSPRQHSNPQTGINDGIGARKEGVTTGGFILPLLERLQVTLYQQTIKMKLPIHHLESAGPNTLKLI

SEQ ID NO: 925774 - protein, 143 aa, Homo sapiens
MCQWTITNVPRVIDVGTRSLGWGPRALAWCQDPLALSFYTGRCKNVFIIQGLGSPSLIPMGFFWVHSPCHTLYSSHPGPLTLLQTYRAFLPLHVVSGAHVVLPSGNALSPFPVHKSKPSGPWVLGCRRPSDVTDWPVLWGCDL

SEQ ID NO: 925775 - protein, 142 aa, Homo sapiens
MQLIKPYLQPTQSETLGDSDSEEMERNSENFMEKVPLPGKFHEVKDVTIKHIYRHCRMSPGGAGGWNCPQVENFCPRQCLSWPLPPILAIQSLFLVTQQQNQCHCPPFQSSVLQRWGVLLPMSLHPHHAYHPPFLIITFIIM

SEQ ID NO: 925776 - protein, 174 aa, Homo sapiens
MILRSPSSNFTTTIIMTVIITIIIIIITVIIITIITFITIKITTITITTITIIIITITIFSRSPSSPSSSSPPPSQDHHHHHHHHHHHLLKITITIIIITTTITIIITTTFSRSPPSPSSPPPPPSQDHHHHHHHHHHHHHHHHHLLKITITIIIITTTITIITITIIIAESVH

SEQ ID NO: 925777 - protein, 146 aa, Homo sapiens
MTWWPIGASLFASSEGSGLFIGLAGSGAAGGLAVAGFEWNVSPGGLAACGRARAQDVVAALEGDSSQWLVSADVQATYVLLALAWVFVPIYISSEIVTLPEYIQKRYGGQRIRMYLSVLSLLLSVFTKISSLGAASFIQPQASEGA

SEQ ID NO: 925778 - protein, 167 aa, Homo sapiens
MRVYETIHIKKRGKNNFRSAASRKITITPTGLREIHSWSNQSTTPNPVGETLTRFKTNLKRIELICKAYKKENKVDMHPKKYVIPVLGNAWHTMNTLWVLAISVVTVDRIPSFEGSRRDIFAAPKRWRHLLKITVLAGPLCQQLPQENKAAEFTSCWASCALVSPPS

SEQ ID NO: 925779 - protein, 191 aa, Homo sapiens
MQENVKGKSQKKHLLQVLESVSRVEREDRGSKREAREDFETQPLLPVLRPLILDSFTTEQVKNDSKEQRSRYIDTANALEQETKLGLRRFEVCDNIDLETILMEYESYYFVKFQKYPKIVKKSSDTGDLLSVLKITTKMSIGEANSSCIDNEKLLKAINPDNDQYNIKTQYRLAVNKAGWRKDLKWGPCAL

SEQ ID NO: 925780 - protein, 169 aa, Homo sapiens
MKNKKEAIKKNILGSSSLNLFTMWVGGVESNTSETEEESTQKTHGTRNEHNRTSENRAYCKSGKASWMWQNFSCAPDKKEDLDEGRRSGLEEHGVQRWRERGESGLPALSVLVERNGNSLSAHWSYKTDLAKVSNPLQQLKRPEVICIHWSTYRLPICGFQAWEKLGYF

SEQ ID NO: 925781 - protein, 151 aa, Homo sapiens
MKPSSHCLGLGAAGAGVAEYGRENSEGSFLICKVGLELVAPVRTQRDDAYEVPSTGQHVDVVAVHVCPAWVTTKFSKAPGEQTDHWLQAAGDLLLALALELTVCVILNALHFLLCLGIFIFQMREVDEFTLANFNSHVGGWLFEDSMELNF

SEQ ID NO: 925782 - protein, 182 aa, Homo sapiens
MPVAEFWIAKWCGGWRRRAATGASRVQKARPISLQAFSEGWNEAINTKMFMEIYVTVPNVINHILTRKVHDPGLALVHLYIGNGGVDSCKVAGDIKSAGHREDDGQNLRGLEFWLQLSHVLTFPLFTHLSNGNKIPGKFQVHTQRYRHLKKDFLSGPDPLTPTASPHGHLQPGLTMKESISY

SEQ ID NO: 925783 - protein, 171 aa, Homo sapiens
MEFSLKDAIYAVVNAWNTVTKDTVVDAWHNLWPATVFSADGEQGGDSEEFCMSSEEKKCFIFLLLNQGYYDNSDDDDGINAAEKVPVDDMVICDRCIEGLKQNVFGTEQGIMSDYKIKERLLRQNTLSMKQMTAGNISKSHAAERFLIPRGSTSQSLNCFPCFFSLKSINN

SEQ ID NO: 925784 - protein, 141 aa, Homo sapiens
MVRFLWVDSKATRLLLLPFAQEAVPPCGKGLGDGASAATSVSEGGVEGLRSGLSSLPLRNFIAGSPGLPRPPQDCTGLPWAGGAALTFHTSPPSCAQAAFWTRDVQASPVPAVSHDNQLTIVLMPKRHVWRCHILVSYNIQ

SEQ ID NO: 925785 - protein, 148 aa, Homo sapiens
MCSYLGKETLIANSQVGKGDGKGHEHSQTFVAFWILNKLLPGDHLPMGQPDPTCLTGPAERYTLQGLCDPWCHCTKTQQGSGAGQVGSGGKPAVTGLSQLPHKLKGRVSLPPHPTRQPKVCFQEEVDKYLALNPNTVPGTKKTSSMEL

SEQ ID NO: 925786 - protein, 146 aa, Homo sapiens
MTLYCSCLGFCSLKLVLWRILRTASLLLMSYSMGLTGSKDSVDCYGCWRRNGAYNWNALETEEYLSSRCVRGEKSQSPRSDSEAEMRRWTLEGCRRNIETQGEAASADGEAAANYPEDLAKSIDEGRYTEQGHVKDLVFITGQYVM

SEQ ID NO: 925787 - protein, 188 aa, Homo sapiens
MRQAPAVWPAVAVWPGPGGVAWPRRCGRPRRCGLALAIRTPTLLFASWVTARATSNPQRRRAQRLETSGPRTLRTQERKALVVAIGGTDLWAPGTQCGPQGLAVTELESDETMESTIPGRGQDREGHASTCKPRNTGPARHWTLPMTRRSEEWAPAHAAPPTPHMQNALPRLGALLKASGAVRPAQNF

SEQ ID NO: 925788 - protein, 138 aa, Homo sapiens
MLIQKDFNKHLPHSGLHPARVHGKSSCCFSGGILMYGALVLFESEFVHVVAISFTALILTELLMVALTVRTWHWLMVVAEFLSLGCYVSSLAFLNEYFDVAFITTVTFLWKVSAITVCGNVTPARQAQGTDAAMASSS

SEQ ID NO: 925789 - protein, 151 aa, Homo sapiens
MIQPLRKTVWAFLTKRKRLLNQRAHRYLHLHRVYAEKVPPQPESTHIFTSTVWDTCLLNKSSPVVSSVEDIRQVEIKGIPKRHVRSFEEQPEQRGVLCGALGRKSTFEKNQDLHTISLPRCVSVSPWSVALGGLEGAMAPGELDGAVAPDH

SEQ ID NO: 925790 - protein, 204 aa, Homo sapiens
MAPSSPPRATLHGDTDTHPHSVVLRFMGRCLHSSSLSSMLVPDHGRVSSLQFCTSQVSGKKNQYQLSSLASAAQQNAQCMIHHVMLSLSTEMSFHHTQAVPVHGDVLPSTHKLSPSTEMSFHHTRAVPVHGVVLHPRMDCPCPRRCPSITHGLSPSTEMSFHHAGAVPVHGDVLPSTHGLSLSTETSFCPLAEGHKVVSSFWQL

SEQ ID NO: 925791 - protein, 176 aa, Homo sapiens
MNPFPISNLVISRMLCKWNAMQMELYSRAFCFQLNLAEGAGRNPSTSPPTVLEVELGRKLTPGYSLWVVSALCEWVSSGQRCQDSPTLPSVSSAFSVLQASVSHYGHNAALPPPGGWPLVFSQSVEITAEAVRVLLLVCVEAPSLWRSQLKRSATLLPACQNATWPFGLASVVAEP

SEQ ID NO: 925792 - protein, 191 aa, Homo sapiens
MVSVLSMDSVLSVVSVLSVGSVLSLVSVLSVVSVLSVVSVLSLVSVLSVVSVLSVVSVLSVVSVLSLVSVLSVVSVLSVVSVLSVVSVLSVDSVLSVVSVLSVVALVQWTESVGLTLVSRDLTSMQLKTPSGQVLSFCILQLFPFTSESKRMGVIVRDESTAEITFYMKGADVAMSPIVQYNDWLEEEVCE

SEQ ID NO: 925793 - protein, 213 aa, Homo sapiens
MLISSASAWPASTPRQGAAAVLHQEAKWLLCPALSVILQGSFESSSLSACVFDYLRVNLDMGKAVYGWMMMKDENIPGTVVRTSTIPEELGRLVYLLTDKTGMNGKGTQTVRSFIVARLDATLIEWCGSFTRTRWWCSSFTRDCTSTIRAAVLSFTFNTVFKKSHGIFFVLADFAQLSGIATASPNFSHHHPDQSAAVNIKTRPSTSKKIKSC

SEQ ID NO: 925794 - protein, 162 aa, Homo sapiens
MDTQGPVSQPFQQPEKPGRVRRRKTRREPRGHNPGRLSREHRGLFNHEVKSLDVARLLSSGTLVPGSPTLPAKPSPSPGRAQEPAPRSRDKENQVPGGSGPGPPSSPELSGVGQLLAELQCQLSLPQAFPRRNLIKDARDAIVHTLQACNGCVPDLALVLKG

SEQ ID NO: 925795 - protein, 140 aa, Homo sapiens
MCKRSNEETRSAVQRYCSSNPVNVWEGSGRWALHRPWLAPGDFQQSQLNSHRQAQDWSQDQQDKATPVACLQGEGATGPPFAPESDMRGGCKRSRFWMMLPPLPGLCLHTVHVFHLPHQRSPRGPLRDTHLANRCGPGSC

SEQ ID NO: 925796 - protein, 179 aa, Homo sapiens
MKRNEALEPWAGLLTAVEDRNDVFLWGTGQASSVPVIKGSGALSPGSSHALQQFAGPAWSSSHTPWELLQGAGVLAPAGGVSDNTKKPGQQPGLAWRVPPGAAVLSLVVPVNAYNSSPSNRGQLSLLFLSPEGLAPQWSVHSHQIAARLWIRLSFPLSNCSSMCSGGSSNVECFNYADI

SEQ ID NO: 925797 - protein, 393 aa, Homo sapiens
MGLGRYTYLVLRGEHLESSSHYLVPSGHYLVSSGHYLVSSRHYLVLSAHYLVSSGHYVVPRGHYLVPRGHYLVSSSHYLVSRGHYLVPSGHYLVSSSHYVVPRGHYLVSSGHYLIPGGHYLVSSGHYLVPRVVITWYPVVITWSLEVITWHPAVINWCPVVPSGHYLVSSGHYLVSSGHYLVPSGHYLASSSHYLAPSSHNLVPSGTQRSLPGVQHHYLLPSGHYLVPSGHYLVPSGHYLEPRGHYLTPSSHNLVPSGTQRSLPGTQWSLPGVQQSSLSVQRSLPGAQPSSLGVQKSLPDVQRSLPGVQWSLRGALQSSLSVQWSLPGALKSSLSVQRSLPGTQWSSPCTHGQFLVPGCHLLVPSGHQWPSGFTAMETFAWEYSSAWSFVSIY

SEQ ID NO: 925798 - protein, 320 aa, Homo sapiens
MDVQICFFLSYVPVRVHACVHMDVNIHTNLPHTPHVQEREGRRLRCHQSPTLLSRSWVFRCDPQPLHLRSPVPTLTLCTQGHLCQPSASAPEDTCANQKKKTQKKTSAPEDTCADPQPLHPRAPAPTLSLCTRGHLCRPSASAPEGTCADPQPLHPRAPVPTLSLCTRGHLCRPSASAPRASVPTLSLCTRGHLCRPSASAPEGTCADPQPLHPRAPVPTLSLCTEGIYADPQPLHPRAPVPTLSLCTEGIYADPQPLHPRTPAPTLSLCTRGHLCRPSASAPEGTCADPQPLHPRAPVPTLSLCTREHLCLLPLTKCVY

SEQ ID NO: 925799 - protein, 134 aa, Homo sapiens
MNDFQHIISRGTICLHASVFLKNGAWILKEVFAERDDSDHYAVQKQRTNDNLLLPIPVLKPGTAPYVLVEPDGSSSLVEWEWSYMCHFWAKAVKKLLAIPLSVSECRECQSQEGRGRVYSTDADRNSHDGLLGE

SEQ ID NO: 925800 - protein, 147 aa, Homo sapiens
MKFQLGICKLLVASISSVLPFTSSCTAESFEVFLTWSYFRKHFGSLMVLRAICFQLIDALFSLMSPDTSDGFQLLPSEEPPCPQSCLSSLFTVASLCVAEGSSLHLPVFAVCSHFRVYAPQTIPLFSLKLGYGWMEPNALIRHPVFN

SEQ ID NO: 925801 - protein, 164 aa, Homo sapiens
MTARLGWMSPLLTWSALTPPGQWGECLPTAGACGSPGFTHSLLFNVGIISLFVLVFPYLRGFICLWSLMLVTFRWSFCVDVLFVDVDAVPLFVSFTSNSQARLLQVCWSLLEIHSRSCLPGFHQRRLQNSKDCCLFLPLEASSQRGTCQMPAGALRYEVSVDPC

SEQ ID NO: 925802 - protein, 144 aa, Homo sapiens
MSQSLPGDCDPPPRHPGLPGDVTLHPGIVAPEAFLIAPISQSLPGDCQFPPRHPGSRSSLPLRHVSEPSRGCHSLCSFQCSLYGMKHPQSASAAFHNERRRKRLVHALIIVDSTICKGSCRKYCMLRFSWMVLYAEVLVDGTLC

SEQ ID NO: 925803 - protein, 141 aa, Homo sapiens [sequence omitted]

SEQ ID NO: 925804 - protein, 155 aa, Homo sapiens
MKLTLLVRVTLVEGSRVPGDSGIVNSRSHVPRWAHQITVELETPHCLVMLGPPHVAQRVTHMCVEMLVYTSRLHCRVYKVYSHVHTLTHNSPKAAPSPAGRVHGMFRCIILTIVLQLPAVLSSGSACLQPWAMGHACSLGVYRLHCPGLGKDTLC

SEQ ID NO: 925805 - protein, 476 aa, Homo sapiens
MRTSWLYVDKILFYMDTALISTGPALIYVGPALISTGPALISMGPALISMDTALIYVGPALISMGPALISMGPALISMGPALIYVGPALISTGPALISTDTALISTGPALISTGPALISMGPALIYVGPALISTVTLCDTQAVNMLMKSCDRGLPQTAGGHAMHPPPQYVLDMGWEVENCGAREVQTRGVGHGLGRWRPTVSVIGSGGADPRCRSWAREVETRSVGHGLWRCRPSVSVMGPGGGDPGYRSWAWEVETHGVSHRLGRWRPTVSVMGSGGADPRCQSWAREVETHGVSHGLWRCRPAVSVMGSGGGDLRCRSWAREVQTRGVGHGLGRQRPTWCWSWAQEVETRGVGHGLGKWRPMVSVMGIALPGCPGQWSWRSRLGPDRPTRSRVLTKATVVKCTSTRGPARAGRKSRHSPPCSVLQEVLSESSKTSKKSGAGSIQRTEEKEKSSPAAQAELAKAAPNPAPRRHPV

SEQ ID NO: 925806 - protein, 144 aa, Homo sapiens
MLLEDPRPAPELPSWVQMPPRPQLPTCSKHLHTGPPHTLWPCSPILRVVHTGAPTHPLALQSYPQGCAHKCPVRTLWPCNPVLSVVHTGAPARNLWPCSPVLRVVHTGAPARALWPCSPVLRVVHTGAPTHPLALQSCPQCCAF

SEQ ID NO: 925807 - protein, 136 aa, Homo sapiens
MAGASGMSSGACPIHERGAACSDQDAGGRDWEVQVPRAWTSMAPGHRQHDAERAAVYKVTTTSWPKCTPVPGPTLGPWGQLGAGAQVCIILVSTRGKLYPLCRNHWAATGPWAQSASGMVDTGTRRLQLKLFLLIS

SEQ ID NO: 925808 - protein, 232 aa, Homo sapiens
MHILPAAKGLGLGSALVLLALGEATPASAGCHHKVQKTQSPELHEHSPLRGSCSFRPKPSKAEGYEENSKGIRDGAHGRDRCLHGTQAILPRYQQRAPSDYSGSDPVTVHRTLFGVTDSRIMTMSGCPTCLPDTVFPSTLGSGNPLQQRRSGAGFWTQGILDDRETSKLKVAQLLDVMTYMGNVAGLTSDGLMNGLTSDGLMNSFMSDGLMNGLTSDGIMNNLMSDGLTSNI

SEQ ID NO: 925809 - protein, 142 aa, Homo sapiens
MQRRGQPIKRNKVSLLGNQNLSRKGDRGDIREDCNPTVLDQWGTGGGTCVLGDKLPAVAAAVLEAGSPRSRCQQAGFFGGLSVGESRLPTMAAHGVSPVYVRSSHEDTSQTGKLGFQARFRNLGFQNFDSNASGHVLCSDPV

SEQ ID NO: 925810 - protein, 131 aa, Homo sapiens
MTFEKGQIPRSKLPLRSWVKARGFIKSLPVELSHKWSQMDSSFTPCPGLRRQEPACTSGRHEGELESKLGSYHLRASDCDMQVTCGSSGDPVSQVHNYLAVGPEDEAGEAAGRCSCCYGNKGPIYLLFIDF

SEQ ID NO: 925811 - protein, 147 aa, Homo sapiens
MCAKAACTHEAGRPRGCSWRLLVGSQEQAGQLAVWDPWAMGPSPSKERGAVASRLLTRSILKKEGISFPLVLVVHNLLFKAQPKVPCLQVVPLASPALGPASNACSGPFEVQVVIIFCSLVLNLLIQTVYGSRAETKSQSGGYLISN

SEQ ID NO: 925812 - protein, 146 aa, Homo sapiens
MNFFPICGFWVIWEEDAKMKLGTESFPDGGPCEQGRAPAHDGTLFRLSSRLLVWGKVEFAHMQALEGLRTAVAARQERKRGNVETRVSGRPAFAGPVFFPSVKIRLYMRLLPSPENCKFRVLCFWPLRRARKGLLQPKTMKRHGEF

SEQ ID NO: 925813 - protein, 136 aa, Homo sapiens
MLESVLDSSFRIFTSRVTWCKTQWVPTWERGLLSGGPRCPCPLAVMANRRRKRRFKAIESMPGGFSKQGSYLGGCELRILAKTETSEDLTETHNRDDSAKGMVLNHKKPPHGPVTSQQAPPPALGVTAEHGIVESW

SEQ ID NO: 925814 - protein, 119 aa, Homo sapiens
MKLIQMRSCFLRMSKESSFLKWNPLLEKMLRTSWKWQQRIQNVENRLHLEANGGRHEGSGNEDQVHGRSGCLSATSNCWTPRRILHPATDDRVGRLVWLEPLGGCRPCVCSGRIHSNIN

SEQ ID NO: 925815 - protein, 141 aa, Homo sapiens
MTGEKAPCLFSTSSPVDGGHGVSPLLVMIMELAHWLVSPSSPVHVDEGVSPVISTFSPVGDDVGAPVIQVDPILFSWSSEFGDDKGPEMKTCTLCYLDLHFQCPLHGEKREYKPSVEKEDPLKQEFPRQCIEEVQGGKDGE

SEQ ID NO: 925816 - protein, 245 aa, Homo sapiens
MVKTEAASGPPAPAPLSLPLISLSKAGPLKSRKSTQILILLGAMLFLASFTATALITLAYKLPVVAPSETRTSRGGLLNARLFTLCPLVHGKSGYETFGLDGKADCLLASKLLNLSTCTGVCANVTFSEQPLPIFQNKMARTVPGIEEAIVLYFVEYYTKPYCRFGPVLVGLFLSIYMHQNHQENILRTKEVFPYPSRPGCVLLFGSSVHCIFLGPGFVGTLPRCSREEALVLGKPCVAHGRKKR

SEQ ID NO: 925817 - protein, 142 aa, Homo sapiens
MLLGGGLHAYGGLFMVFRVFDFLDGTIQWARYRNNVKDYLSNEEEAFGTSLNSQRSQMTLGTLRIKSNGLQALHWHFNASEHDCLAQQQDVKKSIYSSRPGILLLLLSVFVEALEGTLRVRSESYNKSEKGIVIFHKLYFKD

SEQ ID NO: 925818 - protein, 163 aa, Homo sapiens
MAEAGESKPREAECLKKGVEFLILSKWTQSSLDQWKVPAISSEATTAFANASSGPEAYTSPWIPMTAWGKGVLGTQDKEWEGTEEMWKRLQRCGRAPVNPTADLDRSQSMNMGLAVAAMGEGRLPTVHVQVCCCPAAGEGGVVASNLCFCPGAAASSRSDDYE

SEQ ID NO: 925819 - protein, 244 aa, Homo sapiens
MNSCTKDENSVLRDELLFLGGPASSAYALSPFSASGGWGRAGHLHPKGRELDAAAQPEGQLLREVRVLGVPFIPRARVDAWLVHTVAVGSADEAHGLLGAAAASSTGGAGASVDGGSQAVQGGGGDPRAARSGPLDAGEEEKAPAEPTAQVADAGGCASEENEVLREKHEAVDHSSQREENEERVSALKENSLQQNNDDENKIAEKPDWEAEKTSESRNERHLNGADTSFFLSGRLIPVAFITA

SEQ ID NO: 925820 - protein, 150 aa, Homo sapiens
MLVRTLPIIDNLKRKFWKSFYRFLPRNPVVSLVGQCSYYFFLVENKTISLVSRNHGMHTGVTVKVGHKPRKLVMESKSGSLSYVFSCGLRTSIQPFHKYARTPSGVAAFAPGLGDSAENAPGKFPTLEVLTLGLILLGPHCSSIFSFIRS

SEQ ID NO: 925821 - protein, 144 aa, Homo sapiens
MVVHPTGGVWEVQSRTTLSSQAGAQHPEPSQAACFRCFSDFHILSPTPELPWNDTKLYEGFTVSLNGAGTVGAGKSVPWDRGPGQDAKISQAPEWLDFPRTLRPTELRPSDLRWGPVRKQARLTKTCSCKAQLFTPSNKARFQE

SEQ ID NO: 925822 - protein, 165 aa, Homo sapiens
MQIIDLRNHFANDTVQQVKESAGMDWESERHPRLKATQGSKYSQTQSVHSVSSVNHQDSVLGIMLSGGLRGEILNKPFMSPCPSFSIQFQLHAFPYFQLPFLPRATCAGNHQFPCSTGHLKTMVVIENESHQKGPSLVKMRKGNQPFPKNSVNEPRFSRNRSALQ

SEQ ID NO: 925823 - protein, 164 aa, Homo sapiens
MTVDTETFLHVDPHQDLLQGLLEAVVFQIRHQHGIVTWQRPPPPANRRQLLQNQRQTSNAENVNFIQFNTFICVAKKEIPRSKNVKIIFGDRAIQWNGSSRGKGKPENSRAGFPSPEEGAPELRYDPAVPLLDIYPKEFKAETQTDIYAPMFTAALFTIAKRWK

SEQ ID NO: 925824 - protein, 166 aa, Homo sapiens
MVGRTRGPQRYPHPNPRNLEWFCTGWSHDELGFGVPAASCIPVGRPSLHRHRETFVPGVHFPNSIDFSPPGSAAWSPVTLGPLISQSSSLVQSGAVKMHTFLFAVHGCLAEAALGLEPRSLSSKPTFSPTTTPWQAAGGQRLLSFQQSLLPTTGCSWKNLEQSCAS

SEQ ID NO: 925825 - protein, 180 aa, Homo sapiens
MTFCSQKEQRRTPEGSWNKHCMLTCCPQFYGDSDSSWGDPGKPPKIASQPPTQGGILPGREEQRWMAFQLGESNQGVMWAGAGTLGSDGARMEAGLNERGISPQVTELQFYLICNKRLTESFQEMIRFAVYLHHSLLAYSMLALRAKDNNQRDLLRNYHYNQDRTYQKPMLGQWKEGKKV

SEQ ID NO: 925826 - protein, 157 aa, Homo sapiens
MLSGDLLNGFAQNADSNMDNKVQAEVVLDGDGELVGNWSKGDSCYVLAKRLAAFCPCPRDFWNFQLERDDLGYLAEEISKQRSIQEVTWVLLKAFGFIREAEHKSLENLQSGNVIEKKIPFSEEKSKLAAEICISNVEPNVHTPTQYLPGTLNGVWK

SEQ ID NO: 925827 - protein, 195 aa, Homo sapiens
MISRKHLSKPMGHPQSRLSFPFFCDCVHSTAYLTFLLPFLPTANCPGNPSHSLFGTQLTHHPSSVCLLATLPQNLLLPRELRNLLDMELGTAKSPPPAQMEEKPGAPIKEYRYPVCKVCSALTGVVECGSLLLACDPERFPPLVSCTFFSSHPPAGPAELPLSLQPARSPALAATTGAGGPGLLSPWKTLRQPRL

SEQ ID NO: 925828 - protein, 135 aa, Homo sapiens
MVCPNKAQLRNPRAVCDIDQGPFLETSLWPGPEIGWQEKPPDLLGMGSLSESSKLAQQTPQPEELGPFAPSWCSQPLITRSPGRPAEMQMPSPPPGHHPELTLPPQTLLRPGCPGEGRPGPARPGSLCGPRHLQF

SEQ ID NO: 925829 - protein, 143 aa, Homo sapiens
MGRTNSSILLNTKSLFLAYTFPLTPSGSIDSNSWRAQNGRSTDSLHRVPGKATDTQHQPMKAASRGRCILQSHSGRAAQDYGNLPLESVSPGSLKGISHSRCPFNLRSFIVPLPPIGEFIFNISSSFFSPSCILLSLSWIPII

SEQ ID NO: 925830 - protein, 136 aa, Homo sapiens
MRVVLKSSQRVLLVHELFCAFTIVIYAQSYKGSPVRVFRGRRSDPSFPLSQFGHSQYLGRLLGPTGGIHFLQRDGEHPDHQRNQKEGILIMEQKAEMKGKTLNTRKSYKQKISGIAKNTDCALALHITLVHSEFCY

SEQ ID NO: 925831 - protein, 149 aa, Homo sapiens
MLLPGRPSTGTRYMPFAFHCECEALPATWNCESIKPLFLINYPVSEEDRKMWESLKLPRDLLNGFNQNADNDMDNEIQTQVVSDGNEELVRNWSKGDTCYILAKRLLDVTEKKDTFSEEKFNPAAEICMSNEDPNVNCQDNREEVSRAS

SEQ ID NO: 925832 - protein, 141 aa, Homo sapiens
MLKVSSHPPVYFSLSVAQDEEDKKGVTVLAGVTDPDYQDENSLLLYNRCKDEYVQNTADPLVHLLVLPCPVIKVSGKLQQPNPHMTTNGPDPSGMKLWVTQPDGLSRDFTQDIPRSIMGLFPRQTICKMRSKEKEVYLLND

SEQ ID NO: 925833 - protein, 186 aa, Homo sapiens
MLVLLQALGITKVGTGTCPARGTRRCLGGATYHMDSEPGDDLEDKEASRGGWIQKVNIKRLDFHVSGRDSLLTEVTTSKGSKDAYHAQRQMKHTAWSLNPEVLLKKCISVSVIVWKFKVPLWLKNPHCPDMWSLLTAPESTDPRLPPGMKGADVSPSQQARFSVSVSRCSKLVHPKCLLQARSCSS

SEQ ID NO: 925834 - protein, 209 aa, Homo sapiens
MSSHHTGPHDVPETSWFSGPLLAQATLPPGCTFQIPKATISSRACLKAHLLHDSALWTQAGIGFLSETLRVATGKRVEVGTSQQGEQLLLPGVILEAFQLIPLLCQGGLQIQVGAIVRELQSTVIQLQEKEPVIPNLLLRWRLHMEKSHHVALLYAEEPEETLKPRKKQSPKCKELGFLSHCMEESTLLPRSTDPSWTVTASRNEPLLC

SEQ ID NO: 925835 - protein, 180 aa, Homo sapiens
MQVVWDLIQLPLAQNPMLFLLVLSLPRLPAIDFPALHKPSREGLSSVHSRNMCMERGGESTKGMVLAYRHEAPTTQGRPGGPGSSAAPHVPISHAARHQQPSPLHFSQEEEEEEEEEEEEEEEGEGEKRREEENKEEGGGGGGGSVKHISMSMSVILKQMSSTVEAFAESEKHFFIINGY

SEQ ID NO: 925836 - protein, 143 aa, Homo sapiens
MDPNQEEIFELPDYSGIKLEIHCKGNPQNYANTRKLNNLLLNDLWVKNEIKMEILKFFELNNNSDTTYQNLQDTAKVVLRRKLITLNAYIKKSERAQIDDLRSHLKALEKQEQTKPKPSRRKEVTKIRAEQNTVERNKQLKIN

SEQ ID NO: 925837 - protein, 135 aa, Homo sapiens
MVAPENLETSVTTEPQRVLQLLPGESQVLPPRNVTALSHSCCPQLDEWGLVTACSVLLLAAWQVPGSCPVTKRNKNGGVHADWSIGGLEKAPFDRLKCIKKVLTPVTDSIHSWQLGFQASGCLWLEGWVSPGTCP

SEQ ID NO: 925838 - protein, 151 aa, Homo sapiens
MSRHRTMPAKLMKIITTLTLKHLYLPLTPQAPVDLLGQMAQVAQQLAQPPGPVAEPSPVQDCTQNWQPFRSLDKWARVTHPNKPYPKAFGNGFVHFIGESTEGSIYIYSSIEEIFSYLQLVSHNSQGVGRWLIDPRFGICRRKRKCLRLWQ

SEQ ID NO: 925839 - protein, 170 aa, Homo sapiens
MGGPAALEAVGDWVGMALPGSWYNEWVGGRLGPSTKLMQLSQKARRMQALQARGSPGHRPTGRAEYPGQSLEDPPLGLAWRAARENSVRKHSLPLPNRRPAGLSAGLITGQLLPIQPLWQVAGAGGAPVLESQLGIGSRGQSLNLLRILSLWSLLGIFLFAAGVPRARLE

SEQ ID NO: 925840 - protein, 156 aa, Homo sapiens
MRATCIPDYQGESSDLSGTSSGQGFPGRPSGLIIARKTGGTHRKPSEPQRFSLPSAKRRQVLDRAGTQGHAGKDEGRDHDDASMSQGRPGCQQPPEAGREAWNSFSLLPSEGTSPADTLSSTAFSEVSVGSQEQSIEKVQFGWCGLSYNKAHVVEI

SEQ ID NO: 925841 - protein, 115 aa, Homo sapiens
MPLSQLGLMQIVPSAQSGTGMPRTTTRSRASWEAFREGSVPGTILEAESSSHQTLNCSPLALDFPASRMGLLFREVAPKKLLVDCWCSEGEEVKEEDKKEQPQLSVHYSVISQSS

SEQ ID NO: 925842 - protein, 152 aa, Homo sapiens
MTRSASSGKPHASVLGYSNHTSRARAPLGGTNAAGLLRCRGCCPHGLLHGCFPWWPDRTPQTPNLLTRLLTCPAPLHPRSPGTWLDLQKRWQKPGPALVAGVQGPPWHLNSHSKSGWKDVGSLCTPPRQPFPEFSSVPLSFQGERRERSWYD

SEQ ID NO: 925843 - protein, 159 aa, Homo sapiens
MTSSSSPHPCSEWGDLLAGPARLFPVPSRKGTLPASTLHAHTLAPLAQPRQELLPAESPVFSRSFASPCGLSLPSRSVAGRRPVLPAARGQGGRKPSCPPRVDVDGAVRAGPGSGVPAACWASQAVEGRLSQCPWQHLHEVPASWKLSPGTALARGKQG

SEQ ID NO: 925844 - protein, 197 aa, Homo sapiens
MLAKRFSIVEKAGEQNHGRAAVSTIRYNSEVAAKYVPSVLINWTAIEELLISANRHVLPGVVRVQGRHTWGSSTPTQMVSGFPELPQKSTTSWWLKQQQWTLTQRWRPTVQGQGVDHIGCQSKALTKAFQARVTRTFAFSLAPPPPTLSSQQCQPPSVSRVCLVWSSLMASALAVPAVCTSLLQAPAPPAALPDSSA

SEQ ID NO: 925845 - protein, 135 aa, Homo sapiens
MQTRVLQQVHVFPQGVQPGELNESIRISLTVHVYLYLRIEVAGFCSLLFDTRPLACPYSDCSHTRNGTRGQKQCLLKYIVKVQRNASVFWLKSHTGIKATENSTLSCTWPAPVDPGDRHSAHLLPGSFAKPMMVL

SEQ ID NO: 925846 - protein, 134 aa, Homo sapiens
MLKDEDSRGPTGPAEVAHFPWSEGVLEHFEMNSRDPFFVSPKFSGAGRPGPSPLLIRGVPNRRSPKTVPSGGGLDLDLQKILKPAPVFTFTASLFGGGAASASRRKKLPKRPNKEPQRPNSFSHLEQLKNWINK

SEQ ID NO: 925847 - protein, 528 aa, Homo sapiens
MMTMVVLLFLHASPLFGSTLSTAMAQADIVLIRLAVMGQNLILTMKDHGFVVCAFNRTVSEVDDFLANEAKGTKVVGAQSLKEMVSKLKKPQRIILLVKAGQAVDYFIKKLIPLLDIGDIIIDGGNSEYRDTTRRCQDLKAKGILFVGSGVSGGEEGAWIEYGDMQLICEAYHLMKDVLGMAQDKMAQAFEDWNKTELDSFLIEITANILKFQGADGKHLLPKIRDSAGQKGMGKWTTISALEYGIPVTLIGEAVFAWCLSSLKDGRIQASKKLKGPQKFQFDGDKKSFLEDIQNDSWWWAVSTGVQAGIPMPCFVTALSFYDKYRHEMLPANLIQAQRDSFGAHTYELLAKPGQFIHTNWTGHGGNVAAAAPLALVAPTSPALAAYPRQPGGAEDIAKDTDEEMHRPEAEIKVQEATSNDPWGPSSSLMTEIADLTYNMVAFSGIMSMMWKRLNDHSKNWQHVYKELLLLDYPIKTGSECMAQQCREIIFAIQTLKDFQYIDQDGKDQGINVHEKSKQLVALLKDEE

SEQ ID NO: 925848 - protein, 149 aa, Homo sapiens
MRKSKKYLKDQSILGLTIVMSSIGATGEVTYLVTSSFMTPEQKKKFKQAAWKQSLLVLEGQSQSCFQFAGGDAIARQVFFRVCLPRIAAVLKDVYKAIFTSCRKDTLASSFATRVHRTKETGSFNLMRPPYCCVWFPLAVTGPHILYLS

SEQ ID NO: 925849 - protein, 165 aa, Homo sapiens
MGASCSQCFQSVQMVLRVTGSESVVTLPPGIKLGPSRMTRTSSPTHFLLQSCLGTLKCSKDQPTGNGVAGPEHFWYSCVIRYLRPPLLPAAPMFLGSKDELSCTLAPAPPLPYSPFTSVTHPILHRQWQRSLRGEGSTPQPQPEQICLVLRYMCSISLGGRKGFR

SEQ ID NO: 925850 - protein, 177 aa, Homo sapiens
MEVPSWASLPEGAITAGRRCGWGCWPAAPVGDPRAWGNPAAPPGTGDPLLFRVGENLLHLPCMLCSLDHTTQQQRSPFSLPLQHHLYFHTVFKEALQSLINTPMKPEGTRPRAEQGATLVPAGPTTRRIAFREKPLWKEGRSPSLSQRSPHSIKASFIGPCPHPPAHYSLHVLCPSL

SEQ ID NO: 925851 - protein, 192 aa, Homo sapiens
MIVSFLRPPQPGGTDHEKHKSFLEEQRIQPWMPLQAGDGRQTHHASAQCLRPPAYGLASSKHRPSTLHQTPTPKQKTRENVLKAKFSGQNPWMAEPHPVSLVIHSQVHGCEQGSGMCQRGAQNRPQSPAGCPVGCSIKARVPGQRWGLDDRQCRQCPGGAFTVTGDISEDGRGCSLEAVAKKATLSLRVAEP

SEQ ID NO: 925852 - protein, 137 aa, Homo sapiens
MAELSSEQTVEPSPQAVSQVLSAPGKRIAEPDSTGEHESASSCGASRQSTKERGQGSSLVLTCVGSTCGHPLCKAAAVLVRLGCGLGRSSILGGVGLQMLPCSWSPMGAAKGDPNFSWESAHPWACGPLRRWVSATL

SEQ ID NO: 925853 - protein, 152 aa, Homo sapiens
MCENAQTQDTRGDCEMGLKRSRGSRPLGGFRVACTCEDAGRLGARVAPGSTPRALPPPSLPQCLSPTALPTAGVRAPQAPPGAAQSSRRVNPPSTAWRGQRPGAAVLAQGKRPLRKPQEDGTPHAPGRQDPTCPGKTGPHVLQEDGTPCAPP

SEQ ID NO: 925854 - protein, 136 aa, Homo sapiens
MGHGALSPYLRDFSILCKQQVLPGVSAANTDSSDSTVASVKPGEGGTEVLPWLQHGELPAWFRGSQWGASRSPVDGTQLRRLQPSQDAQNHHQAVSTPVGVEQLMPAGGLRVQGTGTAAETPSPAPTYTRVIPRGF

SEQ ID NO: 925855 - protein, 327 aa, Homo sapiens
MVTTSHKWVSYTKKVKFDKPDGQTDKPSMGLARSTVNYSKVAERQGPTKRQCFALIRRFHLILKDRGSRLWFPHSRGLSGHLPPLPDPSIPSSKTLQEQNDQSYPSTLPVFPEVALHTLLWGEDANNSKAVFTLTLSGLVEVKELQREPLTPEEIQSVREHLGHESDSLLFVQITGKKQNFEVGSSSQLKFSITKKSSPSVKPAVDPAAAKLWTLSANDMEDDSMDLIDSDELLDPEDLKKPDPASLQAASCGEGKKRKACKNCTCGLAKELEKEKSREQMSSQPKSACGNCYLGDAFRCASCPYLGMPAFKPGEKALLSNSNLHDA

SEQ ID NO: 925856 - protein, 179 aa, Homo sapiens
MCSSREGSCCYETNGTADLTGGKAQASVAVPTSVVTVTPGKPLNTVTTLKPSSLGASSTPSNEPNLKAENSAAVQINLSPTMLENVKKCKNFLAMLIKLACSGSQSPEMGQNVKKLVEQLLMRMLNMMIVDVYMSAKMLCLLATKLYAFGFLHPLSDHGGYSLESTGLSCMLNGSFTHV

SEQ ID NO: 925857 - protein, 135 aa, Homo sapiens
MDSFPVQGVSRNVIQELEPGIGASQLCPMTYPTVTELASKMQDTVLLLFLLLSSNEGKVFLVAMNVQVEMRGGKQAEGVKVIGIGGMMLETGTGVKCFEDGGRWPQAKEHRQPLEDEKGKEMDSVLGASRRNQLC

SEQ ID NO: 925858 - protein, 238 aa, Homo sapiens
MPTEDRVTWKSNYFLKIIQLLDGYPKCFMVGADNLGSKQMQQILKSLRGKAMAIQGHLENSRALEKLLPRIQGNVGFVFTKEDLTEIRDMLASSLKPLGTTEILSDVQLIKTGVKVGASEATLLNMRNISPFSFGLVIQQVFDNGSIYNTEVLDITEEILNPHFLEGVRNIANVCLQIDYPAVASFKVFLVDPYAFAAATPVATATTAAPSAAAASAKIEAKEELEELDEDTGFGLFD

SEQ ID NO: 925859 - protein, 147 aa, Homo sapiens
MPGLLVAPLTRLLHPHVALPSTEFLHWPLAVRLEGGSEPQLLKVSLLEFGRDNEHFPEHSTNMVKGAGDSQDQKRDLSQDHYVQNCWAQGCAVSYVTVRGSEPSWAILWEVGGGGNLHPFLGPCIYRKSSLHIIDGFLEMTTLSETT

SEQ ID NO: 925860 - protein, 178 aa, Homo sapiens
MPVRFAWTWDVLPTLRAIQGASGHNDGKGLQRQLLKWTLESGARDSGQPPLKCQCLHSALLLPHRGAEGNQDAATQQEIALLPNNAADLGKYITGDKVLASNTYLPGPPGLPGGQGPPGECGRGHRRVITNRKSLPKAHICWGLDNVLQLPSRRNKAGVHGTATHPCNERAWEIGPQA

SEQ ID NO: 925861 - protein, 167 aa, Homo sapiens
MPKGLFPISFHDKVWMYDWQSAKREEDGEAAFDRIKFKMPVGQPDGDVRRQRQREYKEKWLQGSWTLVSQGPLSFSCAGPPGAPGRDGSKGPPGSFDFLLLMLADIRNDITELQEKVFGHRTHSSAEEFPLPQEFPSYPEAMDLGSGDDHPRRTETRDLRAPRDFYP

SEQ ID NO: 925862 - protein, 236 aa, Homo sapiens
MTGSATFCLLLPRGLSPGNGTFLEGGMRKGFQTSSEQPTVLTSLKDITVPPGWRLEVESSFPRNGPGCQMIIHNPTSPVRFRVWGAHAVAMSHSLMAATTVQTWENYGYSQRFAQSPLAEAFQGRTGWKLARPEEESAGGAGAAGDGEVEAEMLRKLNIVVKSEMWISDPFRRKRMWLSVALGHVNAHMQRGCLTIKPPIKQGIINGCPLRLCSPSRIRTSALSGDLLDGPHRRVI

SEQ ID NO: 925863 - protein, 146 aa, Homo sapiens
MVLDYSDSDNCDNEDDVVNIAEKGSIDDMVKICDGLMERLEQCVFITGPEIMTQKLTTCKGDMGAGDSALEITNAATNEEAELQRQQGTETGLQWNSGLRIEIRCLRLVWHSEDKEQETRSCQGKSENCADREKSSQALNSEEDNC

SEQ ID NO: 925864 - protein, 171 aa, Homo sapiens
MFLAEKKNSAIFLPFAFERREIWLCSTQLTGGYTYINTLKAFCCFETQDWFPDNDLCTNISSILPLFHNNKPVQVGILEEHKSETLPTLCFFSLLQAWRRRKEEKDKERCQDTTSKIKFKKIVTCSYLYSLVLFRGFSEESQLSYCKLQYEETHMGRRKIEETSRKKSVRR

SEQ ID NO: 925865 - protein, 143 aa, Homo sapiens
MSAQCKLQVDLPFQGLEDGGLLLTAPLGSASVEQIPIHNCRRRIKYLGIQQTKEVKDLWKENYKTLLREIRDDTNKCTGRLNTVKMAMLPKAIFRFNAICIKLPLTFFTEQDKMFKIHLESKKSLNNQGGYGQKEQNWKHNTT

SEQ ID NO: 925866 - protein, 127 aa, Homo sapiens
MVSSGLPSGEEVYLKLGKPSPDSSKQMGTPQMSAIGDYTFSLKFGLKEKTEARFLDITGKVRELDIESSLLFPPQREAKSWEFPPDHVAPSSERNYGERMTQIFIVTSIQQFSGVRTHFNWFLDISP

SEQ ID NO: 925867 - protein, 353 aa, Homo sapiens
MWLLLGHMGNKQKIHKLKIPVKMHLISEVKTVEKVYPMLLLTVWEAQWSKTCFCGETQRSPNIPNSIEDLKGSGDRKMWESLELPRHLLNGFDQNAGGDMDNEGMSATFTAASFLTSQRLRREKWFHGLGPEPSGSMQPRDLVPCAPVALAPALAKRGQHIFQSVASECASPKPWHLTCDVGPAGEQKSRIETWEPSSRFQRMYGNTRMSRQKFAAGVEHSWRTSARAVPKRNVGSEPPHRVHTGALPSGAVIREPLPPDSRMVDPPTACTVCLEKLHITPAYESSQWLGCLLQSHRGRASHGYGSPPLASDTVKDNQTLDSHKKHATWIPHTHSSQYGLHFYENRMLLLIWQ

SEQ ID NO: 925868 - protein, 132 aa, Homo sapiens
MTSRICKWLVSCKCLCEYLVLFALEDKFDFHLQNPVFPVNFYAMVQCGKQTGKGRGDTEGLVRDISIVQGRYGGGNKYEVKVYTGDVIGAGTDADVFINIFGEYGDTGLFCRWGSHNPGRGRQLEPHFGLLY

SEQ ID NO: 925869 - protein, 130 aa, Homo sapiens
MALHKGRLFTEEGRKMDNKHMKKAIHFSSSNTFFSHRAACQLNYVIFSSSGDSLEAEVDDEVITDCGLARKQIMKTKCTNTREALTTVPSTQQEPSDAVVVAVVAFQSFGEPEEQGQGGTCGNDMGVFTL

SEQ ID NO: 925870 - protein, 165 aa, Homo sapiens
MEVHGRLNRKFPRKAKWLPGLGGTDPEWSFHLSSASPQPDAPVLATPVIPALSSLQTPPSGPCLKLRPAQSSLAFPQQNLSLPQGVPAVFCSCPCYVAELCCPILSRAPKPPDPVAAEHLNHGQSRSTLKAILGGSTQLCSREQDQIGTWMNAKKNLVVIYKIIF

SEQ ID NO: 925871 - protein, 145 aa, Homo sapiens
MQEGSRIISSSSSSSSSSRVLNDQPSQHSETLSLQKIKKLAMHSGMCLLSQLLGKLRNWTLNLKKRRRHVMMVFHHDTMIPIKKRDSHYFLKSQREFNRGPFGRSYWERELGSVYEDPSADYIVLNGNPKSQQMNPRTGGLKTRT

SEQ ID NO: 925872 - protein, 161 aa, Homo sapiens
MSSSISDKGNEIHILLSEAELGLIHFNKHLLNALLVRLCTCRQDETWPSLSARRASTESDEELSLQDVVIVFVYDNWAPEAVWDSQESFHLESKAHVDVLQRNRGFQVGKGGPGPEPQVCCWSSLTVTSHLDFIPDNSPPQTQAYAVTKDGKNYSLAQKPQ

SEQ ID NO: 925873 - protein, 221 aa, Homo sapiens
MSTILHEVPQQGTEHSQVAARTCRGKQDHRVSVGKVKSEAQDSERKESWPRGCVRKASGLSSSLVTLPAGGGGPGSKHLSCWLSGSPRVRGRVASWPAGPEPRVLRLAARSRQSCTVASGHRPQATGGSSRMPEETQNPCQQRRSGPATCLWVLPVGFMKCATLISYPLEFLVKDPECLTSQEGTFMGKNRQECFQSQFLNFSRFQKAARPYSPLQGLHIP

SEQ ID NO: 925874 - protein, 139 aa, Homo sapiens
MSTDKTGENFHLICDTKAPFAVHRIAPEEAKYRLCKVRKIFVDTKGIPHLLTHDAHTICYPDPLIKVNDTIQVDLENGKITGFIKFNTENLCMVTGGANLGRIGVITNRERHPGSFDVVHGKDANSNINKPWISLPQGK

SEQ ID NO: 925875 - protein, 154 aa, Homo sapiens
MGTEAAVLGNLATLPYVHLHLAVHVSFVQYSKLPLLQNISNADLRPSAQKGLESMLSSGYFHGWRFHKLMPDPCGLENFLGLGFWFAPAFPVRQQQFRPSRFPLQYSLFSSCQSHCISTNSTCPPLTEKARYTPMEKIAWMYLELTQLMMYKNT

SEQ ID NO: 925876 - protein, 137 aa, Homo sapiens
MPSYSTTFYPVGIVIKKQCFPVIARCNKTKQVDSIPHRAYAKPSPFFPAVVGYKSSKRSNGSWNLMPYEDQRVQKNPGGGSCLLGSEMNNSRGCMAPGHLSLLPARSAIFFTLLVAHCLSLPNKVQTHRVGTLWFAH

SEQ ID NO: 925877 - protein, 192 aa, Homo sapiens
MVDSVATAVSVCVWSHSENALSIHYVRSTLHNCPLRNGKGDTHPNQAFPPTLGITIRHEIWVGTQSQTISTSKPMSDQGLGNSCKGSIKCIQLRQEEGAKGSDQVGWRVKGESASRCQSGLILWVTCSCCKLKVPEANTCFLFQRDGGQGACAQLKFTNEVLRSCGFICISWTEVTWGKNSCHDSAADLNMT

SEQ ID NO: 925878 - protein, 719 aa, Homo sapiens
MLILLWSHPQHLFASRPITRLKSQSVPRGEVESVTHEERDLQPFTSVTVHCRKGNDQTFGGPLDAGSELTLIPGDPKHHCGPPVKVGAYGGQVINGVLAQCHHQGLERRRGGDSHNIPIQPSYLACAEDRWILRMTVDYCKLNQVVIPIAAAVSDVVSLLEQINTSPGTWYAAIDLANAFFSIPVHKAQQKQFAFSWQGQQYTFTVLPQWYINSPALCHNLIRRDLDCFSLPLDITLVHYIDDIMLIGSSEQEVANTLDLFTALGLLLALVETEHLTISHQVTMRPELPIMNWVLFDPSSHKVGCAQQHSIIKWKWYVHDWARAGPEGTTTPVISQWPHEQCGHGGRDGGYAWAQQCRLPLTKADLNTATAKRPICQQQRPTLSPQYGTIPQGDQPATWWWVDYMGSLPSWKGQRFVLTGIDTYSGYGFAYPACNASAKTAICGLTECLIHHHDIPHSIASDQGTHFMAKEVRQWAHDHGIHWSYHVSHHPEAAGLIEWWNGLLKSQLQCQLGDNTWQGWGKVLQKVVYALNQHPIYGTVSPIAKIHRSRNQGLEVAPLTITPRDPLAKFLLPFPATLQSAGLEVLVPEEGTLPPGDTMIPLNWKLRLPPRHFGLLLPLNQQAKKGVTVLAGVTDLDYKDEITLLLHNGGRPPGTLCLRLTCQRPCVTETLLPDQCSQEMTIFSLPCPTPGPGQSEDRIVILSLGQACDPSLSASRPNE

SEQ ID NO: 925879 - protein, 161 aa, Homo sapiens
MAVIFLRGKCFRKTLTYRKNSHMKMEAEIIELCGHKPRNSCGHQKLEETRKDSPLKTLEEAWLCQDMDEAGNHHSQQTNTGTENQTLHVLTHKCELNNENTWTQGEEHHTPGPEDRDTPGHQGCTHSEKRPGEGTMRRSSASQGAQGVIWGLRNATIKPMI

SEQ ID NO: 925880 - protein, 139 aa, Homo sapiens
MRLRPTGLHSQKVRPSRSQGEIECRHKMQVTKTLLIKQVVVKRPAKTRQNQGGPPPSYAHYTVINKYIETVGFAAEKDFNDCRKAEQEDRRSPQIHLSEEFWAGDFKSIIERTVSQVEVSILFCYLETNHCSKTILLAS

SEQ ID NO: 925881 - protein, 127 aa, Homo sapiens
MLSCLRSSHVKSMTAYFGGLMIVQGKTMDKRNKNLKGRENKRRYMQFAPSIDGFRMALILLNIQCLSRNYKRFIECLKKWEQKKSEAQNTQWVQLTEKKAEKQTSSFAVRPYDIWKLSGNIVLVEFS

SEQ ID NO: 925882 - protein, 159 aa, Homo sapiens
MLNILVSEESVLCPVFFGVQHTSSLHLTFRGLWDLSPVIVLEEKRHGGGGFPGEPALSYLSTASADAIIVSSGNAWLIPPDRGRKMKTTVRAVATATGSREATSPGKKGSSEFRSSLSPSFIGVLPYILIPMYSILFFSNQCPHFNSSHTTRLRVHLLL

SEQ ID NO: 925883 - protein, 147 aa, Homo sapiens
MAVPPGLIATQQQRQAMLQYLPHLSLSDSKYAFHILHHHAVIQAERGFLTTQGSSIINASLIKALLKATLLPKEAGVIHCKGHQKASDPIALDNAYADKVARQAGSFPTSVPHSQFFSFTSVTPTYPPAPPLKLLPINLFPHKANGS

SEQ ID NO: 925884 - protein, 135 aa, Homo sapiens
MILINPTYKGNQVYLHRCLQGLPVSEQRSKVITMVHKTLVMWMLSSFPSPLLPFPLPLTSTYTESSFLCNTASPSWSPKLIALLPVICMAYSLTFPDLCLNFSTRFFPKILFKKEWPYFWALPVLLSPFLLFCFT

SEQ ID NO: 925885 - protein, 138 aa, Homo sapiens
MPIKHSGLVVGSKLQGDTKQSIHPSISKNVMPLDCASYGDVFLLLNGCTARESMTGFISLDSRLEETAGNLKRQRLCAALSSGPARARKADILKNKCVIQDKCVHFRTRNNWDFTDSQVNSSILHPVFCFQTCTKAAN

SEQ ID NO: 925886 - protein, 157 aa, Homo sapiens
MSPSSKTKATEQSWIENDFEELREGFGRPVITKFSELNEYVRTHCKEAKNLEKRLDEWITRINSVEKTLNDLMELKTMALELCDTCTSFSSRFDQVEERVSVIEDQLNEMKEKRVKRNEQSLQEIWDYVKRPNLHLTGVPESDGENGTKLENTLQDI

SEQ ID NO: 925887 - protein, 161 aa, Homo sapiens
MNKSHKTWWFYKGKPLSLGSHTLLLSLCEKSLSPSTMIVRPPQPRGTVSPLNLFYFINYPVLVHSKSVHHSLLAPLSPISVEAASVSAGFICLEYADLVAGMSTVPALVTAMLLPLCEALQCCDSEKECVSMCRNVDFLLHQCNQKRGQQTEAIKRFLLFT

SEQ ID NO: 925888 - protein, 161 aa, Homo sapiens
MGATSCISMTWMLFGGTDGAWLHENPCMAIQTKVLLYSVIILIEGYHREESNLKISKCILLRVLMRLKEEEAAEEEGGGGGGGGEGGEGGEEGGEGGGEEGGAEEEGGGGGRGRRRRRRRRRKRKKKKKRKRKKMKKKKKKRKKKKKEKKGEEEEENPVKC

SEQ ID NO: 925889 - protein, 163 aa, Homo sapiens
MSVPLPCLSSCSVVFPLPTTISPHRTLATWKGHAGIQNHWVLRVHSVIFPGCHLLTEDLGAVLLSPAPQPPQSLPLWPALPRVTTSRRASFPTEYLTPWAPLSPPLYLKSPLQTASGHIAAVNQKKKAASFQGHGSKQSVPTFWMESISLQHMGLRTHDLYWH

SEQ ID NO: 925890 - protein, 152 aa, Homo sapiens
MCARPLLAASRGPACPLGVFRWFVLAPPAAAGSIDPIFTDHPPGVSKEICKKGKLSGPTPDPLNWELCGRGPESVNERTRGFRCISEQSTIWQFHQAHGLVSIQPTLISFQSWICRITHPVEGAQRKKKITITVKIYRAQTTAGSCSNYVYV

SEQ ID NO: 925891 - protein, 151 aa, Homo sapiens
MKSQEQRDSLRSPGGGKPAPPARTCPAWGARAAGLSTRMLFTDLVGLKQIPTPQKGGLERKEALDGKNRQKAGRAADQATASSHWPTPTWGFPPSGYGDPLPPALSCWGHQKAGPQSGKPLPAASPSLGQVWARKSIPRHYFTNPYINPVK

SEQ ID NO: 925892 - protein, 136 aa, Homo sapiens
MDIPTALGSRRQKELSRDLHRKSGFITEELNAELAGSPTAFLESSPCTTLTNLPIAAKELRTQRARTHLNLPAGEGLLCLLNPGQLEVEPQLYILPPPAQNKSEEGGEGGYGRPNNACHPEEIYTLIPGTCESITL

SEQ ID NO: 925893 - protein, 162 aa, Homo sapiens
MNDTLHRYHCCPGNSTELQRCSYHREFSVALGSLAYDTALPTPHPPVLLAPGLPTPPSKTMDKFFCFNASLKPWPEIGTPPMSSLAEGRGGNVAKPSGSHSCIARAWILALLLTGWGTLGKMLKFSTRPPPPPFPWLQNGDSTVLTMQNHCKDARSECMKPH

SEQ ID NO: 925894 - protein, 219 aa, Homo sapiens
MVFLIIVFVLPWIFWYMSPVTIARVSLCTRLGMKLLDQGLCTCSALQGAAKPDSQVVVLLPVIGELLIAPHVHQHWIMSFPSSYPLATGCTGYLERVDHGNRPTQNLEVGLGHSGRDSGVLSWKVVALAGAGAVILDCCGIWKYSPCMVDQQIEGTWVKYCTKSHIISRSHLELVQAIPKKASWKNPGISMEARASRLSPGIEAQELERHWEPGSISAF

SEQ ID NO: 925895 - protein, 144 aa, Homo sapiens
MQKSPAFCVGLTGSCRRELISDSVDLGLGLKISIRNKLTGDMMLLVHRKYFEYPFFRFLVFQVSSEIKNGKTETSNVITQNKQNILIVLKTFNFLKKYPTKTFVWKSPYLDIRKLPSLRSQPSPDTESAVALMLDFQFPELHRR

SEQ ID NO: 925896 - protein, 138 aa, Homo sapiens
MKKILLPNPQKGTNSASTLILDFWPPEFEKDPPMTSGPQTNQPKEHSSNFKLDKSQPHLQHTRTSKRLNCSGQAFLLNLLPQELATSARNLTTRPRNACSPGFLLSRVPSVREPTGNRTVQLTWQPLPEPLELWPKAL

SEQ ID NO: 925897 - protein, 140 aa, Homo sapiens
MTVYKCHGNITKNVVRLEESGCSGDSRQVMLQPLHLVKDGSKNDLQGAADTVWIKKGKEVYKLLDDKHIEGNQIMDMFPTGVGRKLNHNRNSIACNLFREYQVTGVPFLKMNKQNTYSFLLKESELIKSKMDVKVALYLR

SEQ ID NO: 925898 - protein, 133 aa, Homo sapiens [sequence omitted]

SEQ ID NO: 925899 - protein, 135 aa, Homo sapiens
MDRGALGLAQKTIFPSYASGPVPKSGLQRLGLASTLFRNQRGFQELREAREREQALLSLWGKWDFLDPENARMPGPEPRLATVAALRSTGLPLPPTWETKYLYHHLVFSRVNNIFDEVLQQRASADRGIDNTQGK

SEQ ID NO: 925900 - protein, 183 aa, Homo sapiens
MQISAAAALVQRTVWGGAKPPSVSSENSDVSVLSPSSSTESSIENPSYPPPYISSPTVYPSLPEELSPMNTTRSGASYPPPKENLCPLRKVANREEGTGAIGSRTNDGRNSQAIPKVMEPESFRHSSQTTSHISREDLGNHDVPDAVLLPMEVVVIHCRGHQKGDSSVAKENFFADAVAKEVG

SEQ ID NO: 925901 - protein, 441 aa, Homo sapiens
MDPNSILLSPQPQICSHLAEACTEGERSSSPPELDRDSPFPWSQVPSSSPTDPEWFGDEHIQAKRARVETIVRGMCLSPNPLVPGNAQAGVSPRCPKKARERKRKQNLPTPQGLLMPAPAWDQGNRKGGPRVREQLHLLKQQLRHLQEHILQAAKPRDTAQGPGGCGTGKGPLSAKQGNGCGPRPWVVDGDHQQGTSKDLSGAEKHQESEKPSFLPSGAPASLEILRKELTRAVSQAVDSVLQKVLLDPPGHLTQLGRSFQGQVAEGRSEPSPPVGGACKDPLALAALPRRVQLQAGVPVGNLSLAKRLDSPRYPIPPRMTPKPCQDPPANFPLTAPSHIQENQILSQLLGHRYNNGHWSSSPPQDSSSQRHPSSEPALRPWRTTKPQPLVLSQQQCPLPFTSAHLESLPLLPSVKMEQRGLHAVMEALPFSLVHISFNSN

SEQ ID NO: 925902 - protein, 170 aa, Homo sapiens [sequence omitted]

SEQ ID NO: 925903 - protein, 136 aa, Homo sapiens
MVDRVMVAIVHHSHGKEFAHRARRRSCLQFYGQLAVLRSTTVADGTDTRGGVNEFSPAPDFYDPWAPGHVPGNVELMHIYTDHTSHGLNSHLSESWRNSVIIPELERRRGLKFCYKAARDPHSCPILLVFEGRESK

SEQ ID NO: 925904 - protein, 146 aa, Homo sapiens
MVVLRNPGSPNDNCAVLRRLTQSMTLPNLKGVNREIKRLSYLCLCAFLERKNKQVGIFNISSASTTDLVGIKSEYGYSRFRGDQAFRDDKSDDETVGADAVRVSKSHISETFLNKLIPLKFLSHDLLLKELKHHNVLERNANANAH

SEQ ID NO: 925905 - protein, 140 aa, Homo sapiens
MPTTSMRFKVDSSPKPPGLYVTVTSSNSVSLTIVLKLVTIATVANHFIIVFSFLYKKSVSAESEEVPGCFTDESGHTHNSELKTIRDKVENMRVKSDLYMDHKILKAFHLLEEVEYSGSKDEGKIELQLGKISQRLNVFV

SEQ ID NO: 925906 - protein, 176 aa, Homo sapiens
MTQKSQNDSIIAVSRLTKIQQENIFSSLTGNYSHIGKIIEPPRGPRGRKKPTEYVQQSWNQPPCAPQEYFTIWALPFFRVLTLQGPSSELLEYQHQSESQNLKSREANSVAFSLWAKAREPLANHWCLLRSPKAEELGVRCSRAGSIQHGRKMEDRFSQDPCLDIPRFKYMLNSTC

SEQ ID NO: 925907 - protein, 156 aa, Homo sapiens
MQWPILAHCNLRLAIYNDSIKMEVKIASWTLWGPPTKKGVIVLAGVIDPNYHDEICQLLHNGGKERVCMEYRRSIKTSQYYHDLDLVHLYYYNKIPQSRRFIKDKNLILTVLEGGKFKFKAPAVELHLLTEKIHFESRSKMLVNLTGFPCEELMPL

SEQ ID NO: 925908 - protein, 144 aa, Homo sapiens
MFKIMERCAVENKQVVAAGNGPEYPLSSHDWMPNGTKKNFEYDITLPPALWFLIRNQPFILLRLLLLGSTALFHDPRLQIELEHSPHGRRFHSLESMRPRTPGQRPKACRHLGSSLPPSWELQEQRSTCNNKIYCPEEECHKVD

SEQ ID NO: 925909 - protein, 153 aa, Homo sapiens
MPIMLVNKYSHLLTAVWICCTRCKCVSAKNITWDPALHEDSRANFHAEMDGKGFRKAIEFSYGSSNETLKPLLQLSEAQNVETMKKESIRVTELSRYHENNENSLTILRTAWSPLTLTDSSVYRSSNVCGPHTKDLQYLTWFPTPHKSDSFKL

SEQ ID NO: 925910 - protein, 145 aa, Homo sapiens
MAFLIAPVFSSFMISSTSYLPLKTLPKSRILLCKTLMTVWIREVVTTGKLFKADIWIDYTGELRVGVGLETVSRVTKLYFWYKKSISPNRASDQSPQQPQAPNFKIFCGKLRLLFETKRLKPSKVNNKKITGETKDVLASTKLGL

SEQ ID NO: 925911 - protein, 147 aa, Homo sapiens
MWILWFPSTHIGTIVLLLCLQVLRRNRLNPGEGYPASNFLEFNSSGGAQQHSIRALPFWLPKKVTPRFPKGNGEIPLNSRGNVSAENPGASSRVDNSTTVKKPRATKTVSPPQGSSSVATCPLAWLHHLPGKMTALKRAFESPLDKL

SEQ ID NO: 925912 - protein, 143 aa, Homo sapiens
MINNSCILNLIVKVESFFWRTLKIVFIFCYSTCGSCTSYIGISWQLVGNAESQIPFYIQSFNDIKIVMYQLLENEKILNGGKYFINNSFNRRFWNELTHLTVIKCEEAEKKATSGEVKRTTIIWIIWLTIHVRNQQSFIKKKN

SEQ ID NO: 925913 - protein, 135 aa, Homo sapiens
MGSHSSLVCTPFKCILNPQDYFKKCLRIFPFFSLVLSSLRVGVPGKTPTGLHTGVEPWEVHVPFAAERSLAPPLLVWDQGFKLLGGMQSSGGTLALRESLCHLCFLFIERNPVLLTIQIVCEPEFSRSWDKEPLS

SEQ ID NO: 925914 - protein, 138 aa, Homo sapiens
MSQKQEEENPAEEAGEEKQDTQEKEGILPERAEEAKLKAKYPSLGQKPGGSDFLMKRLQKGQKYFDSGDYNMAKAKMKNKQLPSAGPDKNLVTGDHIPPHRICPRESPRSSPASLRGNLRPPLLPFLNHWTFIYYRQG

SEQ ID NO: 925915 - protein, 145 aa, Homo sapiens
MPKPMAYKMLTSCFLSPNIASLIKAVLDNPTMLTFSSQGLRTSLPVARQKGVSHHPKNTGSLDSEPLKYPSSLLHFIACTGSEKQISLFISYQRYFGVILCQLAGECFLLHSGLIYALAFVTILFLSRNGNWLNPSARSRSPFNS

SEQ ID NO: 925916 - protein, 170 aa, Homo sapiens
MELMGHRYAFIYVSFKMGHKAMETTHNINSSFGQGIANECTVQWCFRKFCKGDKSLEDERSDWPSEVDNDHGFYTATGDDLLSGWTEKKLRRPDLHQKKVVVSVWWSAAGLIHYNFLNPGETITSEKYVQQIKEMYQKLHHLPPPLVNRKGPVLLHDNTPLHIAQPTLKS

SEQ ID NO: 925917 - protein, 413 aa, Homo sapiens
MRMQRHKNDTMNFEDSGKGPHGLALHWEDLEPASVGIDLTLGLAQSLGLQDLAWHSHGHGGLVHSCWPGAWGLRCLESVSEEARTTGAGLMTRVVGVCLVLGQYLRKTVSDLTDQKVYELQASCVSSDVIDQKVYRIQDIYENSWTKLTERFFKTTPWPEAEAIAPQDIIDEFIYQFQSFSQYCCKTAKKSEEEIDFLCSNPKIWNVHSVLNVLHSWVDKSNINRQLEDAIQVFTNILFYIQRTKSMFQRTTCKYEMINKQNDQMHALLAIALMMYPMHIDESIHLQLQEKYGDKLLRKQKGHPQVYEELFSYSCPKFLSPVVPSYDNVYPNYHREPFLQQLEVFSDEAWQQAQLSSICSFLKLYTTMPVAKLAGSLDLTEQEFRIQLLVFKHKMKNLVWTSSISALDGKQIE

SEQ ID NO: 925918 - protein, 151 aa, Homo sapiens
MEATARFWPWPSLSSCFLVVPWKLRAIGWGHSLVLPEGLGMNGNNCPGPKGEGSFLRMVPNPYGGSRAHSWEQIRTGFRELKTYLMLNSSFIDGRLVLPESLKILLLRVLHSTTHHGKDKMIQVEYIGVVTYKLFKMVYNQFLIPYSWENN

SEQ ID NO: 925919 - protein, 142 aa, Homo sapiens [sequence omitted]

SEQ ID NO: 925920 - protein, 275 aa, Homo sapiens
MVLVLGSFVGLSFSVFVHSLPTQESHLELIKYDHKILIFGPTSRLNGTLEKSTLGKGKGISIFLGRLGDLASSSRLLVPCFDDIHSNCLSYITNNKTTQRSIVREALNTHRLARNYTKNSSITRLQEFRIIFQLLTKMVIHLFLQFNKVASNVSCVLIHYRGITNTDLAWMVQDSYLGSEASFFHWWVIFAVTSSVATMNIFDRHLFDIEAYIVPRKSFTQSFMVHFNTSLVAMLTGAKVTTMPGLRNPGFARPTKIVSVPPTLPTKIVSVPPSL

SEQ ID NO: 925921 - protein, 136 aa, Homo sapiens
MAKGLQCNTRLQQQKAGILVFRLEQVPAPAMDVPVVGKGELRVMEYPQEPADITSLQNRGLSPGCIFLQREGFRNAVPELHPRPTKSDSPGCGQGISMWKAFRKTEQNESQFKEEGIKYIIVQMIHGNGKNGDNGT

SEQ ID NO: 925922 - protein, 136 aa, Homo sapiens
MWPKFTVSPWIQGRIHVLANIVPGRRSPLDGQAATVLLPHVGPATLTGSADLPKKGILSERRKDADLGLKTEEGGNDPWSCRAQGLDPGPQWFLRKDQTFKDIKEHKSRKPNPRTAIRKIKGTSVHTYEREQVQEL

SEQ ID NO: 925923 - protein, 169 aa, Homo sapiens
MLEAPRPHPTTNAIGVSGIEEEPAFYRTHCGKGRTKGTFSRFMCLFTLLRCIESDLLRAQAEGSSKFRVLRGGEEPGSWNELDYWIFCPDWPVRTNSSAKRKGLKLSIVFKPAPENDNGELASYVKDWAICYDAKNLERGEVTARGQNIRQFVPSLIKSAFAIAKPQGQ

SEQ ID NO: 925924 - protein, 140 aa, Homo sapiens
MLEANVLIKWAFSGVQVVLLVLNRICQCSWQLMGSLLEFAGGPLQTLFAWVSSAEAAEQQTLLPVPSSEGFVPEGHLPDASWSSPVGGVCRPLLGGVSQSGGMGKEDLKCEAVRSLVKTSEKSKAVSCKVTQMDKKSCHP

SEQ ID NO: 925925 - protein, 161 aa, Homo sapiens
MADAPPPTKLECPRSTSDCCAGSGVNGSVSLAFQAPLGYGKELLQLAQFLLKWPPSFVIETQGPGGVAIRGNLLVEGNRCMSAVCYVEQQVDKDEDRVKVGGLEVKLWEVSYTEFSYLYLYEDRKIHVFSAPFLVIVAPGLLVSSFAFIVLNIQGEASKDL

SEQ ID NO: 925926 - protein, 135 aa, Homo sapiens
MSSLILNIEAMRLELFVPSSELVVLLASGVKLQTFPVSVTAHKGGVDRKSEHQDLLRRAKEESFHDLEGDPSGSPAAFTSQWHFLRDFAAPSPGTLAAQRELDTRSSPAGVCLLHRVQGPQSPHPPGTCAGPPEA

SEQ ID NO: 925927 - protein, 142 aa, Homo sapiens
MAIPYLYGSTASSILAPHTPQKKEFEGHKAEGETEASFRAGEKVEMFLFKLALQGQGYFRRSLALLRACYGLNASPEVAVSDRIKHIQDHGTWGVFPPQRGKLEADGCLNFSVSLPKSGYLKVAARTFQCHCNGCLQLLTIE

SEQ ID NO: 925928 - protein, 212 aa, Homo sapiens
MAKRGQGTAQAVASEDTSPKPWQLPCGVEPVGAQKSRFDVWEPLPRFQRMYENTCMSRQNFAAEEEPSWRTSARAVWKGNVGLEPSHKVPIEALPSGTVKRGPLSSRPQNGRSTDSLHQVPGKATNTQCQPMTTSTMGAVPCKATRTELPKAVGAHLLQHCALGVRYGVKGDHFGTLRFNECFIGFWTCMGTIVLISYPDEEVHSSCKGTIT

SEQ ID NO: 925929 - protein, 168 aa, Homo sapiens
MSPKGRCSTFCHHLANLCFGRSQFFTHKLLETGWYQCELPPICCNFWLSKMKTTLRTSHWTLVFKCGRKVFLILTKAGSHTLEREEDIERFKEGCVEMEAKIGVMLPQAKECQEPPEAGKSMEEFFSTRALRGGSFRIEKWVSGFSKHSRKGCISPFSHCHKELRETR

SEQ ID NO: 925930 - protein, 143 aa, Homo sapiens [sequence omitted]

SEQ ID NO: 925931 - protein, 140 aa, Homo sapiens
MVGSGQILDLSLKVDSIDVADGLDVCFERKRGVKDGTRTSGETEFSFLRRDLQVLDMASQRSRPVYCANEDLDAQQNFRMHKRNHQRWNSQLLLECSHGLLPVSVLTTMKYNQWIPPSPLTSRGVISDPDFKPAILTSSP

SEQ ID NO: 925932 - protein, 136 aa, Homo sapiens
MKPVHGLQVSYLKKSLKKPLRKGCGFKAQRWSTSQSGDTCGDTPVIGDTWSFKLRLFLHFQCAPCLHVQSLWLHPLFLNRQTKCILRLLVRLNGEKSVIRNGDFALDIPNLLPHLKYILSCCVVLYINNTYKASKS

SEQ ID NO: 925933 - protein, 145 aa, Homo sapiens
MTTQNFHLKVTNSKDQRKNQHKKAENSKIHNASSPKGHNSSPAREQDWMENEYDKLTEVGFRRWVITNSSKLKEHVLTQCKEAKNLDKRQLRKKHPSSLHLFTFATSLLILSEPFSHQIIIKGFKLQVESLENKQEGFDIITHAH

SEQ ID NO: 925934 - protein, 136 aa, Homo sapiens
MLSAVDPSCWSYKAELTLTSSLKGRAPLGFTGSKATPKFLFKHIKVWKPNRESVVLEAVLARCPELGPQLSSLGPPFKAERVTVLKSMGLTGSLKWDSRPEITSFPWNLIPKEDKLLCYFHPNGNSEGHKTYLENT

SEQ ID NO: 925935 - protein, 174 aa, Homo sapiens [sequence omitted]

SEQ ID NO: 925936 - protein, 176 aa, Homo sapiens
MGNLHLGTHFSLSKASRQEHLSLLKLCPQLPLPQGALSQGDGSFIYKPLTGAAAFLSEMPCPDRRILKRQSGYSGFAKLQCSLFELSGVFVYTVRRKPPTQASVMVDTPPPTKLEHPRSTSHCCAGSKNFKPMGLSFLGSMGMGSTEQNCLAPWLQPPFQGSEWFCLTGIPGVTGV

SEQ ID NO: 925937 - protein, 161 aa, Homo sapiens
MWQPPGLGWFFHVKGHPIQLQACWLGTQHSTVFKFVLLEGDRGGSAPRQAAEASSGPGLSIWDLFDDSRPPLLNPMLWPVPGFPGLCPGTCFHTPIALHPRAQANSMPFPPVLVSYDYITNHLQISWPKTTEPFICLRFGGLTRSQGAELTSVHVRSAGTA

SEQ ID NO: 925938 - protein, 136 aa, Homo sapiens
MWSLQRPYLQGQDCVLRPLGSWCNAGDSSSSDGALKPKWSILVKMLPDLSKTIKAVTLQVCKNPSVTGLRMPPKADTVYITTRKSFQVSGKTSQEGLLKMSPDSKDYNKYLTLECPDTEEHLSISTIQEKMTSPKN

SEQ ID NO: 925939 - protein, 118 aa, Homo sapiens
MMKFEGISSTQHPFTLFVALISDSIKQPIGSQPPLLPSPGLIRMQVTAPEFKLLPLKKAYFDTVITVLERCFTLEYKTLIKLKFFHEIMKINSLSKLASTNSQGASAFSQPGLAKGCM

SEQ ID NO: 925940 - protein, 130 aa, Homo sapiens
MKQACVLESGWHWPESCTDGAHDSIGAKDVLWLTRPFMQQSGSANPEESFVEGENPFTTQVFFQCSRILFSKFQCLHFTVLGFLQLGLSIKSVLLPGQSDRTTGIQMPFGTRNKDESPNMFHFCHRVAPD

SEQ ID NO: 925941 - protein, 160 aa, Homo sapiens
MCDGVSNIEQPLHKHVSNGKPLDKYTQGLFKPHLVKTTTWFTENGRHLYYKRVLHTVREPSSKIPYRTGATGAATRISSFLFTKAPQPPASCAVSKGRDRAADRNLESSMQHSKGSGQTWGRLGGVVPSILDTPFSWEAFDMPRYPASKDRAPVLRGKDS

SEQ ID NO: 925942 - protein, 153 aa, Homo sapiens
MCSDSNAGNLVQEEMLMPAPLWTVSGQPWGHLLHLGTFLVVTTREGDRGWCAPGTLWVEARGTAKPPTVRRTAPPQIMTQAKIPTVQSLRALAYMNVDSEAHSLLYQNQPRIACVRCRPPQSLSWKQVPEMGLGKYEPKRLNLRDEDGQCLLT

SEQ ID NO: 925943 - protein, 135 aa, Homo sapiens
MEIFGLGDIWNNGVAQRTLRHTCTDIFNPCHHQAPLDFVCCGTIKLLKLEDRINSDNNSGCYSLIIYFVPVPQSGVGVGGGGDCQAEGWRGGTLQAQNPCLGRKTSRNAYFHMLGGVYPQDRPEGQQQLPVDPFM

SEQ ID NO: 925944 - protein, 157 aa, Homo sapiens
MSRDLPVPSAFGLCQPVVLGHSIPPGASVQSPFPRDPKPAPLVEAKLVGAQLRASDHSQWKDRSSPVQPFFLLDTSAEANTLEAERGVWLLCSLRYPQLLGNSCFAVGAHQRPKSKEMYAIPSPIDFQLSCVTSLSGRRIPSSPTCLLSDVPGVDSR

SEQ ID NO: 925945 - protein, 237 aa, Homo sapiens
MGDTDAKPGLKKHASCFRVESHHQEGPTELSAQSGWEVKVWARPRGELNAGGCSSFRAPLIQLTLGDSALEMTVPWGDNAFEVTVPWGHFTVAEGEGEARPPRGSAVCRLPGPEQTVPLNQCFRQQGIFQLPHLAPVGEDEEGGGVPSVVHPQHRALQLTVVQEAVAGLLLHHGHPHSAVLIYKELLWAGGTATRTSSSQRTENGLGVTLLAACGSGESTLDAGILESTLRKPNPTH

SEQ ID NO: 925946 - protein, 239 aa, Homo sapiens
MARAQVLSRKKLDQGPQRMEASRWWLLVTVLMAGAHCVALVDQEASDLIHSGPQDSSPGPALPCHKISVSNIDFAFKLYRQLALNAPGENILFSPVSISLALAMLSWGAPVASRTQLLEGLGFTLTVVPEEEIQEGFWDLLIRLRGQGPRLLLTMDQRRFSGLGARANQSLEEAQKHIDEYTEQQTQGKLGAWEKDLGSETTAVLVNHMLLRESQNPGSNHSLAPPITASGKCPLLTWI

SEQ ID NO: 925947 - protein, 174 aa, Homo sapiens
MYIIRAWGCVHMVQMLLESLLEGPWVLYLRQLSPKALWLKDGKSQCPWSQGTFLLFRELLLCRSPGLLSLTASLGPCHALNPTKGNPPVCPEFPPWIRQQLAQFFQGSSGSACELVVLLLSPFQSLPFSGPCAVSFCICSILSVFLYSLPVTYDENHRMPAPEPPLYSNVVIIK

SEQ ID NO: 925948 - protein, 486 aa, Homo sapiens
MFSPLRCQPDIRQGAGEGDGASSGGNISSGGEGGGGGESGGGCNGDISSGGDGGGGSGESGDSCNDDNSSGGDGGAGVGGGNEGGGDGAARGGDGGNNSCDGDGGGESGGGGGDDGDDGTVVVMKVVVVMEVVVVVMVMLVEVVVVVMVLAGVVVLVIMEVVVVMVMMELEVVMQVVVMVVVVVTVVIIIGEVMVVVVVVTVVIIVMVVTVGDGEDGGGGDGGSGGDSGDNICGGDGGGGDGGGAGDGVDGAGGGDDGDDGGDGDGGGDGDDNSCDGGGDGSDGGGGGDGDDNSCGDGGGDGGGGDGGDGDGGGDGDDNSCGDGGGDGGDGGGGDGGGGDGIDNNWGGGSHGGDYSYGDDSGGDGEAGDGGAGDGDDRAGGGDSGDNSCGGDGGSGYGGGGDGGGGDGVNNNWGSGSDGGNYSYGDDSGGDGEAGDGGAGDGDDGGSGGDSGDNSCGGDGVDGGGGCDDGAVTEQIFTLIILNNYS

SEQ ID NO: 925949 - protein, 151 aa, Homo sapiens
MSYMVAGKRACAGELPFIKPSDLMRLIHNHENGIGNTCPHDSITSHWVPPMTCRDYGSYNSKWDLSEDTAKPYQGGTQAMYLAFILLVDATESWGRLKAPRHCLWAQGHVVAERATDVHDRKVSSGISLQLILSPNRFPSPPPDFTSVINS

SEQ ID NO: 925950 - protein, 130 aa, Homo sapiens
MGGFVRIADSAFFYFILSALGTNVATVALGYLVLTEHILAPGSGKLHMKAKHVAMTLGSNQSRKVLIKIVSGNVMTHKEAIERNYTLQEGRLRTLLCTVTDLTRHFQDATTFYTWPLNNMGVRGTNPPCS

SEQ ID NO: 925951 - protein, 124 aa, Homo sapiens
MILAVDLSLIALILLRYVPSIPSLLRVFFFLHLLRQSCGFVIGSVYVVDYVYCFVYVEPALHPRDEVDLILVDKLFDVLLDLVCQYFIEDFRIDVHQRYRPEIFFFRCVSARFWYQVFPSFQPW

SEQ ID NO: 925952 - protein, 131 aa, Homo sapiens
MATPSVCLKRVQTHCGTKMKLAADKPHTRPEAQRFLRQPCTGSQLQPNPTLHMALDDLLRASFTCEEPLKEAASPSGCDGRTHRQEGRQNTSPPSSLFAGSLSEVAFLTPTPCLSTYWTYWLLGDDWELYL

SEQ ID NO: 925953 - protein, 138 aa, Homo sapiens
MATQHTTGQVTKGPLPRSCPQWKETDLCYIRLYGLSLWRAKGPSPCLNVERPSGNPSSRALVGSAGLSVAAASEFNFAFCPILLQDNGGGIMKASPQGELKPEPAVQRQKLHFILMSKKQAGGQKWGQAKRVGSQGTG

SEQ ID NO: 925954 - protein, 120 aa, Homo sapiens
MVVVMVRLTMVVMVILVMEVMVVLKVKMLVVIVMVVIWWWRCGGDGGDDGGDDGDSGNEDGVAMIVMVMAAVVAMMVVNIYTKNARGKPTIPPTVHHALCKALSVTEISLSLLSVVTLRS

SEQ ID NO: 925955 - protein, 249 aa, Homo sapiens
MAFQTKGIAAGGNTESQHSWSCRQKGPKEFIECVSHIRLLSWLLLGSLTHNAVCPNASSPCLPIPLDAGSHVADHLIVILIGFPEQSKEEDLRCCCYDYELLGTSVLHMCSLFHAFIFAQLWTVYCEQSAVATNLQNQNEFSFTAILTALEFWSRVTPSILQLMAHNKVASKPEKSLTFSSWLIGTYAPQSSNPVLLNVDGYQERGCSRAHWKMSGMVEMVCLHVISLMEALQECNSTIFVKVGKPYDF

SEQ ID NO: 925956 - protein, 143 aa, Homo sapiens
MEIRSHLLTPKEFIECVSHIRLLSWLLLGSLTHNAVCPNASSPCLPIPLDAGSHVADHLIVILIGFPEQSKLWTVYCEQSAVATNLQNQNEFSFTAILTALEFWSRVTPSILQLMAHNKVISVVRLYKWIGDMLPYKLDVLLA

SEQ ID NO: 925957 - protein, 148 aa, Homo sapiens
MEFRHRRKRSLLGQVDEDEDTRSVPGLNWVQQHISRIQNRDRNTAGAQDMLVECLPFPDPKQLCVRYQVCTVDKVRTVNKVCAVNKLRAVNIVRAVNKVYAVNKVHTVNKVHAVNKVCSVSEVCAVKVCAVKVRAVDKVCTVNSVCCQ

SEQ ID NO: 925958 - protein, 118 aa, Homo sapiens
MLHHHQTWWSMFLRKMEEEIPGRSWWLMPAIPAVLEAKARELLEPVLPDQPEQHAAQMEKNINDFLFVSSNTEDNEFPIFAMMNFHIISCKTNQDILILGRQGQAIGTVRGHFRRCKA

SEQ ID NO: 925959 - protein, 165 aa, Homo sapiens
MILNVAVAAIHEFPTDLFSNKERQHGAVLLHILGALYMFYALAIVCDDFFVPSLEKICERLHLSEDVAGATFMAAGSSTPELFASVIGVFITHGDVGVGTIVGSAVFNILCIIGVCGLFAGQQPTTGLCWQVVRLTWWAVCRDSVYYTISVIVLIVFIYDEQIVW

SEQ ID NO: 925960 - protein, 153 aa, Homo sapiens
MMMTMMMMMMTMMMMMMMAATTGSGSLQRPTPEGTCLVISSPPSPATVSAPVPRVPPPPDSTTLSPRTPQPPLHWHGKACEGGDDKQEPILEDLDRNRLRTALLATKEVALKGRHPTMKLHRRTPGQRILLCAPAVPPAGLLTGEPLESLNVT

SEQ ID NO: 925961 - protein, 154 aa, Homo sapiens
MRCRVYPGPGFSAFGFGISPLQFEADGCWSRGHTLRSTGPRDAMMTVTALKQQKFVSGSGFWSTKRCTSSCPQLENSVSFGHYPDNIRNCESSNRAIANRFSPSDSVLKADSLANSYYRMKIFQAKTVLLWVMHVSSHRVIQAERILIPQAAGK

SEQ ID NO: 925962 - protein, 314 aa, Homo sapiens
MNSLEIKLQNPMEIGRAPVSAVNHLGGIRMGLGEVPCTTAFFDLNSKCVLQLSPFSGAGLDIPIQIGRFGPPDMPSLIDFAPEKVLYPKVSLSKPSLSMLVSLAPFGSPAHVATQVFLPEGEALGDQGARIEPGLKNLGNIKFPVSRSVTTHIRFFGFSRQKPGSHPSSSIFCCPKPSSNQPVTPVNSISYISSRFGLQLVEPLKENEKGHICVLGKICSGSPVKNGLENNESGKKMVRDLNGKHQGKGPINEGMSAIREATRGAEAPGDPQQQEAITILRPEGQGEGVVLVEPRWKTGCGKDPAATIPKRIAQ

SEQ ID NO: 925963 - protein, 257 aa, Homo sapiens
MRMKFSERCLAASDRICHRFFLHKRERINARDCLSPGYPQRSSACQSTLWRFLPFLSHIPTPCQALNGLDDASHVGEGESSLLSLLIQIIISSGNTLTEGHRKLEAASESVVYTNLRRAPKGMKERTVEFPDKKKKGRTNLQVPTVVVTGVDARYIQLSAFCDISPVGLGPTSMTSLDLNYLFKDSISKYSHIVRPPSEKSQTQSHAPSLPTHCLTPTAALQLLWRASSMICGSACQNADFQVLLINSGGAALESEF

SEQ ID NO: 925964 - protein, 139 aa, Homo sapiens
MTGEPLWAGALGSPLGSLSFTENSKQLRSPVSSPWKPAAGSRHTDGNKQHLAGTEKAESCESQHRNSSHASAPPILNACLGDLRGLPCIPVLGSGTWAISEEDPESLQKGPLGLLALSLCSRKYPVESILAVFSTHEQP

SEQ ID NO: 925965 - protein, 140 aa, Homo sapiens
MACKMLKATRLPGLLLPWQSDKSVEFKILLKKAIWRGHGMFRRLCEVRGQQEKGENALPTSRCLQLQGRSGSCQRTRGRHGPETRNRSEQTREEKGGREGHCLLSPRGVIFLQVAVARAGAEGSSVSQDLSVDWTGDLIF

SEQ ID NO: 925966 - protein, 199 aa, Homo sapiens [sequence omitted]

SEQ ID NO: 925967 - protein, 236 aa, Homo sapiens
MLAKVVSAKEAAHPGGRYPVPCHVCPQVTHNQENVFDLQWLELPDVAPEELEALSRSMVLHLRRLIDQRDECTEVRPRLIVDLTQERDYLQAQHPPSPIKSSSADSTPSPTSSLSSEDKQHLAVELADTKARLRRVRQELEDKTEQLVDTRHEVDQLVLELQKVKQENIQLAADARSARAYRDELDSLREKANRVERLELELTRCKEKLHDVDFYKARMEVGSLAVRPLDGAAGNS

SEQ ID NO: 925968 - protein, 145 aa, Homo sapiens
MGEGQAGIGVFPGRLLPVPGVIGSASTCPRVESLIKQCWGVGSGLMGLYLKRKLVGELFTISRNWLSLGSAVLLRAEGLRCPSTIVKKIKDMANTGRKEKRAREIKNLSMTSMGPIFEDTELTKSVCVTLGRVENKAGLELKDLR

SEQ ID NO: 925969 - protein, 169 aa, Homo sapiens
MEDILIINFKTSMVKIQLMKTSESEHKQEYILNIYNYPLGIKIPQCFTSIILEGGFHSASHLSQTFIEILRMQRDACGCIKQLENLAGDIEGKTEKDIKIDPWKLYALTSEIRLKKLIKGRNPEKQSNKQTNKLISVFTGPEKLGCVLKDSQGLVEKSIQGLCKVGIEQ

SEQ ID NO: 925970 - protein, 166 aa, Homo sapiens
MRTHTICTTKLTFLTLPCKSIEGKLTNRKHIHTKTPSVRHHHQRPKVDKTTKMGKEHSRKAENCKNQRAFPPPEECSSSPAREQSWMENDFDELREEGFRRSNFSQLKEEVQTHDKQAKNLEKRLDEWLTRITSVEKSLHDLMELKTMARDLRDKCISFKFHIQPK

SEQ ID NO: 925971 - protein, 148 aa, Homo sapiens
MDDSAALERSCVFYEAGYEPEARENFANRDAVLSRIPEHKSDRLISLQSASVVYDLLTIALGRRGQYEMLSEVQLLSLVDIQVVGGSCTVTPGKRWALIKARDTARSKVWPLLTSCPQPGAARQLERAFTNCVVSDHPTKTVDVVGER

SEQ ID NO: 925972 - protein, 192 aa, Homo sapiens
MQNAVRSRYRKEVTKRSQVTPSETGNKAQSGHAIGNRNNHQKQVTKRSQVTPSETGNKTQSGHTIRNNHQKQKQPSKQVTKCSRVMPSETGNEAHSGHTVGNREKDVEIGKIVTLPQRNLAGHHLHQSMKVSIPSDESCEYQVPPDMMGQTQTDELSTKYLTNTPQNYQEHEKEKSKKLTKTREAHEDIAKY

SEQ ID NO: 925973 - protein, 148 aa, Homo sapiens
METDCVSCDDECVGVLLNDLDEIGDAVLSLNLTGIIPVPYGIVSNLENTTKYLQESLLKENMQKDLGKIKLEGVAEETDNLQKKLTRMLASTQKVNRATERIFKESQDLAIAIERLQMSITEHATEWYIFARNHADKRLHTVAPKCHP

SEQ ID NO: 925974 - protein, 235 aa, Homo sapiens
MGPSLVAVKQTSSGPADIVVVPESVTSFGENVKGLCLRPLVCKKAPVTGPAQGSRQPGLLRPRKHGDNIGDSAVSGDGPGATVCPIPGSCLSEGSREPHVAIHRPHDIKHRPEVVVMVGEFSQVSWRQLGIKDKTVPQFPPLGGGGGSRSPEWATVSRTASIEDWCIRWHWLRQGKEDFAQDRHDSKSCWTVPEPETYRGAVAYTGMRSQQVDSREQPPRPLGLQGREVELSGDS

SEQ ID NO: 925975 - protein, 125 aa, Homo sapiens
MRSLGQLQSLQDAAPWTALTLDTKCKLEGFSAIILQFDNSLEKLTESCYRGIPEEGIITIGDDSSISVAAPEEFSVGEKVEVEEDTAFQSFKAQARDPQVRKRGSSSDTHENIRTSALSPLPLTI

SEQ ID NO: 925976 - protein, 155 aa, Homo sapiens
MKYDLGSNIWDTFTVGICARKEALLHTQPGSVSVYPVELSTNFSPSSVDSAPPRVCNGNTEEGYKPRDAEDIRENTCKHPISRKPHCVSSSQNTNTKLSFRNGQGILLRPASGEKGKEKNNISWLDLAKWPNRNSSSLQLPARPMQKAGDFCISN

SEQ ID NO: 925977 - protein, 200 aa, Homo sapiens
MDAEIGFTTWGPTVCMHLQPGVPPFRISQVAVTDTEFQPLPQRVPLGKLDAARPQRPLPGRSVLIVNRRAGERSGTRQELRVPAFVDSPFLPLWLRPTLRPLKGRGWCLSSPGVLRHSVLDTGSVSCQFSDIPTKLYLRHGASGRELTDTILENEGKGPKAESITLASPCSERRCNDHFILVSSFGPHNDPERVGAPQCP

SEQ ID NO: 925978 - protein, 137 aa, Homo sapiens
MVNNWPCVLIQSVIGFGLSPSPFPFSSWVRWLLIIGNYLEKWAISNSPSSWNGYISPDDLESGKSKIKNPEDAVSGGERAHEADWSLVFGAGPTITTPDRQESHRSNRAPPSNTVVLKVKLPTHELLRDTFKPHQPL

SEQ ID NO: 925979 - protein, 126 aa, Homo sapiens
MALYINVLLFLLETAGFDVSLSPLPNMSFCKMQMSKSVDFPEYPPSSNYIRGYNHPCGFVCSPMEENPAYSKLVMFVQTEMRGKLSPSIIEKTMPSNLVNFILNAKDGIKAHRTPSRRGFHHNSHS

SEQ ID NO: 925980 - protein, 137 aa, Homo sapiens
MELVKSDLFHCLSYNFEIAVSERTRSRHWHWQIWEQEEGGEGEGGEREGEGEEEGGEEGGGGGGGEEEEEEEEEEEEEEEEEEEEEEERRRRRKEKEKMQKFSTKFSNTNEISKAKRYVYSHAHHSTIHNRQGMELT

SEQ ID NO: 925981 - protein, 228 aa, Homo sapiens
MGATLLELSTHQAWYNSAEAMMWATGHLRLSYKQAWPDCGPGRGQQTKRCSEENLGKTLLDIGLGNTFTTKTSKAQATKTKRDKWHLIKLKSFCTAKEIINSEQSAEWEKIFSNYASNKGLISRNYKELKQLNNNDKSSSLKNSLLTLIPPSSTIPFLNFLLSQSLPEDFLYRLPLKLFPVTLKFILIRSLLTHHHYSDTITFKVIYDVCITKSYHFCFYLTGPISCI

SEQ ID NO: 925982 - protein, 141 aa, Homo sapiens
MQPFNRKVRLRKRSLQRIFIFASGSVYGDIGLRKDPLHGAISEMWEICLNPTDVLQVCPETMHYQFQNGLNNVLFFGLRGPIKEHLPTSTTHSAHLVNDFLCGGFPKNLAGTGQKTDKSFQRCPSELPPVPYLLGHNQCNL

SEQ ID NO: 925983 - protein, 151 aa, Homo sapiens
MVYTDNSGIKSPSNRNDKIKDLKNCSSEMLGVTDSKWQGGDLSLGHSRPVLGPLYCLYYENIPQIIQPGKPEYQSFLVFYPGMQTMKPWLISERRRKREDVDSGSCLGPCNEALQPPLLPKVIPQFTVPIELQRAQDIGNYQSKFCKTVTF

SEQ ID NO: 925984 - protein, 130 aa, Homo sapiens
MPFIAEGSRIERCDFACALHDSPVKHTEETAGGQRLAEVAAGPGIQGCMCHPWAPCMGSCRFRGKLQFPSCAPKGMLHLLQFAFDRKTLPPSAPHTHTLSLVFQRCLDKEAWALQLGLVLLSVSLASKPQ

SEQ ID NO: 925985 - protein, 118 aa, Homo sapiens
MRRPSFQIVLLMMGGAFMTSSHYPSGTSRPLRMRTARRKATTRGEGMQDCKTPEGQILSSEEARTEVAADQYGFTTTNSKHQSYWSKGPLYVGINPPNLTNYVCNDPISNKRIDTRIG

SEQ ID NO: 925986 - protein, 136 aa, Homo sapiens
MPRLFSITWSIRSICHGVLLKPGLCPVKSSNPRGKSRSLLLQYREFPGPILIGPAWVTFPYFDLSSGVRLVLGFCRAVSRVFRNMIGIPTTNPESTGAGANQQELGQISRNWGKAVFQRKGLLMMQTPTVYHDGLF

SEQ ID NO: 925987 - protein, 301 aa, Homo sapiens
MGARQSRASSKDKGPKRMLFTGRRQKFSPWDDALLSGRDPRSLLKRGMHHVSFSLVTRGMTDIPDFLWGLSEVQKLNLSHNQLRVLPPEVGKLTRIVVLNLCGNRLKSLPREVSLLQCLKVLFVNMNCLTEVPAELSLCRKLEVLSLSHNCLSQLPACFADLSRLRKLNLSNNFFAHIPMCVFSLKELIFLHVGSNRLENIAESIQHLASLQIFIAEGNNIHSFPRSLCLVTSLELLNLNNNDIQTLPSELHLLCRLVRIAWNPMDKGLHISHNPLSKPLPELVEGGLEMLFGYLKDKKHT

SEQ ID NO: 925988 - protein, 149 aa, Homo sapiens
MFNGINFSLTGTGHIIGNRTMPQHSWSLEVYQGDEHTDGYGSVLRAVWEHRRRRCRLSIPVLQQIDGWCHFPAEQMGFDGTEEALKVVPRESDHRAIVLKAGTMNKDLDPVVALICIHGQPESAHSGALIGFAVAPIPSLNQALDRAVA

SEQ ID NO: 925989 - protein, 143 aa, Homo sapiens
MLQNINPLPEPLIPGETRGITCIGSNGSLYTLQTLLLLPAYGAQWKLHAFNILTRMSLIKDWANGSTQSAKLQAVISALDSSEFLPNWEDVKASKSAPKYAEGEKNSLMCYFSQMLKNQVKYVGIKVGEGCINFSGSFSHHHL

SEQ ID NO: 925990 - protein, 225 aa, Homo sapiens
MRAGNAQKPAASPRTPLSSFATESTKETPFCEWLFLDAHLWLYSKVLRLSTSLWTASSTCTALQQRISVPSAGEQGTDVSTSKQHCLTVHQTQLHLPGPLRKELAESHLTRVSPFLGNLQSVTQQGEGIKAQPFGHFGPTQDNTEGDLCSRPPLLAWCPSAKPILSSKLQSSFYFQRTRPPSSRGASKDNEVSEWRQALREPLGARSSDLVISASTAIAWECLQT

SEQ ID NO: 925991 - protein, 154 aa, Homo sapiens
MNSHILMKITEPFPVTASLAAILSLQRTDTRISQRKSHNVLLNYLVEDMSSCQTAQPHSFPEWEREASDSVFMKNTCQTRWYCAGSPLTVSSACYAMPLMGVWGTWGLSPGGEVVLSLADGCHILLIGFSCQFFQTHLVVMARFLFNQEKNEPA

SEQ ID NO: 925992 - protein, 136 aa, Homo sapiens
METEHILSKQIVLKLSDIRGPVLRQEGSRTPFMGLRQLPPRPLSERRPAEKTTKIRVGEGALEGALLGRKFKGSMCSNHLPVTPLTTLERVTNPSFSLWQQDACLHKSLAGVEITGQAQSYLEIRKLSSHPALLLF

SEQ ID NO: 925993 - protein, 138 aa, Homo sapiens
MIGVHSKMKIKKIFSSHEEQEGRKRRRRIGGGRRGERRRRRKRRRKRRKEEEEEEEKEEEEEEEEKEEEEEEEKEEEEEEKKEEREEEEEEEQEEEEEEKKEEEKEEGGGGRGGEGGRGGRGGGRGGEGDDGGISQIS

SEQ ID NO: 925994 - protein, 134 aa, Homo sapiens
MQKAVYAVYQCPICGTVSPIARIHGSGNQGVEVEVAPLTITPSDPLAKFLLPVPVTLHSAGLEVLVSEGGMLPPGDITMIPLNWQTKPHQQAARGKMRQADVLFLGRKSTYGELEGKRTLCSWLQRCGVEFPHY

SEQ ID NO: 925995 - protein, 150 aa, Homo sapiens
MAMMIFWCNWPEAKTAAYDGEQATCEPVLKAMFLADTHLLREFLGHWLDKLRREWQVERAFQTALWLLQPEVVFILEDVFDEGKWSTSEAWVDDVEQFRKMFRHPSHVQLKVVAGNHDTGFHYETNTYEVERFEKVFISESLFSWKGLTS

SEQ ID NO: 925996 - protein, 123 aa, Homo sapiens
MGGACYYPPSEDYFCQFIKLILRPVLFPCWQGVVILWRRRGILVFGIFSVFALVFPHLRGCIYLWSLMLVTFGWGFCVDVLFVDVDAIPFCFMLSHTDFKNTFGRCDPRVTQKSICGIHSSLW

SEQ ID NO: 925997 - protein, 155 aa, Homo sapiens
MLVTLSPRRVIDRFIRYKWRWFSRVGKGRGDSKDSISVLQSWHSSDLRGKPILKRLLWKFWSQLQLFWQVGLWKTNSNDPEKSVKNIDPSRAWTSRNEISRALVSEMLLGCRAQQFEDTETQTQTRRGTQNDRGGNWSDAATNQGMPRIDNNHQK

SEQ ID NO: 925998 - protein, 167 aa, Homo sapiens [sequence omitted]

SEQ ID NO: 925999 - protein, 146 aa, Homo sapiens
MLLFQMYVNFSGGGVGAFLFLFCFSKTFGESWPPTGPDYSGWNGLLRSCGNPCAFDWACRCWVEEPGSTARVGQGRGVCEGFVLRTSAKSESLRAELHISIFTKLPSGSNVQPGCILGSKLVGSNERFILQLLVQLSCLLKFPLVT

SEQ ID NO: 926000 - protein, 143 aa, Homo sapiens [sequence omitted]

SEQ ID NO: 926001 - protein, 147 aa, Homo sapiens
MVLVVLFLLVRFLSSPKRDWHSAPFAYLGSPGGVYLGSWKEEKEQGKQMKKKHLVRLECVVPRSRMKKIANILNTAEKSRKFAVKATGARKDKRLGQKCSSFWADQEYFELNDKDEEQHKKIRWNKSLLETFLCKCNKRHVNNRMIV

SEQ ID NO: 926002 - protein, 126 aa, Homo sapiens
MSFIGQNRYEISLFFFTWRRQLAAKRVTRKRGILEVEGDFPSHYFDGETILDYLMGLIIDKGSYIRKSQCDNGSRFEDAVQLALKMEDGATSQGLLAASKLEENNKPRKRNKRYNTWNQRRKTDIH

SEQ ID NO: 926003 - protein, 134 aa, Homo sapiens
MLLMKTRHPEPLSRFSGVQREQRCTLKETPFLQPLYHSPQFVELGDFLHTVQEKEKRNLKNPFERHPIWESLLPVPPSGVHTTWHIRVFALLPSPPLQVDDCSEAEPSQCSFVFPAPGIAPDELGTSNLFRNES

SEQ ID NO: 926004 - protein, 185 aa, Homo sapiens
MPLYGLFLLSGCQNPTYSSRDLLKGFDLKADNDMDNEVQAKVVLDGNEELVGNWNKGHSCYALAKRLAAFYPCPRDLWNFELERGDLGYLVEEISKQQSIQEEAEHKSLENLQPDNVIENKNPYSEEKFKPAAEIGIKGASPNPWQLPHGVGLQVCRRQKLRFRNLHLDFRGCMEKCGRLVTVTT

SEQ ID NO: 926005 - protein, 141 aa, Homo sapiens
MGETALVIQLSPTSSLPQHMGIMGATIQDEMWAHCCLIELRAPNSLINILPIAFDVSLEQKLANFFSEEIQAEITKLVNGIGTETEDFKSQIMCSFSCSLEDANKRGIIAEVNLQHSCSKQTKACDVSTLPRMACILELIY

SEQ ID NO: 926006 - protein, 136 aa, Homo sapiens
MCVFKQSSPDAFPKGSTVLPACSNVRRALSSHLAQQWMLRSFNVFLIYQGKLEKEKEKDVPRYLLVFGFLVKVLYEHSEMWKWSLINVGAVTRAIKFSPHDDVFSIKEAAEIICWSQDCTASKLQSWDSSSVGQIL

SEQ ID NO: 926007 - protein, 167 aa, Homo sapiens
MANADTLEDLVSFHHRKDMISDIRFSPGKLLQVNTGAKEQLFFEAPRGKKQTIPSVEGKFGKFKRYVAHSTHVTNVRWTYDDSMLVTLGGTDMSLMVWTNEMEGYREKRPCDSEESDIDSEEDGGYDSDVTRENEISYTIRALSTNIRPMLGIKPHLQQKEPSIDER

SEQ ID NO: 926008 - protein, 248 aa, Homo sapiens
MTQRGECHRMKQVETGLTRLQARATGNHEKLGEKQPGSSPSPDTRSSGALILDLPDSRTVLHTSTPETVQLLSFSVRPQMAWSSEERPYEDGSKKAAVCKPQKETSPETSPGTLIWDFQLPDLCENGCPATSLTQGCFLDPGIVIAGLEGEERDKKTKMMPGYPAPGDLGLSSLQQTLQQSSQAEEVSLSLEGDSGWRSSCPGNHTLQEAGLILGDGEQEVMVVVVFEVVLHSTPGVTVTVMVTVKQG

SEQ ID NO: 926009 - protein, 136 aa, Homo sapiens
MKEYCANFQENVNDDWLNWNKYRKTPKCLHPSWRQVFHSQSGTGQKEILLYSSKSKLGKHSRWQIECVFLPLPAVPGKKNWGRKSGFFPTTSPMLECWYPPRKKTIPTATKRAPLIAYQTLIQVLSLIHLILQSTL

SEQ ID NO: 926010 - protein, 171 aa, Homo sapiens
MLMGQFIPGVTTPYANSSAGWQDDPQHDMDTRCITRWAGQAAVAVKKASARCGEEERSSHDLTRRNVGGHAQPSAHGVLHTEPRNRLWLLPDHMVHGLTGDLEQGPLYQGSPSPGPQTGTGPWAVRTGCTAGGEQRVSEHYHPSSISRQISDGTRLSQQCEPYCELDMRGI

SEQ ID NO: 926011 - protein, 190 aa, Homo sapiens
MWSEGDLHLMSNLLSFLGLGQFLMLWSYAGEILLLATRIPGSRPTQVTGRMQGESSNNVATGKKDEEWKKKKKEERKKKEERRKKKEEGRKKKEEGRRRWKKKKKEEEGRRKKMEEEEEEEEKEEEGEETKHASSRGAECSIKGKIHQKPARMLPKTIIINKNNMAEMQKKEAKCAHLRKSPSLFRSFQI

SEQ ID NO: 926012 - protein, 158 aa, Homo sapiens
MCECPNPESSRLSPMSLDKSLIGEVFQEQSLFTHRPIPSVRKSAAAAKREHVSSYCHLSVGVICSIGAEFPEIEERRGHRTQLFPQSTQHKDREDKDLYDDPLPLNDYKNRPSLDTCLSRESQYLWDSGLFANSHLIFSKVFVFKERFAFDGLLILRC

SEQ ID NO: 926013 - protein, 157 aa, Homo sapiens
MAGGYIIFPAGSFLCTCLLLGVHGKTMMADGRLSAGGQQCTAKRSAVTFRDSNPMGKSGDKWNLLHRRTVLMAYSQVAKCGHLNVTSTTGIFFMKPPVFLDSCPLSPSSRSVAAISASYVTSPLPLSHLAPSYKNPCDYIVSTQIIQDNLSASSFLV

SEQ ID NO: 926014 - protein, 140 aa, Homo sapiens
MTVFVDQAAFTFKVGSRVLNGKQHKSLENLQPDNVIENKIPFSEEKFRPAAEICVSHEELNVNHPDNRENVSRSRNLVPCMSPAPAVTKRVQGTAQSVALEGTSLKPWQVPCGVEPASKQKSRIGVWAPPPRFHRMYGKA

SEQ ID NO: 926015 - protein, 180 aa, Homo sapiens
MSEPDPIVLIYGTFMETWSFQLIVQPPVTAKGLGKWEIKPDIEKHKEENTHPMKWESFLTPPAGRATEVWLVLFGRHVRSNPLCDREYADGQVQELGQYPGVGVCNFQSLNGCMLQCALLALPSMDVLSVRQFSGPSAFSQGQRASMTAFCILSSCPAHWGQLYNLISPEMAPEESTEQT

SEQ ID NO: 926016 - protein, 138 aa, Homo sapiens
MDKLFSGDFCDFSVPVTRAVYAVPKRNPLLLGKLKEILDSLMLQQTDRAAPRGMELVIPGEESQYELLGWWDRRVTGRENGTSVQTIPAPLTLAAVPAKTQFMHLYRSTQSLLSCGSKFPDPPVSSSDTSNCRNLLRG

SEQ ID NO: 926017 - protein, 160 aa, Homo sapiens
MVNIECQLDWIEGCKVLFLDLSAGFTGEVGFRLNPRSFPDEVIENGNHGSIENGAKSIFKTVSYERSRGAISLPDTPKAPWQCRETFVVVTRVGGVTGILQVEAMGAARALNQYFLYRNSENERYGKTGEWLKSKTVTAANAGKDVEQQKHSYVAGGNAK

SEQ ID NO: 926018 - protein, 157 aa, Homo sapiens
MSREKSAVVAEPSWGTSARAVQKGNVRLEPPHEVPTGVLPRRAVRTGPPSSSPQNDVPSVVGGGGDKLLYLSQRLEENKTTAGAEKFLGFYDGEMENGQKKEQSVEGELKGLARCVLNQLKQERAEGRTKSFSAKVGGSNWGECDEEQEGLVEGREA

SEQ ID NO: 926019 - protein, 259 aa, Homo sapiens
MLMEDSEHIPWEKATFKSSPIPESGVVFGLTSSNPNHDPSSPNTKGSRNEKMALLTLQLLAPPRQLVQEGNEGYSLLFNHAGFFVALVHAKCKLKKYLSAHHLAKKAEQDFLHSDNLIGRFPERHSDFSRGISTATRHRPPACFTSDFRDNDRVVSSLATVGPKSLKAGTPGRQQGPGLAAQPVNSVSLSVQVGVRPPENSAYNNCFGLDDTDCRRTTQAAPPTHRLRIFHLAQGCLLIHDLGEKSIQHGRYKYGMHFS

SEQ ID NO: 926020 - protein, 172 aa, Homo sapiens
MCSVGNGNSSGGIICSQTVHTDVGGGCDGLGGELTGLQVVHVRVLCKDFRSTVSLILTISPRDQGIATPLIGESNAVFTTESSALPNTVPVHIKTIDIFKHVEHELLNKPPLLFVIGGCFRNGYEEKEVSLFPVSAGANYYKFSGLKNYCLKFLEVRSLKLVSWDKSQGVSR

SEQ ID NO: 926021 - protein, 144 aa, Homo sapiens
MPKIMLFVYCLCQSTWTSLFTSLSAFWSKSFNKYLGSSKHSHIFLSSSELSKLFQSLPVTQFQCCFHIFKCLYSSALLSVVKFLKIELLNSYEAICHRDLSRCNCVSWLSSLGRAIVLMSDAGAWSLKDKQSGRENVYDANGVT

SEQ ID NO: 926022 - protein, 158 aa, Homo sapiens
MSIDLQVVMALEKMLLWKPCCPWKDVLTSSAASQGDSLLHPALLVPGFLSGVRKESGHADVKDGNADVNKDRKNIYTRENNPYKDPMLKDCTEKISMESNGNKRGGAKCGWRHRRNHTAKAFGPSEVLLYGKCSRASVKGQSHYHCCFGPKPALTSLT

SEQ ID NO: 926023 - protein, 152 aa, Homo sapiens
MIANHGCLSLLNLLEGIPGLIQQSVQQQCNSEVSNGAVLQYNLDVISVVQPRNSVSVLMSLKIPSILLEFCEYSKIANQEGDGLKVTALYEVLQVRQITNGVPGTARLPLPDVLACCFQVCSSSEKHQKHTGGFKNVRAYIKPSNLEVQWEN

SEQ ID NO: 926024 - protein, 182 aa, Homo sapiens
MVQLSQDVLILGLVSDPAEGSYTLSADPRRGILKTNSASPEVEELGPGSATAMHQLCDLEKIKGFESQLSSLQNWDNNILYTYMVYSKGSQQRKAAQASHSWTCDHRRKDQGQCSGGLFRSSTEIEFELWRSSTLKMKKTKRQGTIVEHLLKGEHCALHTQLHLILSITLEGDILMLRELKS

SEQ ID NO: 926025 - protein, 166 aa, Homo sapiens
MICWGHSHLVTAFSKRWTEVKTKLGDVKSQSQNIQEPKQVESCTKKQNPKKVTRDVSGTSRVGKLKRNYQRHFESKHQTIGLRTHPLLCVQQLHGLGGPTKKLPVASNGIMCFPWGEKPLRPWRSGNLDCHKPLGMGMRAHSSRMDEPEEELICTSKVSSGCNHQE

SEQ ID NO: 926026 - protein, 149 aa, Homo sapiens
MSSYANADCFWVLLTSTLLLVPHILNVWSHLDSVHVVTKGYIWEMKSSCSQTSRSRKSRALIWALSEQENQDISSVRNRIEEEEERKDCEEERKKDCEEEEERRKKKKKKKKKKKKKKKKKKKKKKKKRKERRTAKPKSWCPHLFEFTF

SEQ ID NO: 926027 - protein, 186 aa, Homo sapiens
MNSGPKVGSVPRSYLDMSKVIIFSYLFWFVLTIIFITGTTRISIFCMGYLVACFYFLLFGGDLLLKPIKSILRYWDWLIAYNVFVITMKNILSIGACGYIGTLVHNSCWLIQAFSLACTVKGYQMHGGCRTVVHCESIVYNMRCLMLSLFDHLLETSEMLRTWSQGLEIGCSAVAPFFFQFLPLLL

SEQ ID NO: 926028 - protein, 147 aa, Homo sapiens
MIEGRVNEDVVVKKLGFAGGSVLGPSSAKTWMRLLHEDPHVRSSRIPFTTVSSEPRQASDGKKSCSRRPLDTWSHLITFGSGQASDLYFLCMLETCEGEAALMILTHHSLEEEEREALRPDPYLFSGAPAYHAVKKCSRECNMYSWN

SEQ ID NO: 926029 - protein, 336 aa, Homo sapiens
MLGCPLEPEPTHDPHDSTGTGPSAALGTCKEWVSAWGQSTGPFKWGALQGTLAGPKGLAAPHFPICQEKRLDASAQLQSSWAFCHCLLSGHIPPTTHDGVPEDVHVQIPDTRDEDYDRDLNSAKSRSRLDSNRKCGGSGGRGGRVPAEAAWTATGSAVALVGVVAEYQQKPRGQQPEVPWLWTLGCRSQTRLLGRVVAFCLPPVGIIEILLPSFRSAPFCDGKEGHHFYHQEIPAVGHSAAPAMQKLTQACSSYSSVHSCHWPAEPVTGPSQECDTAKPEHREDTTLAQACWVLTSACRGAGGGWQTLLTNGKAQLPMAFPLCPCNTFCGECVDTA

SEQ ID NO: 926030 - protein, 147 aa, Homo sapiens
MEEGLSLPVPLIGSWSLLLWHASYCSIHLIITFTSSLIASPQHTKVLTWLTLNNAHFPYLHFGSQDKKAEMVKTKTHKRNETFISGIKDPSRKGDLVVCSLAVLLWWLQPSLLATCSESTAPMGSFTLSCVWVAVWGPPGSPGALSY

SEQ ID NO: 926031 - protein, 233 aa, Homo sapiens
MVWISEAHVRELSAGGNRCPYPICFSRTWEPQAKSEHLHIIATSSFTRFTVSHQMLEIQGTRSDMGGLSKALALFNSVKAEKGEQDAEEKLETSRGLFITKVQDKAASADVEAAASYPDLTKILDEVGHTKPQIFSMESTGEDAVNVVEMTKKNLEYYINLLDKAAAGLRGLTPISKEVPLGIKCHQIASHATEKSFMKGRVNRCLAAINIKTRSSTGKDYNLLKAQMIISIF

SEQ ID NO: 926032 - protein, 145 aa, Homo sapiens
MNIEDFRWKLGFIPVVQRTTAVLLENAGTGHQLRYKFRKRDFQENPSYSTEVHISNMTPQECLPRTGQQCSVCACVRVCVCVPVCACITLKKDYGLFMTPGISSFPENSVWLTLADVFVLRARLDCCAVRLGSASSIEVCLHVMG

SEQ ID NO: 926033 - protein, 133 aa, Homo sapiens
MVLLYTTSLNPDSTGSVMRVKLSSGHSPSVGTIGFDAFYEGVEFLVSPASRMGLEKEQEVGNRELERREGKSCHIGERVKKEEKTYVLIKRKNSHEYVRTVERSCFLDVWFRHLIFREMTLLANINFRYEAFI

SEQ ID NO: 926034 - protein, 208 aa, Homo sapiens
MSNVCLIFIQRGIANASFMLKVLLVAAANCYIGIWTKKTPVDVTECKCHKAGTVSGTGECRQGDGDCHCKSHVGGDSCDTCEDGYFALEKSNYFGCQGITAAVSWLSGCQCDIGGALSSMCSGPSGVCQCREHVVGKVCQRPENNYYFPDLHHMKYEIEDGSTPNGRDLRFGFDPLAFPEFSWRGYAQMTSVQVCLFPSFTSYSVLVD

SEQ ID NO: 926035 - protein, 145 aa, Homo sapiens
MEACLYHTEGAQGSHLHDLCRPSSPVILASSSNLSDDASLAISLASFFSFCLQTKKMCGVSCVLSLPLTLWVTSGPVSAVKHVHIKTDLFYFVPSLPCPLTKECDAAHPNTSGPDSLRHGKHPPMPRCCYKTFGQEPHCHGDKFS

SEQ ID NO: 926036 - protein, 137 aa, Homo sapiens
MSLLAPSTPSAKPDPSTTVIHDHPQWPLVNDLHSGGSVTDVLPGFTAFLSVFPAIATEMGLSQECVTQGPGLASARCQLQVPGLQYFSSALLQVGGSHSPLLMFIICYNGSQNSGHTFLPIAVYYKEYDKGYRATAR

SEQ ID NO: 926037 - protein, 139 aa, Homo sapiens
MDPVMVNTECQLDWIEGRKLLTRGVSARRKRERESMRDTAETRPECLTRATKVGKAGGRRFPLWHIFNDLAKYHVVPKEAASHKFANPFPGKSASNDWSLDKFKGPDISVGEFRKTIPLQSSRQVAFVTTVIVLTGSIQ

SEQ ID NO: 926038 - protein, 148 aa, Homo sapiens
MLPHHRASRAKSEARASSELKLQVQAPTNRWGANALPAGGTILLTLGTSWNSTRCTAATSLSHGSSREQVQYITSAARWSPTTGANGCSPRRIAFQTWVGGEHSPYVTPSLARGKANREPAGRAPCQAGLSRASQVDLENTAPSGGKS

SEQ ID NO: 926039 - protein, 147 aa, Homo sapiens [sequence omitted]

SEQ ID NO: 926040 - protein, 141 aa, Homo sapiens
MGSVTTVLSPARVRGSLQNRLGSTKRHATRRALADGGHAACREAPLARLLIEPWAPGKHDLHLDGTGQTFMCRAGDGKCDFPHTHLPPAYLPGVSLAVYPGGKQNGFGEQVESTLHLKIKFQVEIMSFQNLEDIVSSFSSI

SEQ ID NO: 926041 - protein, 151 aa, Homo sapiens
MLPEDGLAFTRASPTQLPWSPYWCPPRIPMVGSLESHESFKVETPSQMRLRELCPQNCQEMQRGWLCRWRKGLQAEAGGGLWKPEKERNGFSLRDFNCWYRERHSFPARHCSLGHEEQSTQWGEFRFLCMWRAAIRMSPVSCMVLPLPTNG

SEQ ID NO: 926042 - protein, 278 aa, Homo sapiens
MDPMRKPRRDRGERQPQAWLGREHGALQGQLWALRGRSGPGGARGWLGSQVCWQPWQPSLTLGASSAWAPTLAALEEPFSPLLHCGSPFLGWPRPQPAVSACGEVWRERCGQEPGLRTALVGQREFRVGVGSVGPVLRAASQPRCPWTDLQPTMPEPPPPRHGLLRGQSFPDECHPLVHGPQSHDPPRAEEYGCMVWDWQAAPPVALVRDPLRLLQGGRTFPKAEETGERRSRLIAGAALARLLTGLQDPWVGSRLRHPGGAGPGDERVMRKGNKKKM

SEQ ID NO: 926043 - protein, 127 aa, Homo sapiens
MRCDLPLRDICQCLQTVWLSTQGAAGPGEAAEKLPYWAPLSMWPQSLPRWTPLWGTQTAHLLTQEATVEVAGPHQVLFDLFESKFEIAKVHDKCNRIPPYALRYDIQISILCPLPPEANSPLRPARA

SEQ ID NO: 926044 - protein, 142 aa, Homo sapiens
MLIAASEKNVRIGEMMSLKPKGVPLSRTCLVSSKAEAEQIVQLGPSAAGMLEFAGGPLHTLFAWVTPAEAAERQRLLPVSSSGSFVPEGHPPDAKMPCQERRNLERESGHSGIAELWWALPSLNFLAAFTLDMDEIGNHHSQ

SEQ ID NO: 926045 - protein, 138 aa, Homo sapiens
MKVRQGLNDDLGLTLRNKGSHSDKRNPHAVKSSKMLQTPTSQYPEGTESMAEASSSVSATTTGLQVVLPGYCQCSLKAQGLFSQLMANVVRPETHPSGMWVPIWPRAGLEMLSKSLAWYSKIQKWARALPHGVYERRK

SEQ ID NO: 926046 - protein, 345 aa, Homo sapiens
MAVAHPDAKRLIPCGSPGVLLRRPLPGPRDYAERRSLPFIDPPGPTSSSIQRTPRLPGQLCGQSRSNLRRLLPQALSVGGAPRAQSKSTPAGHRQRHYSCSWDNILAPGVPRPVGPCETSGAVRSYENLLGREVRERERIPRSLVPPVVVNLSTSPRRYAPLSLSETSLRRRAARVRAERNWYVMPEITITDNDLHATERAPGPGTLPGACTRPLPHAAPDGPTSGRQRTPRAAGRAHHGPGHRLATPRRPPQSRSPLPGPPTAPTAGLAARAPGPRAGAATLAPSLHRHHPGARAPGEAADMSPEPSADEDDLMTCSSARCWHTETMFNACLYVNFCHSCYTYY

SEQ ID NO: 926047 - protein, 141 aa, Homo sapiens
MRHHSDVLTALHWACANGHAEVVTLLVDRKCQLDVLDGENRTTLMKALQCQREACANILIDSGADPNIVDVYGNTAVHYAVNSENLSVVAKLLSCGTDIKVKNKGADPPMQLKICFIGKSVSFDSSKTLQHSTVDLEPEKR

SEQ ID NO: 926048 - protein, 139 aa, Homo sapiens
MKPECAVQQDRCQSWAELDWWGLRGAFALCQHWVFRRGASAARDGACWNELGILREDLKQRVCSRRLSESTASLSAFLAWEEDLCCAYATCEERLAQGLCNTPQSCELPLNSFVTMAVSLRAVFFKVCGGVKYVSYSGS

SEQ ID NO: 926049 - protein, 159 aa, Homo sapiens
MENESDELTEVGFRRWVITNSSELKEHALTQCKEAKNLEKRLDKLLTRIISLEKNINELMELKSTARELQIEDQLNEIKCEDKIREKRIKRNEQSLQEIWDYVKRANPCLIVVPESDGDNGTKLENTLRILSRRTSPIQQDRPTFKFRKYREDQKDTPQ

SEQ ID NO: 926050 - protein, 159 aa, Homo sapiens
MDYQQLLETFGTPTILAHLGNMYVHVLDQVAVQLRDVRELPPDAWATLISTCQVTSVILSLFSLEFLVTIRAICACEFSVSPVAVYKAHGGGYPVRKLGHSRCQPRGNIPEWGRTQTKICKTASRQGPRQADPVANWGVPRHGDRIAPHRLSSATIRPC

SEQ ID NO: 926051 - protein, 158 aa, Homo sapiens
MFNMEAPSSLFVNHVCNKEAGKMVLARCTLPTSYICTRQRAERSKLSKHSFKGTSQIHETGALMTSSNPNHLPEAPPPNTITLLQPTGFISGRFYGANVQLPTPELPVLTLGNLYWAQTLFSGSLKLRIHCSGGCKVLAERWSLHSNGWCQPKSFIVQ

SEQ ID NO: 926052 - protein, 143 aa, Homo sapiens
MRCKSSDLAYLATTQDGPGCGFSLNEWSFPNIEKVTFLLPVAVCTSDLWSADRTEALSRQSSEDSTQSRRKVQCPALHPPHVTTSRLHDLVGQFPHPVQEELYYHPVRKFVRITALLMLSFESKRGPFTYPKNLPAFAHIVSI

SEQ ID NO: 926053 - protein, 141 aa, Homo sapiens
MSLPHQKVQKLPDERKELPVPVIQKDASVNVHDQEGKVTGRTLRRLLPSVVQGRIGVALDLRQWRHQWKVEKGWIGCKLHRGALRSRYESELKRRGLHLRIKIVYQCGDPEEECSRQREEHACFWHTISFIQKNHSAVQHP

SEQ ID NO: 926054 - protein, 284 aa, Homo sapiens
MAGPCRVLNGVRSLPVPIKLWCLAADLKGADAGNGIRVFVPDIGMFIASLTIWLLCRNIVQKPVTDEAAQRSHGSIYCLLESFGIYHRLVNFESMTDFIPPESSSHIPGHQPQGQIEVLFRCRDSLQLQQARLPVSKHARSFLARNADRQGDGIDLERQSGLRGSSTSRRAISVFPPGGGQSACVAGQLQAEGEKIDSEEALIYEEDFNGGDGVEGELEESTKLKMFRRLASVASKLKEFIGNMITTAGKVVVTILLGSSGECLPHWLHVAKGTSSALVNERNG

SEQ ID NO: 926055 - protein, 230 aa, Homo sapiens
MPSHRCHQDQAIIAMPPQQCHQDQAITAMPPQRCHQDQAITAMPPHQCHEDHDTTAMPPQRCHQDHDTTAMPPQQCHQDHDTTAMPPHQCHQDHDTTATPPQQCHQDHDTTAMPPHQCHQDHDTTAMPPQRCHQDQAITAMPPQRCHQDHDTTAMPPQRCHQDHDTTAPLPHPHDHIIITRDREIAQPIREHKYQGESENSTFRDRLDRRRQELSVDAVSEDSNSKDVLN

SEQ ID NO: 926056 - protein, 187 aa, Homo sapiens
MRLRERRKEGEQRGPGRRGTQKKCVEGWVGGGKKHRGALGTMDRTWAFTLRAASTFQWGQQKAGSMVSRGAFEECRFGSWMNNQGWKVNQTGQCEESLGSAGGPAHVCGQEMCHSSDGLKEWLQWDGPTSPSLAFQPLNRRAPPLPPPLSPPHRIPLPPPPTPLIFPLLQLPFHTQQQPVIFQKIGT

SEQ ID NO: 926057 - protein, 205 aa, Homo sapiens
MGLPPAVPHFSDLLPQSENNPISFPSSSDYVFRLNTSTSFPVSPVHGQQVGETLPENQALKCSFPDSVMSTDSSKDRSDALNDSMGIKCIFKKYKFTIIALKYSKTPSTGGRGEEEHEVCSRFWNVPKATVITFLPAHHGEGPADQCKTLYMSFIVSSEVLNIFGVVCGFSHSAQTLPLSPTGSKLKSLSRRYYYSKIDTLMGRR

SEQ ID NO: 926058 - protein, 221 aa, Homo sapiens
MQEWHRGEFLDSPQGRGLQQYRNANRHKESPGRRKEQPTQTENLDSTHSTPATTHAKHCCPSPSTQARWGPRLSPPPGSNKPSVTSKPEQYQRNQLQQKVPEKSVITDLLKPTSVNLSKSFSLQLCSVAGEELRSFGGEEVLWFLEFFSFSALVYWILMEVHSRPCLPEYHQQRLQNSKYCCLILPLEALSQRGTQLYEVSSRPLLGDASQLGYTGGQGPT

SEQ ID NO: 926059 - protein, 153 aa, Homo sapiens
MVLEAKPWLQVSFILYRPEIYDGVFPLQKFPGISPGPKADRTQAQTVQPGPHDRNSPPEGGRESLDKAVCVQGEERLKDSDRRSTHPEALTTFHHDRHKPGTAALGFSEGALKSKSAPRIRAALCPSLRCSGITPTLRGNPNFPGDFQRAGKM

SEQ ID NO: 926060 - protein, 143 aa, Homo sapiens
MSCSSGPQRAGSFSPAPPNAPPIPHCSLQVEVDSLPELQHKPPAGPVGNVRQVDENSQDPESAKWPMPMERDARTYCSPPQWRKVTPLLDLTSGFSLEHHPLDSLIMKLLSPPAPRLWEVRSIHHKSFSHFSACKMSVISYEI

SEQ ID NO: 926061 - protein, 142 aa, Homo sapiens
MSPTFKFLPLPRRQPAETHPYLNSAFNTFHLNLVHSTKLLSPPKCGSTYNVPEGSVEEENRQSYQNPASCQSNGPPLSTPWNVAPPSGSLQPDSAASEISAQQVFTDYQPYTRHYARPLQWGTEPNTVQQKQYSMMLVGTDF

SEQ ID NO: 926062 - protein, 142 aa, Homo sapiens
MYCQVVMALWRNTGQGKGRGSEGEWSGKASMAKGRWSRDLKEVREWSLPQCPRARGGDMPVCVPQHSSMTGTALGPVVHSIVTIVVTPICFPWPLEPRGGKDVSCYSRNLRSGAKRSIRHLQAIGTCLWIKRMNECLNMGKK

SEQ ID NO: 926063 - protein, 134 aa, Homo sapiens
MHWQYLVLSDFQHQRSRTMWMPGDEERQVKIRGGKTLKTNSVTPREKPGNEPEEVKLQNASKQIVQNAILQAVQQVSQESQRREERISDNRDHIQLGVGELTKKHEKNIGRISKMLPVKQTEVSPAPSCRMNSH

SEQ ID NO: 926064 - protein, 257 aa, Homo sapiens
MVPDPYMRSSSGQITHVSGDLNLVFKQQLHSLRRRAGPMGAFRGSGSLARPTSPLPVQQGPWDSLALLWLAQGTASKKARPQKSWMWIEHLDQEELSLEEYGRNTATENLEHAEYSSISVLKAAEYESVITRETMAPGQEMCMKYNAAESSISPKCSNGFRTSPGAKVGSGRRRCFLDERGEAGRCPARGLGPSWKTMKSSAAIGTQHQKPREERNTNATHVTLDHLTCTSKMLTFGPTPKSVGYGPVVLHFQQAVQ

SEQ ID NO: 926065 - protein, 150 aa, Homo sapiens
MKILRLIEGRVLDNVTQLVLKFKCSMAAYKSVKFKSSKLGNGERKITARQRELIQEDLSMKHNSRWVTQNKEPQIALTTFVELQKEVKGQERCPPGSKMMGTGPAHTSIQVYIQQEIQSTPPTAQTNTINNDVLFLKNAKQADKCSQPKK

SEQ ID NO: 926066 - protein, 154 aa, Homo sapiens
MSESLKTREADSAALSLQPKAQGPQGRCWHKFQSQRLKILESDVQGQEEWKEANILHVKKKEPEDSACKFISSSPAFFVPAALVANWMMPTHIEEEKFIKHGAQCQCLNIYVLITLSGKEGEKKGERKKQEKARATGQGVVQSSFYLEFYLASY

SEQ ID NO: 926067 - protein, 140 aa, Homo sapiens
MNSETDALSFLDHPSLLVRPEVLMEPLAPATSLELEKASVSNTLDGSSKLDWLPQDHLGELYKETGFQVHPWKFSAKAVLMMLSLTSLGNNCFFQSFTFTAKNMKAPEEVTCPSFFGKPLLVMFDSVIQCCEHLASELIE

SEQ ID NO: 926068 - protein, 167 aa, Homo sapiens
MGVCCTHQRVIYIRVLPAEAVEQQRFLPVSSSGSFVPEGHQPDASQSSPVCGVCQPLLEGVSQSGGTGSQQARMLNLLKLHPQLPIPPGALSQGDGSFINKLLTGAPAFISELPCPERRNLEGQSGYSSFAILQWALSSLNFLVALFTLWGKTAYSSPSNGGRLSSH

SEQ ID NO: 926069 - protein, 151 aa, Homo sapiens
MYALNQHPMYDTVSPIARIHGSRNQGVEVEVAPLTITPSDPRTKFLLLVSVTLHSAGLDVLVPEGGMLPPGDITTIPLNWKLRLPPGHFGLLLPLVLPYPVIKVNGKLQQPNPGRTTNGLNSSGMKVYVTLPGKNQDLLKCLLKAKRIQNA

SEQ ID NO: 926070 - protein, 137 aa, Homo sapiens
MSPSAGSAWKCVMKKNKLKNTGNSKTWSVLLLPKKSTRSPVMVLNQFEMTDIKFRIWMAMKLIKIQKEVETQSKELKESSKIIQELKDKIPISRKKKPKIQKQHHTEWAKAETNPLEKWKKTRMTTVTTFSQHSAGK

SEQ ID NO: 926071 - protein, 174 aa, Homo sapiens
MAIIIKTIGMLKTLFMTLLKAISSSYSTPSSLLFPSSSSHCSTTAMQVTVAEKCVITNLLKPTSVNSSKLFSIQLCSIAGEELRSFEGEEALCQDPQLQFCWSLLEVHSRPYLPWYHQRRLQNSKYCRTANIAEQQILLNSKYCCLILPLEASSQRGAQPYQVSFCPYWEVSPS

SEQ ID NO: 926072 - protein, 136 aa, Homo sapiens
MVITEGGLICIAAGWTNPERVETSCSGVRLGKEVQRQMDHRMRMARKGKGPGGPSWVPSKGQHGKHSAPTQLAALGTNCHHFLSPGSLRVIFQKPNIETHTQIRTRPIYPIAQSKAVLSKLFQVMIHTENDGAIFV

SEQ ID NO: 926073 - protein, 157 aa, Homo sapiens
MHTSVTALFTVSLCWQYPEQIFLGVDPPVLSNRVATGHEMWQDKLRCAARIKYRLDFEDWGNKSQSLIQSRALTVFNSMKAERGEVAVEEKFEASRGCWFMRFKERNHLRNMKVQGKGASADGEAAASYPEDLAKIYFFSKGGYTKQIFNADKTAFY

SEQ ID NO: 926074 - protein, 169 aa, Homo sapiens [sequence omitted]

SEQ ID NO: 926075 - protein, 151 aa, Homo sapiens
MTPTLRALSMGEMGVSKIPGSCCNVRSPERHRVPACSGRRAILAVMFLREHNHHSHNKNNNQTVFLYDFVGTNQQPDRHEIDRWALCNHKHKLPPLLTNLTIASLFTAVLAHFNLPPSWTNYLDTPNRSRRFSSHGCGHAKRAGARPELSS

SEQ ID NO: 926076 - protein, 149 aa, Homo sapiens
MDFGSLPCKRQSTTDFSRTYLEREELKPAMNRRKPGFLETSPKPSNFSEFSEAPGGCLHFNGKSSESSGNYSQFYFLIERQKPWLSGVRVQDVQMTIGSKSNNWCPYKKATYRGTELNREEHHVITEAELGGMQLQSKEHQGLPATTIN

SEQ ID NO: 926077 - protein, 251 aa, Homo sapiens
MYLVTVLRNLLSILAVSSDSPLHTPMYFFLSNLCWPDIGFTSAMVPKMIVDTQSHSRVISHAGCLTQMSFLLLVACIEGMLLTVMAYDCFVAICRPLHYPIIVNPHLCVFFVLVSFFLSLLDSQLHSWIVLQLTIIKNVEISNLVCDPSQLLKLACSDSVINNIFIYFDSTMFGFLPISGIFLSYYKIVPSILRISSSDGKYKAFSTCGCHLAVVCWFYGTGIGLYLTSAGSPPPRNGVVASVMYAVVTPC

SEQ ID NO: 926078 - protein, 143 aa, Homo sapiens
MLPCIFLYYYALIIPGFRPFKSETASPEVEAAASYLEDLAKIIDEDGYAKQRIFNVDETAFYWKKMPSKTFTATEKKCENKALITAHLLMAWYTKYFKPSLHTYCSEKKIAFKILLLINNVSGHPRALVEMYKETNVFYVSDS

SEQ ID NO: 926079 - protein, 151 aa, Homo sapiens
MTSEGASPKPWQLTGGVGPMGVQNTRIEVWEPPSRFQRMYGNIWMSRQKFAAGVEFSQIAPARTLWKGNVGLETPQRVPTGALSSGAMRRGPPSSRPQNGRSTDSLHSVPGKATDTQHIPNIYFLVNALTLVLQTIDNGFSESATPGHTAP

SEQ ID NO: 926080 - protein, 138 aa, Homo sapiens
MKVTSTIGRPRDKRKHCQSHHVAQDGPGKWKCGDPWGAENRSSCCQIGIRPVLFFRKQFGDSCEDWLNGCDQNADRDVDSEVQADVLSDGNEEFIGNGSSVYPYRPRGLGRTNDLQGHAQGPAMSCSLRTLLPTSRML

SEQ ID NO: 926081 - protein, 139 aa, Homo sapiens
MFDLVTLQVMDAFQTSTTTHNNNVINCSQERVFYGNFQKEGSRSRRILQRVATEDETWLYGFNPEDKPQPNQWLPTGGSSPVKAKLNLPEQRTLNILSLSLLTCKVSAEKCADSPTEFSLYVFTCFSLAAFKILFVFNF

SEQ ID NO: 926082 - protein, 148 aa, Homo sapiens
MVVFTQEFQKNGEAPVCRISIHLVPGVVTSEKAGVNSVAAAEAGLHTVGDIFSDAQCTTQAQRSVPERWLDTHSELYSIEITFLGAKNRVTPMKTKTINKSYILHLKPVFMPTSSLKRPDTRLSEPPSHSNTQDLCDKLGRADISLTH

SEQ ID NO: 926083 - protein, 171 aa, Homo sapiens
MLVKVHLSLPTFLIIVAFCFSRSALVQEINYGVIPTLGAYPDSKGNFPCPNSSLFTWFLQLVLLISSRKALGSMRAKPGNRTAENVKIMSNFGVTDSTSEDIESAHVHIQKAGLLKTKILIGDAEITNNMFQRVCFSYGLLKTKTLTAVSSTSTQSEVTGALGNVGAFVLF

SEQ ID NO: 926084 - protein, 143 aa, Homo sapiens
MSERKTSILPSFKTEILQSKKRESIAKKYGSAELKPPSGDKNTAPALLTELELPVAFNLRKPQAKQTWHITFPTLISTLQFKGGKIITLLGELLELKPNSFGFCTQRLWGGGRWGGEQNTVLEREKRLFSGQLNSSFQKQAIV

SEQ ID NO: 926085 - protein, 144 aa, Homo sapiens
MFSSLIKDTTLEQGSLAPGPKTGPCPWSIRNQGAQQEPYECQQVYIGLCSWTYKPEDGAWNGLIHEVHCGQSSLFSPRGVGDKMVKAGLDRSICQSTNGRHKHQHQGRIQQATDPGEWVLQMSRICLSMKWRQPHCTMIYAQEE

SEQ ID NO: 926086 - protein, 135 aa, Homo sapiens
MQWRNLSSLQRSLFLWLPPSQTHGEYCQPIADVYLRPRGSSVSSWLMLLNLELTFQGKVVSQHNYYNWECVGSHMKPACLRVSPKAHGVLLLVLHGPRVLKLAGAKKIQDCTHLPLSLLWKVETTAFLALILFKW

SEQ ID NO: 926087 - protein, 157 aa, Homo sapiens
MRNSHNFQTLVFHKGTDTSISEQMYHCMSDGNERGRHRVQEETNAQKCKVTRPMAHNQATEGSKDKRWWEPESLTVNQGTAPPGILPADLVCICGLMSPREQDRIKETAAKKNTQLERKLTQPWKWHWSTDPRLKGLRRSLKESRLRAKWKVTLGLG

SEQ ID NO: 926088 - protein, 147 aa, Homo sapiens
MRGAQKATNVNKLSEVIQGKEESPAQFYERLYEAYHMYTPFDPDSPENQRMIHMALVHQSAEDMRRKLQKQTGLAGKNPSQLLEIASQVFVNRYAVSRKENGKEDGGQSRPHADLFVSCSNQRGPRKETRERGPWERNSAWLSEFAA

SEQ ID NO: 926089 - protein, 143 aa, Homo sapiens
MFVTLLANEFKGIDFSFKDSIFPNYTSLACSMAPTCLRPSTQNLGAVTLSDQGQSLYQWDKPTSCPSPVEKDERPRWPNREVREREMNLETAGWQGRFCRETLHPAAQLAQGQLALAHRANDVYNNQAAASSTPEELQALPVC

SEQ ID NO: 926090 - protein, 139 aa, Homo sapiens
MFALGFGSSVRHSLMDPLGFTPLTPQNREPCPVSPLETRFCLRGTQSPALSDDTTVPASYPDTASFLFPTAYPRGPQTQVGAPRAHPSGLVAGLAVFCPGEKTLYSALGCDVPDAVLSRATPLKVLGRCHMPYSLVPPP

SEQ ID NO: 926091 - protein, 258 aa, Homo sapiens
MKHTAAASHTPGGWEKALPGPPTTRSRGDRESQLLYSDLHHEFCSEAVVLTHCPQLVMEHDHVTRETLNGSQGSQGSHRIAKQKIELNHLTLSILPHQRLQNLPMEESGCSGRHSGCVVTKLTTAALECPSPLTENDRRQCLAESPFNLYLLKDPLHSEGCEIRYQLQRQRGEFGTCLEERGGTPAAAPTRCTDDWCALFHSPHSSKFPSGTGPTGHREIEKWIFEGWTAGQLCSEHVHHRIPAEPMLLPCGSQMLSD

SEQ ID NO: 926092 - protein, 159 aa, Homo sapiens
MSDANMGAPLRGEAARESGRAAGALEKELLAGSPARHLSHSHRCMEGNPISSAKDQVFVTLSVSSPPPPRTQGCGTPVGALHEEKEAGSRCSDGLEPLSGPLRRETPEAFPGPALRMNSSLFSDLGTRLVFGMLSCFVDIFVSPMGARHGASQISHVLP

SEQ ID NO: 926093 - protein, 154 aa, Homo sapiens
MGNLTAWHRCLWRAFVLYYNMVEGKDTWIQFNELVFNNDHLGGAWALALKRRRKQGFCPFGAIILLGIQDFHMVLAVNEWWLSNRGPCRSHLAALMLRGGDLQPQNWGALAKAACNHPECNLSETRRLTFFFTKTVFNGHQQSGPLISVSFESF

SEQ ID NO: 926094 - protein, 132 aa, Homo sapiens
MLLLLVPLNLTPFSLAYWCFLLAVYWDFSWGLSQTTYKWTLHVVWVSSQCGSWVPKKSTSKRTEWKHYPFFTSWPQNLHSITFAIGTGPLRCKDRDHKPCLFIGGVSMSAVRRVCGMRELVAAVLENTTCHG

SEQ ID NO: 926095 - protein, 246 aa, Homo sapiens
MITVITIIIIIIVITIITIITITIISITIITLITITIITITIIIITITIITIITVTIIIIIIIISIIITTIFTIITITIITIIITITITVITVIIITIIITITTITIIIITVSITTICTTIIIIIITITIITIIITIIIIITITSSPSITITITIIAMITIIITITIITIIPFSSSLSSLPLPLSPSPSSSPPSSPSLLPSSSSLPLSSYVIHTVLKLIGNIGQKIHGGGEIENKDSCLIRLMLTS

SEQ ID NO: 926096 - protein, 193 aa, Homo sapiens
MIDYITPSSMFYSLSSRCQGTQLADVSPNRNTSLRESSGNGTAYLVLSTLVTGILMFIFCLPGHNPGIFVLIASGGRHWFFTDSRGVVVDACEVLWMNDHLQDASTRMGDPWLQTPSFFRYGDSDQIHFAKVILLTHVRVSSCSLKGTYSEDRLLGALWCPGMVPWHPVCSSHLQVGAATTSKGKKTEKAETF

SEQ ID NO: 926097 - protein, 278 aa, Homo sapiens
MKFPPFWVIDKGVSPFMFRLRMPEPTGGVTCVPTFTRAHMSEPRLTLHFRTFILMHKARDEDWKTESDDDDTNDKRNKSAVQLWDSPHSNIAKGFTNGIEMSCNKPLVQTALVQIHRKDCSRKPAMKMALFRANTTELYTLPTKKEKCFTYVSIPRGPILLIFQIQAQCLEPMLGGNSECTVNLILGSGPCNAVLILWVGPPVPQELHSADIFADDQVKMRSIGWALIQYDCVLMERENVATGTDMRIGGRPCEDEGRDQGMLPHTKECPRVPAATRN

SEQ ID NO: 926098 - protein, 149 aa, Homo sapiens
MEGEVNQGFLLGLNPLLSNYRDCYQSSGSSHPASLPGSRLVLGVVCTESCDVNHLWVSQLWIPPPVRVDSKALSEKELSIQSVNQHKHISIKINTCGKSTADVCPRMRGKICESSRAYNIEVYGGQVALWAIWFLLQLFNSTAVAQKWL

SEQ ID NO: 926099 - protein, 126 aa, Homo sapiens
MAVLKFSSDNSNICIILVSVTIDYLFPFKLRFSWFLCSNTWSRIGRYFRSSGEVGSMAGYDQGMAGYDQGMPWEDRREGRATLSGSGKGVLEEETMLSDDKEQDCKLGMTCCAFLAFMQTLHSIYG

SEQ ID NO: 926100 - protein, 138 aa, Homo sapiens
MESPHRVPNRELPSGAVRRGPLSSRPQNVRSTESLHHAPGKATDTQCQPVKAARRGAVPCKATGAELPKAMQAHLLHQCALDVRHEVKGDHFRALRFDCSNGFQTCMGPVPPLFWPISPIWNRCIYPVPVSPSYPGSN

SEQ ID NO: 926101 - protein, 141 aa, Homo sapiens
MGSIFVSKNRIDTVEIQYERQKMTHLSWSWQDWKLLWMGQRRPCDEGSREWRMHFEDGGRSHRQKKVGAFWKLEKGIITNKFCTCSTQTQPSIRFLPSIFDSWLVESTDAEPRTHGYRWTAVYQFPTAAAPHKGPLGPADE

SEQ ID NO: 926102 - protein, 229 aa, Homo sapiens
MRLGRPRKGKGCGWRSGFLPHHSPRPKCPHKSFPNDLTPPSRLSPPRNRKDLQDSCDSQGDEAHEDLWLGEGALQRTSAQESWEGFRKECFTNEIISTVNCGHFCRGFTDLRRSASLKLPEEVSEAVFGHLSQFYQELDRTQWFKTKTMHSWSRCSDDQISGTSRQWSCKGPTLSYNQSFILVPTLNVPFLDSCTEDCETLFLPHEKKGSDQLAKPAMKRGSGKAASKP

SEQ ID NO: 926103 - protein, 134 aa, Homo sapiens
MLNVRENARGSRPHSGRWSVPESQQGCGEEDPAAERSAHGAGRLRRCLPGWPLSSARAPLEPRVPIAAPASPTGARRGRHGGIPNLECVQHTWVWTKDMFSTPESSLVPPPVGALPGGNHSSDLYALYSLGAPE

SEQ ID NO: 926104 - protein, 151 aa, Homo sapiens
MTLKGWALGRQEGLHAESTGLDGHQSKQQGLGRAQFWTLGEGGEMAAQGSAHGGSGIPAQERASLVDLSFPGLSFFTFVNAQWTKTSHMATPKLKESNKSPHLLLGEAASAVPEAFYAAVALRGFPADILVAPAEPHLLVEAPLQPVLSWT

SEQ ID NO: 926105 - protein, 170 aa, Homo sapiens
MRVGAAPVTLVKGGWAQGSGARVKESAEVKAPTTKGSRPKGTALPLPLCEDTGKVPSLNQKSGTSPDTESADAQPPERLYLLAATSILPHCRQQHCLQTLPDIPWEAKSPPVTVTGLVTPASFLRREPGWSPFRPSVVALLQSAVLPPRVLCQLLLCSDLSSDVASPQGN

SEQ ID NO: 926106 - protein, 137 aa, Homo sapiens
MTALLVHSTADGKCDENAPLYHGQFPVDPEEASVVDLGWADAVRIPSHFPIWLPLPWVWLGLPSLQGLCVVPGPGEPGYVAESCTHVLHQALLCIGVLSSYGLNHPNSPLPVIYINLVLFSTLSNIYIFLWPICSYR

SEQ ID NO: 926107 - protein, 137 aa, Homo sapiens [sequence omitted]

SEQ ID NO: 926108 - protein, 143 aa, Homo sapiens
MDSLFLLGYKPVQHVTVLNTAGNWAFPDFTLHLSLLPPVGGSNWGVLAGLVKKDVFASLSNMIEALAMIGGRDDGGWDPRVEMRNGKKKSNAGYKGGIFTFEILHNPENASPYFCYVPGKQIIQSRNNYGTTPQLPHFLLQRT

SEQ ID NO: 926109 - protein, 151 aa, Homo sapiens
MGPWAVPPMPTEGLSCGQARPWPIQHQPRSHEWNYIDDDSSSLNVQVTLMQELGSHGLGQLHPCGFAGYSPSPVCFHGLALSVCGFFRCTVQAVGGSTILGSGGQWPLTAPLGRKHAPEVDYVCAVGLGHTCTRFLTFTFEAYASCVPDGM

SEQ ID NO: 926110 - protein, 139 aa, Homo sapiens
MSQKFTGVVEFQMAVNKAGPVVTDNGNFILDWKFDQVHKWGEVNRAARMVPRVVDTGLFIHMAERAYFRMQDGSVNRREQPFWRAVSSSAGSEELRLKSPLPAGLMWTCAGCPRNLKGHMKEHWTFCRITAPLASTESQ

SEQ ID NO: 926111 - protein, 220 aa, Homo sapiens
MGAAVIQLENLNAMGVIGSQGDRDQVTALNRQRQVECSFQNGTWYAPTKLANTFFSICVHKAHLRHSAFSWQGRITPSLSYIRDISTRQLYVTIQFAGIFTAFPFHKISYCSIDNLMLIRPHDQEVETTVDLWWSPEQKALQQVPAAMQAALPLGPYDPADPMISKMSVADSDAVWSFWQGAVEESQQKFLGFWSKALPSSVDNYSFERALGQLLGLNRN

SEQ ID NO: 926112 - protein, 143 aa, Homo sapiens [sequence omitted]

SEQ ID NO: 926113 - protein, 200 aa, Homo sapiens
MSLGCCVHHFWRRGGESCNWHKKDTGHLSQSSGCQCGTGDYEVFQTAGEGGRVDYIVSESGPSAVGLLEFAGGPLQTLFAWMSPVEAAEQQILQNSKCCCLILPLEASSQRGTWLYEVSVGPYLEVPIGSGNGHLAGSGMQQTPCRIRRDGSQQRVCGGGGKQQWWMASESSARAVAIASSNAWVYIPIIVPPVVLSGDR

SEQ ID NO: 926114 - protein, 136 aa, Homo sapiens
MPMFVPTAAVWALLSFEKKEEVCYADSTILSQSDRHLWRQAKWLSFSAFVSHRHQMWAAQETCCFGRSHNDPLCQRHQANRNPRSRSDTNVLMALKQQTSSREWEKNLTDFMGPVVFMNLLVVVQESGACKNLLSK

SEQ ID NO: 926115 - protein, 153 aa, Homo sapiens
MDFGIFSQTTCLQALSRALFLGALLTWWWQEKMRKKQKRKPLINPSDLMRIIHYCENSMAEEQGSQSESQNLKSTKAESAAFSPWLKAQETLANHCCYGNNDRQYPNVNNFLIRVQNGSGDKSLEDKEHSGWPSEVDNDQLRAIIEADPLTTT

SEQ ID NO: 926116 - protein, 191 aa, Homo sapiens
MVCLYQSCENGLTQKVEHKSSENLQPDNAIEEKIPFSEEKFKSAAEICIYKEQPNVNLQDNGKNVSRACQKYSWQPFPSQAQRPKRKRWFNGPGPGSLCSLQPRDLVPCIPVTPYMGKKDQSKAWAVALESGSPRPLQLLYGVEPASAPKSKTEAWEPPPRFQRMYGNTWMSRQKFAARAGPSWKTSTWAV

SEQ ID NO: 926117 - protein, 196 aa, Homo sapiens
MLKHKEQTVRSSCDPGNRIGRCCLGQEPFNTIVCVKHIFSAQTIPKSPLAFISCLCTVSRSAKGEWLWIPSGLSQPGHSPAHAKSLKTFRKKSTALQSPLSQVKKLVQREGCHQPHQSSQQLSKSKSNNQPLDLPTPRPGSTFIKATPVEQWGQICKWIQGSHVGEAMGTVSAESFSSCSVKGSREMGSHHSGPAG

SEQ ID NO: 926118 - protein, 157 aa, Homo sapiens
MLVFLTPAAVNSDCLVKVVSARLFHWSFSKLDLTGLYNLNGCIKNIRDSWEEAKISTLTGVWKKLIPALMDDFVGFKILVEEVTADVVEVAGELKLKVKPGDVFELLQSHEYYINLAEKALAGYERIDFNFERSYLVKILKSIACIEKSFLKGRDNR

SEQ ID NO: 926119 - protein, 134 aa, Homo sapiens
MEVRSSGTDETLVSGECELKVTYQGVLGGSKDWDDLPTNQETPKSAGNYQKLGERCGADSPLQPLEGTLPVDSLSSAFWPPDLRVNQFLLFKPLSMWCSARAAPEMSTYVYILCEKIKYNVLHCTIFSEHIKMK

SEQ ID NO: 926120 - protein, 163 aa, Homo sapiens
MQPALCCTDISLTGCGVILLHTQQSGPWDLPLLTCHIVKLSLRRYLGYQLCSHLSADQRFLGKNDCCISPNRPIYSCTHITAKPKAFVGMSKDSTRCNVIKPKLACWKMRDPREQKGTAPAKAVLDQPAPADLQTGFRYVSQPRETNPAGTMIMDFQPTELRK

SEQ ID NO: 926121 - protein, 147 aa, Homo sapiens
MKRCYPSLAPKHPEEAVSPVEGTEVCAGKAEAGEAESPRSLAGWEGARRKQPRTQTPDRHSRKRGRYRSHGLHEWRRDALKSGGRGQEGQVDRQELVGKSDLLGASSRRRSREVLTTWEVTLVVCLVCGLGSLLVCWAQHRKQVRTS

SEQ ID NO: 926122 - protein, 136 aa, Homo sapiens
MTGFVDPAQPAGRDLHGSGKSPRAIRAEDQIRVLTRRLTGLKRESLLCNIIITIIINIRSSSINITTAASYGPLICAKLCAKHFACFILLNHDNNPVDTPFLYDVTFKQLVPEVQASGLPSNYFHCKISTDAQLLC

SEQ ID NO: 926123 - protein, 151 aa, Homo sapiens
MADSVDSYSFDLLSPSLQAELSLAVHHCCLPPSQTCCCLLSLQIQQGVHCADPVRQPLPLLIGLKACHCSYTAKCPGQRTQALPPSWKQPTTILEAAHHHLGSSGSKDPPVTVMLIKCGYLEILGLTCHYSCECFLLWEDASGFLVVLLIP

SEQ ID NO: 926124 - protein, 164 aa, Homo sapiens
MAVAVYKREKSGKCECFLYTHYHLKRTCSSGNQKKKPIRSQFGPQRGELKTSAGLLTLSPCGSSSPCANITMDWYHLWTRGRWSITSHCYGPYIVSSFQNTEGSMEKGNSPVQKPDRHHLSRVTRTISSVRIMRVFFANHKSNTSLVDSHHHCDSFDISLFESI

SEQ ID NO: 926125 - protein, 160 aa, Homo sapiens
MLKETGSQYLKVWGPFYYFQALPICFVLLKKRKHKTKLHGLETQKHRPLDSSLGQRAIIFFPMPQFPSLSQSKGPGRLPYPQQPLGPRHLPRRKSLLPLGSSLEVALEAALWLEAVSCGKHLHSVGQVTQGFHLITHGATCGPGALKFRALHSSAPMAVT

SEQ ID NO: 926126 - protein, 145 aa, Homo sapiens
MCLQAQSKALTLFDSVKPERGEDAAEETLETSRGWFMRSMEKSHLHNIKMQDEAASADGEAAASSPEDLTKNIDKDIATATLTFNNHYPDQSAAINIELPPSVREAFQEQRLQDILEAEVGSHSVSFLLHCVGQSWSQGQQRIKG

SEQ ID NO: 926127 - protein, 187 aa, Homo sapiens
MAQGEVLSSFLKQDPPLPGANCLCTVLRVMQPPLLKCSSVCIEIHLCDSHINYEAVQENPEINMNWDPQDPGGPCDEEGACHERDRRFHPLHHVARDPGNQLSLAAAPIENRATSGTVKCRSIGDPTDPPLAMDVRFASILGEAATCFPRLQGVLRDLLLRKSWRDCPPVRLASILSRFSSGHDRTK

SEQ ID NO: 926128 - protein, 190 aa, Homo sapiens
MYNDGAVLADTDAEKVEGKEISRHCKMQIEATIEFRATVMEEHEKYEEANHRDLKEAGLQTLGFLGKGVPITANVIKCKGPEELGRQIPEIARKPEDGMDEDEVYVGHGRKVGPSWGVTSPTVADGWLELRLLPDFSPTSALLPTCIPFLFSCRYILNLSQDLGMPYTDLGPTLDHVRVDAGSQPADEPA

SEQ ID NO: 926129 - protein, 148 aa, Homo sapiens
MRMDHNPANTLISDLFSAERRENRLLLFSATNFVVIGYDSPNPCSTLCLRKLSLLNHICKQLGVHQPAQFSQRGSPQDMGQMQHTGPYRNRTGEANMMHLRVICVIVCFSSWFLFTPRNIFFYGCSTVCLSIRQLKNIWIGSRWSDCE

SEQ ID NO: 926130 - protein, 192 aa, Homo sapiens
MVRCSKEKGQLGSSPGLTQHIGQGCKCHSKKLNPCYVKEAKCCNGEGPVYRNATEKSSYNKNEKISWRLRSSGVTQGRQFTQVLGQFTAARSRASTSLWAHNALLLTGKLLDMTPRFCDLLDHPYDTKTLNVKRQVQNKQMDTADSRRTQTLISYTKMKGYQEKKFLESAFMLKKISRFKWIQYVNLLKNFV

SEQ ID NO: 926131 - protein, 146 aa, Homo sapiens
MEEEVLKVCGGRKTVFLVMTKSFLTIMLNSNNDYSVWQNLLAQGHASIDAFSLTGNYENEVIIFQGAAAAPFPGVSPGPFTSGNVSSPTHGPIPLFSASFAGARLTIPLCRNEHRKGVMSPLYFLLDTLLSALDVCECRKTFLRRA

SEQ ID NO: 926132 - protein, 136 aa, Homo sapiens
MRNFPEGTRVNGFHEEPASTITFRNATCQPHLQSSKAWMAREDLGFPGISKRNEHSCPAQGILVTAFDVPDAGAQPVDAVLDRATPHVRPCPSKKQFDILSASSWPNDCSTAAKCTNEKSWQSVGVPHVPRAWEAH

SEQ ID NO: 926133 - protein, 142 aa, Homo sapiens
MICWAIEMYITIGLDWVIYKGKRFNWLTVSQGWGGLRTLTIVVEGEGEASTFFTRQQEREGQGKWPLIKLTDLHFVHGPTNAVLYHGTHTHQQVLPCSCMSVHTAGACCGSDFDPELSTHRRHDENSQGAIESCGFPMNEML

SEQ ID NO: 926134 - protein, 146 aa, Homo sapiens
MEDRDDKYTLRAVAEKQTMWFLDGWCSHHTQPAPGGELAGGSLLMVEGMTARDPLGRAASGQNSRLLLLLFLFLFEELLLAYLPKLKSKRGREQTVSNSLYCMRTKFKNVYTVAKISSTQHSKIQIYCIHQKGWPCNSRIIYPILR

SEQ ID NO: 926135 - protein, 145 aa, Homo sapiens
MACVDLVTTELGDSPGQPRKCLASWWPLQSPKKREQGSDVLLAQAPDPGWLGKPPLPGGSSIILLEKQNTKQNKEFNPGSPPLMAEGVEKWPNLRMCVTWASEHFLRALLPHTSSAAEPCCNELIAIVTLNTNSTGYFNGHIALN

SEQ ID NO: 926136 - protein, 188 aa, Homo sapiens
MLMLQVGRNCDSASRAGLNLEHGPPVGLHSIWTVPESLSIGASMLHSCGRSPSYIFTRVPEGNKDTFSKLCPLLLLLLLLYFAQLSKSISPPALYPGISQTVGILFCLLLGAIPTHCSFACCGQGLLVYGYSSNCSHESLAYSDFPSYGIWEALQIQEKRGSSDGRHCLVRTLISLGLKHEMFSVEIF

SEQ ID NO: 926137 - protein, 136 aa, Homo sapiens [sequence omitted]

SEQ ID NO: 926138 - protein, 147 aa, Homo sapiens
MFRKSQCNTAAHCYKQTEKTVMTWYLKKALPKREYESDRQTEPREFSFLQTAKLQKDAHQIIVRLENIQKSLSSAMCRIIKCNISMTSVVDNFQPCQKSDCVCSTSNKVKMNYASEGTAFESENLDFSIFKLQYDLRRNTFKEIAMD

SEQ ID NO: 926139 - protein, 191 aa, Homo sapiens
MVAIACILHRNSTVMRIRSGNSEGRTVMKSTRNTSSKCMHVDLQLEEPLPSKKVDSGEEMTSSPNRFWVTSAASFRNYSKVGSGGIGKNCFKVHMEPKRSLHRQVYPKLNCDLATALQPRQQREILCQEEGEEGEGGEEEEEEEEGEEGEGEGKEEEEEGEEEDEEKEKMKKRDLTDEDLRPTFPGFPRKQ

SEQ ID NO: 926140 - protein, 196 aa, Homo sapiens
MGRNQSRKAENSKNQSASSPPKERSSSPATEQSWTENDFDEWREEGFRRSVITNFSELKEDVRNHREEAKNLEERLDEWLTRINRIEKPLNDLMELKTMAQELRDTCTSFSSRFNQLKERVSVIEDQMNEMKQEEKFREERIKRNEQSLQEIWGYVKRPNLCLIGVPESDGENGTKLENTLQDIIQENFPNLIQPS

SEQ ID NO: 926141 - protein, 133 aa, Homo sapiens
MGLPCPLQCELHIVTSFQTIQNGKVEKPSNFTVEKPDKFHLRQVIKVNINSDKLCRYDIQLSWHPLLKRQDNFPIDLSWHLIFIFNATARGCKRKPKAKGNLGFINNHSQGVSASFLGQTCPLGTSTTPEHCH

SEQ ID NO: 926142 - protein, 136 aa, Homo sapiens
MYASGAGNCLFAGLAPTWGSLKTSTLRTCPLGAASPGKGPQYAQYDNNYVKVEYKTEICEFRTDISTIGNAYELSMGPLATTVLFSASRNVTALGISSILMDVRWYLIVASICISLAINDDCLTLKQFLEMPLNSC

SEQ ID NO: 926143 - protein, 245 aa, Homo sapiens
MEETYLISRKNLLLGPWFGVIIKIRAWDPRTGLSPGLEPTYHEGDDNTVTNVPVYTGLRGFPGRGPFGPQTRTFLEMAGHMTAASRGQGEYPWASGLAQVDNPCSTTQTTHKLPATPTSQSLFDCVVIGGTDVSSLNFSPLVKMELNIPTSSLSTRPCCPITIPENLQPFEICQEYSTDSTLQSPAKMPSIARGDKGMSINLVEDVKPGKGLEALHDTHFGSEEEVREKLGNGNKGKGEFERAYY

SEQ ID NO: 926144 - protein, 313 aa, Homo sapiens
MFFVECYQCKPLENDKSEIFKSSVELSTALPAHPIAIIWPIAGTTALIYTVVDETDVKTDAFRTVVWGSVFNGMLNDDNRRFETFEVNSFEQFCINYANEKLQQQFNSHVFKLEQEEYMKEQIPWTLIDFYDNQPCIDLIEAKLGILDLLDEECGPAGCDSAPVTLAFTLILPSTSSVCQPAGSAAPTGPKGASPHGMRARRGRILNIALPYLVVLQVPKGTDQNWAQKLYDRHSSSQHFQKPRMSNTAFIIVHFADKVEYLSDGFLEKNRDTVYEEQINILKASKGFQNLKRSGARKTLLYSLSSRLSFINS

SEQ ID NO: 926145 - protein, 138 aa, Homo sapiens
MREKTKLLKEKNEKERQDFVAEKLDQQFRERCEELRVELLSIHQKKVCEERKAQIAFNEELSRQKLVEEQMFSKLWEEDRLAKEKREAQEARRQKELMENTRLGLNAQITSIKAQRQATQLLKEEEARLVNLILIPGV

SEQ ID NO: 926146 - protein, 143 aa, Homo sapiens
MHQKRAQLQDLIERKQSSHTKGGDPKRVAIASLKAWVYIPIIVPLTVSGYCPWMNDVATHWDRGDCAWFWLGQRCGLFVLRGVSKVLYLLLNKLNLKCLWDIQKKISRRPFDIQIWIPALQAIWSLSQLSNSAVVAKVVIENM

SEQ ID NO: 926147 - protein, 143 aa, Homo sapiens
MHQKRAQLQDLIERKQSSHTKGGDPKRVAIAGLKAWVYIPIIVPLTVSGYCPWMNDVATHWDRGDCAWFWLGQRCGLFVLRGVSKILYLLLNKLNLKCLWDIQKKISRRPFDIQIWIPALQAIWSLSQLSNSAVVAKVVIENM

SEQ ID NO: 926148 - protein, 141 aa, Homo sapiens
MLLRLIQTVGLPRDFLQLSHGTHPPSSPSHALKLSDFPFYDPWKKTVCFQKAHVIREGFLRRWPLNLALKTGEMAFKPGLEDWGEFQQDELDVERGFQERHSQVWKPEEHFRKGKQPVCRAENGGSAAGKGWGWTGMKGKD

SEQ ID NO: 926149 - protein, 266 aa, Homo sapiens
MTKFILSICRPGVIGHVPDGQRHVLEECAVSFRLGQVISMHIQATRFCRKACCDTRFLDLPVLALEFQPPACILQGKGSKLYAAPQSSSVAYLCLVLLVGAGMGEPLSSLLFQHGSCTHLPLMWTVGLNGSSGCPKCSGCTDGPVGSCCLVDGLKKLLIPTAPDDHKSSEGSCGQEWITTTFYSDTKASCNLNCNHTLQWRQHMQQKQNLHLPMKPLKNLSPHPGTDLNEKAVSKSPRKMVHCEAGQFPLLTHLHSFVDCERMLCS

SEQ ID NO: 926150 - protein, 148 aa, Homo sapiens
MVRVCLHSFSRGLGPTRFPPIPPVSARMLSAAKPLNRFHRPELGHILTPQLQAELEKWVNGTVTSAEGNGLFSKEDSSLTGGPNTCCTLLVVSLKSCLPAVPVSKQLYSPSIECESYLQRGGTLRQPSLADFNRGLMGGDWVMGADPS

SEQ ID NO: 926151 - protein, 136 aa, Homo sapiens
MRAIPSKEAGPQSCNRMKLNPVNNLHEPEGSFSPRASSRNTAGNTLTLTQRALTSDLQNCLKPISQNNDGSPGLLSPLHTVIQEPGFLQSCPFAILYTLPFFPGGLFHSSQVEGEKAWQLLGCLKPSHTFQTLILS

SEQ ID NO: 926152 - protein, 159 aa, Homo sapiens
MGIPWPSGQISGTCSKLLGEEVLEEPLAAAIRAFGVLVCWRCGWGLSHSGGKELQLRNTLLLGCLYSIIVHLEGPTQEAKQGKLKLKGAPKCQGLSVATLPPGLSRSEEAIVLSNKYSLMPLEERMYKKHAPVSASSEGFRLLPLMVEGERETECVEII

SEQ ID NO: 926153 - protein, 165 aa, Homo sapiens
MLGPPWLLLASLTCCISAGEIGTGSKEEVFHADVETAKRPWIFGGYMCRFVTQVSCMMLGFGIQLIPSPAKNKPTNQNENLKNHISMLQVNFHPSHQGLAFYNSHPDGAVPTSLSLHGPIFSHNLTSFYVNMWFFFARHSCMSWTGTEHADMAHPAYLRLFFQLT

SEQ ID NO: 926154 - protein, 227 aa, Homo sapiens
MRMLELTRPTPESCRSTDTHTNKSRRQGNQDKHGCEEQWQRGIERSRGARVTEEGELAELVNGVDVGETEDGSQASGLVASAPRCNPGLPDSADAFPTDTHSFWLYKWQAANSSSSQRQGSRLNSMQLSQVWPLLRTSVPLPDLQPQGSCPVSGFSVVTVVRKICPFAKTLRQGLDLSRIFLSCSASTKANSLTGGHSVRKINAVSLIPSPRSLSEMAAARQKRFED

SEQ ID NO: 926155 - protein, 172 aa, Homo sapiens
MPLWDSNKGRTSNFCLLPLGPSCQTVGKPKQKGPHGGELRPLANSLIELLGNEDQLASHVKMQILRSHFKLIESETLEIHNLGYRECLGPAKVILLTDRETVLRTWVSKLLARLYDQQDMSKLFGKTLSKVTYFTYPSHSLVSIKGSFECLLGCTELLFTKASEGQKKGLTQ

SEQ ID NO: 926156 - protein, 175 aa, Homo sapiens
MFDSTRDAEDNDLALTKLMVYWHLLLLLLLLLLLLLLLLLLLSPRPLCKESYLGVVNTVLQAQRSDFIAIISTANVYKKPRNQETKHKDWSKVFQKGGCKQAGGEAEILICIAGPFKAQKLVPSGTFESEDILIVQFPPMTENIWTQEGEHHTLGHVVGWGDGGGIALRDIPNVK

SEQ ID NO: 926157 - protein, 134 aa, Homo sapiens
MVGAKGPFYRIPRQGDVGNLSDQYDPVIKVNGKLQQPNPQITTNGPDPSEMKSQFYNVLLLISIKLHVRAEETSPKSGVSLVAIAWLPCREQLSVHPLACCVKSCGMVSMMGLISLLQLHTLVPLLALEPCFEL

SEQ ID NO: 926158 - protein, 159 aa, Homo sapiens
MKRNETRKCKSKQCQVGEECAGVKTLSVHLLLIRRSLKYFLQLFIVEDLKKSSCKEWVFHPDLKDEKMQVHPKRTRKHWGTRNYGEDHESRTSRGYSRSRKEAGVWLDASSFLESYRRQAGGCRQGAAPQQRALNETSHSNSYEECEAPKVEKAKSAGY

SEQ ID NO: 926159 - protein, 134 aa, Homo sapiens
MWKCLKTCEVVSFYKWNVSARNVCQIQNEAEKQQVGYIQRTVRFQGYQGYRMEEAVSVNHPCGEATEEINMTVLWSLPQARHKAYRGHEKTSLEDMLFNFYTKRLKIASSRGSTATIRKSCHHSHPTTFMSFES

SEQ ID NO: 926160 - protein, 145 aa, Homo sapiens
MVNVPFRLLKVSEAQLIFSKSGQGKASAKAQLHQCKSSLRMPIYPRDKLTALSFGAFLLPIEDKGKEAGLPHRGWFLDLLGSLIPDVGFYDQQVGKPVMFVLLPSEWQLPSGPGKTIAAIITTDQMWPNESEPGFFHEWAVVEQW

SEQ ID NO: 926161 - protein, 140 aa, Homo sapiens
MLSHSPKCIHPAILSSSSREERGGNMRPSGCRKKIFENADVRSNRRQPWVGIRASSRCTLETLTSARPLLASSPEPRGPRGDGSGGSVLKMSVPAVAKLSSWLCFSCCSRPCRLQAWFLPPWRVRPYFSNSYPNKLLTLS

SEQ ID NO: 926162 - protein, 134 aa, Homo sapiens
MYVGLVHKGGTIGSGGLPGYKQFKDFLTGNRLKELLSKDLESIEKNVWVMIRVCEDQGFIMPMKPPEWSTLSSSETSHIVVRGSASMIAPSWLLSSSYDPPRCSSSSRLSSPWQNFSNHLCTVRSLAVPGPSVF

SEQ ID NO: 926163 - protein, 125 aa, Homo sapiens
MRLRIQIRPEFACKTQEVREPLMRHQNTELRPVGTRLHDCENRHHDVLLGYRFFSQIVLPGAPNGLLPQTWSNAIKAYSEAVSRPPGSKATALGYCQRHLQNSFPPPEGNLREFLLVVLKCLSVH

SEQ ID NO: 926164 - protein, 156 aa, Homo sapiens
MLFKASSASKSAILALTLTILKLVLKSHDCYFSHTRKQPSRCSPEVQLLTIIAYRSLMITMFLDERLPLGLSENHQGDVCRTRNVWLADLVFHGRYSLNRFGPPVSQLPGTVSGAQGAGGEHSGHPAISGGMEVSGGSAMTANSSGGRQVEAQLEP

SEQ ID NO: 926165 - protein, 150 aa, Homo sapiens [sequence omitted]

SEQ ID NO: 926166 - protein, 147 aa, Homo sapiens
MLPVSKVKSRARLCLYAFIFAHLRKLREEVKMSMLTGVWKKFISTHVDDFVGFNMSVKEVLADVVEITRELKLEVEPKDVPELLPSHEKTEMESTPGEDAVNIAEMATKGLEYYITLVNKAVVGFERIGSNHERNSTVQRYMSSFVT

SEQ ID NO: 926167 - protein, 135 aa, Homo sapiens
MQSPDNTWAPGFSKTLVTLENIYGVSIGLIATTLIVQVLYFVHFGKPTSDTAVIIHADRKSSHATCLSGSIPHLFPHHPFLDLRAPCILLLWPTKASLPRQQECVFCPSVPKLYFVLKNFNPIEMEISNIYLLLT

SEQ ID NO: 926168 - protein, 153 aa, Homo sapiens
MRSHCSALTYKCGHAVFGYLFLCQFAEDNGFQLLQCSCKGHDLLSVSDIKKKLEKQEGTLEMTPSQIVDIAFSVYSSSEAKKLRPGTIYLGMVGKIPHQRKDGNSGKALGHSVCTVMRKITGSSFAPKRKDSRSRRRRRCQGEGPLADGGRGL

SEQ ID NO: 926169 - protein, 156 aa, Homo sapiens
MAKRGQGRALAIVSESTRPKPWQLTRGLGPVGAQKSRIELWESLPRFQRICRRKFAAGVVPSWRMSARTVQRGNGGLKPPHRVSTGALPGGAVRRGPLSSRPQNGRSTNSLRHAPGKAKDASCQPLKAARGGALPCKVTGWSCSKPWEPASCISVA

SEQ ID NO: 926170 - protein, 202 aa, Homo sapiens
MEKTLNCIYLEIFELSYLDLLNGFDQNVNSDIDNKVQAEVVSDRDEELAGNWSKGHSCYAKTLMAFCPCPRELWNIELERHDLGYLMEEISKWQSIQEEAEHKILKNLQADYAIEKKTLFSGEKFKLAAEICISNEKPSVNQQDNGEISPGHVRDLHSSHTYHSPGDLRGKNGFLAGPRVPLFYEALGQRTLHPSCSSSSHG

SEQ ID NO: 926171 - protein, 141 aa, Homo sapiens
MGRNQCKKTENSKNQNTSSPPKDHNSSPAREQNWIENEFDELTEVGFRRWIINSSELKEHVLIQCKEAKNLEKRLDELLTRITSLEKNINDLMELKNIARELHDAYTSINSQIDQAEERISEVADQLCEIKKYREHHKDTP

SEQ ID NO: 926172 - protein, 160 aa, Homo sapiens
MWIQRGLWRYLHCAGLQACLTFALEGDTLSIFLDYKQTSSFLQRDTLSLYSKKIDARSWSLAEPTNGDPMGIHRQKMEFYNKRSTVLAVKSKWLEKSIQSIPSSEQAQEGGKPGTVVRLRREQDDHRDGCRPLYPSSCNLILGMGLEARQGDGANLVENQ

SEQ ID NO: 926173 - protein, 139 aa, Homo sapiens
MAEGEEASLRWKQARESGFVKVELSDTYKTIKSHRMSLTIMKTSWGILPPRSNYLPPGIGDTCEGFLHEYFHVTGVWCTNGCVIQVAESAGKRAMMAAAGKHFNWAAEAALQVGATRSLGQYERMSKKFMCETYVMISK

SEQ ID NO: 926174 - protein, 142 aa, Homo sapiens
MLSFPLPPTPRQALVCDVPLTVSMMMVLHKDIISHLPSPSNKQHMSWNLKNMVEMIGFRVSITVIGQRNDAMTEVEGVSQSQSRQDPRCCHIPCNTAPSTIFKLWSMKELGKIPRFMTSEKCTHTKMQANLKNIIQTESTHI

SEQ ID NO: 926175 - protein, 146 aa, Homo sapiens
MLPWLGLTGVPEGAGCRDARVLHRGGQPQLHPGAPTRPPWKMQGSHLSPAPACFLEQEAQIHSCNLGGCGPTQEGRAPACCIEKEAWVCSCSLGSCIGRGAPVPTQKGQGSQWLHGVCSPSRAFLLQLFPHIGVHCFLAFILWSRE

SEQ ID NO: 926176 - protein, 137 aa, Homo sapiens
MVHWRSNDESEQAPIRPEVQASVNKIQKHKMKELKEHSMGRNRKARWENISTMQARDDSTRVQNGNSRNGDIIDMYESLSAEGEAALPRASEFLETLKGTAEACLSYANQPIPNHCLIEFSHTKPMFPLLLSQDQCL

SEQ ID NO: 926177 - protein, 170 aa, Homo sapiens
MVLVEEGRLSEGHRSSLLTSFFCPSSAPRQPRNDFEESKSSVEKVTADVVKIARELELEMDPEDVTELLQSHDKPQMDEELLLMNEQRKWFLEMASTPGEDVVNIVEMTAKDVDYYVNLVDKAVTSFERTDSSFEGSSTVDKLLSNSTKCYREIFCERKRQLMQQTSLWS

SEQ ID NO: 926178 - protein, 221 aa, Homo sapiens
MRSEFLPSGGFMVSLASGVKLQTFVTFTVSVTAVKVARVELFVPSGGFVVSLASGVKLQTFTWILHQGRRWSCLPVPHPAPALLSPWVVDGTGRCGAGGGAGQGGLGLAGAHRVGEAQAWQAAGPEPCPAGRQLRPREKSSIAAAGPGAKPLTARAGGAHWLLERGARGHPRLPRTHAGPQAPRAARVPDHASPSTPSRKLREPAPALASPERGSHSAAVG

SEQ ID NO: 926179 - protein, 242 aa, Homo sapiens
MRTQSKRRLEAKKEQRQKNFVDLACECSAVICCRVTPKQKAMVVDLVKRYKKAITLAIGDGANDVNMIKTAHIGVGISGQEGMQAVMSSDYSFAQFRYLQRLLLVHGRWSYIRMCKFLRYFFYKNFAFTLVHFWYSFFNGYSAQTAYEDWFITLYNVLYTSLPVLLMGLLDQIQKHRKRLKAEEQWQRRQQVFRRGVSTRRSAYAFSHQRGYADLISSGRSIRKKRSPLDAIVADGTAEPSY

SEQ ID NO: 926180 - protein, 438 aa, Homo sapiens
MVSLASGVKLQTFVVSVTAVKVARLELFVPSGGFVVSLASGVKLQTFTVSVTAVKVARVELFVPSGGFVVSLASGVKLQTFTVSVTAVKVARLQLFVPSGGFVVSLASGVKLQTFTVSVTAVKVARVELFVPSGGFVVSLASGVKLQTFTVSVTAVKVARVELFVPSGGFVVSLASGVKLQTFTVSVTAVKVARLQLFVPSGGFVVSLASGVKLQTFTVSVTAVKVARVELFVPSGGFVVSLASGVKLQTFTVSVTAVKVARVELFVPSGGFVVSLASGVKLQTFTVSVTAVKVARVELFVPSGGFVVSLASGVKLQTFTVSVTAVKVARLQLFVPSGGFVVSLASGVKLQTFTVSVTAVKVARVELFVPSGGFVVSLASGVKLQTFTVSVTAVNVARLELFIPSGGFVVSLASGVKLQTFTVSVTAHRGSVDPKSEQ

SEQ ID NO: 926181 - protein, 124 aa, Homo sapiens
MLSTIHSETNELGETSGPLECLRRQLVSCHRKGLWKFAKEVREVCLLSFIYLRSVWSFRDDKLLSPYVPTPNFWEIFHLLQLGSHSLVVQSAVTCPSERKKTGKSLLPHGNDLCWTSWKVQLSG

SEQ ID NO: 926182 - protein, 221 aa, Homo sapiens
MTRRLSSLLCAPVLFRVTSAFTWQEDCLAFLVQTFYNSAGDKITGKYKKQGGNVHSNDKLAEGSKFYISKPSKNKGVIKTFTDEQKLREVIFSRLALQEILKGILQHKMREPYMLNPHEEIKSMVKNVQAISKEQETSQDSVKICPQIRNYDIGRYLLYLVTLKSLSSVNGVQENHEEIGSEAWYAEGRLKQVIKELTSHLLEDNASVSKRHPEFIADKDA

SEQ ID NO: 926183 - protein, 146 aa, Homo sapiens
METEVGESRTDQGEGMLRPEGEETKELHSVGRGRRRQWEERDVPKREYCAATKYAALISLQGNLPHREKLVHCVLHILICFSPHREPPAPPLHSSSCSQSITEQSECSFALKISICWASLRLLLPRPPSSPHSSHSCMVLFINKWI

SEQ ID NO: 926184 - protein, 143 aa, Homo sapiens
MRKERFGDTNTETHREGNGTTEAEIGVMCLQDKEVHGWFVPADIERGKEGSIPSVLRECLDWSRRFNIQSTHQGRLCRQPFTTYRRSSRNRCFLVFCQECQHQITPKYHSFPRELDRTVLSGLEPQLALNTASTHTLRRTTVD

SEQ ID NO: 926185 - protein, 166 aa, Homo sapiens
MQATTQGEDPRQAHTCPAGLLLPLPRAFPSAIALKAQIPQGRIRKLALQEVHYLPPIIPGRSELGMDNADNIESHAEKERNQKGSEGEAVGTQATILLHTIATGFTSCYPHFCDTGSTLKFLGESFQLAVAVRHEPGFMEKSLIAGLGYKMGQECSYPHMCGTPDK

SEQ ID NO: 926186 - protein, 140 aa, Homo sapiens
MPSLFKPCQKARADQCQEDKSHHQKLQKVKEIHQERQVKVEAGSPLSLRGAASNARIANFLFPPPHPKFAYEKNRKQRVELIDKDPSCSNIYDSFNYICPQFPDVHSLPKRRDFSLETKLDSYKYVLNFTGPVPYGNTYD

SEQ ID NO: 926187 - protein, 133 aa, Homo sapiens
MRKPSGVIYLCCQPLAACFPLHPSALEHEAVPYCVLLEQAWSPHPPGFDLSTINHTHTENPPTAPLFSIYVLFITVHYSKQNCANGAFSRNIVLISAWIKGKTDLQTWLGGCLVEERFQVESGSTVRASTASR

SEQ ID NO: 926188 - protein, 130 aa, Homo sapiens
MCTMCSSYSKRQESIGKLPVMNWGLVTLTLERIIFTRLSTFLAAFVVSYGGPGKHHSAKVILDDNFTNTFEYSYVEDIMLDSGDMKRSKIQHLLQSNSQCNEDDSKSRGRSPTGRIMEGHRRDLQSRHRP

SEQ ID NO: 926189 - protein, 141 aa, Homo sapiens
MIKLLRAKGGSSNPWQIKLHDECTSLSSRFDQLEERVSVMEDQMNEMKREEKFREKRIKRNEQSLQEIWDYVKRPNLRLIGVPESDGVNGTKLENTLQDIIQENFPNLARQANFQIQEIQRMPQRYSSRRATQFGKDVSTV

SEQ ID NO: 926190 - protein, 152 aa, Homo sapiens
MSDEDNKCQRQGRHLGQVGILLNQVQVLLNRQWESKVVFEQCSDEGVNSEDIGEIMEGGKQEQSPQEERSVAVQGKKDEDSHWGGSSGDEEEWTDMGSTLEVESTGLADGLELHKGKSAHRLLTTAGKKLGANVAKHVTDAPPYAAQGLHLV

SEQ ID NO: 926191 - protein, 172 aa, Homo sapiens
MDVTLLDEHGKPFWCFSSPVCLRSPATPSDSSSFLGQTYNVDYVDAEGRVHVELVWIRETEEYLIVNLVLYLMTWPLSLWRYVYDSEHVRVQNKEPEDSNQVKMGDRYYVLAPKNERVKGFLLLTPSSTLLSSMTLGQSPWEERNLKCGQMLWDPGSEDGTNGTTGEMRKGL

SEQ ID NO: 926192 - protein, 138 aa, Homo sapiens
MGCTHCLTSPNEMNPVPQLEMQKSPTFCISLTGSCRPELFLFGHLVRTSESEFPAGPWMVPLAVRPSAENPGVSHPPLTAQESPENLESKQRKGQKDVPALGNNSSSTYRVRGVRWGIVRTGVRGVVGSPVRNGPERA

SEQ ID NO: 926193 - protein, 151 aa, Homo sapiens
MAYLETKIWAPDVLIAIGVAPIPGRLSDVVLLKICAVLVNPRERMKTLQEAVESRGDAEEGMGNTEALASASQIGHMLPENEGEERGERGNVEKVQRVVSVQATKPAVPPGGQSPLRIHLPTETPSFLRAPFPPLPGSGSLVLGNGLVSRP

SEQ ID NO: 926194 - protein, 136 aa, Homo sapiens
MPIMSLTCVDEREPSLCPCPNRNKNQSHVALPLLKPFWAHMGAGPALSPMVTTTILDRSCWRAADQGVIYTLTEVSLVKDSITQLAGFSQRQSLSWPTPALFAHLQRLLKHWQWSGLVVSPVATTLLSYPRLPSVG

SEQ ID NO: 926195 - protein, 160 aa, Homo sapiens
MPLKPQQADSAQGIRQGIVSFSLLHNTAVQDCKVIDVSSRPTNYSPPKVPVPHRASPCSGSMWASQRVYGKAIKKTNYFSQGLLPEAMTEFVFEYNLLFPQQEHDGVVCVPERERKRERESAPVERLWNSEIIKFHYLLSRGTAAVNSRVNGYVGRPTDF

SEQ ID NO: 926196 - protein, 142 aa, Homo sapiens
MKVTLKTRPFCWEQKMSRAVSQGRVCGRTGEEMKEEGRADNVGIQQAAFHVVIQGLKHLLPVSPQALGSSVDSDALDADEKKREREREEDHCGRILWVSPKRKNQYFCLQSLTGTITWLHLPVRDWDPQTSHVLSRRRKMML

SEQ ID NO: 926197 - protein, 170 aa, Homo sapiens
MFLINYPQLCGYKLRGEKGMKKPGYWVIAGQGRFRGMLALGHFLLQSGGPRDIRLAGTAQGPPTPLRIGRVMMVSKSKTLVPSLRYKGDKGEACRIHLSVTKSRDPQKERGIDVENPLSSSSSHSSEMEEVWKHVGHWLLRPGPPLSLLISSFGNNQSFAKSNERRLKKS

SEQ ID NO: 926198 - protein, 145 aa, Homo sapiens
MKTTKTHTRKNRQPNIPTYSKFSALPSSNTYSPVHCYGEIMEDDGVTRRGLLEVIKSESSTLMNGLLPYKRGGKEYPSDFVLFPSTSRHVRMQQESPQQTPDLRPGFWTSEPPEFYSQVAQYHCGIPSPPVLQSHETYSETLVEH

SEQ ID NO: 926199 - protein, 144 aa, Homo sapiens
MYVPLKNFLLILVKSVCVFSKICDVATPKFVFVSPPKFRCRAVRSPSHVFRQNTCVSELLPSVTWQESLGKTGRVVPRMRIAAADHDGTLENEEEETAQSVSQLVIDTHLGFPSLRELFRLGFHHGTTVISSIETVYKSIETAA

SEQ ID NO: 926200 - protein, 151 aa, Homo sapiens
MTTPCIALIPSQLCARAITILCQDKHVDQRDRIESRYRPVPIWSTDFQQRFVGCTESITLASDQLLVRLQGAFTHSRKQSGTQFAAVGKRLSWGSYYRNPEFLARSQMYGIRFPLAKQKLVVTVQETGLRSKEIQTPTEKDEMPELGTDVA

SEQ ID NO: 926201 - protein, 218 aa, Homo sapiens
MVRALGQSVAIPDQTEGGAQAVMLPHLLLPPCGAQFLTGHGTVLPVNPCPQIVHDPLLNLLMNLLICPAEVVFTFGALHVIAASILLNADVVFGTVFSVSTTVVGCFRVVCTLLEPFSDGDAVCGCVIYLMTLETEDLVAPIALYSVSSRLLYPNNHEAVCTRAQLELVMTLHIVPEEVAPVFLPQFFIGKQWKHKVLWCMEWDSPEPCKRLPHPHHP

SEQ ID NO: 926202 - protein, 146 aa, Homo sapiens
MQMYDLDIQKNFKIHSHCLRQQNICLPEDLDPKQIATDTKMKGEGIHPISSSKQLLACSREYRCQWPRADGYQALLNAGSSSLYPGAAFLAHWSACSLGYKTLWAGVLLGPGVVTLRHLGECGEISRFPVTCMLNFSVCLSYKLYS

SEQ ID NO: 926203 - protein, 124 aa, Homo sapiens
MMSRARFAECGRRVLLDVGIAFSEFLNSKRALRFLKSEEDRKTWESLELPRDLLNGCDQNVDGDMDNNIQAEVVSYGDEELVGNWSKGHSCCVLAKRLAAFCTSCPRDLWNFELERDDLRDLHK

SEQ ID NO: 926204 - protein, 156 aa, Homo sapiens
MVIPIKYKLVLLLFLFLWESYLAYVWKPKDIADTIPIIKQLRETSPTPQMDNITMHDSSDKTFSSTPGLYFFDAIAPRPHYDNKNVSRHCQLSFRGEIIPDEEPLIQNHLRLGGPLGKEGKSLGPQLLGGAPATDSLPPDFPNRRKKLPTITLSLC

SEQ ID NO: 926205 - protein, 121 aa, Homo sapiens
MYLGRRWLFLYLCPFPSSALPTFCALLHAHTSFCMINGLGHAAHSLAYETFTLSAEGARDPPKATECSICSDCQHPATATTGASVSMDTGNPAPTCTLPQVQVHTGMQQLDFCWYPNPTKA

SEQ ID NO: 926206 - protein, 155 aa, Homo sapiens
MNRSRENSLNWMSITAFHTYDLWDKPLKGFSGSSPSNGDFSPFLTDIILKMSQRDASGKFGDVEKGHRRICGGLTSQKSDSANYNSQEPLAIGLQLESGRREEEEIQGIFPLLCALSGILGGLELFPSGSLSLHGPAPTLLPQQLCSSRGFAYFL

SEQ ID NO: 926207 - protein, 157 aa, Homo sapiens
MSQAGVQVLDTITRKNSGTNRNEAKDKKIFLRSEGTHLREKCGCVPENDLTFLDPPSEIKGESIPHGTVNYINSLPAVLSLFTQVELGPLALNQFEKQTVFHKATSLEGEDSGYRPNALAKMSWLEAMRQKISVTKKMTCPEVKESGNTHINLDRFL

SEQ ID NO: 926208 - protein, 135 aa, Homo sapiens
MCTEYFFDLLYFPWWYIFKPPAPSQNSPPITSYSHSIKKGSKYPSMFSEYELHLWWYNVGGEGVISSQTAVSYLDKCYICQTCRQDKEKDLENDGLWPLKENGARCEKEHCREIQSSLLMDSPGPVKELLCSTKV

SEQ ID NO: 926209 - protein, 145 aa, Homo sapiens
MKRGRESSFREGINGEMAIALIETEGKGEDSEIREKRSWIQEALCLLAKKSLKILTRPIEWEGGENPEGHSPLPTDPPTMGKGPASGGPGQGLPKGASSYPGLRATLTITRPFLLFQCYFKDLRAWGLGLDEAERNGKASFAVTV

SEQ ID NO: 926210 - protein, 170 aa, Homo sapiens
MSLLLLVVSALHILILILLFVATLDKSWWTLPGKESLNLWYDCTWNNDTKTWACSNVSENGWLKAVQVLMVLSLILCCLSFILFMFQLYTMRRGGLFYATGLCQLCTSVAVFTGALIYAIHAEEILEKHPRGGSFGYCFALAWVAFPLALVSGIIYIHLRKRELRTLDLS

SEQ ID NO: 926211 - protein, 209 aa, Homo sapiens [sequence omitted]

SEQ ID NO: 926212 - protein, 155 aa, Homo sapiens
MGAWPLDIAIPLHLCTCLIVIKLSGPSLVVVPCPFLEIQGIRVQVCDIDILHDAEIWASMDAVTQIVNIAPHRKKIITAGCIDHVLSVSDSQQMQANLTQRTEAEIRKQTQIAPTFPAHSLPGIALTIPEYCTIIYSFQFPLTTQFERAPVIDDA

SEQ ID NO: 926213 - protein, 144 aa, Homo sapiens
MGQGSRTLASLHAFALAAVSAQGRGTGGNVFRQGKPPSIKLPVDHDSLVDARTQQECLELMHIIAQCIAGLWLKPVLPGSLVPDSGTSIPAPHPYLTFHPVSRVSADALYCHCPYSVNLHQEQDMLDEFFCSLILLTSHGSEMQ

SEQ ID NO: 926214 - protein, 168 aa, Homo sapiens
MNRVPQLEVQKSPAFCIGLAGNCRLELLLFGHLACLHRKIAMKEQKQTNSVQAFICSWKKMNVLIFIQCTHLYCVLECKMQCNITQGNFYFSGYCLQSKAKLFGKKKKIFEEHFYKVKRTSFLIIPIECISKEKTISAVECPVIFRQKLISPGWISALPVELLGSGSF

SEQ ID NO: 926215 - protein, 140 aa, Homo sapiens
MNALGTGRSITPCNPAAASRGVPVTLQSPRGHVLTVHYFSFAVHGWLMCLTAQCDSPLYPEPLLRIQEESGHTNELKMVNVGDFIANESGFQHDGELKRKWNGKVAGVWLPQPDSLRGPTIKLFVVEQIAFVSFFFLAQN

SEQ ID NO: 926216 - protein, 179 aa, Homo sapiens
MQEQWQAASPIRSGNGRLTGSGAQRTPCRFWRDGSQRQIPNYITSRCYDEAMSTFVGNYQPPAAWLYQFAFSLTKNYNGAFIVPEDLPVTQNVEVEDSDIDDLDPGKTVKTSEHLVLLAPRIVTTALAELEEIFLIDEKPVLYLGKLVTMTPKIIQNLHTKEGLANHGLKEGDNWMRSW

SEQ ID NO: 926217 - protein, 163 aa, Homo sapiens
MLDNPDLCKHCTTEPALLAIISGRPKDNNTPKLEKQLPGEPSEDPSYLGPLRDPLSIQHLRQIKGDLGQFSNDPDRNIAFQNLTHVFDLSWRDVVLLLSQTLTAAEKQAALQAADQAFGFSLPMHTGKMDNTATHTIEWSKSKTLAIPNADKDVEQQELQVGM

SEQ ID NO: 926218 - protein, 139 aa, Homo sapiens
MKHKSMKSLPVGNSGCARRRRGVGVVRRDERLAEIKSQGAALLGAAAAAQTVAADSGIPARGEPRKTPSPCRLGCWRQTGSWAKEIGPDKSRPSAQGGPEGSGPGCQSPGPEWGLVVPFLAHPWLPMDQSPDTSSSLGP

SEQ ID NO: 926219 - protein, 131 aa, Homo sapiens
MHYIWPYQLSSEYSCRKNLRNILLPLPKFSRICKLFMNILNSWQCGCLHKFKKNLSSFIRGHSWTKWSFSQGCGLNGLVRGSSQANLGQPNVDNDSCCTLCGSELIAYLHKNTIMKTLKLENGRIVICVMQ

SEQ ID NO: 926220 - protein, 144 aa, Homo sapiens
MHVVSAYGIQYKLLRPNSSSCQISPTCCGCLLLGITLSGSFAMVTLVQHSFSNSAHSLDVYSITFLVDWHLCGQRNNTMFSKRLEKIAQVPLLFPFIFIILTNYSKMEGAVESQPSFFKTSQDIVTCTWVENCYSSFSRRPLEG

SEQ ID NO: 926221 - protein, 156 aa, Homo sapiens
MKEIIPVAYAFFIHLHKDAATITYSFTHTPKPDEADISTPHFVHEQIGATEANNLRSGGATAETGFAFQNMFHFCCAAFKSSGSQKVVLRPIVSVSAVNLLEMQILGSHPYLLIRNSGVGPAIYLTSPRGASDECSSLKITALKSSYGNALVVMTA

SEQ ID NO: 926222 - protein, 150 aa, Homo sapiens
MPRCSLSDRRWAPQPRRTRIGRNYGGCGVRRSCWDNPWGGKRYTAAVSPVILQGAGAAAAATAVNQLTPAPTAVTFAATVAKMRGRERLTISLLARPKPAPREPAALRWRPKVEKRPAVGKECTAAILVVGNVQAEIFMDEIVRCLAFAP

SEQ ID NO: 926223 - protein, 289 aa, Homo sapiens
MDSYRKVTSRDNLVVPADWHLFGGFIYGHTVLETYWKVGPAPRTHWGRAFLEVVQLVPTGMQMQRRPTQLLPALSEERGATHSQDSPHPLPRVSLLKASEGGTFQKGIVPVLEMERNQMQISINSINGQCLPAIKIAQRLLVSGSKMDDQWPWRSQRSKMTITLKCNLCRPPALRLAGGAASAAMPQARPLSATAWQRAFLEPQPGRGPSWILGRGVCLSILQSPGLRLLSCPAGMLHFLHPSLLAMMSHRRLQKSRAAVWLSPGKPSPPAALCGCGSFLGIIVFHLSW

SEQ ID NO: 926224 - protein, 140 aa, Homo sapiens
MKKTQNFEFKSLSRFPQCCMLLSGQYCLEVESIALEEGKYHGELVKLNCLLTKRFPGEGRSLQGMNFSGDNDISLEIFTLPGLGIKKTSGKSSIKETSLSFSWNLTSNFLFLNCLSFWHLEPSEQSAEGRIVNFCYEYLL

SEQ ID NO: 926225 - protein, 153 aa, Homo sapiens
MPSFFLSSLGSLFTNRKCSSRASGLARVPVSPFSSFSPNKTLLYSLFKPPASLNFHGRATNKDPTSLAEVRKCPATALCLNLQNFLLFFRLNPSYWRFLAFIPTTKEILCCPPDVSYLGLHRELPGRRALHSISDELREFKDERPNLALNIHT

SEQ ID NO: 926226 - protein, 157 aa, Homo sapiens
MIIFPHQEKCSGQVWGLWNPTDTDPNLALFCYLPIVLYWASYLTPLRFHFVISKAKRIIAPTPCENELKLEDNKFVLFGAKFGAICYSSNGKLIQGDNVVSSVDCSILTFKEYVAKVNFYLKVSVIHSAEIIMFRRKEVSGFHFKDGGGRELEEGQY

SEQ ID NO: 926227 - protein, 139 aa, Homo sapiens
MDWYWSMARELLAQLRLTYLAISDPFSFPTNKLCCVTAILCLCMNVCLWIRSGRVTLVGYDHKKERIMIAKPLVQSEGWEEAHFSLGEVIVCDLQNEISLKTQAKCLVVIKPHPLIFGNPLPVESPRPLTVLTDDILFF

SEQ ID NO: 926228 - protein, 229 aa, Homo sapiens
MLAEMLLWVEGERCFQLPPGVSQAQVTSIDLGRVHSVATWERCHPQDPLVTSIDRGHVHSVTTWECCHPQDPLVTSIDRGHVHSVTTWECCHPQDSLVTSIDCGRVHSSPALTVAMCIVWHLGMLSYSGPATLPSLTTAVCIVWPPGNDVTLGTRCTPDIDHGHVYSVAPGNTVILRTCCLLGIDSGQVHSPVTTVHLYLGLNLCIPTLPREFAVALLQLPDKPKHSPP

SEQ ID NO: 926229 - protein, 211 aa, Homo sapiens
MFHGFEEAAMGKIGILRRFGTQNARNAQNAWNAQNTQNARNSRNTRNTQKAQNFWNIQNSQNIQHAWNVWNTQNAQNSQNTQNSRSTQHAWNTQNAWNAWNTQNAWNTQNAWNTQNAWNAWNTQNAQNSQNTQHAWHTQNAQNSQNAWNTWNTQNAQNSQNTQNSRYTQHAWHTQNVQNPQNTWKAHPEYPEFPNTQHAWHTQNAQHLDHG

SEQ ID NO: 926230 - protein, 475 aa, Homo sapiens
MQKSNHKGKTCSLQMLPLLPGFSLCPPGSRCDTMDVTVACTPRALNSKGVNVGTRFDQREATFTAHPKLEFPIDLKLPLKPQMRVNEAPCALPNGNVLAGTDCDKCPAANINVTRAHGIGAACPTEHDVGQEEDGPEDASPTEHGVDQQEDGPEDASPTEHGVNQEDGPEDASPTEHGVDQQEDGPEDARPTEHGIDQEEDGPEDASLTEHGVDQQEDGPEDASPTEHGIDQEEDGPEDASPTEHGVDQEEDGPEDASPTEHGVDQEEDGPEDASPTEHGVDQEDGPEDASPTEHGVDQQEDGPEDASPTEHGVDQEEDGPEDASPTEHGVDQEEDGPEDASPTEHGVDQEDGPEDARPTEHGVDQEDGPEDARPTEHGVDQEDGPEDASRTEHGVGHRAGRACAAFLSSRRDNLYLSFKKANSAHVTGIISSRSDSAEWRTLLHLAVIKTHGGLTANSPCVFLGSPGRVVVTVL

SEQ ID NO: 926231 - protein, 164 aa, Homo sapiens
MCGWCSCVDGALKWAVLMCGWCSCVDGALVWTVLMCRWCSCVDGALMWTVLMCGCAHVWMVLMCGWCSCVGGAHVWVVVMCEWCSRVNGAHVWAVLMCGRCSRVGGRRPLAPRSYGRSWAGDWSAANATSAQALLGRPGTLLPSKAHNIGGVKRVDFKTKLLVS

SEQ ID NO: 926232 - protein, 166 aa, Homo sapiens
MISIYRDLNYKYGEGVLSSLKLKVHVKFKNPRKIGNYLCKHQAPAAADLGSASDVRGDLRIFLTSPQETVAQVPTFKDMCAKPHHCQTYTGTENQIMRVLTYKWELSDEIQRIQANILGRIMAVLRALTAFEMCPVGVMFPQLGLHARSRFLRNRKREKHSASDLL

SEQ ID NO: 926233 - protein, 136 aa, Homo sapiens
MGESKNQGRLQWVGQVLRAADGHPLLGEVPEGGNAGATKLFGLLAAEGTVLLPSVSAPMKILNVSCLLYHQPHGRVSMHHRPRLNNPQGPSPQAVITLRYPEETVLVKPTTTTKNRNQPKTLPKQVQYYLKDNSNL

SEQ ID NO: 926234 - protein, 173 aa, Homo sapiens
MEWGLLCLCGPYGSWRFSNFISLIIFTGSLSPFPLDFNNGNLCTVTECRAVALRWEAVCHHRMGHGWSCRELCAISAAANSPRSCFLVQFPTPQMLCLVPCGSLQHLLHSWPSPQVPSPDCSGILPQGSLLRMLRLETGPEEREVPSLQQARSRGENHRGNHYFSNSYKKKST

SEQ ID NO: 926235 - protein, 190 aa, Homo sapiens
MLTLGDNVSDRRCPEEGIVVTGGDSSMRVTAPEDLPVGQNVEVKDSDIDNPDPARCLEEGIVVTGGDSSMHGTAPEDLPVEQDVEVEDSDIDNPDPAPMRRYRKVLFPKNTQAVFAVCSHADTTTVNTEDFCHPKICGDFSPSGIKQPILQQTPTACRIPHIELPVPEDCPTLSTSHKSRPPIEFKLGLL

SEQ ID NO: 926236 - protein, 143 aa, Homo sapiens
MRKGHPKELRYEGATLGTLLVGSDVDGSQQPVHASQAKTGDRTKNCFLSLHKALIQTRGLEGADPWTWQEASDPPEPRGCGTDVDIPVRMFRGKKRALMNHRESDKCASVREVLFPNSDLFIFVKLNHSFSHPFGRVMPSATS

SEQ ID NO: 926237 - protein, 166 aa, Homo sapiens
MISIYRDLNYKYGEGVLSSLKLKVHVKFKNPRKIGNYLCKHQAPAAADLGSASDVRGDLRIFLTSPQETVAQVPTFKDMCAKPHHCQTYTGTENQIMRVLTYKWELSDEIQRIQANILGRIMAVLRALTAFEMCPVGVMFLQLGLHARSRFLRNRKREKHSASDLL

SEQ ID NO: 926238 - protein, 156 aa, Homo sapiens
MVLCMAPTLSYSLSELDSHHSRGAPATTCSEKAPHLCGGAGLPTPVLLQDYASSPGPLVSTQGTISVCPLCARPPSPEVPKAGPAPAHPPASGEHHGQPMAVDGHQEDSDSAGQGAGVKRRPNWWVEGWGSGAVTTGAGGYTSCGKVIPAVLDQGW

SEQ ID NO: 926239 - protein, 160 aa, Homo sapiens
MGPTSIPDPSAVLGTGNVMGPTSIPDPSAVLGTGNVMGPTSIPDPSAVLGTGNMPGRGWCRNAGKGPDPGPESRSRGLLCDPGSCTLETESGSRGLLCGPGSCTLEKEGSLVTPPSPAGFSPCLRFAGWFDGMPLNIQGTVTKGYCGQRGLLPLRQFHNH

SEQ ID NO: 926240 - protein, 140 aa, Homo sapiens
MRRARLVRTESVPCDINNPLRKPPRYSDLHISQTLPKTNKINKSNSEYSGHGSSLMMKKTEKEEKEEAGGIGRRKEEERKEEEEEKEKEGGRRGRQSGVDEENGGGGRRRSSNSSICQFLMGPSYNPCTSTSSHQKYHLQ

SEQ ID NO: 926241 - protein, 174 aa, Homo sapiens
MGRNQSRKAENSKNQSASSPPKERSSSPATEQSWTENDFDEWREEGFRRSVITNFSELKEDVRNHREEAKNLEERLDEWLTRINRIEKPLNDLMELKTMAQELRDTCTSFSSRFNQLKERVSVIEDQMNEMKQEEKFREERIKRNEQSLQEIWGYVKRPNLCLIGVPERELSPT

SEQ ID NO: 926242 - protein, 121 aa, Homo sapiens
MKLIWLLQCVKKKKKKKELPGKSKVRQLGVAALGSKAAFLTLPPFFQMYVAPGEFSRALTSTFRDMLSDNDKCSQRALSFSGSTIPSQSSDHEQRQRSSAFRRIFVTWFSWPCPISACAVL

SEQ ID NO: 926243 - protein, 184 aa, Homo sapiens
MAGDGLAPALAAGTELMLISIPLLPKTLLHDWFLNPLWHLPSPLGLESSEMEVFGEIKKSSEGRRRSFQDLGVIISGDILDWRLKFLNRNLELIQKRQIQNVQVSSHFPNLGDNDAGPGIPNTGGCGCGLHLGGVAVPEPCSEGPVPGRDVGELQQPGGSGVSSQQTRCTLQIGTRRRNLHNRR

SEQ ID NO: 926244 - protein, 444 aa, Homo sapiens
MLENYSNLVSLGYQVTKADTLFWLEQGKPWILEEEIQSQVCPEDAWQVNDHTEWHRENQSSLETMDRHHKYHIFGNITSHLSSNLHTPFVLGKHLNPNLEYFIQNRSYARNEGECNGYDKVFLYPKHEKIHAEEKYNEYNERVKAFSHKSQLIKHWKTQKREKQYDCSDCGKAFSQKLDLFKHQRTQRGEKPYGCSRCQTAFRWKSCLILHERTHTEEKPYECNKCGKAFTDKSCLNKHQRTHTGEKCFECHTCQKGFSDKSKLTFHQRTHTGEKPYGCSKCQKSFSNKSQLMIHQRAHTEEKPYGCDECGKTFPLKFNLILHQKIHTGEKSHGCNECGKAFIQRSELSRHQRTHTGEKPYHCSECGKGFSVKSFLNTHWRTHMGEKPYGCNECGKMFSIKFSLILHQRTHTGEKPYECSQCQKTFSQKSHLNIHQRSHTGEKP

SEQ ID NO: 926245 - protein, 121 aa, Homo sapiens
MRLGKGWESNGRPGAIGQQARLQLESASSSVLLQIRQINTGTENQTLHVLTQKCELNNKNTNGHREGNIHTLRPVGLRLNWEAPYKHRSFIYPTNWREGKRWVNRMQRPGCDRSASRKETG

SEQ ID NO: 926246 - protein, 985 aa, Homo sapiens
MNFSVITCPNGGTNQGLLPYLMALDQYQLEEFKLCLEPQQLMDFWSAPQGHFPRIPWANLRAADPLNLSFLLDEHFPKGQAWKVVLGIFQTMNLTSLCEKVRAEMKENVQTQELQDPTQEDLEMLEAAAEKVGSTGGFHYCWPIFTLGYFHISSSMFISGNMQTQGCQDPNQEELDELEEETDHRRKYRENMKAELLETWDNISWPKDHVYIRNTSKDEHEELQRLLDPNRTRAQAQTIVLVGRAGVGKTTLAMRAMLHWANGVLFQQRFSYVFYLSCHKIRYMKETTFAELISLDWPDFDAPIEEFMSQPEKLLFIIDGFEEIIISESRSESLDDGSPCTDWYQELPVTKILHSLLKKELVPLATLLITIKTWFVRDLKASLVNPCFVQITGFTGDDLRVYFMRHFDDSSEVEKILQQLRKNETLFHSCSAPMVCWTVCSCLKQPKVRYYDLQSITQTTTSLYAYFFSNLFSTAEVDLADDSWPGQWRALCSLAIEGLWSMNFTFNKEDTEIEGLEVPFIDSLYEFNILQKINDCGGCTTFTHLSFQEFFAAMSFVLEEPREFPPHSTKPQEMKMLLQHVLLDKEAYWTPEEDFTKKMLGRIFEVDLNILEDEELQALKHCKRLNKLRLSVSSHILERDLEILETSKFDSRMHAWNSICSTLVTNENLHELDLSNSKLHASSVKGLCLALKNPRCKVQKLTQENEIEGTMRRMYLVYSNDINKAIRPSITNSGHVFLSSDMLEPAATTWCKSVTPEWVLQDLIIALQGNSKLTHLNFSSNKLGMTVPLILKALRHSACNLKYLWLESCGLTYQICQLFLKLTENTSLNFLSLGDNDLSDVRSLRESSTLPTCPLKELSLEKCNLSAASCQDLALFLTSIQHVTRLCLGFNRLQDDGIKLLCAALTHPKCALERLELWFCQLAAPACKHLSDALLQNRSLTHLNLSKNSLRDEGVKFLCEALGRPDGNLQSLNFHETGTGFLAHK

SEQ ID NO: 926247 - protein, 644 aa, Homo sapiens
MPITWDQVETASWAEVVHLLIERFPGRRAWDVTSNIFAIMNCDKMCVVVRREINAILPTLEPEDLNVGETQVNLEEGESGKIRRYKSNVMEKFFPIWDITTWPGNQRDFFYQGVHRHEEYLPCLLLPKRPQGRQPKTVAIQGAPGIGKTILAKKVMFEWARNKFYAHKRWCAFYFHCQEVNQTTDQSFSELIEQKWPGSQDLVSKIMSKPDQLLLLLDGFEELTSTLIDRLEDLSEDWRQKLPGSVLLSSLLSKTMLPEATLLIMIRFTSWQTCKPLLKCPSLVTLPGFNTMEKIKYFQMYFGHTEEGDQVLSFAMENTILFSMCRVPVVCWMVCSGLKQQMERGNNLTQSCPNATSVFVRYISSLFPTRAENFSRKIHQAQLEGLCHLAADSMWHRKWVLGKEDLEEAKLDQTGVTAFLGMSILRRIAGEEDHYVFTLVTFQEFFAALFYVLCFPQRLKNFHVLSHVNIQRLIASPRGSKSYLSHMGLFLFGFLNEACASAVEQSFQCKVSFGNKRKLLKVIPLLHKCDPPSPGSGVPQLFYCLHEIREEAFVSQALNDYHKVVLRIGNNKEVQVSAFCLKRCQYLHEVELTVTLNFMNPNNQMQMNWETRESISVTGYTGRRPRNITRPIKNYKVFQSLYAF

SEQ ID NO: 926248 - protein, 132 aa, Homo sapiens
MKTLSISCLSLEILGSSDLPTSAPQIAGTTGMRHHAQVICKTFFNVDGDSLCCPGWSLTLGLKQLSTLTSHSAEITGASHWPGPHCSLSIVLLLAQDVPSPFCTFPAPTVESALSLKILGSFNEERYLENNT

SEQ ID NO: 926249 - protein, 147 aa, Homo sapiens
MNYSLLRFPVLTNQLCLGSGQATFFFLSPGLECNGAISAHCNLRLPGLSDSPASASRVAGITGMHHQAWLLLVFLVETGFHHVGQAGLKLLTSCDPPASASQSAGITEFSDGRRRVVTECGYMKYTRWRKMVNCECEFTFHGPLGCR

SEQ ID NO: 926250 - protein, 176 aa, Homo sapiens
MYAGAIRPPTLIPPPATRTPTDTPPAISPPRATPPSRVVPELYFPIASPPEIHDPQIVPPDYAAPQFPPRLTHTFHAGNLAPQRPHALGPAFVHLGRPTVVSGTVATIPPPNLRLACPLPTRQRNPAGTPPLPPQISPSDRRRSAPYSPVYPPGPAASHTFPHCSPHRSEFCPGEP

SEQ ID NO: 926251 - protein, 176 aa, Homo sapiens
MGTANIQLHGPPRVKAVKSSEHINEGETAMLVCKSESVPPVTDWAWYKITDSEDKALMNGSESRFFVSSSQGRSELHIENLNMEADPGQYRCNGTSSKGSDQAIITLRVRSHLAALWPFLGIVAEVLVLVTIIFIYEKRRKPEDVLDDDDAGSAPLKSSGQHQNDKGKNVRQRNSS

SEQ ID NO: 926252 - protein, 140 aa, Homo sapiens [sequence omitted]

SEQ ID NO: 926253 - protein, 144 aa, Homo sapiens
MSRSLVDSWTLLGCAVPTVRASALGSFPSSSPSSAPLPTPPLLVFCSPWPTFPAFSLGGGPGLIPMHLEDRAGQALTPYAAIGPCGQQGGWNEGSRGRSGGQAQSQPLACCFLGLEEGVREDSAPPPLVEGLTLVRPARSHPEA

SEQ ID NO: 926254 - protein, 260 aa, Homo sapiens
MTLEVGSCGFNSRILPHVYPIRLVKVNEDTMELLRDAQGLCIPCQAGEPGLLVGQINQQDPLRRFDGYVSESATSKKIAHSVFSKGDSAYLSGDVLVMDELGYMYFRDRSGDTFRWRGENVSTTEVEGVLSRLLGQTDVAVYGVAVPGKLGLQGVVLRHGVEGKAGMAAVADPHSLLDPNAIYQELQKVLAPYARPIFLRLLPQVDTTGTFKIQKTRLQREGFDPRQTSDRLFFLDLKQGHYLPLNEAVYTRICSGAFAL

SEQ ID NO: 926255 - protein, 208 aa, Homo sapiens
MGEPAFTSFPSLPVLGKLKRNMMPWALQKKREIHMAKAHRRRAARSALPMRLTSCIFRRPVTRIRSHPDNQVRRRKGDEHLEKPQQLCAYRRLQALQPCSSQGEGSSPLHLESVLSILAPGTASESLDRAGAERVRSPLEPTPGRFPAVAGGPTPGMGCQLPPPLSGQLVTPADIRRQARRVKKARERLAKALQADRLARQAEMLTCR

SEQ ID NO: 926256 - protein, 211 aa, Homo sapiens
MRPDPCHRPPEDAAGAPGIDTGSWDLIGLMRKKREIHMAKAHRRRAARSALPMRLTSCIFRRPVTRIRSHPDNQVRRRKGDEHLEKPQQLCAYRRLQALQPCSSQGEGSSPLHLESVLSILAPGTAGESLDRAGAERVRSPLEPTPGRFPAVAGGPTPGMGCQLPPPLSGQLVTPADIRRQARRVKKARERLAKALQADRLARQAEMLTCR

SEQ ID NO: 926257 - protein, 134 aa, Homo sapiens
MRQGLHQIESAGPRGSIGFPEPRGNVALPRNLGWAAQGRGNSLYGSLVLLGQTFESEESQLGEESNFLISGPPKPRWYFLDAGPRAPGCAVDLYTDVHQFLGSGQHPLKLEWLLGPPLMSPQDRARNVAGEFCG

SEQ ID NO: 926258 - protein, 452 aa, Homo sapiens
MATFSSSACLTVGQQMHQRQWDHLGTLKGKGLMKDRCSTTFNYPPTDFSSLLRMGLNQGVDLGHIHVIELLHMLFDLVLVGFNVHNEQKCVIVFYLLDGGLSGQRQRDDCRVAKLVSPGGALSRIFGLPPESQCLGLLEDFILVGLFSHSGSRQLLFSLVAVMFVIGLLGNTVLLFLIRVDSRLHTPMYFLLSQLSLFDIGCPMVTIPKMASDFLRGEGATSYGGGAAQIFFLTLMGVAEGVLLVLMSYDRYVAVCQPLQYPVLMRRQVCLLMMGSSWVVGVLNASIQTSITLHFPYCASRIVDHFFCEVPALLKLSCADTCAYEMALSTSGVLILMLPLSLIATSYGHVLQAVLSMRSEEARHKAVTTCSSHITVVGLFYGAAVFMYMVPCAYHSPQQDNVVSLFYSLVTPTLNPLIYSLRNPEAYEKVLNITDHQRNASQNCEEISSYPS

SEQ ID NO: 926259 - protein, 416 aa, Homo sapiens
MDASRPKSSESQSSLEAPRPGPNPSPNVVNKPLQRDFPGMVADRLPPKTGVVVIDMGTGTCKVGFAGQASPTYTVATILGCQPKKPATSGQSGLQTFIGEAARVLPELTLVQPLRSGIVVDWDAAELIWRHLLEHDLRVATHDHPLLFSDPPFSPATNREKLVEVAFESLRSPAMYVASQSVLSVYAHGRVSGLVVDTGHGVTYTVPVFQGYNLLHATERLDLAGNHLTAFLAEMLLQAGLPLGQQDLDLVENIKHHYCYVASDFQKEQARPEQEYKRTLKLPDGRTVTLGKELFQCPELLFNPPEVPGLSPVGLSTMAKQSLRKLSLEMRADLAQNVLLCGGSSLFTGFEGRFRAELLRALPAETHVVVAAQPTRNFSVWIGGSILASLRAFQSCWVLREQYEEQGPYIVYRKCY

SEQ ID NO: 926260 - protein, 130 aa, Homo sapiens
MGILLLHSPKKLLYLGQSLSCKCVRNIVELNLRFDKETGAMLWGRGRQRRRVSQTMKSIPFGIDFKGWPLQNLPFDKKMDNLQNGDNCSSYPPRAVGEVEEVTPTGSVLRPESAASRMMDNCIDVISRKS

SEQ ID NO: 926261 - protein, 153 aa, Homo sapiens
MDSPFGVLQEDPVLTVITQVGLTISLLCLFLAILTFLLCRPIQNTSTSLHLELSLCLFLAHLLFLTGINRTEPEVLCSIIAGLLHFLYLACFTWMLLEGLHLFLTVRNLKVANYTSTGRFKKRFMYPVGYGIPAVIIAVSAIVGPQNYGTFTQ

SEQ ID NO: 926262 - protein, 319 aa, Homo sapiens
MSWTQQGPGYLPLCPLPPPFNHQVYITQLPRCACGVPTSPARLCAPHSSPPACKLREGVQFAGSNPSPEHVPPELWEPFYTDQYAQEHVKPPVTRLLLSAELYCRAWRQALPQLETPPNPSALLALLARRGTVPALPERPVREADLRHQPILMGAHLAVIDALMAAFAFEWTKTLPGPLALTSLEHKLLFWVDTTVRRLQEKTEQEAAQRASPAAPADGAAPAQPSCPTRWYWKLVPHAIAFCLKESGSKPPMIRYRKDRVVARRAPCFPTVTSLQDLASGAALAATIHCYCPQLLRLEGPRDQQRCSGHEGSFRNWQA

SEQ ID NO: 926263 - protein, 183 aa, Homo sapiens
MRLLASDGPPLPCMVTSLVGSNPHPRSPVCQAWTPQPEEEKEEEEEEEEEEEEEEEEEEKEEEKEEEKEDGEEKEEGEEEEGEKEEGEEKEEGEEKGGEEKEEWEEKEEEGEEEDGEEEEKEEEGRRVFPGCLASPWPDGDLQLNGDLKDNLVLVRDQQGRTLEGTAKCRVSGAGGAGVDSGR

SEQ ID NO: 926264 - protein, 187 aa, Homo sapiens
MTGASQNALAQKAHANNLANVSTNGFQRDLEQARSMPVFGDSFPARAFALTERPGTDFSPGAMIETGRDLDVAVSGDGWMAVQNPDGGESYVRSASMNVDALGVLRAGNGMPIMGNGGPIAVPPQQQIEVGQDGTISIRAMGEGPRVMAEVDRIKLVQPDLKNMTKGLDGTSTPRMASRPRPMPPSS

SEQ ID NO: 926265 - protein, 134 aa, Homo sapiens
MRTTRDLVDRKYFCLGLTTTVLCDWSSTEESCDSEDVVNGGHDFPSLGEIPPMSSRRQCWGFQSAPGCRPRAETQPVVVGRYPGDLIITGLIRQTWSLLCLAPPTASSFAARVFEKGEQLPRTAAEVWGPSPYP

SEQ ID NO: 926266 - protein, 171 aa, Homo sapiens
MVPPGWCPLDGIPWKVPPGWYPLDGALWMVPPGWYPLDGIPWMVPPGWYPLEGIPWMVPPGWCPGWCPLDGTSWMVSPGWCPLDGIPWMVPPDEEEEEEEEEEEEEEEEEEEEEEEEEEEEEEEEEEEEEEEEEEEEEEEEEEEEEEERGKREGRERAREQERDARSRQPF

SEQ ID NO: 926267 - protein, 155 aa, Homo sapiens
MTLIDFCSGRLLICWNRSPMRAGIRVFTHVFPVPSKICIPEGESLGDVWVGGVDWPEACGKVIDSGENEVTGRLINLCDLLPLLTVYLPLATEGGSDYHHGNCSWRAESLQALAPTSFMFKYKGALRNGSEVGEAAPLVLWTSPGPTTLLQAPVV

SEQ ID NO: 926268 - protein, 164 aa, Homo sapiens
MAPRALFAGVTQEAPIPPARSCNNTCEMSSAAELIRDSIIIINHYLLSSFVSSFVYALTIDFTPTVVADTLLENGDLAEVSNQGPFCLQRGIRKYFQSAQLEGVLTATHACSLMKKGNTVTAPVSKRILGLFSSVRFQFTLSEFVDFIIYKSQKVGAAQMSIHG

SEQ ID NO: 926269 - protein, 168 aa, Homo sapiens
MIQKSLMIQKLLLTQLRGKFHRAHFLHSWHSLGSSSLVGFWAVSMETVASVSMEKEPAESGIFQALKVTAKTSQHISRTGLPNMAATGHSFKNILFGFLAMTAEWRPRAHFLAPSPVPYSHGASAAPPTQTARALPPPTHTARALPPYSDGTLELECPTEQPQTTDGC

SEQ ID NO: 926270 - protein, 135 aa, Homo sapiens
MTQLPGHFSTFLVSAPHPAAEKPLLHSVLTHRPVHLLATVTLLPAEEAPLMADITAQAILTPQLCSGTLLLAHVAARAHADTNLQHVGIPAGDTTGDMASMTLLPGSDTVDVSPNIYSPFSLSLCLPWSRRECAT

SEQ ID NO: 926271 - protein, 261 aa, Homo sapiens
MREISLNLTVYLHVFPETLTMPQVVPSSLNLVENARSVDLTCQTVNQSVNVQWFLSGQPLLPSEHLQLSADNRTLIIHGLQRNDTGPYACEVWNWGSRARSEPLELTINYGPDQVHITRESASEMISTIEAELNSSLTLQCWAESKPGAEYRWTLEHSTGEHLGEQLIIRALTWEHDGIYNCTASNSLTGLARSTSVLVKVVAASIIIIIIIIIIIIICQASGAIAGIVIGILAVIAVASELGYFLYIRNARRKTTEGPQS

SEQ ID NO: 926272 - protein, 150 aa, Homo sapiens
MASGPRGSCGLGRADCTSRAGLLLPGLTRATPSWTRTHPHFPGPTEPRLALQPNSGKADWWQQRRWRSRLAEPNENRAYPQGPRAGRRPDLAGVGWEAPARGRRLTVPFLSYGSIVGPRSPHGWVHPRAHPSLASHVGGSCAKECPAAGF

SEQ ID NO: 926273 - protein, 254 aa, Homo sapiens
MRQVYTGFISLGCIYTGFAVTNFLLVLRGHGGNPQRGPEAPGTNSQRRRRRRRRRRRRRREEEEEEEEEEEEEEEEEEEEEEEEEEEEKKRKKRKKKEEEKKRKKKKKKKKKKKKKKKKKKKKKKKKTRKKKKKKKTCSTEEFGSHLYWQLLSGACVGSGPCLPSPGLDLPIRKMRDGGPGSEGLLCNSMIPKSSSPGNVAQTHFQPRQDAPQRDIREQQTWNASPMSSTRPGPLKQVTASQPGSQGTPPFQLC

SEQ ID NO: 926274 - protein, 122 aa, Homo sapiens
MENVRVVWIEDQTSHNILLSQSLIQSKAITLFNPVKAERGEEAAEEKLEASRGWFMGLKERSCLHNIKVQGEAAHADGEAASSYPEDLSKIIDEGGYTQQQIFSVDKIATYWKKMPSRTFRA

SEQ ID NO: 926275 - protein, 216 aa, Homo sapiens
MIGFGVIIECIQHPTSSLVIQAEAAVIVPLGHLYALLLHQERVMERDGHLAATFHCSQPYGNLSSWATYMQAALEPQKHRTRFTVSLCNQKLGQDSSGDGLGGGEVGVSGNRFHRLQDPWWLPESGLDPDPKKGFLDLPQERIQGYLFLTCKSMRTSRALWLKPRTGPEALVFKGSSDPLELPCQGGKAHPIFISKRGKRGPETSSCQESSPGFWL

SEQ ID NO: 926276 - protein, 431 aa, Homo sapiens
MPILKNLGVSDPKVPRAGTLPLRSSRNPFEEVSGLEEEEAGELGSLPNGTSCRRRATLEKLAGLAPFRLGWAPGRRAGSPGDGQPRSFLGRVLVPGIRRSSADFGLLARLHGTRAHGDEEAAGEAARRLAFLRLGRGSKPQRASLAERVVPAGEAAPEPPPKVPEPPKMKEPLSVLEILSLIQQRELARADEHILELEAEELAPSRGGAPGPPKAEGAGGGRRARDVALLYEALQRELWALVRETLAGPGPGACAGAGAVAQLGQVLVQEEAADGRRGPGAARKLRARWAEAVARAARERLEAAAPGAPGGLAGQLEALRARLLEDMAVVRGRLAPAYPAGLGAFGVYLRGYHGALAEWLGASARRRLPLADRYALLHWHNQVYPREVLGLVDMAALENGELGPLLSPGTLRGLEDECVTDVKPQKSVNAT

SEQ ID NO: 926277 - protein, 187 aa, Homo sapiens
MRRKWLSSPEALDGIVGTLGAQALALRRMQDEPYQALVAELHRRALVEYVRPLLRGRLRCSSARTRSRVAGRLREDAAQLQRLFRRLLEDTPSIQVEVGVLVRDYPDIRQKHVAALLDIRGLRNTAARQEILAVARDLELSEEGALSPPRDRAFFADIPRDLGPSAEGHPTAGLSDPIYAADKPTSR

SEQ ID NO: 926278 - protein, 167 aa, Homo sapiens
MLPRLVLKTRLTLRRTGQYKGLLDCARQILQREGTRALYRGYLPNMLGIIPYACTDLAVYEMLQCFWVKSGRDMGDPSGLVSLSSVTLSTTCGQMASYPLTLVRTRMQAQDTVEGSNPTMRGVLQRILAQQGWLGLYRGMTPTLLKVLPAGGISYVVYEAMKKTLGI

SEQ ID NO: 926279 - protein, 673 aa, Homo sapiens
MPGGRAKIGGDAATTVNNSTPDFGFGGQKRQLEDGDQPESKKLASQGDFIGRGGEQINKIQQDSGCKVQISPDSGGLPERSVSLTGAPESVQKAKMMLDDIVSRGRGGPPGQFHDNANGGQNGTVQEIMIPAGKAGLVIGKGGETIKQLQDGSQNTNVDKPLRIIGDPYKVQQACEMVMDILRERDQGGFGDRNEYGSRIGGGIDVPVPRHSVGVVIGRSGEMIKKIQNDAGVRIQFKQDDGTGPEKIAHIMGPPDRCEHAARIINDLLQSLRSGPPGPPGGPGMPPGGRGRGRGQGNWGPPGGEMTFSIPTHKCGLVIGRGGENVKAINQQTGAFVEISRQLPPNGDPNFKLFIIRGSPQQIDHAKQLIEEKIEGPLCPVGPGPGGPGPAGPMGPFNPGPFNQGPPGAPPHAGGPPPHQYPPQGWGNTYPQWQPPAPHDPSKAAAAAADPNAAWAAYYSHYYQQPPGPVPGPAPAPAAPPAQGEPPQPPPTGQSDYTKAWEEYYKKIGQQPQQPGAPPQQDYTKAWEEYYKKQGSQPDYSAAWAEYYRQQAAYYGQTPGPGGPQPPPTQQGQQQASGNCHPPPPPFSFQPPATVHPALGCCGDTMISGLFMSSCCAGSHRPPETGQLPYDPSASALRGPSPLFLLCPSFSIREQRDFSEQPSYLLLCLLRKL

SEQ ID NO: 926280 - protein, 186 aa, Homo sapiens [sequence omitted]

SEQ ID NO: 926281 - protein, 151 aa, Homo sapiens
MAVLWNRKGGSVGEKIEKSDGCRVCVERDLIVKHLIVANFLALRCKGVPQTMAAFGVRYFLNALGCKLVFYLHRVGRGVSIGTTCLLSVFQVITVSSRKSRWAKLKEKAPKHVGFSVLLCWIVCMLVNIIFPMYVTGKWNYTNITVMNKTG

SEQ ID NO: 926282 - protein, 267 aa, Homo sapiens
MLSSLHAFPLCTLKTCSVLYCLKINLLVPLSLCALSPVQYQFPAFTGTLSQRHPFHEPADLPYVTNPCNVTLSVTHSCNVRPSVTHPGNVDPNSPAFLLNALGQISNVHIILYVAHGDVIIMSGAKWKEVYRLNHNRAMTAAILQIGTWCQDTNTCADAASVVFKDLIVKHLIVANFLALRCKGVPQTMAAFGVRYFLNALGCKLVFYLHRVGRGVSIGTTCLLSVFQVITVSSRKSSISCPLDLMVMNAVNFCLSGKDSFLFLFEG

SEQ ID NO: 926283 - protein, 194 aa, Homo sapiens [sequence omitted]

SEQ ID NO: 926284 - protein, 310 aa, Homo sapiens
MLVVEVANGRSLVWGAEAVQALRERLGVGGRTVGALPRGPRQNSRLGLPLLLMPEEARLLAEIGAVTLVSAPRPDSRHHSLALTSFKRQQEESFQEQSALAAEARETRRQELLEKITEGQAAKKQKLEQASGASSSQEAGSSQAAKEDETSDGQASGEQEEAGPSSSQAGPSNGVAPLPRSALLVQLATARPRPVKARPLDWRVQSKDWPHAGRPAHELRYSIYRDLWERGFFLSAAGKFGGDFLVYPGDPLRFHAHYIAQCWAPEDTIPLQDLVAAGRLGTSVRKTLLLCSPQPDGKVVYTSLQWASLQ

SEQ ID NO: 926285 - protein, 115 aa, Homo sapiens
MMNLSQEFGQSTARVVLSAASAAKTGMEGAGIIWKIWERLHSYVRCLGWMTPRLLSDVLVVKVWSLNQQRQHHLGARQKGKFLSPTPDLLNQSETLKERHLEVGGEVCREKLEMY

SEQ ID NO: 926286 - protein, 137 aa, Homo sapiens
MILVRINKRFLLGQEVGTGCVEGGDPRICIHSFPDSFIFSFIRSFIHSFVHHPWTRGLLSIRAELGSRGHGSKSDPCLSLNSSGTSAEKTDPHNGKIYTDRKYISDCLGLEWVLRLGVMAKEYTVSPWTNENILKVI

SEQ ID NO: 926287 - protein, 362 aa, Homo sapiens
MSHKEVHMAEKPYGCDACGKTFGFIENLMWHKLVHQAAPERLLPPAPGGLQPPDGSSGTDAASVLDNGLAGEVGAAVAALAGVSGGEDAGGAAVAGAGGGASSGPERFSCATCGQSFKHFLGLVTHKYVHLSFAGAYDLLLHRRSHRQKRGFRCPVCGKRFWEAALLMRHQRCHTEQRPYRCGVCGRGFLRSWYLRHTAWCTLASGPSSAACAQALRAVVQPGRAPAAARCGPAPALQRCGKTFRYRSNLLEHQRLHLGERAYRCEHCGKGFFYLSSVLRHQRAHEPPRPELRCPACLKAFKDPGYFRKHLAAHQGGRPFRCSSCGEGFANTYGLKKHRLAHKAENLGGPGAGAGTLAGKDA

SEQ ID NO: 926288 - protein, 163 aa, Homo sapiens
MALSKRAGRWLAPRSARRNQLAKHRRRIYKMGPLCDALGAVSSPAPGACETRRKWDGSFSLPPQKRKDCGAGEVGGNLSLARSLFITPWPAAISMATLAPFQCAAPGLSLSLSRSRSGRVLSLGAVPASKWAGLVSRKKILFFSNQKACLVFEWRLQSGEEYL

SEQ ID NO: 926289 - protein, 249 aa, Homo sapiens
MKFEFSLEKIWMGLPELLVKRVVAQLAGALDFLHSRGLVHADVKPDNVLVFDPVCSRVALGDLAVDSWGLGVLLFCAATACFPWDVALAPNPEFEAFAGWVTTKPQPPQPPPPWDQFAPPALALLQGLLDLDPETRSPPLAVLDFLGDDWGPVNPKSQAWYPWVSFLTKASPRPAVPWHLPDRTRSLACGGSRLQDGDELDPNPRPQHPAEGPELETVFPKQEGMLPGWEVSSLHTTRHPGLDPSWKRC

SEQ ID NO: 926290 - protein, 348 aa, Homo sapiens
MPGKQSEEGPAEAGASEDSEEEGLGGLTLEELQQGQEAARALEDMMTLSAQTLVRAEVDELYEEVRPLGQGCYGRVLLVTHRQKGTPLALKQLPKPRTSLRGFLYEFCVGLSLGAHSAIVTAYGIGIESAHSYSFLTEPVLHGDLMAFIQPKVGLPQPAVHRCAAQLASALEYIHARGLVYRDLKPENVLVCDPACRRFKLTDFGHTRPRGTLLRLAGPPIPYTAPELCAPPPLPEGLPIQPALDAWALGVLLFCLLTGYFPWDRPLAEADPFYEDFLIWQASGQPRDRPQPWFGLAAAADALLRGLLDPHPRRRSAVIAIREHLGRPWRQREGEAEAVGAVEEEAGQ

SEQ ID NO: 926291 - protein, 121 aa, Homo sapiens
MPAGFDGGSLGGPGPSRQPSPWEGTRAGRSLLRSRTPGSAHPPRMPLLLHPQKFQPLRFPLSRRLEGKTQAAALWRLDHRGACLCPLFPHSRVTTARRSCSGLQTQHFGMARQEDRLSPGA

SEQ ID NO: 926292 - protein, 189 aa, Homo sapiens
MKHPPPAPQFNLRLATLLALWPREALEPKQPDPSPSFRGAALGVGLPRGWPSPSKLVNYFSGKLVNYFSGEGMVGSLPNPQASRDSQHLPTCGRGHRSFLPLPIPDLGIHFLWLQNPGCVLRGRTALTRVASAFRAPGDVGCSGGSLGAWLASVPTFEVSSGWMVGGAGARRGVLLGRVWEEFAGNAGA

SEQ ID NO: 926293 - protein, 141 aa, Homo sapiens
MTRGGGASPTAPSPLPTRPNLGPPPELLLACLARPAPTCSGRVREFRASRRIPLDSQAFPSSAGSRNAPEQSLSRNCKSRYLKRGIAAGLHFPETIEALAPPGLRALTARECWEMESGSRIRGRKNTYFSCKNKFLQPLLQ

SEQ ID NO: 926294 - protein, 143 aa, Homo sapiens
MGAQGRPHQGAETIYCLAFYMKKFADPWSRTILGTHSLLAFPTPVLLLTQILHNEDCTKSFVGTNSLNPLNTSTHYHLLNKHLLNTYCVPGTEDSALNKIKIFVLCYEKKQSGVKRERVMRGTVLYRMARKGLLEEVILEQNG

SEQ ID NO: 926295 - protein, 678 aa, Homo sapiens
MPSADIDECGEIPAICANGICINQIGSFRCECPAGFNYNSILLACEDVDECGSRESPCQQNADCINIPGSYRCKCTRGYKLSPGGACVGRNECREIPNVCSHGDCMDTEGSYMCLCHRGFQASADQTLCMDIDECDRQPCGNGTCKNIIGSYNCLCFPGFVVTHNGDCVDFDECTTLVGQVCRFGHCLNTAGSFHCLCQDGFELTADGKNCVDTNECLSLAGTCLPGTCQNLEGSFRCICPPGFQVQSDHCIDIDECSEEPNLCLFGTCTNSPGSFQCLCPPGFVLSDNGHRCFDTRQSFCFTRFEAGKCSVPKAFNTTKTRCCCSKRPGEGWGDPCELCPQEGSAAFQELCPFGHGAVPGPDDSREDVNECAENPGVCTNGVCVNTDGSFRCECPFGYSLDFTGINCVDTDECSVGHPCGQGTCTNVIGGFECACADGFEPGLMMTCEDIDECSLNPLLCAFRCHNTEGSYLCTCPAGYTLREDGAMCRDVDECADGQQDCHARGMECKNLIGTFACVCPPGMRPLPGSGEGCTDDNECHAQPDLCVNGRCVNTAGSFRCDCDEGFQPSPTLTECHDIRQGPCFAEVLQTMCRSLSSSSEAVTRAECCCGGGRGWGPRCELCPLPGTSAYRKLCPHGSGYTAEGRGGCPCPQDPQGGKKRGSLLRVMCLYCSRCWNV

SEQ ID NO: 926296 - protein, 331 aa, Homo sapiens
MMSAQPSLAHVVPTGTATTPRAASAVNATKASPWSAQAMAVKVQPSFGWDVNECDGPHRCQHGCQNQLGGYRCSCPQGFTQHSQWAQCVDENECALSPPTCGSASCRNTLGGFRCVCPSGFDFDQALGGCQEVDECAGRRGPCSYSCANTPGGFLCGCPQGYFRAGQGHCVSGLGFSPGPQDTPDKEELLSSEACYECKINGLSPRDRPRRSAHRDHQVNLATLDSEALLTLGLNLSHLGRAERILELRPALEGLEGRIRYVIVRGNEQGFFRMHHLRGVSSLQLGRRRPGPGTYRLEVVSHMAGPWGVQPEGQPGPWGQALRLKVQLQLL

SEQ ID NO: 926297 - protein, 208 aa, Homo sapiens
MFTSSKNILTDLPRMMFDQTSGDPAAQSSSHKKFTNTLGIPGKLGTRPAAPPGLAPRPPPRPPPWLAPSPRCSTAGPASSICCHGTCWGSKAPPPTVGHHHSSRGNGRARTEAETGLRHLQAEGHRPPPPAGEGHRRSLPLSLWKKPALPTPGWQSSGLQNREDTSLLWEHPGHVPLLRQPQVAAAQGPGDPAVNKIGKIPALLEVAS

SEQ ID NO: 926298 - protein, 151 aa, Homo sapiens
MDQVLGSQYRLRVQKGVLDQHRALLQGAPDAMELRELTPWAGRPPGPRRRAGPRAAARACALEVRVSELGLGYASDETVLFRYCAGACEAAARVYDLGLRRLRQRRRLRRERVRAQPCCRPTAYEDEVSFLDAHSRYHTVHELSARECTCV

SEQ ID NO: 926299 - protein, 389 aa, Homo sapiens
MDPLGPAKPQWLWRRCLAGLLFQLLVAVCFFSYLRVSRDDATGSPRPGLMAVEPVTGAPNGSRCQDSMATPAHPTLLILLWTWPFNTPVALPRCSEMVPGAADCNITADSSVYPQADAVIVHHWDIMYNPSANLPPPTRPQGQRWIWFSMESPSNCRHLEALDGYFNLTMSYRSDSDIFTPYGWLEPWSGQPAHPPLNLSAKTELVAWAVSNWKPDSARVRYYQSLQAHLKVDVYGRSHKPLPKGTMMETLSRYKFYLAFENSLHPDYITEKLWRNALEAWAVPVVLGPSRSNYERFLPPDAFIHVDDFQSPKDLARYLQELDKDHARYLSYFHWRETLRPRSFSWALAFCKACWKLQQESRYQTVRSIAAWADLGDRAGAPRVTVPVR

SEQ ID NO: 926300 - protein, 1320 aa, Homo sapiens
MGQTKSKIKSKYASYLSFIKILLKRGEVKVSTKNLIKLFQIIEQFCPWFPEQGTLDLKDWKRIGKELKQAGRKGNIIPLTVWNDWAIIKAALEPFQTEEDGISVSDAPGSCLIDCNENTRKKSQKETESLHCEYVAEPVMAQSTQNVDYNQLQEVIYPETLKLEGKGPELMGPSESKPRGTSPLPAGQVPVTLQPQKQVKENKTQPPVAYQYWPPAELQYRPPPESQYGYPGMPPAPQGRAPYPQPPTRRLNPTAPPSRQGSELHEIIDKSRKEGDTEAWQFPVTLEPMPPGEGAQEGEPLTVEARYKSFSIKMLKDMKEGVKQYGPNSPYMRTLLDSIAHGHRLIPYDWEILAKSSLSPSQFLQFKTWWIDGVQEQVRRNRAANPPVNIDADQLLGIGQNWSTISQQALMQNEAIEQVRAICLRAWEKIQDPGSTCPSFNTVRQGSKEPYPDFVARLQDVAQKSIADEKARKVIVELMAYENTNPEWNKPVTTIQQLSPATSGSAAVDLCTIQAVSLLPGVPPQKTPTGVYGPLPKGTVGLILGRSSLNLKGVQIHTSVVDSDYKGEIQLVISSSIPWSASPRDRIAQLLLLPYIKGGNSEIKRIGGLGSTDPTGKAAYWASQVSENRPVCKAIIQGKQFEGLVDTGADVSIIALNQWPKNWPKQKAVTGLVGIGTASEVYQRAATIEPPKPIPLTWKTEKPVWVNQWPLPKQKLEALHLLANEQLEKGHIEPSFSPWNSPVFVIQKKSGKWRMLTDLRAVNAVIQPMGPLQPGLPSPAMIPKDWPLIIIDLKDCFFTIPLAEQDCEKFAFTIPAINNKEPATRFQWKVLPQGMLNSPTICQTFVGRALQPVRDKFSDCYIIHYIDDILCAAKTRDKLIDCYTFLQAEVANAGLAIASDKIQTSTPFHYLGMQIENRKIKPQKIEIRKDTLKTLNDFQKLLGDINWIRPTLGIPTYAMSNLFSILRGDSDLNSKRMLTPEATKEIKLVEEKIQSAQINRIDPLAPLQLLIFATAHSPTGIIIQNTDLVKWSFLPHSTVKTFTLYLDQIATLIGQTRLRIIKLCGNDPDKIVVPLTKEQVRQAFINSGAWQIGLANFVGIIDNHYPKTKIFQFLKLTTWILPKITRREPLENALTVFTDGSSNGKAAYTGPKERVIKTPYQSAQRAELVAVITVLQDFDQPINIISDSAYVVQATRDVETALIKYRMDDQLNQLFNLLQQTVRKRNFPFYITHIRAHTNLPGPLTKANEQADLLVSSALIKAQELHALTHVNAAGLKNKFDVTWKLAKDIVQHCTQESTRMFNACSPKLVGGSTYCQSHQ

SEQ ID NO: 926301 - protein, 498 aa, Homo sapiens
MITIEEGRRLRCCIAKIVVIPLSLPFALLKVTEESSPAPSMWGDREDMTVSNLEEGPHQTPIMLALSSWTSGLQNSDQQIMRSISLLRDAETCVQGDTMKKQGHQELLRDHQELHIEEAESQGSLWVQPQELLPQAQVQDHSWFQDRDDHLPLGKLWALGEKSRGQTCLTHAHLGGVTLPGAAPGAAVQGGGELAVPELVLHLWREQSVQVKALVMQDALEGSRCHREKDQIQKKPGTGHPATELQEEAPDTLDSTAARLMTALLKVTEESSPAPSMWGDREDMTVSNLEEGPHQTPIMLALSSWTSGLQNSDQQIMRSISLLRDAETCVQGDTMKKQGHQELLRDHQELHIEEAESQGSLWVQPQELLPQAQVQDHSWFQDRDDHLPLGKLWALGEKSRGQTCLTHAHLGGVTLPGAAPGAAVQGGGELAVPELVLHLWREQSVQVKALVMQDALEGSRCLREKDQIQKKPGTGHPATELQEEAPDTLDSTAARLMT

SEQ ID NO: 926302 - protein, 275 aa, Homo sapiens
MKGSRRPRSPSDSCTESKSDHAGESGSSCTPSNAPKRQKVEELGPHPGAEPAPVQPAPHHPAQLPLELPQLPQRKMIIAILEPGMVLHLRLGQEFLGLDPQGALRLSLLNVQLLVVPEQLLMSLKDLLYPAHARWLLLTSTETVWEIDIENGSVRAQRAENVCVAPSVKEGEAPQGFLPLMGPPANLVHGVSPSSWRVLYLKPDYRAAVPQGSSQMPKPSPWRQALPEEFHLDLHGLEPLPTSALRPLPPSPSPEPRICHKFLWRPTCKARRRLF

SEQ ID NO: 926303 - protein, 173 aa, Homo sapiens
MEERRKKKKAARRRRRGEEGEEDEGRKKGRKRREEKEEEKRRRRGGEKGKEEEKRRLGGEKEKVKERRRKRIREGGRGGEEKEEEEGEQEERERRRWRRGEKGKGGGEEERRKRRKKGEGEKEEEEEERRRRKGGKGGRGEQKEEERRRSGGVGGEEEEEERSRRRKRRREGG

SEQ ID NO: 926304 - protein, 165 aa, Homo sapiens
MGGQGHQKGKEREIEGNRQVGIEAKRATRQDPPLEMLIEGPPRWLATKEGKILSPAANQWKLLKTLHQTFHLGIDSTHQMAKLLFTGPGLSKTTKQIVRACEVSTTDSWTGLLAHALMLMTSKAPLLKKSQPHNPYYAPVQQEAVRAVIGPPPQQHLGFPVEKGD

SEQ ID NO: 926305 - protein, 156 aa, Homo sapiens
MCHNAPSVQHQGAESINMSQYSLSEGPKNEDCIISVRGPELCTHTPCSEQGPGMRGGSHNIDDVPSDMPQLILWTGLCNKGESHNLADGHRDTSQCIYLLSLRTGIRQKNHISSGLCPGIIYSPFCDLSPGRKGDSHYLGVGARGMSQCHLLANMK

SEQ ID NO: 926306 - protein, 146 aa, Homo sapiens
MLTGPGIVPSAESDWCGTPVKQIHQALDGSPNSREPELGLERHETGRPDSSPLAMSVVHKKALAWPCLKLPRQFSLCHVYSLPQGICFGRPDGYRLAMSEVERMVLAFPRLRPSRWLWLAAVSFSLGVTNQEREKQGGRERERETE

SEQ ID NO: 926307 - protein, 148 aa, Homo sapiens
MLVVVERERRVNKKYKDLVPSKNAENSETFLSEGNKIISARQYCQSIPKYLRVFSFFRYVVVSAPVHNDSEVYLREVEENRPTTYVKNLSSAKPDPSAKKVGDNCPTLYSACVLQCTDIRNAAPHITMHRTATDVSRAEVKEACLEVK

SEQ ID NO: 926308 - protein, 746 aa, Homo sapiens
MFQGWILLLLGSPLIHAEPLYILVTPRVLRVGSPESIHIQAHSDSRQPLTRTLKVNLTVWDFPMRKTVLARSQLILSPGNNFMDQAPVTVPESLMYLPKPGQQYVIIRATWAPTSGSSFMEKMVLVALHAGYIFIQTEKTIYTPEYLVHYRVFTVNHKMDPVTRTFTLDIKVVFPDEGLGTWTIEASYQSTPKQKFEAAFDVKEYGPELDAKCWVLVLQPFGLDRATKEGAGLGGDEGAEQISEGLGHVSLQKDTLMAAFQGPGEDFIGGSIFVNVTMFSSGGEMVQAETSGVKIIQSPYNIKFTRTPQYFKPGMPFHFRIPPQVFISNPDGSPASRVLVHSQDQKVYTSAEGLATLTINTDANLDKLPIEPEEQASAKMTAWPYLTQDGSGNFLHIEVKTLGTEVGSSIQLSLNTRHQDPKTKDKITHFTILLKVGLKNDRFFQSLEPNSQVELKVTGDAEATVGLVAVDKAVYVLNSKHKLTQKKVWNVVEEHDIGCTGGSGKDRFAVFKDAGLDLKISTGMDSLASSGTGFGADEEEDFDDLFLDDMPVRTLFPESWLWRKFTLPKSKSGISHYPISVKVPDSITTWQFVVVSLKAGQGLCVSDPFELTVMKSFFVDLKLPSSVIRNEQVQIQAMLYNFRDRQAKVRVEFPHKETLCSASKPGAPSHQVVVVPPTSSKIVHFVLLPLETGKVDVEVKAVGYGVQDHVKKTLLVRVMGTPNSLAAGADSGASTRSRLGRWAQDR

SEQ ID NO: 926309 - protein, 134 aa, Homo sapiens
MEKNILHCNYLGVSELLSRDLMVLQRAVFPAHTLSLACLHVRCVFAPPLPSVMIVRLPQPCGTGGGTARGKGRRLGTVLCLARGNKRKSLAQRVHRGKFWDMDHERSFGFLEKSLNVPLRSFDFFLEPLEPWEI

SEQ ID NO: 926310 - protein, 134 aa, Homo sapiens
MRSMASPRQMRFPGGTGEGRRKGRTCTGHGDVGVSGLTTPLSLSCLIGTSGLMTKVASKLSVPDEVVGDTHGHDVYQSLYFVDDGICVGHLDPVIHPWEPVTGASSGLDAEHAGEGQGTVNLAEELIIKCSVMM

SEQ ID NO: 926311 - protein, 506 aa, Homo sapiens
MAFKGWSAHPGVVRAQHLTRLAEVIQKHQRLLWTLESLVTGRAVREVRDGDVQLAQQLLHYHAIQASTQEEALAGWEPMGCTVVALVPPASPAPLLLAQLAGELGPFPGILNVLSGPASLVPILASQPGIRKVAFCGAPEEGRALRRSLAGECAELGLALGTESLLLLTDTADVDSAVEGVVDAAWSDRGPGGLRLLIQESVWDEAMRRLQERMGRLRSGRGLDGAVDMGARGAAACDLVQRFVREAQSQGAQVPWPVVVASPFRTAKEALLVANGTPRGGSASVWSERLGQALELGYGLQVGTVWINAHGLRDPSVPTGGCKESGCSWHGGPDGLYEYLRPSGTPARLSCLSKNLNYDTFGLAVPSTLPAGPEIGPSPAPPYGLFVGGRFQAPGARSSRPIRDSSGNLHGYVAEGGAKDIRGAVEAAHQAFPGWAGQSPGARAALLWALAAALERRKSTLASRLERQGAELKAAEAEVELSARRLRAWGARVQAQGHTLQVKDDG

SEQ ID NO: 926312 - protein, 169 aa, Homo sapiens
MGPTLNHLNNLLRLPFGCGEQNMIHFAPNVFVLKYLQKTQQLSPEVERETTDYLVQGYQRQLTYKRQDGSYSAFGERDASGSMWLTAFVLKSFAQARSFIFVDPRELAAAKSWIIQQQQADGSFLAVGRVLNKDIQGGIHGTVPLTAYVVVALLETGTASEALYLLPIP

SEQ ID NO: 926313 - protein, 211 aa, Homo sapiens
MGTGSSSERVHISTPNKYEFQYVQRPLRLTRFDVAVRAHNDARVALSSGPQDTAGMIEIVLGGHQNTRSWISTSKMGEPVASAHTAKILSWDEFRTFWISWRGGLIQVGHGPEPSNESVIVAWTLPRPPEVQFIGFSTGWGSMGEFRIWRKMEVDESYSEAFTLGVPHGAIPGSERATASIIASSAFSMPIHVLGIEEAQELIPTPPLRDS

SEQ ID NO: 926314 - protein, 138 aa, Homo sapiens
MHGCIFRFAGILGAEDAKLLGFHACPSEPASIPPRLHTAPCFRPKAMAELTRGPPDLQVAKIRGRSMVSRAESHNHSPPPLAVSGVAPSSVPHLGGPSPHLLFLTPCGSSCLASQSQCKNLDTSTEGAEFTRSFYCSP

SEQ ID NO: 926315 - protein, 155 aa, Homo sapiens
MCLLYTETPHFLEWVFCSHTGTKTLSPYIQFITKVIYSGCKRCNQLLGYDPDIIRIPLSKKQFEAVLRLSIYLQIAFSDYTGQIEHELPANKLLHFLSHMPVILPTKIVYSPIPNALTLFTDGSCKHGKVTVWWRPHHSVTQSGLTSTQRAEMGP

SEQ ID NO: 926316 - protein, 190 aa, Homo sapiens
MIPVQKCQKAPSHIPRALWPGLCIVAITSICPIVPCLPCGLYVTPCLPLVPPWLDVNWPVNLCPLVHVLTVSPGPVFHALCHGTLCSASQGARVAWDLGPVDLAWFQSSAFRPALAYHSCLWASSWFHHIPGAVAQIPNPTPPPGSPTIGPNWPSGPPFAQKRVAPATLRTTLPRQNKPDPVAKINSLKV

SEQ ID NO: 926317 - protein, 152 aa, Homo sapiens
MVWLCVPHRNLISSCKRGIKKDQVASCHLPFAFPFHFPQPVTLLSWWAKSGTFRKITAECLGQGLRGGVGVPEDKHHVLNYSWELIIKTIELMKAKQKEEAPLYRDRVRGAPSGERKPQVQRKTVGYIRRLEEAVPDFHMTQGIGLTSCEDI

SEQ ID NO: 926318 - protein, 134 aa, Homo sapiens
MDSIGFEVLKSDFGYCVESGWTGRSERLRASEEAAEELKRQSKGDSRATALSSALGPFSPVLERTLLNPFSKHPPLLVSDHCPYLTKCQIADPQHVVIMACLQQESCIFAVATEGTKPQSCSPELAHGIYICKK

SEQ ID NO: 926319 - protein, 135 aa, Homo sapiens
MPLEGGPDCFCLICIVLIVKPFFKKNLFPSYTKMTPTFAHQSPLDVSFPFPPLFTDSSLQTILVPKSDPVSPPPVAAHAWRGRKNEEEWGGRERMCECVSIRVGKVHLTRRPAFVSGIVLEAATLMVYCIQEVHA

SEQ ID NO: 926320 - protein, 141 aa, Homo sapiens
MTFKDRVQAVKPVTVCSGQSGNWQGSCPPPSCRGTAVISPHCTAAVCISPNAIPPPAPAPTLQQALVLQEFEEERSVRTRDFQASWKRWGRTPCHPMKCGTAFRTSSCPGNKKNEYDYGAAFHTVTHDPVSQTPLLWAVVM

SEQ ID NO: 926321 - protein, 137 aa, Homo sapiens
MATWASQCVPGLLHPSNIHSILINAPVLCTKHCARLWGHSTLLFHRGEENGPHLLLRFGVCVKIKPDNACEVLSSRPGPELLPNVPETVDLGLAKADTRNDCTYLGVKNTGTETKYRAYGDQQVPIQEDNTEQRAWR

SEQ ID NO: 926322 - protein, 157 aa, Homo sapiens
MGRAAVAWTSDGRQQPRDRPQTCPEFWIGQLMWSMVGLADGVLEQSALVPGSACEQCWSVFSVFGLVLEYTGMGLATGSAGLSLDPESVAVGLVPGTIEAGLKAWVWFGLVLGWAWRLVLLGLACSLVPRKLTWSQGPLGRPDVEAADLVLGSTGRA

SEQ ID NO: 926323 - protein, 125 aa, Homo sapiens
MPSSGTIFLSWLWPEAIVQTPFSWTQRLEGVYLSLFLNEVKWASRWELYWKTGPCEESVTLRIRDELLTLLSEGLIVCYTLNNSSSNSSNNKHFLHFSSIISEVLLPYAVVTLVEKWCSDTGKRR

SEQ ID NO: 926324 - protein, 161 aa, Homo sapiens
MWGDTPYILHPRRVFQDPTKWVAYVGATYLSGSEASTVRAQVVQIVKHPLYNADTADFDVAVLELTSPLPFGRHIQPVCLPAATHIFPPSKKCLISGWGYLKEDFLVKPEVLQKATVELLDQALCASLYGHSLTDRMVCAGYLDGKVDSCQVRATEPGVPE

SEQ ID NO: 926325 - protein, 146 aa, Homo sapiens
MALLTPGPPLTFPSHSHLNRFLKGPLHRVFPLPETHCHSFTTHGFGLTSIYPPGLGLTDGTRSSRGVWRLSATGLGQRADDPGDPLYYHLQGSGFSCPQLRTLCCVSVLDGPGGWLHVNFSFASFWLCYEALSKFFWPLRKWGFPR

SEQ ID NO: 926326 - protein, 272 aa, Homo sapiens
MSSDITQCPRGSVKSPWEHLALVTTTDVPDIAHVTGPQPCLSTLSTNQHLEVGWELPVTASASFGSGDRATEGCELAQPQVTLAVGGPPAWSRDPPRHLQTELDGPMNTDLAAGKMASAACSMDPIDSFELLDLLFDRQDGILRHVELGEGWGHVKDQQVLPNPDSDDFLSSILGSGDSLPSSPLWSPEGSDSGISEDLPSDPQDTPPRSGPATSPAGCHPAQPGKGPCLSYHPGNSCSTTTPGPVIQVPEASVTIDLDVGNSRSVMIYSID

SEQ ID NO: 926327 - protein, 251 aa, Homo sapiens
MMKQLPPAPPNTLNFNGAHRKRKTLVAPEINISLDQSEGSLLSDDFLDTPDDLDINVDDIETPDETDSLEFLGNGNELEWEDDTPVATAKNMPGDSADLFGDGTTEDGSAANGRLWRTVIIGEQEHRIDLHMIRPYMKVVTHGGYYGEGLNAIIVFAACFLPDSSLPDYHYIMENLFLYVISSLELLVAEDYMIVYLNGATPRRRMPGIGWLKKCYQMIDRRLRKNLKSLIIVHPSWFIRTVLAISRPFIR

SEQ ID NO: 926328 - protein, 143 aa, Homo sapiens
MDLIVILPASPALTPRPGVGASGTGRDRRVLLWNVQREVVQAVTALARQATQRPPMATARRRSPSRLRPLVADARKVFSEPRAFASQPLVLQAGVIVVVIVGIIIIIIIIIIIINSYLCNWLRDRCVPEAGLMSIGSGTTADC

SEQ ID NO: 926329 - protein, 155 aa, Homo sapiens
MPFSTWLLHSFCFHDRAPVTKGLLTNQPSHLLLPMTLHVFLCQPTYFSIQSKLPDSPPEDTGHKRCPFGDEQTQEDLTISFKSLLSVVQARELDRIPVWPSKQLEKLQPQSNEKLGKYLDTEKLHVYPGRNYTFIVIFTSKHYSLSAVIFYENFY

SEQ ID NO: 926330 - protein, 160 aa, Homo sapiens
MTMKKKQKRKKKKEEEEETTMMTMKKKQKKEQKRKKKGEEEEKEEKEEEKEEKEEEKEEKKTTMMTMKKQQKRKKKKEEEEETTMMTMKKKQKKEQKRKKEGEEEEKEEKEEEKEEKKTTMITMKKQQKKKQKQQQKKNKRKKKKNNHNNKEEEEEEEMK

SEQ ID NO: 926331 - protein, 200 aa, Homo sapiens
MPVSPEYSTFASMKADTRTRDKEATQLTWTKLPQGFKNSLTIFEEALASNLKAYTLPNDNCALFQYLVATYPQGFKIWMNPITPIIRLCHPNIIWSVINASATIAPKDEAFYKFLKPWLGDGLLVNASDKWSCHRQMLMPAFHFNMLKPYMKFFTDSVNIMHVNSLNPEFQLKPWGGGTTDRSGLEFWLCWVAFSIAFPL

SEQ ID NO: 926332 - protein, 316 aa, Homo sapiens
MPSQNYSIISEFNLFGFSAFPQHLLPILFLLYLLMFLFTLLGNLLIMATIWIEHRLHTPMYLFLCTLSVSEILFTVAITPRMLADLLSTHHSITFVACANQMFFSFMFGFTHSFLLLVMGYDRYVAICHPLRYNVLMSPRDCAHLVACTWAGGSVMGMMVTTIVFHLTFCGSNVIHHFFCHVLSLLKLACENKTSSVIMGVMLVCVTALIGCLFLIILSYVFIVAAILRIPSAEGRHKTFSTCVSHLTVVVTHYSFASFIYLKPKGLHSMYSDALMATTYTVFTPFLSPIIFSLRNKELKNAINKNFYRKFCPPSS

SEQ ID NO: 926333 - protein, 156 aa, Homo sapiens
MGFLAEATPELGVGGRPSCMDDTWRCPLWEVQELGPLAAVSGLSDVIRGLAANLNSEHSQLHATLPSGRGERFVVFEDVAVDFTLEEWALLDSAQRDLYRDVMLETFQNLASVVKQYEYNTYGKVFMHRRTSLKSPITVHTGHKPYQCQECGQAYS

SEQ ID NO: 926334 - protein, 134 aa, Homo sapiens
MARRTLEGTVGFRSWTPLSPGLFLVGWAWSISNSSPEGKGPFIDRAAVEVPAGRVPGQHPDILAKKEPYGGRNDAGAGQSHLHPRQVFHLGPVNSTKLQPKCKEFKSLKREIGFTAFIKMIWGLCYDSITPNPQ

SEQ ID NO: 926335 - protein, 150 aa, Homo sapiens
MSEWPERNPMEGLSMLFIREQTSPPPPDIEIVSNKSCSIPSISEQSGKGMRVATHSEGPEDETVKLETGRCSLSVWGKQIQAAMRKPRKQSERNQSPTGVMWPQQSPGESQLSRGLCGWAGRGHVLEGASLELVVCRTCPSDPRVAVEEC

SEQ ID NO: 926336 - protein, 155 aa, Homo sapiens
MPGQAYSAQYSQTVSHPSTNQAPTLLSFQDQIRPGTFRKRFTILDAIKNICNSWEVLKISTSTRVWKRFIPGFMNDFEGFKTSVEEVTADVEIARELELEVEPEDGTELLQSYDQTWMDEELLLMDEKRYNHHCDQSAAINIKAGSPTSKKSMTC

SEQ ID NO: 926337 - protein, 175 aa, Homo sapiens
MIFLGKPSRSKSDLRSQRPLQSLGFSLSPSALSHTWSPRVVMLQENGPDPEPKKGFLDFAQERIQERNDFSSSALAVLVSTVIWRPQSERKNREALAGGGVLQAAAWTSSRPQITISCQRALLFTLPPALPWELSFKTPKNYLKAREQRGIGLHTANATLQGIEPPHCRCHPPGH

SEQ ID NO: 926338 - protein, 182 aa, Homo sapiens
MRPAALLWGMMLPRLEACAPLSQETTYPQFLHIWVNEETKLVYFQGTKDTPLEHHLYVVSYEAAGEIVRLTTPGFSHSCSMSQGTSQLQFASCGASKLAGLCSGRALGRSSVERAQRHPVELITPFHPQNFDMFVSHYSSVSTPPCVHVYKLSGPDDDPLHKQPRFWASMMEAANGPGFELQ

SEQ ID NO: 926339 - protein, 150 aa, Homo sapiens
MNKRTNSATWPGLLSPLAGQKQPRLLRAWHGSEVLVKLMGVFAVPPLSADTMWIQVRTMDGRQTHTVDSLSRLTKVEELRRKIQELFHVEPGLQRLFYRGKQEKSTETSNACERKEQREDSQIDTLGWRLALESIGSGLLNFFFQSSASK

SEQ ID NO: 926340 - protein, 134 aa, Homo sapiens
MPAESFFSAQLKTQDFSASGLRFLLDYRVQEPVDFRPVTFQIPQLKVCWSLLEVHSRPCLPGYHQRRCKTANIAEQQILLLILPLEALSQRGTWLYEVKGKSPNPLYFLSEAMPRPALAGSPRAAPTFRAVPMR

SEQ ID NO: 926341 - protein, 154 aa, Homo sapiens
MATRIRFLRKISMRMTITSMMQSIITLNRKKKISLNIPEEGIIIIGDDSSMFFIVPEDLPVGQDVEVEESDIDDPDPVIPRLENSIKLCIFLKVHLFTFPMADSDLLNGVCVEGSYETAGEIIDNSKQVAEEMWNHLNSGKMMRMQFPDPDEDG

SEQ ID NO: 926342 - protein, 155 aa, Homo sapiens
MAQRTWSWVTYCFRVHSQDQCQQACYLKQGQMWFLVRPLVDGAGGKTKAKWGCSRVHRGMELFPEKTPKIDREVTDIVAKEGGNWEACMESPSTKTSSWPSTGPKEGVSKGTPRHHTPNTTLWDPRDKRSHYPHRHLNWQEELLRDQTEAEIEPA

SEQ ID NO: 926343 - protein, 177 aa, Homo sapiens
MDATTEHNPVSRNIYFASIAHALPLARLYIWLCSSTCRPVDGADGGPRPPHSLPGLGVGVSEKHLAKASVSAGVGQLYRGPATAGTRLTVGFQVGLSGASAKFLGGSVFSWRPKEDYGGSPVARIVKVCDGEVGPGASHLIHPFLGVRASLHSTPSQLRRLPGSTVPCFPWVPLVLW

SEQ ID NO: 926344 - protein, 142 aa, Homo sapiens
MNVDSWLCSPEEEAPKADTGSFWCLRAAGSGLLHSGAQDPTMTWQMQAQQMRWAAEAGASWRISDAEGPDVQCRQLKVHLLGVGPGDRNGKTVGCPLRELRAGEKDIHTIQDQSLNKDPFADSNGLHRDLRFNPPGQSLVPI

SEQ ID NO: 926345 - protein, 157 aa, Homo sapiens
MNEQTCQRFPACSSSVSSCQDGAGSGPSGKGDALPDPGSPSGAPAARTRLSRHQRRPGIYEFAGAEASCRLQPSQPRKSRSPRGDSLPRQPGPRVPQVRPVLPGRPTPTRPPHQGVAREGGPRKVMIRLRRATSEPATRSPGQPQNKTRIPELQWAF

SEQ ID NO: 926346 - protein, 381 aa, Homo sapiens [sequence omitted]

SEQ ID NO: 926347 - protein, 200 aa, Homo sapiens
MAISVRRCRSVNTRRCFLGCRARSFCCSCSLRLQAAGERRAGGRAGHSATVWPAGERQEAHAARRMRRRGEGTRWGKANAHKVPGRAQKQQECRERRRGRQRGTQGRTETETGKQQGQQGDNRKVQDAARGRWRQNGRRGQAGKADAVGVGGGQRRGHSVSAPLQAWLPPPPAPFSMEPTQAPPKPHTPQTPSYPQTLPT

SEQ ID NO: 926348 - protein, 588 aa, Homo sapiens
MVTPVTWMDNPIEVYVNDSEWVPGPTHDRCPAKPEEEGMMINISIGYRYPPICLGRAPGCLMAAVQNWLVEVPTVSPISRFTYHMVSGMSLRPRVNYLQDFPYQRSLKFRPKGKPCPKEIPKESKNTEVLVWEECVANSAVILQNNEFGTIIDWAPRGQFYHNCSGQTQSCPSAQVSPAVDSDLTESLDKHKHKKLQTFYPWEWGEKGISTPRPKIVSPVSGPEHPELWRLTVASHHIRIWSGNQTLETRDRKPFYTVDLNSSLTVPLQSCVKPPYMLVVGNIVIKPDSQTITCENCRLLTCIDSTFNWQHRILLVRAREGVWIPVSMDRPWEASPSVHILTEVLKGVLNRSKRFIFTLIAVIMGLIAVTATAAVAGVALHSSVQSVNFVNDWQNNSTRLWNSQSSIDQKLANQINDLRQTVIWMGDRLMSLEHRFQLQCDWNTSDFCITPQIYNESEHHWDMVRRHLQGREDNLTLDISKLKEQIFEASKAHLNLVPGTEAIAGVADGLANLNPVTWVKTIGSTTIINLILILVCLFCLLLVCRCTQQLRRDSDHRERAMMTMAVLSKRKGGNVGKSKRDQIVTVSV

SEQ ID NO: 926349 - protein, 141 aa, Homo sapiens
MRFPLSRSLGLVFWSILPPSQQCIHSKASESPVEPAPPLQYPPKGVLSPPFLDSERSWPPHWGTESQAAAASRCPVTLHPTQGCHTKIRCLIHRPSKAPQADAGFPAQNWNSFPNARTRPTSGARRGTHGPAFRGEADAAS

SEQ ID NO: 926350 - protein, 149 aa, Homo sapiens
MVQRQPYESVRERAVCTCDHPDPVPSPLTLSCCSHCGETGPTPPLTPAHLRPPVHSHFLRSPPGPASPGLTPVRRENIKHRPGLHTGGPRGCSVEAPWTDGEAEALSTGPPRPPRPCVDGRQLCPGTLSPLDMAGRMDFRSHLSIWQLY

SEQ ID NO: 926351 - protein, 295 aa, Homo sapiens; identical to SEQ ID NO: 796404

SEQ ID NO: 926352 - protein, 183 aa, Homo sapiens
MAAIASAASPPACGTAPRSLPQHPGQGFIGVRCILEVAAGAPQSGFQSLGGCAERPEGAVGGKIYQWGLRFPGSWRKVLALCLLGSSNPSPCYQYLRGQACSPGLQAGWEPLAQALGLQPRVGGGQMQGRAPLRRRHRSAESDRWLIEHFSSFGDFCGFSVNRSLGPRSHRPGAEEPPPHDRR

SEQ ID NO: 926353 - protein, 154 aa, Homo sapiens
MDALFPEQRGVKTHCVLGVPPPALEPGAGRILHAHLSGGQRLRRCLGQTRGLGWGCPDLDPHPYSQGAEMGRDSSWPPPPARRCWGLWAGSPGVVAAAEGDEATLIPACSSRSNQGRSIAEAAAGASLLLLWGGGWVRGSQNWGQSVLSAVWPS

SEQ ID NO: 926354 - protein, 309 aa, Homo sapiens
MKSWNNTIILEFLLLGISEEPELQAFLFGLFLSMYLVTVLGNLLIILATISDSHLHTPMYFFLSNLSFVDICFVSTTVPKMLVNIQTHNKVITYAGCITQMCFFLLFVGLDNFLLTVMAYDRFVAICHPLHYMVIMNPQLCGLLVLASWIMSVLNSMLQSLMVLPLPFCTHMEIPHFFCEINQVVHLACSDTFLNDIVMYFAVALLGGGPLTGILYSYSKIVSSIRAISSAQGKYKAFSTCASHLSVVSLFYGTCLGVYLSSAATHNSHTGAAASVMYTVVTPMLNPFIYSLRNKHIKGAMKTFFRGKQ

SEQ ID NO: 926355 - protein, 269 aa, Homo sapiens
MDHGDPELQPILFMLFLSMYLATMLGNLLIILAVNSDSHLHTPMYFLLSILSLVDICFTSTTMPKMLVNIQAQAQSINYTGCLTQICFVLVFVGLENGILVMMAYDRFVAICHPLRYNVIMNPKLCGLLLLLSFIVSVLDALLHTLMVLQLTFCIDLEIPHFFCELAHILKLACSDVLINNILVYLVTSLLGVVPLSGIIFSYTRIVSSVMKIPSAGGKYKAFSICGSHLIVVSLFYGTGFGVYLSSGATHSSRKGAIASVMYTITYIT

SEQ ID NO: 926356 - protein, 221 aa, Homo sapiens [sequence omitted]

SEQ ID NO: 926357 - protein, 128 aa, Homo sapiens
MGYTHCDIRSNISKNIMKNITGCTPSEYIAYDIRSTPPVTFCTPQVTLEVTLGVHMVYIPCDIAEAPVQPFRGRKFMDRKRKVTYKRMEVKYTNSWMGYLSAFDEFEYGLKGWPALMAQKQQISKISL

SEQ ID NO: 926358 - protein, 142 aa, Homo sapiens
MYLVTVLGNLLIILAISSDSHLHTPRYFFLSNLSLADIGFTSTAVPKMLVNIQVQSNAISYADCIAQMLTCSDTHVNYILLYVVAGLLDFVPFSGILFSYTQIVSYILRISSTDGKHKAFSTCGSHLFVVSLFYGTGLGYLP

SEQ ID NO: 926359 - protein, 192 aa, Homo sapiens
MKEDSDIAFHFRVYFGHWVVMNSRVNGAWQYEVTCHNMPFQDGKPFNLCISVLADEYQQQSASPSTLPFLEFLPRWQNDSPFPSIRAEITCFIANLENHLAETTCYLQTNEGRLSKVLSNSLFFHTAQVRHHFDHPHPLSPCSLPQFVHLQPYSWVCSSPTRIQPNTQIPEVPTHSQCYSSFLSSTFHSHME

SEQ ID NO: 926360 - protein, 144 aa, Homo sapiens
MRGKSRASHPLAHVRLGIQNQPGVTESQVWLARLASSSPKTLPFTGFPGNHGNTGRGMGDPWPFYKLKALLGSASCRSGAARNSRQGWQQVTVTAPETRGLLCCGTTGNQTEPLAPPILLPLYCSLMFTAAKSGRARGVRALVV

SEQ ID NO: 926361 - protein, 181 aa, Homo sapiens
MCRICKWIFGALCGLLWKRKYLHIKTTQKHSEKQIYDVRIELTELASSGVKLQTFTVSVTALKAVHLEFSIPPSGLVVSVTSGVKLQSFTLSVAAHKGSVDTKRASKHSKYPFEDSTKRLLPNCSTRRKVQFCEMKAHITKGFGRKLLSTFYVKILLFHLRWQRAQKYPNADCTKRRFPNS

SEQ ID NO: 926362 - protein, 161 aa, Homo sapiens
MTEAGSPGKFLIRRVAQSGECFYCIVLLFYYPIAFYYQRTLFYEIRPAFWRESLIFMKACGMLLTITPAFQLVSPQPGFHSTLQVASLGDDVRASRMDDDVQGDSSLLYPSHRKEELSLMVPSWEIRGFAVQVGTKSLQTSSSADFERSTEHCKSRFLFQS

SEQ ID NO: 926363 - protein, 235 aa, Homo sapiens
MSWLTLCVNLTGLRDAQIAGKTLFLDVSVGVFLEEDIKLPGPHAFSLRLNDTTSFPASSAYGQHVVGLLSLQNCVRKVLIINLCCLHTLMKQSYPVAENFHGKELRGGFWPRVSKELNCQQHHEINRTLRWPQSCWPLDCSPGETLKLKTQPGCAQIPDSRKSQDNKRVLSEAAPFEPLTGPGNLEMNPSELSALLRSSLHPGRSCSLVTVTCDPCADPLDHRCTFSFIQITLTF

SEQ ID NO: 926364 - protein, 126 aa, Homo sapiens
MTEEKHEHRDACSGGSSCGRGDHRALQDRQTHGCGHSEPAAARPGTHSCGPTGRETAFPWAWLWFSLGGGAQEDPRLSGHMSLCSPPLPQVTVSAAGGTGQAPVESGLGVSLGGLLSQEVTAGSQS

SEQ ID NO: 926365 - protein, 144 aa, Homo sapiens
MRVEKIYTYICTCNYICACTYTSAYTYPVLTPAPNPTMHLHLCLHLNLCYTYISAYTYNCATPKPVPAPTLCYPYTCATTTLCYTYTCATPTPVPAPTLCYAYTCAYTYSCAYTYTCACTYTVLCLHLCLHLNLRLHDFCNILY

SEQ ID NO: 926366 - protein, 194 aa, Homo sapiens
MAVCAREAVAAPGSPDEGPRTHWLWSLEGGAGGGAWRGRRAGRARSRCAGAGAGAQPSVAGGFWRACGRRATQSVSDRARIGVRAAWFWNFLHFRTRDEQTSARRNQSGSLRTRTSRRGFRNGGPAPESPRREAGSGEMKPLVGWVIKLSIPGKGQVHTMCTWMWCPKQDTASLNPASNAQPISTYEEISDKPK

SEQ ID NO: 926367 - protein, 207 aa, Homo sapiens [sequence omitted]

SEQ ID NO: 926368 - protein, 658 aa, Homo sapiens
MGIEEFSLERRSLLTFSSDVQGLLTTGFEQSDEDVLWCIEVSDEGVLWCIEESDENVLWCIEVSDEDVLWCIESDEDVLWCIESDEDVLWCIEVSDENVLWCIESDEDVLWCIEVTDENVLWCIEVSDEGVLWCIEVSDEDVLWCIEESDEDVLWCIESDEDVLWCIEVSDENVLWCIESDENVLWCIESDEDVLWCIEVSDENVLWCIESDEDVLWCIEESDEDVLWCIESDEDVLWCIEVSDENVLWCIESDENVLWCIESDEDVLWCIEVSDENVLWCIEESDEDVLWCIDEDVLWCIEVSDEDVLWCIESDENVLWCIESDENVLWCIESDEDVLWCIEVSDENVLWCIEVSDEGVLWCIEESDEDVLWCIESDEDVLWCIEVSDEDVLWCIESDEDVLWCIESEEDVLWCIEVSDEDVLWCIEVSDEDVLWCIEESDEDVLWCIESDEDVLWCIEVSDENVLWCIEESDEDVLWCIEESDEDVLWCIEESDEDVLWCIESDEDVLWCIEESDEDVLWCIESDEDVLWCIEVSDENVLWCIEVSDEGVLWCIESDEDVLWCIEVSDEDVLWCTEVSDEDVLWCIEVSDEDVLWCIEESDEDVLWCIEESDEDVLWCIESDEDVLWCIESDEDVLWCIDEDVLWCIELPSFGSYA

SEQ ID NO: 926369 - protein, 150 aa, Homo sapiens
MAESLLQGLVHIFLLNLSSQVYTIPQITIPIGPRCGQGVTVCGTTNLAALYPYPRNLWNFELESNNLGYLAEEISKQQSIQDWAWMLLTAYLIWPGHVVVKKSPFSGEEFKRTAEICISKKVPSANHQGNGEKASKAFHSSPSHQRLRGL

SEQ ID NO: 926370 - protein, 142 aa, Homo sapiens
MNKGLSQQNYCPRAPDEPGWEIQRPLLTAIDSATLPACCVGRGSLAETASSGRNYCQLHWDILYFSGNPKPETRWYAKSRPADLPTKEECKGCHQKFLWISVKLEAGIENPKRISQHIAYFQVISTVYVAVVQVGIHVPRTK

SEQ ID NO: 926371 - protein, 152 aa, Homo sapiens
MLPPFALSRIYGKAWLSRQKPAVGVEPTWWRTSTRSVWIKNVVLNPPYRVPTGALPSAAVRRGPPFSRSQNGRYTNSFQPAPGKASGTQHQPLRAALGVEPCKTTGMEMLKVLGVYLLHQCALNVGHRVKGDYFGALKFNGCPAGFQTCMVL

SEQ ID NO: 926372 - protein, 127 aa, Homo sapiens
MACTTLGLCRAVDFPGTEFHDPPKHDVAAVSHTLRNRRVVKEKRRRRGRRRKKKKKEEGEKEEEEEQEEEEEREEEEEEQEEEEGGGGEEEEEEEEEEEEEEEEEEEEEEEEEKKKEKKKKILRAKF

SEQ ID NO: 926373 - protein, 146 aa, Homo sapiens
MRTRRLSKPVYPTFCRLLFLATLAADWMVPTHIEVSKLKKYKYTQRSNVCCTLGPKQFPQEFAHDGRWLFKHCNSYVSFNSTDISKHSNTPSKQLSHPISGSQSPEYLWVFEDSNSQVQNPLSKEWLKVITVTHGVFPTTLCHVIF

SEQ ID NO: 926374 - protein, 146 aa, Homo sapiens
MSLPDSSEESSGSPSTAFKLQKAENSKNQNASPPPKEHNSLPAGEQNWIEKEFEELTEVGFRRSVITNFFELKDHVLTHCKEAKNLEKRLDEWLTRKNSLEKSFNDLMKLKTTVQELREAYTSFNNRFDQVVERISVIEDQINEIK

SEQ ID NO: 926375 - protein, 160 aa, Homo sapiens
MRGPAQAKLLPKSAIQAFAGLVRPLVLALLLVSATLSIVVSWTDSLIQTVLNSDISTPNVNALTHEKQTKSSISQISTTLPPTMNTEKSGGASVAPHPSPTPLSQEEADNNEDPSIEEEDLLTLNSSPSTAKDTLDSGNYGEPDYGTDYGTRLLDHGPQG

SEQ ID NO: 926376 - protein, 502 aa, Homo sapiens
MGPGRYITRGIPGVDASVHRALCDEKALEQDLPGVSRGSSEAAASGPGTHQLLGLQAWGRFPSLCAWASCLLKQGDGSHPHRAVLQCLLVGKFRGKEKTKGEVEQHRAEELLQILARSDHINGGSQAGSEQEERLPGRRKQLLGSSQGLIWPVPVGPGQGTVHRAETQGAHRHCCDGNCRADLPPLCPGLFYSPGTLRTRHGPVGVPDMMSAQELVACLCREGEQHLALGELPLATAFYLAAFSCHAPSALQSVRTALAQARGAAVVATLESWCRGDSQIPAIHWDGMAVVSLTGSLASAFLGALCPDHPAAILHLLAGLLARGRHEEVVQRCSALLDSHAQQVLELRLTRALAWVLSGVQAADGVAAYLQAFASSADRTVAFIRTHQRPHLPALLSALQDYLSGHPEAGHSAGQQETGGQRLLAALDPRGTRSDTLSPEALLHSGRFEDCLAACSRALEAHPTGSEPQGNTCPKNCASIRPKSLRSRDSPHRQHQHKHGLR

SEQ ID NO: 926377 - protein, 322 aa, Homo sapiens
MFESGGIKISLPGGREPNYRSARITAQAELPLSPNYRSGRIAAQPQLLLSPNYCSALMILDLHWLQDLPSLQGPRPCLQFRLTLQSPAAACAQMQHPGKGSWVDGPGGNQFLGDGPATRKRETPEAGRPVPGTLQPSHGQDDGLGCGHQDSRVSPCPGPLCTLASVFLVPLEGSHLQEPGETEGLAVGAGAILGAACVETSYVHGPRRARWLQIMFPICGAFKGWAHEDSAPSLLFLSSLHPPGPRILRMELLLSPENNCKMLFRFKWKNFAAKGREVIPLRIAQNGHSRCVATEKVLEQTTKVTAEDSAEAPSTESARIPK

SEQ ID NO: 926378 - protein, 451 aa, Homo sapiens
MITARPVGCITGKLSGCRGISTHAAISTHAAASTHATISTHAAAFIRAAASTHTTISTHTTITHAAASTHTASPPLSAELSCSSRDEDPGESVLSTLLPVSHLVATLVIRSTAMVPIRFLHCIHLHIVSMADTHTSHPLYTPPHRVHGGHPHISSTVYTSTLYPWWTPTHLIHCIHLHIVSMADTHTPYPLYTPPHRIHGGHPHILSTVYTSTSCPRRTPTHLIHWIHLHIVSMVDTHTSYPLYTPPHRVHGGHPHILSTVYTSTSCPWLTPTHLIHCIHLHIVSMADTHTSYPLDTPPHRIHGGHPHILSTVYTSTSYPWRTPTHLIHCIHLHIVSMADTHTSYPLYTPPHRVHGGHPHILSTGYTSTLCPWRTPTHLIHWIHLHIVSMADTHTSYPLDTPPHRVHGGHPHILSTGYTSTSCPWRTPTHLIHWIHLHIVSVADTHTSYPL

SEQ ID NO: 926379 - protein, 253 aa, Homo sapiens
MHGQPSRAVVTASEASPGAYGDSGMVPSAHTRPSPMPAAPAPSGASPALQPSSPAAQHRHRAASTTPAVPSSPAPPQSCQHHPCRTQQPSTATELPAPPLPYPAARHRHRAASTTPAVPSSPAPPQSCQHHPCRTLQPGTATELPAPPLPYPAARHRHRAASTTPAFTQQPGTATELPAPPLPYPAARHRHRAASTTPAVPSSPAPPQSCQHHPCRTLQPGTATELPAPPLPYKDSLVAAFKHVACSCHTRLT

SEQ ID NO: 926380 - protein, 145 aa, Homo sapiens
MQRGRGSGCRDSRYNRRLSVHWDGGLACRRTTGHPAQDTRPCEQQLLWPWPLPDMGYTWGAGSKLQDPRDSQWEEGPKLAEKGTGSVAWDRAPQSPCGEEELLRAELSQPQRVFPGWTWRCPASPTQPFAGRLGRHPGPGPTLTK

SEQ ID NO: 926381 - protein, 146 aa, Homo sapiens
MELQTGGAQCQKGIRTRGPQISPQDLRCRARLRDLLLFKYQKKEVAVKSFLQGVAGSPEQDLFLGKSSCGDRCWAARGFRAGVLSFSITTSANTTMTYTRVGLRPVHIIPHELGAPRHGPSLQNQYHLVLQVNRHKRLLVRKSWQS

SEQ ID NO: 926382 - protein, 152 aa, Homo sapiens
MDDTRGPRTAGLRTQCLACLAETPEHRAGLASWEVQAGQVPLQLRCSPRPPTLSAGQHHPCNEGPKLVVPWRGCPRPPFFPGVAPRLLEERSAPSPAPAWCPVAPGQSEPNNLLTPGLYFQLLEKQRETPRLSPAGRPGRQEAPAPLCSPRL

SEQ ID NO: 926383 - protein, 235 aa, Homo sapiens
MGTEGRQGPRRPAATPARETLPPLCPEPSCHHSMSEAPEDGILPGSFGANISDGMAQPDTPWLTHPGSHSHLRMRRVEEGGLDQPGTCGTRRRKPMQRVTPVAPPLPKEEGGPGTRSLDQPPTCTTRHRKLMQRVTPAWRRLDDSSSTGPQRQKQMGDLGDWGGGDSERPRSPFGVMRTRESDWTPVLLALAPGPRPAPCRWLRKQKPLRRPELLSTGKMTSDSSHWLQTDQHKK

SEQ ID NO: 926384 - protein, 256 aa, Homo sapiens
MQLHFRVVGVAIDLPVWVPKPSVDLKICMYDRLYQDSVLVHTRSKAALRLKFEVCKELRAHLELLPETGYIQAQSSYSVQLKFLPRGHVLVGSVREQEGGVMRLPALMFQRRRSSHGIHSLPEDAGRYFDKETRVLEAPMTIWVADQNKPVGFTVHAIVTTSDLELSPSEVDFGYCTIYEAIRTEISLHNHSLLPQEFGFVRLPKFVDVQPNDGFGTILPLETLQFCVIFQPTKAEEHRFQLTCKSEINRPQDFEC

SEQ ID NO: 926385 - protein, 140 aa, Homo sapiens
MVSNVEKIRCLLLWDGCCYWVTFWGGKAGDAGPESPHAPGWRPGRHGASLLLLLAADCRLACPLKSGYGVESRLSWSFAVATEDRSDYPSGPWLEMRITATMSYHLLPIRMDITKKSKNNRRWCGCGEREHFYTAGGNVN

SEQ ID NO: 926386 - protein, 140 aa, Homo sapiens
MFTPRSRPAVALAYRLAPPVHSACKGGGTWKTAEQRKVGLSPRERPADPALSRDTIEQSGLARKEVYLALELHFGIIGVWKVQDWASVSDEGLRLLPFLAEGRGEPRSCGERGSKGERRCWALFNNQFFKDLLEVEFSHP

SEQ ID NO: 926387 - protein, 135 aa, Homo sapiens
MGADEDNDERVGSQRASWGHTVFRFYIECVGKPFEQGMTGEPHLRLCLEEMEDSTIGKLTCLQALCPIHKCSAQLCLINASCYVSYAGPVVLKPECILENLPSQHICVLKCPCFLYDQFYRRAAIGKILKNSFLP

SEQ ID NO: 926388 - protein, 140 aa, Homo sapiens
MVFTLLIWPTELKIPGEGETVDEHQKQRRGRASRGRQQEGTWQDVGEEVQRFYAFPGHATFQKPPGVPLTGSPLIPVLLGFSGGFNTQALIKPLTIGHCDQLKPSTPLPSLDNVGGTESPNPPLILSLVFPVTSPHPEAS

SEQ ID NO: 926389 - protein, 155 aa, Homo sapiens
MLPNKCVSSIITPQYSYGSLLVLILPVAYLLSPSPLYCRGGRVIHPSPAQKGPKAEFLQKPLAQRSGLAGSSSNPHSIRGSPRRPFLQLPATLTDCFSCLGNEPFLLSMTKSCMAQVPEATLVTGGRMAVFSELHGELSVAFHPWRHLQKESLFY

SEQ ID NO: 926390 - protein, 139 aa, Homo sapiens
MNKPLTPPQLVSPALILKGNRFSCALSVNVAFALPSVWETHPCSHVGSAGVCSVFPLHLTRVQRGGADLRPRGTADPGGYQWTPGLKTRVENSSYSYIFKEGQMCELPSLGTSSMSCHHFLTTTNLGTRVRNFSSLLHG

SEQ ID NO: 926391 - protein, 162 aa, Homo sapiens
MNILTKCLLGIVFCSQVSEPGLEAIPRGYHLVPLKGRQHIQARPGAHSGTPTPGSIPTFRQEKLAHYGTSFFHFKLAVKILIKHGMLFIFRVSPSVIPAVCRKLIQAHLRQTGTELPWNHQCLRHGLRAGLVAGIGGSEHAATHSGIQRSWGSLNWAGVSFN

SEQ ID NO: 926392 - protein, 138 aa, Homo sapiens
MAQVPEATLVTGGRMAVFSELHGELSVAFHPWRHLQKDKTKSASIENKGTTGYGFRDEHVDPGRASGTQAKNFRCKRMKKISCFSVDLPSLWKTSLELLKVNLQRLLMKKAKNQRETGSWIQSCLKTQPWMYQLCNKI

SEQ ID NO: 926393 - protein, 175 aa, Homo sapiens
MAFTIIPAQGSVLASQTKGGEEKGVGRETWEENQCRERMRGGKSYICCHFLPGQKTSQMNLQHSEPARATALSPHSQAVHAPLGRAHAEGHPGWRKCLGGGPGACTRLDLPESHENWSEKCHAPRDFCFILEIKLDGACKVFNTRSGTWEVFKISKRCEYCCWWFHFILNVVKYT

SEQ ID NO: 926394 - protein, 151 aa, Homo sapiens
MINMPEASQGVGSRIFSIPCSLFATKKGREILRTKNGALFSHFHHLYPSPSDKGSSTRFEKNIEKKKNLETGQFGEAFGEPGVPKRPTRQLQLTRGLVREEGEAGRGISRTQLTGHQPERASWGLLAGPLPSPGSSPPQTSGLCTQTAACQ

SEQ ID NO: 926395 - protein, 139 aa, Homo sapiens
MLQSTMTPGLLLANPMPMSTQCCPTLQQPGKDTCLAWVALTIKTPDVPTFMEKPGMAQCPSEAAKILLCCHTILSFCNVTSWLTSSSAKRCRGALPGPPTLGNAFVLPYIFLDILTLLPGQKVIPKAPPQPLSWPTLST

SEQ ID NO: 926396 - protein, 142 aa, Homo sapiens
MALGREMENGRNLPGPLIQMPKLLIALAVPQATWTDPGVGGYVIGHGYGGGPTPPPWDHMEYQDYVSHAYMMPSVHPRTGSMFSSNILQGASPMAAFGGLLPLWSSWELVDAGEHARARCTLETSKSNLLVCSNEIKAIKES

SEQ ID NO: 926397 - protein, 115 aa, Homo sapiens
MLADYAEISRKRVATSRSLGHCHGKGQGVAMECGHGNGKLTWHNGRHVSRKAASTPPLFQLFLNLVQCSSPTFGVESHLLPQNHHHNQDLECITPKCFFMSLAPCFQSPTAPSEY

SEQ ID NO: 926398 - protein, 155 aa, Homo sapiens
MISSDSMSHTKVMLMQEIWGVHSRSPSAGPGHPPQITFYRLGAPTRRSPSAGLGRSLQITLCMSRAPTKDHLLQIWGIHPRSPSAGPGHSTQITHRRSPSGRSPSAGRGRSQQTTLCRVRPGGLRAAGTEVFGGDDTDTPQTSAGCPVSKCPAEM

SEQ ID NO: 926399 - protein, 119 aa, Homo sapiens
MDFSGKSWIWVLHPSPQPHLKTERKCFKRVAWGSWCVPCSQEDTGACGCLHLGDPEVADLSAEQERDSFSSLGTACSPEFTGMPPTGCAGINAFLQGTATPTERLPGDGPPGTQGLRPW

SEQ ID NO: 926400 - protein, 128 aa, Homo sapiens
MADSWEQGKEERWGVSILDVNLFIPFVVSPHLQPLNSKDNKTPISCRDRNGYFHGHTWKTRRLEKTWGWHLTAQYRCTAPRAEKGAVCVLPCFFRSSRKRPCYPPGANTKEEKGVFEDDRKVVHSNPK

SEQ ID NO: 926401 - protein, 179 aa, Homo sapiens
MPRGEGLLSHLHAALQSFIGFSSSAHTPHPLPFLCPSSMKMTCPKISARIHMDSNIIKVGSTALRIWRRVSCPCPPGPPSPGSEAAILSQPSSDPGRAETHTTLHDAVCPGHFCSPKISTCNVYVAAVNDEFLHFGNGQSESSRTIYRNFEMENTWNACFDWTLPGQSEDLRASGHVVG

SEQ ID NO: 926402 - protein, 135 aa, Homo sapiens
MKTMMMVLVTVIIVVVVMVLVRMMMVVVVTVVFVMVAMMMVVVRVIIVVVVMVVVTMMMVGGGGGGDGGGDGGGDDNGGDGGGNNDDGGGDDGGGGGGGGSKDGGDDDYHLLSSYSATQRSKGSQPSHEPSKIGR

SEQ ID NO: 926403 - protein, 171 aa, Homo sapiens
MGSRLDEARFNVQAAVRMGLMETVQVIGMKDRCPGLDMGIISILVIWANSVSWVQGHPSGGLDDMKLSQRKIMCGLAIVALQANTPCQWYTTINISVIPVAVGWLGLKAPTGGALLGSSAVSVWCSLSGPCRCLSIGFCKVPGAAVNSGGVSQQGSTEEVRIRNGLGTGHG

SEQ ID NO: 926404 - protein, 150 aa, Homo sapiens
MYSQNKGLLHKEGQLATVTWETKGGFSSSGGSGMPERGTLWLPLDDPLCTKHAGPGLKRASAVGLLDHTGPESLGEDDSEIQSGSPAVGAQETIRPNIPGLSTGLVAENWGISPGLKALKGPTSPLAVCISCPLQGASPKGRTGWKIWGS

SEQ ID NO: 926405 - protein, 141 aa, Homo sapiens
MIMNDCVTGFQIYHTIIVIVILGCTPSTYKKKLTVKQPQAGPSGRIPEEDIATTGEIRSKRKMNGKGSHQRTLMGKWPSENPKESWAKIQGGNGAKELDISHSLTHWQLSPWVTKCRHYLRLNSHVFFEDKGLLLKGSWRL

SEQ ID NO: 926406 - protein, 209 aa, Homo sapiens
MDKSTLLTSKIDAGLLMSAPQILSHPSTHWLCLHAVATILSLPLSGSDSSDIVSLAVKILLMSIDSCDSHCILSSVPQLITFKPNIHISHGHPMDTGWDRSPKPSRKTPFSPFSILTANHQPNVKERHNHQNILANNIGHWKSHVPGKPLALDKPGGLVCLPSNTTARVYSKKIDIDVYQDLTKALLPEHYFKHENTANGLNVQQQSSS

SEQ ID NO: 926407 - protein, 134 aa, Homo sapiens
MAMADCPKLGRFLKSPDLELHYLLITNASTCQYPTSNSIVPGPREFQASPESCQEETTPHREVLSALQPHWQHDLGQGMDLKVPHLMREKFILEVMFAQSLSSGAEDVGQGCTSSTRGPRDLFLPEPVVSIDTS

SEQ ID NO: 926408 - protein, 156 aa, Homo sapiens
MSFWYVLESGNLQRVCPAGLPRCHGTQGEAKDSPAATSKSGHKQWLLSANGSITLPTIYLHFQNKQPSKANSPVQLACLPDRGSCGTCVPPGKAGSSADHRWLSGCQGSVTQGKRDEREWGLSPQGAPSLLGGTCLNALSQNQYLKRSPHNVHWKI

SEQ ID NO: 926409 - protein, 160 aa, Homo sapiens
MRVALEAPQYPSHLCFIQLVGFCFVLALTHSPIFCISLAKEIHKTSSHSRGRKIDSISSWENLQKSLFKKSRYSEKKYPDALCGCCGLIKTFSLQDHIKLDCIWNGPANIAKSCNLQLENNLEGSFSVASLDKQEVVGPSLLWNGPAQKERGQKEYWERF

SEQ ID NO: 926410 - protein, 126 aa, Homo sapiens
MSGLVRRKHVIRGWLVQPANFLPVCLPVPGTGFFCPDSGKSTCMTPFFWSPGSVCKEAREENCSWAKASCCFLTPSLMTVDSGGTKPSEIRCWIDPKYQFTSPERTSSSACPTMPTGYECQGEHGK

SEQ ID NO: 926411 - protein, 178 aa, Homo sapiens
MPVGFTPWPVEGKVASAGLYGLKSGLGRPHSCGRFKCHKAMVLPRHPQSLSHLTSSIHLPISPNECRVPKLPPPTTASFAAPGFIAATFQTSLLPWEELVEQLAFLGEIHWLLLHHSDHASSSLPSPPLTLLEDGEEADRGRKSKTRKGLAPPFSRIEILQITHNDCGKNWQIKDSWY

SEQ ID NO: 926412 - protein, 152 aa, Homo sapiens
MITNTAGFLNSGTVDARGLMTFCPGGCPASIVGSSAAPRLTPIDASGTPTPPSYHFWRGREFDGFCNNEIDETDGRCQEFSRGQGDGEATALCQKQGREREDTKINRNKIPENKALLIWRKQKEGESQHGRFKMVTTEIFYSTGMENQLSSW

SEQ ID NO: 926413 - protein, 135 aa, Homo sapiens
MTAAAVPITSSRHLGERLINSFPEAGEMPLLQNNFPSQMFYQFLEMVESVHGCDASGPFQCRYCPYSASQKGNLKTHVLCVHRMPFDNSQYPDRRFKRSRVDSEASGNFEEPTAVKAGSSADLTEEGGKGQEETN

SEQ ID NO: 926414 - protein, 143 aa, Homo sapiens
MHTHVCGMSADRHLLSRSTLKQQTWCSPIFMGALCPAKGKPGLFPRAWNGHGKGVFLAEARISRWFRNRIYPAPDPPGPVTWPLSDQDLQEPLSGNAAKVHVSYDLLHSCEKMLLVLSKQFYHRLKKPRKKIGSQRQPYAYLT

SEQ ID NO: 926415 - protein, 176 aa, Homo sapiens
MINAFCVVLGQDRPLGSNQEPALPSLAICLKHLVIRCKPHTGAFKLKCAVTLPPTLAFVTQPGCPSLCRGEQFGDGNPTAGTGNSPWLSRDPAGREAGPVSRPGCPLPPGSMDMSPANGLAFQSREKIAHECLLYPSGSSRSQIFGSCRKGEMLVSFMPPPLLRKERACPHSCQSP

SEQ ID NO: 926416 - protein, 141 aa, Homo sapiens
MGDFLPHFQGGLDQIPASPLPKPNPLQVLDSLAVQERNVYMNIVARIVSGHRYIFTFRVESFGGHRGAAVPLQRGCLLREVLASAGWTSLHCSMGAQSLERPFCVDVIESSDVHAPPVHSGILSDRSNSVHSHPPRPLRSP

SEQ ID NO: 926417 - protein, 192 aa, Homo sapiens
MLTFYITTDRYCTPACATDLDLVFKKKRKKKKEEEEKEKEKKKKKKTEEEEEEEEEEEEERRKKEKKKERKKEEEEEKEERTEPKNLGQGPVGRRLIFGSDFREFGIENWEDRKTEGRKVNLGAYLSTGSIPIGPGLSRKNFHFYFILGSCVCRCFTSISFHTPVGLCRTRGWLYPLKLFDSSVLSKASVLT

SEQ ID NO: 926418 - protein, 122 aa, Homo sapiens
MPNDTQLESSLGPAVLAPTTRFQQGFQRRRINPVIVTPIMKNPQRRQSDTKTTKPREDCQGVVDPGGCCVDEYETSQVIHTLSKTLWSQDGLAQRSEADAEVSDQAILGHVGFREPKSASEA

SEQ ID NO: 926419 - protein, 474 aa, Homo sapiens [sequence omitted]

SEQ ID NO: 926420 - protein, 125 aa, Homo sapiens
MLARLWNKGSAYTLLGALPGCSGTTNLNSTFSQQGVSGAYFPNQRVFLKPDSIAHKDLELTLKVTAAPSFTLEGFGVMLWLLFLSLPAAPGPALSFTASSAYSVLWVAGAQLTLTQMFLLNFPIN

SEQ ID NO: 926421 - protein, 148 aa, Homo sapiens
MSVQQCSAGKAELELRTGVQEGFLEEEESTWPNGFLQEKCGGQLLAPTSPLGSEPCLMRLASKDSIPRALVLAGLDFFRGLKAEGPSGGQRQEGYVPCLAGGTPPTLSPAALTQNCQLGAGRMLVWAGQLFASGAHNSVYHRHALCTY

SEQ ID NO: 926422 - protein, 142 aa, Homo sapiens
MSWTQSQPPQWYQFHKYCFIKLSVSVQRDGFGNVAKLVAMRRKTPRCQCHFACPHCASCHSAGPSVNSRSWPDICPKDVKQLRVKARPFQALGFERVVYAGMEGLLGEEHPPERFEQLFYIPNTKAIVSYLPVSAHTNLLCF

SEQ ID NO: 926423 - protein, 139 aa, Homo sapiens
MQTSSSGGQHHTNGDPVDMGSSCSCNRTQFGCVLLKHQTQGSSSGLGETGTWVPSAMAHGLSPSCCSSPVPSLSSQAPGRVGMGAHWVQIQERPAGSSLSLKQEAPEQRPQRLPSGPAAALGLAQVSLAPRGSSKPLQL

SEQ ID NO: 926424 - protein, 140 aa, Homo sapiens
MNTPVCLDLPQEALWLYDMELVTYGKQPQPDYSISPITEMVWMFIPSNLMLKCDPQCWRWVPVGGNWVMGVDPPRMAWCPPHGNEVMGIGVVLMITDDGTRTERVGSDGLKIPIKWLDGQSPVKAQKGGKFVGIEILAYL

SEQ ID NO: 926425 - protein, 174 aa, Homo sapiens
MSLCMYPLFSSLITSPLCLSHQPLPCAHHTCPLPCAHHTCPLHCAYQTCPSPVPITPVPSPVPITPAPSPVPITPAPSPVPITPAPSPVPIKPAPPLYPSHLPLPCAHHTCPLPCAHHTCPLHCAHHTCPSPVHITLKATRSHTILSLVHPGIPSMPLPKLHSFTLPRTLSGAS

SEQ ID NO: 926426 - protein, 141 aa, Homo sapiens
MDPNLLTVRQPEMNANVHRNKWMDAALKLEYTQCPLWKQLTVVLQRWVGAWTTVAAVQWSGVQPERGATRWHAAAPCCVEESDTQEQMLSLSCAEHTAASPEGRKGVQRLQGAAGECAVTAVGAEGGMRGDCRGRGGRNAR

SEQ ID NO: 926427 - protein, 173 aa, Homo sapiens
MRPPYVTVTDIVGSSGSVLLCHFSLVPPYHLGSITLRPYHPGGHITLRPYHPAAVITRAASPCGRNHPVAISPRLHHPAAVSPWRHHPAAVITWWPYHLGSITRRPYHPGGITLRLYHPAAVITRAASPCGRNHLVAVSPRLHHPAAISPWWHHPAAVSPCGRNHPGGITLRP

SEQ ID NO: 926428 - protein, 352 aa, Homo sapiens
MDDDDVPSWPPTKLSPPQSAPPAGPPPRPRPPAPYICNECGKSFSHWSKLTRHQRTHTGERPNACADCGKTFSQSSHLVQHRRIHTGEKPYACLECGKRFSWSSNLMQHQRIHTGEKPYTCPDCGRSFTQSKSLAKHRRSHSGLKPFVCPRCGRGFSQPKSLARHLRLHPELSGPGVAAKVLAASVRRAKGPEEAVAADGEIAIPVGDGEGIIVVGAPGEGAAAAAAMAGAGAKAAGPRSRRAPAPKPYVCLECGKGFGHGAGLLAHQRAQHGDGLGAAGGEEPAHICVECGEGFVQGAALRRHKKIHAVGAPSVCSSCGQSYYRAGGEEEDDDDDEAAGGRCPECRGGEGR

SEQ ID NO: 926429 - protein, 385 aa, Homo sapiens
MENTDLADWDVEGQVFIQTQKTPKVLNCKNLSNSNNLNDGRMKSESDWIKKEGKGVAKVGGDTLWYKSPWQAALTPDLSCPQKQLEARGETPEGETFAMAEHFKQIIRCPVCLKDLEEAVQLKCGYACCLQCLNSLQKEPDGEGLLCRFCSVVSQKDDIKPKYKLRALVSIIKELEPKLKSVLTMNPRMRKFQVDMTFDVDTANNYLIISEDLRSFRSGDLSQNRKEQAERFDTALCVLGTPRFTSGRHYWEVDVGTSQVWDVGVCKESVNRQGKIVLSSEHGFLTVGCREGKVFAASTVPMTPLWVSPQLHRVGIFLDVGMRSIAFYNVSDGCHIYTFIEIPVCEPWRPFFAHKRGSQDDQSILSICSVINPSAASAPVSSEGK

SEQ ID NO: 926430 - protein, 355 aa, Homo sapiens
MQLEKMWKVSNSQTNPTSIKKEGKGVAKVGGETLSYKSPWQAALTPDLSCPQKQLEARGETPEGETFAMAEHFKQIIRCPVCLKDLEEAVQLKCGYACCLQCLNSLQREPNGEGLLCRFCSVVSQKDDIKPKYKLRALVSIIKELEPKLKSVLTMNPRMRKFQVDMTFDVDTANNYLIISEDLRSFRSGDLSQNRKEQAERFDTTLCVLGTPRFTSGRHYWEVDVGTSQVWDVGVCKESVNRQGKIELSSEHGFLTVGCREGKVFAASTVPMTPLWVSPQLHRVGIFLDVGMRSIAFYNVSDGCHIYTFIEIPVCEPWRPFFAHKRGSQDDQSILSICSVINPSTASAPVSSEGK

SEQ ID NO: 926431 - protein, 151 aa, Homo sapiens
MRWGRGRGRGITVGVACLTFRPSPRSTLSADAGPECYELQVCVKDYCFAREDRTVGLAVLQLRELAQRGSAACWLPLGRRIHMDDTGLTVLRILSQRSNDEVAKEFVKLKSDTRSAEEGGLGNSTCEGQERRTVETTRRVARLELSQQGGS

SEQ ID NO: 926432 - protein, 136 aa, Homo sapiens
MGAQGPTPSCAYLSCFAPSPPIHRQYALSAQNRFPFRLGSAPHARTTPLRFRARPNPWFLVPAPPLRRPGPAPPPASRFPGPARAAPVTRTRDGGGKMAESGGSSGGAGGGGAFGAGPGPERPNSPGDILICFHSL

SEQ ID NO: 926433 - protein, 305 aa, Homo sapiens
MPDIRKRKPIPLVSDLSLVQSRKAGITSALASSTLNNEELKNHVYKKTLQALIYPISCTTPHNFEVWTATTPTYCYECEGLLWGIARQGMRCTECGVKCHEKCQDLLNADCLQRAAEKSSKHGAEDRTQNIIMVLKDRMKIRERNKPEIFELIQEIFAVTKTAHTQQMKAVKQSVLDGTSKWSAKISITVVCAQGLQAKDKTGSSDPYVTVQVGKTKKRTKTIYGNLNPVWEENFHFECHNSSDRIKVRVWDEDDDIKSRVKQRFKRESDDFLGQTIIEVRTLSGEMDVWYNLGERSWEEFGRGA

SEQ ID NO: 926434 - protein, 871 aa, Homo sapiens
MANLSPLALPCSCWDGGSLDFRPGSPPPHLLGHFPGTPDGRGPWEHPLVQEAGEGILSERRFEDSVIVRTMKPHAELEGSRRFLHHRGEPRLLEKHAQGRPRFDWLQDEDEQGSPQDAGLHLDLPAQPPPLAPFRRVFVPVEDTPKTLDMAVVGGREDLEDLEGLAQPSEWGLPTSASEVATQTWTVNSEASVERLQPLLPPIRTGPYLCELLEEVAEGVASPDEDEDEEPAVFPCIECSIYFKQKEHLLEHMSQHRRAPGQEPPADLAPLACGECGWAFADPTALEQHRQLHQASREKIIEEIQKLKQVPGDEGREARLQCPKCVFGTNSSRAYVQHAKLHMREPPGQTTKEPFGGSSGAGSPSPEASALLYQPYGAAVGLSACVFCGFPAPSESLLREHVRLVHAHPHWEEDGEAYEEDPASQPGTSQDAHACFPDTAVDYFGKAEPSLAPMWRENPAGYDPSLAFGPGCQQLSIRDFPLSKPLLHGTGQRPLGRLAFPSTLASTPYSLQLGRNKSTVHPQGLGERRRPWSEEEEEEEEEEDVVLTSEMDFSPENGVFSPLATPSLIPQAALELKQAFREALQAVEATQGQQQQLRGMVPIVLVAKLGPQVMAAARVPPRLQPEELGLAGAHPLDFLLLDAPLGGPLGLDTLLDGDPAMALKHEERKCPYCPDRFHNGIGLANHVRGHLNRVGVSYNVRHFISAEEVKAIERRFSFQKKKKKVANFDPGTFSLMRCDFCGAGFDTRAGLSSHARAHLRDFGITNWELTVSPINILQELLATSAAEQPPSPLGREPGGPPGSFLTSRRPRLPLTVPFPPTWAEDPGPAYGDGAQSIGGAGLEGQPLSFPGSILSHFTKYVDDFPYNHPAI

SEQ ID NO: 926435 - protein, 177 aa, Homo sapiens
MSETLPNRRDRLPQKTPASLPPAAAEAEEGAFPLCLGPSGHSDNRYPFRSTINPSPVTPATIAGPTYPWTPSWSCPQASSPQTSAAGSDVRDPTSQGLPPPPARLLASPGRGALLLPWQGGPGLDPALGVPARSGQWDRPVLWPRAAPRRLRRSHSCVGLSNRHRELFKMQAMSLPC

SEQ ID NO: 926436 - protein, 149 aa, Homo sapiens
MGTLRGLEPSPGGTSSLGKKKLDAHTPSVEGSGLGQRKAWNLGRAWGTRVVGPGLRTTATFHAHGLTLDLISSCSPLNCDILMSPNSVASNLFGTRDWFCERQFFHGPGCSCPPVSGGFGQLEALAEDLKSLSAPQYTDACWAIFVFSP

SEQ ID NO: 926437 - protein, 259 aa, Homo sapiens
MLFTAEYSGLIRCAFGTWWVNHPQAHTDPFVERQNAGGGTGQVWAELSTSVAVMDSDTTVRCKPQVEKAFHLPRVEGILKTVQKMRMYERRMQENGLVPTTMPKAKITSSLVCVSEPESFSRGMRSQKKWEISEPAQKQQPTDRGAHENQVTLWVDNGHEAVDGHYCQEKAVHGPEQVEGIHLEDAGASSPGTTLGELLHWRNLFLKTSPICAGVLQLQTLSAFPPHILPQRVCRWHHQGEGPGKPPSPPTARGSRGQH

SEQ ID NO: 926438 - protein, 159 aa, Homo sapiens
MSLVVHPNQKTQASREKDSGKCSLTWPSTYEASDWTLEWYSQKNSTLSPSYELTANSKWHRKMVSFGLPSLLRGPLIRRAESTPKTTSLSASGKHIKTLDAKARVGFPDWQHSACTVPHGCPQKTALGGDSWKLCTWDIPGCFRMCLCPRLAFICFLSL

SEQ ID NO: 926439 - protein, 128 aa, Homo sapiens
MIRSCTFYARASARASLYLQLWGHCGAGGGWRPGKSPGWRGLMSDISQARALELLDREFAGTVMQHTTQHNSTQHNLPQQSSVRCTGLQQSMAQGPGSHDTPYKRILGDDCDANLTIPLQFKKGHGNR

SEQ ID NO: 926440 - protein, 143 aa, Homo sapiens
MAGGDDFHRYLLVGLKGAAQKPINLSETTEVVQGPDEPGTLLESLQEAYQTYTPFDPAAPKNSRAINLVFVAQAATDSKRKLQKPEGFAGMNNSQLLEVAQKVFDNRESEKRKQAAEAAEKAADKASKRQAKILVVAIQEAKK

SEQ ID NO: 926441 - protein, 133 aa, Homo sapiens
MPSISCTTMLLLHLGGIALPYELNSLKNLRRAIDFQFVQPFVVVRMGVTSSLHAGMETRSLDLYFLFLVIKFSFPYTFVNISFSCGNFQKLSQAKLELLSQGYIIEARYQTARDDPYSLKPVKLFKLINPQGA

SEQ ID NO: 926442 - protein, 122 aa, Homo sapiens
MNCCIWIREPPDIMLAAHVAEYDNAYQEWEILSGEGICVGVSVCPTREGPAQHTVCFALSKEPQLQVDFHTGMDEDSDIAFHFRVHFGHCVAMNSHEWGVWKCEVKSDNMPFEGGQSFDLRI

SEQ ID NO: 926443 - protein, 130 aa, Homo sapiens [sequence omitted]

SEQ ID NO: 926444 - protein, 162 aa, Homo sapiens
MLSQVPGPPSSASLCVASWQLRSPGFGGDNEGVSAYHHLPPKMPSPSFLRVIASPMGDSHLLALPDGEGASCCTPHSLLPPPLSAFLPPHLDGTKRQPQMHLPFYDSPVPWASEMYGKCSNILLTPTPTITHTLMAFHLPHPWAFAYTDWAGLGDSWGQQSP

SEQ ID NO: 926445 - protein, 149 aa, Homo sapiens
MWQSGGDHYLAQRARPLPSDPIHPTDPTDAEPTEPQPTDALAALSRFPVELGSKRDLDTQVGRLHHLAVAGGPGWGPARLLRRGEGLAAGTSVAAGSRSCMEGVASVGQSAVVPNTDCVPSSVVPDGALRVNMTLGPLGMKCSGMRMRP

SEQ ID NO: 926446 - protein, 271 aa, Homo sapiens
MYFFLSNLSFADICFISTTIPKMLVNIQTQSRVITYAGCITQMCFFVLLEALDSLLLTVMAYDQFVAICHPLHYMVIMSPWFCGLLVLASWIIMSPWLCGLLVLAFWIISDLDSSLHSLMVLSLPFCTDFQIPHFVYELNQVIRLAGSDTFLNDMAMYFAVGPLGGVPLAGILYLYCKIVFSIRAISSAQGKYKAFSTCASHLSVVSLFYGRSLGVYFSSAPTQNSHSGAAASVMYTVVTPMLNPFICSLRNKDIKRALNQFIRVVPFFRK

SEQ ID NO: 926447 - protein, 140 aa, Homo sapiens [sequence omitted]

SEQ ID NO: 926448 - protein, 229 aa, Homo sapiens
MQREIKLGPVAPQLDALLVNKQTLAHFAEPVVGDLALAQQLSHPPVNLVLRAAEAGGGEARSTRVRVHHLGGLQGARFARDALAWRRLLQGAAAFDHLHAEAPGLDVGGAAEVVGHVRVQHAVLGLPHGHRLLPAAIGQNVRGPRHGLSCLAPCWGPNACVLAALSRGNMALLPALGCPKRFQLSRSHSVACRTWPFFQLQGVRSAFTLGSLGLAVPTVIHLRVSEQKQ

SEQ ID NO: 926449 - protein, 125 aa, Homo sapiens
MDGHWACFQLLAIINNAAMNKHRQISAGVPAFHSFWNTPKAELLHFVFPTDKHQGRSWSVAIKNTAVTSLEWVPFHAFAIPRSTLVSQQVSALVRGCDSSLRKYGNLLPFLAAAPPVWTAYGKHP

SEQ ID NO: 926450 - protein, 166 aa, Homo sapiens
MGRNQSRKAENSKNQSASSPPKERSSSPSVEQSWMENDFDEINSVEKSLNDLMELKTIAQELRDACTSFNSRFDKVEERVSEIEDQMNEMKREEKFREKRLKRNEQSLQEIWDYVKRPNLRLIGVPESDGENGTKLENPLQDIIQENFPNLASQANIEIQEIQRTP

SEQ ID NO: 926451 - protein, 139 aa, Homo sapiens
MLTAWRVSLVLTLTLCVLQFFPYGTVGGADMRSIIFKNHAWGREEKQDKGALTQDSFSPLSQEKGDFQSIQTRSLIQWVHVQVCYKGKLYDAKGLTSIDPIIQTVNVVPNRNSVLVLIPPSLLLDSTGCVVPIFMSICI

SEQ ID NO: 926452 - protein, 151 aa, Homo sapiens
MTAATSLGDECYGCRGPCEGGAEWPGHLATSLNNPFIFFVDSSGGEIYSPAQLCSLFLTLQPWFRLSRTFTHYVLDLCDGASPLPLHHILEHMEAFPRLFQLASFLLSSIELRSPEAEVAREVFPREMELELWLGGIVPIWTLSLCFTICN

SEQ ID NO: 926453 - protein, 145 aa, Homo sapiens
MKYVWLPSLFIPSPSDLPWEHRIIIPESHETFPFSKAMEKATSNVNVRISSKSNWTVEEMKASLSSSTPDKTGLRVLQEWLGSREFLEVCSSTPAGYLPHPLVPRGGHSVGQLASSKAQDGFSLKTLKRYMVDAKAFGVDNGSPA

SEQ ID NO: 926454 - protein, 162 aa, Homo sapiens
MTKPHAKKLITKELGSQIAPKLHETSPHLCADEWPTLEPRLFLPSLETTEQVLQIGKETSPTQWGKSFKELSPEDQKHAWFTDASTKYIGGNQCWKAVAYNPIKNKSISDEGRGGSSQLAELVAVPLSYSEGDQRDFSLLYQLLVNTKWSYYLDAPGNKANG

SEQ ID NO: 926455 - protein, 167 aa, Homo sapiens
MAGAQSQRALVTEPHAKQLVTKRARVQDRTKASRDLSSFVHGRVTASGAQAVSSCCGDKSSIVWENPTRLGCPNSSEQAGGKAKSADSQRMQPLLPLGAQAQGDHSSVPEPLAGAVGVPAGRPCPDMGHQVLKSGSRKHKHGRVQALGTGDLPQEVSKYTKGNLEVT

SEQ ID NO: 926456 - protein, 330 aa, Homo sapiens
MLSGGFEAMPGMLPTSLRPLPDTFQPVLQPQHVPPLNTFQQPVQASDGRRARQPWPQQLFRGNQDSQGSDEVMMPRTTTQVEHDLRDELHGRPPSAGAVPRPPALPDVPQQHREKAWKQGKRKAFCMAQHLLRKENKKTASDPSRAGQREGGHHLGEWMWVSKTNTGYVAWSWEEVESMIDSFICFLKKVDDGAAAQPQGMEFTASSPSTFTGGAYNTIVKLFPDWPRQDLDSVWDLLLLSKQQRIKFPDILHVHRGALTKVTGSRRLVGGGMMEVRGLMAQARPPLIGSNHQSASGQSCTDQVPADELLTNQAPGNQVSADKNLLKGVR

SEQ ID NO: 926457 - protein, 174 aa, Homo sapiens
MCLLPRKEPYVPSTHRHWRASDCSVTQRQAASRVGEHLCECVCHTHVHTHVLITVTLGPMVSIRASMGAPQSLPSPYGSVLGMQTEDGGKEASGTNCLPEVTQQPADQFPLTQSLLTRTGLLIQDTGRDGQPQAPGAPTRLSGPISKGTVRGPGTTWTCHLALFLSLGARGTEG

SEQ ID NO: 926458 - protein, 158 aa, Homo sapiens
MWQRMELSRRPCKTAEVQQQKKQTFRNFTQRGVDLDQLLDMSSEQRMQLNSARRRRLNPGLWRKQRSLLKRLRKAKKGAPPTEKPEVVKTHPRDVLLLPAMVGSTVGVYDGKTFKQEAAPVTGPSAAELISWERSRSANCAGDAVVTAGGMQATIVQP

SEQ ID NO: 926459 - protein, 473 aa, Homo sapiens
MSLAIHSTTGTRYDLAVPPDETVEGLRKRLSQRLKVPKERLALLHKDTRLSSGKLQEFGVGDGSKLTLVPTVEAGLMASRPEQSVMQALESLTETQVSDFLSGRSPLTLALRVGDHMMFVQLQLAAQHAPLQHRHVLAAAAAAAAARGDPSIASPVSSPCRPVSSAARVPPVPTSPSPASPSPITAGSFRSHAASTTCPEQMDCSPTASSSASPGASTTSTPGASPAPRSRKPGAVIESFVNHAPGVFSGTFSAHMSTPLPELMSSHPWTPVLDMRDCARAGHSRPPLPAGTLHPNCQDSSGRPRRDIGTILQILNDLLSATRHYQGMPPSLAQLRCHAQCSPASPAPDLAPRTTSCEKLTAAPSASLLQGQSQIRMCKPPGDRLRQTENRATRCKVERLQLLLQQKRLRRKARRDARGPYHWSPSRKAGRSDSSSSGGGGSPSEASGLGLDFEDSVWKPEVNPDIKCEHHVL

SEQ ID NO: 926460 - protein, 150 aa, Homo sapiens
MKTTARPTPSLPPPQPIQHEDDEDEDLYDDTLLLNEYFVSPNLGDAEFLGLSRSAQHRLKTKVDSVHYGGTNDANNEDPARYYCYRNGVPIQTPREGSWISRKKEFRQYDLLMLLNIPWRKTLLCWDGPNQLQTQTADVCPACALCQEWG

SEQ ID NO: 926461 - protein, 144 aa, Homo sapiens
MTREDRPWRGEGGSGSIQAEGTAQVQAGYDRAGPWWELCTCHVPATVQGPSLPPASGPQVPSCPRLFAWAVPSAWNALPPMWLFLYSHLVHLHILSDQHIAAVPRLRFHRLSRCPGACRYAALRFCNSGMAWAPAGSSWNPGMC

SEQ ID NO: 926462 - protein, 155 aa, Homo sapiens [sequence omitted]

SEQ ID NO: 926463 - protein, 137 aa, Homo sapiens
MPDGPRTTPSPSCLESPEDHTHVHAGTRVYLPKTSTGPTQLCSHSRAQVDPQTWDEASSSATFPVSPPRPDVPWQMRSLSSVGEREPNSRALSIGQLATLVSASVSLPAPWRREASHPLRPHPVSLGPFLASISGEP

SEQ ID NO: 926464 - protein, 134 aa, Homo sapiens
MKSPNLVIGGFTDTLSKKKEKKKKKEKKRRGRGRRREKRKKNKEQPRARPLELGSRSFSGDLEMSVAPVLKRFLHHHFQDALQCRSVFLHQEAGERPGVGGIKDAEAECIRYSGIFFPGGACEEELGRQRGSSV

SEQ ID NO: 926465 - protein, 158 aa, Homo sapiens
MATFLLCSHMAETEQTLWCLFLNCTAVLPVGMEQPVRDQADTGSNPERFGSDTEVNLHPAGSDVLTGVPLGCGAVAGVIRFSPNEGARPELDVRVKPVLECPGCPDLELGDGGCRAETNLRTGESISDLIGGFEKPSVPLGASVSPSVQRDDGDDEMR

SEQ ID NO: 926466 - protein, 151 aa, Homo sapiens
MFQKHMGRSLAYNRNSLPAEGTACAKALRQDLTWGVGGTTRRPMWLEQKINKFQAVTAPSARVLEGSDNLQVPGPKGHNCIYNGLFDYCSKTKPILTDTTGMEAFDTTEKGALHSASFESLHAYIEFAHSCYGTCLIAESAFAHNPPSSWP

SEQ ID NO: 926467 - protein, 429 aa, Homo sapiens
MPLCRPEHLMPRASRVPVAASLPLSHAVIPTQLPSRPGHRPPGRPRRCPKASCLPPPVGPSSTQTAKRVTMGWPRPGRALVAVKALLVLSLLQVPAQAVVRAVLEDNSSSVDFADLPALFGVPLAPEGIRGYLMEVKPANACHPIEAPRLGNRSLGAIVLIRRYDCTFDLKVLNAQRAGFEAAIVHNVHSDDLVSMTHVYEDLRGQIAIPSVFVSEAASQDLRVILGCNKSAHALLLPDDPPCHDLGCHPVLTVSWVLGCTLALVVSAFFVLNHLWLWAQACCSHRRPVKTSTCQKAQVRTFTWHNDLCAICLDEYEEGDQLKILPCSHTYHCKCIDPWFSQAPRRSCPVCKQSVAATEDSFDSTTYSFRDEDPSLPGHRPPIWAIQVQLRSRRLELLGRASPHCHCSTTSLEAEYTTVSSAPPEAPGQ

SEQ ID NO: 926468 - protein, 165 aa, Homo sapiens
MGSSGVFDYWRHGGVFCPFCSYGRNWASLGAGVPQVQPLDPTGPEEGEGQVGGFTERGMGGTQVPRCHPGNTPPAPRWVSTACRGQGNGLQAGQWGRRGGALPHQAARPLAAGVQWAGAGRELPGPGRGCRVQPRRILWKGGRGGEGRGSEGGVQEMGNLQYLRG

SEQ ID NO: 926469 - protein, 139 aa, Homo sapiens [sequence omitted]

SEQ ID NO: 926470 - protein, 154 aa, Homo sapiens
MSLIQRGNLDTETDPYRGEMMPPLSPASWRCRQGLLVHPFSRRKAWILHQEPPEGGAGGTGDIILRASHSQCAPDLIKIQRRPEFPDDTGAAGGKLHPQLWAPGPQEWLGQDGYKENLIAPELKPNVFEESCQDSVKVTQDASCCGEGLSLGLS

SEQ ID NO: 926471 - protein, 142 aa, Homo sapiens
MLGEQGEQGQIIFISCCQGQILGHSTWFWGTATHCCRPTEPVSSTPLLPIPGYSFLHHVLRVAPPALVPGSCPWGASGNVRRHCWLSELGESPQMVLNILELTDSPTSMTTPNVIAEEWRALRVQTLLPCVGAGDMAMRLCP

SEQ ID NO: 926472 - protein, 244 aa, Homo sapiens
MGFQGLNWAERQEIPTLIKKCPWSDKSCHTGQSSVFCTAKLSKPFVTISNSNPVENEDTAALTCETEIQNTTYLWWVNGQSLPVSPRLKLSNDNRTLTLPRVTRKDAGTYECEIRNLVSANHSDPVTLNVLYGPDDPNISPSYSYYHPGENLNLSCNTASNPPPQYSWQINGKFQKSAQELFISKITKKNSGIYICFVRNSATDSRCFTIKKITVTGEDVEKWEEKEPWGRLLSCVLVLKSLAV

SEQ ID NO: 926473 - protein, 143 aa, Homo sapiens
MACAACVFSSVEILKMSVVPLTYSQFFHQEMKDFTGSSTWTGIMDPREDCHSGDFGGMDWRPEATPRPKSLGRGWVQSCCGAFHMGPFPVEHESSQGFQGGPLPGRIRRNVAATRCRLLSGPEKRDLFSSFATHVCTVCIRME

SEQ ID NO: 926474 - protein, 246 aa, Homo sapiens
MLLLDQILAFIEKNAALAAAREFGDTWYLSQVNDRMTAKERDKFLTGQQAIPTMDPHWDFDSDHGDWSHKHLLTCVLEGLKGIRKKPMNYSMMSTITQGQEEKPSAFLERLREALRKYTPLSPESLEGQLILKDKFITQSAADIRRQLQKQALGPEQNLQELLNLATLVFYNRDQEEQAQKEKRDQRKAAALVRALRQTNLGGSERTEYGAGQSPSRACYQCGLQGHFKKDCAMRNKLPPRPCPLC

SEQ ID NO: 926475 - protein, 149 aa, Homo sapiens
MPSVRTVTLSARVRAFILEVSETKNPPVPDTKRYLIQQVDQYYWYYLLVSIVAILLIVKVRLLLQLRFKGNRENWGHECSQRSDCLLVYWPHLLYQLPSFSGKNGQRGAPSLTTHSFFVRDIDLLHWFLLNKSWRRALITSSESVTHPG

SEQ ID NO: 926476 - protein, 249 aa, Homo sapiens
MQVYYPGDLQSHSNDFQGPKYSNNHLKYPSLPCLSLTARDLDWQVAMADFIRNISFNLPASKLLNFLQTMPVKFVSIVVSEPLLHAITLFTDGSGKTGKAAIVWQDAMQNWQYRIQEHFKNYTTGRVRCLDIGLTNFPHQDVNILSDSTYAVYSITHLDLAHVKGITNEPLLALSLAAQDSSLPVITLFTSHIFALILGYLVPCQKGMLELMLWYDHRCGLQILLLFCELKLIMLFFIRTPAVLNNSFI

SEQ ID NO: 926477 - protein, 149 aa, Homo sapiens
MRYYPHHGSGKEWYPKVYGAGAASSSFTPPSPVQAISPVTYFGVDDGEDSWEFDGQSDHPKQHRKQAAPFRTSPTIQEVVEGRKETSERLGAECLGNRARRKLGLLLISKKNVFMQSGYIWGYILYEWVFSECIFLFMTHILPLIGISK

SEQ ID NO: 926478 - protein, 147 aa, Homo sapiens
MLPPFISSEPSSALRLSYELQSLPVTNGLARWPGTWKEHYWKTGDKEIWRRATPVIAQLAHEHSGHVAGMEVVFGFSNTDFHLPRQTWLQPLSHASLLAAETNTESKNDTTPQGDQPATWRAFQDYHATWLRSTENYNSPIQATLHY

SEQ ID NO: 926479 - protein, 270 aa, Homo sapiens
MPSTTTAALTPPHAWWVLLGSQCPNARGRWQCQGSRVQGPTFSKLDGAQTAAGAGASRARGLGPGLEQPEDAAETAGLSCTAVVSCAVGSLLSISSATGPARPPPWPGPAAAAERPRGARPRRLHTQQAAKKPSASTSSASPTTSSALCSGKKEAKAPASVTFTPASSAHRPQAQHSAGDGRPGTRPRARSAGAGTGGPSLFSAGGIGLRTPGTHQAPSCRRPGTAQLPGASSRWSCGQLPGASSRWSCGHTARGRRQQGILTSSPRLRL

SEQ ID NO: 926480 - protein, 145 aa, Homo sapiens
MPLPPPPESPFPIPAQPLLTQNSSANKDTAHGSCSLGYGDADNDAASHQPESHAGQLQAAEVSAADGDVHAGPPGALPPAGSSCCATAAPLGQGLHPGGVEQPVCRRILQRDRVLAHLKRPRPTSTAHSASVECSRSQGPGRARL

SEQ ID NO: 926481 - protein, 149 aa, Homo sapiens
MRQKYPSGRGIPLISSILGRRPLEAGWKPSVYKCLKTISQPSDLTLNMAPVGIVPSNHLVFQAQLSMEPTMKAAQEILSNLAPSLLLGCLHVSLWGCRLEQPPLSSKLFYRKPSDCPSLDAPSSFLHSTASFLQGCPEDTVQAAGSETN

SEQ ID NO: 926482 - protein, 225 aa, Homo sapiens
MSKFSGNFSLSTFTPTVQLTTQPNPRSNINSNNLHLGVHHPFPSPENEVDDTEVNVSKKKGDGDILNDLMKTAGTAKVREEVLGDYLKTLKTEFTMGMVRASSPVALGVRIPAMALPMRAQFDVTVEQLYSIFTMKDLVQKFSKSSAVLEAEKGGKFQMFVGNITDEYIESLTNKKIIMKWRCRNWPEGQMELQFDCKGVPICKEENMKFCWQKQHFEEIKDLLR

SEQ ID NO: 926483 - protein, 168 aa, Homo sapiens
MFTFQALAHLCSLAATQAGCFLCSVVQVSLYPSPSICQDCTHPSQGCISYSFPAECDTATACSFTWNLKYPTILGRGAGDWCPWEGRDSESHHPHCAVSLAVLVAEPSLGWIGAPWKKVAMLSGASTQDKACRMADFCPAQLLHIPHYPPALPISTLHPFPLTLSGPS

SEQ ID NO: 926484 - protein, 171 aa, Homo sapiens
MPRQKFAAGVGSSWRTSTRAVQKGNVASEPPHRVPTGTLPSGAVRKGPPSSRPQNGRSTDSLHHLPGKAEDTQHQPMKVARREAVSYKATAVELPKTMGTHLFHQPDLDVRHKVKGDHFGALRFDCPAEFQTCMGPVALLFWPISPIWDGCIYPMPVPPLDMDEIGNHHSQ

SEQ ID NO: 926485 - protein, 141 aa, Homo sapiens
MGRKKKQSLLEEQYSQTSVWVSLLPGSSFCHVYDSKTTCQSGLSVKACEDPGSRNGADIVASKEDGTGKGILSQFVQLLEHSSDEIATPEGLGVLVLKFIHHKGTRASEQRGLGYPMLSSQCLLTFIHLLRSRKATNQRLK

SEQ ID NO: 926486 - protein, 200 aa, Homo sapiens
MEYMTPSHSPSHSITAEDSDSYLTQKMAVTGGCQTCKPPAIFHSFLLPAFVLSKAKVSVCALQPENQEGGWCSCSVKAGRLETQEELMFLFESAGRKKTEVSAQDSQAGGVQLIGRGPPHEEGLKLCKGEAPGGSHVADSLRILVFVSSKTAAQTHPESRSTKWTHKINHHSILERQCLWGLVHVNAEGNSLRREAFVLH

SEQ ID NO: 926487 - protein, 186 aa, Homo sapiens
MTLWKKQNDKDSKKDWWLPGTGEPNQGHGSSCWGHYPKGGDDMAVHKPGAQLCPELVPSGWFLVSLTSKMKPRTLTVCGLTDFMSEATDLCKEEEEEDKEGGGGGGRRRRRKRKNKMEEEEEEEGEEGRGRGGGRRRRRRKRKRRRKKKEGGGGEGERRKKEEEKEEKVEKEKKEKEKKKEFVNVH

SEQ ID NO: 926488 - protein, 155 aa, Homo sapiens
MLKLRMRFQEQRGRGHVGRRWGSKRRGPGFGVLLEDSTISLRPVHPADVCHPSAILSPKTWTESHLGLLWPACGPIPVPWSATLLSRTPAVRLKGRHRVRHSGLCMAKLSQVLSEAVPGACCSPSLYHVADPAWFEDSLPTVSFLGCSCPMSANT

SEQ ID NO: 926489 - protein, 121 aa, Homo sapiens
MVSGRSAGVCGLLFPGRLFLGDCCSPYWLSRIFLMEVIGMCLGREPHSFLLFQKEGREENNIEIMLSKFIRLAEIFKFFDVSIGIRGEGPKMLFDLGKISKRETNMDMDNSFSSCDLSERE

SEQ ID NO: 926490 - protein, 490 aa, Homo sapiens
MGDVLWWLLLKAVAAPGREKWPENTSLLVCGLPGQSSVLPTWDIFIESSPPTPCSWHQNLAFLASSLSALTQGPSGPQRCVQSVRQSQRKGTLLINNIFAIIPAILMGVSKVAKAFELIVFSRVVLGVCAGISYSALPMYLGELAPKNLRGMVGTMTEVFVIVGVFLAQIFSLQAILGNPAGQAIQKELTQTQRRVQALPYHGPNEAEIIPFPAIKEYPGWPVLLALTGVPALLQLLTLPFFPESPRYSLIQKGDEATARQALRRLRGHTDMEAELEDMRAEARAERAEGHLSVLHLCALRSLRWQLLSIIVLMAGQQLSGINAINYYADTIYTSAGVEAAHSQYVTVGSGVVNIVMTITSAVLVERLGRRHLLLAGYGICGSACLVLTVVLLFQNRVPELSYLGIICVFAYIAGHSIGPSPVPSVVRTEIFLQSSRRAAFMVDGAVHWLTNFIIGFLFPSIQEAIGAYSFIIFAGICLLTAIYIYVGTG

SEQ ID NO: 926491 - protein, 197 aa, Homo sapiens
MNERQAVSLTFCFFLTTTLKCSQTSFSMVAVLGNVATGLAMPRQQPLVMELVKYASKSLLTLGLENNTRLGFGRCSPEGAGKAEGSLRQPVGSGSGSLPRKGLLPTQTIESMGPPTRGKIDCFHCLQAELSNGNGGSTWATGDAGFQCLFILPLVPLGPSAVTLLTRIQCLPASLGASGPLPSPSLWLFLLGQYLMP

SEQ ID NO: 926492 - protein, 136 aa, Homo sapiens
MRYVKVSDMKMLAAFSKSLKRKIDRSSIPDFLMNLSSTHAVKSFIDHLLKVLQSKQVNPIDALKAKEGFGKGFWCDLRMDFQPQESHLPLLPSICHCPKLEGATTTLNKFSFGITFTPTQTHMEAEVTFSQCGTDT

SEQ ID NO: 926493 - protein, 219 aa, Homo sapiens
MIRQLHLLFTNIRCSAASAADTQANRLKEEFRTHGKEVKNLEKRLDKWITRITNAEKSLKHLMELKTTARDLRDTCTSLSSRFDQLEERVSVMEDQMNEMKFTKVEMKEKVLRAAREKGQVTYKRKPIRLTADLSAETLQARREWGSIFNILKEKNFQPRMSYLAKLSFISEGEIKYFTDKQMLRDFFTTRPALQELLKEALNMERNNRYQPLQKHAKL

SEQ ID NO: 926494 - protein, 135 aa, Homo sapiens
MSAFFPPPPAPPPPTPPPPTLAAWVTKQDLVSKKKRKKKRKRKKEEKEKKKEKEDEEEEEELSCSHVGGFEGLILYHLNFWAGSRLHGAHPRGWVFLSQSTDSTVNLLWQHPHRHTQNQDFTSYLGIPQSSKVDT

SEQ ID NO: 926495 - protein, 183 aa, Homo sapiens
MVDKLFDVLLDWPLFTFTWTGPDTHRSQQLTWAVPLQGFRHSPHYFSQAFLHDLLSFHPSASHLIQYFDDLLLYSPSCEWSQQDTLLLLQHLFSKGYWVFPSKAQISSPSVTYLSIILHENTCALPANCVQLISQTPAPSTKQQLLSFLGIVVYFHLWIPGFAILTKLLYLSELEKMSHFEMN

SEQ ID NO: 926496 - protein, 133 aa, Homo sapiens
MAFLSSAVGGAAPSASPWDLAGPHMLTSGPQLSLAPALAGPLSSWGVCWILGVRRPQMSDIIAGRWHAPCSRRSVPWVSVLPCGQRDPGSAQQCSVCRVHTEPRAARSPCLGGLCERTYHRADGRLLVATVGP

SEQ ID NO: 926497 - protein, 146 aa, Homo sapiens
MQGVTWGVTDLLALTVCSEQSMGLPWTSGELYTSNRSCPTAQSCGGNKDLSKAKQHLKTPVIGDGLQLIAKHLWPKPSQKMKVRAASLADTELKKKAQREQEKPVLQEPPEGIKIPTPYVTAYPTLPRPAAPWEPDSGASTPQLSP

SEQ ID NO: 926498 - protein, 167 aa, Homo sapiens
MAAGKRRSSLPRWDGGRAETLLTFQTGQPGRGAPHIPDDGRPGRDTPHFPDGVVAGQRLQSRHFGRPRQAAAPCPRAPWARPLLQPLPPGRRSPARRQRLRQLRCPLNSILPAVGRQLLRSVAAAAPLHICSWGPRASAPRLSRLRTALGRSAAAPTTTRGHHGRTV

SEQ ID NO: 926499 - protein, 278 aa, Homo sapiens
MRGRPIPKVPSLIATHVASQGTLRRGAQAPRGIHLNPVEPVAWSTGIKLPPEVEVISFRTSLTDGPEGLMGPGAQTPGSSGSNCHYSTGSPGENLFKTVKQVVKAYEVYLKDNLLNKTASSSLNPKGGKLCKGDLADKLHPHVKTKGHPTPSEPTLLLVLFVIQPGSIDTAHYVQGTVLGALALVIITSRASEGCGPAAPVPGVAARTWWWPSCPRREVGGAGLAPFLLFLPPGRPADRWGEVGMKVSGLRLRPQASHLASSRGGHVDQICDPDLLAQ

SEQ ID NO: 926500 - protein, 138 aa, Homo sapiens
MDRKSKVTYRKWGRNRVFRVGKPCLKLLTSSDLPDLNFILFLSFETDSVSPRQACSGMTAADCSLNHLGPSSFSHLSLLSSWDHTHVPPCSANLLLLFLEDKRQTKALRHQVKEGRALFSWEFQQDSRLQQLSSPEFY

SEQ ID NO: 926501 - protein, 147 aa, Homo sapiens
MEATEESERKREEYSREAFICSTKQPLDSRGQCLSKAVDKLLQKSLRNSFLEHNRNEKYTISHKKLAEPELELVWISGIRLEAYLLPTGEIVTCPLSQHYVDVTLAFTLQSQDIVTYFWAQRQGDGPEDRWDCDPHMKTQLKVRMVK

SEQ ID NO: 926502 - protein, 181 aa, Homo sapiens
MAAAQSSLGFHNFGVRAASPSAAPTVRPFGSSSRQFLLVLLFLASEICQQGQIFRNHAWLSPPPAWRAAPAPLTGAGSSRGPAEHSRNRSSSRSAHARGRLAQERLSCNPASRPSSVRRKPRPTRAFPGRVLSACGASSSYQLPAATSASIRGTLRMAQGPGDTVKKCWGNINFSMVPSES

SEQ ID NO: 926503 - protein, 149 aa, Homo sapiens
MESVVENKFGSILQMDMMDMLALMCPCRVLSSLAILHTWLLVNQTVVLGGEVKLRCEVCRDLAFGGEQQQGGHQCHALLTMLKRRWPGNCPIRHAAGAERAASGMWRGLCLSLQSEYGLVFAVLRPLVLEAHPLWPCDLQVLGDPQLRR

SEQ ID NO: 926504 - protein, 245 aa, Homo sapiens
MSFIGSSQDFSRTWDGHALLLLLIIQEIYLSLGWNIGLLVGQEYETLTFQTNRTFVCRSGTKLPEEGTGSNLTVLQTPLVILRQTGSGMDLQQIPADLQKRGLTVRRKTNEQKGIVATSTKKTSTQRPPSEDYQHQIPKVDKSMKMGRNQCKKAENSKNQNASSPPKDHNSLPAWEQNWTENEFDKLTEVGFRRWVITNSCELNEHVLMQCKEVKNLEKRLDELLTRITCLEKNINDLMELKNTA

SEQ ID NO: 926505 - protein, 146 aa, Homo sapiens
MAHFDHQLRVPAGAPEEDQASCLVTTPTPSLGQQISIHLPTVYSQPTMFLTLKPEPRLECSGTIRAHCSVDILGSCDLLTSAFQVVGTTEVFWLFYSYEFSCEFRNSLWILKGNVCLDLNGIVLHPDHFEEICILILLNFPTIDMM

SEQ ID NO: 926506 - protein, 185 aa, Homo sapiens [sequence omitted]

SEQ ID NO: 926507 - protein, 149 aa, Homo sapiens [sequence omitted]

SEQ ID NO: 926508 - protein, 229 aa, Homo sapiens
MDGLVSLTKLVSASGVHLWGLQSRSKGHRSNGWNGKLAGGHPSTLKAIPMAGIQQARREGDLEPWQFPIRTQPPDQQGNITATFEPFPLKLLKELKQVINQYGPSSPFVMGLLKNVTVSSQMILTDWDALTRACLTPAHFLQLKTWWADEASIQAAHSAQAQLQINITQTNFWGKNHRVGPPDRGKKKTADPEISPKGKHWANQCHSKFDKDGNPISGNAMRVPSQALF

SEQ ID NO: 926509 - protein, 141 aa, Homo sapiens
MHGNLCKFNGADMSVLHTRKLAEILKISGTLILKANPIFLSWTEIDEFCTGQLDLLSKKGHAHRILQGPQTISGIHVPDVQVCYIGRCNAIAGEWLEFKASGSYPVKLYESGVHRLMLLSPMDSAFFLGVFTEVQILAFSE

SEQ ID NO: 926510 - protein, 164 aa, Homo sapiens
MELLAQVKSSKHKTLKNNKSTTCDKCGILVGLSRQLTMSKVKLMALAGVKVDHMALIGSTIVQAQQRDTIMIQCSNDLRGLIRKMSATSVGLGRQLAMSKVDHLALAGSSTIQVQQRDAIMIHCSLHLPTASIGPGRQLALSKVSQIALTGSSIAHITQHEAQK

SEQ ID NO: 926511 - protein, 184 aa, Homo sapiens
MTMAVLIHTKKTLFKCEECGKAFKQSSNLTEHKRIPTREKHYKCEEFGKDFKWSSNLPENEIIHIGEKPCKCEECGKTFKWSSNITGHKIIHTGEKLYKCEECGKAFYSSSNLTLHKMIHTAEKTYKCKECGKSFSQYSHLTTHKGIHTGKKTYKCKECGRAYKWSSNLTEHKITQNWRETLQM

SEQ ID NO: 926512 - protein, 157 aa, Homo sapiens
MGPCLRQAALEGELLACLMMEDQQGNHVHEPIAFKTYKEIRKSIRENGATSPFMKGLIEAIAYNFHMTPWDCFLKHILTFCLSVPWDENSSSVLSTTKEKHHVTKTSGTEIADWAKIVHFLKDDLHGKAANNFRKIQEKLPLMGTYTVVQLDLFCKW

SEQ ID NO: 926513 - protein, 429 aa, Homo sapiens
MVDETPEKSYKCKERGKIFNWSSTLTNHKKIHTEEKPYKCEEYRKAFSLSSNLTTHKIIHIGEKPYKCEECGKTFNKSLTLTIYKRMHTEEKLYKCKECGKAYVWSSNLTKHKRMHAGEKPYKCEECGKAFSQSSTLTTHKIIRTGEKRYKCEECGKAYVWSSTLTKHKRMHTAEKPYKCEVCGKTFHRFSNLSAHKIIHTGEKPYKCEECGKAFIWSSTLTEYKKIHTREKPYKCEECGKAFSRSSTLTIHKRMHTREKLYKCEEYGKAFRQSSTLTAHKMIHTGEKPYKCEECGKAFNSSSTLTKHKIIHTEEKPYKCEKCGKSFNQSSILTNHKIIHTGEKPYKCEECGKAFNRYSNLTKHTIVHTGEKPYQCEECGKAFKWSSNLTKHKIIHTEEKPYKCEECGKTFNQSSILTNHKKIHTVEKP

SEQ ID NO: 926514 - protein, 149 aa, Homo sapiens
MLWLCSSVHTPTLPGRPEPLGRAVGWCTGEAQISPGLSGHPGYPESGALLEGQSRGSPEARAGANRGGEGTGQRLRFGGVQGSGDRAGEIRWEIGRVGGGAALVLAEGSSSGGWVPRLPGRTENDPVSAARRGREPGRSLNRGQPQGFS

SEQ ID NO: 926515 - protein, 386 aa, Homo sapiens
MCVNGVCLNEDGSFSCLCKPGFLLAPGGHYCMDIDECQTPGICVNGHCTNTEGSFRCQCLGGLAVGTDGRVCVDTHVRSTCYGAIEKGSCARPFPGTVTKSECCCANPDHGFGEPCQLCPAKDSAEFQALCSSGLGITTDGRDINECALDPEVCANGVCENLRGSYRCVCNLGYEAGASGKDCTDVDECALNSLLCDNGWCQNSPGSYSCSCPPGFHFWQDTEICKDVDECLSSPCVSGVCRNLAGSYTCKCGPGSRLDPSGTFCLDSTKGTCWLKIQESRCEVNLQGASLRSECCATLGAAWGSPCERCEIVADPACARGFARMTGVTCDDVNECESFPGVCPNGRCVNTAGSFRCECPEGLMLDASGRLCVASRSAGSPARIYL

SEQ ID NO: 926516 - protein, 277 aa, Homo sapiens
MPLWLKNVDECARDPLLCRGGTCTNTDGSYKCQCPPGHELTAKGTACEDIDECSLSDGLCPHGQCVNVIGAFQCSCHAGFQSTPDRQGCVDINECRVQNGGCDVHCINTEGSYRCSCGQGYSLMPDGRACAELLERPQTTRVTIAILTWLQVVLGPGEQMCTGWSIRAKLSTVPNPAPPDVDECEENPRVCDQGHCTNMPGGHRCLCYDGFMATPDMRTCVDLMLSSPTDVDECDLNPHICLHGDCENTKGSFVCHCQLGYMVRKGATGCSVPRGVP

SEQ ID NO: 926517 - protein, 397 aa, Homo sapiens
MNARLEDTTVTVTPPVSTSRGVSAVDLDECVSQEHRCSPRGDCLNVPGSYRCTCRQGFAGDGFFCEDRDECAENVDLCDNGQCLNAPGGYRCECEMGFDPTEDHRACQDVDECAQGNLCAFGSCENLPGMFRCICNGGYELDRGGGNCTDINECADPVNCINGVCINTPGSYLCSCPQDFELNPSGVGCVVQNLCPGGEGFQPNRITVILEDIDECQELPGLCQGGDCVNTFGSFQCECPPGYHLSEHTRICEDIDECSTHSGICGPGTCYNTLGNYTCVCPAEYLQVNGGNNCMGDPYPHSSPVVANYRYEEECLLPASTTAHVKMSWPSSVTRKMCCCSYNIGQAWNRPCEACPTPISPDYQILCGNQAPGFLTDIHTGKPLGDPWNPPFYFLTL

SEQ ID NO: 926518 - protein, 162 aa, Homo sapiens
MQKSPVFCVAHAGSCRLALFLFGHLGTAEDIFLLQVYTCTNIFLTKEEENTHDNFSPCFAAGHVVVPGIDDRLLLLPILYSLCLQQTPQQFNGIVVVSPGGSISPSGTKTTRDSAVWNTMTVDKAFCESTDGSFGRSIACGIGKPISGVSVYSSEDKPLSFV

SEQ ID NO: 926519 - protein, 158 aa, Homo sapiens
MEFKGYLLDIHCFGSVMHNTEHLVYITGITFYSGLALLAQVSGAGPSRGIPEEDIVIIGDNSSCMLLPLKTFHWDKMWRWKTVIWMLLGPLKRADWWHKYNCQCCCCPLPAPWKNERSAIYSYCKPESSLVMLPHNLSLESSKAGIMKEEMFCCDEAA

SEQ ID NO: 926520 - protein, 124 aa, Homo sapiens
MKLDPYLTPFTKITSKWLKDLTMKLTTTKPLKENTKEKFHNTEFSNNFLDMIPKAQTTKQITSVGDDVEKLEPCKPLVGKLNGAATMENSMTVPQKVQPHSSLSSGHICELPADAIGSLFQEAI

SEQ ID NO: 926521 - protein, 136 aa, Homo sapiens
MEKEEEEEEGGGGGGRKEREERSTGWERNSHAKSKAKRVSTDKTASRQNRCLGAEDGVGCLRNRKEGHVAGGRQTGQIKQSIAEQGKKSGLYSNFHKMNEIGHVTLNNPFLASVSIFLNLLGMGKKPCLMYISEIV

SEQ ID NO: 926522 - protein, 157 aa, Homo sapiens
MWVWNEVLLSLGSDSHHQTAMTLSLIVSEGNSCRTAEPTSQLSKNNLNANPKILKPWYKSCFSQTRSRHWDGSGPGTVAARLPGLTGGCFGKQRPASPGSLSWTPESRVLLEKAKACPMSGRNRLAEQQIQILMKKKIENTELAILFKAWSLKNKAR

SEQ ID NO: 926523 - protein, 135 aa, Homo sapiens
MDNKCTLFGSPWGKGRHLCSFAPKLLRACTDRNRCQQGETNTLILPDDLSQMWIEVSRGPQDEELSYPVPCTCPTPTCHVTTDVPSVPINGIIRKHAGEHQGKVDITVEHRKPRTASRRGEQGVLPLPTLPPPLG

SEQ ID NO: 926524 - protein, 148 aa, Homo sapiens
MANLRFYNMISEISSKSDMLESSDRNLEFLVNSVRCEGLLRGLHIGILQLAGWSPGDGQLQSGIFLRSTSLVGRLRLLGMFQQAQGTPVGRSVNTGCLTMSWMGSQLDEGCVRSPGKRSSSKAVLSRFPNGLTLSDFEFQLHRKNTSV

SEQ ID NO: 926525 - protein, 172 aa, Homo sapiens
MGKKQNRKTGNSKNQSTSPPPKEHSSSPATEQSWTENDFDELREEKKRIKRNEQSLQEIWDYVKRPNLRLIGVPESDGENGTKLENTLQDIIQENFPNLARQANVQIQEIQRTPQRYSSRRATPTHIIVRFIKVEMKEKMLRAAREKEESGGQYSTFLKKRIFNPEFHIQPN

SEQ ID NO: 926526 - protein, 161 aa, Homo sapiens
MAKSAKQQRWQPAPPPGSFISRRYNAVTSGWLEFQARASYPEDVQESNLLLARVAAAFAGKPRKLGYLRLLAHVTFKENKIQVCPIPNCKSFRCLQNQSQTSYHVHIALFDLAPSYHSYFTFYHFSQDDMSYLLSKQLSFIDGSDRPIALMYAHFTLLVRL

SEQ ID NO: 926527 - protein, 137 aa, Homo sapiens
MSDTPGMVLNTPLNGAHEGGINGPSPCTKGCAKGWESRGEEIRCCPGSRGAWGPAGEKNVRPKQIPDMHLLSLMIFKCQGGKLREGARGKTAEGYHNKLPQTSEDTYLPLDLGPTKITQDDLILRSLSTSANTFFSK

SEQ ID NO: 926528 - protein, 175 aa, Homo sapiens
MRGTVVRAGKTKLARPNSSKSWQDLELEGLVETLKDCKHTTDMIRQDGLRNHSEDNSGCVLVVLRRQLWLHFGGWFEKNLLLLRERESTGSWKETAANQRKETLLWVCFGATPFRIQEREKPRDRECQRKGGACSVCIYKSEFTSVDFEGVFPPKDLRAVIRHKRDFSLYWLSFS

SEQ ID NO: 926529 - protein, 134 aa, Homo sapiens
MIIWNDNQNSPSHFSSRIAASCLVFAFVERSKAGTGVTTAPSPVSPCALGHFPKPWLDPSMPLGMPTPSLLLGFPSEMLGGRGDNSGVLPGSLSLTSWEPPNPFSIDWAHVRPPQSQNLSGIFFPLPFSGLTPS

SEQ ID NO: 926530 - protein, 143 aa, Homo sapiens
MLSERSAALLFKRQMQKHPLPHLSLRNISSHLIEVIPHASGSSMFLMSPTESLVAHTFCSMAIELAPLHPLDLTDTGPIMTLTQPSGSSAHPFYLLEKCPSCSQCPGEALTTLSFSGFLVPRVLHHLLGLPYALPSPLRMVPL

SEQ ID NO: 926531 - protein, 124 aa, Homo sapiens
MATGNQSHFKASIKAFWFSQHSLNIQLEILCLLFSHFKVFSAVNKRPPHSNLCNYYCLCTFNYRNHRNPHLTFQLALHLRQPQAEVLVIRMPLGVRGLAPLKAEPETKAYIQALFWDYDPREQK

SEQ ID NO: 926532 - protein, 231 aa, Homo sapiens
MGQLQASALVSDATYVIICMDVSGGVDEVVCVDVSGDVGEVVRVDVSRGVGEVICVDVSGGVDGEVIRGDVSGCGCVDGEVICVDVSGGIDGVVICVDVSGGVDGVVICVDVSGGVDGVVICVDVSGGVGEVVCVVVPGGVGEVVCVDVSGGVDGEVICVDGPGGVGDVICVEVSGGVDVSGGVDGVVICVDVSGGVGEVVCVVVPRGVGVCTIPGDNNNSSRRSSSSELS

SEQ ID NO: 926533 - protein, 155 aa, Homo sapiens
MTAIPAAVRPQQLSPQQLPPQQLPHSSSSPNSSSPMAVSPTEAPLTAAPQQQLPHSSSPDSSSPTVVFPMAAPAVPPTAAPCTASPSEQLPSLPPWTGSKSGCILWGRHELFLVLPTEALCVIMVLRTCTGLQAASSSMIWRWCSHHAGPSQLCV

SEQ ID NO: 926534 - protein, 153 aa, Homo sapiens
MGEQEDLQTALTVHNQSFEQQTVRKIKAGRHSSSQGPPVEDEEECTQGLNCPELQTLDTSPRDGEAKQPVPQLGEGLSMGQEKDAPGWGIEDMEGWGGARQEFKCCPHRCHTAYQAPIILPQVTAVASSLVSLPPPLCPYNLPSQQPEHPLMT

SEQ ID NO: 926535 - protein, 193 aa, Homo sapiens
MLPCCVPGLVLGTQMEDALSKWGPCTPGPIGFPPMLIGAQSPEGAKVSGGWHVSTALSMCTPSRAVTVPRLSADFALRLEWVLTAGGSQAVGAGISNPARTGAAFLGPQECRDARVHSCGLGGYSCAQFGLGCRAPACSMEQETMGLQPQLGLLWLHLGSSCPTNLEGFRSKYPFLQEIFLLSFSEPPQHSII

SEQ ID NO: 926536 - protein, 151 aa, Homo sapiens
MRQGALWTQPQWDLMPRPRSDTPCTPTNNAAMKAGLQLRADHQGGSARQHQETTALDRICHWPDSLAHSRHFAKNFHLTEIIKKYTDHYLHREDVRRKDSELNSKPSCSDFHFTVGKGKPTGSSLLLLQARHTVGAPSQKSSPIRPDCRTL

SEQ ID NO: 926537 - protein, 149 aa, Homo sapiens
MGRRSPPCLLPPAPQAQCQYLEGQSTQGHQQPDPSRPPTPSTSTRHELIPSLVPACQGQLQRLVRGVGSSVIESSAFSSVTPATFHSFLVTLQPSNQGICDCDHVLDEVTVTHGINDGDIVLLCPELLQKDVDGMPLIWFGCVPTQISS

SEQ ID NO: 926538 - protein, 194 aa, Homo sapiens
MDLHRSFGPTPLFDRHGKCHSLTPPISHNRILIIPIIIPIIIIPIIIITITIIPIIIIPITIIPITIIPTIIIPIITIIPIIIIPITIIPITIIPTIIIPIIIITIIIIPIIITITTIIIIPNITIIIIPIIITITITIIIIPITIITITINITIITITIIPIITIIITITIIPIIIILLLITIIVICMEASLY

SEQ ID NO: 926539 - protein, 153 aa, Homo sapiens
MAPIALWLLAGSYQAALCIHLWPWVQVTSPSPPFRPQVVTAPHIACQPWVSWSAIPSSPKHPETPTPEPRVVRRVHSELVTIILTLIVEKLKCVEKASGGGRQFLAFPGFRQTPLQFQPPSSCGILPVCLSPLRIMTPVIWDEGPILLQYDLI

SEQ ID NO: 926540 - protein, 141 aa, Homo sapiens [sequence omitted]

SEQ ID NO: 926541 - protein, 136 aa, Homo sapiens
MRNWPCLLCPYRFFGWLERNSFPRVLIINIPCWEKNLAIALLLAHPFIGSLQEEKYGSFCPTPQAGRPYGCLPLFPKNCYYSVLFQGALISYCSNIHVLPSICTVRYNYHSGPETVSAACPQLDYFPWNPDPLSDI

SEQ ID NO: 926542 - protein, 203 aa, Homo sapiens
MQVTLWHPCPEDDTYGGEKPNPCSIITIVITINITIFTINITIITTMFTIIITIIFTMFTIITITIIILHHHHHDLHYRLHHHHHHHHIITIFTIIITINTIFTNTITTMFTIITITIIITIFNIITIVTNTITIMFTIIITTMLTIIIIIIFTTITIIITIIFTITIIITIFTINITIVTTMFTVITTIILTIIIITIIITR

SEQ ID NO: 926543 - protein, 172 aa, Homo sapiens
MIGQCFMPACCLPALGLERLLMVRLDGENASKELSAIPGSNSSPLELSLLPLHQWLYATYDPRITYDLCIIYDPHITYDLWITYNLHIICDLCITYDLHIIYGLQVTYDLHITCDLHITYDLYITYDLHIIYGLHIIYGLHITYDLHVTYDLHVAECSINPKSSADLACSFP

SEQ ID NO: 926544 - protein, 142 aa, Homo sapiens
MQEFLPRRRQGKATVEHSAPLPNRIRPGETDQLGPGVLFCPRTSLELDLVSRRIFLAQQPRSFRRWACQGKLCFLPLRGVLLPLRDLLTEAGKSRICFPKEQAEPHTAKSQNGFQGREPSVDQRIQMTSLVWDSPQEVYFIL

SEQ ID NO: 926545 - protein, 170 aa, Homo sapiens
MVGVSKRESVTVKDANPEETGRPQSEIFFESPDPAMPEAMHTWIFQVASPPGHVWSEQGTGFGAGTWGVEDTPPLLEKTTRLYLEEWSPSSPHPVGIQQTESSGVGGGGTSKHLDQEPQGFFSALYLPSFLTFTCSQGCEKPGSLGAQASDLQSRLAEALACAGKERVKA

SEQ ID NO: 926546 - protein, 331 aa, Homo sapiens
MYSHNLYFHDFPGCDDDDGNDGDNGDSDDGDDDDDDDNDDGGGDDDNDGNDNDGDNDNGDDDDGDDNDDDGGDDDNDDDGDNDDSNGNDDGDGDDDGVDDDDDNSDGNDGDDDDSDDDDGDSNGYDDDGDGNDDDDGDSDDDDSDNGDGDNGDGDDDGGGGDDDDNGHDDDGDMMMMIVMMVMVMMVVMMVMVMMVVVVQLRKRAEASVSEAKVGPEESVQGGHSPKELLKEQHACPEQEELKVIVKAIFKHWKAVTWTRAFKYIKHPALYLAQNRCSINVSDDNDDGDGNDGDDDDSDGDDDDGGGDGGDSELTNQFPTNHSGMKASKKS

SEQ ID NO: 926547 - protein, 197 aa, Homo sapiens
MGRTGDGSRAPLCALNTSSLLDVITRGRGLSLLWKLVVLEETAPVMLEPLSGCTLQGLGPGGGTVAEAAALGTFLCQQICWTAATPERGSLCMAGAHRSTEYRAPPGLSRRASRAAARGANCNWQVNSSQPGSGTASPVLRGAVNTAVPAVLPTKVLQGLGSGWPHQATDRGQSLESSGQGETPCLGVNVGLDRPLC

SEQ ID NO: 926548 - protein, 213 aa, Homo sapiens
MGSGNRRLTGSEAQWTPCRIRRGGSQQWVCNSIDQQWWTGSKSSARAGTNMDQKSVLLQDLIEGGVEQARLGPVLGLALGLDNCSPAQSRRNLGPKHLSTGEAKFHDQSRGAGDGPAKGKSTQVRPGSSRYPDSIREGPPKRCPNPQQCPLLPTFVGLNESTQLRKAVCSRRREGVCKAMFLEYTKGNRHNPNVALQTLNAAAYPGQAATSSS

SEQ ID NO: 926549 - protein, 166 aa, Homo sapiens
MPLLLDVGAILLLWQEALILRTFSQHWMGLLCSGRPLEAALKNPLDPISPVPGGKKARAGQCPPGDANVDEFSLQYRRGHSNSPEMKCHLKATQIINREAGPTLSCTVSSTAAGILLSWFTPGSQIPGQWGHQGDAPINWHQKPQIEKRQSRFQCNGKCEWGRASP

SEQ ID NO: 926550 - protein, 134 aa, Homo sapiens
MSYKPALFGFLFLLLLLSNWLVKYEHKLTLPEPQQEEEKPKTSENDSKNSKAVNTKEVNRTHACFALQDEILQRLLFSEMKMKVLENQMFIIWNKMNHHGRSSRHRNFPMKKHRMRRHESICPTLSDCTSSSPS

SEQ ID NO: 926551 - protein, 139 aa, Homo sapiens
MSEYFRFCFVTCSVLDPNKPQSLRCTELYTVLLEPAVPGEDRGVLWAGNMSCPLAENRWFPHMTCFGQWDVGRRDAAVTHLGWLLHLTTAVRTWLDSLLKDERHTEQSQVSPVTPSKFNYISQGQPTSASNDGTPQTCK

SEQ ID NO: 926552 - protein, 136 aa, Homo sapiens
MIRGPQGQPEMKEESFHGSFLGVGSALYMHKDFWSPRNMLTLFNAPYLWIFNFPDPPFKFLGQHIVCFNWYYCLLCCKDKQFLLIVFSKHPEDRAFPTAAMLLVLTATMAAKLLLFKATTQEEQNRTLLGLLQAFD

SEQ ID NO: 926553 - protein, 163 aa, Homo sapiens
MQCMWVCQPCVASTHRSTCTAFEGAVFAPCKRGTLCLSASSLVCSGERGPFKEVGLEKAALGLGTPVFSVTYNHPGPTSLPTFRLVESQNGNLGPQPMRAVFEEGLFILDPRVPVASAQNDRHYLCWLICTASVDTACASSAERELQVVWHLIGMIGLPQVCL

SEQ ID NO: 926554 - protein, 132 aa, Homo sapiens
MSAKTRTVLGTLGWLDTLSAETKAQVRCHVSQERRAESADASQARGGMSQHEFDDTKADFLGCYHVPDKPDPQKELNTWLEWGSGDLEGLRGQEVAILIECQKEPGIGTTAGNQTNGSWQGDSDTVLLITVK

SEQ ID NO: 926555 - protein, 230 aa, Homo sapiens
MVYPRTHWVLQLPPPRCHTAVLNTSSSMTTRLSLLSTWASAGPLSPQCPPPSLSGSASYLFLTLGHDISIFAMGETFLGQSTYHGWELSSSSISTVPVGPSSELSSLTGGVESLPKSLQLTPTPVTTLACLMWRLKGKAVLVMQGRQALKWGLAAGFLALPRKEFKGKPEVEGNSFVKEAVSQLCDCCCRAGLPHRQRVAAQGSFAVTFIPTFNDMQIKGRFMQKDLGKG

SEQ ID NO: 926556 - protein, 116 aa, Homo sapiens
MWVLCPCDTSENGQGWPSPLPGPVPGASPLPPLTPHESPFCSPEMTTVETHGAFMNSPIFTGYPLCADTVPSAGDTTLGAQCGAKEEDGMRDGKAVGEAAASRMMNREVVKQSCST

SEQ ID NO: 926557 - protein, 136 aa, Homo sapiens
MRNCCFICTSQLEPAGASLTEVLLAKRGSHSDRISPQPQGIWNKFGPGPYMSKTCISAQGPKWEVPLNMPDFTLNSPRAFVGIGPIFMDRVFGGLGPYGRRKHETEVQRIQDETHKRVDRQGCLGPCFTLRQTQVP

SEQ ID NO: 926558 - protein, 285 aa, Homo sapiens
MAQSQSESHKNIPRVCTQLLLEACVQATVPIFIYTSTLEVARPNSYKEIIQNGHEEEPLENTWYAPYPHSKKLAEKAVLAANGLTLKNGGTLYTCAVRPMFIYGEGSPILSAGINEALNNHGILSSFSKFSRVNPVYVGNIAWAHILALRALREPKKAPSVRGQFYYISDDTPHQSYDNLSYTLSKEFGLCLDSSWSLPLSLTYWIGFLLEIVSFLPRPVYTCRPPFNHHRVTLSNSVFTFSYKKAQQDLAYKSLYSWEEAKQKTMEWVGSLVDWHKETLKSKTQ

SEQ ID NO: 926559 - protein, 463 aa, Homo sapiens [sequence omitted]

SEQ ID NO: 926560 - protein, 160 aa, Homo sapiens
MLDSGHPAPCPRPLAVQVKPGFGKHQPVCPRPQPVLLCHPSALPSGLLCPPGAHRLTNIVTASCWWGRQWLSFGLLFLSENTAASPASRSWLVVRGGHLHAPTSVAACHCAFEVVPDFPVCLKLLAVYAAAGPASPPAGPFHDGASRWGLGETATGPPGG

SEQ ID NO: 926561 - protein, 151 aa, Homo sapiens
MRDRRPRLAPPQNVTLLSQNFSVYLTWLPGLGNPQDVTYFVAYQRCQKTPNIYCVAGTVSTHVMNLISQQLSEDKFNLTDTFPAVHYDKMFQVPLTLGLKLVVCWGLSDLWSQTEGCTFSFPGFEGFRFGLSHYGFFLSHLADGLSWDFAL

SEQ ID NO: 926562 - protein, 143 aa, Homo sapiens
MARTPQIIQFPKLSKYIPSSCSQILYLLKVICNFKINTASAFVIIRGHRRVAKNLSRSTSTFRLRSSKDLLSHLMQSWPEDRDGRGQRRVVQEGPALGTIWRGLNPNSGISDLKIRRLSWIISLGGPNVIASILIRKQEAEEE

SEQ ID NO: 926563 - protein, 141 aa, Homo sapiens
MMILLENTMSPETLLSYPEEGIVIIGDDSSMRVIAPEDLPLGQDVEVEDSDTDSPVPVTEPELGNKQQLLKCPLFPHFKSCINVMMVVPKQNTSSLTRHNLCRVKGPSEGLLKNQLLKGRLIGEKVLWLALGQRGFVLETR

SEQ ID NO: 926564 - protein, 180 aa, Homo sapiens
MYEEQALCRHRICWHFALDVDFPWTVLVEAQNKRVVEETSVPLEITQVVINNMDPKGHSDEVSDRNKDHVTENWRKGDPWYKVAMNLAKFCPCLSALWKSQSTLVVGVWLWALLSKVMEVGPLGAIKISKNDPESLMVQAENCHRSVATTDSLHQAPMPSGAMRSKRRMIIRGNGSFSER

SEQ ID NO: 926565 - protein, 308 aa, Homo sapiens
MKRKNFTEVSEFIFLGFSSFGKHQITLFVVFLTVYILTLVANIIIVTIICIDHHLHTPMYFFLSMLASSETVYTLVIVPRMLLSLIFHNQPISLAGCATQMFFFVILATNNCFLLTAMGYDRYVAICRPLRYTVIMSKGLCAQLVCGSFGIGLTMAVLHVTAMFNLPFCGTVVDHFFCDIYPVMKLSCIDTTINEIINYGVSSFVIFVPIGLIFISYVLVISSILQIASAEGRKKTFATCVSHLTVVIVHCGCASIAYLKPKSESSIEKDLVLSVTYTIITPLLNPVVYSLRNKEYFNTIPAPPTLCR

SEQ ID NO: 926566 - protein, 336 aa, Homo sapiens
MCIIPGLGLPRVRNRGKSDRPFSPPEGNSEILKRKEKQEQEQQGGAPPPTSLPSVGHKEKTFSSDEDGLELFSPQNLKALMNVVKGVEVIREMEATEEEGGKGSPCLCCYTNTARAMGHSKSHGHKSNWECVPKKLHGMKNENREKANCPRGTSKAVPVVAFKALLNLPGDKNPGPAELQVAGTSCNIPVFAELWALGPSESCDTPPFTELQAARLNKSCDMPPFAELQAVGLNKSCEVPSFAELQVAGTSCNIPVFAELWALGPSESCDTPPFTELQAARLNKSCDMPPFAELQAVGLNKSCEVPSFAELQVAGTRERAVTFLGVSGLGIPQAKL

SEQ ID NO: 926567 - protein, 143 aa, Homo sapiens
MGAVCSMKSSNDPLRYSWAIYAVQSSDSCTVTPKRWADLNVVGIIQFIEGLTRTKRQKEEFVPFASRLPVEPLYWDLHHQLPWFSGLQTRTGITPLAFLDLQLADSRRFLATGPGQQTDSSGACRKHDSALLILSYTLRLHRP

SEQ ID NO: 926568 - protein, 144 aa, Homo sapiens
MKVGKKQCKKAKNSKNQNASSPPKEHSSSSARAQNWKENECDELTEIGFSRWVITNSSKLKEYILTQCKEAKKLEKRLKELLTRITSLEKSKNDLMELKNTAQELRTTKHGKEQPVPPTAKTYQIVKTIDTMKKLHQLTGKITS

SEQ ID NO: 926569 - protein, 165 aa, Homo sapiens
MASGFIHQTGPSFARLLQFAGGPLQILFTWVPPHPGGVTSGGCRTAKMAACFFLWELQSAAPVPTGTQSQGDQGSVHKPLAGVAEIPTGRSHSVRRDESGSSLKMQSGHSLPQLLCCTMGNSSWFQTTSPSGTGRGKQQTEAAVMAAAPSPKNSVVLDGLQPSGS

SEQ ID NO: 926570 - protein, 312 aa, Homo sapiens
MGIPSWSTKDRKPDSVHGSSNSAEPWPVQLLWAGDVYSTDIHTNFRDCHGSSPRGLRRPPLPLTSKIPEGPGYVGVISEFVGEELFPPPVLSAIPSPEPREGSLVTLRCQTKLHPLRSALRLLFSFHKDGHTLQDRGPHPELCIPGAKEGDSGLYWCEVAPEGGQVQKQSPQLEVRVQAPVSRPVLTLHHGPADPAVGDMVQLLCEAQRGSPPILYSFYLDEKIVGNHSAPCGGTTSLLFPVKSEQDAGNYSCEAENSVSRERSEPKKLSLKVHLSTEPGREILKSMESGEPHGGSSHVVTRGVTIILAAIP

SEQ ID NO: 926571 - protein, 196 aa, Homo sapiens
MTRVEEIFHQNSGPSAARLLEFDGGPLQTLFAWVSPAEAAEQQILQNGKCCCLILPLEASYQRGTQLYEVSVSPYWEVYALPPRNEVYRGRQASLSGSGLQRFRAFQLLCLPTQASAMVDAPPPALLPPCSSISDCCASSKRGSMGMGPSEPGYNLLKSPHIRRLNHHHAANYNNVSWGHLDNYSAPPEKDVPCHC

SEQ ID NO: 926572 - protein, 142 aa, Homo sapiens
MCSEGETRLKSIKTMISCYSKDLAQLEPIWGETRSLADISILVIQSLSKCTYFADLGLTVTLTAPTSFYPNNNAMHPFVHVSLWVIVKTSRGIAFELYSFSKKFMYPKYDFIPTNCSLECLHQSILQYSIQRLLYPYISLLF

SEQ ID NO: 926573 - protein, 137 aa, Homo sapiens
MNNFCSSTLKRTNGDPCYSDAPEGEEGSRSALWELAPDQPCGSWPQISPAGVGPRSALQELTPDQPCRSWDTDKKLRGLGEGSSDIDKVSSPRAAVAVGVLMISENQGGDLNNGKEMKRMLWCGDYWHLARESFLED

SEQ ID NO: 926574 - protein, 218 aa, Homo sapiens
MGSSQDISEDRRKAANMAVPKDTAVFSRGDRKARRRARFKRSNSVTAGVQADLELEGLAGLATVATEDKALQFGRSFQRHASEPQPGPRAPTYSVFRTVHTQGQWAYREGYPLPYEPPATDGSPGPAPAPTPGPGAGRRDSWIERGSRSLPDSGRASPCPRDGEWFIKMLRAEVEKLEHWCQQMEREAEDYELPEESESRHRNKGTLGTMASCVLRRP

SEQ ID NO: 926575 - protein, 138 aa, Homo sapiens
MDGLEPVKRMVLIRAMQRQKLVMLEKRRKAQERSSKVLDTDLVIVNNWQGVLDTDQAIAAGWWRLLDTDPVTVPGWWRVLDTDPGIVGFDCDFGVGMQGTLNSVLPAVLRKGLELVRSFWVTSDTNSFFLNFFYFLLF

SEQ ID NO: 926576 - protein, 128 aa, Homo sapiens
MDDRIFSRKKTQKSWSEDSDIAWVYVKFQWGRPHNTLDTQEPGKWDLIAHSAMIRAGQKIDTGNTANKVEGKMQSERSRRTTIFFTEHFRYARHIFIMTFYFETVQNSQKLQTSAIMPMYPSSRFSQW

SEQ ID NO: 926577 - protein, 154 aa, Homo sapiens
MSRPRRLSWKLSLTPKPGQASLLGSPIPALPTLYHHYLCPPLNFESQQNGARTVLFATGSLVSPIAGPNTGLRIHDCPLKEMSSWRQPSAGVARVSDRRCRQGSETSEFRFLAYAWGLGHSKPHYPYLLPNQENGNLSADVTSFQWLNCSLCHS

SEQ ID NO: 926578 - protein, 157 aa, Homo sapiens
MKVRISATASVNLGPAPEQLCGGKRHQLPLQVKRGIEVEAILGRMQPTGRKLEKLDLGKGCGERRRDGPSPCLWQSQRVSVRQQTKNPGDSRRGLGGSPRELEPRGRGEELGSWGPGGKAVPRTCRASEAGLEFGSGHESQQGLSWAQSPPHDLRAE

SEQ ID NO: 926579 - protein, 139 aa, Homo sapiens
MLRVTQPANGRTGLEHQLTGCRVCALSQFAVALSTLCVRQFTGTLGPRNSPILQMRKLRHRSSNIPEDTQLGRRIEHIRWEIIKPLMPNAKIIFGEKLLTPFSKQKFYDGKNLSCCSPFVTQKGPILFVSICLSEFELG

SEQ ID NO: 926580 - protein, 133 aa, Homo sapiens
MRGWSSVVQYLALSDSGRLMCEGQIEEVAGKDPPMTSGPQTDQPKEHLINFKSACVLKNLKPLQLTPDLKPKPLVFFCNTTWPQYQLDNGSKWPENSTFDFSILQDLNNSCRKMGKRSEVPDVQAFFYTSVPP

SEQ ID NO: 926581 - protein, 150 aa, Homo sapiens
MAHQLIVPWLPLPWPRVATSAAGSHGSFSEAACWVLAWTPSIEAPQLAGTLASCRLDPVGKRDGQSVPGHWAPAGAKDPSLSQAGQTFVCGWLRRAPPPNPAAWQGMHLLGDLGDLRMGTVPGGLSPKPGCRHYGFSTLSSLEVFARAEP

SEQ ID NO: 926582 - protein, 142 aa, Homo sapiens
MRLILSFMSPIKGRRERQRRLNTYYAPGPVPSEDSALLSMFPQVGSQHPSSLNLLEDGRSALDLDLAWPGGHLQPGQEHLPIQVPWDACSAEPQGPGRQPSPGTTSCRPGGILLMPLQGEPHQLSSCFSFWFIILTTHEHRL

SEQ ID NO: 926583 - protein, 183 aa, Homo sapiens
MRLSHPLCKRCPQLCPSSLKVFPSNSSQEDLPLTFLAWLGSGFSRVKLLFLNPVSIAYHWEGGHWVQPTLKSWDDHPPPRGRGIYVNYVEFFCTGYLSSWHVPALSQGQRQRFYASVPENFSRILEIPGLQSQKGQVDEPMRGARGFWHLSLHLPRVSVSPQKGSISQRDAPVSHEGRQSTVD

SEQ ID NO: 926584 - protein, 138 aa, Homo sapiens
MQRHKNDTMDFRDSGEKDGKGEGLRLAGQTWPLQLSTPQRTQETHSQQHPGHLRLSPQSHRATQHRRVQCVQDPAGPRLGSAVAQGPQPQCKRGRGPKVQGLELSGLNPGCGESCRRPGWPRHCAPAGTVSSRGPSWA

SEQ ID NO: 926585 - protein, 136 aa, Homo sapiens
MVCEVTTVTHKPRNNSVKAGTLITKSFLSNAQSTNIFCCLWKLVCKQLDGDAAPGLIEELGSWCLEQGIGQNTQSKEGMKGFIENESTLHSAGAGSSIGAQGPGYRIFLGPNTPYRFPIGHLVVNSCKPSGGPKSV

SEQ ID NO: 926586 - protein, 148 aa, Homo sapiens
MLNKGLQIKVSASFYLRAFCKAPVCNCAYLMVIRKCQGINTFWDGPYQVALVDQYPNSFTSDGIMEWVFYAVSQSTREALDLQNAEKMAAASLPPPKSQGMSLVAQPMRTGNCIGKDMLGNAAAAHLRAHSLIHLLILRAPASSWPLR

SEQ ID NO: 926587 - protein, 154 aa, Homo sapiens
MGTSEERGPPPSTQLSPRTASPAGKWMDSWETSACCLQGVSWSAIQIHSWKEGQKRRLRSKWALDHQQDKARRNILPLGGGGAGTEQSWIAALKAQLEVPLHPLVTSSVYTGDGVSQHPNGPTDPPGYYSACGISDLVFSALCGIEAWLPLQDL

SEQ ID NO: 926588 - protein, 149 aa, Homo sapiens
MLSPRSQTHLFEGRHGLLVPFPLSWLLPFMPWLLLLCVNDGILQNVPGSLGAVSSIGSLPRRPCCLPPTPLPCPLGSSAHLPVSQALLIDVGYPKSQRGATLQDVTVARQLSAVEAGPEGLQLEAMAVGFLQVGPGGHICVYHPSLTQT

SEQ ID NO: 926589 - protein, 144 aa, Homo sapiens
MTRAGPLSNDAVNKLASGRIAMAANCLASHRPSPAVTHTPGPPTVLARKELQVLGPEARQAADLPCSPQEKLSRNPTLLSSRGFGGEGSLPGSRSTKQKGAEGHHTLAICREPFPTQGRHVPLWLPGSPQHPWEDGRSRGGDMA

SEQ ID NO: 926590 - protein, 134 aa, Homo sapiens
MHIAPCKLGCWHLLAVANQHRSFRQLRLQGLAGSELANVTLLLSAGSVLSGHAGMQPTRFPEASSATQNAKFPFPGGGQRGAPAWAVVRQENGFTKSWMVMAKMQGIPWAAQDFSQGQCKPGAAGATTGRTLAG

SEQ ID NO: 926591 - protein, 303 aa, Homo sapiens
MTIWVLMPLFEPLGAGLLETSGRRLLFSLGDVPGEASDPAISSIPTMPTTALAEAAPCGVLLRAQSPREAESGTKWPINGTAGFRELNLYFPLGLTYSYFLESGAPAAVQELAGRLSQYLLGHLHTELWSFNFGKGFDYRMPGSLSHVPRWWGERALLGLMDQPGRQGGRKHRTNSTLVACPQPSFQNVALPEAALAGWGRGGVGGVETPRQKSQRMAAAPGLRTAAPGSQDGQACVAADPLPAPEPVNPGYAQPSPEKRLQNSSAFSSLQFQDNGTHSTSQALACVAGTPPIHFDLHANCRT

SEQ ID NO: 926592 - protein, 167 aa, Homo sapiens
MGLGAVEQGVALVEEARAVQEPTEGVGGSGMAGCRSRALPHGKAAKARREIERSAGGLALLGDPVYPLQLLARVLSPSLPGAGGAGQPAAPSAGPAKPTPTRNSSRPASAARSPGSRSRLSLQAEGVGSGLGQPRKGLPQCSGGLKGSPSAAKVEAQAEEALRAREG

SEQ ID NO: 926593 - protein, 599 aa, Homo sapiens
MKWKDQNIEDQYRYPRKNLRCRMLERFVESKDGTQCGETSSQIQDSIVTKNTLPGVGPYESRMSGEVIMGHSSLNCYIRVGAGHKPYEYHECGEKPDTHKQRGKAFSYHNSLQTHERLHTGKKPYNCKECGKSFSSLGNLQRHMAVQRGDGPYKCKLCGKAFFWPSLLHMHERTHTGEKPYECKQCSKAFSFYSSYLRHERTHTGEKLYECKQCSKAFPDYSSCLRHERTHTGKKPYTCKQCGKAFSASTSLRRHETTHTDEKPYACQQCGKAFHHLGSFQRHMVMHTRDGPHKCKICGKGFDCPSSLKSHERTHTGEKLYECKQCGKALSHSSSFRRHMTMHTGDGPHKCKICGKAFVYPSVFQRHEKTHTAEKPYKCKQCGKAYRISSSLRRHETTHTGEKPYKCKCGKAFIDFYSFQNHKTTHAGEKPYECKECGKAFSCFQYLSQHRRTHTGEKPYECNTCKKAFSHFGNLKVHERIHSGEKPYECKECGKAFSWLTCFLRHERIHMREKPYECQQCGKAFTHSRFLQGHEKTHTGENPYECKECGKAFASLSSLHRHKKTHWKKTHTGENPYGCKECGKAFASLSSLHRHKKTH

SEQ ID NO: 926594 - protein, 119 aa, Homo sapiens
MTLQCTGTIKAFPTYLTFMRSISSVPYHVSLEASQMIKCFPTLLTFMGFLCTVSQRIEGLPTFLTIIWFVSCVRNFVGLKRVAITEGFPKLFTCITLLSIFLILMWFVPSINSDVAMKG

SEQ ID NO: 926595 - protein, 231 aa, Homo sapiens
MQFYYLQVWEALLTLVFFPVCVVFAWMADKRLLFYKYVYKRYRTDPRSGIIIGAEGDPPKSIELDGTFVGAEAPGELGGLGPGPAEARELDASRREVIQILKDLKQKHPDKDLEQLVGIANYYALLHQQKSRAFYRIQATRLMTGAGNVLRRHAADASRRAAPAEGAGEDEDDGASRIFFEPSLYHCLENCGSVLLSVTCQGGEGNSTFYVDYRTEDGSAKAGSDYEYSSS

SEQ ID NO: 926596 - protein, 143 aa, Homo sapiens
MRRVGRWGAQVGASASAYSIQYSCMLHVCSLGTIGYTIQPSCVLGYTIWVCTAYDVHATRKKSPEDTSLRQISVVKYFHRTLPYFLQISAQCNLTREAFTDLYKTIPSDPILFPLFFFKRYAVSTRATRYKVPWSPGNVAGLN

SEQ ID NO: 926597 - protein, 263 aa, Homo sapiens
MAIGSLTINEERSEIVDFSVPFVETGISVMVARSNGTVSPSAFLEPYSPAVWVMMFVMCLTVVAVTVFIFEYLSPVGYNRSLATGKRPGGSTFTIGKSIWLLWALVFNNSVPVENPRGTTSKIMVLVWAFFAVIFLASYTANLAAFMIQEEYVDTVSGLSDRKFQRPQEQYPPLKFGTVPNGSTEKNIRSNYPDMHSYMVRYNQPRVEEALTQLKAGSAQTRAGGGGWAAGDLRMLKDGKGSRFIHSVPEVSPGWVSLEGGGH

SEQ ID NO: 926598 - protein, 159 aa, Homo sapiens
MALLALVTENRCIPKLTSTHSYILSNPDPTSGPVCPAFPPNTLDGPSCCHLSWRARGLFKSLLFCLGWMDGWTDGWMDEWMAGWIDISSSFGSSLTSLFFPYPASNLLENRTGFTFKTDPESDHFCYHSSLKHHHLEPGLSSSLLTDLRRSVACCQPYP

SEQ ID NO: 926599 - protein, 146 aa, Homo sapiens [sequence omitted]

SEQ ID NO: 926600 - protein, 124 aa, Homo sapiens [sequence omitted]

SEQ ID NO: 926601 - protein, 140 aa, Homo sapiens
MAASNRTSFWRAHVDMGLPDPILGVTKAFKRDIDSKKVNLVIGANQDNNRKLYLLSNICKAEAQTATKNLDKEYLLIGVLAEFCKTSAGLALGKNSEVLKSDWFVTVQAISRTGALRIRTSFLAVEGNSNGVKKKNLYII

SEQ ID NO: 926602 - protein, 216 aa, Homo sapiens
MALPHSGYITSWITAAFQLGLAMAASNRTSFWRAHVDMGLPDPILGVTKAFKRDIDSKKVNLVIGANQDNNRKLYLLSNICKAEAQTATKNLDKEYLLIGVLAEFCKTSAGLALGFARGDGNKDAGAVYHFIKQGINICLCQSYAKTWAYGERVGDFTIICKDVAEMTKDGHISVAGVTSGNVGYLAYAIYQAMDELSVTVLQLKQENPTLDTGLK

SEQ ID NO: 926603 - protein, 205 aa, Homo sapiens
MMLSAEPELTLAELRQRLIHFSAKDVINEAWFPEDQRVLTPNLVAALPPSTHGAGWQLFCRTVWSAHSGPTRMATAIARCAPDEELLSCSSFSRSGKRRGERMEAQGGKLVCRAHNAFGGEGVYAIARCCLLPQANCSVHTAPPAEASMGTRVHCHQQGHVLTGGGARKLPPSLWGISPFKQVELCSGAASCSQCADVRGQNDFY

SEQ ID NO: 926604 - protein, 144 aa, Homo sapiens
MTPILPSGSPCLPQWVQGRAEQSPSCLLIRAAPGLNTGKGAWLMCDTLLWCCLEPQHSLESGEIRPLKIKLPWRLPYVKFWFTAFIGLSIGANKVKTTSLYYCLMAKVPSYWIFVCVCIYMSLYCCEKWESSSSKIIKSHNFFL

SEQ ID NO: 926605 - protein, 128 aa, Homo sapiens
MLLGGRCSQSSQDGGGPLPRWWQASCSLTWGSWPHGFQEMESWAMRNNGKPSAQSGVVMDQKHSRHPAGFRGIEVSGGSVTAANSSGGVNNTFLLVINRTRSNVSERLTPVIGASFGELPEHNMLKGD

SEQ ID NO: 926606 - protein, 215 aa, Homo sapiens
MVCSVDASEVAHDSGDESLDSTHTSVPQALPPEGAIHHTFSCPILPCHWYPTPPCPQPGSQAELQRGGRAHTGCPLPSGSPMCAPGPSPYCVPPGPSPYCVPGIGIGMASLQTLTHLFDSHRQSVHYSSLVPFHPTGQVRDEEIEAQRGYTTCVRSHGSQGKQLDWQLLPGHTKSRALAWGGGWLHSLRKLRTCWVWQRSKSQWAQQFMESHPEV

SEQ ID NO: 926607 - protein, 135 aa, Homo sapiens
MCEGTEACPWNYAELYENRNGSGVQAKPQRFQRSSQPCRLSLDADLLQTKRGGCHYRLALGSPAKVVAEPQQKIAMGAKARMGSEWAGFIGDEKWGGAAWTVFKAALSAHTQPTHPGLLLLLRWPGWSGSWYQHS

SEQ ID NO: 926608 - protein, 138 aa, Homo sapiens
MLPCCVPGLVLGTQMEDALSKWGPWYLSARLQLDQVHRKQLPWRPLENTVAPRSLETPGTAGPQRGSHSPGLGSSQRSGYKHRPWNLAAWIHILSYRILEGLKAERAEGREKMQTLGSSSCGGPYLQSGPSWSRDIVA

SEQ ID NO: 926609 - protein, 234 aa, Homo sapiens
MVADVCPVVGQSCVLKDKELVQNCNTTTTTATTTITTTVTTTITTITTTITTTTTITITITTTTTITTTTTVTTTITTTTTTITTTVTTTTVTTTTTTTVTTTTTTVTTTVTTTTTTTVTTTTTTTTTTTITTVTTTTTTTVTTVTTTTVTTVTTTTTTTITTTTTTTITTTTTTVTTVTTTTTTTTITTTTTTTTTTTTTITTTTTTTITTTITTTTTTSITTTTTTITTTTY

SEQ ID NO: 926610 - protein, 143 aa, Homo sapiens
MRLKVGEAKGVGVCVHPWPWDAPCLNPVEGDGDSGVDQTGDHEIYKSSLVPPPSLSREMSMDSASSADQPPTPSPRPALPTDALKLTGIDTALSGSLANMDHSRSLQFCALAENALGLLCSLQTQGFWGWGCCRDCVYGETEA

SEQ ID NO: 926611 - protein, 263 aa, Homo sapiens
MSHHSYHRLRAYSTWASLLTLEHARVTLTSGNLHVWLPLPGLTTQDVLMAPSLRAVPNHSSSSASTAAFPTAAPPTAAPSQQQLPQQQLPHGSFPHRSSPHSSSPTTAPPQQLPRQQLPNSSFPHGSSRSSPYSSSMHSVSLRAAPLSSSLDWLQIRMHPGSWDLDAHALGSRAGPALIQGGWVGPEMLQSTKLPGMLLLLLARDPQQEAGKLTSLKEVTCLGLSGGRPMGMLPASGDFVVFYQKKALYWCLPEKVVDFVYEP

SEQ ID NO: 926612 - protein, 142 aa, Homo sapiens
MSRATGPKDHGGFLEQKTSELNRQMPGQSMSKGCISKDGDEDVSFAEPGASFYSCYHLSRAYSASCSRCANVGLRIGGLGGQLKGHPLWVAKKDHVTSCTEHKAWSMAGGLLQIPVQPFQSSVPQVTAGQWQISDGISVQAC

SEQ ID NO: 926613 - protein, 446 aa, Homo sapiens
MLGSEKFRGGIGQGEETEVRRVGSVSVGMWQGTDEMAQSSQAIFGECKKETKKAKAWAGHKEILEMVLFPGIRQQRAPLPPLEDEEPLDVADKGCHPEAQSRGDKGEARVGRDTPVQGEGIFFIIIIFSIIIVIILSVIITSIIILSIIIISIIMFIIILSFIIILSIIILFIIIFSTIIITIIPILVIILSITTIIIIILSIIIVIIILFIITILLIFSIIIIFPISILSIIIIIIVLSPKEALAALLPGVKAHTCKSQPLRTHLPYSPVHPSLLSPVHPSDRIPWPPPPKPSLTPQARSDPPIIMDSSKEETSEQGSEAAVTLKGTDDEGRCRTPGLTAAGSPSVPRSEEGQSEPARELHVELRREGLWPLGEECSQSGDTAGEVQGDERLFSHLLLVAPVAKPTLKPEGLPAQGLWDHRAGWQGPHQNGLHYTFSYSILVMTT

SEQ ID NO: 926614 - protein, 391 aa, Homo sapiens
MQSIDPGCQRIYSRKKNVKRVTVHWAKGNDQTFQGLLDTGSELTLIPGDPKHHCSPPVRVGAYGGQLVNGVLAQVRLRVGPVGPLTHLAVISPVSECIIGIDILSSWQNPHIGSLTGRVRAIMVGKAKWKPFELPLPRKIVNQKQYRIPGGNVDMSATIKDLKDAGVVIPTTSPFNSPIWPVQKTDGSWRKTVDYYKLNQVVTPIAAAVLDVDSLLEQINTTPGPCYATIDLVNAFFSIPVHKAHQKQFAFSWTSPKYNGEGTSSQWAELCLFPKPSLSSPNGPMNEVTTVAGIEVTNELSNMDFHSPRLAWLWPLPATWWQVDYIGPLASRKGQRFVLIGIDTYSRYGFASPAHNASAKTTIHVLTDYLIHRHGIPNSIVVEEGSHRYQL

SEQ ID NO: 926615 - protein, 128 aa, Homo sapiens
MPKGWENLACRPECFSGIVCSGRSQLSRPEAALWRDREGNFITHIKALKMPISFDLMRPEIYHKEIIRDEDKDLCVELNKNEMGAWDIDKIVHEATIEVLKFLNPEFSYMREKQIFLEAAVFQIPINS

SEQ ID NO: 926616 - protein, 139 aa, Homo sapiens
MGLGIPAGALGQGSQEEAREAGLGTLGWESGPGGKSSQEHRGGAWLLTWVGPGPAPPFSAPNLLVTGQALASPTLENPGDWRCPAKPALPLGTSCSYARQRVAEGGPALLAPFVSRNPALSPDREGPFVRLRQWEFSLN

SEQ ID NO: 926617 - protein, 156 aa, Homo sapiens
MDLSDRGLGLSHLCHLELCDLGHSAKSSINIDSTEFHPTQQPYKLTISLLDFSFTPEKPRGLEPKEPGRCSTSGLEQGELLLDGPALHLLSLDLGGLSPSPCFRPCRPGHRALAWVKLTPHCGQLVLTCHKFFNELLIDKNLAATTEPQSQGVKRI

SEQ ID NO: 926618 - protein, 202 aa, Homo sapiens
MRLSSDLPSPSRSGAGHRVLTAVTGACLQKKDVRMLRFIQEVNTTTRSCALWDLEEDTEYIVHVQAISIQGQSPASEPVLFKTPREAEKMASKNKGRPGSLLRGMGWDEVTMKEMGRNQQLRTGEVLIIVVVLFMWAGVIALFCRQYDIIKDNEPNNNKEKTKSASETSTPEHQGGGLLRSKCLPSAAKKTDSRECERISWF

SEQ ID NO: 926619 - protein, 166 aa, Homo sapiens
MAQSDKPRNAGILVGSGPTCCQTHPSVFVGPGAYVRVSAGFWQQVPEVAGKAGFTENGPEGLFLPTFPKRQKAMPGFEPGSVTPGNLYSHIEEPAKMQHFLYLLGSLTVDLAWNWVLLPRSQGSSWGPIGAISILQSSAASGALPAGSSSLDFCLEKDHLKQPQPS

SEQ ID NO: 926620 - protein, 153 aa, Homo sapiens
MFSSSFRYARKSQAQRTFSDGGYNKDTEEVRLLGKPSQQRPASPRRTGTGIDLCSGPMPSGHVPSIDVSHTRQSHTGIGLHHIQLVQGSKWLGPKSCVQSATVRLAGLASLDLRDLDHSDFMKPEGGNTGGAKLAESRGESEVWLKRTLEVEL

SEQ ID NO: 926621 - protein, 124 aa, Homo sapiens
MEQDQSVALLKMICLIGEELLNGMRAEHWGTQTLRIEQRCLRRSTTEVGKGRLQKDSNQHPALQEGRSTNKDLKCFINDLGESEEWAQKLDQNPFPQPPPIGRGARGEGVHGFALGGRAMRKSS

SEQ ID NO: 926622 - protein, 168 aa, Homo sapiens
MAAAVVSDCVQWLDPTLVHTPLAVPCLTPTQSRGVQAGGVSRAWPARPSEWNKLSGPEQHSGKGATSHRGFWPEKQHPKDPQDTFSPPALGHQTLRSSAFGPETCTNNLLEPPGGSQAFGLRLGPALLASLDLEPINENSDNKGLNNGAYFSHALKIWMYQLEAGAGS

SEQ ID NO: 926623 - protein, 135 aa, Homo sapiens
MAEGEERAERLFQLYPSFKFQCKHQSLQEPFQTPSPCTVPQGNVNVFTLTQTNENKNILYIQGVLTNQQERDKHNNRKTDHESGGPMNRISATTEEALEGSLAPSTMVRVQFHSYACGYPVFPAPLVEKNCPYLQ

SEQ ID NO: 926624 - protein, 148 aa, Homo sapiens
MKRECDSFIILVNFSVIAGIRQSPGPDLANATGEGNSWWSSAHLEWALLSTESSNPGSPTAFGGCVFFVPSNPGPFLHLFLSFMTITPLASTGDFENVQPFQMALGAKCQKRLLKVWCREKAGCVIDNTSFSKTTEISRDHTRGPIKR

SEQ ID NO: 926625 - protein, 144 aa, Homo sapiens
MQLVPNLPSFPPACPLSPNPKQVFRLFFIKYKNPAQFMACLAATLRRFTALDPKRSKGHKPQPHLQHTRTSKRLNCSSQVFLQNLLPQELATSDGNLATRPRNARSPGFLLSRVSSLRDSTENRTVQLTWQPLPEPLELWPKAL

SEQ ID NO: 926626 - protein, 134 aa, Homo sapiens
MRISCSNISLAQNVTGKGSQSGPQERVLGSHTRKNLSEDHQRSRSEDDQSSEDDQRSRSSSCNRRTVPSGRLGGTKEICSRCGRTRDHLTKIKSLCRSKLVGPRGQHQDVNPAVHRCRPRRQAIHNRTDRESEL

SEQ ID NO: 926627 - protein, 248 aa, Homo sapiens
MGAAFVASLRSNLSSATSRSEMNSSVGDLGVGGCSLWDDPARFIVVPAAYALALGLGLPANVAALAMFIRSGGRLGQALLLYLFNLALVDEFFTLTLQLWLTYYLGLARRPPATRPGPPTTCPPMRRVCRCGFVRGPGPRAAARLARCLRRPARAACAFAWLAGLAPPCLEHRWASSGLASATVAFAAAFLLVLAANVSLARALKAPSGPGPGPATAGAHRRAAKTMVLGFLLVFALSLAPNHLLLAP

SEQ ID NO: 926628 - protein, 169 aa, Homo sapiens
MALTVKPLTSPLAFGIWTLPAPILDELSWAVIALLHSSLDNRERPCLKKKKEEEEEGEGGGEGGGEGGGEGGGEGGGGGGEGGEEGEEGEGGEGEEGEEGEEEEEEEEEEEEEEEEEEEEEEEEEEEEEEEEEEEEEEEEEEEEEEEEMIVLKIIVAKQLFEYSSISGI

SEQ ID NO: 926629 - protein, 170 aa, Homo sapiens
MFSTSAKIVKPNGEKPDEFESRISQALLELEMNLDLKAQLRELNIMAAKEIEVGGGQKAIIIFVPVPQLKSFQKIQVRLPTWKSCTKYKQKHPRSHTLTAVHDAILEDLVFTSKIVGKRIRVKLDGSRLMKVHLDKAQQNNVEHKVETFSGVYKKLMGKDVNFEFPEFQL

SEQ ID NO: 926630 - protein, 146 aa, Homo sapiens
MPGLYGYPCNRPTGSLCPLPGHSRFIKTDELHRDRVIHTELAVWETGVLLLLISVSLSIRGLAVSRITWWVGGNQWPNVRTMTHDTAPGGPENMYPRWLVYSLIVPFKRTEVTGKHQSVHIRCTLARNGKGEVEETYQIWTVYFQV

SEQ ID NO: 926631 - protein, 186 aa, Homo sapiens
MRQQLQHCQKPREGRNICWLLLFEALPESTMMPVCEDAHKPYRDSASQLRPQVSILPLRMFSPPWLEPGLSFRTEDSLVQLQSRCGSSRLTRCIQGPHSPQNIIILPQCHCKSFPTILSHLSSPDVESLLYDQVEMRKKGPQYFQPSLIWGEPPFPEDWLDRGRSRGIDWEEAQEDFLVSRKYSIY

SEQ ID NO: 926632 - protein, 607 aa, Homo sapiens
MVKSKAECDNVGSVENGKTNSVVTCSGAGNGRNVSSLNEEVTELDMETNIFCPPPLYYTNLTQEKPPPAQAKITIEPQMNAPEEMDDASPEKKRVNPPAHRSCLKHPSSAAHEHPPMLVNPPHIQNIGATNQTCQTEQNRINTIRQLPLLNALLVELSLLYDQPVTSPAHIHPHLAWLYRTEDKKSPESSAKSTCRSEAKKDKRSVGGCEKSVSLQYKKNQIENYKEDKYSEKSSGALHKRVPKGRLLYGLTNTLRLRLKLTNPDMLVVHEKRELYRKRQSQMLGTKFRIPSSKVKLLSSAEQSQKPQLPEDKYLDSDASFTENSDTSRQISGVFDEPSTSKETKLKYATEKKTVDCSKNRINNVSLEEVVSPANSIIPERLTPTNILGGNVEMKIQSPCVFQQDAVVDRIVDKEIDIRQVKTTDNDILMADISDKRTGKNSCYENISELKYSDDLSSPCYSEDFCTSEDTSRSFKAHDSSSRTENPKHSQYTSKSSDTGVSKKKNSSDRSSILSPPFSAGSPVHSYRKFHISKTQDKSLEEASSISASDLSSTHWTEQKENQIDQNSMHNSEITKRAQDISVKTRSSWKSLEKSQSPQTSQVGIEQ

SEQ ID NO: 926633 - protein, 148 aa, Homo sapiens
MCLALHLVSYRLCLIFIATPGNYWHTHKETNETNLESLNNVFKVTQQESGLEVSGKRCLNYDKGDCEDEGSCYVDEDSRSSNGLVALMEIAYRHKFPPAKTAFGAISKDGKEIYFGDGYKRKKRKIRTVSKHVGKLEACCTTGGIIKQ

SEQ ID NO: 926634 - protein, 153 aa, Homo sapiens
MVCGLSEQNKGQAVVLKEPMPRSPGIQSPAVQPSGMPRPLLPSLGMSFPDVCWGESWDGHRMFYHTPQSRPIYPGPHRRARGPPPPSQPLSPGPAPPPPAVGISWGKSLCLSIKSTCLISSCPAQQNSWFPGAQDTEIQSFSLSFLQGNGSQP

SEQ ID NO: 926635 - protein, 145 aa, Homo sapiens
MEEVVNRTCLAAFLPWASKVGQPRTMANPSQEPSASGPQPPLGNAASKEPSHLSKVPRSSTLFRSTENWEAPSPCGFVDWHPVCKPGKASASQETGVLRPPARPRIRTGFWRAAQQELPPLLRVLLWPVQPTLGTSMGVAMSQEE

SEQ ID NO: 926636 - protein, 136 aa, Homo sapiens
MRRVAVWMLTRQKLLNGQDGCCLEEQLLPGEEEQLLLLPAPPALPWDTGDLEQSHEAGHFSLISLPYQPLGSLSSSLSCQQSLLDTIFLWLQSHGRCHIRGYKGFLSQVLALSLASSVSSSIEGKEIGHVHSQTPL

SEQ ID NO: 926637 - protein, 151 aa, Homo sapiens
MERNPRPKTMAGSILIAKSKRERRDAHISHSLLGATIVLWILSSKKTSTQHLLMSTLRNRMGTKSQTTDQGDDGAGPLEAGHQPQLANDLLTSRSALPQLHTKTSEMSGCHENCVNTLLTMKIPFLPEGVAQTGRENALASLAGSLFCGSW

SEQ ID NO: 926638 - protein, 153 aa, Homo sapiens
MLRCHNPLIQPHPHIHVTGKSLITLPTRGNLLWFGCLSLPNLMLKFDPECGNVGRWDLVGGVWVLGTDPLYISSRMQMSGPELSIHQNHEPNTSLFFINYLLSEWKDSMVVRALGFRPQWTWWVRCMVAAQLWRRHGHGWNSGKYCDMGEKLV

SEQ ID NO: 926639 - protein, 144 aa, Homo sapiens
MLAKIHAMPVLTKQLKYTKSPGGQSDDIRQQQSDAGVCVLSLLTHTVVSGAKVFDSWAAAMEKTGAFLTLTSPLHQKWSWLCLPEWSDVCCSVGTRKEADLVHLRLIRTDNENYQYSKEGEFELSHEGCGGICLDRKNEGKGSS

SEQ ID NO: 926640 - protein, 133 aa, Homo sapiens
MLCCVHASYLDPLDTIHFCLPLPKMLNLFLQLPQTVGCLSKFDVSTCCQNLPISPRQHQFGVCQNDLQPPAPVFHGLRTFSDCQSPETGSLGMRQGVLIPWQFQTLIFKHDKIPIIKTDDTGTQIGQQINAIE

SEQ ID NO: 926641 - protein, 518 aa, Homo sapiens
MLDAQDIAFAVWVPPTSASAMAARTVIIDHGSGFLKAGTAGWNEPQMVFPNIVNYLPCKENPGPSYARRRVSLGIDICHPDTFSYPIERGRILNWEGVQYLWSFVLENHRREQEVPPVIITETPLREPADRKKMLEILFELLHVPSVLLADQLQMSLYASGLLTGVVVDSGYGLTRVQPFHQGRPLPASGKTLEFAGQDLSAYLLKSLFKEDCDRRCLFQLETVAVTQMNKCYVPQNLGEALDFRERQQSALDESNTYQLPDGSRVELTPMQRVAPEMFFSPQVFEQPGPSIPRAIVESVESCEISLRPLLVSHVMACGGNTLYPGFTKRLFRELMGDHVSSTKATVWEGSNRNFSVWLGASVVAHLSTYQSEWMSREEYVPGKWLHVLSMFEENEATAAQRREVTSESSSGLSRQIRCLLHTSAHFSPPLPQHRISLQQHRLQPRSERCFCICVLCESRAALLLLPMLGLILRFHGATCQDGQPGSDGQVPFPFTGAGKDPGLAPAERPLKWLAPNL

SEQ ID NO: 926642 - protein, 150 aa, Homo sapiens
MPCPVLIPSLGGGLSLLSLCHLFAKGLLTWAEAAVSPSEGGISCPMRFLLQILSAQLWEGRLPLSHFKLLRGSLRLVWENLDSAAGKLGMKSWFLDLLRSIPVQEEPGRGGGIFQAPASRSLLRTHPPSEAVAGWIPLPLEEDIATACAC

SEQ ID NO: 926643 - protein, 118 aa, Homo sapiens
MAPCQIMYPCGQPPVKQASGNFHAHSTGPTGWHRLHAHSFNQQVTGPLSLHQCCFEHWGRGCPLGAHDLVRGDGQSARVQIITTISSTNMDCVLCRVSAVAVLATTASPSLRTVPGIH

SEQ ID NO: 926644 - protein, 285 aa, Homo sapiens
MWAKCLGQFKEGKKRKDPLGLATVEFPCDVPKGANSFRVSGSSGVEVFMVYNRTRVKEPIGKARWPLDTDADMVVSVGTASKELKDFKVRVSYFGEQEDQALGRSVLYLTGVDISLEVDTGRTGKVKRSQGDKKTWRWGPEGYGAILLVNCDRDNHRSAEPDLTHSWLMSLADLQDMSPMLLSCNGPDKLFDSHKLVLNVPFSDSKRSSRRRFNNNEFHFMERKTEAQMQEFTVAQPSGVEQAFQPRCLGCTKAPPFTIAPHPFPPLVNQRGLNCMPSTVQAGRA

SEQ ID NO: 926645 - protein, 157 aa, Homo sapiens
MSFPHQHNGTGTTVTAANLHMRQLSHREARWKGCWQEIAEKVELAVESGRKELGSSQVLLGAPAPGHWAQDIGFNPLGPPGSKFCEPNPVTAQALRLFYVAGLCGPHKGKAKDDLSLLSWCPAWDLMYSSYPGRPTGFNHDSATSPLGSPEKATPPS

SEQ ID NO: 926646 - protein, 127 aa, Homo sapiens
MFVRFIHLLHGDISLDCDLNCEGRQDRNFVDKWVWGPSGYGGILLVNCDRDDPSCDVQDNCDQHVHCLQDLEDMSVMVLRTQGPAALFDDHKLVLHTSSYDAKRAQVFHICGPAYTPGDALVGGGSQ

SEQ ID NO: 926647 - protein, 133 aa, Homo sapiens
MRSSQLTKRGWGECFSGGSSHVLYPGLSKSELGFTDLEEAAACLLRLLRMIVMGKNLGIPKPFGPQIKGTCCLEEKICCLLEPLGFKCTFINDFDCYLTETKMCSNRPQSPSLPTVFPCKGQWSFGAMLALLL

SEQ ID NO: 926648 - protein, 462 aa, Homo sapiens
MPPGASKEGLLQNCRVHREGCWGSNPEQEAEDPGQCLTRGSHGRSCSHLLAQDNSSTFELVLGPDQHAYTLALLGNHLKETFYVEAIAFPSAEFSGLISYSVSLVEESQDPSLRFAGGELQKASGAQLGAGLNGRNPGVPLEVYLCRELQLQGFVDTVTKLSEKSNSQVASVYEDPNRLGRWLQDEMAFCYTQAPHKTTSLILDTPQAADLDEFPMKYSLVWNLSPGIGYMIQDTEDHKVASMDSIGNLMVSPPVKVQGKEYPLGRVLIGSSFYPSAEGRAMSKTLRDFLYAQQVQAPVELYSDWLMTGHVDEFMCFIPTDDKNEGKKVCFGGFLLLLASPSACYKLFREKQKEGYGDALLFDELRADQLLSNGREAKTIDQLLADESLKKQNEYVEKCIHLNRDILKTELGLGEQDIIFFPQLFCLQKLTNIPSDQQPKSPLRGHTSLTWDAPPREQVYRA

SEQ ID NO: 926649 - protein, 220 aa, Homo sapiens
MLPHIAILTATINSSQLPSAAEGHRCLSNRPQTPLACSSAGTRCAPQKCQCFTIHGSGRVLIDVANTVISEKEDATIWWPLSDPTYATVKMTSPSPSVDADKVSVTYYGPNEDAPVGTAVLYLTGIEVSLEVDIYRNGQVEMSSDKQAKKKWIWGPSGWGAILLVNCNPADVGQQLEDKKTKKVIFSEANGFQTNFLHPTPDTLFPSPHAWADQTFCPEL

SEQ ID NO: 926650 - protein, 144 aa, Homo sapiens
MHAPLSHTVRLCLKKKKKKKKEKEEGQEEEEEEEEEEEEEEEEEEEQEEEEEEEEEEEEEEEEEEEEEEEEEEEEEDGGGGGERRRRRRKNFPLCCLSLLLTCEEDADFFFHHDCKFLETSTAMQNSAGMKKPSGVLEMFCILI

SEQ ID NO: 926651 - protein, 153 aa, Homo sapiens
MRAIISTVFIVPLIPTMILTIPNTIPTILPSISIIPTTIPNIPTIIPITIPTTISTIPTTVTITPTISIIIPTIPTILTINITIPTIPNTIPTIPTITITIPTNIPTTHHAHHHPHHQFAYLPPPDCEPLRHGCALAISDLSGMLRIRHVVGA

SEQ ID NO: 926652 - protein, 127 aa, Homo sapiens
MCLHPLRRHACFPFAFHQDEEDRKMRENLELPRDLLNCCDQSVDGVMDNEDHSEKVSGGNEELIGNWSKGHSCYALANNLAALCPCFRDLWNFELESDDLGYLVEEIPKHQCSGCDLAASKFLCAYV

SEQ ID NO: 926653 - protein, 127 aa, Homo sapiens
MELQERVPPDKRECTTPKYGALDIEYLKLKEFEKRRVQEGLSELSSEADHKTFSPDASFGVNQTRTRQVFSTAPGKQDSSWMGTSLPGAHFPSSWAEAQQLIQLVLHLPMDALIWCNQPGLWSQHAS

SEQ ID NO: 926654 - protein, 429 aa, Homo sapiens
MVEAGWSVAGFSLRQAHPSSKIESLRVTVDFLKVPLGLKKPVLKEVAVGPPKRPQPAALERYKARRSDAMDTESQYSGYSYKSGHSRSSRKHRDRRDRHRSKSRDGGRGDKSVTIQAPGEPLLDNESTRGDERDDNWGETTTVVTGTSEHSISHDDLTRIAKDMEDSVPLDCSRHLGVAAGATLALLSFLTPLAFLLLPPLLWREELEPCGTACEGLFISVAFKLLILLLGSWALFFRRPKASLPRVFVLRALLMVLVFLLVVSYWLFYGVRILDARERSYQGVVQFAVSLVDALLFVHYLAVVLLELRQLQPQFTLKVVRSTDGASRFYNVGHLSIQRVAVWILEKYYHDFPVYNPALLNLPKSVLAKKVSGFKVYSLGEENSTNNSTGQSRAVIAAAARRRDNSHNEYYYEEAEHERRVRKRRASWR

SEQ ID NO: 926655 - protein, 121 aa, Homo sapiens
MSLGHVRDLHSGTSHYSPRGPGGIRGFVGWAQDPHAVCSLGTWCPVSQPLQPWLKGANIGLMLWLQRVEAPSLGSFHVVLSLLVCRSQELRFGNLISDVSKCLDAQAKVCCTGGALMENLC

SEQ ID NO: 926656 - protein, 139 aa, Homo sapiens
MRVPEASEAPSQGSESSYDLRCSTFLIPEGPVLVSLTVERYWLRWAILSGPGAAFDVCSKAHQDLSRRVSLRPSEPDSTGYIVIGVGWHLCLLVRLTVAAVLPGVMYGLCFFITLFGSYVSRLRRVICASYYPSREQGC

SEQ ID NO: 926657 - protein, 135 aa, Homo sapiens
MLMQLQELPSHDVYPPENDLSSLGLVAAAVAAATFASYLAPWQLDPVPPPFDRTLYVGYDRKFISKWLQYKAKLLVQSLVFLVTSSNFGAIQEPSKSHLIITRSGSYHPGNPMGFRSSVPGTRDKDPKYISYYAT

SEQ ID NO: 926658 - protein, 142 aa, Homo sapiens
MRFQSLTSSDRNLRARAGRGSATGHLGSREGLAQGAVASTASRPCSSLTALPVGETSIQAHETLAAFFPARNPWLLRSGPSLGLLLRCLFCIWETGLDIQGLSGKKCGQKAYTYQLAFLVASRASKGQVMCPGSKCPNSQSG

SEQ ID NO: 926659 - protein, 133 aa, Homo sapiens
MEDVLQEVRKSSLPFGGPFVSHFWLHQAYCLGCGQPQDEGDMENTVSCSTPGCQGLYCLTCFRLLDNTCSVCASPLSYQGDLDLELDSSDEEGPQLWLAAAQRKDPEQAWLLQQQLQEVLGRSLSMESTSESR

SEQ ID NO: 926660 - protein, 175 aa, Homo sapiens
MRVPEASEAPSQGSESSYDLRCSTFLIPEGPVLVSLTVEGTGYAGNIYRDLVSAFDVLQQGNISILSRRCLLRPSEPDSTGYIVIGVGWHLCLLVRLTVAAVLPGVMYGLCFFITLFGSYVSRLRRVICASYYPSREQQPQPALLWLNSKANDLDCKPLDPRWGWEKWCLWGGAS

SEQ ID NO: 926661 - protein, 232 aa, Homo sapiens
MVIPQAYHLCYVLMPFKLALCGLASLVQVFCVIPKYIQPFLRQTIGTPVIQLLNRVRQEFEFNMTATHHFSVDLNASRSLSQVAMDLHEAVSMKLHRVREALALMGFTTPLLLVLLYLQALFYRYCYLNWDHYDNIYITSRFLRMEAVRSTAGLPTVLPLSAHEARRYIPPGSIFLSQWEKFFYILETFNLIRHLLLVLFLVFLDYAVFWVLDLARHQLQGEIVARTPSACF

SEQ ID NO: 926662 - protein, 206 aa, Homo sapiens [sequence omitted]

SEQ ID NO: 926663 - protein, 180 aa, Homo sapiens
MSAKSGCYGDSHGGVELCHARFQGVCLMVICLTNRDPVARFKLAGTVGLWQQGYLRAELPLTQRWSHATHCLGQGWGRAGVLNCILMGPQWLLVLNALQENAEANSRWQRLTQVMCTVPFCVRVTGECLQGSPVCPCVALLCGGGQRLNFPEQLCGPGAAKGSLEVWLPQPYPEGLACHW

SEQ ID NO: 926664 - protein, 159 aa, Homo sapiens
MAATRGVLGIIPESLPLHLAHDKVSGGTCVTSICQRELGSNPRGLTPHVKDEECAIWQVGHLWIIALASFQGIVKKQSFKSMTIKGQFFGIIAGEGNSGCNAPIGCITELMALKSVNILHLPDFFLITKTGEFQGENVGAMCPFLNCSVTNFSKASSFS

SEQ ID NO: 926665 - protein, 231 aa, Homo sapiens
MGINILIAPGQTLFSPWWKRQYLLKPEASKGLEALINNLKMRGFLKPSNSPCNTPILGVQKPNGEWRLVLDLCLINEAIVPIHPVVPNPYILLTQIPEGTKWFSVLDLKDAFFCIPLHPDSQYLFTFKDPSSQTAQLTWMVVPQGFRDSPHLFGQALSKDLSEFSHPQEINRLLSSVFLPQGVAAMHCKGHQKGTDEVAEGNMLAHQTAKSVARKPQGTTHLKPLEFGKAP

SEQ ID NO: 926666 - protein, 142 aa, Homo sapiens
MVSGARVKRLPLARDVKMDGLGQGSKAQEKVKEAPRTLLQRNQEAIRQSDGVWVTRNQVKTNEETETQKSKFLVIKPSDIAEGQESALNSAGSSWLHCCSGCVNRERKDLETHVHLPDAERTRVPFFYTQIADGLLWDLVIM

SEQ ID NO: 926667 - protein, 232 aa, Homo sapiens
MSLKGLNTSERLAADSGTQIVASRSSDPSSIVWLALAQCQAYVLTDQAQSYQAIADKTAVWVAWYKYKNRQAKVDRQKVQRRPRAIEWGRNGQMVWRDAVEDFTQQEITDILQTFRQKGGESVITWLVRINEQGANGIRVDSGNVLKFVTLSWVPKIQLALRNWATAPHPTNDEGNVLDEISLWQLAINVARQKYSTEDAWPDGGKPWHTLKEYAMRLKEEAMETAVSYNPQ

SEQ ID NO: 926668 - protein, 136 aa, Homo sapiens
MTRNVRKHIITAEGEGEASMSSHGCRRERESKVGGATRFQTTRSHENSIMRQDMGDGDKPLETTLMIRSPPPPGPTSDTGNYNSTQDLGGDTEPNHIKLCEKISNCHLRDIPKNNGKCLQPIANDSLTHRDPRFST

SEQ ID NO: 926669 - protein, 275 aa, Homo sapiens
MRGGEKEEVMGPVSPDLHKEEVIGPVSPDLHKEEVMGPVSPDLHKEEVMGPVSPDLHKEEVMGPVSLDLHKEEVMGPVSPDLHKEVMGPVSPDLHKEEVMGPVSPDLHEEVMGPVSPDLHKEEVMGPVSPDLHKEEVMGPVSPDLHKEEVMGPVSPDLHKEEVMGPVSPDLHKEEVMGPVSLDLHKEEVMGPVSPDLHKEVMGPVSPDLHKEEVMGPVSPDLHEEVMGPVSPDLHKEEVMGPVSPDLHKEEVMGPVSPDLHKEEVMGPVSPDLHK

SEQ ID NO: 926670 - protein, 149 aa, Homo sapiens
MFSPITITIEFHDPTNHGDENTWYPEKNPDKLTKIIQKLFVFAFTWAFGGALNREDEHRENIPFCPSLEPDSLAKVTYDFDKLVHELFGNSSQVGATKTYNASKAEDKAIKLSIQPTWGQVHQYHCLPPPYIVPLEVLQGNNTHRAVIS

SEQ ID NO: 926671 - protein, 444 aa, Homo sapiens
MSKHADGRGKEQKHRMGKTLTSCMSPSAGPKQYCCRSSEKPYCEFEIYKQAAESKHADGRGEERRSPIGPYCGSEIYEQAAASEDSGSSDDEQKRTTGNRLTPCVLCQPQAAQAQEVGRALPWVRSTSRQKQRMVQMAVERSKGTPKSASPNQADPRLRREHYCEAAFSKQPAGGIQADGRGEEWRRPMGHRLTSCMSRGSSSKQCQCRRSTEFYCGSEISEQAAESKHADGGREEQSCSMGNRLASCMSQSASPEWGWHRRLVGDYCKSEIKEQPAASKGTGSSREEQRCPMGNTLISCMSPSASPKQDRHRKSVEPYCEFQIHERCWYKRLAELYWGSEIYEEQEAMIKVEPYYEFEIYEHAALNKGTGSGGEEWRCPIGNMLNSCIFPNASPVWGCCTGLVEPDCRAEIYEQVAASKNAGSGREEWKLVWHRRSVEPYPQV

SEQ ID NO: 926672 - protein, 145 aa, Homo sapiens
MLGDALPREEESREAVCLQQLCRAAVGSAQFKLPCGFVYTVMGKLPTQASVMADAPPPTKLQHPRSTSDCCAGNENFKPVDLSLLGSVAGVGGSAELDHLAPWLQPPFQGSEQLCLAGIPAHIQVPVRYIHMMTEHYHSAISQGH

SEQ ID NO: 926673 - protein, 232 aa, Homo sapiens
MREIVAVRVTISVPRLVAGALRAQRGPAGWPEKMLAAAGAFWEVISDEHAIDSAGTCHGDRDLQLERINMYYNEASGGRYVPRPVLVDVEPGTIGSVCSAPFGRIFRPDDFIFGELRAFLHWYTGEGMDVMEFTEAKSNMNDLLSEYQQYQDATAEEEEASQGAWTSRPASLKLSNKMDVSWVLGSTPRTVLFYLALVELIHGLYDTLLVTHTLTQVDWEDEASIAWGWAYV

SEQ ID NO: 926674 - protein, 216 aa, Homo sapiens
MAPKRAAYLPAQRSSSAKDQTASLSAPLGRSFQRKEQSAIFAVLQPPLPRQTGPGVDLQQIPAYQQQRALTIRRKTNKQKGEHVHSETTFEGHQHQRPKVDKSMKMGRNQGKKAENSKNQNTPSHPKDQNSSPAREQNWTENEFDKLTEVGFRSWVITNSFELKEHVLTQCKEAKNLEKRLDKLLTRINSLEKNINDLMELKNTARELCEAYTSYQ

SEQ ID NO: 926675 - protein, 189 aa, Homo sapiens
MAPAFARMSLPNKGVGLSGIIRKACEKSKVTQSQLSDWEKYLVTACPRTPWIVTDLEDSCLGQESKTEKAVPVSRRQLTSRPSMVKHTWGSVRVMAWAGACPGNPHSCCWIIWLVASDSEDLHTLGCGGPSSDSLDIRGMDKGVAYFYSDNLFNMSLQTALEASPIRHSICPAFPFSRATKVHLPEGHD

SEQ ID NO: 926676 - protein, 420 aa, Homo sapiens
MWLPFYEGTLLGGHPCDLLAGDLRRNMPLQELVSFEDVAVGFTWEEWQDLDDAQRTLYRDMMLETYSSLVSLGLLEFAGGPLQTLFACVSPAEAAQQQRLLLAPSSGSFIPERHLPDASWNSPDHKIQIGLQCFEYSGRRNAFNVEAILTHKSASMGKTSCKSNKCGKACNESATIAQELTQVGRKTFERHVCGKIFSKKHKVTEHKKIHSGKKPYKYSEYEKAFISQSCVTKHQRTHTEEKPYPCAICEKSFCQKSNLSVYQRIHTEGKSYFAKNILAAGKKPYEHNECGKKFHHKSYLRVHQGFHIGKKPYECNECGKTYEKGILTSHQRNHTGEKPYECNQCGKPFGWKSSLRSHQSIHRGQKTYGCNVCSKSFHQKSDLTKHERIHTGENPYECNECGKSFGWKSRLSQHQRSHIG

SEQ ID NO: 926677 - protein, 169 aa, Homo sapiens
MSADGAVWGRMRSCLRAFPERLAACGAEYSSIPQIPAPTPAWNAHSAFITALNSTWFPKAMSPHTTSQGYNTLGFSDTVNTKQHELQDTQDSWRGADVSYLTAGPVLGSMPGFASVWRRERREAAGNGEHRVEPTFKEEGAGKRVKYCKAAQDTKVSKVLSTETAGDLW

SEQ ID NO: 926678 - protein, 163 aa, Homo sapiens
MSVGVCWRSTSDPVCLGITSGGYRTANIAEQQILLPDPSSGSFVPEGHLPELERCAVRSAALFRAGRQERLSLLKLRLQPPLLPGALSQGDGSFIYKLLTGAAASLSEMPCPERRNLERQSGYSSFAELWWVLPILNFPAALFTLKPYDRELWGPLGADSGPY

SEQ ID NO: 926679 - protein, 220 aa, Homo sapiens
MGCQYPSLSQLKQLHLIHILMWTTNLEPLGALLEKAAATIETLVLEDCRIQDSQLMVILPALSRCSQLTTFYFHGNETSMNALKVLLHHTGELSKLGLETYPAPLESLNNRGHVSWEILAPIQAELMRTLREVRQPKRIFLVLPPALPVAHGHLRNWSCIFASREGLKQDQSPQHKGYSDTVDTTYSSTPPSKVKSNCSPPFPSCPAWEKQDCNRTGSIK

SEQ ID NO: 926680 - protein, 139 aa, Homo sapiens
MAEERKRLLLLIDLGCCNGVEHELTLALVNGQRVSGNMRDKAKRQVLVNPGVPALHHFQTRKDLATLTRCCGWGPCGADLQDEDVPGARGGKWSRTSSLPHFLQPNQPALPQPIHQISQSLLPALSWLRSSSWVYPTPH

SEQ ID NO: 926681 - protein, 160 aa, Homo sapiens
MVWLCPYPHLILNCNSYNSHVSQEDPEAVLAQPLGGLPYHSQISITYWSDIKNNSKQYDTELNQPEVLLVQIGQYRDNYTYIWKSSSLSPSSWLLYAKIQAPLNYAYKTKVHGSGTTSREKSHDWTMVDRIGGKKKAFSPQKTTVPERSATFPLEASCLL

SEQ ID NO: 926682 - protein, 231 aa, Homo sapiens
MMCKAIQGHLENNPALEKLLPHIQGNVGFAFTKEDLTKFRDMLLNSKVPAATHAGAIAPCEVTVPGQNTGLEPKKTSFFQALSITTEILSDVQLIKTGDKVGASEATLLNMLNEHLSLLLWDDYPAAIGYPTVASVPHSTINGYKQVLALSVETDCTFPLAEKVKAFLADPSAFVAAAPGATATTAAPAAAPAKAEAKKSWRSWMRIWDLAYLTNHQKATNSASFICKTKK

SEQ ID NO: 926683 - protein, 292 aa, Homo sapiens
MVVEVVVVKVVDDGGGGDNGGGGGRGVGGGGDEVVVVKVVDDGGGGDNGGGGGRGVGGGGDVEVVEVLVVVVMVVEVVVVKVVDDGGGGDNCSGGGRGVGGGGDEVLVVVVMVVEVVVVKVVDDGGGGDNGGGGGRGVGGGGDGGRNGGGGGSGNAGEDSGGGGWWWVMVVEVGDGGGSGGDGGGGGGRGGGGYEGRGGGSGGGGGGGVAVAQHVDMAVMTMVVMVQKVVDVIVVVAMEMGEVVKVAATVGISEDQSGSPCDCDGDGDTGEGDEVGAAGGGGGGDGGLIPGY

SEQ ID NO: 926684 - protein, 152 aa, Homo sapiens
MGLEPESVGASLRPESTGADLALEWALNLNLQGLAKSEMGLVHGAGLDFESSGAWNHKDQPRAWGQPGTRASIEPGSVEADLEPRIVGNALVLRATGTGLEPGDLGVNLGPRYTGEVLKLGCVGVSPPLWSSGTCLYHGPSGTSLVVGSTGA

SEQ ID NO: 926685 - protein, 159 aa, Homo sapiens
MFRDSQLFCLGSFWVVLASCISGLVQQLGERDRETEREFCSIHKRLKLESWRKQWRSLQEDSLAKEDCRILTYSQGCFRYSWPQSETQDETLALSAENRFSVSQASTRWRHRAPTSPELRGGSTWLGRPCRFSPLFRLCVPLRAAVLQLFKKEIFTKSS

SEQ ID NO: 926686 - protein, 150 aa, Homo sapiens
MAATLGLNLTLALGILRGCQTQVLVPKRPGVQAFRAKREYFPGEGGGPPEAWAKSYLPNRARGGSDAASHEGGALTNGIVLLEERALSTLLSCEDTPDANSLQAERGTPPEPSHAGTLMAFSEPPERLQYSLSFGYHFVFSKALVLPLSH

SEQ ID NO: 926687 - protein, 142 aa, Homo sapiens
MGFEERVDSVGHKVFCSPELGYSPEGLETTIWSKCFLGIQLHFLPPGSLQRKPLKGRHKYSTGGHPCTHPLWAAPIRAASSLVQNSADASAGISWVPQLELQVQTCFPLQISCTGPQCDIGGHGIDGFFKKNVASVPSLNVE

SEQ ID NO: 926688 - protein, 842 aa, Homo sapiens
MTTILVLCWSQQVDAARRSWNLGVMENFLIMMAPQAKDQSSQGDEEKDPPKSHPYSVETPYGFHLDLDFLKYVDDIEKGNTIKRIPIHRRAKQAKFSTLPRNFSLPDSGARPPAAPPLQNWSPVVPREASLGTQEQNQSPPLGNAPQASTSRSEVSYHRKALLAEATRQLEAAEPEDAELTFGSGRPQLLRASSMPATLLHSRASEEPGLSLGPPAPPALPPLQGEGSVCDGTFEPAEGLAGFHSSSPRASTRIPELVQEGAEPPEGVVKVPNHLPLPGPPFSFQNVLVVLEDKEDEHNAREAEVLFTPGSPTPSPPPLPSPIPENELLLEEIELNISEIPPPPPVEVDMRSIGIRVTEESLGLARVDPGSISSLKQQVSALEGELSGRTEELAQVRTALQQQEEEIKAREQRIRELEFTVAQLEGQFHQENAKDTQGQTDVMVNTDPVHGLLTRESCDKGIEVNLLGSMESESWGHRGEENGLLWGPDGHKQGNQSPAERVLLPQLSLPQGPEQVLTSSVHSFLSTELRIEEAGTEQEGGPQGGTRGAGGFLWGSDRKTPPAGREETSSNLPGKEHPGRPPSSPTDATIGQYVKKIQELLQEQWNCLEHGYPELASAIKQPASKLSSIQSQLLSSLNLLLSAYSAQAHPPKEPPASSSSPPVEISPSTSLKSIMKKKDYGFRAGGNGTKKNLQFVGVNGGYETTSSEETSGEDSTPEDLSDSEAEKKCDGPDHKHVKDAHLTCEAGQGIPEGTCHAAQESGPGEEVPHSKAESQEWFRVSSRKSSSPAVVASYLHEVQPHSPHFLKLLVNLADHNGNTALHYSVSHSNFSIVKLLLETAPI

SEQ ID NO: 926689 - protein, 184 aa, Homo sapiens
MDTASRDKTGTVVEFTLFSFLQGSKSYAACYLMSKNVSYIIIEQMYHRVLYRDIQFPGKRQETVAFLYLNYKRLSSFTNPPQHRPFTSVGLGDGQIFLIPRGHISDYHMGRNLGQYPTFQGRGLCGFPQCIVPLARNEVSPGLGHILPNSLSSFQLSTVALQLIVSGTIQTNGEKHVHLAESSQ

SEQ ID NO: 926690 - protein, 184 aa, Homo sapiens
MKDVKFTRGAVVNLASVSSGAVRVNLDGCLSTDSAVNCRGNDSILVYQGKEQSVYEGGLQPFTEYLYRVIASHEGGSVYSDWSRGRTTGAAPQSVPTPSRVRSLNGYSIEVTWDEPVVRGVIEKYILKAYSEDSTRPPRMPSASAEFVNTSNLTALLTCKAAAQRDRTGVSPQTEDCSETDFII

SEQ ID NO: 926691 - protein, 134 aa, Homo sapiens
MKLKHKKEQSKYKERENRFQSEGAAPAKAQKCELVVLEEQNNGGQGIQTDENNEREKDLAVFTPHQFLLSACTHVGCTNSSWVLLYTAQLPPEHVDSPVLTVLDSRTIHIQRGEESKRGGFPKNAVVRVTLYFQ

SEQ ID NO: 926692 - protein, 165 aa, Homo sapiens
MHGQRLCSGPTAANGSSGYKIGSAVSPDVLATLNKGDLHYQPASCTDSSYVENRTLEAPPEGTVNVFVKTQGSRKAHVRWEAPFRPNGLLTHSVLFTGIFYVDPATDVGFFIFLKITYTDKLLPDGSQNVVPRAAATATSDERLEMYVVELLPQPSESETLEAKV

SEQ ID NO: 926693 - protein, 183 aa, Homo sapiens
MLFVHNSVGFTPSREVTVTTLAGLPERGANLTASVLNHTAIDVRWAKPTVQDLQGEVEYYTLFWSSATSNDSLKILPDVNSHVIGHLKPNTEYWIFISVFNGVHSINSAGLHATTCDGEPQGMLPPEVVIINSTAVEVCTIYACVKSNGTQITTVEDTPSDIPTPTIRGITSRKYYSFDGHEF

SEQ ID NO: 926694 - protein, 136 aa, Homo sapiens
MERAEKAVYALNQHPIYGTVSPLARIHNSRNQGVEVEVAPLTITSKDPLAKFLLPVPATLHSGGLEVLFPEGGSLPPGDTTMIPLNWKMRLSLRHFGLLPPLSQQDKKGVIVLAGVIDPDSQDEISLLLHNGGKER

SEQ ID NO: 926695 - protein, 171 aa, Homo sapiens
MAGYPSEMKLSEDRSGSNICCSAILNVLQPLLLIPRQTGSGVDLQQTPTELQLRVLTVRRKTNKQNDIHTKTPSDIGIGKDFMSKTPKAIATKAKIDKWDLIKLKSFCTAKETTIRVNRQPREWEKIFAIYSSDKRLISRIYKELRQIYKKKTNNPIKKVIKTRPVGEDND

SEQ ID NO: 926696 - protein, 163 aa, Homo sapiens
MGLELRYQQNFGRGLHCGVSEGDEELTGNWSKGHSCYAVAKRVVAFCPCSRDLLHFELERDDVGYLEEDIYKEKSIQEVAWLLLKPCDYLHKQRNDLKLELTYKREAEHGKMPPRHFRDLCSSPFYHRSEGLGGNNGFMGQAQGLVALCSLRTWGPASQPLHP

SEQ ID NO: 926697 - protein, 141 aa, Homo sapiens
MQWGDSQASGHEKALSKSFEIPMPSSFQMVITGRFFPVFRCSPAPCCFIKATSGGRPQTLGIQKEACPSQTQHTVQGAETKEQDKALPTRNLQCPQSDQTLFQLVGTWAVQIVGGLSEAHSQEPYGIVMGSTTAHVSPTPN

SEQ ID NO: 926698 - protein, 131 aa, Homo sapiens [sequence omitted]

SEQ ID NO: 926699 - protein, 172 aa, Homo sapiens
MCNKLFLNLQVDVLPKKYRLALFQEVNPDFISHFATGGGQMDALGIGHCAVGGWGISRTSTLGFGGKALEERALPALGFQSRGFAGESEVFQCQGALKATATCRGGPRRGSGQGPPTGLKCHSGPQLGPKPKPLSLPDHSAGTAPPSPGTSTCLPLWLFQQPLTINDTESCQ

SEQ ID NO: 926700 - protein, 152 aa, Homo sapiens
MGQLESAVTSGSGWSLFPARGRSMQEGSSSASSWALPGSADARCVAEPPAKPHWLLCSFSQVQCVPGHRVPKHKVYLSIGLLPAACFKGRPEAHPVSPHLLWSRTLPALTWKIRGQQSPETVEARDPVPVSESFMVPSHPLLLKPQLGCVLR

SEQ ID NO: 926701 - protein, 148 aa, Homo sapiens
MNNTGQRKYSAVCSYTGTTNPDLGTNEGFLEEAAWESVDLYKDQRNLAPGHTLAECSSVKWELHSQEHEGYIRGVHVPRSPRHPGGDDSDIGPGSSTLDLPAPNPHNTLKRQRPGEGRRAVPQKEMGEPAGGTNAANTLLLDFQPPEL

SEQ ID NO: 926702 - protein, 152 aa, Homo sapiens
MATACFQSPRPKKAGLTARFYAMFHFSSAHQLGLPTARSPRLFYGSAYPMLCFNTRYRLIRCLSGFLKLPPDPSPAPPTFLPAAGQDTAAGDLLVKHTSAHDFPLLETSCAFPSPSESSSRAMASVGDVVASNNRMYPLPVLEPRGPKSRCQ

SEQ ID NO: 926703 - protein, 138 aa, Homo sapiens
MSLTEELASLAGELVFYHLEKLGPLGELTDSNGALGQRHKTGSGLHQTLREYLGDEKSEQLLPSPYYRMTFPGTLVSATYCRMYSSISKVYDNIKDIARFRSSVPAYRYLLAHPGVQPRAPSQGSMKKVGWGTTLSGF

SEQ ID NO: 926704 - protein, 682 aa, Homo sapiens
MNFEAVLHYKHQNQARDEKKKLRHASGANITNATTAATTAATATTTASTEGSNSESEAESTENSPTPSPLQKKVTENAPGPLAGPEIRVFRASAPPPPSILFRKPLSAQDNNSYDTDLSKTLLMYTVPAVQGFFRSISLSRGNNLQDTLRVLTLWFDYGHWPDVNEALVEGVKAIQIDTWLQALIYPLTVASKSTTTARHNAANKILKNMCEHSNTLVQQAMMVSEELIRVAILWHEMWHEGLEEASRLYFGERNVKGMFEVLEPLHAMMERGPQTLKETSFNQAYGRDLMEAQEWCRKYMKSGNVKDLTQAWDLYYHVFRRISKQLPQLTSLELQYVSPKLLMCRDLELAVPGTYDPNQPIIRIQSIAPSLQVITSKQRPRKLTLMGSNGHEFVFLLKGHEDLRQDERVMQLFGLVNTLLANDPTSLRKNLSIQRYAVIPLSTNSGLIGWVPHCDTLHALIRDYREKKKILLNIEHRIMLRMAPDYDHLTLMQKVEVFEHAVNNTAGDDLAKLLWLKSPSSEVGHWALQTCALLEPPLAIGWPSHLFMCTQRLFFAVIGCRAHPSNLMLDRLSGKILHIDFGDCFEVAMTREKFPEKIPFRLTRMLTNAMEVTGLDGNYRITCHTVMEVLREHKDSVMAVLEAFVYDPLLNWRLMDTNTKGNKRSRTRTDSYSAGQSVECL

SEQ ID NO: 926705 - protein, 258 aa, Homo sapiens
MEAQMWKAVSHPGKGFLATQTSLALATSRSPRPSHPTSSPQGLGFFALPTLAWSCLLPRPFALGSVVAVTKASGGLPQFGDEYDFYRSFPGFQAFCETQGDRLLQCMSRVMQYHGCRSNIKDRSKVTELEDKFDLLVDANDVILERVGILLDEASGVNKNQQPVLPAGLQVPKTVVSSWNRKAAEYGKKAKSETFRLLHAKNIIRPQLKFREKIDNSNTPFLPKIFIKPNAQKPLPQEPESVWAFMPLAPALQCEATS

SEQ ID NO: 926706 - protein, 140 aa, Homo sapiens
MMDATYPMVSRMKPDTVSSIVPGARRNFQKHLHPIRLKMGWQEEDVLVGIILVDCVIVQPLSGIRKRLVCLAIARTVPIRDLLSEHLPEKAVISPGKARADCEAPAEKRSICAYPRHRRHGVPHQRLNIHQIVTEFLLCA

SEQ ID NO: 926707 - protein, 179 aa, Homo sapiens
MKLRNQQRSVYVEIAGNKSGNRAEGCRLEPGFPGSQHSGGAGHAGCLLEIHTRRNQEDAGLYQGKSQTATQANKALASPTGKRWSINGPSSCPVLDLMAGPLYPHCYQSLDVNHLGKGRPLAFCSILWLSSVEANPEEAVSWKPIAHSWGNKSSLEARSRRHISMSPPHGPRIAEFGDM

SEQ ID NO: 926708 - protein, 151 aa, Homo sapiens
MQAVSGSTLQGSGGQWPPSHSSTEQCPSGNCVRAPTSHFPLASSSISSHGPSCTWGPLSLGCSWSSWDVGSSVLRLSRATQPFNQSLRSSKFSLIFLSSSELPNSSNLCPLRNSKAASTSLVIFKAMPLFSFPVFCVSSFFQCSKVVPEAG

SEQ ID NO: 926709 - protein, 202 aa, Homo sapiens
MVALWVLGKSHHQLKEMGFINQRQPQGRACTLPWPRTSCHHLVHPYFSEDRAGEGPAQEGRRQSVWSQKPKDRLIHILWLQTGPGDNLEKGDRQVYSQGAWTPHVEPQTGGSVPPCMAVAAEPPLGNKRLQSKGPVLPQQRELKGYQGWECGEGQTHGTWLQVNAKQIPMNLEPGSLGAQVSDLQSHLADALACAGKGRVKA

SEQ ID NO: 926710 - protein, 162 aa, Homo sapiens
MPAGQFAPHPRLAALALAVHLPLGCSCSFVSITGLTSKPPAAAFRAPPTTSQGYFGQDPVKTWLDGEMLPGDAGWREGSSEPYLALPFQVVSPVSLQNGELTPGKECITEWWPNHFQILLESPLLAPLELHCRSALSFRQLSWTLTTQGLLSCLPSDPCARG

SEQ ID NO: 926711 - protein, 173 aa, Homo sapiens
MSWVHPGLLVSVLGRLVSESDDNNGDEDDNGDVSDDGDGSDGDYDDDKDGHYDKSIDGDGDDDDDDDGDDDNVMKIIVMMVMMVMVVMVVTIGMVMMMVSDDGDGDDDNVGMKIMMVMVMLVMIIYHYMRGSAKSSGSCPGCINGKYKPDHKDLKPSEKQENLMSTKSIAINA

SEQ ID NO: 926712 - protein, 134 aa, Homo sapiens
MRRSSSAAIVEIKIVIITVTIIILPMCQVLSYELGMSSLMEAFQCPTGWTGSMVPVSTSDEASGSLQSWQKVKGEKVYHGETRNKREKPEQQSNLFQKQKEEEERRRRRRRRRRRRRRRRRRKIYYMIYTEYYT

SEQ ID NO: 926713 - protein, 140 aa, Homo sapiens
MLCSVFSRIGKKEPCALKATEVMSSWVCRAFLRRQDFSKALDPFSKTNSKDSTVMSTAPWKLLGQHSPLECSRVMGTFYASIAQCGSYQPHVAMSTCSMASVAETLTFQWYLIRNPGFRALSVSALEVKSQEPNSEDTLL

SEQ ID NO: 926714 - protein, 172 aa, Homo sapiens
MGSGESKSLTGFASLFASLWPHTESLEKNLSYLQGLQTFAQILNLDEKRKRRAVSSVTHLQSHGERLLACSKRDLLGAGWNILVGSQFAASHGVPPHVFLMENSRGMCLHDIGMATQKQVTRNGSASESWCNWTRESVSPKCMGKSPSQEQIKKVFSDFCHGQNRPRRAREC

SEQ ID NO: 926715 - protein, 137 aa, Homo sapiens
MDSVSTFFTALWMQCQPPLLPHEYSVNLSHCPMDSANLLLLPRGHSANPLSLPHGHSATLLYCQGDTVSTFPTAPWTQSSRERSCLTTHRGAAGEKGVAWLGVLPRLAGGSKQGWTDCTCLPWLEEGKGRRLPFLVC

SEQ ID NO: 926716 - protein, 138 aa, Homo sapiens
MNFLSSEKGAYKGPVTVLAGRYLEVSDLCAPRGTWKPMLLPACCQALLMCGVDLVGLLEAGQVCSLAGRKGKEEAKGQQFPWEEGGEPAHIPSPHVPPATTQLPSAVEEAGTVATCPARTRGILRERGGRRSQWLHSH

SEQ ID NO: 926717 - protein, 167 aa, Homo sapiens
MLTFCISVIISILYRVLIKMFQVWLLIQQMASSGAAVTVLKDSDNPELGPAPAESEVPLRSLRDMRRGTGSSCPSVSGTAMTPLPGSCTWRLVPQFMFAHIKFKGQGHCFEFIKVKSNNFQIRTNSSCHYQGQDGEGPLQQADNFPGCAHTCKYVSVWAYASECVCL

SEQ ID NO: 926718 - protein, 233 aa, Homo sapiens
MCLGTQTEPWISGVDYESGLIKAHAYINHNNPGQWTMESTKTCEIAGNGFNMESPNHESIGETKAPSVVEIEVSPALSEVHLLLKKENVHEHQLMKDVLIRNHEPPELTDHARLTKIIHRTVHGCQLSAFSLNFHSIPDTVVWDQSLISPCSPICNRILGLPHVGINPVASNNRNSPSRSCRAGALKSRCLQGLILPMALTVVLPGLFQLPVVTSSPQHLACHQHDASLPFSG

SEQ ID NO: 926719 - protein, 164 aa, Homo sapiens
MTIDPLGQCSSLPLPILWERLSSGLSHPSQKVVRGPSSGANIGHVPSCAWIPGARATAMGNADQLKPGRPPGSSRENEVGVPKGDDRYTMTAALTTKVRIFSAEPGAPGHSWAARGPRNGQGPPATQILSQKSYREQTRRPCQPAPAPPPHPTPGCAGATQRLF

SEQ ID NO: 926720 - protein, 142 aa, Homo sapiens
MTLLYLLSKTTTYLMALNGRNLFSHSSGVLMTIDPLGQCSSLPLPILWERLSSGLSHPSQKVVRGPSSGANIGHVPSCAWIPGARATAMGNADQLKPGRPPGSSRENEVGDRYTMTAALTTKALVCDVPHPVSKCSPNEDNL

SEQ ID NO: 926721 - protein, 141 aa, Homo sapiens
MLRPWGCPAPRRLLTAGLECRYIQAALDLIETGKSGNFSGEVTLTGVLKDWGKLAKGHEYKEELSKMKCWPTQGPKDAKPGFEPKPPAGTCGLAMLLCCRCACDFRSYSPSEDGDHGRGLQRVSEAWTPEEKNLASYFQVV

SEQ ID NO: 926722 - protein, 243 aa, Homo sapiens
MHHHHHHHHHHHHHHCHHHHHHCAIIITTTVIITTTIITNTTAIVITTTVIITTTITNITTTIITTINTTTPIIIITTTIITSTTTTITTTTTITITTIINIITTTITNTTIIITTTTITNITTIIITTITKTIIITITTNITTITNTTITTTTTIITTTTIIITTTAIIIATTMTTTITTITTITTTIITIAITTITITTTITTTMTITTITTTITTITITATIITTTTTTITIKPSALLFF

SEQ ID NO: 926723 - protein, 373 aa, Homo sapiens
MTTWLLHLLHLICIPARTKDTERKKICGNRSVLSLRALPEVTSSNFCLHIIGQSCVTINSSFVSKEEEENEHWVVSGQHVTFLAISHVPSNKTKANIAHQRTVKACSRSFFKSKDSSSDRELLEEVAFLLNYPLPWCNGGGNGDGGDSDSDDGGCDGGDGCDGGGHGGGDDDGGGGDDDGGGGDDGGGGGDGGVGDGGDVGGDGDDDGLGDGGDDDGGDVGDGGGGDNDGGVGDGGSDDVDDSGDGDCGGGGDSGGGAGNDGSSDDDDGGGGVDGGDNGGGDVGDGGGDNDSGGDDDGSGVGDDGGGDNDSGGDDDGTVVVMMMAVVVVMMVVVMMVVMLVVMRRRVVMMEMMMMIFYWYIIFVHSLKVCVIF

SEQ ID NO: 926724 - protein, 133 aa, Homo sapiens
MKGNAKSQLGLNKDASFPPYELKDPLNSIQVPWESLDKENSRRKCFLTTEMGTSPAEVSRRSQSLKTTAAAPDVHAVESSSGHPANSGPFSPLGEVHSLEPWGTPAVSSPSPLPYFPNKGASRPLQEVLFEAL

SEQ ID NO: 926725 - protein, 148 aa, Homo sapiens
MVSFYSAPGIFHASWADGCGCPYEACISYAFSRVLRAEPKLDKCVHLGDKDSSGSLHWTGKRCGLTLAVAISSVDFMKTYCNAIIIELINPEEDLDTKGSAVGVFPLANSLAILVLFMDSEARLQPAQCQIPESQRFKDITCHSHGYV

SEQ ID NO: 926726 - protein, 144 aa, Homo sapiens
MGTQELVSVEDRVLDLGSLTLTLGGWHQNCMAVHPAGVEIEQTARMKEDIAADIKPAEGLCLSQGLRPFHVEICILQRRVPLCHLLASSADFVLQAADFISSLLGPLPEDSLKHGAGDSEERRMLWPKEKLGLRDFLQRAYHPL

SEQ ID NO: 926727 - protein, 135 aa, Homo sapiens
MGIIVLGISVLIVASGEWEDIAGLIAVIVDSWTINRPSKSTVLSDCKEQQVPHCYHNRQYPPKPYELLIAIPLELGLISFTAVINTGPWAGGSWSGTAEPIGVGWARSLVHPLDLIVLSCDGICLAGSTLCFPDP

SEQ ID NO: 926728 - protein, 205 aa, Homo sapiens
MNIYDTSTSYNLFFIVLCNMDHFLSNVALLERRVINTLKPNCLYYSQGESPFLVPLSGSPPPNINHSPSPPCPSSRSLVKGCVSSLSLRVKTRHCSVLVSGPAKVVFLSTQSYQMLALPRKQVHTGPLRVEPSLMTLKPVSVTATLLPAPRSCPLPYKHTQEFPKGRLDPSDSIQYNRNLMSTCSVLEMLLGTRATLRGEPVQNR

SEQ ID NO: 926729 - protein, 119 aa, Homo sapiens
MRSHSQALGVGTSTYLFWRDSSTMTVIWGGIGPIQLSDVTENRGHVTDGFGFFVTADTLAYLDRCTDFMYFPEEVYKEVPVLILETCECDLSWQKGLCGWDQAEDLDGEAIPADPGRTI

SEQ ID NO: 926730 - protein, 153 aa, Homo sapiens
MKECFASHRWACVLYCFFHTPLLTITLLEEGPPLASSNLTNPLARTQPRSLPMNPTTQKALAIGLPEGPTLKPVSGVVEIWNAKQKWQEMWLSRMWVGNQIINTFECQIKEFGLAPGDRGVQKKIKPLTHKLNHRDEELLISNCFKVQTSLFY

SEQ ID NO: 926731 - protein, 145 aa, Homo sapiens
MEHLGPNSEECRHLKTERGGKETYEEARKGKWGRRDSTGLCSWAEVGIVGATPGYRGTHMKMCCPDLPPEKHLLCSCGECSQQTTFSCQLLQSLPQLQRAALSEIIAFPLPPVSGDLDIERAGLFSPMLGTLPKETCSKAFCQVG

SEQ ID NO: 926732 - protein, 212 aa, Homo sapiens
MHSNNKPFPCSECGLTFNKPLSLLRHQRTHLGAKPFRCPACDREFAVASRMVEHQRVHSGERPFPCPTCGKCFTKSSNLSEHQTLHTGQRPFKCADCGVAFAQPSRLVRHQRIHTGERPFPCTQCGQAFARSSTLKRHQQIHSGEKGFLCAECGRAFRIASELAQHIRMHNGERPYQCEDCGQAFTRSNHLQRHRAKHGTCKKEPIPSSSDE

SEQ ID NO: 926733 - protein, 155 aa, Homo sapiens
MFTAASRSDQPPPKSLISRASFCGLVCGHGGRPTGALHQSGTVCQCRSYDVDPHSTQGCSASRYSQVVDLEEASRPRGAQVGLTQSDRQDCLAESRSDSSSKANVSYGSKLSLEGWLCLAMLCYKCSRNKPSGPHISWLVSPTSLSSFPCQLKCW

SEQ ID NO: 926734 - protein, 206 aa, Homo sapiens
MPSLHSSSSSPSPSPSPSPSPSPSPSPSSSSSSSSSSSSSSSSSSSSSSSSSSSSSSSSSSSSSSSSSSSSSSSSSTSSTSSSSSPLLLLLLLSSFSFSFFFFFFSSSSSLAQYWLILSPRPMYTWWQLLKFQTCYKTQQASLLALFILYLPCIGLNLYCLSCHIHFCGRTPESPLQTTGVSPRVQKLKNLEPDVRGQKAFSTGER

SEQ ID NO: 926735 - protein, 161 aa, Homo sapiens
MQPSQPNKGKATQGQTLWDEILGFPHQANKLLIDQIMLIKDREIESGWWMRQLTNVIWSLGPVLKCKSPVSWCVSTPELSQKIKEPAQPAHNHGLEMWRQLQLPGAVLNQWDQKPVNKCPSVPSFTWAIPRDPKESNPRYLLLQMVTLHPYTFPSSLSHSP

SEQ ID NO: 926736 - protein, 165 aa, Homo sapiens
MRDLLKTKAKDLVPCIPAAPVVAERGQHRTQAVASEGASPKSWQLPHSVEPVGAQKVKNGGLGTSIQISEDVWRCLDAGQEFAARGSAEGKCGIGVPTPSGAVRRGLPSSRPQNGRSTYSLHCVPGKAADTQCQPVKAAGKEAVPCKATGAELPRDHGNPPLVSA

SEQ ID NO: 926737 - protein, 195 aa, Homo sapiens
MSKTFHSHSSSHPVRGILLWYPQQIHTDPYHDLNPLLISVVESENMSIHIYGTWRGSHENNQYFQQNGKCLKSFTLAKREKEEVNFRSSPAEMIVQDPAKYLGSSNINNLLSSGENSFFTLWLQKNCWHREDMGEEDHGEEDGSTGFSPWILETPSKAPPLRTVRSLEDEGKDNTIDVKGQPVLKAASEDVVVLG

SEQ ID NO: 926738 - protein, 142 aa, Homo sapiens
MGYSRSDAMPVSGIAVYWPGSICLLLIGLFTFGVLSLRTQPLYFFFTATLRRVDIQCCNSSLILTPPICFSSPPNNQTAFIKVADDVHVSEFNGYFSVVKGLVNSVTVAQSNLFEELERMRGIRRRHVSKFCPNSKRNKNMD

SEQ ID NO: 926739 - protein, 591 aa, Homo sapiens
MIGSHRKECVISLRFTYNIFSDGFLEYSGLNRQFLFRRLDPFTLYTLTLEACTRAGCAHSAPQPLWTDEAPPDSQLAPTVHSVKSTSVELSWSEPVNPNGKIIRYEVIRRCFEGKAWGNQTIQADEKIVFTEYNTERNTFMYNDTGLQPWTQCEYKIYTWNSAGHTCSSWNVVRTLQAPPEGLSPPVISYVSMNPQKLLISWIPPEQSNGIIQSYRLQRNEMLYPFSFDPVTFNYTDEELLPFSTYSYALQACTSGGCSTSKPTSITTLEAAPSEVSPPDLWAVSATQMNVCWSPPTVQNGKITKYLVRYDNKESLAGQGLCLLVSHLQPYSQYNFSLVACTNGGCTASVSKSAWTMEALPENMDSPTLQVTGSESIEITWKPPRNPNGQIRSYELRRDGTIVYTGLETRYRDFTLTPGVEYSYTVTASNSQGGILSPLVKDRTSPSAPSGMEPPKLQARGPQEILVNWDPPVRTNGDIINYTLFILLQEPMQNGSLLLSNRPTLPPNKRMERRAVEETQKGILTVAASGSCLKTARGTVEAFPAPAPTIGYQIVGDELEVGGRKANIFYSFSHYFWIFEHINLFGPFLII

SEQ ID NO: 926740 - protein, 322 aa, Homo sapiens
MATQQTLHGLQAFTNYSIGVEACTCFNCCSKGPTAELRTHPAPPSGLSSPQIGTLASRTASFRWSPPMFPNGVIHSYELQFHVACPPDSALPCTPSQIETKYTGLGQKASLGGLQPYTTYKLRVVAHNEVGSTASEWISFTTQKELPQYRAPFSVDSNLSVVCVNWSDTFLLNGQLKEYVLTDGGRRVYSGLDTTLYIPRTADKTFFFQVICTTDEGSVKTPLIQYDTSTGLGLVLTTPGKKKGSRSKSTEFYSELWFIVLMAMLGLILLAIFLSLILQRKIHKEPYIRERPPLVPLQKRMSPLNVYPPGENHMFALRFYIS

SEQ ID NO: 926741 - protein, 146 aa, Homo sapiens
MSSPGTRPFLLPSIDKNLNLCPFKHTNWVTAEVFCTNLINEMVAIFSHFTLLRVKSHGAGDMFLSCTKNHHSKQMIRQRFGELIIYQFDPSRYISYEQDLELTNNQSWEKPWDFSPENEDCISGVLQALPKDSTCVTWIKKETQHC

SEQ ID NO: 926742 - protein, 134 aa, Homo sapiens
MLRKTWQGLSTSWKKVRPSSFGSEKFVITDRPSAAGLLEFAGGPLQTLFAWVSPAKAAEQQILQNSKCWCLILPLEASSQRGTELYEVSVGPYWEVPPSKALGFILESLIILHSISNPGAGLVSHILKVDPECD

SEQ ID NO: 926743 - protein, 137 aa, Homo sapiens
MWEETGVPGENPHKCGENVQTLHRQSPPPGIQFFSHQPYNQMTLNEVIQFEDMLYIYYLFVYSLTEEQFPQKPEDTVHREDDFNRSGKEGNLSYFLPDQLIITIYPLGAFYEPGGIFLLPYAHQSIPSFSISHLSSY

SEQ ID NO: 926744 - protein, 174 aa, Homo sapiens
MGLFYTIGVVGSIHFELPGGFVYTVRVKPPTQASAMAEAPPTTKLQHLRSISDSCCAGSKNFKPVDLSLPGSVRLALRGLHPLSNQSECDEPGWTSSIRWARPPYRGQNQNLLWEQVEPREMAIPGCAPLQMLLHQTLYHYRCSRTKPSRLHIILLTATTTSLSSCPCKLQCPW

SEQ ID NO: 926745 - protein, 149 aa, Homo sapiens
MDLTQKIGTREMGYFHGTLLKIPENVEATLELGNRQTDLLNGCDQNVDSDTDSEVAEEVSDEACEKSYGAVCCRVTGVGVPTALRTHSLHQCDLDDRSDIDEIPQLLSGIFSLSLTFGSLIIKSLESVFFGLKSWCCITFLYLSIDIFL

SEQ ID NO: 926746 - protein, 190 aa, Homo sapiens
MGRNQSRKAENSKNQSASSPPKDRSSSSAMEHSWTENDFDKLTEVGFRRSVITNLSELKEDVRAHHKEAKDLEKRLDEWLTRINSVEKSLNELMELKTMARELRDTCTSFSSRFDQVEEKIPVIEDQMNEMKQANAERFCLHQACLKRAPEGSTKHGKEQPVPATGKTCQIVKTIDARKKLNQLMSKITS

SEQ ID NO: 926747 - protein, 136 aa, Homo sapiens
MGCCSNLHSCVLRRKNLTEGHKAEGETEANFGTGKKEEGSGKGNNTEWSLSHSRNGDHPACLRKGPISVWQPRSCFLENRCCSLPFKAKSEEDIGKNTFFDGYGNLVAHFLLVYEGWQENQNFFEFPQNSNFECSV

SEQ ID NO: 926748 - protein, 173 aa, Homo sapiens
MAHVYLCNRPAHQPQNQTVCIILVQCLLTPGLLMSNIIIQVMTYLCPSVKFPGDIPEIREFHPNSTAPTTLRPPTGLSSGPLTLLSSLSLSSTPPPPSPLATGATSHSQKRLCSPRFDAIVPCSPFLPCLPGKRHLFQKVLWEAFANPPSPAHQVEMATPPLCSQLSFESQCL

SEQ ID NO: 926749 - protein, 236 aa, Homo sapiens
MLESTLSISALMKADSCPQVKAGEASGNLQSWRKGKQTLPSLGGSKEMCRAKPAKAPYKAIKSRENSLTTTRTAWSAASPVGSLSTGPQRWHSSSSRSWRTARLGSLPPDFSSWLSELLRFLTSPPALPFQLFFIYPVRSFLWILILRRWGLECGWGGLHGGLGFGWSIHSSQPGADSIFCPGRSSLFYCTMLKECLFFLTSNDVEKALSVALASGDTRLLEGTDKESNLEGNASR

SEQ ID NO: 926750 - protein, 211 aa, Homo sapiens
MCISWRISSVRPWCISSIHPWCISSIHPWCISSIHPRSISVVHPRCISSIHPLGHQLHQHLVHQRHPPLVHQLCPPLLNQLHPTLVHQLCLPLVHQLCLPLVHQLHPPLEHQLHPLLVHQLHPPLVHQLCPTLVHQLHPPPVHQLHPTLVHQLRPPLVHKLRPPLVHQLHPPLVRLLCPPLVHQLHPPLVHPFRPPLVHQLHPASLHRYGP

SEQ ID NO: 926751 - protein, 153 aa, Homo sapiens
MIIACVGIYLVPKRRDRLLTDWLTDQQGTDSRVSLQLIRSHSEPGQVSYTQWQPAVDTATQGPTGSLGPRPMERLPSTSRGQRATVLQPSGYSHSTFSNRAFLTTTPVPRLEVPEQQVFTTASLPPPPPPSNSLAMFSLFTSQNLGFFNSRGG

SEQ ID NO: 926752 - protein, 225 aa, Homo sapiens
MQTTKTAACDKGLGCSSVAWRGKRDWSLLAALGGEKTSGLRMSELEGALGNTATAGSPVLSAMVNPTVFIDGESLGHVSFKLSADKFPKTAENFRAMSTGEKGFGYKGSCFHRIIPGFMCRGGDFTHHNGTGGKSVHQEKFDDENFILKHTGPGILSTANAGPNTNCSWFFISIAKTESLDGQHVVFGNMKEGMNVVEAMEPFGFRNGKTSKKITIADCGQLQQI

SEQ ID NO: 926753 - protein, 139 aa, Homo sapiens
MTAILQSEKVRFSANASSKRENLFRASQRLVFAGNPGCSLARVSVMPSPSIVTWRPPFCFRGGPAKDKISAEYMNAGMNDSWQRRKLKFTEMTAIAQGTQKRENHLNGPPGRLAINVFIEGPSLDFGAQQLRPPYTPPR

SEQ ID NO: 926754 - protein, 143 aa, Homo sapiens
MPPPLGGPRTTCRLCSPRGVPWGQCSPQPCSPVRGPSVGVAWGSGRGVWRLVGQPCWWVELDQEVLLREDPLDFPQARSLASTPHWPLGNQGQDLFPGTFILHVSSRLLSARDYRRGWASARGCCLGPHVGCLKNISLKAEKV

SEQ ID NO: 926755 - protein, 136 aa, Homo sapiens
MSRAGRGCLGKRSGRQPQFHMPLSLSLPCKDTDFHSAQCRNPPGVRRRGKSTRPGSQKPDKFYSQGACTLDGEIVNTLTVNKLQSPPRAGSVTTPERPWTLLPSDNLEAISSLSCKLQNLGNLGSQRPLPTDCSQL

SEQ ID NO: 926756 - protein, 170 aa, Homo sapiens
MKSWGPLDTLIPHLTTCSGGQSGQEPVAVSAAGQLFCLTSVCPVFSPPLLMMQTVLSERAPSALLANVKCLQTEKNRPERLFRLEINVTEKCGSRAINAAFFATHYEETHQGLSPPRHGASHPWEKETVLINPGKVKMAVRESGVFDLLPWRRRWSLMPGSWALCHQGNG

SEQ ID NO: 926757 - protein, 250 aa, Homo sapiens
MANAGSSCGKKFCFLELVVSSPTSSKKLLSHCGAALPAPQGEPLLKQDSKQVQVDLQDLGYETCAKARMRLNRRKPPVPVRAQECEEHNSLKEMVLMEGLCSKQGCRGSTLASSSERKPLENQLGKQEEFWVYGKSENISVLRKDIKDLKAQLQNANKVIQNLKIRVWSLLVTSDYLSSLERPWKLGAVGTLEGSSPHSVTDEDEVWLSDGTGAFYSPGLQAKKDLESLIQRVSQLEVQLPKKSTRREAG

SEQ ID NO: 926758 - protein, 161 aa, Homo sapiens
MAVRGPLHSQQSRGEDGSACTQLSASPARQPRRPQQQRPEEPPQPRNGQVDASIYSLGKTFVNITPAKVGVLVGKDWSSFFVNRLTLRGQKCTVVLDSLLQDGELTVHLQTKSIGGAPTFNVTVTMIAKTLGLLMSKEAVHGSFINKKCYEMASHLQRSQY

SEQ ID NO: 926759 - protein, 153 aa, Homo sapiens
MQQYLLPSPPFLRETFLPVLDWTAGSLGLPDSGHPGNVPHPHAFPGAHGWGFLAGGFHGKEIGGKPAFSLETSPNDSNYRPFLCGQFFQRRVLQSPSCGRGLWLSLAGSLTPSINFNFILIFSLLPDFHASLCLESSSSGPLWFNFSRELLTS

SEQ ID NO: 926760 - protein, 156 aa, Homo sapiens [sequence omitted]

SEQ ID NO: 926761 - protein, 183 aa, Homo sapiens
MDPAPQRSYLLQHVCSLVEVGSGDPGLGRCLCRQHAECLWTSPLMPLGLFPVGPGSSTNLAPPQAGARGVASNPDGCVAAVTKYRKLGGLKQQKFILSQFWRPETQYQDVSRATFLSMALGENPLRASSSFSWLPHHSNLCLCLHLTFFSVCELCVSTQGQLTLDLEPTQIIQEDLLISRSLT

SEQ ID NO: 926762 - protein, 189 aa, Homo sapiens
MGPGLLSVVLKHHLPPVWLLPLNLHLWCLLYSLCQKFKSREGFYFLSSKINFKFGKHVLLALPSTPTLSGVVHGSNGHRGGGGGRSHNRLLVPLENVPHGGRGNSWGREVKRAGLDPKTGLEVKNQGPLDFASGDKEMDAIYQLSLAPPFYPCRWIGSPPPLSADSSPQPVHEVFIEPYLRHLEVALAP

SEQ ID NO: 926763 - protein, 147 aa, Homo sapiens
MTAHHCPLPAPTLSPQQAPPHLGLLLLKHPKFTVPRASPRGRTGKPAGILQAAPSCRTASFPCKPPAGEAPCPLKLVALSFPIKIQRLELEPGVILAQAAQAGRPENSEVGMQWDATFSTQVAHSLDQWLLEPFENFTKVPFSQKEQ

SEQ ID NO: 926764 - protein, 205 aa, Homo sapiens
MASLPCSKLFGNRIGKMLTTVEAGPLAVWPSASLPASPVASHPIAFHTRDPQETSTLLLSTRNRYNALEQLFVSISRIPAGTESPLSHGNSTLLDSKDRNGYVKARAQLVSDTNGGSDTKIQDTTRGSMTPEPVLLTTLKLPLKVPWGFLSSWLVTLRPPGWQPIISFRGPQTGRILEPEGTWGPKHPQGNPGALCKLVQPYPSI

SEQ ID NO: 926765 - protein, 138 aa, Homo sapiens
MPNIGVAIEGFQGIGKEVKCHSESKANASTCKTQDTRHTDEVPPPHTVSLFSRPAVGGPPYLSKHFRYLLPTYHPPNLGKVLSVLYATVTTGFKAYGAKGLEKIKDKLLEMGLAYSCGLTEHRGSGKSGFLHTLTVRK

SEQ ID NO: 926766 - protein, 142 aa, Homo sapiens
MKTGKKNDYRDQSPRLAVPVTNTCVQHDTLFRRNQCKSLLPLMNTDWSSQDSEGPRTGTGLLEVTLLLCLQQPHDHILEDGPCVLIALCEAYEMEEIGTVREKCRGTADFCSALRSRPETVVWRTAPPADSLGARPLLQELP

SEQ ID NO: 926767 - protein, 163 aa, Homo sapiens
MIIIIFALLLGACLSMSHPKCLRAGTFWILEYLHYMYSLIDHPKSKNLKSSMLQNLKLFECQHDAHRKCSLEHFGLWIFRFGMLNLYHTDEATFHRCLGKVVSKLWAMEPLEFVGIAQGPIGENGKRNGQASGIHHLDPRKFHFPLFRSVPSRESGTKQALNK

SEQ ID NO: 926768 - protein, 138 aa, Homo sapiens
MWFVKQMLEGSMLIGKEKGKRLRDLIQGSQLRNYIPNEEKEIKDFIPSEGSTDADKKTEKLQLSRPCQEKEAYKEQNLENNRQSKTAGPEQREARIRPLSEDAIICPEASSTGWRAELDGRQQGSLPELAPAWKARLT

SEQ ID NO: 926769 - protein, 176 aa, Homo sapiens
MAVGASVGQASLSLGYLLTWMNCPGCGGRGPRARALQMPPRLEKLHPAPPMPLLQFLLFLLPSHKRLQQSKMINQKSEKDDSLGKYGSGGALMQIQPKCCGSECVGTIGSDGDLQEKGSRKDVVEDGLDWEEETGSKDVHRLTKEHRLQRGSDGCGNKGNGKEVHVVHTPALTADA

SEQ ID NO: 926770 - protein, 174 aa, Homo sapiens
MVLPPAQQEEVSSAGRIEIQPTNTCWVAYCALSTLLAALFPGSPCGPHVCLAKQVSLLLLYCWGNTSSERRNNSSTVTRSISTATEPFCPPPAGWAQTAAVSLTNISAIIPKSLEATREGLEFVDSAQEHGSRATPRLPAEASYPPSESQSITFLICTMGIITVPPYGVAMGTK

SEQ ID NO: 926771 - protein, 280 aa, Homo sapiens
MSVKMSQFQTVHPLLQQRELDGGVLREQVHLEQAKEQQEELGSGKIKDVENLKLPSPTCLQMKAGPPTAGPLVALSGLCPWPREGFEEGSQVREDPWSAFHPPGAVGGRERIFLCLRAAVSVGSKCSCWHRGNISCICHLKSISEKCRGGKSVQNCQRVGISRPAHFLLQAALLRGSQRHKAFQEKHRPGTEQPLKGNPGKAMGKEWLLSRNDRLRTKGAGSLRNQSDQCPARAGACHQGPTALLAFQEPQRNSAVTTTPVCEVGTAMIPLLQLGKLRLE

SEQ ID NO: 926772 - protein, 141 aa, Homo sapiens
MSGAQALGFSLHPLSLGELIKDKAANPTGVTLKLYPKTNPFPTVTAPVPAPATVICLDGWHGFRLPHTSTRCPPPTAARGSLLKRPPCQSRAELPGRLEACSTGKEDQSSNQLSTTGDFSQCGMEQKNHSAEPCLNSSPTA

SEQ ID NO: 926773 - protein, 146 aa, Homo sapiens
MAYPGQEEERRSEEDPKHQGPALCVLTSTYLINAQTVGMEDCQMETEHLVLGVIKGLWVLLLLRPPWNISKGLKGGWCLTAVEGDEAVWPCAEGALGEGEKTEAASGLGFEPKVFELGHVSLKSSQGTVAFGGIWAAYHNIPYVAG

SEQ ID NO: 926774 - protein, 186 aa, Homo sapiens
MPVASWGQQRAAEQESRGAGKEGGWCCSCSERPWVERVATGSALPQISRPHFLDWPGLDSKDLIIKSPGFLFLNITQIHPGTGPILCQSSPLTFWKTAESGTQGKDRASIWGTLEDFVEEAYLLVGPGGGSGFQQAETEAFHARAQLGKVAPHFMVVEGVVIGESEQGQTLQIDKILPTETLNLMT

SEQ ID NO: 926775 - protein, 163 aa, Homo sapiens [sequence omitted]

SEQ ID NO: 926776 - protein, 219 aa, Homo sapiens
MVCGLLFLLSATARASPGAVVENLLGVELLEDGLQEVSLQAEIQESSLYLSSLWLLRILLEMQFPYAGPGLWDLTISLFPAAQPGPLLWPLGPGEGRLFRFQMASLPLIPRSHWKLFGRQEPSTTNHEASSLMTTSCSPPARDQQLPFTAVRCGPIGGDTELKGVCYQDLNRKGLYTLEIFFLAAASEDSSYGGFCSIDRRRSSYKLLNHLFTNMGKPH

SEQ ID NO: 926777 - protein, 140 aa, Homo sapiens
MGPSGAFREITDRIQTNPPWRGRGRGKASALNQPSEPRKPGNLERAGGSTRTVEPSAHGNWQICRLVHFLRTCWETLTGEAETNVLRLVFVASLRKEKAGYSLPPDSLTFESLELRPYDRDQLGAPNTHMLLLILSLPCS

SEQ ID NO: 926778 - protein, 179 aa, Homo sapiens
MGTVSNSLGLQMGCWGPGLLVRARWQCSSSLLSFQGSSQLPWEARDRFDIGWELTAPPDHKGEGTEDHLWSAGALGRKQWGLSFLNCGVGEKDGHLRVHCESPERWQTVDTQNTLALPCPQLYLVARDSDHITNSQAQLTCHLHLLQTDDRVDNPYFVVVLAEACLLGTSILDYPATQT

SEQ ID NO: 926779 - protein, 140 aa, Homo sapiens
MKSYCSIETSSGHIVHCPAECPMWLGIQALSPTVHKEMNAANNQKCLSIASESSEMLSTCTKLILSIYSVEKHNCQAAKRKACKGSQIKQLHSNKKAEALDDYLVHQLIDPYPMPVICIKPQDVNQQSQWKAGKLYVRTT

SEQ ID NO: 926780 - protein, 146 aa, Homo sapiens
MKEAWFPWVPQLLTAFLGWESLSAFWSIPFNKSLGSSKFSHIFLSSSELSKLFQPLPVTCFQSRFHIFGYLYSSALILKAYAIKDAIVVIEKALKAIKHTTRNSCWRKLCPDVVHDFTGFTTETIKETVKDTVDIAKENKYVDVDR

SEQ ID NO: 926781 - protein, 153 aa, Homo sapiens
MNNSRRTALRAVTLTAKHLETHIMNFCSKNRNIPGKPRESNDPLKELDPCCRLPEMLKNCELACFLSKEAHGLGQVLSPGHQLPGNRFSAVGWGTRGVRLAFRAVGYMGTGRSIIELIKESPGKGEVQLKEIKITIQDMKGKFFSEIDSINKK

SEQ ID NO: 926782 - protein, 146 aa, Homo sapiens [sequence omitted]

SEQ ID NO: 926783 - protein, 142 aa, Homo sapiens
MLGSARAAPWACSARPGKAGPPSGTPGPGPVRGSTLGNLEQSFPSSRGKEHESPGGLSHSAKMEVMTGSHCRHREDSILLTLRQPCLHPEVNTNTLTRCTHCKIHQHTGTAAETLTTGMDRFTYRYKTHRGTGKNKHAHRRR

SEQ ID NO: 926784 - protein, 147 aa, Homo sapiens
MHLHVQTAHGHRTSLASTLLQRLEISDCGSLHHLCFWEHGAVEGMWTLENYKGMDFSPSTFCMISFVKWKLLSGKKTFPVLFGGKLRALEIEVKWKKEVVPGGFLHLQIRPMLQYDVIFEIIKEKIDKFDYMKIKHLSTLKNIIRKF

SEQ ID NO: 926785 - protein, 141 aa, Homo sapiens
MGYCPHPWAFPGAGLAWRGGSAPSTQKLVELTQAAHGQTKPMARHPPASVGHLPSPLVITVPPEAIHASEEVESRMVKDRGSGTRHLGKNPVSTSYQFCDFRPTTYISVPPFPDEESGTQSDLSTAARFVNDRSWDKAHFF

SEQ ID NO: 926786 - protein, 353 aa, Homo sapiens
MVVMLVIVMVMVLVVMVMMLVVVMLVMVMLGMVMVMVIVMLVMVIVIVLEVMVLVLVVVLVVTVMVMVVVILMMVMVLVLVVMVLVVVMLVMVMVGMVMVLVVVVLVIVMVLVVMVLLLVVLLLVMVMVMVVVILMMVMVVMVMVLVVVMLVVVMVMVLVVIVMVMVLGGDGDGAGGGDAGDGDGTGCDSDGDGAGGNGDGAAAGDGDGGGDAGDSDGTAGDGDGGGDTDDGDGGNGNGAAGGDAGDGDGTGGYGDGDGGGDTDHGDGDCAAGGDAGDGDGTGGDGDGVELMVILLVHVLVIVLLVIVMMLVVMALLLILMVMVMVLVAVMLVIVMMTVMVMVMMMVMVMLWC

SEQ ID NO: 926787 - protein, 145 aa, Homo sapiens
MLVTSVNHGNDEYPLKQPQSLQIPSNLTFCDSEAAWTSHPDLMWLFVSQGLQLQLEVAPDPVAGLLWKFNSSHQDEKFLWEEDWEEEKRQKRSMGLQSGWVCTRLHYTAAVWPWTSRFTSLGAPASPSDKCGCNLPFMALSSGII

SEQ ID NO: 926788 - protein, 141 aa, Homo sapiens
MPWKDTHPILARQNVSSVFFEFVLQGFAEDGNRGGLLNIVTLLPAPRSTSGLAASLGHPKPGSLGPGSIWVSVRAFTIEEEDGYHLSQSRAPGNHSSYLLLHPPWLVSHQGLERSLQNSTWSDPICFPGWRAQWLSPECLQ

SEQ ID NO: 926789 - protein, 145 aa, Homo sapiens
MWQPMELDAGALSWDRGIGNGLKGGFARVVVRITWMVSVKHSTLPSTESALLVTWAAGSSVQSPNIPSPPPSGYMEDSFSGCLGVEWSHGLLPADELGSDPGIMLACGRLSRGFVPLCPNDWGSMGPGGGHRTDPRGSILVLLNK

SEQ ID NO: 926790 - protein, 157 aa, Homo sapiens
MLIGILLPKFPSGIFQTQFGFGNGREISRPKLSRFPYSSPGPVGDAKAAGVPGVGGISAIAADFGKKEILLLNTLSLQNDRGFESLKRRAVFECLVLIGDRDQHGKSSLSPQYGRQVSDRLPCCTEPDSTELGRRSGHNKKWKLLPRKVSEELTSDG

SEQ ID NO: 926791 - protein, 138 aa, Homo sapiens
MNPTVTCALIGNKRTGWTYGSVPLSSNSPFKVAFEADLDGNEDIFIALDDISFTPECVTGEEEEEKTHREYHVMKGAEIGVTHLQARECPTWSAKKKLRERSGAASPQSLQREQGSSNTLNSDFWPPQLWKHKCLNNH

SEQ ID NO: 926792 - protein, 343 aa, Homo sapiens
MAGAGAGNRNWGDSTLLHGSSKETGNGDSILLHGGAGKQELGAQHPTAWGQQGNRNWGHSILLHGGSKETGTGGTASYCMGAAGKHELGDSILLHGGSKETGNGYSILLHGGSREMGTGQTASYCMGAAGKQELGGTASYCMGAAGKRELGGQHPTAQKEENPRGCVGGGSFSENKQFSEGEELRYMLQELSGSSGKELRYVFQELSGGFLQTQSSPIPRSPGLLAGLKRGSKWETFGQVSITDPTKGLVGAALEVNPSAADGEWEDSGRLSASLLSYVHMAGVPYSLEAWTNGIQGLGKEWAEALPVTPTGCRACQAASIAGFGSQREWLLFYSTLVPGMET

SEQ ID NO: 926793 - protein, 142 aa, Homo sapiens
MIDVTNKQKIASYRNLEWFWEHPELSAGVRGSAAGAPEIKLRITQAAVLRTDYGGARVEARRPVTIPAMQARNDGGSRENSENWLDFRYTLKRNPQEEMGMVFERKKGVEADFKVLSKSLQSYVYRTLTAISIQANHISNAL

SEQ ID NO: 926794 - protein, 148 aa, Homo sapiens
MLLAHCIGSAEGVAPRKAASWVATVEPLPEVAYCRSWPRALPCQSQDMLNTLKSKAQSYTPYITQCPFVCTFCHPKFNSLFTYQGSQPNISGAEVFEVTHLKCKPPYYRGNVCLWISSFTDDNYQKILLSTGKPASWRKRLGYPGPFS

SEQ ID NO: 926795 - protein, 162 aa, Homo sapiens
MELPFKFILLLDNAPGHPEPHEFNTEDYGVETGLYGNKVKAEKPVEAVARATKVKTDKWDCNKLESSCTAKETINRVKRQLVEWEKIFANHTSNKGHQTPDATPGMKTGCYCCWNKVFPGFFLCITISSVNTLGGHVHLTKPRSHAFSLAARGAGAIQEGNF

SEQ ID NO: 926796 - protein, 138 aa, Homo sapiens
MGKFRHGGLQVRALLGRQLRPGEKSSTAPVASTAGGPSSPFAAAGPGAKLLSARGRRGGRPLRVQGPPSPRPPGTLAGLQALHAAPVPTRASPSTPPHKPREPAPASASPEKGSHEGTESERGLRGLASTLSPLTMIN

SEQ ID NO: 926797 - protein, 241 aa, Homo sapiens
MFWFISEIFVFVRHIIFMLPSQCLQFLVLDLPGPAVVGNLVLVLDLSGDAVCVRGVAVVHGQDHRCVQDLGLQLLDLLFIQLPDEIDLVNQPFHARLQLYILHVSFVRKLLDEDKCIVHLCTLIDLILMLILEVLQQPLHVAKLCLQLQLLLAQNVQLLLKVVDVALEHVVHVALCRLLLLLEATLALQHLVLLLQELYRVSDGGKLIVKSLDLLFLLGTHGLDLSIPNPKSDMLQNLKFF

SEQ ID NO: 926798 - protein, 157 aa, Homo sapiens
MAEEIYVEEVEHLETLKGANSGGANCKSQVMTCDSDVPGINLGSHNPPSQMMKRIQPCKEHSGREKNKHQGSGLGSMFMETQGNMSGSREVKRGNKGNFQYGSNTLLANEVPRSCWAGTDTEDSSLVCENTQEILPSRNAHLSFGVRSFYWGLIIKT

SEQ ID NO: 926799 - protein, 148 aa, Homo sapiens
MLLAHCIGSAEGVAPRKAASWVATVEPLPEVAYCRSWPRALPGGLTQARPIIPCPQFSNWDREESQPLSDYLHNQPAIVSVYNCVSLFPYGGSQEALMVHEEKRRKDKGYRKSVFPIVPWGQLHFCPSYDLVHQFFLDPSWLNSFCLL

SEQ ID NO: 926800 - protein, 149 aa, Homo sapiens
MKSASTLRYFLGSDYGVETGLYGNKVKAEKPVEAVARATKVKTDKWDCNKLESSCTAKETINRVKRQLVEWEKIFANHTSNKGHQTPDATPGMKTGCYCCWNKVFPGFFLCITISSVNTLGGHVHLTKPRSHAFSLAARGAGAIQEGNF

SEQ ID NO: 926801 - protein, 134 aa, Homo sapiens
MCVGMYVAMYVYVCVWCIATIFSGRGYDCQTTPLATQNPMNSTPKVSKWSTYSQAQDSAFRLGGHKDLQGSLTQFSMERIANAMEENPDGENIVQVWKDYTTEDAIVVIGKAVKAIMPETINSCYRKLIYYILA

SEQ ID NO: 926802 - protein, 149 aa, Homo sapiens
MPSVSQQKPLLTTSPGPEQEAQSEWAFNVRLLRHHQRHRWCSGSPRCSGGSPKGFLEKQGLHRGPEEGGGQLDRQRQKEGQEKAMQRLHLWISAPGSMQTRCLQISCLEAALGLTCGVPLKMMGWGPQLGEAPMGAAPGTLRSSFLNTR

SEQ ID NO: 926803 - protein, 142 aa, Homo sapiens
MASLLTAGGCVQQPAGTLHHSTLSAGLGPSTWQPALSGISSSSSQNPDPAASRAAAAGREGGGELIPSALAQHRGRAIPQNQILLREEPDSHLALLPITARLPCTMALPPHGRVTCPETCSKCGQRTCSINISWELAGNAEP

SEQ ID NO: 926804 - protein, 186 aa, Homo sapiens
MCISVAAWQHFYLLSLQSPFPGTEEPQKALGSTNEEVTGSSEGADMLSKLVVRLRASCPWSRSPCASAAAGNICPQETAPRRASGRRDPAWMAEGALTRPTGATDPTRFFFWCIFLGDVSFWEMLELGPEKSIRDHNPQDTAWWGTPHVCFKCHRYSKESLQDPSTSEVRKNPESGIGCQELEFWA

SEQ ID NO: 926805 - protein, 148 aa, Homo sapiens
MMRSQTKGTTDAYCGQKPARNQLTQDPGTVSLQESASQLPHTEKSWGMSLERLQEATVYTGSLSIRCHSPEGWTQGLALCSSAHLLTVQVSEWGQPWRLYTLWGLAHLALDLVFILVNQILEMEYSCYLSSWFQLVMCLCPAEPTAAL

SEQ ID NO: 926806 - protein, 248 aa, Homo sapiens
MNGMANVNPASRPHYASAIPVPRASSQTRIPTPGASPQLRPRQAGLALSPQRAASPRLGKAAGPSRNSSPRAFRGRGSPKFAGAVRESAEDGEGPFSSPWNSPRTTPKAALSSRAGSGRIGERQGTQGKKKKAQEGTPVCQTRGRSPSRTSFHGETQIPGAPEGRKPPSCPGKDQRDINYKSSGTPRSLEPDEGAASWASSPVCSPVQGKRPSPSPGAISFSSVHQQSQPVTATVAPFQYSSDCSIQL

SEQ ID NO: 926807 - protein, 337 aa, Homo sapiens
MGQGQLLFIILSLGPRVVPDVKQMFQLISTTRNLAQDLCYEKQGLPKTKPEDPSIKFSSLTQLFLLSLPDPESQRKRTVQNVLDLRQNLEETMSSLRGSQVTHSSLEMTCYDSDDANPRSVSSLSNRSSPLSWRYGQSSPRLQAGDAPSVGGSCRSEGTPAWYMHGERAHYSHTMPMRSPSKLSHISRLELVESLDSDEVDLKSGYMSDSDLMGKTMTEDDDITTGQRKDGSPAAPPAPSGAFALVSGSQPAACLPVSPVDTALPGSAPAALSQPASPSRGCRLQLRAEEGGKGKAGSKQEEGSECAHGEGGGGEIVCLFLAREGEGSWFQIGNDKQ

SEQ ID NO: 926808 - protein, 258 aa, Homo sapiens
MSISSLACLWQNAGYFLRGLSMQCVSVSSVAYMWQNVSISSMACLWQSAGYFLSGLSVAEYVYFLSGLSVAEYVYFLSGLSVAECWLFPPWPVRGRVLAVSSMACLWQCVSVSSVARLWQNVSISSVACLWQSAGYFLRGLSVAVCVSVSSLACPWQSAGYFLRGLSVAVCVSVSSVACPWQSAGLQESRNGADSFSKKEKLKPTKAERLAPGHRKKRGLESRGLCIQPCTSLPDTWGPGRFFRGQKLYRFQSWDKAQ

SEQ ID NO: 926809 - protein, 140 aa, Homo sapiens
MHPKGFSRPHWHRHQSMCVHRAVELERLLGASPPPSPKHHHHLYQHYRDTTSISTTIIKESITTSSLSSSPKHHHHHCHHQQKITIISTTITIISTTITITATITAAATVTTTSACSGHSSCSSIFPELKIYMNLMSSHA

SEQ ID NO: 926810 - protein, 147 aa, Homo sapiens
MIQRDLIPSLLSVNLDKSFILIILKALFYWTRACNKHSTFRVHVHIVQVSYICIHVPCWCAASTNSSSSIRYISQCYPSPLPPPHNTPQSVIFPFLCPCDLIVQFPPMSENMRCLVFCSGDSLLRMMISNFIHVPTKEVNSSFFMAA

SEQ ID NO: 926811 - protein, 138 aa, Homo sapiens; identical to SEQ ID NO: 773243

SEQ ID NO: 926812 - protein, 130 aa, Homo sapiens
MQSLRVVFTLTVSLMIPIFLAFCTEEHLFPDLNFVLAVTETPQMRLEWAYGASGQPLSPTCPRGFRWAGWWRKGLEAMVQDGFLPLLPLSLLKDTQCPSLCEAISAERMHPSSDEGRGAAGSPCAPIFFR

SEQ ID NO: 926813 - protein, 161 aa, Homo sapiens
MYRFVTKVCWSVLGVHSRPCLPVYHQQRLQNSKDCCLLLPLEASSQRGTHWMPARALLYEVSVYFFSELERCAGRSTALFRAIRQESLSLQKPRSQPPLPPGALTQGDGSFIYKPLTGDAAFLSEMPCPKRNLERQSGYSGFAVLQWAQPSQNFLAALFTL

SEQ ID NO: 926814 - protein, 140 aa, Homo sapiens
MTSKMEASFPTHKAKEGECDVPACLGSSWSSLKRCHYITWGRAELAYFFFLREEEAGEGTRMPENDGRLHQPQPLTSLPPFRAPSSPLRVSGRRGLEQRWVQICGNRLKLNRLKLNRSSQVQVPAENPLLQALVSTTPLS

SEQ ID NO: 926815 - protein, 168 aa, Homo sapiens
MYLSWKCRNHLPSASISLGAADWSCSYSAILAAMIELDNSYFSLLSAIASFSLKPGTFSSFCVGTDLKVPFATNHILYKSNFTMGSRHSASTLRGSCHSLDFVFASNGLDEAYYPHWGEKSALLSLPTQMLMSSRNTLIDTPRIMFIWASHGQVKLTQKLNINNEQGA

SEQ ID NO: 926816 - protein, 167 aa, Homo sapiens
MIALAGSQPGGLQPAGATRILRVLPGRHLPRWDTSPEQCVARPCGGSTQWLNTGKELALGVWISETCISGWQRQGKTSREKERKETERKRGKEREEETERQRRSQEKREAEREAEREEETEAKGKSKREREREKVKERKKKRKRNIQVVKKKTVYPIPLKAKRQLLC

SEQ ID NO: 926817 - protein, 144 aa, Homo sapiens
MVQGPKPLVLWGFQLGGDGVQRRRLGSLLASTSGEPRHQPLCGCTSKHASSAWQGFLPRLSQHNCRSEGGITGLCDLFIFLFGAFANSNLSFQPTPAHLLCITCETAHNTFLPYIRQTVGLQKTPDGCCPLRIYDQEAPHYAAK

SEQ ID NO: 926818 - protein, 174 aa, Homo sapiens
MAGCRSRALPRGKAAKAWREIEHSGGGPALLGDPVHPPQPLARVLSPSLPGAGRAGRLLRVRGRPAAPSAGPAKPTPTQNSSWPASSARSPGSCSRLSLHTSPQAEGVSSGLGQPRKGLPQCSGGLKGSSSAAKVGAQAEEAPRASEGCEDCQHAVTSQCELPLLRASTHISLL

SEQ ID NO: 926819 - protein, 135 aa, Homo sapiens
MAAATAIKRIQCLMESRDGEKGILTAENHNPKRAGRNQGVSSTEQRRKRFFTLVQGSVALRFMPLWWRQSPRLLITSDHKTIAPCSNSAVTKQSYHVTFTMFIHCKLYNKVYEATHTDPNAASLTILSSLIPTHN

SEQ ID NO: 926820 - protein, 157 aa, Homo sapiens
MCGLMCGLMYRLFHQPGIRPSDMIFILINFGPKFILPMWSRKTTRNIFSFKSPVLLEHLRYIVEANANSFWENPHSTKTLGDFKIPRNIRSLTTLLTQGHDPLTDSQQEQWMTVSEPQRLENLVKLLRKAEEKRGKGLVQEGSTELQQSCNFPLQNS

SEQ ID NO: 926821 - protein, 191 aa, Homo sapiens
MCITHRAHKVAKLVGILNPNSYEVLVLLLHNGGDEGICLELREAMEFIQTSRSGAVKLVLEGPGLLEFAGGPLQTLFAWVLPAEAAEQQRLLPGPYYGSFVPEGHLPDASWSSPRCAGRSTAVFRAGRQEHLRLLKLCPQLPHPPGALSQGDGSFIYKPLIGAAAFLSEMSSPVKRNLERQSGPRCFAMLQ

SEQ ID NO: 926822 - protein, 278 aa, Homo sapiens
MADSLPPTKLKCPRLTSDCCAGSENFKPVAPSLLCSVGVGSTEQDHLAPWLQPPFRRSEWFCLTGISGMTGVRKTNKQTKQNKTLLQLARCLPKQLPSFVLEAQGSGDIGTRDNSWSLGSKDHGKIIVSGLNSTVPHGTVPHGFPLLGYGVPQPLALSGDLHGSLYHQRPGGLGGKNDFMGWAQDLAALCSLRTWCPVSQQLQLQQWLNVVKIQLGPLLQRVQAPNLGGLHMVLGLQVCRRKGLSFESLCLILEDVWKCLEVQADVCYKGGALMETIY

SEQ ID NO: 926823 - protein, 157 aa, Homo sapiens
MGLLFSGQWIYVSREIMAASAASCKSPGKFPSEGACLGAEELHCKLWALTVLQVSLGACSGNPLPSKAILNQIISECLLKHRSVGFDPDQLIYNYLYKCAMNYCVPQLSECASSQEKPHQSLLGDWSEQCRSPRTTLIVPRGGSGHHESHLPCISPL

SEQ ID NO: 926824 - protein, 137 aa, Homo sapiens
MVVENAWCLVGSCYQLCCHLSMTVINNHSNDNDPKSFSENVMFELSREGFVEISEAKRSCIQHGKQLIKISTVVKVAFQKPEEIVLFLSSKCTRNRAFEVNSVGVQHFKAAKTAKRRTGGTFYPREVQSSNIVPHGY

SEQ ID NO: 926825 - protein, 140 aa, Homo sapiens
MGPRDTNPVGPGPAPRFLWCTGERELSDPSKFDVLLGAWAYSKSRTSVMNRRSAGVSWDYKNEKEMSLDKSKGKAQKKYFSKDLNEVMGKPCEYLGKSTPAHGKRSTKSLRQVWAGVSEPQKESSDGEKKSAAHESSAQS

SEQ ID NO: 926826 - protein, 183 aa, Homo sapiens
MPSIPSSSLRWVRTSSFSSEKFVIADLLKPTSVSSSKSFSVQLCSIAGGELRSFGGEESGPLAAGLLEFAGGPLQTLFAWVSPAEAAEQQILLPDPSSGSFIPEGYLPELCSWMNAGVEADSASLPVLLEPFVGSCVSSANAPEKSITRPEFESSCFFMWSWEVATLNFGTKDNLQLPLTLDC

SEQ ID NO: 926827 - protein, 124 aa, Homo sapiens
MEPFLPIQVSMVVEGSPPGGVPEAYGKNVLLLASSTHPCPQSHWGQGKSPGARLATKNVKKALFGVIVFHYGKLIQITWKLNLMKRELECHETQEEYVQVIFQQIFGGLRAIAPTPVNTGKNIY

SEQ ID NO: 926828 - protein, 207 aa, Homo sapiens
MITCYVTLERTIPTTYAAYGYILDISVNGVNKVLGSRNALSKNMQGEQGPIVIPSLFEAGNNGKSTVIPVWFLQVQEEEEYSEAITVVLLTLHPLMNTPAVAPETQPRKPGRKNRNSPITVFPVGVYVGDFCFTPCICDIWINNGNIKDLTEIFNIGFLRTHILNGGQCCRHGGESWLLGRLKKILNIKMFCGPSSYVNRYKAYMWY

SEQ ID NO: 926829 - protein, 183 aa, Homo sapiens
MCWQERAPQKPNDPKDGKSLSPRSTAWSWGRGDTSTPLATTAGVSRAPQVHWLQAQHSTRTCPRPFCRSNSFRTPGHFSRRSPGVLNKVVELAGTEIPTAAMEDFPLARASLAVPSKGTGQVLPCVVFRCDRAALNSYAKSHSHFTFPPPCIQILSPNTAGGLAKVVIAMQECLSYPLQCLFP

SEQ ID NO: 926830 - protein, 151 aa, Homo sapiens
MVKRCQCTVHAIASAGASPKFWWLTRGVGPPGAQKSTTGGQNPQENLCWHSVEGKCGAGVPRVLTGALPSGAVKRVPASSRPQNGRSTDNLYHVPGKAADAQCQPMKAATSGAIPAKAKGAELPQAVGAHLLHQHDLDLIFSSHGPRLWEY

SEQ ID NO: 926831 - protein, 145 aa, Homo sapiens
MQKSPIFCISHAGSCRLELAAAIRWGFTSSPIHLIHFHAWKCHSGRLESSKDGCLLLLRPLTSRSINLMSVGCSCVGCLTNRVGGSHPVWWHQEQNPFNKALCALVEMICFAEVKPTHLGFLDSSELPGGEAKSAGSQRLRPPLP

SEQ ID NO: 926832 - protein, 154 aa, Homo sapiens
MQGEGRLTVDLHYLRGVVKEVLIGRSQPSVQLLRSANKCSEEAEDVHYRAVYALKGNLKGEMHRYSGWASISCHSNTVTAGVSGWHTTVDAALRRCLVGHDLHVLECSLSSYPLLHCPSHEMPNTCGALGFSPPFVFLDEFKSWTQFERSWTAL

SEQ ID NO: 926833 - protein, 128 aa, Homo sapiens
MPKCCYGLLCVHKIAFSTSEMQLSLGGGLQQDDHSEPAPVDPNTYSFLWLITAASEKFHAKEDYNQCFRYTTRSNLGTGGPPQKTLESYIQFLLLIYDSSSPSPQNKSKAKIEEGKRRRKGNQGREMF

SEQ ID NO: 926834 - protein, 197 aa, Homo sapiens
MANRTCKIEGCHALAGCGMETPAQLKGRSRTAGVLGGTEALKAIFCFQLLYWASVPGDIDVYLQLRRALGSRACGEQHWLHVSNGTSQGLAELSLPRTETTPTAQEVLRVHECITEYGGEKNGPTLDSLRWRKMAISSPEWQNFGFPAHPDKSRIISPSQDPQLNDACNVSFAILGSFMDSGDWNASIVGCYSACHR

SEQ ID NO: 926835 - protein, 116 aa, Homo sapiens
MKTPMQIEINDCPKSDCIYARLEPIVLRGALSPLCGLLTETLQTCSPSPCYLPAGRVESTQPTSCTQSWTIVPWFISIRLCGNHVCNFELEFTPDIWTLQVPAGGNLDDVMKQRQV

SEQ ID NO: 926836 - protein, 131 aa, Homo sapiens
MILAVEKLLFLKPSDLTRPIHYHKNSKGKTHPYDSIISHWVPPTTYGNYGSINSKVRSPKSHLRQGKSLPPISLYNQKQVSYFLDTVGLQALGKYSHSKWEKLAKTKGLQAPCKSEIQQGSQILKLQNDLL

SEQ ID NO: 926837 - protein, 153 aa, Homo sapiens
MPMVSPASKIHLPSDCISILLGPSVFFANPESLLLIHTRCLQGSPGMVEMLANCVLSEEGLRQWPLLLHDLHEGLLEGAECVGKSKNAYGEGEVKLPFLSLSRALSHYFTGGERRIRNKGPWSANYSSMKPSLIPTPAPKEEEPCLLVVEDGV

SEQ ID NO: 926838 - protein, 160 aa, Homo sapiens
MESLPPICVLRGLAAATAPASDPVSPRQGFSQPDLPAATQQLSLGTQNLLAQTFIPNSRPGANAEASAGAANTEWGQGGEEKQQLRVCMTDGLMKKGNLDTKPCMQGEHQMKTRVTQPEGKEQPEDRREAWNRSFPSPFRGSMFLPTLHFELLASRTVKQ

SEQ ID NO: 926839 - protein, 140 aa, Homo sapiens
MRTPLVEDKDKDTKLCNVLTRQLLARLAVGLSGTVRKWAKKRRGKTKKERKIQHLNKIGKWAVKGGARQEGGNVRKGIHRGVKIQQLLGSPCTLGPECPLGLNAMLALPAGCTPIFSLKDISLPKLQQHKAAHLSSFTEA

SEQ ID NO: 926840 - protein, 146 aa, Homo sapiens
MPPSQAPELTVGEGWSPRKFPLIFWYSRRSIVIIGNDSCMCVIAAEDLPVGQDVEEEDSDIDDPNLCRPRPRIYSFSWQAAAQPKATFSRLLACGCDQFSSYSQREVNGSYKCQFWTKAFEKQSCFFYTLSPSAGLHAEKEQALGI

SEQ ID NO: 926841 - protein, 164 aa, Homo sapiens
MGVSMGLMEKVTSPKHLSGELVYRVGCSNPSHEQREERDVLLRIYSFSWQAAAQPKATFSRLLACGCDQFSSYSQREVNGSYKCQFWTKAFEKQSCFFYTLSPSAGLHAEKEQALGIPTTPQHSQRQRLNTDTQKSSLPAENSKQQKDSFCPLPRFTFLMSASN

SEQ ID NO: 926842 - protein, 134 aa, Homo sapiens
MPVLLVWVLHLTTIGLEYCFSDFQIMAHTENNFCMEYQSKWNPGLCQTAQGLREEISQHMAVYTSQTGWGGLAERDKRGKGQIPKCEWITRLSKQQKWILLSRTGTLFHLCTSSTNEEGLEDISDYIEFMVHLH

SEQ ID NO: 926843 - protein, 147 aa, Homo sapiens
MRVCPTSSEHVILPGEAESWSCPQLRRQVLLHPLNLPKGEHTSDSVERLVSAKRTHPHAEGQHLGLLCSHGDKLALSREQLLATCSPVQAKPFSEQECRSLIPRIQGWRYSKEGQAEGRSVALGKSETPVPEPEGTPKRGFIGPTTT

SEQ ID NO: 926844 - protein, 154 aa, Homo sapiens
MGEVNFLQKKGWMRMISFIRSFCKYRRFMLNPSKRQEFEDYLHQEMQNSKENFTTAHNTSGRSAPPSTNVRSADQENGEITLVKRRIFGHRIITVNFAINDLYFFSEMEKCLLIAHSLLNTGFDIGYTKNNYDVLSISKIPQTNEDGRKDTNKS

SEQ ID NO: 926845 - protein, 156 aa, Homo sapiens
MGEFPDPPSAEGATGVWLICSAAACSNPLWEEGHADRQVQEPGQVLLGSGPTVASTEILLDDGGGSQQNGCGAEKGMEWGDDLPLEFGYPMADLLSDCPQLNSSQCSDAPSLLSFSAMPLFCSSALLFVCPWSLGPRGGAFARELPSPTQYFSVYC

SEQ ID NO: 926846 - protein, 230 aa, Homo sapiens
MADVVLGIPVGYPVPEDLSSTMVVGKNQHLTKDGKKGAKKKVVDPFSKKDCYDVKAPAMFNIRNIGRTLVTRTQGTKIVSDGLKGHMKKFKMITEDVQGKNCLTNFHGMDLTHDTMCSMVKKWQTMIEAHVDVKTNDGYFFNLFCVGFTEKMQQSDMENHLCSTPTDSIGRDIEKSCQSTYPPHDVFVRGVKLLKKPEFELRRLMEFHGEGSSLGKATGDETVDKVKRAD

SEQ ID NO: 926847 - protein, 136 aa, Homo sapiens
MNGSLGQGFQEAGLVWGKRSCQHVRKEMCTKYKYFFLQQKKLFIWNMHYQYKLGDCKTYTVLVSLENTKVQLESKGTEACALTEAEKLKLSKPKQSRALQVYILNNKKRGGNIHYQMFIINTTKNETQVARNNGKC

SEQ ID NO: 926848 - protein, 155 aa, Homo sapiens
MDRWDGVLEETSGLEISISQSLAWSSQDICCFAKSASPGNLWGASPPVTQTLCSVLCVYYLIYPPGQHIKVIEEWNKAECITNFCGKAEGLTLAVFFFAFWRHSCMMKRGTSSFRATPNNCSSRPPAVHLTHPGPHSPAEPRSALSFTLTTSSKQ

SEQ ID NO: 926849 - protein, 149 aa, Homo sapiens
MRFYTLSGGNRHNFQPHTSARSYIELSRKSINEAQWKAGRLRQRFQGEIKFECYPSIPSVINEPLIAEEEDKKGNQRAAAEEEVKTPRKEKDLMHHHWLEELRLHNKNERVVGANKGHDEDPVLSPAEDHEMMMNTMMMKMLMVMLNIY

SEQ ID NO: 926850 - protein, 149 aa, Homo sapiens
MVYLRAWGEVLWRMKFSNLTICDIDMQIRSHSPSHALQWLLFALDALGIKTKHTICPTCCSLVLMTSHSSCIFNHTPPGSLNLNDAGLLSFPPMFQSLPHLGLTHHHYPSAPKSPPHTRCVSLINFCTLFRPLFKTYFLREPLPSPSQL

SEQ ID NO: 926851 - protein, 183 aa, Homo sapiens
MILTFKELMACWRERLIPKKKEEEEEEEEKNKKRKKKKKEKEKEEEKEEEKNKKRKKKKKEKEEEEEKNKKRKKKKKEKEKEEEEEKNKKRKKKKKEKEKEEEEEEKNKKRKKKKEKEKEEEEEKEKEKNKKKENEKEEKKEKMKSSRKRKRKTRGQAGIHFADIMDTKWDGLDILPAKKVLV

SEQ ID NO: 926852 - protein, 139 aa, Homo sapiens
MACNRVMLAGLLRNRVTLAQLYTAFINCQVQCPFWTQRLQLQEKSQVDSESNSFKDGRHTITLKPRGTESSIPRITICQEVRGERDVLHNESGKRGIWIFQIKTSYIPQKIRRKKDSQTPADVRNLLSGFGEKKSYTGS

SEQ ID NO: 926853 - protein, 191 aa, Homo sapiens
MCRRLRAYLGRAVSPKSVCEGCQRVILDRFLLRLNDSFWHEQCVQCASCKEPLETTCFYRDKKLYCKYDYEKPKRHAQRAELPFSAVVYIAPHGKVVGQRSARVRAAVARVPQKCAQWLSSTPWNPSSLVSLFYRGALRVASDPVSPCWFSPHVTQVSAPASRLCLAASRCLVVPGGSRCRGDSCLLFAHT

SEQ ID NO: 926854 - protein, 146 aa, Homo sapiens
MGFVPVSAWVQCGNALPNSDKFTGREFISQCNDKSLKDFKHGSNMIKFVIYKYRFGYFVANGMEVLAAETGKEAVHSGEQEPFLQLLSSSGPAQYLANGSSLNHIYRTYRKIQILNKKDHSTAPQHVELAQCLPPPAVVKIDDRSR

SEQ ID NO: 926855 - protein, 163 aa, Homo sapiens
MVIYNVHPFSPTRIRCMEELRCLGPGTTPISVGAKEASLSENSIEPASYKGKWFFSWSSGGTPVLPRAVLQVPRALVPPKEPGHGQVARAPVAACSGTFWADWRGPNGGISLELGRAPPLSCETEEKETRILMHKPMRISSPGTGFYLCLSGAPLTHCPAVMQ

SEQ ID NO: 926856 - protein, 154 aa, Homo sapiens
MPLMNATCSEEEREMQFECSMAHNQGCIIRPQEESKRVREKNLLYDNVMTLSLPVPKWGSYTCGWDCDTTITLGVAIAAHPCSPQPLSKWMHTFLSPVSRPGTRPQNTFGLGSVSYRAFNNTGLYSTHCLLWVSHICGFGCGLWRGGHGSFKDT

SEQ ID NO: 926857 - protein, 464 aa, Homo sapiens
MCGIISEGSSGPSAAGLLEFAGGPLQTLFAWVSPVEAAEQQVLQNGKCCCLILPPEALSQRGTRLFEVSSDPKSDSWIFALAVLLSSSFVYNSMGTINHQALEQLQYPSRNYVTELTELIRAKSCPRPDEVEDSSEFVSFFPDFIWTVRDFTLELKLDGHPITEDEYLENALKLISGKNPQIQNSNKPREWIRHFFPKQKCFVFDRPINDKKLLLHVEEVREDQLDSNFQMQSENFCSYIFTHAKTKTLREGILVTGNRLGMLVETYLDAINSGATPCLENAMAVLAQCENSAAVQRAANHYSQQMAQQVRFPTDTLQELLDVHAVCEREAIAVFMEYSFKDKSQEFQKKLVDTMEKKKEDFVLQNEEASAKYCQAELKRLSELLTESISRGTFFVPGGHNIYLEAKKKIEQDYTLVPRKGVKNLMILHKMDKLILIGYGVIVVIILVYIDRGDNDGDDEMNGS

SEQ ID NO: 926858 - protein, 179 aa, Homo sapiens
MVSRVGLHSHSPPPLAGAACLFIPDARTWIFQLKVLNSLAPFNSSPEKLEKVHAGLMCHLEEVADLVVLDTSNSRTKAILGALLILYVHCRDIVINLLLKNIFNAEDFEWTSFTYGYEYLGCTSRLVITPLTDRCWLTLMEALHLNLGGCPAGPAGTGKTETVKDLAKVFEESPHCLSQ

SEQ ID NO: 926859 - protein, 441 aa, Homo sapiens
MCFVKQMLEGSMLLKSHHHSLISSTQGHKNCGRPQGPLPRKARSSLGTSLPNPLHPAGFSPTDGEPRLAPSQRPPERRAFVGGFPLVPGSCRLCGARHRLGSSSTSSPCPPHEAWERVLPGCARVGVAQLAAFGMQSTGDPPPPLLLLQPLQLLLLAPSCCSSRSGNVFGVSSFRWVRGLTGSGVKLQTFALSQLIKAAWTQRVTNSRIYCKEQKNKPSTLWKWTRVGCHCSLGQPAFILLSGPTHILLIGRAQCGFTTGAAGGAACQSRAVRRHSSALGWWMGLGAVEQGAALVGEARAVQEPTEVGEAQAWRAAGPEPCPAGRQLRPGEKLSTAAAGPGAKPLTAQGRRGPRGRLAAPSAGPDEPTPTQNSRWPTSTARSPGSRPRLCLHTSPQAEGAGSGLGQPRRGLPQCSGGLKDSSSGAKVGAQAEEAPRASESE

SEQ ID NO: 926860 - protein, 304 aa, Homo sapiens
MHTSSSPRFVCRTSCPCCPSSFSWHLPQSSLWEPCSSSQRPCTHHQHPFHLQLKIREVPRRSCSHQSHGAACEAEAPPTGPPPNWHHCCPCPYSQPHVTLGQKQWWGSQGSVKSLSQVRCGQDPHRAGSQGRGRTNLGGEDVCIVGLEGGCGLVDRKKQWAWKSCMIRAGTGPGWIGGPWGLRIQQGAAGVKEEGMTGANTFPPKPLLPSGSSPELSPLSVGHPLLELEIGVGGAKAIISNDIITPSSSWMTCLTVYFPAVQAVYPAVGEGLGQAEPGSLTVCSRSAPQKLLLGIRALECLGCN

SEQ ID NO: 926861 - protein, 308 aa, Homo sapiens
MPYFKSRLRISEIENTLTEPTKDGELIFWTQLISPPPSEGFHDCLILGGSGDKVTIPCVNFSQSTSAFDFTHVLVEGQAEENMAAKVFASIGKFGLALAVAGGVVNSALYNVDAGHRAVIFDRFHGVQDIVVGEGTHCLIPWVQKPIIFDCRSRPRKVPVIAGSKDLQNVNITLRILFWAVASQFLASSPASERTMMSVCCCPSRPASSKAMEAKQVAQQEVERARFVVEKAEQQKKVAIISAEGDSKAAELIVNSLVTAGDGLIEQEAVEDIAYLLSRSWNITYLLAGQSVLLQLPQSVFQQEIYIP

SEQ ID NO: 926862 - protein, 138 aa, Homo sapiens
MESSLFESGYNASELSQVKGIWINPWYQFGTRRNPMSSSFLILGFLVTPGGSTSQDPTQCHASFLYQGIQETNQSFFPQTKLKYVWLYLDKVSLHGIGNLGNSVNSASPYLYLNLRTLFMSPLCVVLSVCLYPDSVFP

SEQ ID NO: 926863 - protein, 144 aa, Homo sapiens
MAHELRRGYNGEEGKKKKKIKQGKTWGGGIGGKEGAFSPRTRKELNLANNYLSMPGSRSSPDKPCDDYSLKVDESIVSQRTQLIQVQIPGPQKMPTNKWFFRPLNSGVICKHQDRHFVCYPQASEVNLAGLESPIPACLLLLLL

SEQ ID NO: 926864 - protein, 154 aa, Homo sapiens
MGSLLTQPTLQVSPAAMLADLGKMEHWAVHGLIGASGEELQKGPKEGQWPWNRGYGDAMYVKLIPSDGHEFIVKREHALISGMIKAMLNSPGQFAENETNEVNFREIPSYVLSKVCMYFTYKVRYTNSSTEIPEFPITPEIALELLVAVNFLDC

SEQ ID NO: 926865 - protein, 359 aa, Homo sapiens
MSGYPRRPGATPLSRARSLAIPDDDKFEDLEEANPFFFKEFLKTKNLRLSKEDPASRIYAKEASRHSLGLDHNSSPSQTGEYGLEYQQPFFEDPTGASDLLDKEEDEDTRWSGAYLPSAIKQTHPERVPAATLPCSTYLSFFSTPSELAGLQSLPPADFAAHGESLGDRHLRTLQISYEALKDENSKLRRKLNEVQSFSEAQTEMVRTLERKLEAKMIKEESDYHDLESVVQQVEQNLELMTKRAVKAENHVVKLKQEINLLQAQVSNFQRENDALQCGQGASLTVVKQNADVALQNLRVVMNSAQASIKQLVSGAETVTPVAPEGGPCGHGPSAQGPPRGCCCPPPGPTGTKVTHSVL

SEQ ID NO: 926866 - protein, 436 aa, Homo sapiens
MHGCFWLHQFAAAWGEEMFRFPMGLLLGSVLLVASAPATLEPPGCSNKEQQVTVSHTYKIDVPKSALVQVDADPQPLSDDGASLLALGEAREEQNIIFRHNIRLQTPQKDCELAGSVQDLLARVKKLEEEMVEMKEQCSAQRCCQGVTDLSRHCSGHGTFSLETCSCHCEEGREGPACERLACPGACSGHGRCVDGRCLCHEPYVGADCGYPACPENCSGHGECVRGVCQCHEDFMSEDCSEKRCPGDCSGHGFCDTGECYCEEGFTGLDCAQVVTPQGLQLLKNTEDSLLVSWEPSSQVDHYLLSYYPLGKELSGKQIQVPKEQHSYEILGLLPGTKYIVTLRNVKNEVSSSPQHLLATTDLAVLGTAWVTDETENSLDVEWENPSTEVDYYKLRYGPMTGQEVAEVTVPKSSDPKSRYDITVLEIAGYGGENKR

SEQ ID NO: 926867 - protein, 297 aa, Homo sapiens
MCSSVDRSFRMLQPSVKTDVPYPTLPTNVVTDRVTEDTATVSWDPVQAVIDKYVVRYTSADGDTKEMAVHKDESSTVLTGLKPGEAYKVYVWAERGNQGSKKADTNALTEIDSPANLVTDRVTENTATISWDPVQATIDKYVVRYTSADDQETREVLVGKEQSSTVLTGLRPGVEYTVHVWAQKGDRESKKADTNAPTDIDSPKNLVTDRVTENMATVSWDPVQAAIDKYVVRYTSAGGETREVPVGKEQSSTVLTGLRPGMEYMVHVWAQKGDQESKKADTKAQTDILAYVRHQPV

SEQ ID NO: 926868 - protein, 471 aa, Homo sapiens
MCSPGSRSRLSLHTSPQAEGVGSSLGQPRKGLPQCSGGLKGSSNAAKVGAQAEEVPRANIDSPQNLVTDRVTENMATVSWDPVRATIDRYVVRYTSAKDGETREVPVGKEQSSTVLTGLRPGVEYTVHVWAQKGAQESKKADTKAQTDIDSPQNLVTDWVTENTATVSWDPVQATIDRYVVHYTSANGETREVPVGKEQSSTVLTGLRPGMEYTVHVWAQKGNQESKKADTKAQTEIDGPKNLVTDWVTENMATVSWDPVQATIDKYMVRYTSADGETREVPVGKEHSSTVLTGLRPGMEYMVHVWAQKGAQESKKADTKAQTELDPPRNLRPSAVTQSGGILTWTPPSAQIHGYILTYQFPDGTVKEMQLGREDQRFALQGLEQGATYPVSLVAFKGGRRSRNVSTTLSTVGARFPHPSDCSQVQQNSNAASGLYTIYLHGDASRPLQVYCDMETDGGGWIPRMPVMDAP

SEQ ID NO: 926869 - protein, 138 aa, Homo sapiens
MPPLRFLQIARELILSSHLWPQFSALAEFLFSVLHNSAPSSPNLILSPKSNHFYKRCTLAEFLLMVLFQPAGNRCKEHSCTECPSRRTTGLPWAENFPAQQHRGMAFQGSELCKFVGPLGAATAPLSHQAVSPVFLTS

SEQ ID NO: 926870 - protein, 152 aa, Homo sapiens
MVLEKAVHALNQHPIYGTLSPIARIHRSRNQGVEVAPLTVTPSDPLAKFLLPVPMTLRSAGLEVLVPEEGTLPPGDMTMIPLNWKLRLPTGHFGLLLLLSQQAKKGVTVLAGVIDPDYQDEISLLLHNREASLEEEDLVRERAASVPLQSSG

SEQ ID NO: 926871 - protein, 124 aa, Homo sapiens [sequence omitted]

SEQ ID NO: 926872 - protein, 144 aa, Homo sapiens
MAPEQTPRTVGMGQEPPDSRRKLPQEAAAPTEFQHSLLAREKKGHATGNHWHWSQLSLTSHLKATLQDFSLKKMQCEDEEGLFSLSRLVTMGSYAVRAESSTVWVEISHAMTSRKTIFELVQIIQMSPLSEMPLTPHPVHQRTT

SEQ ID NO: 926873 - protein, 136 aa, Homo sapiens
MIILFFEWRNCGSTQLSNLRKPISLVKEEVAVTFLRESTVFPHSQFFFGLQRSVNIKNQVTFFFCLKIKAACCLLAPGALFSQGLFHLSGFPFYSSLLSTLASSAIQCFPQPFYLLVRHTVATLSPRSGMGKTELG

SEQ ID NO: 926874 - protein, 144 aa, Homo sapiens
MLPSLCPCVLIVHLPLMKVQPKNYLGSHISCHTFQNHWQAADSTVCQNLYFHFNQSTGLQGRSLNSHSHLEMAPAPLPVSCLNASSCCFESLLKGNICFSMGLVQFPLRQAEGQCDSFLYPKLLSSILEKLGHTWTRRMNARFY

SEQ ID NO: 926875 - protein, 185 aa, Homo sapiens
MIFTAVSNNGPMPFLAKKGNLAGKERPTLTQCQNNQKIPGKSRQKFAAVAVLSWKTSARAVQKENVGWKPPHRVPIGAPPSGAVRRWLPSCRPQNDRSTNSLHHVPGKAANTKHQPMKADRREAVPCKATGAELPKTMGTHLLHQCDPDVRHGDNRDHFGALRFDCPAGFWTGMGLSTFKMACKQ

SEQ ID NO: 926876 - protein, 196 aa, Homo sapiens
MGRNQSRKAENSKNQSTPSPPKDRISSPAKEQRRMENDFDEFTEVGFRKSEAKNLEKRLDKWLTRINSVEKTLNDLMELKTMAREICDACISFSSRFDQVEIRVSVIEDPINEMKREEKFREKRVKRNEQSLQEICDYVKRPNLRLIGVPESDGENGTKLENTLQDIIQENVPNLTRQANIQIQEIQRREHHKDTP

SEQ ID NO: 926877 - protein, 153 aa, Homo sapiens
MVWLCPHPNLILNCNSHNSHISWEEPEEDRKMWESLELPRDLLNGFDQNADNDVNNEIQAEVVSDGDEELFGNWSKSYSCYVLAKIWVAFCPCPRDLWNFELESDDLGFQNSRFNNSLRRVPGKATDTQCQPMKAARMGLSPAKPQGQSCPRP

SEQ ID NO: 926878 - protein, 154 aa, Homo sapiens
MILHYPTNRVVWTVKKYSLPGSGCQFTEQESSLASSQDSRRIRSHTDLKDGECGVLLGGGDGCQWDGWGSGQGMEWEDDLPPGFGCPTADSSTIHSQAPPDFQMLLLFAPSLPCGSAVRSLICSFPHLLLESGNHHRTFLVGGGEPSTALLMPV

SEQ ID NO: 926879 - protein, 193 aa, Homo sapiens [sequence omitted]

SEQ ID NO: 926880 - protein, 168 aa, Homo sapiens
MREVVEESKKRPLTRFEIVTSGHLGIYVQVTGDAMAWLGLRGLTILPSYINKKNKTVLKSWGGENFGGVIWRENGRCFSGLLQAGLGAAWEPRVGEIKLKEDFVGTDLPSTVRVTRSSASVMIYGAFEVIGQRQSSAAKPRRSQRALGQNSRGSGSACQNCGAFTTYH

SEQ ID NO: 926881 - protein, 148 aa, Homo sapiens
MNPGKFSLRHYADLEKEEGYTVRVRLFLLSVSCDFYSILWTTEQTQVYLQFWRFLPRAVTVTAKVCGFTPQVRETMNPPGGTNNSDAPPLRAVTLTESVCGFTPEVKARPQTHRKEETPDTSGHLKKQTLDTPSLRTNTHREGLWLHS

SEQ ID NO: 926882 - protein, 135 aa, Homo sapiens
MLSVQAVEMEEFKQAAEICQRMEEPNANSQDNGVKTLKALQRPLHQSLQSQVQWPRREEQFHGLGRGPHCPAQPWDTAPCIPAVPAPAVAKRAPDTSQATAAEGSSHKHWWLPCVVKPAGVKRARVEAWKPLPRA

SEQ ID NO: 926883 - protein, 138 aa, Homo sapiens
MADTTVTRTGSTNRLRSVITVRPEIALMMSRGRTQYPLTFPRNITLLCQQSSFLMSVKQKDWAGRNRNNKTASCQPAQHSTVKLHNLHCVLEEKKFLYLDRLTCSVNKSNVQLCVFGEQRNFSVNNVDIGLTNQCPLT

SEQ ID NO: 926884 - protein, 164 aa, Homo sapiens
MSTSGFFKPTESLLPFPKPPVALPGAILCQLKKTQTQLAERGEASGRQRLQLDIGEKRLDFRGTAGQCNLGEEFGQRRSDFKGKLPSLPSPLQFPFPLRATSISNKIYHIYHLSIRSGDFISPKSWTRAQVPGVRMKKAVTLTLCPHRQKAAISCEKAKGPLSY

SEQ ID NO: 926885 - protein, 156 aa, Homo sapiens
MASMIITSDSLDISQKVCKMKGISPLSYLEYPSYEKMITCPSFCHQYPTFSILLKYSGPGTQDLTKFVPGPGKQKALPSQSPPLIYQSSVKHPHKHPVINNSKWTMKIEKNIPGIAGPSTRSHYRHETEGPSTRSHYRCVTEGCGALKRKAVYGAY

SEQ ID NO: 926886 - protein, 178 aa, Homo sapiens
MIKHRLTREKHTHLFNKFDVTWNALHSKTIFEAAEMAPYNGLGVELGSLIAYTGIPVWTEQLVETHVINFCSKNYHENIPGKPRESTDPLKEVDCCSKLREAAEELWCAPESAISWLEANQHKTSTLNKNTTKGSYRVHFSSLLPLLEQVLVSTLRDLKTGYITGLLADSPQNHPGAW

SEQ ID NO: 926887 - protein, 167 aa, Homo sapiens
MGHTSGHGSLWDCVVHKPTKQAVTLDDCCRKICEEEVSRRRDDGVGMVIECPSAQLHDLLEPFRLLNRLHQWKVCCSHSCYSFHFEGCFPSHWLDHIKGTLKHGSSCCNICHNLTVDLSQEGSSILKHFHSKMQNKTKNLRAEVAVLDIQYLKNLCLLVQLSGGPEP

SEQ ID NO: 926888 - protein, 164 aa, Homo sapiens
MLLIYNLTPNPVLSETCAVSTQAKVGLDLQDSSSPPPSASQSAGITGMSHCTQPFFSSFGNVIHLIEIDVNIINANIAFTYLTGQRKFLVVHCGAVEFYFPKEVHRQTAGFGTGTLNSQAGFEFSRCPATHLFSQSLFSPARDVMIPLRAKLLPSNAGCLPQLP

SEQ ID NO: 926889 - protein, 184 aa, Homo sapiens
MDSSFTCRGQICWYQKPGMDLDAINDVILLEACIYHLLKIYCIYHLLKIYCREQPYYLNLTVLFLQSSYQTEIRQTLDLITAPQGNVDLGRFTEKRHKSIVKYKTAFYSFYLPVAAAMYMAGIDGKKEHANAKKILLGMGEFLQVQDDYLDLFGDPSVTGKVGTDIQDNKCSWLVVQCLQQATP

SEQ ID NO: 926890 - protein, 275 aa, Homo sapiens
MGGHHPIGCLTARPKQAEEGIPTCTERTPASLFPQLADGLSFRGLHLREKKKRKRKKRRRRKRKKKKKKEEEEEEEEEERRRGRRRRKKKRKKKEEERRRGRRKKKRKKKKKKEEEEEEEEEEEEEEEEKEKTVINKTLLPYNIVDLLSLMLLSATQTDCVHVIHLGMFNITLSMELEGKEDHVNMMFMLLAVPVRIPGNETAWLAKQKTKTTTTTTKTNQSVIDVCSCFPCSNFLKNKCLMLVGKNNHYELMNQGDTEYPLHCQHWVDAYLKSP

SEQ ID NO: 926891 - protein, 141 aa, Homo sapiens
MTKVLSNVNLFPGTAASTSSSSSSGTGAWNITVNKADKNLTFMEFTYLEGEDRLICTEPPEIHQLQFRFSYPGTGFHGGFCLCISAPDEVTISKLLPDMPDQKLKVLSLIFCAWVCSHPACSSAPTSHSLSLPCPLVRFLV

SEQ ID NO: 926892 - protein, 142 aa, Homo sapiens
MQTSLQYTDFLLLESDLCLVIVFDLKPIFPDVSVATPALFWLPLVCNIFLHLFTFHLCASLNLKDREQEQEEEEEAEEKEEEEEEEEEEEEGEGEGEGEGEGEEEEEEEEEEEEEEEEEEEILIMKQESVSVKVFLACESAD

SEQ ID NO: 926893 - protein, 159 aa, Homo sapiens
MLQLLPSQYDIGCGFVIDGSRYFEPFEVKNLLHWRGQGIPSPLVTTLQWVVVAKILHRGDGSGIHVHSHVPAAIAAWQSGAKVIVVFAIESNGKNRRYFSMNLCAMLRRHLTQQYCCLITSIVSAKFVVCITVHAKWISTYPKQHRGMSKKTGHFNKEC

SEQ ID NO: 926894 - protein, 150 aa, Homo sapiens
MKIKELAQSTEEIYHSQSFHNFIGKLEIKNFQHRILASLAGSPSTEHNTGLKMWNGVVLTHCLAEKTFRLTVLSACQGYHIRKVREPVPGMCAEVCSSWVGISLSTQTRAGKWSAPESYFSEKEQLSLRVLKVASSSLMSQSPKLSEIYI

SEQ ID NO: 926895 - protein, 146 aa, Homo sapiens
MPQVSAKDLLERCSPLWHFLASQEGNLTLEDMPTFFRVVIAIYHSKEANRTGTTLRKGKSAAVSQCGTRVCLHQHKPKHSHPKLPKQNALLMVDQVVIFLWNLTLLTQARNLEQSKESATLHDSDGKTLPRFDGQISEKSFHSHCS

SEQ ID NO: 926896 - protein, 168 aa, Homo sapiens
MVPAHTEDRSSPLSLLTHRLISFINTLTDVPEIMLYQFSKWSLTQTKHRERANLQGQGDKKSFTEWLEFQLDLEEKFVITNLRRPTSVNSSKSFSIQLCSFAGEELQSFVGEEEPQLQVCWSLLEVHSRPCCPGYHQQRLQNSNITEQQILLPDPSSGSFIPEGHLPV

SEQ ID NO: 926897 - protein, 136 aa, Homo sapiens
MEGVWFLKDHVAGHLQGGNIFNRFGIARNKLMVPSGCPHKVEGKWSLLDLICKGANLIHEGSTLPHLPKSQSPNTIILEVCEFGGYANIQITAGSLEGMPWVSISKGTKVKDHRTVAETSHLSPVGVSRNPTEQVS

SEQ ID NO: 926898 - protein, 195 aa, Homo sapiens
MIFCEENLELPGDLLNCCDQNADSDMDNEIQAEVVSDGDKELVKNWTTPAPAVAKRAPDTSQATAPEGVSPKPWWLPCGIWHKSTAGVEPSWRTSTREVQRGNVELELPHRVPTGALPIEAVRGRPLSYSTQNGRSTDSLHRAPRKATGTQCQPIKAVKGVVPCKATVAEMSKALGAHSLHQCSLNGVMQQVGPN

SEQ ID NO: 926899 - protein, 140 aa, Homo sapiens
MGRVCEASQDDARRRGRDGACAAGSKVLREDRLLANIWETGVTGGIETGVTGGIETERLEGWFLELWKTEAAIKNFSPYYSRQYSVAFCNHVRTEVEQQRDLTSQFLKTKGKTIDREKKQYTGPFSIWRSEKGEGSSKMD

SEQ ID NO: 926900 - protein, 142 aa, Homo sapiens
MRMKSQAEIQIEFQLFSASYQLGATCCSVTPIPQGPAFPKGGSWRYKTRHQCDVDTRNRNLGVINAEVKIQTTRMDELTKSHSLVRKLKGHGKAGFHIHFPYNKIELLLGKGSPAINYIFQLLWHLEVTICAFPILFFSWMQ

SEQ ID NO: 926901 - protein, 327 aa, Homo sapiens
MTGLGNLPTPFEWKRGLITHGNPDQFRYVDTWLQPDQFRYIDTWLQPDQFRYVDTWLQPDQFRYVDTWLQPDQFRYVDTWLQPDQFRYVDTWLQPDQFRYVDTWLQPDQFRYIDTWLQPDQFRYIDTWLQPDQFRYVDTWLQPDQFRYVDTWLQPDQFRYIDTWLQPDQFRYIDTWLQPDQFRYVDTWLQPDQFRYVDTWLQPDQFRYVDTWLQPDQFRYVDTWLQPDQFRYVDTWLQPDQFRYVDTWLQPDQFRYVDTWLQPDQFRYVDTWLQPDQFRAYPESTEAFLSKILNPVTRGWPKCIQSVAATVLLTTTTTTTTKHMYHP

SEQ ID NO: 926902 - protein, 132 aa, Homo sapiens
MFFLIHHKNRTSPSMQLHHQSPLQPLMAASLAGSLGFWVQDSSFSTPSHLFTLYFRFCLTLGLFFLCGSSTYMCLPANWMDTRTLVFLTPKIQFADGNEKLPVPLMTSTQQKKVIPLIPLLVELPGPRFTCC

SEQ ID NO: 926903 - protein, 140 aa, Homo sapiens
MSDRREEMTAVAFSDPVGKASTHPVKVSTQTKRYFSFLTEAWFINKPIVNRKEGNMGKWSECQVDQRDTVMGVRCGIRNNVGGRIEVWARNNGTVGDSTMKLGSFKRFRSLVVNTHNSYGDKGNRPLKSTIHNSQDMGST

SEQ ID NO: 926904 - protein, 270 aa, Homo sapiens
MASHIVLNNGTKMPILGLGTWNSPPGQVTEAVKVAINVGYCHIDCAHVYQNENDVGVAIREKLREQVVKSYHEKGLVKGACQKMLIDLKLDYLDLYLIRWPTSFKPGKEFFPLDEPGNGNVVPSNSNILDTWAGMEELVDEGLVKAIGISNFNHLQVERILNKPDLKYNSPDRPWAKPEDPSLLEDPRIKAITAKHNKTTAQVLIWFPMQRNLVVIPKSVTPECIAENFKVFNFELNSQDMTTLFSYNRTGGIQRADEQLHPFLVTFMGN

SEQ ID NO: 926905 - protein, 187 aa, Homo sapiens
MVVDNPNHILWLAFCISSQAVFSAGLWWNETTLLLSPLPLLPEDKAREEGDNLLPSDLSAREAWCVLSQDRDNRASHGGSSKGNIHRLPSEPTGSRLRKGRPEAQKPAAKGASSMVDSWGSPLGDTDTVACSSEEGRRLQDCSSGLDTTPACTQTSGEGGTEVPETEHGSHRHQPGTSHFFLFGLIL

SEQ ID NO: 926906 - protein, 165 aa, Homo sapiens
MRRAALAGTPHGQELASAYGRQETGCSALAFKDWNPAKGHTKERTLPGSPALLVGFGTPECGYGSVMAAELTEAVEFRLRSGGSKDCPAPCPAPTLDARKEEKRPELQRGQREGRKRTSMFAQGTQWRLPPRMEGRYSRERPPKRLEIFHGCWDEGCGGLLCAVH

SEQ ID NO: 926907 - protein, 160 aa, Homo sapiens
MKKREDNTLVYIVDVKANKRQIKQAARKLTNTSVVKVHTPIRLMERRRPSAGNAVSAGCQGHRPGPEVLRRPQRVDQMHQEAPGLVSVGSSWPNLWRGPGSRRAPREESFPWLVQHFSRALLYRNMVLTPDLGWFLEQRPTQCEDDEDEDLYEDSVLLNQ

SEQ ID NO: 926908 - protein, 149 aa, Homo sapiens
MKASDIRCVASQLHHSLMMGIEASELMDITVPVWRGSFRWCSCTDGTAIPILVDLLKVRMAPLMPDVNGTFLSASVKNLVTKKLHPFNLTISISYLKKAHFYVLPVHPPHALLQLFLLREMISPFKVQKVPKYSLIPSLTASLIINILH

SEQ ID NO: 926909 - protein, 148 aa, Homo sapiens
MVPKIKWLGIASAHQILNLCSLAGSCDKFWSVGYEQTGPMSLVDETGKTGWVPHELPSCLRSEGDLWPAHSIGEVAGVMRMPNVPQAARESLPYAVSGWGLTTMHNERAAAELQMMPAALESTLLSLFSRVKLEAELGTPGQSSRCRM

SEQ ID NO: 926910 - protein, 136 aa, Homo sapiens
MLTVGFTCSFPRSNWCSEVDLCGALYGVGIRYFLAGLCQLFGCPSFCPSQTWRPPENGHKSNTLTSFIHSLTVDDMPSTSPPLCSVMGTQQAMTVSVSVGPLPMETPPPTQDGREDKEGDVVRWLLIPLKTLNQDL

SEQ ID NO: 926911 - protein, 137 aa, Homo sapiens
MYKRHPRLNEENNPTGPTAPDNAPSLDNTGPGQNAEEDKILICSSVLYEGGRFEGDRTLSLHNVESLPVPGIASPNRHCRYTRAVCPRSRRRTAAGPCCKRSCSLAGTCFSASSHPGIVTSKKELQIPEEELGYGRI

SEQ ID NO: 926912 - protein, 148 aa, Homo sapiens
MTSRTNASRAPSGLSPLPALSSVCVLEKQQHCNEAKAVDIPHMDIEVLKKFNQNKKLVKKLAKKVSDQADPVSPRPGLHKAGTFPSLLIHNENEVDEVKSTIKFQMTKVLCLAVTVGHVNVTDNKLVYNIHLTVNFLVSLLKKNWQNV

SEQ ID NO: 926913 - protein, 158 aa, Homo sapiens
MEFSTLALLTFEAVLCVTELDSAGTSGNERELTELLTAVLILNFFLRGLESRPQAKSSPLQPVANQTIAEASSRCFTISCLLRPNYCTSPREPLSVVQDDKTYKGLLSPHSESNKWEGNPMSLICLTMYGAQSGVPAEMQCLVSSNKRTLSPYLRNRG

SEQ ID NO: 926914 - protein, 267 aa, Homo sapiens
MVAGFPEETATRVGCGVSVLHRTSEDVPPKLLRSSTPWDATEHPPASFFPSAHERRLRAAAASEESSAGKVAPVGPGASAPLAWQNLRGPPRGSGAVPRLRSWHRRSPVPRSQKHQAHLEAQAASRPSPTPPSTAAVSTAAQRRRSRDLKGHGRLYRTTGWSRLGAAGAEKTSNGGQSAVGTGKSLSSPSFSKHQPLTLQFADFPGHWKRPCQVKEAGDTPPLEPGATGRLGLQASPFRTAPKSDLQARAADPQASEGSPSSPERWP

SEQ ID NO: 926915 - protein, 138 aa, Homo sapiens
MLGLMPARGRTRRRPFRCPSSFRITQCTGFNRSRQAAPLRFSEALEPAQLFYKRRWLRLTLDGRLLCVVIPERESTVPVSQSGGVLASKSGGGWFELFDFNRRCVSLSSNIFFQLNERAFSFVLLPAQQFPYISLMYQ

SEQ ID NO: 926916 - protein, 203 aa, Homo sapiens
MGILLTFRSSALRASVSLLLPLSEPRDARRSPHPLFGVRGPRNRVLTVARTTGKSPNHPFGVKEPGGSPFRASLLAPSNRRPGLAPPGTQRPSKSSPPLRATLGLGESSYVSIAGPKSRCFTKLWNLTPGNFILSSQDLSRKERSARAGSAGSVPRPPRLNSRRTTGKRSLSSSEGPVSDGGAPPRPVRTLPQGEDALERYQS

SEQ ID NO: 926917 - protein, 138 aa, Homo sapiens
MKWSQNSQPLSWGRNFSLISRMFFSAFSLDQGLADNTMLTFVAEEVEPGTGEKKPKHMMGALRCNCPGFAETQAPWSHLRVTTNEDYSFSIHSQYSCTPVTMPQTHLFPNTSKHIPHCLSLVCTTSSRQTVSQQVIFS

SEQ ID NO: 926918 - protein, 150 aa, Homo sapiens
MVGSLLPVDFTLKGAVRTEVSGKGPEPWGLSLGDGDGRRGKAGKEGSGKGDYAELASKLSKPSQPFSTGFTTQITRPLMGQKSGLPFSPDKQLRISSQFQPCYRDCTQTDLVSSSSPFDIKSQFPPYFNAKIPSQCEDGVHVTYMFTLCT

SEQ ID NO: 926919 - protein, 187 aa, Homo sapiens
MTTTTWNADTDNRVKAQYQLIQHWVVSSSFPTKESRIPKQSPEKNNLSQIRPEGGLFGKHSSWGKNTFPWAVENDKGKGWHMHMWAGREGPRGAAQWGATHSLGEGTAGEEHGERGRGAVRALTITVVFLVHRLPEGSSETCVRKEKLSGLSSLLHDHSFSPTYHCLAWNGSWKEDSRETIETDNRK

SEQ ID NO: 926920 - protein, 241 aa, Homo sapiens
MHISLMTTTTWNADTDNRVKAQYQLIQHWVVSSSFPTKESRIPKQSPEKNNLSQIRPEGGLFGKHSSWGKNTFPWAVENDKGKGWHMHMWAGREGPRGAAQWGATHSLGEGTAGEEHGERGRGAVRALTITVVFLVHRLPEGSSETCVRKEKLSGLSSLLHDHSFSPTYHCLAWNGSWKEDSRETIETDNRKDAVISELSLEHFSPVCQGFREGFPNIQAGCQGFLKKPPFLDIVGKGQSI

SEQ ID NO: 926921 - protein, 176 aa, Homo sapiens
MAEVVSDGDEELVGNWSKGYSCYVLAKRLAAFFPHPRDLWNFELERDGLGYLAEEISKQQSIQEVTWVLFKAFSFKRKIEHKILENLQPHNMIEKKSSFSEEKFKQAAGICISNEELNVNHQDNGVNVSRACHRPWQQTLPSQAQRLGRIKWFCRQAPGSPCCVQPRDLVLCIQLL

SEQ ID NO: 926922 - protein, 189 aa, Homo sapiens
MGYLSLHNHVLCELESGHPQLDQQWEKPQEGPGEDGAVAGPATTSTNEVCVSYKTAVASLPSSKSPTRISLMGHLHGKYTQKGIPGQVVQLSQVDTLQGHHTYIEPTALAPVLSYCPFSFGQSLVPPHAEMQLLFAASFCVLALQEGGFDEFHTAGKEQLKSPVQHPEKLNLPPPYTWGKMSNVLCYNI

SEQ ID NO: 926923 - protein, 125 aa, Homo sapiens
MPQNMCIFDPIVLFMEFYPKIIIYNMPDNLDRRRVNVLFLIPKEWKQIHMPINRELFRNVTVIHTNENCWRHIEQLLTQRQDKSSKEARILILLCDFHHGMRILPHGCQHSTEMPFLGYAFMFYP

SEQ ID NO: 926924 - protein, 175 aa, Homo sapiens
MRPNCGVVKEGQLMKKYEGTENQEVKGFAQGHTAGKAEELDWEGREGGREIEERNEEREGQREGWREKDFTPDTTVGCFWLQNGFPHGTQMTTNSNGGMYSSVYIQMERVRESMDQGSCPSGRLVNSVHTRVPVPRLTQLVKHTARSPYVSPTREASRQYLPGEAHGTEAICSRW

SEQ ID NO: 926925 - protein, 157 aa, Homo sapiens
MAIAALPQTSTESPYAVLETVKKRRGKPRQTRSSYRHNPRFRSRKAQQDQRGVVISDKQMGRHGGLLMVGPGKSLRDWIWRMEFSRPGQAASQCVSPRRAFMRDQGWILAWGPKFIERVSMYVCLHMYEELYTIRNATLLSTLPEPQKNPQVRVPES

SEQ ID NO: 926926 - protein, 126 aa, Homo sapiens
MYQSHISKEENATFRTQRGLPGDMLSSYVGTAAVGHCVRPEFSYLTFTTTVVITPQTHKPRNQCGVLPKTKYIHSDDSLRLRKLPFGINVNTDLASNNPEHVRVSLFPNQMITSDPGYPSVNGFQV

SEQ ID NO: 926927 - protein, 161 aa, Homo sapiens
MPAITIAIVAIILTTSPSSAPPTGCFAVNTGMWRRVNELVGWERLSVKVREGNKTAHSPAALSTFSLPAKSFLASLEILTAPRVSHLLPCFCTATGIGTCNLNGSSRVLPSPGPTHACGLTACPAGVSASEILSSVNLLNTGTPVRLCRMMTNRVHINLVP

SEQ ID NO: 926928 - protein, 146 aa, Homo sapiens
MKSEEEATSGGAAVVLLATAGGSPLPEPPPLLFKNAMLVRSSFLRLDGKGSSGSLLRRKRRPLLLAAMKKAESGTVPSTEYIKLNAPKPIQFSQAGGDADLIPYHELIINPSAGSLLLIPYRQDFETVPSRFRGSFLALSSTFSTH

SEQ ID NO: 926929 - protein, 142 aa, Homo sapiens
MCLKHSRNAIIKLLKGYHMENDLYVRMYNMGFMGRRHQKGGAFEWVDGWGKWTMMEDGWVDKWMDGWIDGWMHGWQQNALGRGRERRGGGSRSEMLEEVEKKSQRERRDLGKRRLEKPDVRIQRPAATSATRRHFAEPRFPH

SEQ ID NO: 926930 - protein, 179 aa, Homo sapiens
MSVGSGGDRGTDVTGHWDPTCIQPLTSDKPPADLSLFFPKIIYVSACLHQSPKEKSPFFTPNLLSFWKARAQLTPCKASAMLTRALINAANTVCSVVISLPHQSAIHAHIHLLSLFEFQGLEEIWNKVVLGSWEVKLCAVSSYPPWLGGQVQCGIAWRPKMDWDRASQALTATSTTQGA

SEQ ID NO: 926931 - protein, 140 aa, Homo sapiens
MASSQLDYICTDLISKQEGFISPKSFHKPCLYPNPTPVFNLPQREVLDPRATCFQRPLSQCYTRFKPESMSTGDTVSKCNGCFYKEDPQNGEHSIELPVEDTHSPFSSRSGFVSHNQEKLDTQTSKKHLAVSIKTWWQIN

SEQ ID NO: 926932 - protein, 162 aa, Homo sapiens
MQTTAALFLDYSSRLHTGSTNIIIPEPGRVTQCSLTLRCCQTSTKQDLTLHNKGISTEGKWIEPSYGSGVALAESDRFPGCTKTNTIQRVEDKPYKDSETSHIHEFLGIQWSGACQDIFSSKIKNEYYILHLLPLRKKYNSWEAFSDSQVAYTQLENTTPAH

SEQ ID NO: 926933 - protein, 137 aa, Homo sapiens
MGKLQEGLAEAEYSIFLLKHGDTKKAEAPKLTEGPSTGVTVSAAYGWSHTPVLLEVGTAFAFGKNKMQKVGLGRQTDAVPSPAQKIIWGRSLIFGELGRGDSQAHISHCGPRHEDAAWCLLRAGCHGLLPLLGDENP

SEQ ID NO: 926934 - protein, 140 aa, Homo sapiens
MVAPCSVPSCLPLQPSFCVFPVPPVHSQCLPSEGLLGVRQSTQSLGGSSSTWLCLVGHLALSPYLFVCSFNKHLLNNVRQCNYTLPSKALAKAQESPRSGASGNEVEVKVEALVDGGAQSENKSHTLILHSSKSIDNAKN

SEQ ID NO: 926935 - protein, 139 aa, Homo sapiens
MISKILVRPSPEQCTLYPTCNLLSLTPTLSSESSKFIISFLCLYILTAKLPLMNLATQQSYWFPGWYWRLSAQFCDVNHLHSGLSAMDSSSCSSRGGRGVKWTLVSGKPPQGPLQDKVRNGFPKDRESPQGSSCCFLYP

SEQ ID NO: 926936 - protein, 134 aa, Homo sapiens
MCLRYSSPLLASCLPPPIFSLTPVHKDQSSNQISDSIKLSQHMCSKSDNQCTHRDGLWSNKQLKTPDPLPVDHGDIENILEVIEPHAVRDMQIKLMVSILQSQPMGDKNNTAWNLWSSLGMNKAFKQESYIEKV

SEQ ID NO: 926937 - protein, 541 aa, Homo sapiens
MRRQIRSSTTSMTLVTKSLKCLRPHYGKLKEMYENMAPGENEHFAADIISVLAMTMSGECECLKYRLVGSQKELASWSHEYIRHLAGEVAKEWQELDDAKKVQQEPLLTLVKEIVPYNMVHDAEHEACDLMEIEQVDMLEKDIDENAYTKVCLYLTSCVNYVSEPENSVLLRCALALRLALMRNDMELVEDIFTSCEDVVVQKQMAFMLGWHGVFLELSEDVKEYEHLTEIMSNVQLNSNFLALARELDIMEPKVPDDIYKTHLENNRFGGSGSQVDSARMNLASSFAGSGNVLKVQQLLHVCSEHFDSKEKEEDKGKKEKKDKDKKETPADMGAHQGVAVLGIALIAVGEIEVSYNSIFAMGMVGSGTNNARLAAMLRQLAQYHAKDPNDLFMVHLAQGLTHLGKGTLTLCPYHSDWQLMSPVAMAGLLTVPLSFLDVRNIILGKSHYVLYGLVAAMRPRMLVTFDEELRPLPVSVHVGQAVDVVGQAGKPKTITGFQTHTTPVSLAHGERAELATEEFLPVTPILESFVILRKNPNYDL

SEQ ID NO: 926938 - protein, 172 aa, Homo sapiens
MGIWGEIKEIRGMVWIEEIREMGPKSPLVPTMGLNGGTGKEMGKALGGDGKSSIGERVKMEWAKLLELLLGAGGLGDLEHIEAHRLAQGLALAHCDDVTDLDVPEAGGQLYGHVLVALLEAVVLADVVQSRQMTMILCIFVLVTTPERTHPRMETFPVKGHFLSMWAPSIAS

SEQ ID NO: 926939 - protein, 161 aa, Homo sapiens
MTGHDNDTCQESYDATQQFLSLLTRKEERNSRKQIKKENVGGGRMTYWYLLHPSCLLSLLRSPVRRLRCGRGCQQKPRESSLLFTVHLRRSGPPENLPLLRTTAKSLAPVYPSLPLCPDRPQSFPMWPCLACCSPCFQGSVSTNNIFPHDSRFHVCVPYHT

SEQ ID NO: 926940 - protein, 138 aa, Homo sapiens
MNKSESCRENRGVWSYFKMAPLLALPELGEDFFSDHHRKNLAELLEINLTEVILALYSSLWSFHSESQACGGDSLIEDRGILATFCVCSLGIRDSQVTKETYIVISSYISHESNRIYDTDKETKVLRGCKGHNLDLET

SEQ ID NO: 926941 - protein, 143 aa, Homo sapiens
MESAGTVNRLLPLQPGVLHVARHHPWWLVFPSKHLKRTRRKLQGFFWPGTKGHTTLEAASQCFPIDEEEEEEEEEEEKDNESPSLASLIKYKVADSLRADSPRAWRMSASVVKVDLGSAPQCPLEQKLKTEFFPKDQKTYGPA

SEQ ID NO: 926942 - protein, 149 aa, Homo sapiens
MYLNSTKGEGVKPFRRNCPHDWIIIFHQALPPTLEITIRHEIWAGTQIQNISDLKAVMETTNKRKAPEMCVQGVHKRAKRPMWLEDKAQSPFGNLRQQYVQGKMVTRTKMVTRTVWKGRVWRSESGLEFGAHYAFHVYYTSKWRFLVGN

SEQ ID NO: 926943 - protein, 145 aa, Homo sapiens
MYWVPQQCRPTGAVLYFSPGLSCLPAGQGSGPAARHASAFPDLRGLLCSPSLPEERRPLLHGAQSHHHPRAEECGRTPRDWQAAPPAAPVRDPLGEASWAPESAVTLTVKVRSFPPEPARPGTHQKEETQNTSQHQKEQTPDAPP

SEQ ID NO: 926944 - protein, 235 aa, Homo sapiens
MINEEQKHKETNNSNAPNPSKEGSEGPDEDILPLTLEKKENKGYLKSLFEILILMGKQNIPLDGQEADEIPEGLFTPDNLTSESYYKEILSVPTVEHIIQELKDIIAEQHLQARKCLSLVPSVMGQLKFNTSEEHHADMYRNDLPNPDMLSAELHCWRIKWKWGKTQSFCPPFMKPSICLTSSFFLMCMLNDLLPKVLCISPVMKVENEQYENGRKHLKAYLRNTLTDQRSSNLA

SEQ ID NO: 926945 - protein, 126 aa, Homo sapiens
MWENGVGPPGARRRTLPLASEVHSLPVLLSSEQKQGLVPAVTTVKRYSGSIRGQVSYTLEVSGVKFPAPWKKPAIKKNTARMQERQTRKLRKASNLVVEIYKADNNRIKYMLKSKTLFQVKNPVKV

SEQ ID NO: 926946 - protein, 269 aa, Homo sapiens
MADSGESHQCSKGMEAASCTHWSPCSVFLLRLSRNILKGQLLLIHASSDAYPTVESIRDEAFHGEFYSKQNVDHAFLMSFATKFSDYFLLIEDNVFFAPNFVTHIHSRVTTMKSNSWVLMEFSNMGFLGKLFHSRDLPLLAHFLLLFYKEKPLDSLISHFHTLLVQESPILCRPFLFYCRVSYTAFDHKQKATALQKKNADGPNNPPGAVFTDMQVSDVHFPWEAYTLDESFFWTHNISIGNHLTVILNHPANLSRVQVMTGSIVEWEL

SEQ ID NO: 926947 - protein, 237 aa, Homo sapiens
MLLLLPRIPPHQWRKEVAPEALSICPETCITTHTCLKESALPTWECELKKSSPRKPQLQQICSWGLHVTSSFPLDRAIEFGTAVSCQELLMKPQYLPGLGKMQGDTKEPSSKAHGIRELSGLGHQVEGTLSAAGRASGSSCGNCSANPGQKSPVACTHFLFQLCNSKGSPGSIYLGSLGSVTSESTRQLIQRNALTLKGILEAGGNRGSKKNFLEGNYCNISILRRYCRFRSRPLQQ

SEQ ID NO: 926948 - protein, 232 aa, Homo sapiens
MCKSAIFRSSISSANKEGLALKVVLSMPRAAFCCWASSRCFSSWSQSFGHNPRPSRCPGSPSANAGPRLPVGTVTLNESFCCLHKVTGEQRPLDSVGRDTRSNRTQLNDMQHFITLSGQSMLKPQSTPAGSGNGQSCCFQVLVGTFPHPKPKYVTWTVWICSEEVLDGDTSYWYLTPLNPLHQMHDIACYLVVELLAGDNGDLLAHALIRVEVIAQARVVLFCDDLGRLLHE

SEQ ID NO: 926949 - protein, 143 aa, Homo sapiens
MVFPSHCEELSVSLILPVSHLSSPHPLPPNNTNLPQNLGVQNLACLLEKRRENTESTIQMALFFFFWIIPQQSLLHGRGCSKPFTDEEVWSLQPLPLEYLTLNPHLTVGSQPSTSLGTVRIRIQVFGLNPWTDVYTTIPPSNA

SEQ ID NO: 926950 - protein, 149 aa, Homo sapiens
MMLAVGLSYMAFIVLRGQLPLCCPIRLPISQLPLHCPIRLPISQLRLHCPIRLPISQLPLHCPIRLPISQLRLHCPIRLPISQLPLHCPIRLPISQLRLHCPIRLPISQLPLHCPIRLPISQLRLHCPIRLPISQLRLHCPVQLPFLAP

SEQ ID NO: 926951 - protein, 151 aa, Homo sapiens
MGKVVEMGSAGPTPFSQARDPELCTITHAHGKADEALELASLYLGNCVILLGRTPGGSKAPTHQSPHPPSRPSSDAELKKDTADFPSKEGATHTKLAALERAIAKTETRRRFPEEGGVSGNFLNTRKLSLRCTYEEWVSGKGSIILGAWQT

SEQ ID NO: 926952 - protein, 462 aa, Homo sapiens
MELGELLYNKSEYIKTASGNKVSLQSVLCGSQNILLNRKTMPPFKKFSKGVEFFPLHIGDHVFIEEECVVNAAQIGSCIHVGKNCVIGCRCLLKDCCKILDNTALPPETVVPPFTVFSGCPGCFSGELVECTQELTIDVTKSYYQKFLPLTQNLLTDGPSGGVVFKCCAYTLSVTSHFVPLSVEHRIICSQRSSPLVLCMAGSHRKRACTAAAPSWCGGYVAGELLTAIHCPCRAPPTQEQSVTTNYFYNPREESLLVLRILPEEQPDGKDLDWDSFQWAWGRGNLMAHIAEKAGLDWALGCIPELQTGICLFGSQLCFPLSWLYSRAPWCGPTAPVIGKKSSHLLTELLDLVLIGPHEEGIQPQVITVAKRWNTLSGQAWHVYPQRLRVGADGMVVDEITRRRDKWVLGRKKHQLPSLGLSSFPGVFTFPPYPCCSLPSAQSLSTPGLGKVPSEDAPGTGT

SEQ ID NO: 926953 - protein, 165 aa, Homo sapiens
MGTCTSLTLFDPPKSLVRENSREVGDERMVSRHIAHSLPSSHSWSLFSLLAPLLFKAKCIVLFISPLQLEEQVLLLAHALESHNSTQAIYQSISSKQINIASSPKGISLNIFLHLIVPIFGIDTGTESKCTLEEFSVESDELNHVHSASCKFALLPSTSPFQVLA

SEQ ID NO: 926954 - protein, 162 aa, Homo sapiens
MCLGKAGPRASPGMEVEGVDNDVPSQSKWMQKELRETLSFLPMGKTSLPEAQASEEGCPRIVKIGDLGMKGNYWHFILQLVSAFEADSMTCACTTRIRKTALEKRWYVGQSAQEGCQDGLFKFSVLGKHGEMYYTCSYSWPSLWQTDEIGQPKYVDRLWGVY

SEQ ID NO: 926955 - protein, 147 aa, Homo sapiens
MFQQCEATQELENREKIETIKFSAAAIGSCMHCVDLHNCRCDTVQKLPGILLPPIIPLGVVAAKKDEAASKRLPKSKEPLLYHRCTSCISCTCSPVTRIPTHYGQNLRDGPQYKILRWEEGSAALRFSSFLGLLGTPVANQAPWEDS

SEQ ID NO: 926956 - protein, 143 aa, Homo sapiens
MENRRIVWKGYSWSCWLGIRFGILLSVSSLCVFVYVKGTSEEIAYGSPADLTQNPPLFIWSHLVIPKESSTGLSQGGYSLFTLTRDPNVNYHLEVIPSHLEWIKDNRDQQEKWLDPHSYGTASRVIKNCSILMEAAEKGNLKT

SEQ ID NO: 926957 - protein, 327 aa, Homo sapiens
MCHAGALHPLTRHLALGPSAAGLLEFAGGPLQTLFAWVSATVAAEQQILVNSKCCCLIVPLEVLSQRSTRPCEVSLAVCWENHCSLQSCQTGTFKSAEVTAVFLFVYALPPEVEPTEAGRPPGAVGRFQLIGDPHYQNCSLVIRDVQMEDTAVYFFRVKRGSFVRYNFMNTFFLELTALTQKPDVYIPKALEHGKPVTVIYVFNWAFEELLNLILRPQDHDTYHTCCIDFSRTGVSAWWTIQLFVAYTSRYLVISISYDNAPTELASSHISSKKSGPMEAVVLVAVREGAVKILLLCICFTFLSVSFYRRKVMRAAVGVEAANTVTG

SEQ ID NO: 926958 - protein, 432 aa, Homo sapiens
MKSSVQQTPHILQNFPLKWCTGGTLASQLFREHVRYVTTFDTWHWLLLGQKAPHPDIWKTNTFTSFKSRWQKTDDELCRHSMSFILHKAIRNDFFQSYLYLLEKIPLVKLYALTSQVINGEMQFYARAKLFYQEVPATEEGMMGNFIELSSPDIQASQKFLRKFVGDGSLYLKYQGAFLQGPGRAGTDCALDCGSGIGRVSKHVLLPVFNSVELVDMMESFLLEAQNYLQVKGDKVESYHCYSLQEFTPPFRRYDVIWIQWVSGHLTDKDLLAFLSRCRDGLKENGIIILKDNVAREGCILDLSDSSVTRDMDILRSLIRKSGLVVLGQEKQDGFPEQCIPVWMHQTGIRESSRKNEGLFKFHENYGLQDWSKQYNASGKNQEVHRNKKLGAHWDQASIWEKTVARLDPEETIRGYEQSEVHSFIRMMVFMF

SEQ ID NO: 926959 - protein, 140 aa, Homo sapiens
MSTLNIGPGLGLGVQCSDHALTLDLEGSEDRKMWKSLEHPRDLLNGFDKNADSDMDNEVQAEVVSHGDDELAGNYNPPHRVPTGALPSGAVRRRPPSSRPQNDGSTDSLHHASGKAAGAQCQPMKAARLRILSRKVEEND

SEQ ID NO: 926960 - protein, 161 aa, Homo sapiens
MAHVYISALFTSFVCLPSQQGSYSTPSILIYLRPLLSPTWLNDLFLASTLISMEVVPQSVSQLLIPFLSSFLKLVERFNPDIVLGFQIQHIKNKLMRFPSYLASSPNLPNSTNDTLLCLKCVIPELPLSLISPHASNPNVCHFHVLFSIPTNVLFPLIYAY

SEQ ID NO: 926961 - protein, 173 aa, Homo sapiens
MITATSQAGCAVLIVTAHIYITVDEFEAGISKNGQSHEHVLLASTLSVKELIVVNVTTEIKSVEMHHEALSEALPGDSMGFNIKNVSVKDVRCGNVVGDSKNDPPMEAAGFTAQVIILNHPGQIPVGSAPVLDCHTAHLTCKFAELKEKIDCHSGKKLENGPKFLKSGDAAIC

SEQ ID NO: 926962 - protein, 171 aa, Homo sapiens
MCNLNPSVMKTGRNPDPKRGFLDLAQERIWGKWKKTDQGSLAPTAPQLVNQDSRVAGSSSDSLNKLTKMTNEHRIQILMDLAPSIVPLYVHTEHTLCVSAFSALGTLCKCLGEEILHSNGDKVSLQPVFFFGVCVCVCVCVCVCFHPLVHAFTHVCIHIQVHAYIHLMDNF

SEQ ID NO: 926963 - protein, 153 aa, Homo sapiens
MSEARNQILLVCLALLTIFFPQTPTFTGCGPPRDRTKHLCNLFPSPAVDCDLHHQSSDSQNYTTSFPGSPACRQQIVEVSLHNCLTFEPALTSNTNEGLAAQQRMLCGNQTAVQDLRESRSLNIEHRFFNGLSAYPQSVLRPGEIPDLGYPTP

SEQ ID NO: 926964 - protein, 144 aa, Homo sapiens
MIREQKMLINFIANLFQEVRSSTEESDHITKKTASLEVFQGKPFPSNSECMNLEEDNCRKGAHAGEYQCLPALMVWNLLKLWSLTHSITLTCDSTHRPPPPYSKGDNVFLVIISKPKRDVPDVSFTEVYCMVEGKEPCFDIMHT

SEQ ID NO: 926965 - protein, 157 aa, Homo sapiens
MGQNRVSISSLAALGCAAFSQALPRDDSQGRESESQPSCERTAAQVKSVLSHREWQLSSVAMTALSLWSPLLAVLWPVPAQSIEHWPPNWAQGPVLETSEGEGEAFPWPIQLWCHEQDTKASLLEATVKGTSKEWSTERWTNYGMKALHQRAGLLIS

SEQ ID NO: 926966 - protein, 145 aa, Homo sapiens
MHMYCGRGLSVHNAVSRETWKIQAWFERARSCRAERGCGHPGGKRAARSAPAGGLSFGQHRERSLEEGARWTGQGWWEGICGCALHEVWRETLRRILGKLELASSNYCALGETLLSLSSELLQARKKGLENKGAILGPVTEKEAS

SEQ ID NO: 926967 - protein, 166 aa, Homo sapiens
MTHSAVAQQLLLRQRGAFSAGSVCKLRKREASKPGSQQCGLQLVVKAYEPRQATGAVPESKGRRTWSLDVHGQEESKQASSSGRQQSRRCSKQVDPPSSPALKDYLIPCNNLEEEKKSGPRPLLHLSLPKFTSLFSTSYCHVVPMCVFGARGGDGKRRSEDARTRA

SEQ ID NO: 926968 - protein, 162 aa, Homo sapiens
MGKLAASFPGFFAECYEILYIKVCLLPAVFVPALRMYGFPCQVESPGFFYVASSSGKTPAPGKARVLGHYLVNTDSYQAYSPVPFHLRAPHTAQQPHRHRIPRRTSVHNALRICHSLSQHLREGFLASEHHQFPPLPPSVTLPALPFPSQAKFPWYLFSLCC

SEQ ID NO: 926969 - protein, 142 aa, Homo sapiens
MGRLPGGGAPHFSDGAASQRRSSPPRRGGGGAETLLSSKTGSRPDRGALHISDGAAGQRRSPHPRRWAAGQRCSSLPRRDDGQEETLLTSQTGRPGRRAPHIPDDGRPGRDAPHFLDRVAPGQRLQSRHFGKPRQAAGRWRL

SEQ ID NO: 926970 - protein, 139 aa, Homo sapiens
MTVRNPLEEAVCPLAELKRGAGRSAALFGATSQGRLSLLKLCPQPPPPLTPHPTTAPTPPPPGALSQGDGNFIYKPLTRAAAFLSEMPCPVRRNLERQSGHSHFAVLQSVPPNFPAASLTLEVTPHPASAHPLWAAPTV

SEQ ID NO: 926971 - protein, 272 aa, Homo sapiens
MVGKAKWKPLELPLPRKIVNQKQYRMIGGIAEISATIKDLKDAGVVIPTKSLFNSPIWPVQKTNGSWRMTVDYHKLNQVVTPIAAAGPDEVSLLEQINTSPGTWYAAIDLANGFFSIPVHEAYQRQFVFSWQGQPYTFTVLPQRYINAQALCHNLIQKDLVCFLLPRDIILVHYINDIMLIGSKEQEVANTLDLLVKYLCTRRWEINPTKIQGSSTSVKFLGVQWCGACQDIPCKAVPMSSWGVPYDQLTEEEKTRAWFTDVSAQYVGTILK

SEQ ID NO: 926972 - protein, 151 aa, Homo sapiens
MEFLGDNIAMQGEFAATFYNSRAAGPRLCCCKIFGSISHCGDENTMSLHRAGCPWGGCEDERSARLHSPGGRPSSKQEEEEEVAQLLADFPLAAGAAPASPRLAIRQPVRSPPPGRVPPLPSPAAAMKLTHRMLLRSFCIANVFCENSGQD

SEQ ID NO: 926973 - protein, 261 aa, Homo sapiens
MGTHCPEEGGNRNISRLYKAALPYRSYAGLCVTTTLRVERVQIKVSFKPQLSSDPILSYNHQMVHSENNLPWMELRCINLALETLACLTIHFKLGLRGPAFGDEARDGHKKMSEFTAGCQVLSPPCFVGRQIFELLYEDLGHCRVFKFTASCPHVRVNYSYQALFAALAVEMVPNPQSRLSCEEFPFLYSSASEIWKAKLRQQPFLCSEGGYRYQVCSRDIVQWDGLRSSRHNSSRLEETADSCKSLRQVSAVKEEAHWRY

SEQ ID NO: 926974 - protein, 135 aa, Homo sapiens
MTMAVMLGEDSDHQGVRTQQEIQTPLMQRSLTLSFPTPEHRHKGRGTWSSMPLLTEYPQSVTGQLCRGLCGYLGTVKAYVFHLQVAELRGVGLGEAQSLLPFRMSHETPGEELLTPPEPHSPSMGLSCFVKLDSL

SEQ ID NO: 926975 - protein, 255 aa, Homo sapiens
MFSRATSLPDIAKTAVPTEASSPAQALPPQYQSIIVRQGIQNTVLSPASLAPLLPARDSDLVLSFADCSLGDTQHGEKLRRNCTIYRPWFSPYSYFVCADKESQLEAYDFPEVQQDEGKWDNCLSEDMAENICSSSSSPENTCPREATKKSRHGLDSITSQDILMASRWHPAQQNGYKCVACCRMYPTLDFLKSHIKRGFREGFSCKVYYRKLKALWSKEQKARLGDRLSSGSCQAFNSPAEHLRQIGGEAYLCL

SEQ ID NO: 926976 - protein, 126 aa, Homo sapiens
MLELSEKDFERAITTMLPRAATKTFKTNEKAECQQRKRNNQIEILELKNIIAKINSVDGLHTFINIANCVKLKVQKKEWTWDESKMLVMQDPIYSSRTKGSPFILQCCPSILQRNLTIVLLYRRCA

SEQ ID NO: 926977 - protein, 161 aa, Homo sapiens
MRAGSAAEAGTFTLCLFLGALSFPAALPALANRKFADFFSHPVDCLFTLLIVSFAVQKLFQLDVIPFVYFCFGCLCSWGITQEIFARSNVLEMFASPPQYVGSLDVPRPNSRVEIVAAMRRIRVSGQRWTVWSGESSALAAGPSSAIVESGMKHGKTFYKP

SEQ ID NO: 926978 - protein, 163 aa, Homo sapiens
MAWAYGLLGSHRAPSGRVLAVRVVKAILIQAQLLGVEVFGPRAERTWLQEDKSFVGTLIIFWPKDTKPRDRGLSSDRSWQAWLISLLILCGQAPGDYRGCLRPVNGTARLLREVENPEAPPALFQEKRSEWCGEGPAGDVKRFIKEITGPFKGVRQLLMMENC

SEQ ID NO: 926979 - protein, 150 aa, Homo sapiens
MQERRVFGESKMDALCDFGGSVDFVLTGLRNEEKEYKEKNFTAGPPGVTSHIGRFHDAHLSHKTSKFLLGILKGEGVYKQGVPVPICLPRQGSLNTDPLSDCAVSIWPHTAVASHYQSVLPFGSSCPWALQPLWDLSTKSQRISGRAGGQ

SEQ ID NO: 926980 - protein, 156 aa, Homo sapiens
MICAAAIVGIFLSCKRSANLDILDRLPGTVHGGLAAEVLEKAGLVPEGLSGIHCGGPVTGSMRVALVPWSVKADLEPGSMGANLKSETTSTNLALALKAGKSKIKMLAGSVSGEGSLVGSLHGRSGEDKKGPKLFNSSILIRDEWVMDKEKSQMTS

SEQ ID NO: 926981 - protein, 128 aa, Homo sapiens
MLSCLYCSASWSRLWAQGRGRAGQKGNTWVEKREASYDSHEDTGSKTLGFLAPEKFPIFKIRHGRNTNAEFNMTHTGWVNGYLNGNQFGLTTEGPLPNMLFWVEHPKSKKLQNPKFLDTDWTLKGNGH

SEQ ID NO: 926982 - protein, 374 aa, Homo sapiens
MEEELKCPVCGSLFREPIILPCSHNVCLPCARTIAVQTPDGEQHLPQPLLLSRGSGLQAGAAAAASLEHDAAAGPACGGAGGSAAGGLGGGAGGGGDHADKLSLYSETDSGYGSYTPSLKSPNGVRVLPMVPAPPGSSAAAARGAACSSLSSSSSSITCPQCHRSASLDHRGLRGFQRNRLLEAIVQRYQQGRGAVPGTSAAAAVAICQLCDRTPPEPAATLCEQCDVLYCSACQLKCHPSRGPFAKHRLVQPPPPPPPPAEAASGPTGTAQGAPSGGGGCKSPGGAGAGATGGSTARKFPTCPEHEMENYSMYCVSCRTPVCYLCLEEGRHAKHEVKPLGAMWKQHKQLMAGNVSLYLILREREEPSKSDEET

SEQ ID NO: 926983 - protein, 137 aa, Homo sapiens
MVMDIFVFSLQQFAKIIMDMFLRVDALIGFCSRIIPGLMWQGGDFTCHNDTGGEPICGEKFHDENFILKPTGPGIFFTANAGPNTNGSQFFICTAKTEWLDGKHVVSGKVKEETEYCGGHGALWVQERQDQQGGHYC

SEQ ID NO: 926984 - protein, 214 aa, Homo sapiens
MKTPAAGLNKTSVSFVLPHFILLKLIFNCKISQGYCRKISKTQHKEEEEKILFFSLPPGNNQYKHFDVHWRVTERIKLHRYTSVQTQGRTESTNTFLYFHEFFLRSNNTRQKSNITDILGRDLPYSHSSQITSTLTPALSHFPTDSAPTKVIDDLCLAEKPGPPPHERCGLLAQRLQMMENWVLLEGPGGGYTQKPDLTHLLTDPKFLSKAFLP

SEQ ID NO: 926985 - protein, 147 aa, Homo sapiens
MVNGVKVRGEDFKGRFRANDISELVLPQGKGAGLLYHPQNIYWLPWGRKEDIKGMRGKAALAPNVDSLKLQVRLVVAKLVEAGLWGLQPQTGPKGTWTEHKGDIVRISASVSHSEKKNDLNGCLWYPLWGKASLKAFTEKPTRWVRP

SEQ ID NO: 926986 - protein, 137 aa, Homo sapiens
MRNLLLQQASAWSSRCFHTSSELYEKVTKPQFLTCVYSQAQHHMEAAMVWGLHPLKPQPELYVGPFSHSWSSLDAGHQVCWSLLEVHSRPCFTWYHQQRLQNSKDCCLLLPLEASSQRVTHQMPASAPLYEVFVNPC

SEQ ID NO: 926987 - protein, 159 aa, Homo sapiens
MAALANDYTDPHLTLPSVNCSLASSTEAKGRMPLPYGNTAEKQHTLLTLHFSGEVNWIATPEHYSSAISYYIIAKRISELNFICISEIGSFGALNAELGTRFMKDKVIKARKECQERMTTVIVMTNVTGPIYTHTFYTEFLTYTLSQSITLRQERKKSL

SEQ ID NO: 926988 - protein, 163 aa, Homo sapiens
MSLYSVPFLIFLVFVSLGLAEAEESSLIGLEVMSLPEGTCQPFMQHEKLELRLGPIGICCGTEAGEPSLTGLEGVHLPGGTYQPFMQHEGLELKLGPFGIYCGKEYEVPNLQFKIMWVAKATPREWHLRNLEEVRVSATHIAGGKVFHVQKTAGIKALISEHT

SEQ ID NO: 926989 - protein, 137 aa, Homo sapiens
MMVAHKVNSLLDAYSGLLSNESMILAVNSSFVDPLLQFESQLKIIESSFGMLVVMPSLDKVKEMGSSYEYIEDMENVTQQVIIFRVLLFTLFSYNSQGTNLYHWTPCAKENAEHSIFMGTTVPKEGLTTIQNPIFHN

SEQ ID NO: 926990 - protein, 220 aa, Homo sapiens
MHITPMLAHGEVDPGTEEISGGKDLNQGLADPPIPPPTDPDLSLSGILAQSFSLRLGSSPDDIPKCVFQLVSILTVTFSQAPLQKVCWSLLEVHSRPSLPGYHQQRLQNSKDCCLLFPLEDSFQSGTCQMPVGALLYDVSLDPCWEQSSITVLFRAGRQEHLNLLKLCTQLPLPPGALSQGDESFIYKPLTGVSAFLSEMPCPERRNLERQSGYSGFAEL

SEQ ID NO: 926991 - protein, 218 aa, Homo sapiens
MVRKFLSICLSAPLLQVCWSLLEVHCRPCLPGYHQQRLQKSKDCCLFFCLEASFQRGTHQTPARALLYEVSVDPYWEMSPSQEARGAGRQECLSLLKLCPPPLLPPGALSQGDRSFIYKPLTAAFFSEMPCPERRNLERRSGYSWLCRAVVGSAQFELPGGFYTVRGKPPTQASVMVDIPPPTEFKCPRSTSDCCAGSENFKPVDISLLGSEGWHPLG

SEQ ID NO: 926992 - protein, 165 aa, Homo sapiens
MTLLDFTRATILKGYPLEHIPNEAKKEKEKEREGEGERRRRGKRRKKEEGERGEGKAEEGEEEEERKKKKKMISIFHMKGCPSVPAISLCYVNHQKTLAVPGLMDKQAYKELEICSENNENDKVVKNIHNSIWVNSLCGAPSQQPSSTPRTVKEALKGSEHTAVE

SEQ ID NO: 926993 - protein, 208 aa, Homo sapiens
MPAGALLYSVSVDPSWEVSPGEESRHSAFSRARALCWKICCSLQSWQAGMFKSAEAAPTAAPSPRCSDPGRWEFYLKAPDLGCCLSFRDALPSEEESREAVWLQQLCSTVVGLTQSELPGGFVYTVRGKPPTRASVMVDAPPHTKLEHPRLTSDCCAGSENFKPVDLSLLGSVRVGSAEQIHLAPWLQPFFQGSEEFYLTGVPGATGA

SEQ ID NO: 926994 - protein, 150 aa, Homo sapiens
MASMFSNKSLNVNKKLEVMINHCEEGMLKAKELMYLVTLSGSQFSFIIMKILEPLGIYSACALEMRHNKALMTVYLFTAWFTEYFKPTVESYCSEEKIPFKTLLLIAKAPGHPRILMKQCKLINMFIPINKASILQPMDEGVILLSTLII

SEQ ID NO: 926995 - protein, 264 aa, Homo sapiens
MQKEANLPIILTNVQEIMNLLRDFCTFEYFLLPLKSKRNGSSRTPINHSFSRSRNILEGSEVDRKIWESLELPRDLLNGFDQNADSDKNTEVQVEVFSDGDKELTGNRNFSGSMEINGCSGRSLLHGWSPHGGPLLGQCRGEMQLAHVLGNVAGTQHQPVKAAAGAVHCRPTVVELPKAMGAHYFHQCALNVRDEFCPGNFTFDQNCYKVQLEVSFFLCSFLNSTRSPPQGPCETKFKMASLWTESTHRAFPPASSTPIFCSHL

SEQ ID NO: 926996 - protein, 134 aa, Homo sapiens
MASEGASLKPWQLPLGVEPGSVEGKHGVGAPHRVPTGALPTEAVRRGPSSTSAQNGRSTSSLHCAPGKATDTQCQSMRAVGRRAVPCKATGVELPKTMGTYLLHQYDLDEVTNLLLTLQTLRGMSAPPIIGPEA

SEQ ID NO: 926997 - protein, 142 aa, Homo sapiens
MVCTQKFTESCTVTVLNVICAFPLVTLSIIHGALSDTVAPAGLFNMVSSWFRALSIHQDPYTIGCDQCPSLCSQFIPDVSALLVLPMIPMGQNQSGLPVKIPKPLRKSNVNHYFPHLILATVGPGNFSVSGIMPPWGRDHAV

SEQ ID NO: 926998 - protein, 145 aa, Homo sapiens
MPEPPTHSMGSCEDRASPMSTTPCSAVSTPIDHPRAEECERTAQDWQAVPPAALVRDPLGEASWAPESGGDLRDCKRTNQCPDKTGHSALPVSRMWVGPDKRIKAGCRASIGNLLGSPSTLWKLCSFTLCNKSCYCSLFGSTLLL

SEQ ID NO: 926999 - protein, 164 aa, Homo sapiens
MWQDEDVLSGLNVLIQILDPFSNPQSSHIKQQCVVRFHAADKDISETGKFTKERSLTGLTVPQGWGNITIMAEGKEEQVPSYVNGSRQKDLPLSTPHEREHVSQQVQELERVLLGTGRKKTPFTWLTVLNPLWEGTYRLWVWDPTDRFWAQVGANSMRACSSVQ

SEQ ID NO: 927000 - protein, 156 aa, Homo sapiens
MIYLLRVVELVPNIWGNYCSHSLIHTKVISFKNIRSEAANADAGDIASYPEDLAKVVDECGYTEQQIFSVDETAVFWEKFKQNKKTDGLEEVRGPFLKVLADKQGYDLRDRKAWLEDAVLMLAWDKAISSQQDKYWRKAFPKDILYLRKRFNDVTN

SEQ ID NO: 927001 - protein, 180 aa, Homo sapiens
MTEEAQKLNPNYFSNQSNKPNHNLFSNKSRDPNHNCGNKWPSSVRTWSATANFSLFAPTSNLGPASLQAGSGVYIIGPLALRPLNYTTGFSGLLEKTAAGEVTEQPRHFMIWGQDIERKGEGEDLGLLNKGEQVGRQASERQEFESSELAEDLELKERESESAGNKVMCGILTNQHITTN

SEQ ID NO: 927002 - protein, 188 aa, Homo sapiens
MYLWFMVLMVLYRAPQFSGRLVTEVEEEEEVGKEAGEAGLLVVQLKDWQLVFIFSLPGLRVSSFIDYGSPNHKLHSICTKILENITDIPICDVTPGGPAVKFLFELFLFISQTSQHLGKIERTYVEILGNGSPDNFVYSHGVNQGLWYCTKQDEKFYLEYAAHESHVIDWLTERLKHFLQSNIPNCYF

SEQ ID NO: 927003 - protein, 143 aa, Homo sapiens
MYCILNMSFHSLLAWKVSTEKSAARCISAPLKSLTPWPLLLQVYGTYYSTTTDVHLRPKGSSDILVNAARPESPPSGKWTPIWPRVGPEMPSRTQAWNWESQEPGWCSIPRGCAGAQAAEQSPLYSSLSFPQTECISPFGYHS

SEQ ID NO: 927004 - protein, 147 aa, Homo sapiens
MVTTLPQSPGDQGAADGHNQGILPETVKNKLLPAGVPGMMPGFPCNPSMEAVTLDPSKGAGVVKSLEGPCKVTALGGHPVSLLDSRTPRCPSQLHHHVCNSQMFTMIFGRNCLPQSQVLTTPGIYSPYLELLTHFFGNRPNGISYFS

SEQ ID NO: 927005 - protein, 372 aa, Homo sapiens
MDSQVLKKALTQAPVLSLLMGQDFSLYVTGKTEIALGVLTQVRGTSLQPMAYLSKETDVVAKEVSLTDPNLNLYTDGSSFVEKGLRKAGYAVVSDNGILESNLLTPGTSAQLAELIALTRALELGEGKRVNIYTDLPPMTIYTEQDLYNYVVPKPRNKRVPILPFVIGAGVLGGLGTRIGGITTPTQFYKLFQELNGDMEWVTDFLVTLQDQLNSLATVVLQNRRALDFRLIAKRGGTCLFLGEECCYYVNQSRIVTEKVKEIRDCIQHRAEELQNTGPWGLLSQWMPWILPFLGPLAAIILLLLFGPCIFNLLVKLVSSRIEAVKLQIILQMEPQRQSITKIYRGSLDQPASPCSDVDDIEGTPPEEISTA

SEQ ID NO: 927006 - protein, 193 aa, Homo sapiens
MRKKQNKIAENSKSQSASSPNDCNTSPAEMDELTEVGFRSKTGQHSNSGNPENSSKILHEKINPKTHYRQILQGRNKGKNVKGSQREKPGHLQGKPIRLTVDLSAETLHARRDWGPIFNILKEKNFQPRISYLSKLGFLSEGEIKSFSDKQILREFVTSRPALPKLLKEPLKMKRKNHYQPLKKRDTLKYTDQ

SEQ ID NO: 927007 - protein, 163 aa, Homo sapiens
MTAALAGILGKAFICLGQACGCEDVKNQNAWFGTRNAYFTPIFSSLNSYLSFEAHLLHATSSRKLSMTLKVDQAQLAPNGSWTLEDHILGEPAAMAAPHGKDHDMDLVTGYSGSIAEGRWKDVIDEMIKAPADLVSGEGCSLPPRWQHVAASSGGQEHRVLTW

SEQ ID NO: 927008 - protein, 144 aa, Homo sapiens
MMSAVGFSRMAFIMLRAKPHQGLILSVFGAPGGKCGQQCQWVQVGQSLDLQMPAVTAVGQEGGQMFGPLGNIYGVGDESTQKVAQWWTYLRTPRQHTLVVVAAAGWLFQDPGPQVAHPGSLLGSDKNLSRLGSGKIVSLKDRSY

SEQ ID NO: 927009 - protein, 152 aa, Homo sapiens
MGRIQSLESEEARILFGCQDQLLFLPFYASNPPPALLGHCQGWNTDLSWTHAAAIARQSTFNANRPRFAIYASCCQAFASRLSPRWVQIFPLIKTCCKCHLVSLWVWEVVLVANAQSRLGDAGEGCSCCPTEGEQMVNGVSSPPLPGEATGP

SEQ ID NO: 927010 - protein, 179 aa, Homo sapiens
MWLMTTILGSATLDCEVLEGLIQSCIILAPRIIPGMYQILSSGVLGRPLGGGDHRMSKVAQRSDATQQAGSSTDSKAQVHSIVRLRLSGGDSIGQNYGAANPSVVGSHTYFNTQRFDLTSYNLAPHSLAGSCLATREAFSRHPIYSSCPCLHMTLHLFLSSQNNVDAGKGTGPTSGPKA

SEQ ID NO: 927011 - protein, 452 aa, Homo sapiens
MFVLRTEKEKQDVYHHEHIEDLLDKQSRELQDMECCNNQKLLLEYEKYQELQLKSQRMQEEYEKQLRDNDETKSQALEELTEFYEAKLQEKTTLLEEEDVRQQLREFEETKKQIEEDEDREIQDIKTKYEKKLRDEKESNLRLKGETGIMRKKFSSLQKEIEERTNDIETLKGEQMKLQGVIKSLEKDIQGLKREIQERDETIQDKEKRIYDLKKKNQELGKFKFVLDYKIKELKKQIEPRENEIRVMKEQIQEMEAELENFHKQNTQLELNITELWQKLRATDQEMRRERQKERDLEALVKRFKTDLHNCVAYIQEPRLLKEKVRGLFEKYVQRADMVEIAGLNTDLQQEYTRQREHLERNLATLKKKVVKEGELHRTDYVRIMQENVSLIKEINELRRELKFTRSQVYDLEAALKLTKKVRPQEVSETGPIYTWPSGILSGAHTCSLRNP

SEQ ID NO: 927012 - protein, 115 aa, Homo sapiens
MDSACLHPGEINSHVAHTKPLWWSLHTDAHEIWCRDSDRGTSLRRSIPCPPVLCSVRKIHLQPQVLRPTSPRNISPISNPRQRRHVLSVDPKLQRRSRTGKAAFPWCLIIAGTPL

SEQ ID NO: 927013 - protein, 179 aa, Homo sapiens
MRDLGVRVMLAYPTKSKRQTAAVCFCHHKEGSPMPLRPLWVLEAHIPHLETPLQSFHWVTCKAPSSEWDLEQERALQQIRTARQTALTLGPYTPAELGVGNVSVETDGYSNPKDAIARNEGLGYIVRPAKRGPLGARGVHAVVPVDCGSHEIHYSDLPSVKNLPLSCGGPWRKMELLVL

SEQ ID NO: 927014 - protein, 148 aa, Homo sapiens
MLLCPSEARDDLITDLLNEAKQRLSKVVKDTTRYQVLLDGLVLQGLYQLLEHRMIVRCRKQDLPLVKAAVQKAIPMYKIATKNNVDVQIDQESYLPEDIAGGVEIYNGNHKIKVSKTPESQLDLIAQQMMLEVQGAFFGAKANRKFLD

SEQ ID NO: 927015 - protein, 163 aa, Homo sapiens
MSISKAYLACFSNHKLPLLLKDEETKGTEELSNLHKQTGLLKVGEYQEIIRMGLMETSENSEARPVDLEIAATVPKSWGFLTAVCVCIFWSQEQPLLRCSWKTLASEYTYAKLRRSALTNEGLDAIFLWKERCGGGPGLDEMTWESILNKAIPITEFLFSITP

SEQ ID NO: 927016 - protein, 136 aa, Homo sapiens
MTLEACCEEEGWTGTERNTSVPFLSAFPSRQYNAYGKRKQQQNLNQYLGQSYEDLDYGGREVGGSSLSQGNSGVTISARSQFNFEYPSLDASYKRVTGKEALELQREFRPADIESSIWPEFGKVIEAMDMAIFHRK

SEQ ID NO: 927017 - protein, 151 aa, Homo sapiens
MRMREGESQLNLLNGFAQNADSNMDNKVQAEVVSDGDEELVVNGFAQNADSDMNNKVQAEVVSDGHEELGNWSKGDSCYVLVKRLVAFFPCPRDLWNFELERNDLGYLAEEVSRQKSIQEATWVLFKAFSFMREAEHKEHKAEWKICSLTM

SEQ ID NO: 927018 - protein, 151 aa, Homo sapiens
MASEPANQVKSRCCYVRIAENARSAHGPMEMNDFRSPNLHKKAVTKAQKKDGKKRKRSRKESYSIYVYKVLKQVHPDTGISSKAMGIMNSFVNDIFERIAGEASRLAHYNKRSTITSREIQTAVRLLLPGELAKHAVSEGTKAVTKYTSSK

SEQ ID NO: 927019 - protein, 742 aa, Homo sapiens
MEEGFRDRAAFIRGAKDIAKEVKKHAAKKVVKGLDRVQDEYSRRSYSRFEEEDDDDDFPAPSDGYYRGEGTHDEEEGGASSDATEGHDEDDEIYEGEYQGIPRAESGGKGERMADGAPLAGVRGGLSDGEGPPGGRGEAQRRKEREELAQQYEAILRECGHGRFQWTLYFVLGLALMADGVEVFVVGFVLPSAEKDMCLSDSNKGMLGLIVYLGMMVGAFLWGGLADRLGRRQCLLISLSVNSVFAFFSSFVQGYGTFLFCRLLSGVGIGGSIPIVFSYFSEFLAQEKRGEHLSWLCMFWMIGGVYAAAMAWAIIPHYGWSFQMGSAYQFHSWRVFVLVCAFPSVFAIGALTTQPESPRFFLENGKHDEAWMVLKQVHDTNMRAKGHPERVFSVTHIKTIHQEDELIEIQSDTGTWYQRWGVRALSLGGQVWGNFLSCFGPEYRRITLMMMGVWFTMSFSYYGLTVWFPDMIRHLQAVDYASRTKVFPGERVEHVTFNFTLENQIHRGGQYFNDKFIGLRLKSVSFEDSLFEECYFEDVTSSNTFFRNCTFINTVFYNTDLFEYKFVNSRLINSTFLHNKEGCPLDVTGTGEGAYMVYFVSFLGTLAVLPGNIVSALLMDKIGRLRMLAGSSVMSCVSCFFLSFGNSESAMIALLCLFGGVSIASWNALDVLTVELYPSDKRTTAFGFLNALCKLAAVLGISIFTSFVGITKAAPILFASAALALGSSLALKLPETRGQVLQ

SEQ ID NO: 927020 - protein, 456 aa, Homo sapiens
MLYPYRLLDIMVKSLSITPFSYYTGIMENIMNSGHNFTAADCLRLLGIGRNQYIDLMIQCRSSKKFFRRKTAGDLLPIKPVEIAIEAWWVVQAGYITEDDIKICTWPEKCATDKTKMLLSWGGGESRRPVQEASSATDTDTNSQEDPADTASVRSLSLSAGHTKHIAFLFDSTLTAFLKMGNLSPVQSTGEREAQRYFDHALTLRNTILFLRHNKDLVVQTAQPDQPNYGFPLDLLRCESLLGLDPATGSRVLNKNYTLLVSMAPLTNEIRPVSSCTPQHIGPAIPEVSSVWFKQYIYVYHITGQGPPSLLLSKGTRPRKLPDIFQSYDRLLITSWCHDPGVVPTSNVLTMLNDALTHSAVLIQRHGLHGIGETVHVPFPFDETELQGEFTRVNMGVHKALQILRNRVDLQHLCGYVTMLNASSQLANRKLSDASDERGKPDLASGSDVKWEYRVI

SEQ ID NO: 927021 - protein, 143 aa, Homo sapiens
MAGATVTGSARIGWCCAVRWKPILQVLPRGVGMLDVWSNSFSPQREYGNWRFFAYLLCAGLGVEPVVSAYMLVETTFFILNGPRHLQCASAQNQARQKPVPGEIPRKDGTPQAPVGQLHKLTHYLKKDCKDSEQFSLGKMSSE

SEQ ID NO: 927022 - protein, 195 aa, Homo sapiens
MLGAADRSCSYLAILEWSVLLGTRLRTRGPVTSTNQAASQLLQENHPLAPVVSNEDDQNGPGGDAGSQFSHVPTEGYFAMAQQLLRHVFMAEYFLLYVAFLEYIADQEYVPILLTRAGFQLQRGFPFLGFLALRLPLSTLPPALAFLASGFFSLVLLLPWNIGESPKSVLHPCSLISSLREEDCTAEAAADSGWG

SEQ ID NO: 927023 - protein, 155 aa, Homo sapiens
MIKVSVGSMYAHWTESLSSPLTVRCPQFIAILSSPAWQLASSSPVRKRKRKIKMEMNCVLDFPIELSTQQFLEISLTKLLMMLSKSIINYFPIAFDASAASNSGILLLGGRVGHEVHHFVAITKFIVIPENELEKVVTEGNDSPRIKGGRVGVNG

SEQ ID NO: 927024 - protein, 149 aa, Homo sapiens
MSFQVYLPFLPGVVLSGLVSLFPKSTLQSHPGGEKGPKSTFQVRLPCFSLQAFPPPYGASLRWLTDQASSPLSLITPHCLLEICPLPSFACENCPGGFSDPSAAGLLEFAGYPLQTLFGWVSIVEAAEQQVLPPDPSSGSFVPEGHPPV

SEQ ID NO: 927025 - protein, 140 aa, Homo sapiens
MKDISFTRTVEEPGKPEGQAGLTPKREAVTVEDCNFQGAVQSRDAHTFKAGPLSMRGAVGMQLTADSRSIPDWPDHQGGTVGREGLTQPWNQTQIKKQNLDSTPEAAFVPISTLDPSPRGGNHYPDSAQPKKPFMNKSAP

SEQ ID NO: 927026 - protein, 136 aa, Homo sapiens
MQQIPFLRLALALHHSCPRIPLCGTLEENESVLKKSSYGSPFPTAQLALLLESLDDDRQALPISPEASIPTCPYSPLLWFSFTNGLSFVSCSHPLNLLTFFLSSVPSVLGFQCVDSAQAPAGDTQSQVSAAGPGWH

SEQ ID NO: 927027 - protein, 141 aa, Homo sapiens
MKCLLIEWLKYRQMQLLSMKGILLAPCTVSSENSCFSVQLQHVSHHKEHKALASISTLKLSSPICVPSAACSGIEEGRAGLQSLLFFLGSVNGKGSCEGIQIDTLGSGHQRTLPCRHIEEGDGGRRLCTSRRSPRKVLAGS

SEQ ID NO: 927028 - protein, 158 aa, Homo sapiens
MQYTCHSAAGLLEFVGGSLQTLFAWLSPARLQNSKDCCLFLPLEASSQRGTCQMPPGALLYEVPVNPCWDVSPSQDARGASRQECLSLLKLHSCPLPQVLCPTEMGVLSIGPTGAAAFLSEMLRPERRNLEKQSGYSSFAKLRCTLPSLNFLAALFTL

SEQ ID NO: 927029 - protein, 183 aa, Homo sapiens
MSRTSHRNKRSLSDSASTEWSAGVTVLCNCLNFPRANGNARHIVGPQSVFVAEWIGIWWGRHIGSVVVSTARKQVSQTLWLKTTPIPYLMASVGQKPGYSSAGFSAQGTKGLMLVAIWKYTSKTKDKETIWEAIAVNGIDCNSSFRDVKVSHLQPLICISGHMGHPSPKADWPRGTVKSTVYP

SEQ ID NO: 927030 - protein, 153 aa, Homo sapiens
MWQEDTILHSVRSAQLMVTGSTPRSSKHWDRKCKNVPVQALKQLSCIQEMKLSRRKETELHSSPASEEPRGSPAESQANGALLGGTDSEDGALALSVEGGAWWEVIGSWRPMSYDRLSTKPLVMMTVSEFANILNNMPQKRCRIPVAVSDNGY

SEQ ID NO: 927031 - protein, 154 aa, Homo sapiens
MWFGSNTLKPLGPDEEQSLAGCVLRSIWIVKSIRQLEGCDGGEEGRHVVLLMGLLCPSSEEKVVNNIFLWPESLPCEAQVLTKETEVPISKVPEFHLSIVCLHCSHQGSWAGDTQLSTFRMGPGLDARAGALVLGLEVGAVDSGSHRKRKLKQP

SEQ ID NO: 927032 - protein, 155 aa, Homo sapiens
MGVSYANEQRGKPEVAFGATCWFLPVSVFILLGLGNKSRWSPTSLGVESDVDKFEIPHCVGDTSKVHEISKIDDENGQHKANQNSLTNVYYVNNLDYSLKDQKYNVSKPAEGNGGGVMKILSTLVEDRKGEKQEEEAGKKNEEKGEEKEEENEEE

SEQ ID NO: 927033 - protein, 167 aa, Homo sapiens
MGECMLIGPWEDLEKAPFDWLKDIEEVLTLTVDWQLGFQALNCLWFEVKTIQIWTHGTQDAVEYQPRAQERLLGLMGMQLSGQTHCELTMVEGNVQMLQTEPPWIVPWKPEKVSMKPRHKYEEAGHTQGLISGIIYGKEFSQVQGKENITPECQPFAKFNHKKKFRS

SEQ ID NO: 927034 - protein, 135 aa, Homo sapiens
MLHKEILFFNRNFITALRNSQQSSLPFFYTGGLRKLEKKQGEIRAWTLSVLEGKGPRGSVIRGFSYLTLTRLTSLILSFHIWMLRQYIPPRQMWRINLRNNRIILGEKSPFLVPWSPPLNCWPPQRQLLSSAPTC

SEQ ID NO: 927035 - protein, 146 aa, Homo sapiens
MGDILQLVGGLARQILLPLRNSNQLTYFKAEVKSIAGAKSSKQEGMSLKDVFEELSVKGEQSKRETDVDEAGNHHSQQTNTGTENQTLHVLTHKWELNNENVWTQGREHHALGPVEKKIDGHNDSYPSGQKREKATFKMSIEELNI

SEQ ID NO: 927036 - protein, 154 aa, Homo sapiens
MILWLKWAKVQLGPSLQRVQVPSFGSFHIVFSPWVHRSQELRAMQNGKVGLKPPHRVPPGALPGGAVRRGPPSSRPQNNRSTNSLHCASRKAADTQHQPMKTDESGAVPCKATGAELPKAMDQHDPDVRHGVKVYHFGALRFDCPTGFQTSSGP

SEQ ID NO: 927037 - protein, 124 aa, Homo sapiens
MFPASQKVALDSSGLRSGSLSGYLIQKCSKLSSAACFGGVTSDSAVGWWWGQGPLGPRLEAAHCTSGRTLGVTASQQANLVWCAEGQLQDRVCQGGGYLSPLTTGPAASTLTLPFSHELIQTTT

SEQ ID NO: 927038 - protein, 158 aa, Homo sapiens
MLTPNPTLNGAPQVPAKDLWAHMEGAGSGSLDDEVRGRWVTREGHDPELPGLMEDGLWLGLQEGTGTALTSGNGPPMARCCLRPPWPDGGQTQRGSRTCSSMLRPRLRCFFSSSETACSSDLNRSVGSASSSSGSPSSFSASCRKCSSSSTKKARSFL

SEQ ID NO: 927039 - protein, 144 aa, Homo sapiens
MQVSSMHLTEDMLLTTHTTSLRNPDWAWKGSRDEPGLGGWLPLPSRVSQQRPDTTAAQAAPVHAVLCGHSQGLRLWGIQHFTGQGTSTSPYCAWGHCDLLVLLESMSVQGCVQLSLKGLIISSPHCMVTLVKGQKCLWGRLGER

SEQ ID NO: 927040 - protein, 126 aa, Homo sapiens
MGDKPVWEPIGSSFNQHYYQLFDNDRTQLGAIYIDASCLTWEVRQFQGKAAAVEKLSSLPFQKIQNSLTAQDHQPTPDSCIIGVVVGQLKADEDPIKGFHQMFLLKNINDGFCANDMFRFALHNFG

SEQ ID NO: 927041 - protein, 171 aa, Homo sapiens
MPKTIKMPQRHFGDVHHSPYHHRPGDIGGKNDFVGAGPGPHCPVQPQDIAPWSQLLQLQLWLKGPQITSQSTAPEGGTHKSWQLPHGIKPVGAQRARVEAWELLPGFQRIYGNAWMSTQKPAAGAQPSWRTSARAVQRGNVGLEPPHRIHTGHCLVGLTTTGISQEIQEDP

SEQ ID NO: 927042 - protein, 137 aa, Homo sapiens [sequence omitted]

SEQ ID NO: 927043 - protein, 142 aa, Homo sapiens
MRGFNKTTVVTQFILVGFSSLGELQLLLFVIFLLLYLTILVANVTIMAVIRFSWTLHTPMYGFLFILSFSESCYTFVIIPQLLVHLLSDTKTISFMACATQLFFFLGFACTNCLLIAVMGYDRYVAICHPLSIDFWFHSNVA

SEQ ID NO: 927044 - protein, 165 aa, Homo sapiens
MAKEKTTWGPLKLILHQSLIFNPHQQQVSSFKEMEEMQLTYILGRCPTINRACEQNIPLPSLPLQPLKDGYVTIITHDCQQKGVRAAKEEEGKHLDGTAQERNGLLLGQQVNQHLGYNDEGVANLRAREDGKEEVHGDMKGPVQDNGGNDDCIGAQSEQKGFEMI

SEQ ID NO: 927045 - protein, 313 aa, Homo sapiens
MEQVNKTVVREFVVLGFSSLARLQQLLFVIFLLLYLFTLGTNAIIISTIVLDRALHTPMYFFLAILSCSEICYTFVIVPKMLVDLLSQKKTISFLGCAIQMFSFLFFGSSHSFLLAAMGYDRYMAICNPLRYSVLMGHGVCMGLMAAACACGFTVSLVTTSLVFHLPFHSSNQLHHFFCDISPVLKLASQHSGFSQLVIFMLGVFALVIPLLLILVSYIRIISAILKIPSSVGRYKTFSTCASHLIVVTVHYSCASFIYLRPKTNYTSSQDTLISVSYTILTPLFNPMIYSLRNKEFKSALRRTIGQTFYPLS

SEQ ID NO: 927046 - protein, 328 aa, Homo sapiens
MDSSKLDSGKGLHINLVPNKQNQTLTIVDTRIGMTKTDLINNLGTVTKSGTKAFMEALQADADISMIGHFGVGFYSAYLVAKKVTVISKHNNDEQYTWESSAGGSFTFIGYPITLFVEKEHDKEVRDDEAEEKEDKEEENEKEEKESEDKPEIEDVGSDEEEEEKKDGDKKNKKIKEKYIDQEKLNKTKPIWTRNPDDITNEDIYGWTANMERIMKAQVLRDNSTMGYMAAKKHLEINPDHSIIETLRQKAEADKYKSVQDLVVLLYKTALLSSGFGLEDPQTHANRIYRMIKLGVGIDENDPTADDTAEEMSPLEGDNDTSCMEETD

SEQ ID NO: 927047 - protein, 264 aa, Homo sapiens
MVPQTVNDGVEEWNNDSVENRYHFVGIVGIHEFGTGIGEKCHGIEENYDGQVGGTGGECLLAALSRRDPEDGGKDSSWITNGYIAVKGHDSKKDVLSADKGHKKVKLSHAAIEGNTLVMTEEVNKHLGADDCDIPHLQEGEVAQEEVHGLMQLPITAVDGWVEEWYNDSVEHRDNLVVVEGVHGPGPCIGEESGGVVDNNHCQMSGTSGKGFVASPGRRDPQDGCNDGSDNWEIKRSFIMELKKPLPQEAAARRVARLEGMRLG

SEQ ID NO: 927048 - protein, 257 aa, Homo sapiens
MHAGTCEDVPKGVHWEDLMDLVGPTERQCGNHHNLGKQDKETEEAGTCRELSTEPGGHDHLIAKRVADGNVSVNGHGAIDDRVEKGSKNCKHQCNSCVQNRWESGRETQVHEGYTAIEHQKDTKMGGTGRKGLLAAFNRGNPQDYSDDSDIRKGNNQDREYNGHSMDHILNQNHGRVCTGQAQHRFKITEDLVDLVGSTEGQCGNPCNLWEQHKKAKDAGPHRELNTEPGGHDGWVAERVTDGNVPINGHGGQQNPL

SEQ ID NO: 927049 - protein, 257 aa, Homo sapiens
MAYDRYLAICRPLHYPIIMTTTLCAKMAAACWTCGFLCPISEVILASQLPFCAYNEIQHIFCDFPPLLSLACKDTSANILVDFAINAFIILITFFFIMISYARIIGAVLKIKTASGRKKAFSTCASHLAVVLIFFGSIIFMYVRLKKSYSLTLDRTLAIVYSVLTPMVNPIIYRVGLDDIYVPSVSLSSPFQGQRRAKQRIMVKARFLVIGKDSCKLKHFKNGENCLMGQEASSAVNPGRGLMPICGDMDSFMSEKI

SEQ ID NO: 927050 - protein, 174 aa, Homo sapiens
MVSKYKNNVLLKGLEAINDYHFSIINSLLINDLKLNSTRRDEYDKIQIADLMEEKFPGDAAKGKTSSKKRKQRKVGPTTPLATTDKKFTAEEGEETPIAQKRKNPTKEKAGTKRSKISEEQTQPPCPAGAGMSTAMGIPHLPRPHHQLHPTLPQLRQSSRWEENPNNVPALTST

SEQ ID NO: 927051 - protein, 135 aa, Homo sapiens
MRIPRRATSREVLQQSSDSSPRGKGRVRTSLRGAMPGFKAWDEGECVYFEKAGFGNTWVVKGSFSGVTEVDISEFPSEVSHEPFTLEKQPLIFTKSMKSRYYSHIRNGKTKAQRILRGNAFNFSPFSIVLAVGLS

SEQ ID NO: 927052 - protein, 135 aa, Homo sapiens
MCNNMILKCLPILKVTSVEVCHQFPVPGLPCGPLCLCAHTCQADDCCCYSLWLSQEWMQIHLVFSPCSQKAIAFFHVDCEGLGTTVCAALRKLTRFWAQLQGDTSDSLERQKSAGDGKDLPKQDTTPRVDKGKDR

SEQ ID NO: 927053 - protein, 139 aa, Homo sapiens
MLIGMDILSKLHAFSLFDDRAKAHSYNLVRTLPFGCRSVPTNSGCWHRNRWCPSGLVKAHDLLLTCDEAGTQSSSQTAGSVAAFTADSITTPPQEEQVIKGSKNSSVACSTYYVAGCVLGAEDTKKNHKNAKKKSKSQT

SEQ ID NO: 927054 - protein, 170 aa, Homo sapiens
MESVMERHLPGILLLTTLSRGVTRKEQAAIFAVLQRLLVIPRQRGLEWTSSKLQQTDLQKRGLMVRRKTNKQSHSINININIKDPHTKTPSKNHHPQRSKVDKSMKMRKNQGKNTENSKNQNASTPPNDRKSSPGRAQNWMENEIDELTEVGFGRRVITNSSELKEHVLT

SEQ ID NO: 927055 - protein, 156 aa, Homo sapiens
MHQYSRAALAQELPVPAHYLKNEVQYFIQFTFKFWILLCLVEKKVGETRRGHKKKIQGNRTFMLSSPDTGSKTEIPISEFIGKCPWHQNLSPDTTYLDNKFLKLNCERPQYLINNLGFCQLFRCYREEQASFALIYVLPSDFSSREYTGTFRLEGS

SEQ ID NO: 927056 - protein, 144 aa, Homo sapiens
MSTGHGEGPGAGLWPGSLAAGSSRSCPVQSVGRAPGALYLQEHIPVMPAAYEKPVKPVEKDSLWPHDSLQDSEGTGRGSCLESQGDAKQAEGLKEGAEENDHAMEKHEEDLGKAGDLLLASCFHMKMPGCKTEKKEAHAEMASE

SEQ ID NO: 927057 - protein, 140 aa, Homo sapiens
MLCARQPPAGGAVESQKAGSLERNAALLPPSDLDGIIPAGEMGLMLPGIHQKYANCTISFSCLRLHSIEDSVVQVPNDPLLTWPWVPGQTLSSCPSTDFRASPCRATGPAGILSHNPSRAPQTWEGRAAPIFFPVMLPQD

SEQ ID NO: 927058 - protein, 237 aa, Homo sapiens
MVGWCVELLQAFFLVVDDITDSSLTHWGQICWYQKLGVGLDAVNDAMLLEACIYCLLKLCCWEQPYYLNLIELFLQSSYQTEIGQTLDPITAPPGQCGSSQIQGKELQIVKYKTVFYSFYLPIAAAMHMAGIDGEKAHTNAKKILLEMGEFFKIQDDHFDLFGDSTVTDKGQKEAKKVVQEKALYEELDLLAVFLQYEDDSYSHSHIMGLIEQYAMPLLPAIFLGLACKIYKRKNMY

SEQ ID NO: 927059 - protein, 147 aa, Homo sapiens
MPSSLCYIPKSGTLQVSPQGPSSFRPPTLSSLRVSHDREETAFLGDLKGCSELKNFQELINQSALVHPRVDVWWYCGGPLLGTLPNNWRGTCTLVQLTIPFTLAFHQPEGKKIRHHKVREASYGSFDSHIYLDTIGVSRGTADQFKA

SEQ ID NO: 927060 - protein, 149 aa, Homo sapiens
MKMANESAATHPSSLAHQANGLILPGLESCAPYENLMPDDLRWNSFILNHPPAGPRCLWKHCLPQNQSLGAKKDGDCWDSPFVSLEACSLGNFVGTGWDLVSFVHCYVHSTNKGTWHIGSLTQKAFVDERMNESFVYYWVYAHHFINSS

SEQ ID NO: 927061 - protein, 151 aa, Homo sapiens
MKLMFLKSFSSNSHDSIHVFWEASGSFYLQGKMKRRELLLTGQDEVGAGTSRGKNKRLLKMTLEERRKEYLRDYIPLNSILSWKEEMKGKGQNDGPTAAGQLEFLGGPLHTRFAWVSPAEAAEQQRLLPVPSSGSFVPEGHLPDASRSSPV

SEQ ID NO: 927062 - protein, 135 aa, Homo sapiens
MASSDPCLLVTTSLYNALPCCPCILHKQQNTVEVTKNHLRSTSILKMEKEATFSSTYELQEKRINSVENIHKDLGRSKPIISNQEFCFWCHQKFGALKYRRVNLYALTFPHDLTEIKVNKHRGKKKPKQTNKQNM

SEQ ID NO: 927063 - protein, 159 aa, Homo sapiens
MSSPSKLYFLRNCMADCMKIGWSFRDTQGQKAGSLSLGESKEHRQWKHLPFTECLLNAREMKQLDRDHPTRKVAEPGLTPKSFIPWSCSTNEARHESDCGQHSKAKHSAVGIFWGTLSWDTYPAAAGGPDLKTKRSWSEGARVILSLAGKGQAYGSHGQ

SEQ ID NO: 927064 - protein, 310 aa, Homo sapiens
MVVGESLRPWSSFLATLQPRNGSSCAGGPPPGECRGSVKTLAVTSAAPDSLVLVCLLTAAAPTCVLCTRMLLPVQLLAQARQRQYLEFSLPRRTHLWDQGLTPPVAVPGSYWCPLALSAKQPMLVETVALLRTTSCWQLHVRPHRSPWRWNFLSGRRGAFPLGQPALAIKMVIALTGSSAGQPSRASMVLLQSSGFPEILDANKQPAEAVSATEPVTFNPQKEESDCLQSNEMVLQFLAFSRVAQDCRGTSWPKTVYFTFQFYRFPPATTPRLQLVQLDEAGQPSSGALTHILVPVSRDGTFDAEVTFCF

SEQ ID NO: 927065 - protein, 234 aa, Homo sapiens
MLGKPSPCLAPCPYLCSRRDTCGCADVTVQVFNLMWAHDTARSGAGGPRPRFPFSKYFPGHVLGPVHRCPLLTPHHWESSTALTQKRNTVVLEVARQTCSGLNDQVPQKHGLVWVVPKPDPCLFSHTRFTLPPAEVESKGLTGYFSKMRWLVWNWVQPGTFYFGWLAVEKCWISYNSNKNIAEFKGCPKGLQTIFGELLLYRQPCICVQRHEQECSVLTTFTLIEIRKQFKVHQ

SEQ ID NO: 927066 - protein, 139 aa, Homo sapiens
MSQACKIALWATLSRYFPRPPSSYVPMVCYVGIRVPWWFAAPIDPSSKFPPLTLPSPPTGPVEGVCFAGGKPAHLGCLDSSELPAGKAKSAGLQRLWPPLPLGAQALGDQGFVPEPLAGVGGVPAGRPCPVRKDGSGSG

SEQ ID NO: 927067 - protein, 267 aa, Homo sapiens
MSISLTSDAPRLLLWLRTQIPKALGSHNNTCPNVLGTDVNSGAAGQRGECDTSPSSGGHSPVMCLGSSAKKHEAIILVSLYRSQAPNPESQMGHREPEEIMKGQKNKAQASWRLCGQDREIRAEYLPPEIKGDDQFKGFLQRSVVNGDGDSDDYGDDSDGYGSDDSDDGDGDGGVVNGDGDSDGDDDGDGDDGGVVNGDGDGDDGSGDDDGDGDDGVVNGDGDGDDGSGDDDGDGDDGGVVNDDGDDDGDDGSGDDDGDGDDSGGKW

SEQ ID NO: 927068 - protein, 140 aa, Homo sapiens
MNFCFFWWEGECGGAVAIPTNVPLAHFLPNVEQPSFDIHIWEGYSLSRRDATAASSMVYCLTGPEDISQRRDFSPEPFSFLLCGPVTLQANGESPLPPAWAFPSPLSCVGAVPSWRSCALSLLVWWSILSSSFLRHDTWK

SEQ ID NO: 927069 - protein, 168 aa, Homo sapiens
MFLPLDSEARNTMVALIAVALALLALTTGPCESISCYGSTEETSSSTALRASKVFLEERQNSATRRNKQTILCFVAGKEGLTFTTQWQRKCDLSSLLKASRFLFLADWKEEPKEAQNWLWAGNLRPFTYLAENLLEALEGPRDIQLSVGVCHSKDLLNRNLAFNKIYR

SEQ ID NO: 927070 - protein, 161 aa, Homo sapiens
MQLQQRSQLISQGALELGWPLRLGSQGLYVLSLISYWMWAALGCSLLCSTIQLFPCREELAMLICEEVEADPQDVSLGMFVELCNLVDAVNVSVLQPPRLQEVWQIHILNYMVPNRISDSDSLVNMATSELGSGDKSLFLSWPWNFDLENGDGELWMTKDF

SEQ ID NO: 927071 - protein, 140 aa, Homo sapiens
MVQQHLQNPEMVHRILKWTITWKHCCRGTSALRGDWSQLLPTPPFQNSKSQVLFLLEKPGAKFHGPCPQPEDRSLGQKGKPSPKPERPQDLIGEFVFHGLVSNWSVLFQIFMQNFLGIKNNNDDGGDDDDDDKNSPCLGL

SEQ ID NO: 927072 - protein, 145 aa, Homo sapiens
MEGRAWGPQMLCVVPAVAGPEGQVLWSPDSMCDVGGGSSSGRPTLRTPSSAHRHQQWWWQSGCAGPQSPGWYMWAGAGSSNVSVDRQVPLLLGGAYGHKQHVGWSCPYTARQHSHILVAAHRVGLYPNHCTVDAGPRTDFFMSTQ

SEQ ID NO: 927073 - protein, 141 aa, Homo sapiens
MTPRCLRQSRESVPPPKAPVGRSSVSLSYLRKTPTDNAGPLWTAVDRNNKLPADNRYLSGNSQGDPNQLPIFLNHVRMNDAAKINKNVPLIYVDSCMKLKGPGHRVCLENKKFSKLNNKITHNSIKNEAQDLNNHFTKEKI

SEQ ID NO: 927074 - protein, 175 aa, Homo sapiens
MDSIWARQPSPEDMQPLTYAVVIRFPPSIHGRYEVYIHAPLSAKGLHLGASEVPQRKNRPQKGRRPAFRLPVVPGAFLPPLHQETPQQKRAERDQCYPEKEPQSSTDMIPGFDKCHLLKEALSVDQERTLTPLTHYTSPWKHSSHGRSFSLSPLNLIASGAASVHSILIASSSSH

SEQ ID NO: 927075 - protein, 170 aa, Homo sapiens [sequence omitted]

SEQ ID NO: 927076 - protein, 205 aa, Homo sapiens
MSLTKVEMFGCSRLASAQRGALARTHLWDSQLEKCMNRCTPRPGSSPEGLHPSWCLLCYLATNLFRLPMWLQLLSDVIQIHGLPSLDGSCGNASYQPSPGTQAAWECGLPLPPTTWSARRDCWLFLRIPAPCFQSPDPWERLCRRGSCCISKAPPAGSLTSTPPPPPHALDGEMTFDDDVCVCGAGSVLEPDKQCISNSTAFESL

SEQ ID NO: 927077 - protein, 180 aa, Homo sapiens
MSRHRDSLLFKNGTWSNSNKRGAGKEDPVGKVHVEIGEKVLLNSAQEKINSMLKSVTQEFDIGSPVCAEEMGQMSAPNDKAQGLCVKYLDSQSIWLVSLVEEKKLNWLVNIVCSSDDIASFLYNFLFNYSVILQTFVGYLLCLGTMSRRWGYNSDKTDVALSPVELTVLCGRVLVSQLKH

SEQ ID NO: 927078 - protein, 124 aa, Homo sapiens
MVHCRTSQPVPQMGSMWPRNNDALIPWSSLGWPSMVAPPPCTPVCHDSVIFCVMTCKRLEHTTVPLVHRSRWALFSFQAKRGVEVGELSPSIPCQPTVSLGLHVHVPPSSRALWDVGEYALIPG

SEQ ID NO: 927079 - protein, 137 aa, Homo sapiens
MNGGEGGVLAAAWEAAQRELLEAAGVNKCRVAGEMDELINGWLLTNSHCMGMLHSLVAGSASSMEGLGICQVTRGSNLHFLNFSVELGRVKGAAGLAVHQAIGNHRMSINPDDRLQNCKGIALCQITNIYASLLDIA

SEQ ID NO: 927080 - protein, 264 aa, Homo sapiens
MLFAILPFVFSIAAEEKTSKAASFPQLPLDCRGGPRDGPSNLQGSPGPCLASLHLPLSPGLPDSMELAKNKSKKRRNRTTFSTFQLEELEKVFQKTHYPDVYAREQLALRTDLTEARVQVWFQNRRAKWRKRERYGKIQEGRNPFTAAYDISVLPRTDSHPQLQNSLWASPGSGSPGGPCLVSPEGIPSPCMSPYSHPHGSVAGFMGVPAPSAAHPGIYSIHGFPPTLGGHSFEPSSDGDYKSPSLVSLRVKPKEPPGLLNWTT

SEQ ID NO: 927081 - protein, 180 aa, Homo sapiens
MSTGPKVERSNKQERDSPWALHRIRRWQTESSPELRITVPDTLPGPPLTPIHLKNCPYVTYLGTRTILSVLTARNFLSASTLCFVTLSQFHHGKLLGTLDGTDQEIADFTLSSLRLMTHLNYYVPGPGTTAGHLALPTGDRQIMTIASGHFSKRTGIPGTMGAECGVQGSTLCSTSGLTF

SEQ ID NO: 927082 - protein, 176 aa, Homo sapiens
MAALSSTTTTTPTATTASTSSITITTITSSNTIITTTFSITIITTTFSITITTTFSITITTTTSSVIIIITILPNTSSPPTSYHHHQHYHFQHIAMITIPTINTAITITNIIIMITTIITIIIIPITSKGPPKEGNTLSDLSSQPPEGGTPLASPIPWQQRLPLVREEFWELKARP

SEQ ID NO: 927083 - protein, 146 aa, Homo sapiens
MANSTGKEEERKKANLKQGMNKILFAQSSSMSICLSFPPRTLPLQFGAFCEEGGILELPLEPKEAHRVLSTTTGGSDLIEEEKVMCEMRNEHDQLVKDGTEVKEFPSRRNGLLQRNLVHKGAQEVPEAEKRPAWLEQNAERKLTER

SEQ ID NO: 927084 - protein, 156 aa, Homo sapiens
MRICGLDYSKPCRKPNRNNPSFTGDAETPASGVHMLLVTHWIRLSGSGIQDYESLFCINISDILQNQCFWNVTVLIMAVSIYILTNGIQGFTFFHILTNTYYLLTFNNSHPNRNNKECAGEIASKEVKAPLCRPWMIVKEAIRGLSLLTAMKIIGP

SEQ ID NO: 927085 - protein, 154 aa, Homo sapiens
MRFCTPYPESNRGFETEETGIKVARVTFQIRPLQPCGIPGSLWRENLHGTSLAAVRGYLEGFRNTVWESFMEEVGHEQPFKEERDLGGEEGQISGRETELTKPKKQHYLGGVHRRSRSVGGCDQTRIEPFSSAPFSSSPPAPLPVIHGLSGVTG

SEQ ID NO: 927086 - protein, 149 aa, Homo sapiens
MTAKNAFSPPPLQVPGHNSEVSPSSLSSHPLLKVGLQLQTTNNPAPPPRRLAPSSPSVLSHLGEGKLASSLLRTACEVSRIPNTRAKHLDAWKEASGKPKSMNKQAIYLEVKKQEEEEERMEEKEKRMCLEKEEKEKEAEKCGQSSRYF

SEQ ID NO: 927087 - protein, 120 aa, Homo sapiens
MLPRKIIWIPIRPLHNWALFKILFQLCPGACSPRGSPYTFPSKPPCRSVGQQINLSSAIDPALPPGPQTQELGVVEFAPVSYDQGRAMDVGEKPSTYVNDMSVCGEVVDSPSGATRLLDV

SEQ ID NO: 927088 - protein, 143 aa, Homo sapiens
MQVCGSCVPLGTGSLRAGEMVPPRPCSGKPGLAIQQHCGAAAWEGIDIFARGVDGGGGERCPVKPTYEIILDYPVGSKSNNNHLHKRQKGRHRWEAVEHVKMDAEITVMLPQAKERLMPPEAGRSKEGSSPRAFAGSPDLLTP

SEQ ID NO: 927089 - protein, 146 aa, Homo sapiens
MVCTEGSDHGDIGATPGPGICDFSLLDLEERGLAAGTAGEQQAPLQQQQEPQGHPAGGPGMACVLWPPQMPGSAIPEQGGLQVHTVQRGSLSQREDLQTSAVALRRPLAPGPEALSGCSLEMAEANPLAARGRSTAGWNRKGPESV

SEQ ID NO: 927090 - protein, 329 aa, Homo sapiens
MTITVPISAAGHVVIAGITDYLLLPILYSLCLQQSPRQFNGIVVSPGGSVPPSGTKSSRPAELNVVGTGSKNFTIGSLGVMFLTTQRGPSTYLSSKFLCHRFSNYASSKSLTIQPNHWLQPVNPHIIAHLAISPSLQCAQPGALIEVLPTGIFPFTTVLQGCPRKRPYCYSCPLSGMEKKAFAKSMAVYQVPGNVYTWYSSCNWSHHLVKLTIIYCHSPRSICLLHKLNGRSLNLNRDGANVGVLPAAKYVYANYAFWHWGNDHRMNLGTHWTHSALPPCSSAPCEVEEAAAQLWLKVRKLPLGVQLRFSLENFQALRSLKRHKQGKGP

SEQ ID NO: 927091 - protein, 134 aa, Homo sapiens
MSEAYKKVCLPGVPDSRSWLEVAGSDSHLQEERKEKARIYSGKEKQLLRPQKQAAKNMEKTDRYAEVLKTHGLLMQNVRLQRQGASMPPSWISPHHRYIFTRPLRSSSPLSSTFRSDLCCLFIVLVLLCAGDER

SEQ ID NO: 927092 - protein, 292 aa, Homo sapiens
MAPKRQSPLPLQKKKPRPPPALGLEETSASAGLPKKGEKEQQEAIEHIDEVQNEIDRLNEQDSEEILKVEQKYNKLRQPFFQKRSELIAKIPNFGVTTFVNHPQVSSLLGEEDEEALHYLTKVEVTEFEDIKSGYRIDFYFDENPYFENKVFSKEFHLNESGDPSSKSTKIKWKSGKDVTKRSSQTQNKASRKRQHEEPESFFTWFTDHSDAGADELEEVIKDDIWPNPLQYYLVPDMDDEEGGEDDDDDDDDGDEGEEELEDIDEGDEDEGEEDEDDDEGEEGEEDEGEDD

SEQ ID NO: 927093 - protein, 147 aa, Homo sapiens [sequence omitted]

SEQ ID NO: 927094 - protein, 242 aa, Homo sapiens
MAGSLAAVGLGPHLLLFHPEPFGDKPTWFEPQLLLLLLLSSVTFGKLLNLSESQFTYLQNGGCPLVAAAPSHVALRPGTGIPDKGWSAQRQHWTLYLPPPPDCTEVCSVSQATLRVGGGPGRQPGVLAWRKCEGRLGPACPLARELALETSGWRKWAFGGTAGCQLPAPHPTGPCLASPGALLGCPLQAQVQAKAGCAGGAQHLSGDEQPRGALLARTLPRPHEGEEVAEIQTQSADSQTCV

SEQ ID NO: 927095 - protein, 344 aa, Homo sapiens
MEACLKEELPSPVELEESLRNGVLLAKLGHCFAPSVVPLKKIYDVEQLRYQATGLHFRHTDNINFWLSAIAHIGLPSTFFPETTDIYDKKNMPRVVYCIHALSLFLFRLGLAPQIHDLYGKVKFTAEELSNMASELAKYGLQLPAFSKIGGILANELSVDEAAVHAAVLAINEAVERGVVEDTLAALQNPSALLENLREPLAAVYQEMLAQAKMEKAANARNHDDRESQDIYDHYLTQAEIQGNINHVNVHGALEVVDDALERQSPEALLKALQDPALALRGVRRDFADWYLEQLNSDREQKAQELGLVELLEKEEVQAGVAAANTKGDQEQAMLRQNAVACGH

SEQ ID NO: 927096 - protein, 489 aa, Homo sapiens
MSSPNPEDVPRRPEPEPSSSNKKKKKRKWLRQEASIQALTRAGHGALQAGQNHEALNNFQRAFLLASKAPQTRDTPVLQACAFNLGAAYVETGDPARGLELLLRAHPEEKAQGRRHGDQCFNVALAYHALGELPQALAWYHRALGHYQPQGDQGEAWAKMGACYQALGQPELAAHCLQEASQAYAQERQLRAAALALGAAAGCMLKSGRHRVGEVVQVLEKSRRLAERSTERRLLGHLYNDLGLGYSQLQLFPLAVEAFLQALPLCWVPGEQATVLRNLGMAHNALGNYQEAREFHQKAADLHGSVGQRWEQGRSFGSLAFALSQLGDHKAARDNYLHALQAARDSGDMKGQWQACEGLGAAAARLGQYDQALKYYKEALAQCQKEPDSVRERLVAKLADTVRTRLAQVGLVQTHTLTSAPGRLQAPGGASQAEGTPAKAGSSTAGVQHRSSSGWEDEEFEEGHQKKKEERSANVPVRAGPGRPERELM

SEQ ID NO: 927097 - protein, 397 aa, Homo sapiens
MNKQIQGRTGACSQRDTATLIKTESSDVIHLIMQYLKENGLHRALATLQEETTVSLNAVDSIESFVADINSGHWDTVLQAIQSLKLPDKTLIDLYEQIVLELIELPVKDVEEEKFPTQLSRHIKFGQKSQVECARFSPDGHYLVTGSVDGLTEVWNFTTGKIRKDLKYQAQDNFMMMDDAVLCMCFSRDTEMLATGAQDGKIKVWKIQSRQYLRRYERAHSKGVTCLSFSKDSSQILSASFDQTIRIHGLKSGKTLKEFCSHSSFVNKATFTQDGHYIISASSDGTVKIWNMKTTECSDTFKSLGSTAGTDITVNSVILLPKNPEHFVVCNRSNTVVIMNMQGQIVRNFSSGKREATGKLERTLTVHEKDVIGIAHHPHQNLIATYSEDGLLKLWKP

SEQ ID NO: 927098 - protein, 462 aa, Homo sapiens
MELRQVYLTRAHSINSPPFSAENHKIPGSCPWFTNSTNIYKAPLSTMSCATMGSGEPAEENKTARVADLGADTLSGIQMFNKEDTIYNGDHFPKAQTQPISPEWTMHCSCLAEGIPANPGNWISGLAFPDWAYKAESSPGSRQIQLWHFILELLQKEEFRHVIAWQQGEYGEFVIKDPDEVARLWGRRKCKPQMNYDKLSRALRYYYNKRILHKTKGKRFTYKFNFSKLIVVNYPLWEVRAPPSPHLLLGAPALCRPALVPVGVQSELLHSMLFAHQAMVEQLTGQQTPRGPPETSGDKKGSSSSVYPNFMEEGSMAFTPPLSCWGPKLCTPGSAAEAMGVGCSRACWDSLGLDLALPQAPAGWAFAAIWGASKASCLVLPPSLLPSRPLCPPTGPVSRGPSCLLSRQSSSSQGLLSQTSCSQDLGASQGPGIFQGFLSWQGWDRVRDPGKWGGETLAFSAL

SEQ ID NO: 927099 - protein, 152 aa, Homo sapiens
MSLSDYGRYQTPVRPLLGIDFTEKEAFVAHSPVTFLAVVPPAETVQCSGNSVLSSKARRPKRLRIQPALKSNKPQDQNLYLIFDCPGFQPLQPPPGNSDCDNKIKLLHVRCLKWILHIAGIIVFSRRSGEEEAKDKVQVPGWGHCLRMGTQK

SEQ ID NO: 927100 - protein, 223 aa, Homo sapiens
MGKKQSRKTGNSKNQSASPPPKECSSSPAMEQSWMENDFDKLTEEGFRRSNNSKLKKEVRTNGKEVKNFEKKLDEWITRITNAEKSLKDLMELKTTARELHDECTSLSNQCNQLEERLSVMEDEMNEMKHEEKFREKRIKRNEQSLQEIWDYVKRQNLCLIGVPESDRENGNKLENTAGYYPGEFPQSSKAGQHSNSGNTENTTKILLEKSNSKTHDCQIYQS

SEQ ID NO: 927101 - protein, 149 aa, Homo sapiens
MGKERGAEKRMELRSREEPSLAHPVVVIKQACAPFPGPNQVTVHHTRLLKIYPRGQGSKSHRGPKCDLRESKGLPRELDQTGMPGPAYNPGTLAVSLPLSQCNASLTCVISNHEEQKTATSDLGGNVFNSKNCPARAGSSSGGTPFPED

SEQ ID NO: 927102 - protein, 144 aa, Homo sapiens
MAPRFCGCNKWSNRDDIYWDGKTVWEACLGSLKAKLEIPVIRPSGADSCDYTELTQITQDNSHLKTLKLDDVCKVPFAIRLYWHMVQELVQSHNLRKKMRVDNEDRSSGCKPEDIPEYRGNENQKHNELPVHTHSEGNNQRNGQ

SEQ ID NO: 927103 - protein, 151 aa, Homo sapiens
MDVHTESPSKGHQHQSPKIDKSMKMRKNQSKKAENSKNQNASSPPKDHNSLPTREHNWMENEFDKLTEVGFRRWVIINSSKLKEHVLSQCKEAKNMEKSSTGQHSNSGNTENNTKILPEKNNSKTHNRQITKVEMKEKMLRAAREKEESGG

SEQ ID NO: 927104 - protein, 135 aa, Homo sapiens
MYQHEHRQTYLPVGSWVARNTLCPQLGPLADCSGGRTKAKESYIQIYWGKVLFPGLYPGTCTVSLLPGCENTLSKQLSSVLGSPKVLLPLTWSPIRSQLYFGLWKALKFLLLWEDMSGTSPTLYSALKFYFTERH

SEQ ID NO: 927105 - protein, 182 aa, Homo sapiens
MPAAPPWRSHFFWLLGPGLCPALPLRPRSSAGWLGSPKPEHPSYLLQPKAIFCLPLEVHFLLNTEKILLGSLPYTEKQTELGVEPKNLEPRQMQGPAETTQIVAYTRTILQSLPIMARVVGGDDAAHAFPPVGTFPSWPVVVGGDDAAHAFPPVGTFPSWPMAVGSDGAAQSFLSPTPPPFP

SEQ ID NO: 927106 - protein, 214 aa, Homo sapiens
MRCPSGDVCPLGNWTSGFGAQDLWNGHPEAEDPENSQEMQQKRRSWMWDSLGKICSTLCNCSLKALVSVSTKYINIIIISIQGAHLKIRCSCFELIKISVTKVGVQPPTQPLLHLTGKKKKKKKKKKKKKKKKKKKEEEEEEEEEEEEEEEEEEEEGGGTAPLAGSNHSHELTVHHGGTRLVTSPTLALILTITLRGAGVPKPRATDWYQSLAC

SEQ ID NO: 927107 - protein, 118 aa, Homo sapiens
MPGTGNAVVNPFLHGASVEVGGSKEKIKTKYVHFCSYVGRVDEPGLAQYRMTAGLEHYAKQFPPASQNAQLSSVEAEYAGGLATMQVVKPEGSLSTKFKKAVLQDFPRSSSYRLALSP

SEQ ID NO: 927108 - protein, 587 aa, Homo sapiens
MAAAVAVAAASRRQSCYLCDLPRMPWAMIWDFTEPVCRGCVNYEGADRVEFVIETARQLKRAHGCFPEGRSPPGAAASAAAKPPPLSAKDILLQQQQQLGHGGPEAAPRAPQALERYPLAAAAERPPRLGSDFGSSRPAASLAQPPTPQPPPVNGILVPNGFSKLEEPPELNRQSPNPRRGHAVPPTLVPLMNGSATPLPTALGLGGRAAASLAAVSGTAAASLGSAQPTDLGAHKRPASVSSSAAVEHEQREAAAKEKQPPPPAHRGPADSLSTAAGAAELSAEGAGKSRGSGEQDWVNRPKTVRDTLLALHQHGHSGPFESKFKKEPALTAGRLLGFEANGANGSKAVARTARKRKPSPEPEGEVGPPKINGEAQPWLSTSTEGLKIPMTPTSSFVSPPPPTASPHSNRTTPPEAAQNGQSPMAALILVADNAGGSHASKDANQVHSTTRRNSNSPPSPSSMNQRRLGPREVGGQGAGNTGGLEPVHPASLPDSSLATSAPLCCTLCHERLEDTHFVQCPSVPSHKFCFPCSRQSIKQQGASGEVYCPSGEKCPLVGSNVPWAFMQGEIATILAGDVKVKKERDS

SEQ ID NO: 927109 - protein, 157 aa, Homo sapiens
MRGACGNPDSKSAGPGWGLRVCVFNKLLGHAGAAGLSTTLSVGSLGGGIMISLSAGLGLWALGQRQGGNLSCLAEMSESAESGGGGHAQRYWTHFCVLLNPWKSESEAAVCKPRCLLESALGSTSARGEGCRIGEKERLNHETGATEASPNPWGALD

SEQ ID NO: 927110 - protein, 143 aa, Homo sapiens
MRICFMLFGMENPHPLSPKKNICEAISLSFKGHGGKRYQRHLTLLDQIREGNEEFHYLVSRALWRLEPPDALVEAVRRSSALLLPGCRPPLPVQEAHRYARAVGLLKASQSPETCSSGAAFPTWLAVPDLHMKPALGGNGTSR

SEQ ID NO: 927111 - protein, 144 aa, Homo sapiens
MHSGTCQYHVDGIVPDSHSNPSIPPGIGGDVFSLTIVFTRIVGYKMEAQCFLLRVPVEQTCKRLLGLETLQTREGLLMCPQEGKGRRSTVVQGGVSHASLKKSFLKCKKAGERHISQGLGPVRGQTRGWRTCIAGSARHLVASG

SEQ ID NO: 927112 - protein, 140 aa, Homo sapiens
MNACKICAFKKHLFSGRMRLTLGVRQQSSTFLAPGTRFRGRQFFHGAGKVGVAADLIGGGAQVVRQSKAAADLIGGGAQVIMPTRLQLTFSCAAWFLTGHGGVAVHGPGVRDPWWNSWEEEHRWGVMMLGEGMKGMKLDL

SEQ ID NO: 927113 - protein, 189 aa, Homo sapiens
MWYAHVLTTVPSDGKDKDRIEEESTGCGEGSSMSLFLKSPQAAGEGSVFAWRYCPAYNLPSCKTVVHPLHSNSQISVHIEAKESGDANNLMRKNTSKEEYAYLSGFCVQVISSTKTSPDYVLSLEPMLVRSMTGASAACEWWQRFLTQSPGIHMDDLERASGLGHVNKGTCLFYLVFFKSIQAWNMFSL

SEQ ID NO: 927114 - protein, 130 aa, Homo sapiens
MHYKLCDSLLLLFITCIPEIHQKPGRDNQVLQDQELNRGGQSGAPSLGVKPKSTDLVSNGEQNSVHQRREDAAQRRRTFSSWCLQIGNLGFSFFPFDLLPTLPFYFFKNFFGSLAGKDLRGQCPSLLVPP

SEQ ID NO: 927115 - protein, 139 aa, Homo sapiens
MENCCRCPKQKAGGKISTRTSKRWYHSQIPRRLHSTKHLRTLPLFHSVLPRGVRKNPESTVSSGESGSQGGEVRRLGRGGGQNRGGTVWRCGARGKPCFPAFWLQIKASAGAGIKSKPKDTWVRPTGALCTGILGCPIV

SEQ ID NO: 927116 - protein, 450 aa, Homo sapiens
MSIQAPPRLLELAGQSLLRDQALSISAMEELPRVLYLPLFMEAFSRRHFQTLTVMVQAWPFTCLPLGSLMKTLHLETLKALLEGLHMLLTQKDRPRRWKLQVLDLRDVDENFWARWPGAWALSCFPETTSKRQTAEDCPRMGEHQPLKVFIDICLKEIPQDECLRYLFQWVYQRRGLVHLCCSKLVNYLTPIKYLRKSLKIIYLNSIQELEIRNMSWSRLIRKLRCYLKEMKNLRKLVFSRCHHYTSDNELEGRLVAKFSSVFLRLEHLQLLKIKLITFFSGHLEQLIRCLQNPLENLELTYGYLLEEDMKCLSQYPSLGYLKHLNLSYVLLFRISLEPLGALLEKIAASLKTLILEGCQIHYSQLSAILPGLSRCSQLTTFYFGSNCMSIDALKDLLRHTSGLSKLSLETYPAPEESLNSLVRVNWEIFTPLRAELMYQRWSLDAPWYE

SEQ ID NO: 927117 - protein, 319 aa, Homo sapiens
MSIVGTENVGCVGPQDILVPIVLGWMSLQAPPRLLELAEQSLLRDRALAIPTLEELPRELFPPLFMEAFTRRCCETLTTMVQAWPFTCLPLGSLMKSCNLEIFRAVLEGLDALLAQKVRPRRWKLQVLDLRNVDENFWGIWSGASALSPEALSKRRTAGNCPRPGGQQPLMVILDLCFKNGTLDECLTHFLEWGKQRKGLLHVCCKELQIFGIAIHRIIEVLNTVELDCIQEVQVCCPWELSILIRFAPYLGQMRNLRKLVLFNIHVSACIPLDRKEQFVIQFTSQFLKLDYFQKLYMHSVSFLEGHLDQLLRPPWRQS

SEQ ID NO: 927118 - protein, 163 aa, Homo sapiens
MEERRKFTRDTDKTPQSIYRKEYIPFPDHRPDQISRWYGKRKVEGLPYKHLITHHQEPPHRYLISTYDDHYNRHGYNPGLPPLRTWNGQKLLWLPEKSDFPLLAPPTNYGLYEQLKQRQLTPKAGLKQSTYTSSYPRPPLCAMSWREHAVPVPPHRLHPFPHF

SEQ ID NO: 927119 - protein, 525 aa, Homo sapiens
MHKEIPALTAQSAGGKQKLRNILETLSKCLGELWYSGGDSVELRNLIRFIKMSIRAPPRLLELARQRLLRDQALAISTMEELPRELFPTLFMEAFSRRRCETLKTMVQAWPFTRLPLGSLMKSPHLESLKSVLEGVDVLLTQEVRPRQSKLQVLDLRNVDENFCDIFSGATASFPEALSQKQTADNCPGTGRQQPFMVFIDLCLKNRTLDECLTHLLEWGKQRKGLLHVCCQELQVFGMPIHSIIEVLNMVELDCIQEVEVCCPWELSTLVKFAPYLGQMRNLRKLVLFNIRASACIPPDNKGQFIARFTSQFLKLDYFQNLSMHSVSFLEGHLDQLLRCLQASLEMVVMTDCLLSESDLKHLSWCPSIRQLKELDLRGVTLTHFSPEPLTGLLEQVVATLQTLDLEDCGIMDSQLSAILPVLSRCSQLSTFSFCGNLISMAALENLLRHTVGLSKLSLELYPAPLESYDTQGALCWGRFAELGAELMKTLRDLRQPKIIVFCTVPCPRCGIRASYDLEPSHCLC

SEQ ID NO: 927120 - protein, 896 aa, Homo sapiens
MVGAPPPALLPPCSLISGCCASNEQGSVGTGPSKPVQTVTMQPGVSGRMSLQAPSRLLELAGQSLLRNQFLTIFTLDELPREVFPLMFMEAFSMRRFEALKLMVQAWPFLRLPLGSLMKTPHLETLQAVLRGLDTLVAQKVRPRRWKLQVLDLRDVDENFWTIWSGARVLSCSPEAMSKRQTVEDCPRMGERQPLKVFIDLCLKESTLDECLSYLFGWIHYRRGLVHLCCSKVQNYSMPTSSFRNLLERIYPDSIQELEVWKKCSLNKTGKFAPYLSQMSNLRELFLAFGYERELYVSVQYLKNPLGAFIFSDAYLTDRDMECLSQYPSLSQLKELRLIHILMWTTNLEPLGVLLEKVAATLKTLVLKDCRIQDPQLRVLLPALSHCSQLTTFNFHGNETSMNALKDLLRHTRGLSKFMKMSIRTPPRLLELAGRSLLRDQALAMSTLEELPTELFPPLFMEAFSRRRCEALKLMVQAWPFRRLPLRPLIKMPCLEAFQAVLDGLDALLTQGVRPRRWKLQVLDLQDVCENFWMVWSEAMAHGCFLNAKRNKKPVQDCPRMRGRQPLTVFVELWLKNRTLDEYLTYLLLWVKQRKDLLHLCCKKLKILGMPFRNIRSILKMVNLDCIQEVEVNCKWVLPILTQFTPYLGHMRNLQKLVLSHMDVSRYVSPEQKKEIVTQFTTQFLKLRCLQKLYMNSVSFLEGHLDQLLSCLKTSLKVLTITNCVLLESDLKHLSQCPSISQLKTLDLSGIRLTNYSLVPLQILLEKVAATLEYLDLDDCGIIDSQVNAILPALSRCFELNTFSFCGNPICMATLENLLSHTIILKNLCVELYPAPRESYGADGTLCWSRFAQIRAELMNRVRDLRHPKRILFCTDYCPDCGNRSFYDLEADQYCC

SEQ ID NO: 927121 - protein, 122 aa, Homo sapiens
MGKKTTLHDALMVDTCHYPFVKIHRIYKTSNDPSCELWTLGDNDVSLWLIGCDECSVLVWVLILWGCCVLKGEEDGTRDIRIGNFDLIMNESSPEMPTLPPAGSWGSALWGNHDKIVAESRS

SEQ ID NO: 927122 - protein, 129 aa, Homo sapiens
MLNRSDLMLTLVEGLGFENCWDWNPGSHLTPTYTSRIYSPWEASGNIYRARIPYAKRPTKKESPKKQEGTPPARDLTLTDLRDIHGLRGTKESVLGADPHLERSKTVPQGLEDVSCFLCAVLWGRPSPF

SEQ ID NO: 927123 - protein, 115 aa, Homo sapiens
MPIQEESWGPCLIKVTLDSTAGGDLDESLGHLSGVTSAQREITKYDVQKPLGPDPSCSPGRLLGNSLAIIKFPLTTKSAMKKTEDNNTLVFSVDVKANKYQIAGMSHCAWLNILK

SEQ ID NO: 927124 - protein, 329 aa, Homo sapiens
MSLQSPSRLLELAGQSLLRNQFLTIFILDELPREVFPLMFMEASSMRHFEALKLMVQAWPFLRLPLGSLMKTPHLETLQAVLKGLDTLLAQKLRPRRWKLQVLDLRDVDGNFWTIWSGARALSCSPEAMSKRQTVEDYPRTGEHQPLKVFIDLCQKETFGYDDELYVSGQQQFVPDLDCPFLCLYYPQMLYIRKISNIKEHLEHLLRCLKNPLGTFIFCHAYLADQDMECLSQYPSLSQLKELHLIHILMWTTNLEPLGALLEKVAATLEILTLKDCQIQDSQLRVLLPALSRCSQLTTFYFRGNETSTNALKDLLCHTDSEMEPEVLE

SEQ ID NO: 927125 - protein, 719 aa, Homo sapiens
MSIRTPPRLLELAGRSLLRDEALAISTLEELPTELFPPLFMEAFSRRHCEALKLMVQAWPFLRLPLGSLMKRPCPETFQAVLDGLDALLTHRVRLRRWKLQVLDLQDVSENFWMVWSEAMARRCLPNAMMNRKPVQDCPRMRGQQPLTVFIDLCLKNRTLDEYFTCLFLWVKQREGLVHLCCKKLKMLGMLFHNIRNILKTVNLDCIQEVEVNCNWTLPVLAEFTPYLGQMRNLRKLVLSDIDSRYISPEQKKEFVTQFTTQFLKLRCLQKLYMNSVSFLEGHLDQMLSCLKTSLNILAITNCVLLESDLKHLSKYPSIGQLKTLDLSGTRLANFSLVPLQVLLEKVAATLEYLDLDDCGIVDSQVNAILPALSRCFELTTFSFRGNPISTATLENLLCHTIRLNNLCLELYPAPRESYDVRGIVCRSRFAQLGAELMGRVRALREPERILFCTDYCPQCGNRSLYDLESRYVTYFDVATDRRSNLLEHSKPSFVPGGKNGSHTGAAGGAACQSRTLRLHSSALGRSMGLGAVEQGAALIGEAQAVQEPMVGGAQAWQAAGPKPCPAGRQLRPGEKLSAAPVGLHCWGTQCTLRSYGPGAKPLTARGQRGRPGRLASPSAGPEPTPTRDSRWPTSTARSPGSHPHLSLHTSPQAEGAGSCLGQPRDGLPQCSGGLKGPSSAARVGTEPEEALRVSEGCQHAVTSELYLHSLLPQPPGFK

SEQ ID NO: 927126 - protein, 219 aa, Homo sapiens
MRPRAPACAAAALGLCSLLLLLAPGHACPAGCACTDPHTVDCRDRGLPSVPDPFPLDVRKLLVAGNRIQRIPEDFFIFYGDLVYLDFRNNSLRSLEEGTFSGSAKLVFLDLSYNNLTQLGAGAFRSAGRLVKLSLANNNLVGVHEDAFETLESLQVLELNDNNLRSLSVAALAALPALRSLRLDGNPWLCDCDFAHLFSWIQENASKLPKGIISLGFGS

SEQ ID NO: 927127 - protein, 267 aa, Homo sapiens
MVWGLSFQGQTLLDSLKCVSLIPLLPAPASKPSSKISPNRTIVPPPSKDKTKIAMVKVKDLKQTLAIETGYQDVNAWLEWIKYSVHALNKSNCYACAHGRPEAQIVPFQLRSFNSHVHLDTIKVPWGIPDRFKVQNQIAAGFKSICWWVTINKNVHWINYIYYNQQRFINYTRDAVKGIAEQLGATSQMGWENRIALDMILAESGGVCIIIKTQCYTFIQNNTAPNKSITKGLQGLTALSNELASNSGVNDLFTGWLKKGTSVNGKE

SEQ ID NO: 927128 - protein, 181 aa, Homo sapiens
MGPGVSLSKFKSWIWIYHFTAGGVVVTSWALCWFLLKRRENKQQQAGAGSSGNCYKPPIAFRTPYKVNLCAHRRMTLKGPPGQITRKAPHVARPLASRSSNTSSISWTTIPKLPDDQQNGLPWSIEKPVVRGIQVEATEQAVVGTTERPPNSIDNWPGRIRASAVLPGTILSLLSPLTCWR

SEQ ID NO: 927129 - protein, 142 aa, Homo sapiens
MGIRRLQVLITTQNYVTIFMGPSCDNQKCPWKGEEGDLSLVKNHRSRIDCVTQRGNSASWSLSFVPGLCPTVVGRILSLKDVHLLISRNCEYATLHGRRAPQNVVKVMASLHMWASYVYSVLSAWSMVLIWPTIKEEDACNA

SEQ ID NO: 927130 - protein, 202 aa, Homo sapiens
MELSQQEETLAAQGVTSRYWWKFQTTPGLIYYLHSHVIFTSFLDFKIISANYPFLRFAIKCRLAYQVTPYKVGKTSMSQSSSHRQKTNNSKNQGTFCLWALHWLFPASGMFFAQIFLFHNPLKHPSIRIQSQLYLDQVPLGPVKEDGHLPSTDVKLNLESFWAELMSPDKSLRMGRKGSLPLQQGKICLLPYRPMGCLVFSS

SEQ ID NO: 927131 - protein, 150 aa, Homo sapiens
MGRNQSRKAENFKTQSASSPPKNLSSWPAMEQSWTENDFDKLTEVGFTRSVITNFSKLKEDVQTHRKEIENLEKRLDKWLTRTNSVEKTLNDLMELKIMAQELHEARTSFNSQFDQVGERKLYKPEKSGGQYSTFLKKRIFNPEFHIQPN

SEQ ID NO: 927132 - protein, 143 aa, Homo sapiens
MCPELVPFCEFLVSLTSRMKPRTLVVSVTVLKDGVSGVCSFRCSDVSGVSSFWWVHGLADFRIEATDLRTWKGTQVGCCCWLRWPAFIPLFGPTHILLIGPFYRELIGPFYREPIGPFLQSADWCTYKPLARHRALTGAFTIL

SEQ ID NO: 927133 - protein, 136 aa, Homo sapiens
MRELTNEENRDLCSSPSYHRPRGLGGEDGFVVQAHDPGYPAWPQDTGPCIVATPASAIAQRAQDSVEGKRGVGAPPNRVPTGTLPTGAVRRVPSSSRPQNGGSTDSLHHAPGKAAGIQHSYLNTPATSVALYHFQD

SEQ ID NO: 927134 - protein, 233 aa, Homo sapiens
MVNSLLFGEMALAFGCPPGGGGGGCPGGGGGGGGAGPGPSPVTAALRDDLGSNIHLLKGLNVRFRCFLAKVHELERRNRLLEKQLEQQQSERERRLRYKTFSREQAVQTGPELLRPPAPGGGHGLSSGAAAGANANAVALGGLPPGGGSHPQHYGRLPGTIWSYTQVRRTGGGGVETVQGPGVSWVHPDGVGVQIDTITPEIRALYNVLAKVKRERDEYKRSFWRWPGMRRCC

SEQ ID NO: 927135 - protein, 122 aa, Homo sapiens
MRTAQVKGSVPQNCLTSDTGPRRSPRLLTNWLQIESSPDPASGSIFHLHDSQILGKHFIYVCWLVTKGTTPEQPDGRRCLHCCDFCFSRNKMMKLQGTCPDSLGGFSLTRERVICKPAVRVN

SEQ ID NO: 927136 - protein, 188 aa, Homo sapiens
MARAEGRQVTFASSNPGSQQPGMDVAPSEAKSDSGIYWVTSVALLSLFLAWTPCQEGKEQILPKLPPALHSKSSVRPGNKAAMGSLLAVPELVPVNLKQSNKTKGTGRGLWGPPGGTLHGSIKVLGFASLSRSCLGILQTTRSPHSNPAKPDYDAIFPDRNKTETNLSSDPGFLSTKTSVFQAAGCDP

SEQ ID NO: 927137 - protein, 156 aa, Homo sapiens
MFKNEGQRIQNADVRSQENLDVPAKEERENSPFLCLLFYSGPQGIERCLFTLFLKVVDPDICSIQPPSVDYIHIGQLDKGYLTDPHTLHGLHKYAAVTTTQSWCGSTGLIPSIQGVLPSAFRDRFKKELRLGITMAADADCIFVPYLAYPRDSPVS

SEQ ID NO: 927138 - protein, 209 aa, Homo sapiens
MKCYSSHLFLLPAARPQLARSSPAARQTRVCGAQWTFCLSNVKVTGETASSDQETAEEFPSDIKKIIEKKRYVYEQVFNADERPLKLITHDTLWKGSSMLWKRTPIENNIMKVWKNYSIEYAIVVIENVMKAINPKTINFCPDVVHDIGFKTEPIKEIMKKIVDMAKKIKDDNMMEVSASKSVPNDEEEDAEETVPENKFTSSNLAEEF

SEQ ID NO: 927139 - protein, 169 aa, Homo sapiens
MSKTVSEVMREVLILESRQVSIIFQKVQYSAYSGYTDEIYLVAKEDRFLAPEAYEQPIANMCIPEIPGCMRGSSWVLWSEKVSENESAQRRISPMYHIHDVSFPLMPSIYLTQVILDKGGCDRDLACKDCVIWEDCGDAIWVSRRQTINRRNNSQHRGLLSWLSLDNSN

SEQ ID NO: 927140 - protein, 152 aa, Homo sapiens
MEIDLRLSSHLLSCSGQLKPSSLAILVVSVIGFLRSKSHNLDRSPGVLVKVRSNVTLSISPGHPGETELCVAALHRSGETERPHAASLLLTDRQQGTAEALHALQAGLSRLRKASWGRWSLSGEPSTYTAAEEPRKAAQLGFTSWMPHGAPD

SEQ ID NO: 927141 - protein, 139 aa, Homo sapiens
MSSISKISSIKKVSKLKKNSFLFTHKMLIDYLLYRGHTLVNGNKAMNKTAVVSVVFQSIRSVGWRCLFVLLVGRSLSWVPNQEPEGMMAIQETLVSCIGWKYVRASARQADAFQGSAGIISKQLFDQCCMGLFPESCLL

SEQ ID NO: 927142 - protein, 168 aa, Homo sapiens
MRNIKRPDLLDIAAHQRRPHDSVSSGIPGTPEAPEGVCYSVLLAWLSTDSLSVKYLSGPSAFLHEVVALCQQGQRDFIANESGSQWEGSWKRDGTGRRSSPGVQPSPARLLSKAKRSSCPSEVKLLLSDVKPQSPTSSCFSSSPLLCSLLVEPGVFTETVEYQYEKKI

SEQ ID NO: 927143 - protein, 144 aa, Homo sapiens
MGLHLAVGVSTSLDPVEASLQGVKSMDHGEIANTVFEVSCVKTQPKTGSSHFPAVPCDSEVEVLDTHGLEVLTRAGGPAPGEGCMCCKLEENRDTHGLDVLTSAGGSALQEGRMCCKLEENHKKFWTLMYSLINTNERLLARGQ

SEQ ID NO: 927144 - protein, 210 aa, Homo sapiens
MNVDAKILNKILAKQIQQHIKKVPLLAGTQRIYGKAYMIRQKPAAAAEPSQRPSTRAVPRGNVGLELPHRVLTGALPTGTVGRRPPFPRPQNGRSVSRLHHASEKGAGTQLQAMRAATGPAPCKATGEKLPKALGAHSLHWCTLDGYEFITSIFEFLTFNSKMLPELLDYGEIKTTDGSLKFSTLVFSKRPFCSKAVSGFEGHAYKLQWS

SEQ ID NO: 927145 - protein, 144 aa, Homo sapiens
MLPFPKPSMACPTPHLVPIKIPELSWQRREVTGHQTLRTQGPRMWMQKALTLTLCSRWWKAAASHEKAEGPLSCCQLSCPWMAKLKEHCNTSSGASGGAGTSQMLLQGCYRVGSSRHPKALAPGPAPAHLCLPSHEGWNTAGVS

SEQ ID NO: 927146 - protein, 298 aa, Homo sapiens [sequence omitted]

SEQ ID NO: 927147 - protein, 220 aa, Homo sapiens
MPVGEPNIPRVARPFGGNLRMPPNGLPVSASTGIPIMSHTGNPPVPYPGLSTVPSDETLLGPTVPSTEAQAVLPSMAQMLPPQDAHDLGMPPAESQSLLVLGSQDSLVSQPDSQEGPFLPEQPGPAPQTVEKNSRPQEGTGRRGSSEARPYCCNYENCGKAYTKRSHLVSHQRKHTDQCSREFMRSDHLKQHQKTHRPGPSDPQANNNNGEQDSPPAAGP

SEQ ID NO: 927148 - protein, 969 aa, Homo sapiens
MMTSACTNIPGTVLTQDLTMHPLKALEDLSETYSMGQKVTSFDQVKHTAGSQMTDVTVTPKSSPTDCQKTTITASNMTISNESSQLNTPSSDQTLNESQIPALLGDQMKTLSDNQTLCGDQVTFSSDQTLTDGHTVTSGSDETLSGGQMTTSLDLYGGQMMTSIDNQTLCGEQMTTSSGNQAFYGRQMTTSTGNQTLCGEQMTTSTGNQALYGGQMTTSASNQTLCGEQMTTSTSNQTLCGEQVMTSTGNQALCGGQMTTSTGNQNLYGGQMMTSTGNQTLYWGQMMTSTGNQNLCGEQVMTSTGNQALCGGQMTTSTGNQNLYGGQMMTSTGNQTLYWGQMMTSTGNQNLCGEQVMTSTGNQALCGGQMTTSTGNQNLCGEQVMTSTSNQTLCGEQTTTSTSNQTLCGEQVTTSTGNQALYGGQMMTSTGNQTLYWGQMMTSTGNQNLCGEQMTTSTGNQALYGGQMTTSTSNQTLCGEQMTTPTSNQTLCGEQVTTSTGNQALYGGQITTSTSNQTLCGEQMTTSTSNQTLCGEQVTTSTGNQALYGGQMMTSTGNQALYGGQMTTSASNQTLCGEQMTTSTSNQTLCEEQVMTSTGNQALCGEQMTTSTGNQALYGGQMTTSTSNQTLCGEQTTTSTSNQTLCGEQVTTSTGNQALYGGQMMTSTGNQTLYWGQMMTSTGNQNLCGEQMTTSTGNQALYGGQMTTSTSNQTLCGEQMTTPTSNQTLCGEQVTTSTGNQALYRGQITTSTSNQTLCGEQMTTSTSNQTLCGEQVTTSTGNQALYGGQMMTSTGNQNLYGGQNMTSTDNQALYGGQMATYSGNQTLYGDQMLTLQVGNMTTLTDDHSLYGGYMMSHQFSSLPYPGFLCFSSSHLIQGQLPKQKTQSCQFWKNPEVSRPYVCTYEDCKMSYSKACHLRTHMRKHTGEKPYVCDVEGCTWKFARSDELNRHKKRHTGERPYLVTAFISML

SEQ ID NO: 927149 - protein, 149 aa, Homo sapiens
MNFLLLYEIGNLAKGFSVFLRGTGFLFSVTSIFHEMAWCRTLRGLECRQCSNTAGVSMLQPSEDGSSHSPSIYFWPRAARQAEVGLKSDCYPQSTSSQCHRLQKRDFSVGPDGLTLAAGVGECSRTGVALGQDNFPSFMVLQIPFLLLP

SEQ ID NO: 927150 - protein, 137 aa, Homo sapiens
MGESNACILVSALGLGAPKDGRTSQHPQHSQGSSLTLCPHCSQSLKGFGVQKGSPTFWPVIDIRSSWFGNSEPACSLMISSDRLFQGYEIRTCARSSSGNGNNLPKRGSKWQGPGCGVPGVPSLAHGGQPGCLPHAC

SEQ ID NO: 927151 - protein, 144 aa, Homo sapiens
MALTSSAGFGEELLPGWGMGSSEIINSTRELCDSPRVVVGLRLSKPPGKAVKMNFLESQTKLTASEYLEDYGLELDFSQASQVIFINTQTLTVNDLRSTCINTAALTSKPSSSMKSTPLVQGCIHQWYNFPSKVQTPGRGLCRS

SEQ ID NO: 927152 - protein, 191 aa, Homo sapiens
MAAATPDRPLLQIGLYYIASERQKSKLPVKSYGYNRKYRTDLAVHGWLGLHGGAQFLCRWPRSIPSAHLPGFLSTVTLNVVTTRLNVYLAPTGVRNTEDELVAKGHTEFLNAEFKFKPLGLHWFMLVSNLERVPNRSEESCNQGIGSGLSQGYTEDGCDQQPSQIYFKPQDGRRREQDFILLLKRLPGSLT

SEQ ID NO: 927153 - protein, 129 aa, Homo sapiens
MANDVNHAFICLFSFYILFGEVSKSLPPHTSFLFLRQDLTLITQMKFHCGFDFPASCTRFFPTADSEFQRAAREQTPMHKNLPRPLFTSCLLMSHGPKTGKKNVGDSHLIYGRLSTLLIRMLFRKLTCQ

SEQ ID NO: 927154 - protein, 162 aa, Homo sapiens
MSLITQMKYNVTYKNAHSFSHCKLNTLLRGHFSNHQWPCNSLKIFSISQKERSHKTSQYEKKDFDHVNMSNCLLTLPKETELYNFQKCSLNSASGLILHMLPLDTSSAKPYLITKRNLNRCYSSRCTGCKAASTEDSLPRKTGKRAVLTDIQNGKNELQRSN

SEQ ID NO: 927155 - protein, 165 aa, Homo sapiens
MISTLGVLAAKPLKLIKICAHELINTVWLLCGFGIFNISSASTIDLSRNQIGVRLQRIQRGPGLPRCSEWCKCENGREVYNRCCLPNRNKTVFDWLSSDSCECEKYKELVINVECKQIGKEALSNEFFLQETLGGKVPCKISRSTNNTVKKNFCEEELAEDMEVL

SEQ ID NO: 927156 - protein, 447 aa, Homo sapiens
MRAIVQAREYGDPEAWQFPVILQPPVPATPTVQNHPQPVVDPAQQAADPAAQQDQEADNQAPQPETQAAQGNNQPPQLPAPGAQPIPGIPAVQAVVQPDPIHPGLAEDKRLVPYDWEILAKSVLSKSQYLQFRTWWVDAVQERIHLNQGSNPPVNVTADQLLGMGQWAAIRHQTILNDEVVEQLQKCCLDAWDKIQDDGKVCPSFTAVRQGQHEPYPDFIARLPDAAEKAIPDSHGQRLVVELMVYEQANPDCQAAIRPVKGKIPLGGDILTSYVKACEGVGGTLHTAMIMAQAMASILMPGQFSGQCFLCGQKGLAKRNCPRRAGRSPLHHQQQQQKTFQQQDAPPSTVCPRCQKGFHWASQCHSRFDIDGNPLQPFKNQGNGMRGRPQAPLNNGAFLNSQPLASSQTGAFPVQSIQPPPQFPLQRCRDQPHKVDGSLPVCRDERV

SEQ ID NO: 927157 - protein, 159 aa, Homo sapiens
MCNQKEGRAGPAEFGPGEQASLQGARARLETEVLQLQLRPPLFLHWAESRDGASAGVHGGGRLLSGPGPEAWQDAGQLEAKLEKFQREILFHEEMAQEVWMATGSTKRVLQELREEYDFKRQKPAHWEAKFQPFWTVLWLLGLQPQSAGPGSTRGTVSH

SEQ ID NO: 927158 - protein, 139 aa, Homo sapiens
MAKIKARDLHGKKKEELRKQLDDLKVELSQLRVAKVTGGAASKLSKIRVVHKSIAHFLTVINQTQKENLRKFYKGKKYKPLDLRPKKTRATRHRLNKREEHLKTKKQQWKERLCLLRKKSDKGLYAADVPASSSSNTVY

SEQ ID NO: 927159 - protein, 172 aa, Homo sapiens
MDQYLAPRTPHYQLTEGCQILSLGNIRSFQKNLALRCKVILPMPISGIILQVFMPGFRTITRVEICMEQRPSSMWKRISPAEGQQQDRRPGRRFCSDISSKCHFLEFCFWKWFSHSEQLESLVKYNYIHLEASERYPISEENRCERERRPRDDPGVRDHFSPEADANSESGS

SEQ ID NO: 927160 - protein, 152 aa, Homo sapiens
MSGSQPKISRHAKRQKNMTHNERVINRNCPRTDTDVSVISVTFRIMFRCYQNCISCVQEVKVEIWDVFLKYPNQSSIEEMTNYEKTNTLDGIKGRLNIAEKRYNTKSGIHKIITSKENLDFIKIKTSALQKTLLKEQKDKPQAGEVFCKAST

SEQ ID NO: 927161 - protein, 255 aa, Homo sapiens
MLECRDDLVSLVSQAGYFPRNSHVEALTRSTQNVTVFGERAFSPNRRRVDVYAEQHLLTPTRPLLLMMVTVAQVLTKSLGLPPVGFPGTLAVVESRRIQTKIQPSQQVRVKMSLLEQHLLEQNRTGCSLALGLAALAAGGPESRAWLHIEGHQPERAAGGTAVRKVISSRGHYYGRGIGCCHPSSLTGDCAGCCCNLVVGCHQTAIEDRPEAWLWRLSKQKAGNIPMAQNVLRQHITAFNVSLTFIPFALPWGHR

SEQ ID NO: 927162 - protein, 601 aa, Homo sapiens
MAPYSPLVTRLQKALGVRQYHVASVLCQRAKMAMSHFEPNEYIHYDLLEKNINIVCKRLNWPLTLLEKIVYGHLDDPASQEIEQGKTPFISSGLPKVAMPSTIHCDHLKEAQLGGEKDLRQAKDINQEVYNFLATAGAKYGDEEVPKQDGRTDIANLADEFQDHLVPDPGCHYDQLIEINLSELKPHINGPFTPDQAHPVAEVGKVAEKEGWPLDIRVAAVAKQALAHDFKCKSHFTITPGSEQIHATIERDSYAQILRNVGGIVLANACGPCIGRWDTKDIKKGKKYTIVTSYNRNFTGCNDANPETHVFVTSPEIVTALAIVGILKFNPETNYLMGKDRKKFKLEALDADDLPQEEFDPGQDPYQHPPQDSSGQHVDVSPTSQRLQLLEAFDKWDSKDLEDPQILIKVKGKCTTDHISAAGPWLKFCGHLDNISNNLLTGAINIENSQANSVCSANIENTQEFGPVPDTARYYKKHGIRWVVIGDENSSREHAVLEPPHLWGQAIITKSFARIHKTNPKKQGLLPLTFADPGDYNKVHPVDKLTIQGLKDFAPDKPLKCIIKHPNGTQETILLNHTFNEMRIKWFCAGSALNRMKELQQ

SEQ ID NO: 927163 - protein, 178 aa, Homo sapiens
MPCFSASSGNFVTCNRQKLPLPSVGDAGHTGRLSSCCVLPAVAPCLEQPRFVPLGDKSETPSQKKKKKDSYKLYVHSLKSQFKASGWSRAQTGSLFPELPHQEQGWKAPEKVKETYSGGSRSCCKQPPDLLRDSSALQWDWKVHGVPIASLSGATTGPGADPELTRLKRCHRVELHNM

SEQ ID NO: 927164 - protein, 167 aa, Homo sapiens
MSTSQTFKRIRNSGGGAQQPVIPQTLQGVTLLGSQLNACVFSELFPFGGLELRCIRIPCELRELFSLQLPVHSLLRPMELCVMHIQLSIQPEPPLDPQALPSILTKLKSENETPVHYHQSSEVLPRACTELAFSEHCGKGVQGTTVLCAARYPQHLVQCLAPGKGSI

SEQ ID NO: 927165 - protein, 153 aa, Homo sapiens
MLLIGHMGSLALWLPGNTSLIVAYLAPSWALQGAVEGARAVARPNWVRTWICIFISLNLTGEWTKAKHQAQTSEGMVLLKIVNPAIFIQEFLIVTFQGLLQLLLPAWKMAWAHTPVLVTLWGRSRGNGFCSGQPLALTSSSARGAPAESPDRM

SEQ ID NO: 927166 - protein, 139 aa, Homo sapiens
MASKIQTRKGAALQRQAWLTTNQPFGKTCFTTVTNQRPDAFPQFCDGPPGRTTEQALEDRRDWSEWGGIEGKMEIEPERAPNARTCSSPRIRSSRRTRPKTSRWGTPKSLEEQHPHDPLCSFRQKDLLPLFVQLFVFVK

SEQ ID NO: 927167 - protein, 145 aa, Homo sapiens
MKSWPSTYVGFTQQTHKKCSSSLVIREMHIKTTMRYHHMPVRMMIIKKSGNNRYWRGCGEIGMLLHCWWEHKLVQPLWKAVWRFLKDLELEIPFDPAIPLLGVYPKDYTSCYYKDVYMHTYVNCGAIHNSKDLEPTQMSINDRLD

SEQ ID NO: 927168 - protein, 240 aa, Homo sapiens
MGLVVKIKHKSNSLELSTVSNGDLLAGLAIPVPKVLRGFHNIHTFFHLAKRHMLAIQPLSLGSADEKLGTICVGSSICHGQDARTCMLSDEVLIIKFLPIDGLVTGAIRACEVTTLTHKPWNNSVKAGTLITKSFLSSAQSTKVFCCLWNLVCKQFDGDAAQGLAIPGDFKKDDGVSPMNIYSFVIQQVLLREGCRTGYYGNIYKAFNVPVESGDQRKMMSGNYAKCFESAKDKQMQTII

SEQ ID NO: 927169 - protein, 184 aa, Homo sapiens
MGVTESIPKPCGQLTGAEFAGIIIEWNRMESTSNGIKWNHHRMESNGIIIERILRESSNGIERNYAIESNGIIIKWTPMELSSNGMESPSNGNEWNLRMELNEIIERNQIESSLNRIKLDHHRIESNEINIERNLVELSSNGIEWNQQGMESNGEIEWNPLESSSYGTECSHHTMELNGINEGT

SEQ ID NO: 927170 - protein, 137 aa, Homo sapiens
MTLCLHPWNPWKVQERQSSATGSSPNRTGLGMASSLGARPKSSPLVSNGGQNSVHLQREDLAQKRPFSDPSCAGPKRAVPLPTGPSLPGVFGALAHPERYCPPVTARGPKRTKEGSGCGGNHRVTAHLRLAGSSQIE

SEQ ID NO: 927171 - protein, 317 aa, Homo sapiens
MLAPVVVSDPEHSQEMESLREALLSSRSHLQELEEELEHQKVERQQLLEDLREKQQEVLHFREERLSLQENDSRLKHKLVLLQQQCEEKQQLFESLQSELQIYEALYGNSKKGLKVLTFYLGGPYTLAYRTKNFPASADPGNKQLLLQGLGLDTSPVMKAPPKLEGDATDGSFANKHGRHVIGHIDDYSALRQQIVEGKLLVLGSKGIHELWSSTSALHHALEESASLLTMFWRVALPSTHIPVLPGKVRESTERELLELRTKVSKQEWLLQSTAEHLKIANQQKESMEQFIVSQRRFPEREWGKKRAVFPMPHLCC

SEQ ID NO: 927172 - protein, 243 aa, Homo sapiens
MFISAFSLDKGPADTTMLTLGFWVIRAYGHLTWAELLDKVLCQSTPLSQLFLEVLPLGLLSFLRVNQDFILPKEQEPVHQEADFTLTKQSRGEEDSTCIELSASPTRQPRRPQQQRPEEPLQQRKGQVDTSIYSLDTAIVGNKDPPSICATVPGKTFLNITPAEVGVLVGKDWSSFVMNGLTLGGQKYTVVLDSLLQDGELTTDLCMKSIGGAPTFNVIVTMTAKTLGLLMGKEGIHGNFINK

SEQ ID NO: 927173 - protein, 208 aa, Homo sapiens
MSSPCHPRALRGGIHRTGTWSLHRLQPFAQSQPSTYANAVYHCHKLYSQVSHIWGNCRGQQIRSAMDKTRSGKTTFVTRVSLLPALTHSWDSQVRPAVLNPLPRHGNSFVAKQHVAKQQPLRWLIYIEVALSVMSPTVPFPVPVCLSAAQPTNPLPEPARGSDVCLSLFSLLLPSSVLFQRSWSLACIAEQAFGDQLDPGHPSSNNGF

SEQ ID NO: 927174 - protein, 137 aa, Homo sapiens
MQVIFRNEVTNEFLYYNVSFRVIPSGIIKTIEMVTPVRQVASASIKLENPLPYSVTFSTECQMPDIALPSQFVVPANSEQQRCCWIVRKTTALEALEFCVCICAYVSQALNSNNLESEDTLQAHVSLHGNEVEVFVK

SEQ ID NO: 927175 - protein, 137 aa, Homo sapiens
MTPNLPVVNFTCQVRSKHTQTILLSNRTNQTWNLHPIFEGEHWEGPEFITLEAHQQNKPYEITYRPRTMNLENRKHQGTLFFPLPDGTGWLYALHGTSELPKAVANIYREVPCKTPYTELLPITNWLNKPQRTSRGC

SEQ ID NO: 927176 - protein, 232 aa, Homo sapiens
MRLCLIPQNTGTPQRVLPPVVWSPPSRKKPMLSACNSMMFGHLSPVRIPHLRGKFNLQLPSLDEQVIPARLPKMEVRAEEPKEATEVKDQVETQGQEDNKRGPCSNGEAASTSSLLETQGNLTSSWYNPRPLEGNVHLKSLIEKNQTDKAQVHAVSFYSKDHEVASSHSPAGGILSFGKPDPLPTVLPAPVPGCSLWPEKAALKVLELPATVPTKENCRSHRCSCNRPLPCN

SEQ ID NO: 927177 - protein, 904 aa, Homo sapiens
MPQLLRNVLCVIETFHKYASEDSNGATLTGRELKQLIQGEFGDFFQPCVLHAVEKNSNLLNIDSNGIISFDEFVLAIFNLLNLCYLDIKSLLSSELRQVTKPEKEKLDDVDVQATTGDGQWTVGTSPTQEKRMLPSGMASSSQLIPEESGAVGNNRVDPWREAKTHNFPGEASEHNDPKNKHLEGDEQSQEVAQDIQTTEDNEGQLKTNKPMAGSKKTSSPTERKGQDKEISQEGDEPAREQSVSKIRDQFGEQEGNLATQSSPPKEATQRPCEDQEVRTEKEKHSNIQEPPLQREDEPSSQHADLPEQAAARSPSQTQKSTDSKDVCRMFDTQEPGKDADQTPAKTKNLGEPEDYGRTSETQEKECETKDLPVQYGSRNGSETSDMRDERKERRGPEAHGTAGQKERDRKTRPLVLETQTQDGKYQELQGLSKSKDAEKGSETQYLSSEGGDQTHPELEGTAVSGEEAEHTKEGTAEAFVNSKNAPAAERTLGARERTQDLAPLEKQSVGENTRVTKTHDQPVEEEDGYQGEDPESPFTQSDEGSSETPNSLASEEGNSSSETGELPVQGDSQSQGDQHGESVQGGHNNNPDTQRQGTPGEKNRALEAVVPAVRGEDVQLTEDQEQPARGEHKNQGPGTKGPGAAVEPNGHPEAQESTAGDENRKSLEIEITGALDEDFTDQLSLMQLPGKGDSRNELKVQGPSSKEEKGRATEAQNTLLESLDEDNSASLKIQLETKEPVTSEEEDESPQELAGEGGDQKSPAKKEHNSSVPWSSLEKQMQRDQEPCSVERGAVYSSPLYQYLQEKILQQTNVTQEEHQKQVQIAQASGPELCSVSLTSEISDCSVFFNYSQASQPYTRGLPLDESPAGAQETPAPQALEDKQGHPQRERLVLQREASTTKQ

SEQ ID NO: 927178 - protein, 158 aa, Homo sapiens
MGLAQVVLPAVAHMSLAWVTLLSLVNMSLAQDIPLLTVSMVVAQGTSVAKDSMVLHQDSHQPLTRRDLAQASLPAMATVALAPVSLLAMADMGLDLASLLATADTGLVQGSLPATANMGLAQDSPLVIVSMEVAQGKMGILIAKEEKVKALKAKMQQR

SEQ ID NO: 927179 - protein, 152 aa, Homo sapiens [sequence omitted]

SEQ ID NO: 927180 - protein, 146 aa, Homo sapiens
MEPLPVPGAACPARCSSQHVWLCTVAGPHTRSSTHPSLLHACLALCRCGIWAGRATQFTLQVPMSQLRHWPPEPEQVNHKASGWNSLEGSQGDRKMRESLELPRDLLNGFNQNADSDMDNEVQSDVVSDEEEEHIGNCSKGTLVML

SEQ ID NO: 927181 - protein, 156 aa, Homo sapiens
MCPAFLPSSGFMVLLTSGVKLQTFANKLHKDRWRHREPDQKPFLQRPKERALPSPVNSHNTTQDYFQTVYVSMDRFLCMHFIPKFCFAIFNKYLIYLRSHGLRNSTAFVSSTLKLLQKEDGTVTDKGSYGDVVSKCHVVPWMASWNRKGALENKYS

SEQ ID NO: 927182 - protein, 137 aa, Homo sapiens
MGQGGNVATIGDGKAIFSGKMFIRVYKSSFIRFLPNVPILSFGVPSFSNQCPHFNSRHLVRLCMHLSFQAFIIYRVLLTPLSPGKQAGSRALEKIGASEAALMRNNCDFLSQSKSILVSASAFLSVAVGILRITEIH

SEQ ID NO: 927183 - protein, 142 aa, Homo sapiens
MTECQISSQKLGLQHNLLETEDVGIGSYRYIPYSHGVCCQMKKQEKRLNNCISTGELWLQYQCVYIHLLNPTVLPKWLQNFYKKGGRSWGAKWSSSADPTPTEPSKLRSTGLKFSLSAEQSEVHPGHSSLVRRGILLLLRLE

SEQ ID NO: 927184 - protein, 156 aa, Homo sapiens
MAEAIAAAAATRTANKMLLLLLLALAVMARILVVDIWKPIAHFEQRSYVIDFQFNQLHYFLLSTERVELGRQNKLDVAMKRCSQWSVKGSDVDHFWSWPAKSPKRSSTLSPSFTKCIENIKRLPTMLDSRGHPACISWLLSSLLPITPPMLLSSHL

SEQ ID NO: 927185 - protein, 147 aa, Homo sapiens
MGYSHINTKPGASWSTRHLALLRSLSSGGIGVAVSCGEISTQSRLLITLQLKRSWQREPLRCKFPFHTLELQPSFLQMKSRTLMALACQAGRPDWERDQVETSDLVTGAFGGAVPVRLRQGDGEPWLDAAAAQQPSQVPLLWRSCCL

SEQ ID NO: 927186 - protein, 157 aa, Homo sapiens
MWTIAILIIVANQCPGLWTREFGRWKVNNLAVERRNFLGSPLPLAPEFFRNIRLLGRRPTLQQITENLIKKYGTHFLLSATLGGEESLTIFVDKRKLSKRAEGSDSTTNSSSVTLETLHQLAASYFIDRDSTLRRLHHIQIASTAIKEESVPSLIII

SEQ ID NO: 927187 - protein, 131 aa, Homo sapiens
MKAQRSQVLFQCQRSKRSIPLQSYQGAGNNALGLFLGDNIQETDNAEHKYSVCVYNDLPFCDHRRKLTFINVLSNCAYIRALRWLESNAYPVEISTILACAVEQWQQGATPSQPNDHKVSNQYATVDCVVR

SEQ ID NO: 927188 - protein, 312 aa, Homo sapiens
MENYNQTSTDFILLGLFPPSKIGLFLFILFVLIFLMALIGNLSMILLIFLDTHLHTPMYFLLSQLSLIDLNYISTIVPKMASDFLYGNKSISFIGCGIQSFFFMTFAGAEALLLTSMAYDRYVAICFPLHYPIRMSKRMYVLMITGSWMIGSINSCAHTVYAFRIPYCKSRAINHFFCDVPAMLTLACTDTWVYEYTVFLSSTIFLVFPFTGIACSYGWVLLAVYRMHSAEGRKKAYSTCSTHLTVVTFYYAPFAYTYLCPRSLRSLTEDKVLAVFYTILTPMLNPIIYSLRNKEVMGALTRVIQNIFSVKM

SEQ ID NO: 927189 - protein, 288 aa, Homo sapiens
MAVSFLSQSKTIRFLGCEIQTYVFLALGGTEALLLGFMSYDRYVAICHPLHYPMLMSKKICCLMVACAWASGSINAFIHTLYVFQLPFCRSRLINHFFCEVPALLSLVCQDTSQYEYTVLLSGLIILLLPFLAILASYARVLIVVFQMSSGKGQAKAVSTCSSHLIVASLFYATTLFTYTRPHSLRSPSRDKAVAVFYTIVTPLLNPFIYSLRNKEVTGAKSRLSVTESRKEKEEQTFVCKKHICGAFYSSHKSLKLRALFRCLAFCTSSKSTDEIYMVIQGARAMEY

SEQ ID NO: 927190 - protein, 135 aa, Homo sapiens
MKDMGRPKVKIFLEMLVLAYSSPQTSLEILQGSPRDLLEFAGGPLEILFAWLSPAEAAEQQRLLPVRSSGSVVPEKHPPDAAGALLYEVAADSSVLLAFQAPLVYGKRLLQLAQCLPKRPSSFVPETQGTGGIGT

SEQ ID NO: 927191 - protein, 147 aa, Homo sapiens
MPSIPMLCDFLLCFRGERKWQSLDLMSPSPGSPCMAVDRFTASRWLCWRIPIVLLDVEPEIVWNAWCFFQFLDANLREQLGEHMTNQPEHLRQLEESVSYGHHSPLCQTGADGWSGQSTVLSSWFWEGLRCLLSPHKLMRTCTPVLS

SEQ ID NO: 927192 - protein, 226 aa, Homo sapiens
MKTIAYGGCLVHLYNSHALGSTECVLPAVMSCDRYVAVCRPLHYTVLMHIHLCMALASMAWLSGIATTLVQSTLTLQLPFCGHRQVDHFICEVPVLIKLACVGTTFNEAELFVASILFLIVPVSFILVSSGYIAHAVLRIKSATRRQKAFGTCFSHLTVVTIFYGTIIFMYLQPAKSRSRDQGKFVSLFYTVVTRMLNPLIYTLRIKEVKGALKKVLAKALGVNIL

SEQ ID NO: 927193 - protein, 309 aa, Homo sapiens
MGLGNESSLMDFILLGFSDHPRLEAVLFVFVLFFYLLTLVGNFTIIIISYLDPPLHTPMYFFLSNLSLLDICFTTSLAPQTLVNLQRPKKTITYGGCVAQLYISLALGSTECILLADMALDRYIAVCKPLHYVVIMNPRLCQQLASISWLSGLASSLIHATFTLQLPLCGNHRLDHFICEVPALLKLACVDTTVNELVLFVVSVLFVVIPPALISISYGFITQAVLRIKSVEARHKAFSTCSSHLTVVIIFYGTIIYVYLQPSDSYAQDQGKFISLFYTMVTPTLNPIIYTLRNKDMKEALRKLLSGKL

SEQ ID NO: 927194 - protein, 271 aa, Homo sapiens; identical to SEQ ID NO: 793172

SEQ ID NO: 927195 - protein, 201 aa, Homo sapiens
MTNQTQMMEFLLVRFTENWVLLRLHALLFSLIYLTAVLMNLVIILLMILDHRLHMAMYFFLRHLSFLDLCLISATVPKSILNSVASTDSISFLGCVLQLFLVVLLAGSEIGILTAMSYDRYAAICCPLHCEAVMSRGLCVQLMALSWLNRGALGLLYTAGTFSLNFYGSDELHQFFCDVPALLKLTCSKEHAIISVSVAIG

SEQ ID NO: 927196 - protein, 338 aa, Homo sapiens
MVAMPTLPLIVDCTTWPLPPRDPTIPTEFTFCSRVAVVPTVRADIQRRASTRLFKDAGAALTNLFCKALVRDKYGKADGSVDWGGDVATTGDGKAVSSGKEDSSEFASSGSSALSGSSHTSPFQVAGSQYVPVNALTLTVDTWPLAFAIGCPLDAPAILVMVGPQKLWGFWHLEWGPSVADTWGTPGFQHLVLAAPCFLQGTRKPRLRDPLLAAPTRRPMPSLEPPQVPSSEGGPASPLMKNSIPRSSDTPPLYPANPSIYPLMTEKVSPTSTTRSGTPYQPLKSKLSPLQECPLEHIETKDIEGDDNEATSEDQVLPYQLMLSVTKRHIQRKGLCLR

SEQ ID NO: 927197 - protein, 326 aa, Homo sapiens
MLPPRSNGTAYPGQLALYQQLAQGNAVGGSAGAPPLGPVQVVTACLLTLLIIWTLLGNVLVSAAIVRSRHLRAKMTNVFIVSLPVSDLFVALLVMSWKAVAEVAGYWPFEAFCDVWVAFDIMCSTASILNLCVSRSSALNRTYAISSSLISFYIPMAIMIVTYTRIYRIAQVQIRRISSLERAAEHVQSCRSSAGCAPDTSLRFSIKKETEVLKTLSVIMGVFVHYAFNADFRKVFAQLLGCSHVCSRTPVETVNISNELISYNQDTVFHKEIAAAYIHMMPNAVPPGDREVDNDEEKESPFDRMSQIYQTSPDGDPVAEQMRSVH

SEQ ID NO: 927198 - protein, 142 aa, Homo sapiens
MVGEPVEFRCIPEAQNVPDRYFAVSWAFNSSLIATMGPNAVPVLNSEFAHREARGQLNVAKESDSVFVLKIYHLRQEDSGKYNCRVTEREKTVTGEFIDKESKHPKNIPIIVLPLAQLGGKRGIPESCLLLCGNQVPEEVGR

SEQ ID NO: 927199 - protein, 146 aa, Homo sapiens
MVTLPAVAGRMFSLSLVGVTYSVHTFVDTLNATHRSHLNERERQRVLVDLRKSHILDERHIEEKGVDRKTRDVWEGKELSECLCGPLALVTWEWLMHPLAVPGVWALPVTVGKENGLAVLQLGLRWVQEADETSKLLHRREDKHLL

SEQ ID NO: 927200 - protein, 252 aa, Homo sapiens
MEATHSTLPSFQGPVSLASITVVGIDGQASKPLKTPQLWCQLRKHSFMHSFLVIPTCPVPLLGQDILTKLSASLTIPGLQLHLIAALLPNPKPPLHLPLVSPNLNPQVWDISTPSLATDHMPITIPLKPNHPYPTQCQYPIPQHALKGLKPVITFLLQHGLLKPIYSSYHSPILPVLKPDKAYRLVQNLRLINQIVLPIHPLVPNPYTLLSSIPASTTHYSVLVLKHAFFTIPLHPSSQPLFAFTYTDPGTH

SEQ ID NO: 927201 - protein, 162 aa, Homo sapiens
MLSVLGWTATVVQSEAALWLDPSVYHASSGMWGHPSLNGEGSGSRGASGTMALSCIRTTVPKISCNSAAKGLISSVFRCSNAVKNAHPTLAAKAYSFLVLSASSCSRAFSMLTGDPSTATPVSTGAHPSSRAATRGAFCHDCKFPEASSATWNCKKIEAQQD

SEQ ID NO: 927202 - protein, 164 aa, Homo sapiens
MSSSPDPPHQRSADTTDQMEGFDLEGSCVTSRLNMGTPFANLLVAACVPLLVTSVSIFKAYRSDLCFPHSPLIYYYTHYRDRQNEKIQTSRVRSRPDSASNCAFAETILVILKGSRRPDVHSLRGPLTTLDICTKPEVIPTLPVTKSYTWLSAPLAALLHLASE

SEQ ID NO: 927203 - protein, 177 aa, Homo sapiens
MKRWDIECQTYFFFFLIKEKPQDCEPSLHSGPEEDRKMWESLELPRDLEGSEDRKVWENLELPRDLLNGFDQNADSDMDNKVQAEVVSDEDEELVGNWSKGHSCYAKRLAAFCPGPREDAEHKSLENLQPDDVIEKKTPFSGEKVKLAEEICISNKEPNVIHQDNGENVSRACQRPS

SEQ ID NO: 927204 - protein, 137 aa, Homo sapiens
MWLQSSHRTGLLSSEGLPGDGDSTSKMAHFYGCRQWVSVPRHLLTKTLAYHHEFQEICGHILNGHSLAKPSFSLNGYFLGRCNPAYWWLAGIPSQWVLSCEVPWKWGLQTVAAQPPGFSIFPREPYFWLLVFDSYIA

SEQ ID NO: 927205 - protein, 176 aa, Homo sapiens
MSSTPTSPLSLASSQSPRTDFHWTRLGHMPLPEPITTSSLARPGFHEAPSGSGWGHPLQKDMGKTRKWQEGCFLLKNRDAITTRGIRYRAGTNKSYPRHHHVGVQQVHHEATWLLRKTESQLIQSMRNIPLFGFPPFTPGLAHPKFAWSKASKLPAFYAAQKAENIILLLWLKNFL

SEQ ID NO: 927206 - protein, 124 aa, Homo sapiens
MTTQNSEGKEEWNMEDKKGRSSEGRRKPTQLLMFLIPSHYEDMKRKFQDLLSEENESTALSQVLAQGPLESSRERSIARLGVEFVETGWLAADIFMRTAGTLVHNNRPGYILILALIKIQVYSL

SEQ ID NO: 927207 - protein, 149 aa, Homo sapiens
MAFLGPLSPNGPIYCTNYQSFLRTLYRMGPMPGKTHTSCQWWAVCMHTGLLACGSPTTLTSLLSRRAISASDLLSTDPRSFPPLQVTFHGYSSNGNGPCPKLNHFCKANERPLGYGEERSLSSAKAQAQVTVSHYSRGYKICNSSNYFS

SEQ ID NO: 927208 - protein, 145 aa, Homo sapiens
MCSRSSYTHMEAGQDEDPITDSVFIPVAIFLEKPDECKNYFILIPDIFKQNCINRKYALTNNVNIRCTCGRNKDIKGDTDEGSERKEEDSSASYYCFREHIYRYHNVSRNMNTKGALVGSQLKMRNMLSETERKTVHAMKWQILG

SEQ ID NO: 927209 - protein, 140 aa, Homo sapiens
MTKGLGTASGVPLEHSISYLGITMSLLTTANTLMNNSPPRGLKVGPGSPSFSPIVPKHTVQRHEAQSNPPVAPEFSWGLRSGPLNLLLPPLLATTCINYFRSGHQPVQPVATTTHTHMHRFGPRHCPTTATVITHATFNS

SEQ ID NO: 927210 - protein, 184 aa, Homo sapiens
MGPRIRDWAGDRAVTTGPSSPAGAHVFRFMQVQTGQTNTARPRREEGNPDSDTERRRRRLRRQSRQWGDAATSQGCLEPPVVEDAGRVLLQNLQRQRGPARTSIWDVGLQTAREWTPVVEALCGHPYHGSPGIPQLCPVTSHPAAGEARFAPGSRDCEMWMFCCDVHCYSHAGVLLSLSGFRHR

SEQ ID NO: 927211 - protein, 178 aa, Homo sapiens
MGMIVSPIPQFQAAQHMERDCLGENKGREQESLPHFKRIQKSCFEEETSDLICTVDQMDLIDIYRTFHPVAAEYTFFSTAHGSSSRIYHILSYKTSLKTFKKIEISIFSDHNGIKLQINSKKRFGNYINTVKLNNVLLNDQWVYEEIKEIKILRAASENGNTIYPNLWNTVKAVIKKF

SEQ ID NO: 927212 - protein, 208 aa, Homo sapiens
MGGLTLTSSLCDFFHLCFPRQPLLWDLHSSCAVLWETPPGPWCQQARVANSNHRYSGCPSLQELGPSLAVSSLLPLASWNSKPMGFDAKLLGFHACPSEPASIPPRLHTALCFRPKAMVAELTGGPPNLQVAKIRGESMVSQAVTQSLTASLGCEWGLPSSVPHLDGPSPHLLFLTPCGPSGPSQSQCKNLDTSTQGAEVTCSFHCSP

SEQ ID NO: 927213 - protein, 142 aa, Homo sapiens
MDFRHRACFVLSKPDFSTRWPGADAQRPPVLVVVALDSSLPFTEHHNFTECYQLDSKVSKLKRRISASYQKYCNLTTKDKQGNMEVAAIPEAAPLSMGTEPQKWSQSPLHISSGSALSLSQWVEAGPCEGKGIRCFLASAVW

SEQ ID NO: 927214 - protein, 166 aa, Homo sapiens
MGLIPHGLRSEVHLSVHKCIVGGGTWWEVIRLRGRIPHEWFSTIPLVKQRGPMIDSLQAGNPGMLTQSKSESLRIKEADDVLITLNPMQPLLNWTMPAHSEGGSSLSPQTLTPISSGNTLTDTSGSNASPALQSSLEKRPFENMARKWLSASQGERPYQKPILLAP

SEQ ID NO: 927215 - protein, 142 aa, Homo sapiens
MVAIVKPPEPIPLKWLTDKPIWIESWLLSKEKLDALEKLVTEQLENGHIAPTFSPWNSPVFIIKKKSAELDCEPFAFTIPAVNNLQPAKRFHCFTDGSSNGKASYSGSKACPKARCYQQLNSIYRNQLQRQKQNNWFGGEIQ

SEQ ID NO: 927216 - protein, 136 aa, Homo sapiens
MLSNSVGSGHSCLVPDLRRKAFRLSLFRMILAVGKSHTEEGQVLGIAQEGIQKQACGGRKQLYRGTGGVTALLLLLQDREPSKWAVTSSCFHGKGWGLPVLPWHWQTVMALVGASSGDLRPEVLSLSLPVSCVPLT

SEQ ID NO: 927217 - protein, 288 aa, Homo sapiens
MDAAVTDDFQQILPIEQLRSTHASNDYVERPPAPCKQALSSPSLIVQTHKSDWSLATMPTSLPRSLSQCHQLQPLPQHLSQSSIASSMSHSTTASDQRLLASITPSPSGQSIIRTQPGAGVHPKADGALKGEAEQSAGHPSEHLFICEECGRCKCVPCTAARPLPSCWLCNQRCLCSAESLLDYGTCLCCVKGLFYHCSTDDEDNCADEPCSCGPSSCFVRWAAMSLISLFLPCLCCYLPTRGCLHLCQQGYDSLRRPGCRCKRHTNTVCRKISSGSAPFPKAQEKSV

SEQ ID NO: 927218 - protein, 141 aa, Homo sapiens [sequence omitted]

SEQ ID NO: 927219 - protein, 138 aa, Homo sapiens [sequence omitted]

SEQ ID NO: 927220 - protein, 184 aa, Homo sapiens
MALAQCLTQIIVPILIRIADVQIKKRLSLMYSITKGYIKSQEDAKLLIKQIAVCESIYQKLCEILETNKQDAVKELVLMEHEGRDVVIALKTKQAIRNVIAKALKNLTFLCSRGIIDKHEVIEINKVLLKKLKALNNFPKAIPPPTPDIYLHNIIWLEGKDVLIDFFKREYQPFDVMRIRKTST

SEQ ID NO: 927221 - protein, 140 aa, Homo sapiens
MTLGTFSYTCLPSSAGDESCQDWVLPFKTAVSLLTQGVSRNVVQELEPELGASKLCPVPYSAVVELVSKMQDKVLFTLLSSSRRKKVQTERQRKDDKMATDFTAAWEQQVGTNLGPTLMRWGIGVALRAVYTAFCVRVTI

SEQ ID NO: 927222 - protein, 150 aa, Homo sapiens
MGAAHQHDTCIHMKGSSSLTFIENDLYNDELFSKQKQQAASHQRILGPSPVNPYVADADRICWLAQEALLHMAPIFKPLLVSMCGEHGLLLMDSESLHKEPNSEIHASSLKMKNCLVFLENTAPYTLLWVSVNNQSHPKTNDTQMEFILW

SEQ ID NO: 927223 - protein, 146 aa, Homo sapiens
MTFASAVQKGNVGSKPPFRVPTGAPPSGALRRGPPSSRPQNGRSTNRLHCVPGKAAGTQCQPMKVAWREAVPCKATGVELPKTMGSHLLYQCDLDVCQSSISIVMLPYHSLKETGVCLRPMISQGPSSAIATLLIWQHKENGASIR

SEQ ID NO: 927224 - protein, 166 aa, Homo sapiens
MALGLAQGLWWPLPSYCLYSLKAQWSTISSWQIQPGMRPSSSLSLWPPLPRPTASPPGYCWYSLEAQGLYNQPVVNTAQHGFLPSGQWALLWSRPGPEMLSRSQGLESGTLGSCLVCYTTVAELVPKLQDKVPFTLPSPFVKQKVSLPLVPTAGECSGSPLKPAWL

SEQ ID NO: 927225 - protein, 136 aa, Homo sapiens
MAQIHSICSDNCFANRRKYEAILLKKKKKKDSTLTTKNSLNPAGFLAGDLNLNYYTKGGNLVFLGDLKGCSELKNFQELINQSALVHPRVDVWWYCGGSLLDTLPNNWSGTCALVQLAIPFTLAFYQPEEGKIKHR

SEQ ID NO: 927226 - protein, 133 aa, Homo sapiens
MLSPTSNNSCFGICYWHQKKKESSEVILKPFLLCIFKQRTSPKELLLQNQGRKSNSSHLRVNYPGNFVRRWEMSVRGEDCGEEVGLAFKIPWKEEAKCWKALLPDVHQLITVIGIVKIFSVTPLLEFIYQVFQ

SEQ ID NO: 927227 - protein, 172 aa, Homo sapiens
MPLSQILSSEEAIIEVAADPYGFVAGEWVLQMPRDLLGCGAERVPLLKDLHTGQGSSKSCLVAAGGLRRKPCCSTRGPSEVAGGSRLLVVLESYGGFRRVQGFIRTHLEPASGCHGRERSCRVGFAFSGNALCPGASPQPIRQSDPCLPETHYHGGNRSPDRGRCRRPAGAN

SEQ ID NO: 927228 - protein, 198 aa, Homo sapiens
MESDNVQMCPEFLPSGGFVVSLTSGVKLQTFTAVDGTWCYRAGGVLLIQEARAAREPTTGWEGSGMAGCRSRALPHGEVGEARPRIRVLHGWAGSAGGPGAPSAAAGPGAKPLTAWGWRHWLAAPSAGPAKPVPTLNVRWPASSAGSRLRPRPAQTGDPTMQGWAEALLKHSQSGHGGAESEQKLLARCHLSVRLDSD

SEQ ID NO: 927229 - protein, 159 aa, Homo sapiens
MDYTCTLQGLLTLLGVHSGFVGYSIGPLSPSDSSMVANNWLVLGKSNPKRTYMVSQISGSVTGSPNPPFGLQEKWLTYYGGLLKEIVTRLLTNERRLNKAVTIAPDYGVYNTAVRESEINQIECQNRNSNIPNSFQAFWISPQDTEHVAVMSRSNCRRT

SEQ ID NO: 927230 - protein, 139 aa, Homo sapiens
MFLSTLFTLQLFAYLNLPGCREPSHSPCPDADADACSRCLMQYILSSHNLQKPHAVHLVQPQPCIEPTPVLAPGAGLPCCSSDMPGCMQWPDPVLAWPHTSCHTVPSSTLAGMESGTPSIITKAPFEQSFYYNLDHYYS

SEQ ID NO: 927231 - protein, 124 aa, Homo sapiens
MEDVNVSYTCGLRWGYTRGRREGGFGLGIRVAMRCGCSPGMVREADNLVKMSQPNKETAQEGITKKECIKECCPSWHQSGGVLIGLEAWPSIPTNSYGAYYPQLVFEIINLKANTYQGVNKPRN

SEQ ID NO: 927232 - protein, 157 aa, Homo sapiens
MAAVATNGLPLPSTGSPRSKCWQRLLQHTHGFTTTLLLQHRQLLQHQASDVHPADSNVPNIPSSGWFCNRMPPLRHLSMNSFSQHPKGQFSSNFREQVSSKRCEKRAGERRNERQEGGVEQILLPFRNQGVEISCQKPGAWLTTSYPSSPTLFSSPT

SEQ ID NO: 927233 - protein, 388 aa, Homo sapiens
MQQPCNTPILGAQKPSGQWRLVQDLRIINEAVVPLYPAVPNPYTLLSQIPEEAEWFTVLDLKDAFFCIPVHPDSQFLFAFEDPLNPMSQLTWTVLPQGFRDSPHLFGQALAQDLSQLSYLDTLVLQYVDDLLLAACSETLCHQATQALLNFLATCGYKVSKEKAQLCSQQVKYLGLKLSKGTKALSEECIQPILAYPHLKTLKQLREFLGITGFCRIWIPRLYYLKGQCCNCALVQLLTQSHFFQTMKIEYNCQQIISQTYATRGDLLEVPLTDPDLNLYTDGSSFVEKGPQKAGYAVGTPITHQEAIRRLLLAVQKPKEVEVLHCWGHQKGKKREIEGNCQADIEAKRAARQDPPLEMLIEGTLLWGNALRETKPQYSEEEIEWGTS

SEQ ID NO: 927234 - protein, 453 aa, Homo sapiens
MSIRTPPRLLELAGRSLLRDQALVMSTLEELPTELFPPLFMEAFSRRRCEALKLMVQAWPFRRLPLRPLIKMPCLEAFQAVLDGLDALLTQGVCPRRWKLQVLDLQDVCENFWMVWSEAMARGSFLNAKRNKTPVQDCPRMRGQQPLTVFVELWLKNRTLDEYLTYLLLWVKQRKDLLHLCCKKLKILGMPFRNIRSILKMVNLDCIQEVEVNCKWVLPILTQFTPYLGHMRNLQKLVLSHMDVSRYVSPEQKKEIVTKFTTQFLKLHCLQKLYMNSVSFLEGHLDQLLSCLKTSLKVLTITNCVLLESDLKHLSQCPSISQLKTLDLSGIRLTNYSLVPLQILLEKVAATLEYLDLDDCGIIDSQVNAILPALSRCFELNAFSFCGNPISMATLENLLSHTIILKNLCVEVYPAPRESYGADAPPQDQHPHQHRAFITTNEPQGHIIITQCP

SEQ ID NO: 927235 - protein, 153 aa, Homo sapiens
MKSKSKPVVEESSSTEALAVLQPCVPSGRAGSPPAKRNPWASGDPGGPDQCSPVVGADAWAHHRRARPDVPVRAADSGRCWEDTLGVPAVKRVPEAQEHVAEAGGPGPGVCRPRSCPAAEGPGYQPACHSVCPSVPVLTHSSRETFPISRVVV

SEQ ID NO: 927236 - protein, 2746 aa, Homo sapiens
MSMRVASHGLAVLFPSWDTCNDYNDSRSLQESYVRDKHSEASWSVLESYVRDKHSEPSSSVLESYVRDKLSDPRSRVLESYVRGKHLDPRSTVLEYYQCSGVLCDEQTFRPQQESSGILCEGQTFRPQQYCSGILCEDKHSDPRGSVLESHVRDKYSDHNRSALESYVRGKHSEPCSSVLESYVRERHLDPRSSVLVSHVRDKHSDPPSCVLEFYVRERHSNSSSSFLESDLRGRHSDPSSSVLECYMGDKHSDPSSRLLESYVGDKHSDNGSSVLESYVRDKHSEPRSSALESYVRDKHSEPHSSVLESYVRNKQSDHSKVFWNPFNVLESYVRDKLSDHNRSVLESYFSGMLRDGQTFPPQQECSGILCEGKHSDHSRGVLECYVRDKYSDTSIRLLESYMRDKYSDNDSSVLESYVGDKHSEPRSVVESYVRDRHLGHSSSVLESHVRDKHSDPNRSVLESYVRDKHLDRLSSVLESYVRDKHSYPRSIVMESYGHSDTSHSVLESYVTEKHSDHSSSVLESYQCSGILCEGHSEFHSSVLESYVTDKHSDHSRSVLESYVRDKNSDPSMNLLESYVRDKHSDSHSSVLEYCVGDKHSDHSRSVLESYVRDKHSDPRGSVLESYVRDKHSDPHNSFPESYGKHSDHSRSVLECYVRDKHSDTRSRLVESYVRDKYSDNGSSVLESYVGDKHSEPRSVVGSYVRGRHLDHSSSVLESHVRDKHSDPNRSVLESYVRDKYSDPLSSVLESYVRDKHSYPRSSVMESYVRDKHSDLRSSVLESYCSGIVCEGHTFRPSQQCSGILDEGKTFRHQQKASGILCEGQSFRQRQQCSGFLCQGHSEPRSSVLESYVKNKQSDHSRTVLESFGHSDHCRNVLESYVRDKLSDPRSSVLESNVGYKHTDPSSSVLKPYVRNQQSDPHSSVLEFYVRDKHSDSNVVLECYVRNKHSDHSRSVLECYGHSYHSLSVLESYVTDSHSDHSRSVLECYVRDQHSDPCSRVLESYVRDQHSDPRSSVLEFYVRDKHSDPSSSVLESYVRDIQTTDTVFWNSVTDKHSDHSRNVLESYVRDKHSEHSRKPSSSVLEAYVREKGSESSNTVLQSYGRDKHSHQSRSVLESHERGKHSDSSSSVLECYVRDKHSDHSRSVLESYVREKHSEHSRRLLETIVKDKHTDLCSSVLEFYVRKKHSEHSRSVLKSYVRDKHSNHSRSVLESYVSVKYSDNSRSVLESYVRDKHSDPRSSVLESYVRENHSYPRSSVLESYVRVKISESRSSVLESYVRDKHSVHSSSVLESYVRDKHSDHSRSVLESYVRDKHSDPGSSVLESYVRENHSYPRSSVLESYVRVKNSESRSSALESYVRDKHSVHSSSVLESYVRDKHSDHSRSVLESYVRDKHSDPHSSVLESYVRENHSYPRSSVLESYVRVKISESKSSVLESYVRDKHSVHSSSVLESYVRDKHSDHSRSVMEFYVRDKHSDHSGSVLECYLKNKIQNPAAVFWNPMSVLKSYVMNKHSDHSKSVLECYARYKHSDHSRSVLESHVRYIHSDPRSSVLECYVRDKNSHHSRSVLESYVMDKHSEHSRSVLKSYVRDKYSDHRSVLESFVKDKRSDPCSSVQESYVQTFRHQQKCAGILCEGEHSDPRSSVVESYVKDKHSYPHSSILESYVWDKHSNPHNSVLESYVREKLSDHGSSVLECYMREKHPDPPSSVLQSYVRDRHLDPRSCVLESYGRDKHSDPRSSVLESFGHTYPSHSVLESYVTDKHTNNSRSVLESYVRNKHSDPSSSVLESYVREKHSYPRRGVLESYVREKKLRIQEHCSGILYPSSSVLESYVMYQHSDACSSVLESYVRDKHSEPTNSVLQSYVRDKYSDPRRGVLESFLRDKCSESSSCVLESYVRDKHSDQCRIVLESYVRDKHSDSNSSVLECYVRDKLSDHSRSVLESYSYVRDKHSEAHSSVMESYVRDKHADLSSSVLGSYVRDKHSDPRSSVLGCHVRDKSSDHSRNVLESYMKDKHSDSCSSFLESYVRDKPSDLSSSVLGSYVRDKHSDPRSSVLGCHVRDKSSDHSRNVLQSYVKDKHSDSCSSFLESYVREKHSDPSSSVVKSYVRDKHSDPPSSVLESYVRDKHSDPPSSVLESYVRDKHSDPHSSVLESYVRNKHSDNCRIVLESYVREKRSDPRNSVLESYVRDKHSDQSRSVLESHVTKKLSEHSRSVLESYVMDKHSEPSSSVLEYYVRGKSSDSSSSVLECYLRDKHSDHSWSVLESYVRDKHSDHSRSVLKSYVRDKHSDHSRSLLESLVKDKHSDTCGSVLESYVRDKHAEHCRSVLKSYVRNKHSDHTRSVMENHSYPRSSVLESYLREKNSESRSNVLESFVREKHSVRSSSLLECYVRDKHSDRSRIVLESYVRDKQSDHSSSVMESYSYVSVKHSDNSRGVLESYVRNKHSGHSRSVLESYVRDKDSDPHNNVLDSYVRDKHSDPSSSFLESSCSGILCEAHSDPSSSVFECYVRDKHSEPSNSVLECYVRDKHSEHSSSVLESYVRDRHSHNSRNVLESLVKEKHSDPCSSVLESYASDRHSEHSRSVLESYVRVKHSDPRNSVLESYVKDKHSDSSSSFLESYFRIKYSDPRSSVLESYVRDKHSEPSSSVLESYVREKHSDNSRSVVELCVRNKHSDHSRSVQESCVRDKHSDPHNSVIESHMRDRQPSSSVLESYVRVKHSDHSRSVLETCVRTNIQTTAGVFSNPI

SEQ ID NO: 927237 - protein, 174 aa, Homo sapiens
MEHRCFGVARGSGEGENHCLPTYLGERARASTFPEDCVSHVYTLRQSQTCASGARVHLEEEQPQLLQVIKMRRPVHEDDSGQEFTLGQLELLGLQWVGVGEGSAGGREKASPNFSIMVGAEHRAAQVRAPTSSNRSQKLLQEQQKAHQRVAQQDRFFPETSVYTIRLPSSDHHD

SEQ ID NO: 927238 - protein, 120 aa, Homo sapiens
MKDSETLLVEVEPEKPIAGSNQLVRGSPDLCPSEQCGLISFRYAVFAGVSMLRGESGGDENSLEEDFFLSIVLISLHCYKEISDTKEFIKKRGLLGLWFCRLYAKHSASIHSCFFICQMG

SEQ ID NO: 927239 - protein, 142 aa, Homo sapiens
MESQGQMIKRPHHRQYTEVYLEYKLGASTHSATDCSSHAAWGGTNTVGSLILDSKPPEPCDKTFLLLKPLGLWVCGTSEATFSLNVTQAYPRASGDCELLSNTFAWEKRVHLAVGQPRWGGTVGIILASGPASSSWALLSDL

SEQ ID NO: 927240 - protein, 119 aa, Homo sapiens
MHETALIGCSFQQSLVIPGGLVLLGSFVLVSSGRNRRLASHFQFSIRVTSFCQQAGNANSFRQQAHHRDFPRSSKSGDSIEDVASPSARTVGPDLCLQGWDEAELALGAAQAVAKGELT

SEQ ID NO: 927241 - protein, 302 aa, Homo sapiens
MCATLVSTCLLWTTGYISEENGLTKQVPLERKTTDETHKMVKKHNAEFRMVEKHNAEFRMVEKHNAEFRMVEKHNAEFRMVEKHNAEFRMVEKHNAEFRMVEKHNAEFRMVEKHNAEFRMVEKHNAEFRMVEKHNAEFRMVEKHNAEFRMVEKHNAEFRMVEKHNAEFRMVEKHNAEFRMVEKHNAEFRMVEKHNAEFRMVEKHNAEFRMVEKHNAEFRMVEKHNAEFRMVEKHNAEFRMVEKHNAEFRMVEKHSAEFRMGVRGQQGLPFYIRCLEKSSQKRGRSSKVVNEAGRRVCGELTF

SEQ ID NO: 927242 - protein, 153 aa, Homo sapiens
MKRASFPFTFRHDCKLGVDTEMHHPGSILGGLCCRAAGSVLADRPRLKLLQRQAQQPNCPAPGLIFPGQPHPGTEQGRGTEATRCWATCSRAPGLALITKYSIDSFACQGMERLPRVLKDAVRALALPMEPVCGLSHRSYEAPSFGPKHLTGI

SEQ ID NO: 927243 - protein, 460 aa, Homo sapiens
MARDYRVTRGNEASRGVSMFVWRNVEGHSVAVFPWYSIPFLTPPCSHMRPSNLPVTQWPPTRENNLPSWQLLLISVHQMMSGPVPQCLRKEQDSSSEKDGRSPNKWDKDHIRWPMSAGHDLQQAAPGPGRAHQGHPNHYNRTISQMLSERWYTLGPNETQKYHDLAFQVKVAHLQQGPKEVQLRGQAHKPGASRIAAQTLQSSDTKEQLLWGRTAAHSQETWLSLAQAFSHSGVHSLDGREIDRQALRELTQVVSGTASYSGPKPSTQHGAPGHFAAPEGNKGFGGKVFAPVIPSSFTPAAPCWILSPQGPPIHLQLLAKSMVPPCPPPTHTRMLPPQPWHPPPSYWAQEPSKPRSLVKAAERAPYDPYPWGWGPRDAFQGDLFPPNGSCHLLVEKPRTGSGNRRPRRRCPLHCTRPGPVPALIMQLFQAHCFFLSTRPQLPSRPTMHTSSPPRFVLPLP

SEQ ID NO: 927244 - protein, 143 aa, Homo sapiens
MVQGFKVNKFMLNSCEEKQRKGWGEGAHGGKGGGCTRRISWERIEKYARDFKESLLQYENVTFGYQQRPHYSKRLCMPDGYIPEAIKSSKKKLSYQNSDGPVADCTFPEFHIIHSQKGGENFWSRLVEEMVSREMGARSQVEG

SEQ ID NO: 927245 - protein, 461 aa, Homo sapiens
MQWSPTPGASACLGWASSLACSTAPTLLGRAGRGPLMAAKWFKEFPLNLKTVSERAKPGGGGGKLRKNSEAGGAGPGPGKGRKNSAAELGSGRAGVGPKDSRLSRDSLQGLIQAAAGKGRKNSRATEEEPHRGATKSSGCSTYINRLIKVDTQEKNGKSNYPSSSSSSSSSSSSASSSPSSLGPELDKGKIIKQQETVIILEDYADPYDAKRTKGQRDAERVGENDGYMEPYDAQQMITEIRRRGSKDPLVKALQLLDSPCEPADGGLKSETLAKRRSSKDLLGKPPQLYDTPYEPAEGGPRAEGKARPPDSRLPENDERPAAEYEQPWEWKKEQIVRALSVQFEGAERPSFREETVRQHHRQKSWTQKILKPALSDHSEGEKVDPGLPLEKQPWYHGAISRAEAESRLQPCKEAGYLVRNSESGNSRYSIALKITYGSPQAMPLYVRSDSHGSASSPSSH

SEQ ID NO: 927246 - protein, 127 aa, Homo sapiens
MRNSSMRNCIKTSKYNILTFLPVNLFEQFQEVANTYFLFLLILQLIPQISSLSWFTTIVPLVLVLTITAVKDATDDYFRHKSDNQVNNRQSQVLINGILQQEQWMNVCVGDIIKLENNQFVALISSE

SEQ ID NO: 927247 - protein, 162 aa, Homo sapiens
MEARKSCFADELPSCHTGRSARSLDVGGGGGGLPCCAKLAQIQVRLAGFVQFYILFRPPLLFQLSPPKDHLRLPPHFIALLFHWEAHRGPGWALGTGPLEVPQEVHQPPGSVLSSWGAPWPCPCTPSGSWSLGPDSRTSTGSHTVKAKQGQACVWVYVNPCK

SEQ ID NO: 927248 - protein, 327 aa, Homo sapiens
MSVSSAPETLPGPGNCICAMGHYHHEHRHHHDHDLYHCHHYYRHHHHHHHQTMITTLMTTTIIITIDSLIPHNRRYHYHHHNYHHDHHHHYHQYHQHHHTCTTMSSIATTTMITNITITTMITTTTTIATITTAIITITTTTAITITITMTTITIITTVTTTTTIATITTAIITITTTIAITIIITMTIITIITTVTTTTIITMALITIITIPTITSLSTGTSTPTMIITITTTITTLINTIITTTITTIITTTITTITRMTVTIIITAIITTIIITIYHYHYCYHHHYHHCHPYHITTTTMTTTVTTKITTTTILINIHITICYHC

SEQ ID NO: 927249 - protein, 133 aa, Homo sapiens
MATGPEFKCVCKKDTRGAPETGCKPPPASVQHTSALLADSVPNVGTFEMPTLGVVKNQLLLGWHSEDCALEELLCEPHAPGFNKQREAAQAVLKGFPLLAVLGSTLDPIIPVPIASSSAGLRFRNPREQGSST

SEQ ID NO: 927250 - protein, 170 aa, Homo sapiens
MIPTHNSLARASLMATSNFNVARCTILLCTQQRTGPHYPLGRATIILDCHSSLRDSTFALYGKSPLSSQRDLVPREFGRPGRSPNSPVGGMLLEQLHWTDEQIEACRKREGSGSPYYILSVGLGGYPGTQDCRLPTPCPSSALSLPGNSFCPEDGGPTGLRLWAVPSGSQ

SEQ ID NO: 927251 - protein, 144 aa, Homo sapiens
MSLLPAGRWPAQAWKLALAVILTCSTSCPALAPGRASPALHHVWRLLALGLPICLLLQLPGLAAADQGQNEASACSSGPRGTGKQRPWGVPGSGVHTGVEAETSLPGNVHHQSSNVGKSVGFRAADLGLNPGFTTLLCDFGQIA

SEQ ID NO: 927252 - protein, 182 aa, Homo sapiens
MALCEVLMFVGSPNSPVGGMLLEQLHWTDEQIEACRKREDEKTPAAPPGPKGTLFIFTHGGLLHPQGLLTKIWDPGAMPEAPLLPEGSPRPSATLPGWYHILPQPCILGPGTKWVPRAESLGHRFLLNPPAPMLAMMLRIDVCVLAGAAPKLGIATACGGLCAPGTTLLCPVHIHQDPQSPV

SEQ ID NO: 927253 - protein, 170 aa, Homo sapiens
MSTQKLVGWLLLFATENTDCSGNGAVGGYGDGTSAGGEVGGNSRPCSHTHSHVHRLTSARSPRVTIHRWLPRKDNTRPLRICPGSALIPETAWALLPGYAEGPGPPVFLCSECVCTQAPTGPPVPMSPSLNGVAAPKRAVLKGGHTSLTCPCKPHRGQRVLDTRLTDNTT

SEQ ID NO: 927254 - protein, 391 aa, Homo sapiens
MHCKGHQQATTSVALGNSQADSEAYKAASTQYRASVTAALLPQAPDLVPAYSKEERDFFQAEGEQAIKEGRIQLPDGRVAVPQLLGAAAVLAVHETTYLGQESLEKLLGWYFYISRLSALAKTVTEQGVTCRQHNVRQGPTVPPGIQAYGSALFEDLQVDFTEMPKCGGNKYLLGLVCTYSGWVEAYPTRTEKAREVTRVLLQDFIPRFGLPLQIGSHNRLVFVADSVQKTQKIRCTPSKRTGYSPCDRVWIKDWNVAPLQPRWKGPQSVILTTPTAMKVEGIPAWIHHSRLKPAAPEAWELGYTGYVDTEPMPSYLINGQAVFVIGTIKTSFFPAAGKNSIPQQPYRKRPNCYISAHSYISLLVGFSIPGPPATHHQRYQASSSSGPWGN

SEQ ID NO: 927255 - protein, 157 aa, Homo sapiens
MGSCAAQASPTSTTPCSPAPSPIDYPRAEECERMARDWQAPPPAAPAWDPLGEASWAPESAVALTAKICSFTPEPSETTSPPGGTNNSRLAALRAVTLTAKVCSELTRRKKLRTHLNIRRDRLQTRHLKSCNTHRKDCKLHEANYPICVVHHSKANT

SEQ ID NO: 927256 - protein, 214 aa, Homo sapiens
MTQVLLNGFSFKRETKHKSLEILQPDSVIEKKIPFSEEKFKPAAEICISNEEQNVNHQDGEENVSRAYQRPLQQPLPSQVWRPRRNWPEPGSLCCVQSRNLVRCIPAAPGVNKKGKALLKGNVGWVPTHKVPTGVLPSGTLRRGPLSFRPQNGRSTDSLHCVPGKATDTQCQPMKAAGRKAVPHKATGTELPNTMGTHLLHQHDPDINNILIIV

SEQ ID NO: 927257 - protein, 157 aa, Homo sapiens
MHFLPSEAHKTPNTGDWRDSMTTCQQRGATHSRVSSLLKAEHSSRHLGGAKELSSPSQGCDTLFGALWFLVSPTCHAPLCSPVPAVEDAYGAPGPAATLQGASVHAGTWSCLSCCSQCAWVCTVAGSHAHLLTYPSPLCLPLAGRGPGQRNSFKEQP

SEQ ID NO: 927258 - protein, 138 aa, Homo sapiens
MIVTFYHEFVGFCEISTATLPFHHLHLGQSAAINIDARPSASKKIMSLKLSDFSGLSWTYTCYFYPAVSQLLVFFWLSVGVTVIASEDLNGSCSCSFLQAVSQTCSLRSHSWASKSPEPRCGAAPGASLTHQRVPLAT

SEQ ID NO: 927259 - protein, 140 aa, Homo sapiens
MQSCLTPDTRHLTPASNCLTRKLHHFTFHLLENKGGSARDSGNGEIAGATTDTEDRTHSQQQEIDRRKSRQMANLHQGRVSSEQQVCWQRRQIQHQEPGWQQTESISEKSDNSSFGGPHFHSYRANTDTTLPFMHTQGDQ

SEQ ID NO: 927260 - protein, 152 aa, Homo sapiens
MFLVQSAELIVLKQRPEKRQGHEHQNAMPFLDVQKRFGLNTDGWLTIQSAEQPYKIPARHHPFEKEWRECAHGIGGIWGEKECRIEYDYFIECILWQKMMRCNGISQKGAAPNLKHNPDFNLSPGKKRLNKATAVDYGCQYVTCLLHQMKIP

SEQ ID NO: 927261 - protein, 176 aa, Homo sapiens
MLGEPPLSSELSGMFKFADISAAFCSAMPCLQSWRLQSQQVLMSCSGLHPVRASLGLLCLPTQASVMANAPPPARLLPRRLISDCCASSKQGSVGLGSAEPCAGYNLLVCHLLRQLEKHGIWAGVSIFPGAISHGFPCLGKGNPPTPCASRKEYELNMVNNVIWSGEVKRMETEKG

SEQ ID NO: 927262 - protein, 139 aa, Homo sapiens
MDQSAGCGQRQENKSWPPEPAAATRSGPLPCCGSFVLLLFTVNLAAAHSLGVTDTPSLRAVSLTTKVRSFILEVSETKNPPEGTNSGHTTRRKSSLRTHRKDAHEGDTRLASQISPTNPGNQWGNRCHSQSDVTSCIFY

SEQ ID NO: 927263 - protein, 145 aa, Homo sapiens
MLGRKDEPYPCVNLCSRDTFSRDADAENSTGKAVSKCMYNSPQLCGRDPVVHQEPTDPLWLPESEQILGYVYGVFGDAAIQGLRIPGPDARWPVRERKRETERKKEDLTVAPGNPKEIPEGARDCKLLKKELCNSTLTWNLHMTI

SEQ ID NO: 927264 - protein, 157 aa, Homo sapiens
MVLTAANVKYNCAHQIKGGSAFHTPLTQMLISFGNSHTKTYPGFILYIPQSNQVDTQYFTIATSMVKPPAFSRVNQPIQLDLLVVTWLNVPTVAADIWLSWWPPRYFFSHVLRRCEENVLLWRHRKSYPPLLLHNPCNSQQNEKDMTKGKKSSKYEK

SEQ ID NO: 927265 - protein, 164 aa, Homo sapiens
MISCGWGGCAVNPSCGTLPGEDQDGWGSHGEDSLASSPYERHRRAANGKVQPGVGLLEQGVRGSQERETGLLSVWWLQCAGGASKASRFFVPQPKGSKDGTTAAAMAEKVCGLSLGIPLQRKAELPPTEVINLTAVGMGPAAAQQRLQSCWLPLGAPTQRNAEL

SEQ ID NO: 927266 - protein, 166 aa, Homo sapiens
MGRKAGETTCNINNAFGPGTANERTSLAGPRRSSKALPKAKLAPEKGHGHCLRSAAGLIRYSFLNPEETVTSEKYAQQIDEMHQKLQHLQLALGKCFHNQQDAENAFQDPVPQIPTGQPQPEARGLGSYSVVCSDQPPGGSVEQRMENGAEVANRSQPNSVKLNQT

SEQ ID NO: 927267 - protein, 168 aa, Homo sapiens
MGVGRSFGIAVEGRRCKSQTLWKGRGHSQRTVCSSHPAAFKWVWPACATPSKEVYEHLPGISFCEINPATLLNLATPDLPPLTLSTLTSTEPLCPDDPFGHTSLVSPLLDLTPVISPFPDRHLTPRPSKGKGAMATCRPSRHTAAYGVKREQCEATQKGAESQRKNKF

SEQ ID NO: 927268 - protein, 167 aa, Homo sapiens
MEQGAALIWEAGAAQEPTESPALPRGKAAKARREIERSGCGPALLGDPAHPPQPLARVLSSSLPRAAGPAAAPSAGLAKPTPTRKSSWPASAPCSPGCRSRLSLHTSLQAEGAGSGLGQPRKGLPQCSGGLRGSSSAAKVGAQAEEAPRASEGCEDCQHAVTFHYLH

SEQ ID NO: 927269 - protein, 140 aa, Homo sapiens
MGHVSNSGPAKPSEGILEEGIVIIGDDSSMPVFAPEDLPVGQEMEVKDSDLDDPDPGDMDEAGNHHSQQTITRTKNQTPHVLTHRWELNNANTWTQQEEHHTLGPVIGLAGWGGIALGDIPNVNDELIGAAHQHGTCIPM

SEQ ID NO: 927270 - protein, 143 aa, Homo sapiens
MALPQEESPGDVSFGSGLVCPSSPQSVLRATKGKAICSRPCLRLPVKTSTCEQLDKFTPREPFVGCTAQATCSFLGESQLTLHLSPPAAGYNSTHFEPLSRGADGGSGIRISHHNGSAGKQKTNVSGPLQVSTKKEVKKYDTG

SEQ ID NO: 927271 - protein, 169 aa, Homo sapiens
MVLMGSELICEVHSGLSSLLSSGVGRGVQDLCVGTVGQLRLLIQASRCPKCLEICLSVEQIGPHRTKISGQQAKILEPKRLPSSTCRHTSGCSVTAEGILPQHPAGTHADRFQVTKLALAASLVSREKLGPAKRNKHSQAIRTAVPVSNNSHGSDEPVTAAALAEKAVK

SEQ ID NO: 927272 - protein, 139 aa, Homo sapiens
MVVKVVGNGSCDRDSDRSRDGSGGGGVRGGGGGGGGEKTEVEVEVLKVVLEVEEVMMAVEDSFRKFDDIENPKEKGKTITQNCSEVTTTYLYHEPIEEKMEWLYMLMFGVGERNSQRDSQIFKILRHTHSYSDLPVCSS

SEQ ID NO: 927273 - protein, 135 aa, Homo sapiens
MRRRTNRFLCYWGSLLPELPRWWRATSKMAASFVFSDLGFLASWIPMNGIFGHVDEPRHLAVQEQWQAFSPIGSGSRCLSGSGAQRTPCRIRRNGSQRWVCDGGKQQWWTVSESSAQAVTNTDQKSAAARFNRVK

SEQ ID NO: 927274 - protein, 142 aa, Homo sapiens
MACWYLLVPVGVLFSSSTCPAAHLEKRSRPFKGEENSNSTNAMMIGEDAPGAGKTLIYSMARGISPKVKWELHFLFRGCQGAQRALQSLLDSWSRDLVLLKCLHLPVLWLPHLQAIYFTLEPRCLLPLADSKDTISPKGFEE

SEQ ID NO: 927275 - protein, 147 aa, Homo sapiens
MNHCCLDADFGGLLMVVLAETAVKFGLHGVFEKSKFGTFGKDWRLGHCWADATGIEWVAKLVRFLKVDQEFNVEYFCSPFTISQELHKQLCNAQNTRSRSASCQQTYLYTPVIFPFHLACKFSIEICCIFFLHPTHSYTPVSCTAPF

SEQ ID NO: 927276 - protein, 147 aa, Homo sapiens
MLGGSLQSLVTSDFPGPGGITSEGCKTAETAACPSLWDLGPREGGPMLLPWLAGIPSKWILSCEAPWKWGLQTVAAQPPGFSLFPEICYGDLTSCFARVAATFARKPEEHEYLKLPGICACLSSCSAETPWDSMCQTEGPGGMGFLT

SEQ ID NO: 927277 - protein, 179 aa, Homo sapiens
MRAGDDKLLNGFSGSSGAHSLGTRRLPNPIHYYWYFLPNPIHHYWYFSWETEVGLNYQAATITAGNYLADHLDPEDHPATDTANFQTTPSAQGHKNPSTRLTPCCYYWHLSKPPGGPRISLPGPTNIGASTHHSGTQGPTCLAHHCHHWSLKTSSPAILVPSKTSPHPPLSHQENYRYH

SEQ ID NO: 927278 - protein, 143 aa, Homo sapiens
MSNGKKLSASDLTNGVDEILATSSNLSTMAPGWRPRCEGGISRRASCTRQKMDKMIFRGASHAAIQCAGAELIGNPFQDLRNRLILFRLISIILDRGSSSCLDLGAFGHVNNKAERLQGYAGAVRTPECPLRLSRVSERLRTM

SEQ ID NO: 927279 - protein, 161 aa, Homo sapiens
MINLIDIPHPYPHTDTGVWNVKHEENVYSVKKKMYLLEKEEGAVWFTTGSPQCIGFMKLRNAVLGLKAGTCCSVTHFGFTPSFIHSISNRYLRNACAWCKGHNRHVVPADLELSVLIVTMSAHPSVGRSSVQSRNCHSGVQSRDPGEDSRDFERLGKGRIS

SEQ ID NO: 927280 - protein, 249 aa, Homo sapiens
MGDMPTLAEIHVFTVQLAQLGSATQQSSNVEFQTAASIKAHFQDIDVESGALVVVYQEVYLISFQSTPNGEHRCCQELMKLDSHLAPSDQTLLDNFACLETGGSYATSLGLVYGCSGKGCVWSVDLFPAARFKKFATENEAWAFVRKSASPEGSEGQKNKHVQESQMKASKGLCEPLNGDGDESAESCAKPVKQIIEPAPRVMNKKDFVALEKLSQGMDIQWILVPGHPGCIGNEEADRLARGAKHSED

SEQ ID NO: 927281 - protein, 141 aa, Homo sapiens
MGYSHCTDDLPDSGMGTFMAGEFQEVLGPVALIQDKAMGPEAPLDLEPSPFREVHPLIHNEAWHTDGSSQGATAAWTALAVQPNTDTIWFETRRGQSSQWAEPRAMCMVITKEAIPIKWLVTSPCGAKSCGKTYKREDDLL

SEQ ID NO: 927282 - protein, 160 aa, Homo sapiens
MFEFESRNKCLSQLKSSQAGGIPSYSGDVVLSFQTEPMFILRMLINVSCLPRMYESKLCSDHLGHMSSERLETVSRARILNAGKINSKLTETCLEICLSVKQTGPPAPRSLNRKGWWVRLPIWSPGLGKIKVLSFSLSCLDPQWKGPSAAGLLDFAGDPL

SEQ ID NO: 927283 - protein, 221 aa, Homo sapiens
MGVNLSGMAWAIPLVITSRSRKLPQSPAATALKTESSTEDKEQEEKSGEDGEKDTKDDQTEQEPNMLLESEDELLVDEEAAAAALLESGSSVGDETDLANLGDMASDGEKEPSGTVKNDASASAAAKKKLKKRRFPGSMEGFLTLDEVGDEKDLELQELRKSGMAFKSGDRNDDGLVEIKVDKMEEFNQENEAALENGIKNVENTEPDVILHFCILKTFWP

SEQ ID NO: 927284 - protein, 169 aa, Homo sapiens
MKQGAALSLFPILPPLLIGAQSLEGAETAGVWHVSATLSMCTLDQVMMAPGLGYSFASHWSRLLEPGEAREQEGALPSLWGAGQASWAPDSAGKLGCSATNGQLQLCLGAWGSCLSDLVGGRTPMGSMGHAALDTPPLLQPTSLQPRPLMGCRCHHLYLIFSNISGFLC

SEQ ID NO: 927285 - protein, 141 aa, Homo sapiens
MISLIIGIRGDTEIRSVPITLHLHAMFKTHYPISKSNSSQYLINALLRIPHLVGIGLPIISKMSRLNRLMEDSQGLGKVTRIQIPSRARTNITLFLESKWEEIYISHENDPSLRRVWLQSRKIQLHGHKNYYNILQSQNYV

SEQ ID NO: 927286 - protein, 145 aa, Homo sapiens
MAKRGQGTVGAMASEGSSPKPWQIPQGVESAGAQKSRIEGISWSLGCKNCEKSIGKSIVSGPDSTVPHSTVPHGFPWLGEGIPQPLALPGNGLVYPENKKNTRMSPLATPIQHSTGNPSKSNQTTERDKKHTNKKKKSNYLSLMI

SEQ ID NO: 927287 - protein, 183 aa, Homo sapiens
MFLIASEELPLKFNIGIGIGSASLNLGNFYGIYCLQVDQAQPTERASQPFQFGHLYLLLQKLDCLLVIVCVLYSHEKLEFGKVIFFCNTVWPRYCLEFWSLLLNGKDRWSCIYPGFCAAVLSRVRPAYYAMFSFGVVRPLCSFESGEVWPLKIKLETALPKILVHSLNWITYWGKQSKTENCH

SEQ ID NO: 927288 - protein, 140 aa, Homo sapiens
MAFWMTFLDLPWARGESSTLRGASQSWQHSPQAELRVLRPYGNISGSPAVLLMAGSGDVHRAVPQCGLHVQAPTPQLPSVLALYEGCVPVTGLSLDIQAFSYILLNLGRGSEASTLSLCPPTGVKPHGSLEGLQPPEEEP

SEQ ID NO: 927289 - protein, 138 aa, Homo sapiens
MSLIILECVRKFETAEGSVQDRKMQESLELLRDFLNGFDQNADSDMENEVQAAVFSEGDEELGGNWSKGHSCYALAKRLETFCSCPRDLWNFEIQRGAVWYQAEEVSKQQSVQDITWVLLKAFRFIYSQRRFEIGTYV

SEQ ID NO: 927290 - protein, 141 aa, Homo sapiens
MCVNANLPQCGMCKLCDDQVGETKINVHRSGDQREELHKKNSRDLQKVPSSIQISSDQCTGVRDMDEAGNHYSQQTNTGTENQTVNVLTHKWELNSQNTWTQGGEHHTPGPVGGKPSIGEDVEKREPLHTVGGRVNGNKLL

SEQ ID NO: 927291 - protein, 147 aa, Homo sapiens
MARLKLDFPAQPSLHSLLLCVLPTSLRTLWYEIIIRKYFVSFRYSSLRASVDEKNWSCFLCYGFSMEAFPVVSNLLIHCQEETNETKGKIRVLLKHRMNEFGAGEIVNKWVPSCREEETHQAIFGSFIRHTWYPVWLEHTSNPSLYE

SEQ ID NO: 927292 - protein, 161 aa, Homo sapiens
MLQGSRAAPNPARSSPEKHRQLSLHTIPQNFRHPNALPLFPFIFHINIRRQECQASKPKLSHHIPCDLHLHIQMADADSTLGEVEISGHRCCVRNYHWATESLEEPASASKTGSYPVSNLYTTLGPGGKELPEIITSNSKIRANSPRKANVKKEMNGLKNI

SEQ ID NO: 927293 - protein, 131 aa, Homo sapiens
MWTAKTQNPRPAFLPSGCGAGLSLEWGSYDLQSNKVDQNSYVEAPTLNVTVFEDMTFMELTYVSRSFQYRKYDLRIIVHAKCYTVTKMMKRIMFLGSHVTGKLHSAASASVKQPVIAQLIRSAFPSLTNPS

SEQ ID NO: 927294 - protein, 136 aa, Homo sapiens
MEPGQEKELEEEEELEKEEEEEEKEKVIEEEEVVKEEEKEEVVVEEVEEEENEENVSGEKLDHWKVTDILQIPVGKPTTAQPPPGNRVIILVISKWYGIVTFSQKCATEITYKAFLKMQVSGLTSDQLNQNLQENS

SEQ ID NO: 927295 - protein, 143 aa, Homo sapiens
MRWALKEDLAMCDDADMTRAKGTFTLDLGWDSGQGVLAPSGRRAAGSVSYIERTKIRLEAHFHIPIEDDLLLLLASLEFRECCPSRLLALLFWKEGSKRGPPWEPWPCSAGEGQTRALSRARNALLLRDRLLLSGGFHPAAIL

SEQ ID NO: 927296 - protein, 132 aa, Homo sapiens
MTLVPLSKASWAYSCGAASTTRAEVPKLMENTGFLGFDIQCYRKANPALSTIASIVKGGRRTGFLSFSVDQHWKLGMSLIYSSLVFHLQHGNHENTYGLGVGSVETVHAKYLTVEIMNKAAGNIPVQVSVWT

SEQ ID NO: 927297 - protein, 119 aa, Homo sapiens
MEIIEKFYYLPTTLIPVPLWPGLSPAPRDWGTWLFPVALKPVDGFQISVAIVSMATAAFSSPTSVVLSDNGFQKNSQELDLRYVGISNLCRRDLLPSCDTHSIPGTLSIIKLFFMLSPI

SEQ ID NO: 927298 - protein, 152 aa, Homo sapiens
MEYPGSSLLKLDENIGAFLGWILLPKMRFAWRLKEMVFIRKTNNCNSGTLDQGSSEEGPNSQCRRVFLIGDICKKLFSEAVIGQAEILNDKPVLIGQLVRREVIASQVLPPAPCLYPLGLRCFGCRRELLTICSAPSGWQKLEACHVTQSPQ

SEQ ID NO: 927299 - protein, 148 aa, Homo sapiens
MGNELNECMVPLKDKELSFCGIQRTQHETWAMAFRVSLRTATPPVHRLCCIREAAVTNYPKPGGGKQLWRTDISIQSEGVKVKVLAGLGPSGGSRGDSVPGFFQLLVAPGVSWPDATSLHHSGLCLCGHIDLSASVSNIPLSASYKDT

SEQ ID NO: 927300 - protein, 147 aa, Homo sapiens
MLKGKSMQAPSWLPRAGFPKAPQAPHTCLHIRIPSGIPEVKGEVPRGQGQTSVLGRSSWFLLLTQAPCCGGRVPTTCITSWVLDSGDVGVPGPMYLPWALLSTWALGAPCHRCRSLRHREGHVPQGGPIPMANSWRGRPAQFPHLEL

SEQ ID NO: 927301 - protein, 180 aa, Homo sapiens
MEPDTAELIRPQGLISASRDGGGVNARRTVLHAGRRGETGNKRLEPTSLQPSLGGSTEADLEHSQPDNVIEKKNPFSEEKFKPAAETCKSNEEPDVNRGTQCKSQQRHWGKCLQGILHRASGKAADTQCQPVKAARRGAVPCKATGMELPKAMGAHFLYQHDLDARPGVKGDHFGALRYD

SEQ ID NO: 927302 - protein, 210 aa, Homo sapiens
MLVQIHPMADAPILDLVGTRGAHTHYPLWFFSNTPSHGAKSPRLNLGESDRPTSSTFLVHYQILGQEDRAWNLSPLAQDVEVNMSPRSWKEAWPTGLTPADPRSRPHDAGCFALRGFHMQRLLVTQNLPQSQTQGDEITPLARAAPEEECLLQLLAEWRAQGLGTLVLVGSRGWAGSAVATGEPRRGFLGAFLSCCQKLLYVTGRECGAV

SEQ ID NO: 927303 - protein, 135 aa, Homo sapiens
MGSVAQTPTLGVQVHLILGDMSIEEAEKPLPQGGQVHQRPAMCGTESVLLHQDFCTGREGQLRLLILEKKMASETLLPLQTCDGRQPNSSAYCWDAFHICHSILAVGSCPTPEDDYGNFACLHDDNNPFETNKRF

SEQ ID NO: 927304 - protein, 169 aa, Homo sapiens
MFCNFLFASSVLLASCFPTDKRNAELPLTEVIRRGKAAVLQAQLEGRRCGGPQQWQKLQACQLPLGAPFQRNAELRLAKVLRQDSGGYSGVLGQWALPDEEICNSQKEVKILTLRGIWKRLIPTLMDDLEVFKTLVKERTAYVVKIARELEIEVEPEDVTKLLQSHDRT

SEQ ID NO: 927305 - protein, 147 aa, Homo sapiens
MAKAAEQQRLQHSLPSGTSIPERFETAAGWKTQAGVAVDLDQKVAPVKRNGIWDLLEKAVWLLLYRASALAAALKAIIAKAMKQQRWQPTPPSGSFMSGRCNTATCGWLDSQASGSYPMRYHGSGTCRPSLLSPLVSAPFLGVYMGL

SEQ ID NO: 927306 - protein, 139 aa, Homo sapiens
MIYRKQALFFRASRQEHLSLLKLCPQQPLLSRSLSHGDGLFIYKSLTEAAAFLSEMLCPERRDLERQSGFSGFAELWWALPSSDFRAALFTLPTELTFPVSTGTGLENALVLSPVHKDLLNSCYVPESEPSLGNTKMTM

SEQ ID NO: 927307 - protein, 127 aa, Homo sapiens
MSMSTMQSHSQYPSFKLLLSRYRKGWTLRLLEDFGDGGAFPEIHVAQYPLDMGRKKKISSALAIQVDSEGKIKYDGITRQGQSKDKVIYSKYTVLVPKDVTNANDPDLQRPDEEAIKEITEKTRVAL

SEQ ID NO: 927308 - protein, 137 aa, Homo sapiens
MRKPHDLQKVMILSFSFLMCVMICEQVSKRRCARMEATVRCHLILEVGSHRLSHRGGDHQGTSTTVGIAVFLSRGIERPGDSAEVIQEMVEELGDNQGSLAAEAALIATMLHCAAPQLECQGMHFLNLEDQRAQAQS

SEQ ID NO: 927309 - protein, 149 aa, Homo sapiens
MAVFQCTARGFAMRKPHDLQKVMILSFSFLMCVMICEQVSKRRCARMEATVRCHLILEVGSHRLSHRGGDHQGTSTTVGIAVFLSRGIERPGDSAEVIQEMVEELGDNQGSLAAEAALIATMLHCAAPQLECQGMHFLNLEDQRAQAQS

SEQ ID NO: 927310 - protein, 133 aa, Homo sapiens
MHTTSVNTVHAALPGAGRPLCMQTAHAKGRIRGEGMQPPSEACQHKKPKSKEIKEARIEVAPDPCGFAAADILWCCDLDMFPSGYPKDSPSGNCHWCGKPGHWKANCPNEINGKKPGTACPFATSSATGKELL

SEQ ID NO: 927311 - protein, 196 aa, Homo sapiens
MNKQKGIASTSTKRTKKDIHTKTPSDCSPSPATEQSWMENDLEELTEIGFRRSVITNFSELKEDVRIHHKKAKNLGKRLDEWLTRINSVEKTLNDLMELKTMARELHDSCTSFNSRSNQAEEKMPDTVQYSYPQVLRAQSEESSTLAWDIDFTEDALVRLIHYHENSMGKTSPCDSIASHQDPPMTRGNDEIYNSS

SEQ ID NO: 927312 - protein, 225 aa, Homo sapiens
MKIKSLEEICLFSLPIKESEIIDFLLGASLKEEVLKIMPAQKQTRAGQRIRFKAFVAIGDYNGHVGLGVKCSKEVATAIRGAIILTKLSIVLVRRGYWGNKIGKPHTVPCKVTGCCSSVLACLIPPPRGTGIVSVPVPKKLLMMAGIDDCYTSARGCTATLGNFTKATFDAISKTYSYLTPDLWKETVFTKSPDQEFNDHLVKTHARVSMPRTQAPAVATTKVFI

SEQ ID NO: 927313 - protein, 140 aa, Homo sapiens
MSQRFLREGFSDHPAWRRCSSSFHLSIPFTSRPGFHWSEAEKPRPYGLSYSSLRLDIFSLYCLSHLHPPSLLTNPLIPFTKCLQQSVPAGRPPWILSFSGLLITSNLCPALLNTRRENKGRKQEEKQVCGGGLRCVSNIT

SEQ ID NO: 927314 - protein, 140 aa, Homo sapiens
MSRMLASDLVTQGEQSEKNKIKNKTLRSTDIVEVKEESKNYKGEMRDQNCKGKLNSGNQKPVRKKFENGVLNVNLLDKFTRNLFCLIHYVKHKGVNKTKPFGAYCLVGKTLLYITKKAIFLITIPCFFLKRHVAYPKKSV

SEQ ID NO: 927315 - protein, 3004 aa, Homo sapiens
MEGNAMEWNGINPSAGEWNGMECNGMESSGMEWNGMECNQPDAMEWNGMEWNGNIPNGMECNGVAMEWIRMEWNGMEWIQQEWNGKEWNQPECNGMEWNGMEWDGMEWNAMEWNQPECNGMERNGMEWNGNYPNGMECNGVGMEWNGMECNGMESTREQSNGTEWNGMQWNGFNLNGMERMESTRVEWHGLEWNGKESTRVQGNGMEWNAMEWNHPKGMDGIEWNGMESTRVQGNGMEWNAMEWNLPEWNGMEWNGMEWNKPECNGMEWNGMEWNGTTRMEWNNQSEWNGMEWNGMELNGMEWNAMEWNQPECNGMERNGMEWNGNYPNGMECNGVAIEWNRIEWNAMEWIQLEWNGKNGINTSGRHGLECNGMETTRNGMEWNGTERNGMEWNGMERNGMEWNGMEWNGKEWILPEWNGMECNGFNSIAMEWNRMEWNGMEWNGINPNKMEWNAMERNGTERNGMEWNGMEWNGMVWNGMEWYGIEWNGKNWNAMDSNGMEWNGMESTRVQGNVMERNVMEWNHPEWNEIEWNGMEWNGMEWNQLDCDGMEWNGMEWNGMELTRIQWNGMEWNGMEWNGMESTRVQGNGMEWNAMEWNHPEWNGMQSNGINSIAMEWNGIDWDTFESTRNQSECNGMEWNGMEWNGMEWNGMECNGMESTRVQSNGIEWNGMQWNGFKLNGMERMESTRVEGHALECNGMESTRVQGNEMEWNAMEWNHPMEWNGMERNGMEWNGMEWNGMERNGTERNGMEWNGMEWNGMESTRNGMEWNGMGITRIEWNGMECNGMERNGMEWNGMEWNGMVWNGMEWYGIEWNGTNCNGMELNGIEWNGMESTRVQGNVMERNAMEWNHPEWNGMEWNGMESTRNQSECNGMEWNGMEWNGMEWNGMQWNGINPSAIEWNRIEWNAMEWIQLECNGKNGINTSGRTWIGMQWNGNNPSTGEWNGMECNGMESSNGMEWNGTERNGMEWNGMEWNGTEWNGMEWNGMERNGFFRNGIEWNAMDSTRLQWNRIEWNGMEWNGINPNKMEWNGMERNGTERNGLECNGMEWYGMEWNGECNGTEWNGMESSGMEWNRMEWNGMEWNGTNSIVMEWNGMEWNGINPNTMEWNGMERNGVEWNGINPSAGEWNGMESNGMESSGMEWNAKQWNQLDCNGMEWNGKEYIGINPSGMEWKGLKWKWNQHEWNGMDWNGMEWNEPEYRGMEWNGMQWNGIIRNGMERNGMEWNRMEWNQIDCNQMEWNGINLNRMEWNGMEWNGAERKGMAWNGTEWNGTERNGMEWNGMEWNGMNASAGEWNGMECNGMESSGMEWNGMEWNGMEWNKPECNGMERNGMEWNGTTRMEWNVMEKSIRMYWNGMERNGMEWNAMEWNGMQWNGINPSAIEWNRMEWNAMEWIQLEWNGKNGINSSGMAWIGMQWNGINPSTGEWNGMECNGMEPSNGMEWNGTERNGMEWNGMEWNGTEWNGMEWNGMDWNQRECRGMECSGMQWNGIFRNGMEWNGMESTRVQWNGVEWNGMEWNGITPNRMEWNGTEWNGMEWNGMEWNGMEWNGMNGMEWNGINASAGECNGTECNGMESSGMEWNGMEWNGMEWNQPDSNGMEWNGMEWNGTTRMEWNLNRINPNVMEWNATEWNGMEWNGMEWNGMQRNGINPTGMAWNGMQWNGMEWNQLEWKGMEWNGKEWNEVNSSGMEWNGIDWNGLQWNGMQWNGMESIIPSGMEGNNGMEWNGTEWNGMEGNGINTRAGEWNGMECNGMESSGMEWNGMESTPLQWNGMEWNGIEWNGINPNRRECNRMECNGTEWSGMEWNGINRSTGEWNGMECNGLESSVMEWKGMEWNGMEWNGMEWNGINSMAVEWNGMESTRIEWNGMEWNGTEWNGMEWNGTERNGMEWNGMEWNGTEWNGMEWNGINAKWNGMELNGMEWNGMERNGMEWNGRMEWNGMESTRLQGNGMEWNAMEWIQLEWNGKNGINTSGMAWIGMEWNGINPSTWEWNGMECNGMESSVMEWKGMEWNGMEWNGMEWKGMESTRMQMEWNGMERNGTERNGMAWNGMEWNGMEWNGKEWNGMEWNGMEWNERVCRGMEWNGMQWNGIFWNGMEWNGMEWNQRECRGMEWNGMQWNGIFRNGMEWNGINSIAMEWNGMECNGIEWNGINPNRMECNRMECNGTEWSGMEWNGINPSTGEWRGMEWNGMETTRMEWNEWNGMEWNGINSIAIEWNGMELTRIEWNGMEWNGTERNGMEWNGMEWNGTERNGMEWNGMEWNGMEWNGINASAGEWNVMECNGMESSGMEWNGMEWNGKEWNRMEWNGMERNGTERNGMEWNGMAWNQRELQGNVMERNAMEWNHPEWNGMEWNGINPSAMEWSGMEWNGMEQPEWNGMEWRVRELNRINPNVMEWNATEWNGMEWNGMQWNGINPSTMEWNGMEWNGMEWNGMDWNALKPNGMERNGINTSGMEWNGKEWNGMEWNGMEWNGMEWNGMESTRLKGNGMEWNAMEWTQLEWNGKNGINKSGMAWIAMEWNGINPSTGEWNGMECNGMESSNGMEWNGTEWNGMEWNGMEWNGTERNGMEWNGMEWNGKEWNGMEWNGMEWNGINASAGEWNGMECNGMESCGMELNGMESTRVQWNGVEWNGMEWNNPNRMESIEWNGTELTQIEWNGMEWNGTEWNGMEWNGMERNGTERNGMERNGMEWNGINASVGEWNGMECNGMESSGMEWNGMEWNGMEWNRMQWNGINPSTMEWNGMEWNGTDWNGMEWNGMELNGMERNGINPKWNGIEWNGINPNGMEWNGMERNGTERNGMERNGMEWNGMVWNGMEWYGIEWNGTNCNGMELNGMEWNGMEWNQLECRGIAMEWSGMEWNGVEQPEWNGMEWRVRELNRINPNNGMERNGMEWNGMEWNGINPSAIKWNRMEWNAMEWIQLEWNGKNGINTSGLAWIGMDWNGINPITWDWNGMECNGMDSPVMEWKGMEWNGMDWNELDWKGLESPRMQSIGMEWIYPE

SEQ ID NO: 927316 - protein, 2219 aa, Homo sapiens
MQSNGINSIAMEWNGMERSTLESTQVEWNGKDWNGVEWNGMQWNGMEWNQLDWNGMEWNGMEWNGMESTRLQGNGMEWNAMEWIQLEWNGKNGINTSGMAWIGMEWNGINPSTGEWNGMEYNGMESSNGTEWNGTERNGMEWNGKERKGREWNGIEWNGMESTRVQGNGMERNAMEWNLPEWNGMEWNGMEWNGMEYTRVQWNGVEWNGMEWNNPNGMEYNGEINPNVMEWNGTEWNGMEWNGMEWNAMEWNQPECNRMESNGMEWKGMQWNGMEWNGINTIAIEWNGMELTRIEWNGMEWNGTEWNGMEWNGMERNGTERNGMEWNGMESTRVQGNGMEWNAMEWNLPEWNGIEWNGMEWYGINPSAMEWSGMEWNGMEQPEWNGMNGMERNGMEWNGMVWNGMEWYGIEWNGTNCNGMELNGMEWNGMEWNGINLSAGECNGTECNGMESSGMEWNGMESTRVQWNGVEWNGMEWNNLNGMEWNGDAIKWNRMEWNAMEWIQLEWNGKNGINTSGMTWIGMEWNGINPSTGEWNGMECNGMESSNGMEWNGTERNGTERNGMEWNGMEWKGTERKGMEWNRMEWNGINASAGEWNGTEWNAMEWNLPEWNGMEWNGMESTRNQSECNGMEWNGMELNGMEWNAMEWNQPECNGMERNGINASAGEWDGMECNGMESSGMEWNGMEWNGMESTLVQWNGVEWNGMEWNNPNGMECNGEINPNVMEWNGTEWNGMEWNGMECNGMESTRVQSNGIEWNGMQWNGFNLNGMERMESTRVEWHGLEWNGMESTRVQGNGMEWNAMEWNHPMEWNGMERNGTEWNGMEWNGMVWNGMEWYGIEWNGTKCNGMELNGMEWNGMESTRVQGNVMERNAMEWNHPEWNGMEWNGMESTRVQWNGVEWNGMEWNNPNGMECNGEMEWNEMEWNGMEWNGMEWNGMEWNRSEWNRRECIRVEWKGMESTRVECGMEWKGLEWNGMEWNQLDCNGMEWNGMEWNGINPNTMEWNRMEWSGMEWNQPECRGMEWNGMQWNGIIRNGMEWNGMQNNGIISITMEWNGIEWNGINTNRMEWNGIEWNRKEWNGMEWNQPKCRGMEWNGIQWNGEWNGMEWNGINSIAIEWNGMELTRIEWNGMEWNGTEWNGMECNGTERNGMEWNGMEWNGINAKWNGMEWNGMERKGTEWNGMEWNGMVWNGMECAGKCNGTECNGMESSGMEWNGMEWNGMECNGMESTRVQSNGIELNGMQWNGFNLNGMERMESTLVEGHGLECNGMETTRVQGNGMEWNAMEWNHPMEWNGMERNGMEWNGMEWNGTERNGMEWNGMKWNQCEGREWNGMECNGMETSGMEWNRMEWNGMEWNQSEYRGMEWKEWNGMEWNGIEWNGMEWKGMEGKEMECNQPECRGMEWNGMRWNGIIQNGMEWNGMEWNGMEWNGINASAGECNGMECNGMESSGMEWNGMEWNGINPSAMEWSGMEWNGMKWNGMQWNGINPSAIEWNRMEWNAMEWIQLEWNGKNGINTSGMTWIGMEWNGINASAGECNGTECNGMESSGMEWNGMEWNKPECNGMEELNRINSNVMEWNATEWNGMEWNGMEWNGMEWNAKEWNQPEWNGMEWNAMDWNGMESTRWNARQWNGMERNGMESTRLQWNGMEWNGMHWNGMQLTGIEWNGMEWNGMEWNGREWNQHECRGMEWNGMQWNGIIRNGMEWNGINSIAMEWNGMEWNGIEWNGINPNRMECNRMECNGTEWSGMEWNGINPSTEEWNGMECNGMEMEWNGMERNGMEWNGMEWNGTEQNGMEWNGMESTRVQGNGMEWNAMEWNLPEWNGMEWNGMKGNGLNSIAMEWNRMEWNGMEWNGMEWNGMPSNRMEWKGMESTRVERNGMERNGMEWNEWNGMEWKGMEGKEMECNQPECRGMEWNGMRWNGIIRNGMEWNGMEWNGMVSTRVQGNVMERNAMEWNHPEWNGMEWNGMESTRVQWNGVEWNGMEWNNQNGMECNGEINPNVMEWNATEWNGMECNGMEWNGMQRNGINPSGMAWNGMQWIGMEWNQLEWKGMEWNGMERNGMKSTRVEWSGKMECNRMECNGTEWSGMEWNIINPSTGEWNGMECNGMESSVMEWKEWNGMEWNGMEWNGINSMAIEWNAMELTRIEWNGMEWNGTEWNGMEWNGTEWNGMEWNGMESTRVQRNGMEWNVMEWNLPEWNAMEWNGMKGNGLNPIAMEW

SEQ ID NO: 927317 - protein, 164 aa, Homo sapiens
MLSLITWNCFTEGSLQFFHPCDKSLPRPLGFQQYSLNMALALCKPAESVDASKTYGLYLFEWWFHHSVQQVYEGCLVPIPEKKFALLGLWAFNGGGRLKYLKCLYGLAFIVLRNSTWLPSVYAKPFGKWLLNYTLGFLSQMCFFTLYGSCEYGCSITYNRVVSQ

SEQ ID NO: 927318 - protein, 157 aa, Homo sapiens
MTKIPTLQRETSCLCSSRPGLTNTSQTQEVERREDPSGMEAIQEGFHRHRDTQSGMLLKRYPKMWKQLWNWVTGRGWNSLESSEEDRKMWKSLEHLLNGFAQNADIDMYNKNQGVHGQVCSKDTLCNAAVWSTNKSITQIIHDYYEFTACNSLFSYR

SEQ ID NO: 927319 - protein, 191 aa, Homo sapiens
MAVYFTWVQLLVCSRRPESLWQNPGPRGQPIGWCPPTPWVGLPDDGSSSLSPLTQMLNLFWQHPDTPRTITLHSSVIKLTFNINHHTFYGARCKLLVDLPFWGLEHSGPLLTAPLGGAPAETLHGHSDSIFPFHTTLAEVLHESLAPAENFWLSIQAFPYIFRNPGRGSQTSILDFCASAGLMPCGSCQGH

SEQ ID NO: 927320 - protein, 240 aa, Homo sapiens
MEWNGMERNVTEWNGMEWNGMEWNGMEWNGMVRNRMEWNEWKWNGIEWNGMEWNGMESTRVQGNVMERNSMEWNHLEWNGMEWNGMEWNGINPSAMEWSGMEWNGMECNGMEWNGMQRNGINPSGMAWNGMQWIGMEWNQLEWKGMEWNGKEWNEVNSSGMEWNGMDWNGLKWNEMEWNGMESIIPSGMEGNVMEWKKGNGINPSGMQGNGMEWKGMEWNQLDCNGMEWNGMEWNGMEWH

SEQ ID NO: 927321 - protein, 641 aa, Homo sapiens
MEWNGMELNGMEWNAMEWNQPECNGMERNGMEWNGNYPNGMECNGVAIEWNRMEWNEMEWNQLEWNGKNEINTSGMAWIGMEWNGINPSTGEWNRMECNGMESSVMEWKGMEWNGMEWNGINPNTMEWNGMEWNGGEWNGINRSAGEWNGMECNGMESSGMEWNGMECKAMESTRLQWNGMEWKGIHWNQPEWNGMQRTGMEWNVMECNGMEWNGMERNGMECNGMERNGMEWNGMEWNQREMEWNGMERNGTEWNGMEWNGMVWNGMEWYGIEWNGTNCNGMELNGMEWNGMESTRVQGNVMERNAMEWNHPEWNGMEWNGMEWNQPECNGMEWNGMEWNGTTRMEWNEGKYSSGMERNGINQSGMEGNGMEWKLIEWNQPEWNGMERTGMEWNGMESTRFAGEWNGMECNGMESSEMESNGMECKAMESTRLQWNGMEWKGVHWNQPEWNGMERTGMEWNGMECNGMEWNGINLIGMEWNGMEWNGMESTRLQGNGMEWNAMEWIQLEWNGKNGINTSGMAWIGMEWNGINPSTGERNGMECNGMESSNGMEWNGTERNGMEWNGMERNGTERNGMEWNGMESTRVQGNGMEWNAMEWNLPEWNGMEWNGMESTRVQWNGVEWNGMEWNNPNGMECNGE

SEQ ID NO: 927322 - protein, 135 aa, Homo sapiens
MLISVLKPNNSLNIFSSSDSAKPVEPFLMLLFESFLTSGPSVWPENSTFRIYPEFDHYHHLEASLLDHCKNSLSDLPTSALPIRPPPQHPTYHSPTGEGFCWRAKRELAAHMVKAGPIERMGWGRCHTLLNDQIS

SEQ ID NO: 927323 - protein, 285 aa, Homo sapiens
MHGSAAPPASSKPHGTGYTLVCPYGLNHVHAGIQAGTHWHSAWEALSTQDVGFEAEESVNRGNQQMGISEQLNAAGEKGEAKPENGRQPHHPLGLRMLDLLWCCHCGRRQIPGTFIPGGLCQPASLLLLQGLCWPLQSLGLSNHRLWKDFMARSTQEAADRDVIHVRICSVSPWESLLFGEGRMTIELLRLGGLAGAVSKQVNSFRTGAFNPLSCSQAFGERGPRERLERVQCAQGMKWLVEGCPEMVGPVQISSASVHNPTHTRHQPELTCRPERKKGPESLVP

SEQ ID NO: 927324 - protein, 166 aa, Homo sapiens
MGGTAPMIQLSPPGPALDTWGLLQFKKCTFLCLCQQYPRESIRTSCLQGSKPWVRDSVPVKNVHKLSISNIQNSGRVNGAAPQRNREEGETYFLKFEKQGYKENIKDQDTGRFFWEERLSTSGITQSGELGCWSTACGILGGCAFRVPVETWNRTSLEIETTVVFL

SEQ ID NO: 927325 - protein, 149 aa, Homo sapiens
MPIWHTYSEKEIPGSCSGIFPPETALPVSTYCLHHSCDNNPLTLPSASRFEKGIDSYVLDDAEASPSSWSLHPYHSSPASSPPLRPFQPHLTLSHGSQDAGVWDPILGPRLSFEEGLQRIAGLAAGVSGEVKRSYWERRDLSIIRKICG

SEQ ID NO: 927326 - protein, 137 aa, Homo sapiens
MAMKATSGHPHCSLHANYNTLAYFPSNSQTTLLQVCWSFLEVHSRPCLPGYHQQRLQNSKDCCLFLPLEASSQRGTRQVPARALLYEVSVGPYWEVSPSQETQGSGTHLRRQSVPYQSLNAVLLDLLLSSELSGRDI

SEQ ID NO: 927327 - protein, 185 aa, Homo sapiens
MATLGRLMSLLSPFDVVIWMTDGWPLYESRLKGKLHVISKRYTQRIERHNLNLRQHLARLGRKSLSFSKSVELHDKSRTWPPEAEEVWWWQLLQLLLPVAGASTGRSWEKGQRPTETRGCAASACVGAPVDLHPAPSTAFDAQTMLKKASEMNESTHWRWRQHGIWFEAACLQARRLDRRALCLS

SEQ ID NO: 927328 - protein, 141 aa, Homo sapiens
MVTVQNPQVAREKEQKRKKKEKKKEKGKGKGKKEGKGKGKKEGKGKGKKEGKGKGEEKGEEEEEEKKDEEEEEDEEEEEEEEKEEEGEEEKEEEEEEEEEKKEEEEEKKKEEGEEEEEEEKKKEEGEEEEEEEKKKEEEGY

SEQ ID NO: 927329 - protein, 157 aa, Homo sapiens; identical to SEQ ID NO: 916613

SEQ ID NO: 927330 - protein, 140 aa, Homo sapiens
MVTVQNPQVAREKEQKRKKKEKKKEKGKGKGKKEGKGKGKKEGKGKGKKEGKGKGEEKGEEEEEEKKDEEEEEDEEEEEEEEKEEEGEEEKEEEEEEEEEKKEEEEEKKKEEGEEEEEEEKKKEEGEEEEEEEKKKEEEG

SEQ ID NO: 927331 - protein, 168 aa, Homo sapiens
MQIHTGRRQSTCLEKCLKLSLEGYTGVGPAKWVVRIKSTYTEKKTHFQKWKCGVGPCLEDASVSVRYARGQILKLSGLPLTFMGKPKVFCLHRARCSSNPITSPSCTAHQEAGLCWGQREAEEADCPQPRFLLQIKPGIDCADSPPGCCHNSSCSLLALKSFSPNYSH

SEQ ID NO: 927332 - protein, 209 aa, Homo sapiens
MFFKERKNEATKERKQGFIENESTIHSVAAHPSSWARAQIQNLLGSKCPLEMLLLRLIGGYTLRTTDLEEGAIIMAEGPGSCSHFQVNTSCGLFWGQPGEPVGPKDHLSMSIMRLLCTQCPWRGPGDGTQDETPGDQTEEGKGVGNRGIDWIELCKRMRRLKVTRRLCPAKFLLLPNSVDTILMGTGHLQNSLSNKRLLQGQNPLPAED

SEQ ID NO: 927333 - protein, 146 aa, Homo sapiens
MDPRLLFIFAAHLVVFCRENWELTLSFAKIWGSANLGLLYVDICLGSFEAIHRVGIQTPDLNECGEDVLDAVEIPSSHILSTVAASASGTFHGAPGSLHSAFSLCQSPNANECLTARCHPSSFCPVIFLLLTDFETSVLYLPVKDF

SEQ ID NO: 927334 - protein, 163 aa, Homo sapiens
MDLKISLSCYQEDFPPGACIIGPSHSKMQKDYENPAAGLAAMHHLWAFICQWRKIQSKRHELSLEEWMQWILQAHKLPTFQAEAAVGARAWRGVRRAAWQRNASLCINFVYSQGWSKGTDGKKIGFKERKDVLASGSSVNLLASGVRTRVTSSYPSSRVPVCC

SEQ ID NO: 927335 - protein, 182 aa, Homo sapiens
MCQNVTPGIMALGMSAVYFQVSGTKEQPVPGHPMQSILLELWGFQVHHCVPGNPRPDFMEHSKDLTLSLLDHSCHWHGRSHSSKEYLELHRENFLLILRFLVAGSAEGAAGAMSGHEGGKKKPPKQPKKQAKEMDEEDKAFKQKQKEEQKKLEELKAKAAGKGPLATGGIKKSGEKQAVPCA

SEQ ID NO: 927336 - protein, 158 aa, Homo sapiens
MPKCESCAAEPLSCRSVGVCWRSVHSRPCLPGYHQRRLQNSKYCCLILPLEASSQRGTCLFEVSVSPCWEMFPSQATRGSGTRLRRQPVRSQSSNAVLREPRSLQSCQTGMFKSAETVCCLLFYYALPPEVESIEAVGLAELQWAPLSLCFLASLLTL

SEQ ID NO: 927337 - protein, 127 aa, Homo sapiens
MPVSRPGARSQGLESGTLGMYLGLCSTAAQIVDMLQSIVNPAVLNKLNQSADIIVVTQYCGNIIVVTQYCDNSIVVTQYCDNIIVVENLTKSVWKVTEVSYREECEQVKEKFLQETAFRTFNVPIRP

SEQ ID NO: 927338 - protein, 155 aa, Homo sapiens
MGPQRLSLTHHFPAVEKPPLAPCHSQGARKLINEGPERTNNGRTSSNLKRGYLWVRSATKLPTGLLIQKDLSIKSLLNKYPQGQLVEAVAATLYSTFLGVFEGPGPLAQLTGRISVSVSVIHPSLGQGLQDGPLQLVPCVRNAAKGVQRTSQKRR

SEQ ID NO: 927339 - protein, 139 aa, Homo sapiens
MCALTLGGFGPGPQLCYMPPQDEVPAALTGPQHSQSTGNNSPMGDTNKSASLEHLLRGPCLRTCAPAAAGVQCGIESRVESAAMVMATEKHPRWACKAALQEGMAWRGPQERPVDRRASNHIGISHGQDSPSLCRSDNQ

SEQ ID NO: 927340 - protein, 185 aa, Homo sapiens
MQWELDYAVPFDNMISQSASCADAENFRQIQGGAGYRYFTGLEAGKRLVNVQDQKRDKSKTKALILLHNCPIRKQRIQGAEPIEKFILKSMQNGYKEEKQTTPKWNYPKTIKLRGPEYNPASCRYYRSVTLVLSHSGTQPVSGHGKTADKSKMRNHLLKREGYIVHKVNITVRRNAVKKFQNKGH

SEQ ID NO: 927341 - protein, 179 aa, Homo sapiens
MDNATHHREYIQYATFSLTCGCPWTILPTTESIFNMLPSPSLEDACGQYYPPQRVYSICCLLPHLWMPMDNILPTTGNIFNVLPSPSLVDARGQYYPPQRVYSICYLLPHLRMPVDNTTHHREYIQYAAFSLTCGCPWTIYYPPQGTYSMCYLLPHLWMPVDNTTHHREYIQYATFSLT

SEQ ID NO: 927342 - protein, 213 aa, Homo sapiens
MQRGEELPRQRRYHDVRCQVGRPLVEEWLTLLEYELWKEAEQAPTPSVTEAWTTSGRGGGKGVWQSVEPGTSKSLPSPAKLQEQRSFQGPHFLSVGAATPAAAGQKRGVQAQRFVGNRRSGRSSLDFSGDLAIMGPGKGRLQPPRERPRAAPSAGEAVVRKLPPRLLQGTSDSASLAVSNVSPNRKNKAQSGPSCLYLSGLVDYSVHFSVERA

SEQ ID NO: 927343 - protein, 182 aa, Homo sapiens
MWHKGAIWEQKLDPHQTPDLPEFKSIRGHGHHYTIVHITEMQFLIATTMTVLTTVGITINFTIIIKENLETDTYTGKIPTEHEDDRLQAKEKRHGMDPSLIALRRNQLCQHLDFGFLASKTAAILLYAAWTRSCLTCTVQIIFAPDPLSSSKRDVGGMVEDGMVKRKLCYISDNRWKLIYVA

SEQ ID NO: 927344 - protein, 151 aa, Homo sapiens
MEKSAGPYDKGEYLTSVQKTLCDIQVLSLSRVPAAFLWLCLPPLGEESVGPQQHTLQRPMHSPEFPVQIALRLLRERGQISSRDLSSRGRIMLLVFTLRPESRQRGRCLQEIEDMEISLPNIHYFNIDMSKMGLINKEEPWQNVKPLSVSD

SEQ ID NO: 927345 - protein, 143 aa, Homo sapiens
MTRSIHLLPGGRGIGKNRGEVVLGLYTRTRPCGLDCEKGNSRRGCSDEQIGVMDMSPDGKMVGLACLRSYWAEEWTEVGCKSDFLDIGKQLACSMYQSLLGHQTLLHLTEVCRPESSGDWLNPYLHMVMALSVKPKLIKNYTS

SEQ ID NO: 927346 - protein, 605 aa, Homo sapiens
MNMFDADTTTNLVTISFILPIGVHVFGLCSTALITDIIQLSTGYQAPYFLTVCKPNYTSLNVSCKENSYIVEDICSGSDLTVINSGRKSFPSQHATLAAFAAVYVSMYFNSTLTDSSKLLKPLLVFTFIICGIICGLTRITQYKNHPVDVYCGFLIGGGIALYLGLYAVGNFLPSDESMFQHRDALRSLTDLNQDPNRLLSAKNGSSSDGIAHTEGILNRNHRDASSLTNLKRANADVEIITPRSPMGKENMVTFSNTLPRANTPSVEDPVRRNASIHASMDSARSKQLLTQWKNKNESRKLSLQVIEPEPGQSPPRSIEMRSSSEPSRVGVNGDHHGPGNQYLKIQPGAVPGCNNSMPGGPRVSIQSRPGSSQLVHIPEETQENISTSPKSSSARAKWLKAAEKTVACNRSNSQPRIMQVIAMSKQQGVLQSSPKNTEGSTVSCTGSIRYKTLTDHEPSGIVRVEAHPENNRPIIQIPSTEGEGSGSWKWKAPEKGSLRQTYELNDLNRDSESCESLKDSFGSGDRKRSNIDSNEHHHHGITTIRVTPVEGSEIGSETLSISSSRDSTLRRKGNIILIPERSNSPENTRNIFYKGTSPTRAYKD

SEQ ID NO: 927347 - protein, 140 aa, Homo sapiens
MMWVPCIQRGRCVNAQNLNIFNGNPVSVHSNEKWHPLKKQPSDILRDRVLHSTNNLEKICLKMHLTLLFKVSDFSEFAAAPQCTKYSQEGAPLLENPLDNQLQHMLLPKSTGHTPRCGLLKVLGEWRDPTVLLTGGGEKA

SEQ ID NO: 927348 - protein, 156 aa, Homo sapiens
MGRNQRKKAENSKNQNASFPPKDHNSSQATEQNWTENEFDELTEVAFRRWDSQRERSEYSQKEAIRLTVDLSSETLQARREWGPIFNILKEKNFQRRMPYPAKLSFLSEREIKSFTDKQMLRDFVITRCALQELLKEALNMERNNWYQPLQKHTKL

SEQ ID NO: 927349 - protein, 184 aa, Homo sapiens
MGAGQRRSLSSYKDHHYSLPPCQPLPKPIPGRSCGVVYTVQPLLPNLGVLQGPHLSTFLEAWVYFGSSSATGAGPQGTGDGATGWSQCHRAVVLLRSAQPRFTAGAHVGEDPPTLRTLREDSLLQVCCSLLEVNSRPYLPEYHQGSLQNSKDCCLLLPLEASSQKGTGFMPARALLYEVSVNPC

SEQ ID NO: 927350 - protein, 142 aa, Homo sapiens
MCRAVGETAVFCLQLATRDFENQEKTILTGDCCYINPLVRRTVRFLGIYTFGLFATDIFVNAGQVVTGNLAPHFLALCKPNYTALGCQQYTQFISGEEACTGNPDLIMRARKTFPSKEAALSVYAAMYLTSHHRNSHVFNNH

SEQ ID NO: 927351 - protein, 128 aa, Homo sapiens [sequence omitted]

SEQ ID NO: 927352 - protein, 140 aa, Homo sapiens
MSMCIHCLAPTCLNNYPSKVHIQVLSNPHGRHNTSSPLKMRFFKNARESLPNGTEVISGATFIYLRTDGKYREAYFACGKAHIRLPLGTATYVWQMRQPECRHRLTSWLSLKNSGKVSRCSGRVKCSLTTGLNLQEGRGE

SEQ ID NO: 927353 - protein, 209 aa, Homo sapiens
MYLPSGLNFCEIELGEEAPLKSFLLEVGLCFGGPGPISQGLLFPVLDRAMKGSLSYLHNGNLGWFLEPTANIILNGQKRDAFHLKTSTRQGCPLLPLLFNIVLEVMAKAIRQEKEIKGIQIGREESKQSLFADDMILYLENPIVSAQKILELINNFKKVSRYKISVQKSLAFLCTNNSQAKSQIRNEIPFTIATKRMKCMGIQLTKTLQ

SEQ ID NO: 927354 - protein, 148 aa, Homo sapiens
MQPFLLPELALSMGIKSMCRGRMHNETEHSGETYRSFNVAKSQSLKRGMEQGIAEVEVKFRSCYARHFHPYPECFEIRGLQHTRLASRSFTVGSGSVAVWGGRARKAMLPRIHGSDKTQAKNDSPTGLSKTIMEVKLLAQRSKQAAGI

SEQ ID NO: 927355 - protein, 141 aa, Homo sapiens
MPIHIFSTFKGNYHVSSTCYEAGTVCSGCKGGHPIRSLEVQDGMADAMSGRRAAGRKVIKKGFPEGLLGQTLGKGELGRGEGAGGMEFQAVGTCAEAQKHEKSRTEAVKRERGRGGLEPCAVTDQVSLRILCEVTSSVWTQ

SEQ ID NO: 927356 - protein, 124 aa, Homo sapiens
MLLLLIILFYMCIFIELIFHFDNYILNNKGLLDIAFSVSCVKAKCLIYLFYYTLSSRVHVHKVQVCYICIHVPCWCAAPINSSFTLDYHIFLYINLSDLASSSAGSINLKDKVKSIYKDSKRCS

SEQ ID NO: 927357 - protein, 154 aa, Homo sapiens
MISSCIQQDGNCGNHNQSSIVTKCTRSSVATRKQISIDGWWSMSKIGKHSHRKQQQGKKCSEDLPERSITYLQEAEVFGSVHWFGVVSRMKTILYKMGVLACATPPQTSDSTARGSKRDLLLLLEEKKGKSNKDFVLHLGYKFSYSKIGYQSEL

SEQ ID NO: 927358 - protein, 283 aa, Homo sapiens
MPTVTVTSLLPFLSDNSDVFLYASLEIVCRRPQIPKAIFVSGFGPLYTYKDSIMVNCEEGYILRGSSLIYCETNNEWYPSVPSCISICSYPPSIAHGHYKEVILITPYPEATYECDEGYVLAGFATIYCKSFHWQLAPPQCKALCLKPEIVNGRLSVDKDQYVESENVTIECDSGYGVVGLKSITCSEKRTWYPEVPRCEWEAPEGCEQVLTGRKLMQCLPSPEDVKVALEVYKLSLEIKQLEKERDKLMNTHQKFSEKEEMKDLFFPSNQHTESSLIHPTLP

SEQ ID NO: 927359 - protein, 152 aa, Homo sapiens
MDTLHLQALSHQSLLSGKVICLTLQKSSQVPPGNGTSILDSLICAIRLCHAGFIHLANVHLGNSVVSCPECIHHVILTAPVTGTIVGSRLCCYNQHREDHSFPCPYTIMGDLPGHEVERAPLQQDLCTGRVGQLRLLIQPRKISKFKIQSTD

SEQ ID NO: 927360 - protein, 139 aa, Homo sapiens
MFSTLLTMFSGLQAWTESYMVSCSVSQAFRLRLSYSAGFPHFTACKMAYSGTSQPLNVFKLHQHFTTSYLNLEAPTGRLLSVDGCKILVVVGGYKWVTFYSAILLMSFLLYRDHILTEVQSGPEEGSRLLWSLETPYAE

SEQ ID NO: 927361 - protein, 143 aa, Homo sapiens
MHLMKNGFAICSCQEAVDLGVQLNEYTNVQLDHSPFQKDLKGYESSDGKKEQLFTVCFCACYSSAGLPDILSRLTIVFFKSVIIAALSALEGVHKSRWGSFSTVPGEAGPRLDPLRICRGMAAGKPISLAQSRSLHRGNISNP

SEQ ID NO: 927362 - protein, 146 aa, Homo sapiens
MSSHEKYTEAFWETFLTCKWILEPFVAYGVKGNILTLKLHRNILRSFFVTCLETVFLKNLQTDICEHSEAYAGKEVSSQKTIKKVSEKLFCDVCIHLSEKQFWDVGIHLTEKLQRDICEHFEAYGEKLDRSILRNCFVMCAFTTQS

SEQ ID NO: 927363 - protein, 167 aa, Homo sapiens
MVSGLSAPHSFRSSPTAPGSRLGLRSALWRRTKLANRNAPTAPEKGHPPLSRIPRGAEWEGSFQGSCRLQVAPPISDRIRYSTKWRPNRDFKDMKKKVCWSRGTEIDKVNGDPRVSLPVADIRLREAVKRQIPHTAAAEMLILTLAFENANTDYKHALAPSLSGRGN

SEQ ID NO: 927364 - protein, 186 aa, Homo sapiens
MDRGSGQLCPFPGLGLAPSPSYSVKHISCPLLILHAEDDPVVPFQLGRKLYSIAAPARSFRDFKVQFVPFHSDLGYRHKYIYKSPELPRILSQQPGILKPRGAGTCNAQEPSSHLESTSDPRERGVQVLSAPSQHMQNDSSGSIVPSCPVYLLAFLSCPTSPGLAHSPTVEVPGICTSSPFTYLYT

SEQ ID NO: 927365 - protein, 2698 aa, Homo sapiens
MLIGATQTQAFEFEMLNQFVIRFELILTWCKVFAGGYCSFATSSGSVSDSSALVISTISAVTSSTEVLNSSVSSVKHSDTCNDSSGSSSVQESYVRDKHAEPSRSVLESYVREKLSDPLSRVLESYNKHSDHSRSVLEYYVRNKHSDPRSSVLESYVRDKHSDHSRSVLESYVRDKHSDPRNSVLQSFVREKHSDPRSRVPETYVRGKHSDHSSILESYMNIQTLVAVFCNPMSRTFRPQPQCSGILTNKHSDHSSSVLESYVRDKLSHHSRSVLESCVRDKHSDHSNSVLESCVRDKYSDPCSSVLESYVRDKHSDPSNSVLESYARDKHSDPPSCVLESYVRDKYSDTSCNVLESYVTDQHSDHSSSVLESYGKNCDPSINVVESYVSDKHSDHSSCVLESYVRDKHSDPIRSILESYVRDKHSDPRSSVQESYVRDKLSDHSSCVLESCERNKHSDHIRSVLESSVRGKHSDSSRSVLEFYVRNKHSDHSRSVLESYVRNKHSHHSRTDLGFYVRDYHSDPCSSVLESYVRDKHSDPSRTTLDSNVRDKHFNRRSTVQESYVRDKYSDQSSSVLESFVRDKHSDPCSSVLESFVKEKHSDPRSSVQESYGKQSDPSINVLESYVRDIHSDHSNSVLECYVRYKHSHHSRTVLGSYCSGILWEGQTFRPQQQCSGILFDGQTSDPRSSGLESYLRDKYSDPLSSVLESCERDKYSDHSSSVLESYVRDKQTTQECSGILLVEQTFKPQEKHSNHNRSVLESCVRDELSEHSRSVLKCYVRNKHSENCRSVLGTYDRDTYSDPRSSALESFVKNKHSHHNRSVLESYMRDEHSDHSRRFLESHVRDKHSERGSSVLESYVRDRYLDPRRSVLESYVKGKPSDPRSSVLHGILCEGQHSDHSSGVLESFVRDNHSDLRSSVLESCERDRHSDHSGSVLESYVRDKPSDNSRSVMESCVRNKHSNHSRNVLESFVRNKISKPRGSVLESCVRNKHSDHSRSVLESYVRDKHSEPGSSVLESYVREKHSNPHSRVLESYLRGKHSDPRSSVLESCERDKHSDHSRNVLESSVRHKLSDSSRSVLESYVRNKHSDHSSSVLESYVRDKHSDSSRSVLGSYVRNKNSDHSNSVLESYEQTARHSRSVLESYVREKHLDHSESVLECYVWNKHSHHCRIVLASYVRDKHSDPRSSVLESYVRDKHSDYSSSVVESYVRDKQSDHSGRVLEFSVRNKHSNHSRIVPESCVRVKISESHSSVLDKHSDARSSVLKSYVNGKESDPIINVLESCMRDIHSDHSNSVLECYVRNKHSHHSRTVLGFYVSDKHSDHSRSVLESYVRDKHVNPRRSVLEFYVRDKHSDHSRSVLESYVRDKHSDPHSSVQESYLRDKHSDHSSSVLESFVRDNHSDPRSSVLESYRRNKHSDTCSSFLEFCGRDKHSDHSRSFLDSYVREKMADNSRSVLESCESYVRDKYSDQSSSVLESYVRNKHSDPCSSVLESYVKEKHSQHSSSVLKSYVRGKHSDPSRSVLESYGRDKHSDPSRSILESHLRDKHSDQSNSVLESYVSMDKHSDPGNSVLESYLRDKHSDQRSSVLESCERDTHSDHSGSVVEPYVRDKQSDHNNSVQECYVRNKHSHHSRTVLGSYVSDKHSDHSSSVLESYVRDKHSDPRSSVQESYVRDKQSDHSSSVLESFVRDKHSDPRRNVPETYVRDKHSDPRSSVLESCERDKHSDHSWRVLESYVRDKHSDPSRSVLESYVRKKHSQHCRSVLDSYVRGEHSDHSSSVLQYRSVLESCVKNKHSHNSRNVLESCVRDKHSHNSKNVLESCVRDKHSDPSSSVLESFVRDKDSDPSSSVLESYERGVLESCVTVKHSDHSSSVLESYVKNKLSAHCRSVLESNVRDKHSDARNSVLESCERDKHSDHSWSVLESYVRDKHSDTSSSVLESYCTQCYVRNKHSHHSSTVLGSYVSDKLSDHSSCLLESYVRDNHSDHSSSVLECYVRNKHSHHSSTVLGSYVRDKHSEHNSSVLEYCVRDKHSDPNRSILESYVRNKHSYPRRSIQESYVRDKHSDYSRSVLEFFVRNKHSDRRSSVLESYLRDKHSEPRGSFLKSYVKGKHSDPSINVLESYVRDLHSNHSASVLECYVKNKHSHHSRTVLGSSVWDKHSNNVRGVLESCFRDKNSERRSSVLESYVRSKHSEYSRSAVESYGRDKHSDTCSSVLESCVRDKHSDRSRSVLESYVRDKHLDPGSSVLTTSSSVLESYVRDKHSDPSRSVLECYVRDKYSDLRSSVQESYVRDKHSDHSRSVLESFVMDKHSDPRTSVLESYVRDKHSDTCSSALESYGRDKHSEPTRSVLESYGYSEPTRSVLEFYVTDILSDHSSSVLESYVRDKLSDHSSSVLEYYVRDKFSDHSSSVLKSHVRDRHSEPRSSDLESNVMDKHSDPSSSVLESDVRGRHAHPIHSVLESYVIDKHSEHNNSDLKSNGYSDPRCSVLESYVTDKDSDDSSSVLESYVRDKLSDQSRSVLESYVRDKVSDHSRSVLESYVRDKVSDHSSSVLESYVRDRHSESRSNDLESYVRDKHSEPPDSVLESYVRDQYSYPRSRVVECYVTNIQTLIAMFSNPMSEIFRPQPQCSRILWDRQTFRPQQQCSGILCEGHSDHGSSVLESCVRDKHSDHHGSSFLESYVTDIQTLVAVLWNPM

SEQ ID NO: 927366 - protein, 540 aa, Homo sapiens
MRIHGSSVQIIDDLIERSHESHDRFFWQINVLFPIKPCETQSGEKPHVPDITRKSHRYQEHLTQHHKIQTLLQAFQCNKQEKTFNTEVIFFIHKRAHIGQTFGKYNEYEKVCNNSAVIVQGITQVGQPTCCRKSDFTKHQQTHTGEKPCECIECEKPSISKSDLMIQHNLTIHQRIHTGEKPYGCNECGKTFHRKSFLTLHQRTHTGDKPYKCIECGKTFHLNVEKPLARSHTSQYIIELTPGKIPMHVTIEKKHLSISQDLLPIREHTQGKNPMNVMSVENPLSISRTSGYIRELTQGKNPMNAMNVGKPFTVGCSSLSIKGLTWEKPYECNECEKTFPYKSFLTVQQRTHTGEKPYACNECGKTYSHKSYLTVHHRTHTGEKPYECNECGKSFYCNSFLTIHQRTHAGKKPYECNECEKTFINKLNLGIHKRTHTGERPYECNECGKPFIRSQISAPIRELTQGRNLMYVMNVEKPFIASHSSPYTRELTREKPYECNESGKTFCQKSYLIIHQRTQTGEKPYESNECGKSFHQKANL

SEQ ID NO: 927367 - protein, 141 aa, Homo sapiens
MQSLSGSLLLHMKEKISLPEHEVQSQSRSHPGNRVHNAVRACVGQKRNHFLLFPVGSPSGCFASAPGTASDTDRACKRGRRVSSGLEQTVGGGPQGGGCEESESSITLWHAESLSSRFLGISLIGSTLPCKAGRTRDYGGH

SEQ ID NO: 927368 - protein, 196 aa, Homo sapiens
MGVKGRSRETRGSGGRSCEKGSDSGYILKVDLTGFADVFGVDHVACPVLIQQDTSPAWDFTDRGADVVNTDKCHSLAQHAGGHLQPSWAKIEPENRSQSSFCRHAPSIAGNATFAAAILPPQPGVDAPLTLHIEAPDALLRVCFPSRSLHVTYLSPCQLVLLETFPGPSHVPAHSAAKGVHLIPLVMDKAHIQNPS

SEQ ID NO: 927369 - protein, 144 aa, Homo sapiens
MVLTHCSLGFLLTCDHLLNFSIPEVQFGSFLKWLFQLLYHFIGFIGLGFNFLLSTTEFLCHPGSEFCICQFSHISIWVGFIAGEPVQPFGEQNGEPWRMDTYGHILLQLSPMQNLLGLAQEYEPGTIAESWPIPVAIFQPLIDC

SEQ ID NO: 927370 - protein, 147 aa, Homo sapiens
MQVVKQPCYENELTSKSKHEDNEIEDWNEPPELPDSGLALGSVCKESRDVIHLQVFQPWIPAPALVEVAGVGSGLYSPWAGLAMTAVGDGGVVPRPMGLCSQGDYGCLCFIIQVIKEVGESWQSQASHCSHAAHCPKARSHSRCAPQ

SEQ ID NO: 927371 - protein, 143 aa, Homo sapiens
MHQHCPHYQLPSARTSTAVTLDSCWPSAATARAAEDMPDKDRGCGLAGEVGSSCLQRAQPACALPQWSLEWSPAGKGLPLEGGSGPIRHVQQGRVKNLSGRLWTPYPPGPPGSCEGQDVNEKQSWVWYKLVGPKVSDFRGSKV

SEQ ID NO: 927372 - protein, 607 aa, Homo sapiens
MEPYYEPDSEFREPLTDVDAFLDSARYNEAGDLDLLKAYLEKNPSDVDARDEQGRTAVHMAAANGHMPILEMLFQFNPQPNVPNDEGNTALHFAALNNRVAAAEALLAHGWRAAEQNIMGKTALQLIYEKQYNEMETLLMSRDETLDTYVPPTQASVMVDLSAKEGDEDEDNEREEKPTVEAKVAAERKTPPAPMAPAKKIVPSASEAPAPVEMSIGERFFEALFSFAEGDYVATRRFLFQNCTLEAVRANKSSGHNRVASQFNLLEFSSSEISPEHGVRHYAHYPTQGPACASAWMAGTVYRNYLLHPDFFGGTHAAPFMENADVADRGQRTNRQLNMLDDLVEYLTRARNSGDATSAADAANSTACSAPALLREHFFTICNGYFVQKRQMASLPARLYRIAAVEGISMADVEEESVSRLHIGLVEVATVTLLLHDPPVSRVREQRQLTDQAERKVVRRSDVDVAAEVEVHEVTQTYNSALSLPPKDYCTPLEWSGIATLSRIILRGTYEATLLAGVQHTLRDLERQASLADASSPATPPFSLPPIFLANVGGGVFNNDKEWIASGIASAVHRVAALSVPLNVRLVHFCQMDEYYMKYFPSWPVLD

SEQ ID NO: 927373 - protein, 1294 aa, Homo sapiens
MNNYVLNDEIGQGAFSTIYKGRYRTTTEFYAIASIDKKRRERVVNCVQLLRSMHHSNVIEFHNWYETNNHLWIITEYCTGGDMSTILRSNINLTTQAVQAFGRDVAMGLMYIHSKGVVYNDLQTRNLLMDSAAMLRFHDFSLACLFQDAATRPLVGTPLYMAPELFMADRPLYSMASDLWSFGCVLHELATGKPPFAASDLETLLGDILTSPTPAVPGAPESFQTLLCGLLEKDPLKRYAWVDVVRSEFWDEPLPLPSNGFPSQVAWEDYKRSRSGRGASQYNWTDSDVRVAVAHAVGAAKSNASTHNVEERERAAATLNVAKELDFTASAAMLLERLPERTQERAAHATGHVATAHGSLVHGCPSTASAASNTFNANGSSSSAVASSRRSRLSESKNNGGDPQRHRVSKGRGATSIRTSGSAAIAYEGGCTAYATNTGAKEDRPTEASLHLFASEALRHLTISDLLPHHTDQHIRPLSNNSRIEYTPEPSYDISTLGFTALTAAEINSLTGKEHTAFFRSLYLALSTLSSGYDNVLNTMNYVISLCGDAEVARASVNSSVMRLCVKHAGRKDAPAGFRTAAALIMGLLVRTTAFITPEVASSSILPDIMQLFEDETDVPVKRKLIACISEFLFYIAVQQKRQRAMWNVQPATVKRIYASALDSDDDVLKHYAAKMIENMASTPQKEMTLELFADPVFVEKLLAVFALPSAEGRSEDMRSDAVCAALKLAMVKDELILAVMQCKWLPVTSYATVMQRSTLTHTMQILLTFLNYALVKGSGGSGSGRRGCALTSSLSVEDAEEVVGNALFVSEDLLARLSEAIEQASVAVYGKTLLFVMLIGCVGGSTICQILNSRIVAFLDRLVRDADLYVKRCGAALSAFLGWFVSEKLASIARRVSSTSTATHLAAIQQLLSNSAVRSGIDFQKDVFQSLSTCIDKAMHNTIYGTYRDEFNTIADRFVESPEEVLRYEENICLYLATSYAEMLRRKEASGRFTAIRFLTSVMVPISAEVTATRKESSGATSAARQVLNAVAPNVTSLLQETSPIPTNTIRLLVTCGEMAQSKLSGLVSEQLLGHIMDYVNESGDGDGIYYPLSFIHLCLLVSQRVDIFNYVVRQGLCALALETLASAAKSRNEPLVEMCCNLLAVVVRRVAGDPSSRVKAQCASCVQEDSIGSVLLPICADTASSIALMESAASVIEDFVRLSSAARDDLTSASAIATWAGALSNALLSSARRAVAASLLAALSTSCESASRDVLQELKCDSRLMSVLANAADCTHMRLVASEANRILKKLS

SEQ ID NO: 927374 - protein, 135 aa, Homo sapiens
MLGANTNDSGNLLSHCVSMKALKGPLWNRRSINPELRSIFLFFSFVLWCIMFVVKSLGLSTRFSHLQDEGMEDDSSFLQFEKSQAEPHSHALTVKQKIFLPLLNELNTMFTHHIRKKKGKKPLTPTLVHLGVCHY

SEQ ID NO: 927375 - protein, 229 aa, Homo sapiens
MLPSHTSLLAAPPMRQASLATRPLILHFSLPGILLPRQLHGFTHHTLQSLFKRLLNREDFLGHLKVVNEFLHFTSKNLQSAKLKAEGIDLSSSKNAARAASKESEKAQWRKKKLKDGKENENRKEGVTSSRAFWKAQSFPETDLWINGSPGGLNMFLKEAREIKIDEGATKLGKIFVSGKNLPGPFRKLKGEGGLSQSHCLSAYASHGVVTGVENGISKPTQQEGQGKV

SEQ ID NO: 927376 - protein, 139 aa, Homo sapiens
MCRPWASESLSKNQLVYENYCADVDEKVRRAKWYWDTNASVRSGHSLAEWLASTLWPPGSPIQICVSANYLMTGTFWITHWGFLSFMHIQSANANAGLSVAQMKSPEFATVSLCCSSKFLFLSPHGLSVLDTTKMGKLQ

SEQ ID NO: 927377 - protein, 186 aa, Homo sapiens
MSKSWIIFPAQKLMTNKIETDAQIEVKELEASQGKGRERSSEKEGINSSDTMEAELARLGGQLQKRVREKGVTRSPRPLDILVEAGFTTVTLGRAVLFGIKGTEARLQTFAEGMGNEGLKLRHTETKLVQSHQQRGVLLEDHSCPDRTLPFMTWQDTDFERMVVQGGAQALYRLIADDVQGKSLQG

SEQ ID NO: 927378 - protein, 139 aa, Homo sapiens
MCPELVPSSGFFVSLTSRMKLWTLTVSVTVLKVGVKPQTFAVSVTTLKGGASGVVYSSWWVRGFTDFRNEAADPRVKRMSVETIIGPADVVESGPSKAIPCLYIHRNGKSAKKLCNFILPFAFLIELGSSRLNELSVEL

SEQ ID NO: 927379 - protein, 137 aa, Homo sapiens [sequence omitted]

SEQ ID NO: 927380 - protein, 146 aa, Homo sapiens
MAVRIPRTWVGPEVLTEEPQSLAISTPDHEEYCQTTSYCSLKAQALLSQLVMNATWPQTYYSGPKALQLAGDECCQDWLLSFKTACFYHAQDMSRNVIWEIRPGTGASRPCPVPYPAVAEQPDEVRVEEEVTLDSLLKISEPQFPQ

SEQ ID NO: 927381 - protein, 140 aa, Homo sapiens
MFGVRAHRYPFYQRVSNPHTKPNFSALCGSTLFPNGEPGDPQNVDSDFSERLSVATAAHHLSKAPTCSPTSPCHDVTSPFTRFLRPRSLKIPLSIIRAVSKPFRLHISNPAPLLAGLLRQHPYWFHFFQPYPSSLHLPFK

SEQ ID NO: 927382 - protein, 140 aa, Homo sapiens
MGLGEDVAITGDEKLFLLAKKVHQNLQAQCPQLQQGHPTHPHSKFQAPILFQPILSLCNSRHLVRLCMHLSLQVSHSHGKRLCSFSQNFSSFSTGDKTLTQGTLMFLGFPPRVKGIMYRVIKLIASHERWIRSVLCLYFA

SEQ ID NO: 927383 - protein, 124 aa, Homo sapiens
MSISDRLDEENLVHIHHHVLCRDMDGAGGDHPWQTKAGRENQRSHALTYKWELNDENTWTHRREQHTLGPTGEVQDQGVSKFGYLVRAAFLQYPLEVRKTVSSHGRRWNGKLTKSYNDAAFQGP

SEQ ID NO: 927384 - protein, 165 aa, Homo sapiens
MRTNSFSIFASSVLQAPLSLQHLVLLLLVDEGGKLVVEGLDLLLLLGAHGLDVGVHLQVKRAQQALVDGDSGDASHTTGPAIASAQATREAAADHSGEARGADAGTGLTLVGAAAEGPGAGGGHLVGLLGHPHGHGGGRSGGRQAEPGIDSRRRGEAASCSLSFF

SEQ ID NO: 927385 - protein, 161 aa, Homo sapiens
MQPSQFSESVGSSPFQVPSTDPILALLSCRPQSWGARTCWLLLLLNACGWVPGTVWDLKRSQAARIHSGETKHLGWAAEATLGMHSYGVARQGPWEGLVNRQVCRTDVPQSCEEAGPAFSLVVSWGQDLSVGGRQGALVDEMAALAGTLIESRDMLSQRKS

SEQ ID NO: 927386 - protein, 143 aa, Homo sapiens
MEYYFAAAVLTVTLTTKICGFVLKSARPRTHQKEETLDASEHLKEQTPDAPSLRTVTLTVMVHGFILEVSETKNPPEGTNSRHNMTRNPLIIYQSQSKLGFKVPISAKLLYQEDTTIINNYKSHSGELRYMKQTLVDPKGELE

SEQ ID NO: 927387 - protein, 137 aa, Homo sapiens
MFPILCPCALIVQFQPMKEDRKMWESLELPRDLLNGFDQKPDSNMDNKVQTEMVSDGHEELVGNWSKGCSVKAQINEYFVVLNSIELLGHLFYKKEISSFYSYHTRSEDLIFTRSVDDSGALSVIGNKWSNKTANDV

SEQ ID NO: 927388 - protein, 464 aa, Homo sapiens
MKVTSILIALIMKPSWRPPVRTSGALVVTASNKAHFHPYADFKDPSSRLMESLEVPRDLEDYEDRKMWESLELPRHLLNGFHQNSNTSDMDNKVQAEVVSDGDEELVGNYSKGDSCYTLAKRLAAFCPCPRDLWNFELERDDLGHLVEEISKQQSIQYVTWVLAEQKGNVGSEPQHRAPTGALPVGAVRRGPLSSRCQNGRYTDSLHGASGKATGTQCQPMKAAGKGGVCCKASRVSLPKAMGAYLLYQHDLDVRHGVKGDHFRALRLGCSIEFQTCIGPYLIEHTLRNADLGFDIQTDSSHMAFSTTSILLERVTSILKGGAVQAADPGEWVLHMSGDLPGHEVEMASPYHDLCPEMVVWVRLLNKASGCSKCLENLPRHEAERPPCTGSLHRNGVGILAAGPCTVVSGKPAGAQRSDTRRPVPSYQAGPGCNSHHIGDTVAVAALLLPQANDRGNYNSSSCC

SEQ ID NO: 927389 - protein, 135 aa, Homo sapiens
MGKGDPKKPRGKMLSYAFLVKTCQKEHKKLQSTSQSFLRSAQREARWKTISAKQKGKSEDMAKANKARYEREMKIYIPPKGETKKKFKSNAPKWPPAASKKGVIKAEKSKKKKEGEEDEEDQEEEEDEGEENDDE

SEQ ID NO: 927390 - protein, 170 aa, Homo sapiens
MRQLPKQIRKLLFHHQNIFCKAVLSSDTKTNLDKILRASALSTIQHQALVSVPPVTWESCTGRCPCDVEPTLALVDVLTLATQKLALNSWGSGKREYLTKDIKAKTWSETDLTFTYNPNQEFPGNKITNLGGILLMDILGDSKTLVIGNSDSKLECFFSMHALSSCGQES

SEQ ID NO: 927391 - protein, 151 aa, Homo sapiens
MRATKDVHIQTLALRKVSNASCVCNRLVEVLLSVGSLECGEGAQRDFLVSSSEEGASAKAIAEAKGSSFPQHAQPEEESQKLHERGPDPDPKRGFLDLTQERIQDHIGYLPDVAMAFANCHGAGGSAAVRTTRGHSRRHFGFGGFWPARLL

SEQ ID NO: 927392 - protein, 161 aa, Homo sapiens
MGISQPLQEALRTTSMMTQARVSFLIVHRYNTAQPLPQQTRGAGRPCQDSNLLTRLPKQQSSALQQRQQCGQRHGFQGWPDLDLNPSTAADELCNLGKVLHSLESQVLPQQNEGIAHLTLHSHSNEPFKSLDTSGKQPVELLQHRVGLSYKRERQLQKKLF

SEQ ID NO: 927393 - protein, 154 aa, Homo sapiens
MRKGWHWQFKMLSYPLQKEGSSSHPTSSILQSGPAQNRDKLFSEGKAQQRELPGVHMAALLPEESMLCSALHGLLLCCAMLDPEPWLEEVLLGRAGPVLPLRSRGRVTATTQPPRPEQLRYAPESQTLALWQSAPTYASESEHVSKFPGATVEW

SEQ ID NO: 927394 - protein, 136 aa, Homo sapiens
MPQTAAASNQPSCHFSLNKLSLYCCKPLLNFQCSEKFDSDHFCQCSHCLYRDDFPRSSLMLFTDTPPQILSMAFIFSLTSTLIFPNTEKSKAPNSLYVLCFQEVSFLRCISGNTVPVAAAQKYYKKTTLNIATTKI

SEQ ID NO: 927395 - protein, 186 aa, Homo sapiens
MDDAPLTIPLKPNHPYPSQRQYPIPQHALKGLKPVITPLLQHGLLKPINSPYNSPFYLSKNRTSLTGLVQDLHLINQIVLPIHLMVTNPYTLLSSIPPSTAHSSVLDLKHAFFIIPLHPSSQPLFAFTWTDPDTHQAQQITWAVLLQGFTDSPHYFSQAQISSSSVTYLSIILIKTHVLSLLIVSD

SEQ ID NO: 927396 - protein, 156 aa, Homo sapiens
MKNSLGAMGGGKRFSDDDNFELFYHTLRVYGIYKSLTACSFHSSIPGTGMVICIAQLLLLCCLTYSFCPGQTRTMMDYIYETSSLEARASDYHENCSKILKYSLAPSIWKAHLSKSHANKLALCVFREFLSFFFHSFNHFTFLNFLDADFTDTQCS

SEQ ID NO: 927397 - protein, 156 aa, Homo sapiens
MGRNQSRKAENSKNQSVSSPPKDCSSSPATEQSWMENDFDKLTEEGFRSQFDQVEKRVSVIEDEINEIKKEEKFREKRVKRNEQILKEIWVYVKRPNLHLIGIPESDGENGTKLENTLQDIIQENFPNLARQANIQIRKYREHHKNTPQEEQPQDT

SEQ ID NO: 927398 - protein, 1157 aa, Homo sapiens
MLVYDLVREDIIGHYLDHFASCVEDGFEGDKTGGSSPEALHRPYGCDVEPQALNEAIRWSSKENLLGATESDPNLFVALYDFVASGDNTLSITKECETLNYYLHAESLAPKGEKLRVLGYNQNGEWSEVRSKNGQGWVPSNYITPVNSLEKHSWYHGPVSRSAAEYLLSSLINGSFLVRESESSPGQLSISLRYEGRVYHYRINTTADGKVYVTAESRFSTLAELVHHHSTVADGLVTTLHYPAPKCNKPTVYGVSPIHDKWEMERTDITMKHKLGGGQYGEVYVGVWKKYSLTVAVKTLKCQAHQQIEMINPSAIADNAEEDTMEVEEFLKEAAVMKEIKHPNLVQLLGVCTLEPPFYIVTEYMPYGNLLDYLRECNREEVTAVVLLYMATQISSAMEYLEKKNFIHRDLAARNCLVGENHVVKVADFGLSRLMTGDTYTAHAGAKFPIKWTAPESLAYNTFSIKSDVWAFGVLLWEIATYGMSPYPGIDLSQVYDLLEKGYRMEQPEGCPPKVYELMRASEELGRAASSSSVVPYLPRLPILPSKTRTLKKQVENKENIEGAQDATENSASSLAPGMGPLAGFIRGAQASSGSPALPRKQRDKSPSSLLEDAKETCFTRDRKGGFFSSFMKKRNAPTPPKRSSSFREMENQPHKKYELTGNFSSVASLQHADGFSFTPAQQEANLVPPKCYGGSFAQRNLCNDDGGGGGGSGTAGGGWSGITGFFTPRLIKKTLGLRAGKPTASDDTSKPFPRSNSTSSMSSGLPEQDRMAMTLPRNCQRSKLQLERTVSTSSQPEENVDRANDMLPKKSEESAAPSRERPKAKLLPRGATALPLRTPSGDLAITEKDPPGVGVAGVAAAPKGKEKNGGARLGMAGVPEDGEQPGWPSPAKAAPVLPTTHNHKVPVLISPTLKHTPADVQLIGTDSQGNKFKLLSEHQVTSSGDKDRPRRVKPKCAPPPPPVMRLLQHPSICSDPTEEPTALTAGQSTSETQEGGKKAALGAVPISGKAGRPVMPPPQVPLPTSSISPAKMANGTAGTKVALRKTKQAAEKISADKISKEALLECADLLSSALTEPVPNSQLVDTGHQLLDYCSGYVDCIPQTRNKFAFREAVSKLELSLQELQVSSAAAGVPGTNPVLNNLLSCVQEISDVVQR

SEQ ID NO: 927399 - protein, 156 aa, Homo sapiens
MVISQDLKKFLSKHNGGQMATVRNCCQNGGELVSLALIYQKHLCPLAFLPLTIPGMVLLNCAEQYLRFTVDDTKAIDTDDMYHNSAPNMVWSEDSAVPGLSPSTRQLLPQSEQGFATLLRSKVVGKPELYPNDIDILTVKSWRRFRSSHILLRIPD

SEQ ID NO: 927400 - protein, 190 aa, Homo sapiens
MVDRSKLLPTSLQNEFIPKEVLLSLTYAANAGPCPENLLPPKKIKTPKPKTLTDTLIPEEFHIVSSTGVSGLECYDEKPNKRVEVAQLNDVMDTMLERAGVENQEYTGPTKIARQMIDFYKDLVTQRVMDQRILEELYNFKHVIEELTRELCLVRAHDVKLTKETEKAHKDLAQALLNAEKNAKKPVFKF

SEQ ID NO: 927401 - protein, 202 aa, Homo sapiens
MRVDVIVTLVSLLSVFALRLSWLMARTGGTGPMILNEKKEEFTGDVLLSKYDTLKIIKHLQENWADIGLGIFNRHKSLEGEMPSERQYMEEIIKNIQKLYKEYEIRINGDNGGESVFKSVNVELAAKDGDTSELPGDLLNGFEQDANNDMDNEIQAKVVSDGDEELLGNWSKGDSCYILAKGLAAFCPILEICGTLNLREMI

SEQ ID NO: 927402 - protein, 153 aa, Homo sapiens
MDGRGTYTAIASGCQIWRILHPNNISYRNRCPTPGQDQTSLKPHFLWIRAYLGLENWLGLSRVYTITTPGWWAQRGEDSHVSLGENAHVINIPADADECTSDGNMCLYHDEMQIRGPGANPRKSAQNCFISVSFNLIERKHALMQREKYECLI

SEQ ID NO: 927403 - protein, 135 aa, Homo sapiens
MLWASVLLVLSSLVSLAGYVYLDWILFFVLYDFCLVCITTYAINVGLMWLSFQKVQEPQGKAKSIIHLLLHAEYTGEEGREGGETVSGRAETGLHCGQIKALFSLHDLLLPALLEALCEDYTKDYMESIWQSVLY

SEQ ID NO: 927404 - protein, 148 aa, Homo sapiens
MDLLESSHGIFSFFWSLLILQTLKEKHQLRKNEELPVLSYSPSVVIRAPGRPGYTSRLQAGMNMAFNILFIIQKLVFRAWILKSDRPGLKTNSTTYYICDLEDLKAGLFLNTPHIELSPLWEAGQVVGFEGFKGSLALQKMAVVDIWF

SEQ ID NO: 927405 - protein, 161 aa, Homo sapiens
MMGRNSFLPKMDFAGDLIRETEEEVEALGLTNGTPERRGESLPGGGRQSQFPQSIVLSFLQQDARSPTEKGLICLPSQHNNLLLAFLLGLAQSNRIQSLPGEKEGRKEGGEGNDRSSGSPVPSLGPGETQHCEARTQTRAVQVQSAWYEEQFRFTENLNQM

SEQ ID NO: 927406 - protein, 182 aa, Homo sapiens
MRKNQHKKAENSKNKNASSPPKDHNSLPAREQNLTENGFDELAEVGFRRRAITNSSKLKKHVLTQCKEAKNLKKRLEKLLTRITSSEKNINDLMELKNTARELHEAYTTISSRIDQVEERLSEMNDQLNEIKCEDKIREKRMKRNEQSLQEIWDYVKRPSLPLVGVPESDGESGTKFRAEFY

SEQ ID NO: 927407 - protein, 164 aa, Homo sapiens
MSVGAQNYAPSQLSFNGLHCIQRAYNLWESSCPDLEVSVLKLPWSKIHRLWTCWGKQHWGKISQAGCQEETDGMLRLANVGAVAFQLEGCANSWCASSPSDSAESPLSYQCSPYMPALEAQKRARRVEGGCEGAVEDGELKSKPSRASELFNYTKMNHRGSTLN

SEQ ID NO: 927408 - protein, 330 aa, Homo sapiens
MEYYATIKRNEIMSLGGTWMELEAIILSKLIQEQKTKHHMFSLQHENRLIQYIGTRSGVLLKRYLKMWKRLWNWVTGRGWNSLEGSEENRKMWDSLELPRDLLNGFDQNADNDMDHEIQAEVVSDGDEGLVGNWSKVTLAVIKRCQGVARAVASEVQAPSLGSFHVVLSLWVYRSQEFRFGNLCLDVRGCMKTPGCSGRSLLQGPQNGRPIDSLHRVPGKAADTQCQPVKAARRKAVLCKATGVELPNTMGTHLLHQHDLDVRHGVKGDHFEALRFDCPIGFWTCMGPQATQINDQCTEKQGPLRCLPKTTYVSNRLIRCEGNDYLHKVK

SEQ ID NO: 927409 - protein, 140 aa, Homo sapiens
MAVAPVAQDLSEPPSTLNGHVRKRRPNRVRIGSTEQWPGAVPGAEEERKWRGPDYQQGEPIPLSLEAQAPVWVSRLPRPHYHLFSKSTLPSVETSSAFGIPYTKGRGLESLKFLELSAVKSLCFQTSQAVGCTDLQILLF

SEQ ID NO: 927410 - protein, 342 aa, Homo sapiens
MIVRPPQPRGTASPLNGGGSDGDGDGDGGDGDGHVGGSDGGGSDGGDGDGGGHVGSDGVGDGGNGGGHVGGSGGGGSDGDGDGGGGGGSGDGGGDGDGGGSDNSDGDGGGACGYRSSCNGDGDGDDGGGCGGGSGGGGSDGGGGDNGDGGDGGGGGGGRSGGGGSDGGGGDNGDGGDGGGGGGRSGGGGSDGGGGDNGDGGDGGGGGGRSGGGGSDGGGGDNGDGGDGGGGVVSGGGVGSDGDGGGSGDSGSCVGDGGGGGGGNGGGGDGDEGGDGGGSYYGDIDGGGHDGGGGSDGDGDGGDGGGRVGGSGGGDGGFRSRPKLVSPASWQFCKPTKYVRTC

SEQ ID NO: 927411 - protein, 159 aa, Homo sapiens
MKVPQVFSWTAQLCHEQRKDGNGLREPTESQGPHCPAVRGQNCRGPQVGSQDEVGSSSSEALSSLEILGWKGDLLCRVGHLFQAWLSQEKWQLPAGSARGSRSVVFGEWIHESGGESPFALTLLLAYPYKFTSPEENRMGDPGQRSFLHSFILSFTQQT

SEQ ID NO: 927412 - protein, 309 aa, Homo sapiens
MANHTGRLDFILMGLFRQSKHPALLSVVIFVVFLKALSGNAVLILLIHCDAHLHSPMYFFISQLSLMDMAYISVTVPKMLLDQVMGVNKVSAPECGMQMFLYLTLAGSEFFLLATMAYDRYVAICHPLRYPVLMNHRVCLFLASGCWFLGSVDGFMLTPITMSFPFCRSWEIHHFFCEVPAVTILSCSDTSLYETLMYLCCVLMLLIPVTIISSSYLLILLTVHRMNSAEGRKKAFATCSSHLTVVILFYGAAVYTYMLPSSYHTPEKDMMVSVFYTILTPVLNPLIYSLRNKDVMGALKKMLTVRFVL

SEQ ID NO: 927413 - protein, 305 aa, Homo sapiens [sequence omitted]

SEQ ID NO: 927414 - protein, 312 aa, Homo sapiens
MAWENQTFNSDFLLLGIFNHSPTHTFLFFLVLAIFSVAFMGNSIMVLLIYLDTQLHTPMYFLLSQLSLMDLMLICTTVPKMAFNYLSGSKSISMAGCATQIFFYISLLGSECFLLAVMSYDRYTAICHPLRYTNLMRPKICGLMTAFSWILGSTDGIIDAVATFSFSYCGSREIAHFCCDFPSLLILSCNDTSIFEEVIFICCIVMLVFPVAIIITSYARVILAVIHMGSGEGRRKAFTTCSSHLMVVGMYYGAGLFMCIQPTSHHSPMQDKMVSVFYTIVTPMLNPLIYSLRNKEVTRALMKILGKGKSGD

SEQ ID NO: 927415 - protein, 153 aa, Homo sapiens
MYICCVLMLLVPFSLILSSYGLILAAVLLMRSTEARKKAFATCSSHVAVVGLFYGAGIFTYMRPKSHRSTNHDKVVSAFYTMFTPLLNPLIYSVRNSEVKEALKRWLGTCVNLKHQQNEAHRMGENYTSTCSRGNFITHTRFMHHQRNYFRTR

SEQ ID NO: 927416 - protein, 312 aa, Homo sapiens
MARENSTFNSDFILLGIFNHSPTHTFLFFLVLAIFSVAFMGNSVMVLLIYLDTQLHTPMYLLLSQLSLMDLMLICTTVPKMAFNYLSGSKSISMAGCATQIFFYTSLLGSECFLLAVMAYDRYTAICHPLRYTNLMSPKICGLMTAFSWILGSTDGIIDVVATFSFSYCGSREIAHFFCDFPSLLILSCSDTSIFEKILFICCIVMIVFPVAIIIASYARVILAVIHMGSGEGRRKAFTTCSSHLLVVGMYYGAALFMYIRPTSDRSPTQDKMVSVFYTILTPMLNPLIYSLRNKEVTRAFMKILGKGKSGE

SEQ ID NO: 927417 - protein, 280 aa, Homo sapiens
MRRDQENNSGNVTKQDSLIPPEDHSSSPQMDPNQDKISELPEKNQNEIDSINNVITSGNQGNTERNAKCTEIEDKVFKSTQSIQGKEKIILSNEQSLQEVWDYVKYPNIRIIGVPVEEEKSKSLENIFKGIIEEDFPGLARALDIQMQAAQTSPRKFIAKRSLHIANMLTEVKMNEKIVKAVRQKHQVTYEEKPTRLTADFSAETLQARRDWGPVFSLFKQNNYQQIILYSVKRSLTNEGKASSFLGKEKLREFTTTKPALQELLKGVLNLETNSWNTPK

SEQ ID NO: 927418 - protein, 347 aa, Homo sapiens
MAWENQTFNSDFILLGIFNHSPPHTFLFFLVLGIFLVAFMGNSVMVLLIYLDTQLHTPMYFLLSQLSLMDLMLICTTVPKMAFNYLSGSKSISMAGCVTQIFFYISLSGSECFLLAVMAYDRYIAICHPLRYTNLMNPKICGLMATFSWILGSTDGIIDAVATFSFSFCGSREIAHFFCEFPSLLILSCNDTSIFEEVIFICCIVMLVFPVAIIIASYARVILAVIHMGSGEGRCKAFTTCSSHLMVVGMYYGAALFMYIRPTSDHSPTQDKMVSVFYTILTPMLNPLIYSLRNKEVTRAFMKILGKGKSESELPHKLYVLLFAKFFFLISIFFYDVKILALIMYIA

SEQ ID NO: 927419 - protein, 403 aa, Homo sapiens
MAWENQTFNSDFILLGIFNHSPTHTFLFFLVLAIFSVAFMGNSVMVLLIYLDTQLHTPMYFLLSQLFLMDLMLICSTVPKMAFNYLSGSKSISMAGCATQIFFYVSLLGSECFLLAVMSYDRYIAICHPLRYTNLMRPKICGLMTAFSWILGSMDAIIDAVATFSFSYCGSREIAHFFCDFPSLLILSCNDTSIFEKVLFICCIVMIVFPVAIIIASYARVILAVIHMGSGEGRRKAFTTCSSHLMVVGMYYGAGLFMYIRPTSDRSPMQDKLVSVFYTILTPMLNPLIYSLRNKEVTRALRKVLGKGKCGEQLVTRADNLPQTMGLSFEKANRLTSSERLREPASVIQFLQRVSGFSQLSWYVPVVVLGANIHNVSFHTLLCPSEWELKASPPSYPSSKSRC

SEQ ID NO: 927420 - protein, 158 aa, Homo sapiens
MAHVYISRPHFWRSAIVCWGPIPGPVGLGITSGGHKTAKVAACCFLKASSQRSTSLLPARALLYEVSVDPYWEVSPSQEASGALSQDDDSSVCKPLNGASGFPAEMPCPVPLESEKFPATQHQLQQPPRFVFETQGPGSVGSQGNILFCGLQKSTERA

SEQ ID NO: 927421 - protein, 317 aa, Homo sapiens
MEQSNYSVYADFILLGLFSNARFPWLLFALILLVFLTSIASNVVKIILIHIDSRLHTPMYFLLSQLSLRDILYISTIVPKMLVDQVMSQRAISFAGCTAQHFLYLTLAGAEFFLLGLMSYDRYVAICNPLHYPVLMSRKICWLIVAAAWLGGSIDGFLLTPVTMQFPFCASREINHFFCEVPALLKLSCTDTSAYETAMYVCCIMMLLIPFSVISGSYTRILITVYRMSEAEGRGKAVATCSSHMVVVSLFYGAAMYTYVLPHSYHTPEQDKAVSAFYTILTPMLNPLIYSLRNKDVTGALQKVVGRCVSSGKVTTF

SEQ ID NO: 927422 - protein, 151 aa, Homo sapiens
MVSEEGRPLDAGFTVKLKDSKADAHNVDLTHHNGLFFKGNESQIVSLAAMENKCYPQNGSILKALDCNDALLTALFKSRPVVAGTSKNTVFDLSQDPVLEEERESQKLLVKKIPLFNQILVTVAIHACHCSWHSDTCTQCFHLFPGVAAKA

SEQ ID NO: 927423 - protein, 171 aa, Homo sapiens
MCVVSILLFVMELVIAYVGNSLSLASDAFAVLSHFVSMIIGFFGVRASNIKQHKKSTYGFLRADVVGAFGNTIFAVALMFSILVEAIKRYINPQKTEEPILVLSAGIIGLFFNVLNYVIFLDCCYCAAPKPQGDMEAGNEKVSSGTQRGSKGTNRSHRESDWKDGGCGSLL

SEQ ID NO: 927424 - protein, 135 aa, Homo sapiens
MDIQFSQHHLLKRLSSPIYVLGIIVENEFSLDLRGKAFSFSPFNIISAMGLPFTAFIMLRHTVAITPRIALALTGSQHNTGSFQRPDVGEFPQALGGSRDAVWQPGIRVKNLRNLPGHMLPHSIGSKSSIAPGLA

SEQ ID NO: 927425 - protein, 137 aa, Homo sapiens
MKKPPKKHFQLPVLAAAPPTRISKGLDSRQPQPVLVASPPGELAGVFKVSNVASSNSSPTVTYPLTRTRKGSQFLSTSVIVATWKHPGNFCILHRFSFTLKCVHGKEIKSTSKHDPKKPSYLPSLFLEKIKIILVPF

SEQ ID NO: 927426 - protein, 155 aa, Homo sapiens
MLSGNQDLDSETLGIYLALYSTVAELASKTQDKVLPTLPSPTPQAEESPCVHHYHLPTGSTARALPISLQIQGLFSQLRCCPRAMARIRDLTSPPDALSLFGQADTQAQDKVPFISPLAFLKEKGPLPVAMMAVNEASMSHTITQDPQPVPPVIQ

SEQ ID NO: 927427 - protein, 245 aa, Homo sapiens
MTFHQNPRNACSLFEDDENTEGGVVHLLGLGKEVVQMCMIMDGLDEDGFAVRVAAYEVDGSAGCISCNEADLMVSMFGVHSPPEAERPTEEKATVIHSAMHAKSGTVSFGPVLNFCPACVMLLPGLHRDAGSACGYHSHSKCGALQAVSAMAHSSLGAGLSPPSLSLGSGSAAAPRTVAAARAPALLTTAPVTGVGPLAPASVVAPVVVQEAAALGARATAPRAWGTARGSWRQTLYWVLWGTLG

SEQ ID NO: 927428 - protein, 185 aa, Homo sapiens
MGCALEWHCGGPFEGIGIAGGFLERKSQGCRSPLGWLDPQQDMEEKLLRVEGVIMEHFHKVRESCGSELMFPQRTRIQKMQGTGSCPGMGPLEPSLGPIKDTSSFSTSSALTPQGRVCAPACDQGEWQPGIPEGYEQGRGMGRMEVGWRKSCVLVFCHTEEEWDSVCLESVEAVRPTGGRIGGES

SEQ ID NO: 927429 - protein, 145 aa, Homo sapiens
MEMESNSGSRTVKRGVYRNSTKMSCQQNQQQCQPPPKCPIPKYPPKCPSKCASSCPPPISSCCGSSSGGCGCCSSEGGGCCLSHHRHHRSHCHRPKSSNCYGSGSGQQSGGSGCCSGGGCLRLINFRPWICIILALCQYLYFSDY

SEQ ID NO: 927430 - protein, 141 aa, Homo sapiens
MWCGCDETLSVQIYLPIARSGIPAFLHCLTPGVHEWCPDPLGTLSAWSCLVPACGGILVFLQCWSRSVHGRTQTVHECSPGRGKTLNVQTFLLTGHVWTLGGSADGAQPVRGLTLTVCLSLLNVPHCHWPDYHWTLGVHCL

SEQ ID NO: 927431 - protein, 141 aa, Homo sapiens
MARRPILAPLGGKVELSCQLSPPQSAEHMEIRWFQSHYTRPVYLYKDGKDLYGETISKYVERTELLKEAIGEGKVTLRILNVSADDDGQYHCFFKDRNVYEESITEVKVTDSSSEISSQEHFKLDLCQAECAQLFNCFSWA

SEQ ID NO: 927432 - protein, 136 aa, Homo sapiens
MKDSPSLGTFPVHSSLSTASLSRGPLQFFHSLHTSSRGRPIPNQLLPTTPTCILHQDIHREESAFCCSGPRARAFLGASYSSQNIPAPYNSSSLLEPQLLDARLNSSQVGRNPTLVHSAPTEGYASQLSTFPCQRS

SEQ ID NO: 927433 - protein, 139 aa, Homo sapiens
MENRLRAGIGKGPTGTAWQVKEQIFSEHLHWARSWEGKHSCKTLSWETVFVVLVAKGHFIIQFAFANKPETKPGHGRSEPTGGNGGVEDANESGTENKSCQHHYFLRTAQRLRSAEQMLGIRQNGSELWLLVLLDQGSK

SEQ ID NO: 927434 - protein, 140 aa, Homo sapiens
MMTCWQRGATHSKVPSELFCYSIKLLFTLLTLHLSVYLIFPGHKIRTRNLLNATAVTPSLGPCSSWSLQASITFPGASHGSCLCCAWSSHSHTESHLCWHLELPASLQQLACLSVCSGRTPCSLTHTLLATPRLACPWQA

SEQ ID NO: 927435 - protein, 180 aa, Homo sapiens [sequence omitted]

SEQ ID NO: 927436 - protein, 202 aa, Homo sapiens
MDGVCQSHGVASCKEGPCVDDCPLVPLWVRSLAASHGRDPKGEDLHPRPTWGRGRYRCSEWATPGLKRDGIWGSVSLKEKLSPRKRRQLGHDSDRMCRKEGRNKNEDPKQPLVHCAGPGSSLQQEADWYFLTPHMEESHWSAFPSHLSRPPAFHVPPTSLIKSLCPERHLPFHRELNPPTGLQASGLCGEPQGGEALFPPCS

SEQ ID NO: 927437 - protein, 493 aa, Homo sapiens
MHPHRDPRGLWLLLPSLSLLLFEVARAGRAVVSCPAACLCASNILSCSKQQLPNVPHSLPSYTALLDLSHNNLSRLRAEWTPTRLTQLHSLLLSHNHLNFISSEAFSPVPNLRYLDLSSNQLRTLDEFLFSDLQVLEVLLLYNNHIMAVDRCAFDDMAQLQKLYLSQNQISRFPLELVKEGAKLPKLTLLDLSSNKLKNLPLPDLQKLPAWIKNGLYLHNNPLNCDCELYQLFSHWQYRQLSSVMDFQEDLYCMNSKKLHNVFNLSFLNCGEYKERAWEAHLGDTLIIKCDTKQQGMTKVWVTPSNERVLDEVTNGTVSVSKDGSLLFQQVQVEDGGVYTCYAMGETFNETLSVELKVHNFTLHGHHDTLNTAYTTLVGCILSVVLVLIYLYLTPCRCWCRGVEKPSSHQGDSLSSSMLSTTPNHDPMAGGDKDDGFDRRVAFLEPAGPGQGQNGKLKPGNTLPVPEATGKGQRRMSDPESVSSVFSDTPIVV

SEQ ID NO: 927438 - protein, 246 aa, Homo sapiens
MALAASKPDMRLTGSLLCSQFCLCMAEAILLFSPEHSLFFFCSRKARIRLHWAGQTLAILCAALGLGFIISSRTRSELPHLVSWHSWVGALTLLATAVQALCGLCLLCPRAARVSRVARLKLYHLTCGLVVYLMATVTVLLGMYSVWFQAQIKGAAWYLCLALPVYPALVIMHQISRSYLPRKKMEISLVQEGAEFGASWQMRAGLSSLQRPPRSLLQLKVVPQAALGASAERLLLPAAGPPKSKL

SEQ ID NO: 927439 - protein, 135 aa, Homo sapiens
MLYLLWLLYRFLKIIGPVTGLKFNPSPAFEAFFSQGLQLQTIRTVQILGPHCTSFPLNPWVPKVGASQHPPPHPQQLEAHVSFSIKISLCPRAPCSPVVHHPDCTLEIPGGLLKISILLYYPQILIELGCCRTQA

SEQ ID NO: 927440 - protein, 295 aa, Homo sapiens
MRDQPWKKNLGGTPTNLTRKVQLSDAELCPASLGWKGTVMEYQGSSFSDPKHLSHLPGFADPGSYAGRISSHPPPPTLFNGLHAAILDAQNQHCSICEVLPKFSPPGSPVELTTALNAAVHNGAMAYAFMKFITQSPKSCVDKPSWSSSLVGEIDTLNGNYTTALNVRKEICWDCFDEEHLSQQSGELGSKVRVALSRKQSCLCSSESGVNGEVALAPTTGTSWYHCQLCRGPGIPSGIWTAGPHLLLALLLAASTTIAGAGDSGNFLQVEFTGLKGTLVYTNTSSLCGFAKGCQ

SEQ ID NO: 927441 - protein, 195 aa, Homo sapiens
MPSCLLPCIKMCFCFSFAFCHDCEASPVMWNCESIKPLSFINYPVSEEIPKWKRLQEETEHENSEKVQPDDAIEKKNTFSEEKSNPAAEICISNEGPNVNHQDNGENVFRECQRSSPQPLSSQAWRSRREKWFHGRGPGPCCFVQSWDLVPCVPSGAKRGQHRAQAIASEGASPKPRQLPRGVEPAGAQKSGIVV

SEQ ID NO: 927442 - protein, 137 aa, Homo sapiens
MNILKWKLVLPFPGTYVPLRATRGQQRAHSEEHPLPQDSSACARWFLPESSKAREGAESLKGGRAAWVLGVVCGAVASRVRRVQAPPGRPEMKSSPPAKPPRGAVQRGPLGGGHAVVPEVPELALRGPALRSDELIR

SEQ ID NO: 927443 - protein, 201 aa, Homo sapiens
MIDKLATRALIRDYKDGILHENETSREDENESPFPDIPKVSELITKEDVDFLPYMSWQGEHQGAIRNQIASFGFAAPPRQFDASQFSQGPVPGSCADCIPQLASCPTGPPQNPSSAPYCGIALSGSSLSSTQSAPLQPVGGRTTRPSTGTYPELDSPQLHFSLPTDPDPIRGFGSYHPSASSPFHFQLSAAPLTANNLCLT

SEQ ID NO: 927444 - protein, 1912 aa, Homo sapiens
MDKNSDRHSRFLESKVRDKHSEPSSSVLESYVRDKHSDPAEVFWNTLEKHSDPRSSVLESYVRYKHSEPRNSFLESYVREKHSEPSSSVLESHVSVKHSEPSSIVLESYLSDKHSELRTCVLECYVRDKHSEPSSSVLESYVREKHSEPSSSVLESYGQTNRTQQESSGILCEGQTLRTQQQFSGILCEGQHSENHRSVLETSVLESYMRDKQSEPSNSALESFVRDKHSDTQQCSGILCEGKTFRPSCIVLEFYIWHKHSELSSSALEPYVREKHSEPSRIVLECYVWDKHSEPSSRVLESYVRDKHSEHSSCVLESFVMHKVSEPHSSVLESSVLESYVMDKHSEPSSNIPESFVMDKHSDPRSSVLQSYVRDKHSEASSCVLESHKHSEPCSSFVDSTVRYKHSDPRRSVLESYVREKLSETCSSALESLVRDKQTQLSSSVLDSFERQKYSDPRSSVLESYVRDKHSEPTSSILESYVGDKHNPATVFWNPLDKHSDNHNSVLESYVRDKHSERSSSVLESYVRDKHSERSSSVLESYVRNKHLEPSSTVLESYVRDKHSESRSSVLESYVRVKHSETCSSALDSFVRDKQTEPSSRVLESYVRDTQNPAAAFWKPFPVLEFSVRVKHSEPRSNVLKYYVRYKASELSSSVLESYVSDKHSETSSSVLESFGQTETSSSVLEAFVSEEHSDPRSSVLESYVRDNHSEASSTVLESYVNDKYSEPRIKTNIESQTSVLESYVRDKHSEPRSSALESYMRYKHEEPSSTVLEPYVRDKHSEPSNSDLESYVRDKHSEPSHSVLESYVIDEHSEPSISVLESFVRDKQSGHSSSVLESYVSDKPSELLSSVLEFVLASYVRDKHTEPGSSVLESFVRDKHSETSSSVLESFVRDKYSEPRSSDLESYVKHSDPHSSVLESYMRDKHSEPSSSVLESFGREKHSHPRNSVLESYVSEKYSDPRSIVLESNMRDKHSESSNSVLEPSVRDKHSDPHSSVLESYVRDKHSEPSSSVLESFVRDKHSDPLSSVLESYVRDRHSEPSISVLESYVRNSHSDPCTSVLESSVGDNNSEACSSVLESFVKDTCSDDSRSVLESYVGDKHAEHSSSVLESYRDKHSESSSTVREFYVRDKPRERSSSVLESFVRDKHSDTQSSVLESYVRDKHSEPCSSVLESYLRDKHSDPHNTVLECSVSDKHSDPRSSVLESYVRYKPSELSSSVLEFYEREKPSEPSSSVLECSSVLESYVRYKHADPWSSVLECYVKDKQSEPNSSVLESNYVRDKHSEPSSSVLESLVRNKLSEPLSSVRESYVWDKHSEPSSCVLQSYVRDKHSEPTSGALESLDKHSEPSSSVLESNVKDKHSEPSSSVLEYYVRDKHSEPKPSSSGLESSVKNKHSEPSSSGLESSVKNKHSEPSSSDLESYVRDRHSEPSSSVLESNESYVREKHSEPCSSDLESCVRDKHSDPGSTGLECSVRDKHSDPRSSVLESYVRNKPSELSSSVLEFYVTDKPSEPSSSILEFYVRDNHSETSSSVLEFYVRDNHSETSSSVLVFDMRDTHSEPSRSVLESYVREIHSQTSSSVLDSYVRDKHSDPRSRVLESFVKDKHSEPSSSVLECYVCDKHSGTHCSDTESFVRDKHSDPRSCVLESYVRDKHSNPRNRVLESFVKGKHSEPSSSVLEYYVCDKHSGTRCSDKESFMRDKHSDPHSGVLESYESYVRDKHSEPRSSVLESYVKDQQSEPSSSVLESYVKDKHSDTLSIDTECFLREKHADPHSSVLKSYVRDKHSEASSCVLESFNPQAVLWNLCEGQAFLHFSSVPESHVIEKRSEPSSRVLEFYVKDKPSEPSSSVLILNDRDNPSDPSSSFPESYVRDNTQNPTAVFWNPILVAVFWNPICGTNTQNLGAVVWNPL

SEQ ID NO: 927445 - protein, 364 aa, Homo sapiens
MIEAPEENINAYLHRTALHWACANGRAEVVTLLVDRKCQLDILDGENRTTLMKAVQCQREVCANILIDSGADPNIVDVYGNTAVHYALISTALMLAMCHGSSEIVGMVLQENVDICAEDTCGMIAERYAVACGFNPEEPDPASQIEKSDERTPTPKASTWDPLYHFALLSASDPSPRAAAATPDPTPDPSPAQAVPPPYNSNSWELSSHEPVPCQPKYLSLKGFQHEPSMSPYNTSILPVKKSDGPYRLVQDLRAINRIVQTTHPIVLDPYTILSKIPYNNQWFTVIEAKRCNGYSVIDGETLEEIEAGKLSKNWTAQTCELFALSQALKDLQNQEGAIYTNSKYTFDVVDISGIQEEISQDHT

SEQ ID NO: 927446 - protein, 169 aa, Homo sapiens
MVDPHIEFQNIPALVWVIPEHGYEGMNDCPSHGIPVYCWRVLRVSPSHTIREHCYKALNDCTSHGIPENSCSHLNVCPSDSIPEHCYWVLSVCPSHKIPDHSCCGPNVCSSHSIPEHSCCGLNVSPSYRIIEHYRCGLMVDPHIGFQNTLAGFWVFVPHMGFQNNPPVV

SEQ ID NO: 927447 - protein, 585 aa, Homo sapiens
MIRGIPKHSCCGLSVCPTNRIPEYFYCGLKVCSSRRIPEHCYEDRIREHCYKGLNYSPTHGIPEHSCCGLNVCPSLKIPEHCCWVRNVCSSRTIPEDCYVGLNVFPLPRIPEHCFEGLIPEHCCSVVSVSPSHRIPEHYCCGLNVCPSHRIPEHCYECLNYSPSHRIPEDSCCGLNVCPSLGILGHCCWVLSVCPLCKIPEHCSVGLNVYPSHRIAEYCCEVLNVCPAQWTPEISFCVLNVLHVCPSNRIPEHCCCVQNVCSSHRTPELTCYGLNDCPSYRNPEHYCLEHCYKGLNYSPSYRIPEHSCCRLNVYPSLRIPEHCCWVLSVCPSCTIPEPCHVGLNVCPSHRTPEQCYEEYCCWVLSVCPSFTIPDHCYVSLNVCPSDRIPEHRYEGLNVCPTVRFPEHPSYRLNDWPSYKILENCCWFLRGSLSHRISEHCCWGLKVCPSHRIPEHCYEVLNYSPSHRIPEHSCHHLNVPHLGFQNTAVVIPEHCYEGLNVCPSHRIPEHCYGCLNYSPSHRIPEHSTCCLNVCPSLTIREHCCWVLCISHLHTSPEHCYVGLNVFLSHRIPEHCYEGFQITAAWF

SEQ ID NO: 927448 - protein, 148 aa, Homo sapiens
MLYSTDAEAVVVEEHKLAVSRTGQGSAGGSRAPGTTTGGTPCVQVHGFPVPLPLTKHVKNSKGFRSQTWAQARGAWPVVLAKVGTWVPNRHRSTALARRDWQFQPWDISGGNWSCGHPGDTESGSLCPSHRHPITKMRGFALNICSLS

SEQ ID NO: 927449 - protein, 300 aa, Homo sapiens
MGKHSDIPSSVLESYVWDKHSDPSSSVLESYVRYKHSDPGISVLESYGKTFRPQQPCSGVLCDRHSDPRSSVLESYVRDTHSDHSRRVLESYVRDKYSDPHSSVLESYVRDKHSDPGSSVLESYVRDKHSDPSSSVLESYVMDKHSEPRSSVLESYVKDRHLDPRSNVLESYVREKHSDPRSSVLESYVRDKHSDPSSSVLESYVRDKHSDHGSSVLESYVMDKYSEPRSSDLESYVRDKLSDPSSSVLESYVRDKLSDPRMCSSILCEGQTFRSQHQCSGILCEGQTFRPQEQRSEILS

SEQ ID NO: 927450 - protein, 157 aa, Homo sapiens
MGVTTAYITDTTTPFLGGGDTAEVRYMPMPVPSNQQTTASWESNGLRKKDTKTKKTQSQEHVFHACKKDKERHPCQAALIRDDSAMRLHVHNHLGNHGQGETDVSSAEFGEEEAHGGVERGVRADSQDAEQVPQHRDHIHGQGQGQQSEDRLQFWIL

SEQ ID NO: 927451 - protein, 324 aa, Homo sapiens
MHGYLLYLFVITAKDQQAALLHPHGAFTGTSKSLPAPHRLLGCHSFWVCGQTTRTLAQCPPTPCGPQPITQPQPHHPLLPKPFLMPEEKAMPLSHSLCLVSCHVGGAVSGGESSPGREAHLLLSDFRAASQGKNPEQMEASQKPVAGLWAWWLNISLSAASHGAQNHPFKRVTTTLQSQGWNKDLWIMRELLCNNRPEQLLQETATIKAPIAPDQGSPAPLMVEGGYLRSSCVSTADPWSQEVIYNFCKAVSSVSCMPFNIHFNSNIPPESSGDWRMQQPCKVEQSILGAQHGGGGCRPGSLRELFPCLLAEPNVEEEVAALGA

SEQ ID NO: 927452 - protein, 317 aa, Homo sapiens
MKTSQFIFKDEKITETDSEPEEGEITDSQTEGSYDEGITSKGNATAKDTEEADEEKVWPSYMRVIVIRSPVLQTGSFFIITAVKSATIGRENDMEHTLRIPEVSSQNGTIVNVKWIVQLKTKCDPYEPEHGDKVKIGDTVLSYYIHPGSNSCVGCEPGHVRAHLFLDKKDESLNTDYKDDKILENPKCKDRAGKHREQIGNEGNFQRDDAPASVHSEITDGDKGQKMLKKISGKHMQDWRQTNRLQLKRLTFSKTRTTTTRTTTGTKHRRGLLKTFNNNNNNNNWDKAQERFAENFPETKLQKDDLGTIPWVKGTEE

SEQ ID NO: 927453 - protein, 282 aa, Homo sapiens
MGKGNEDPDLHCSSIQCSTDQPPFQQISFTEKGSDEKKPFKGKGKTAFSHSSEKHTQRQAGSDPNPNKENSEETKLKAGNSTAGSEPESSSYQENCRKRKISSKDICQDRAGNCPEEECNLTLNKKSRSSTAVHNSEIQETCDAHHRGSSRACTGRSKRHRSRALEVQTPSLRKSLVTSVRAMSEAVYQDLAQVWAQQIHSPLTCEQLTLLTRLRGPLCAQVQTLYSMATQAAYVFPAESWLVPATLPGPGDSALDREAHPFPGQEITEPVSGSDEAKLGAP

SEQ ID NO: 927454 - protein, 192 aa, Homo sapiens
MLGSLELLRDLQNCFEENADSDMDNEDQAEVASYGDEELVGNWSKGDSCYAKRLTAFCPCLRNLSKVFKRKQSIKVLKILQLDDEIEKDNPFSGEKFKPAAEICISNEELNINHQDNGKMSSGHVRDLHGYSNHHRPGGLGGKNGFMGPVQGLAALCSLRAWCPVSQSWLKGQCTAQAMASEGTSPKPWQLT

SEQ ID NO: 927455 - protein, 138 aa, Homo sapiens
MLEVHVSMGSGSHVGQQEGPAAQLSVPGADCGRNLGKSGEELGDTGESLKAGGEEVKEMGEGCSKVPGEELPLKSEFLRGEKEKLGEASMDFGESGLGDRSLEEPDKTPLFLDADMIRKPAAPRDPYQFSNPQNEGVF

SEQ ID NO: 927456 - protein, 160 aa, Homo sapiens
MLGARAGSGVARQLLPAHRGRLQLGRPGGGAWSGCRLECVRARLEGPLVVPPASLLGASLPLRLRRRWAFARAELSSPQHRPGEHREGEAEFSSAQTSEIQRRRSSVLSTDPGGRAGSTARAELRSAQHRPWGHCLALVRDENAVLFPYMWLANYPKIMC

SEQ ID NO: 927457 - protein, 259 aa, Homo sapiens [sequence omitted]

SEQ ID NO: 927458 - protein, 206 aa, Homo sapiens [sequence omitted]

SEQ ID NO: 927459 - protein, 191 aa, Homo sapiens
MPPRGSVSVIMKAMPLAPREWHSTAKIDEANLHLGSSYHTGEQSCTHSDVYLRRTFRGPTAVVPTTLWLHKGITGAKSLGPVIVSSGYHKKISQTGRLKQCLFLMVLESGKSKIKVLADLVSGRGLLSGWQTAAFLMCLRMEDRKLCLSSSSYKDTNPIRGSPSSKLHLNLITSLHPNTTTFRIAASTYEF

SEQ ID NO: 927460 - protein, 169 aa, Homo sapiens
MNRTARRACILHPECPPNPAWTPSFLDISETGLKEERDEYTDEAPHCYKSQCLELSWNPHQHALPIPRRKQRTCCQGPRLARKYLRLRDGFSVISEKGSSPRQDERKEVPLWVSKDQGGRKAQERDRSPCPPLSRMASDRRGESISKLQGTARIGDDVFSCFITRIFLK

SEQ ID NO: 927461 - protein, 143 aa, Homo sapiens
MVPSMLGFWGGLGELLVVAGGRRASVSDGKMISQDAWRGGTVQYDSKVSLDVCNEPTLISSIQAHPGYSFTSSFQQVRFIETCEHRSTAYRNRCGCKSVILLLSVETEEGTGLQSMETCGCRSKTCRKRFKHKSTKIDMGKGL

SEQ ID NO: 927462 - protein, 201 aa, Homo sapiens
MELGSQDLFSTLVISVSFPAGTNSETRDGEEELVGNWSKGYSCYVLTKRLGAFCPCPRVLWKFELERDDLGYLAEEISKQQSIQEGSAEGGQSPSTEPSGAVRRGPPSSKPQNGRSTNSLHREPGKATDTQRQPVKAARRGAIPCKATGVELPKAMGAHLLHQRDLDMRHGVKGDNFGALRFDCPAGFWTCMGRDFWSVDF

SEQ ID NO: 927463 - protein, 148 aa, Homo sapiens
MKEGGLDQVEVVVAVKNKGEIHMFRRPNSDPLLPGTLCSHHNPWCLLLPLNYVRDSRFTSLQLTSAPRAGTVWVQGTVLPGPRFPPLSNEEEGPILLNVCLAVQLVLLMTSVHFEGPVETRVPFSLNLPFEGVPSSVIAVSPCAYYLG

SEQ ID NO: 927464 - protein, 134 aa, Homo sapiens
MTASSLSHLQKSPQNVVLQTSQVPAYLTLCVHHETVNSSKAEAVFTCCVSPASPVGSRTEEIFSSIGCLTTLGFRLVFKGTALKSARKLWALQGRKSCKTAWGLEWELWALLLGDTIAVGMKLIQLTHQQFFKK

SEQ ID NO: 927465 - protein, 196 aa, Homo sapiens
MREKQRDPEDRSRISSTWIARAPEGEEGTDGEEARRRVFLDAKDSKERCSDVSGVSSFRWVRGLTDFRSEAADLRSGFVVSLTSGMKLQTFSVSVTAHKGGATTFFAMTCCSSWGEPLQKIAVILSDIAVLQWGTSSPGSYDPMILCDLLHSKHLTRVGFNQGWAPDGKISLSLPGICYGLNCVPLLNPCEAPEHF

SEQ ID NO: 927466 - protein, 156 aa, Homo sapiens [sequence omitted]

SEQ ID NO: 927467 - protein, 146 aa, Homo sapiens
MTGSVERETGVTQDCKESPGGQHGKGTGVTQDCKESPGEQCGEGDRVQGPAPPQTAISRALPKKADSSTTAEQMQCDWKVPKTSEEDERESVPLLFFTRAGRMEESEGIQACLHVKEHKHTLQLHFPLRQRSSGSTAEISCFRTCQ

SEQ ID NO: 927468 - protein, 115 aa, Homo sapiens
MSPASTQCDKISREHGYSSSELGRTRVYLEVPDILPGLHSPALSYQLEPCSCAAEHLLCVRHWKYRSEDVHLPPLTKNCGNTEVGSPPTPTARECQEGCVEEQRGPSMWTGPRCP

SEQ ID NO: 927469 - protein, 135 aa, Homo sapiens
MSALESWASNLTGQKSSLEAPEHTASRAICQPLLLLSSTCHGISLGKRLSLRVISINSQDGVGIRSQLTEPRLLFGPALTAQGKPHMLTENNHSHDKDHNVCHCLSSYSRCSSEHNAPLPLCQVRAHPWPKFTSW

SEQ ID NO: 927470 - protein, 154 aa, Homo sapiens
MGPHVCHAGSGGHGVLALTYLDATETAQPLETDRPLETDRIGAPWCRLALVQSAGAGPWEESAQLMWVFPLVILHPLHASPYSFRFHGCTEHSIVSGIYSFWWVLRLADFKSEATGPHGVKPQTFVDLCCEYYRVVIGPHSTQEVQLASPLSIQ

SEQ ID NO: 927471 - protein, 170 aa, Homo sapiens
MSWVSQALPSYCFFPQEDVSTLTELTRNSEPPSFLLPSRRNHWEGAGPLGEGCLYLGCQKRVRLFAASTSGLDGCCSFKPGLLDDNGDDADEDPGDCTGNRTDAVSDPTENSAGGARSCGFRIALSRLDFLREPVELLTCSKQGMSKDGGGSGDLYFNLHWVVVSRGPSR

SEQ ID NO: 927472 - protein, 153 aa, Homo sapiens
MCRAGQPCPSPCKLPEQKATDGEASELQRFLSHGCRGWKFETQECARRSRPSWALGVIDFWGKLFPRAALPVQMKALESWLEPQLHFLPSAAQQLSELSGCSNKPVDLPQVILRELNWATQARAPAQSLDTPRMLLPPAGGLPPWQRGLSKKP

SEQ ID NO: 927473 - protein, 137 aa, Homo sapiens
MRAGEAFPSPAGGTSCLTGPPKERWGGALGRVWPGFPDPAGCWSGLPYRMITLAIVVREMLCVEGGSMEMRSEAEDEGGCGPAGSRTVLKKGLDLGIWYWKGRAPSFADGGMSVDHRASVEAGGGRALRGGCSRAWG

SEQ ID NO: 927474 - protein, 140 aa, Homo sapiens
MGSEGRGRPKGSGFGSQPLEERNGFTERRFLGPTTNTQDPVFFLLEIVWFLELLLGLGVTDSRFVCWEDTTGELLHLSELPQWDKLWRTFTAGHSSTRGSCFCQPQVPHLVLPEMMPEEDRYQPQLTECMKTKGLPGRGH

SEQ ID NO: 927475 - protein, 195 aa, Homo sapiens
MFQAEEAASARALGQSGTLKWRMEVTVEGQGQRCLGPVSLCEDLGFPPETGRSLAEIVGTEWGDSWEDYAEGDGSVSCEGDGKWPDPGCILKGELAEFPGRNVTIASWKLICEWHSAALDPQHHCPVSKAEDFHTGWVLGPGEERVWNMGYLFVLVHGKNEWKDTTIQYRSWLRSFRNEGLGHLARVPCFGAVSS

SEQ ID NO: 927476 - protein, 225 aa, Homo sapiens
MRISHEGEGGADGLGRTSTGEAVLGAKRTGSGPLWQEELCSSKTETVFLLSGKQPSLMLPPPPDTARHGAYLELELAGWQRYLLQEARRAKKAVCVKSPVLVPELCGPSSYLPGQPIHHVTSSTVACVCQALQGAQLISKSHWFCFHMYPQSVHVSLLIAWVPHEIKEPCRVGLGPTSSWVHVIIDASQVLPFSLDLSLGPRPGYLTVHLRAQQGCPAECDCIWR

SEQ ID NO: 927477 - protein, 127 aa, Homo sapiens
MPSQAHWLLQQGRQLRVQAWALALCEVVAGPGTPQAASTAATGEHSSTWKLGESRNYRAPKRESQPYFQELLVWAPQRAAALLTFSPAMCPQETKVNCKVTCLYSYILEAVLILKIPTHQHLLMHKN

SEQ ID NO: 927478 - protein, 146 aa, Homo sapiens
MQSIVLYINDSIIAGLLLQHSGIHGPLFTDIWSNWLPVPRWWRQGTAPSMASFTHDWQMVPFLGHPGSSPLQEPLRKILKSRGCGHLDWHCLLVLVSWYPSPGTHLLVPISVPRHPVPPPSVERSLVRRGRPLTTPEDTAALHTVP

SEQ ID NO: 927479 - protein, 250 aa, Homo sapiens
MLELCWYSLQNPWLLLAFFVGLPAPGPQLTGVDAWKKLGGRSWVFLYSNTKWIGRRFWGQWTTSSLTCLTQSTPFWRGPCPVSLQTTRLLAAPPVSLLSMPGGRGTLSVQGTDANGEITADFTRKQGILTTEPRLPHGTSAQLMALMLFWWLNIDHGENIYTTESGKYCIVGPYGLESWWFNIFQHSVVTTVFTTLEFKTDKFAKHGKTEAHVLSAIRVRLRYASRASESPLDTSVRKCMRKANQGSVLL

SEQ ID NO: 927480 - protein, 343 aa, Homo sapiens
MELDEWERIGRDFKNAYKDGAKIPVSVWSMWALIKAALEPFQTDDEADSDEEEEDECKNLTSDSECEEQKMEKIKEKKGKLKKVCFTSPSVPTAELSERPPPFSPLNGPEDELATKLTAPVVATLKPGAIGGAIQNSIQKARAEGDLEAWQFPLMGVRPDWGRLENQAVMEDVAIVQLSVRQGPKESYIDFIARLQEAVYKAVTDKTPQDAVIQLLAYDDANAECQTAIRPLRGKTHLTEYIKACDGIGGNLHKATLLAQAMAGLRVEKNMPRFSGSCFNCGQFGHTKKERRKGNKKARATINQQKSPSVCPHCEKGHHWASQCHSTFSKDGLLLGNGKRELP

SEQ ID NO: 927481 - protein, 146 aa, Homo sapiens
MRLHPDEPICPMGPDSDILELVQDVINRVTDVFAKHWRADPHLTSVTSKAPCGSLVVGLATPLRREVHLTALPNCFFVFPEETDDSSPQPLNDPSELELTRDKLPQPSLAQAEDFYPHDGLTILPRSNFNYNSNHFPPSMQAHVLF

SEQ ID NO: 927482 - protein, 181 aa, Homo sapiens
MSLSDSFEESSENLQPDNVIEKKNPFSEEKFKLAAELCISNEELNVNPQDNGENISRAYQSAVQNENMESRPKHGVPPGALPNGAVRRGPPSFRTQNGTSTDVLHRVPRKAADTQCQPMKEAGREAVPCKATEVELPKTMGTHLLHQCDLDVRHGVKDHFGDLRFDYPTGFQTCMRLDNFN

SEQ ID NO: 927483 - protein, 145 aa, Homo sapiens
MSKAASSQRVGSVDGLCDTFQNLLGCSENYYLALPRFKGSRRCSLQGVQEGENLVLMSASDVYHSVCPSPEAMLLSAAEEGISDYIDVWHRTITLNGALVVSRSKWYSQPITDLPSNAVQGTSADCTIQISGKRKQSKTLACCGV

SEQ ID NO: 927484 - protein, 146 aa, Homo sapiens
MVPLSVIKKTEERPGEGSSVLDTSIEMPVRHPNGCVNGAALKAGLAYSWVPPVFLLAEESSGIHVQNVQNNQGLLPVMRNGIVAVGNILMVPKKGTFNPAEDAGYKRGSTRQKNLPGRCVRRCPLFCLAQGDGKEDEEGRETRAFR

SEQ ID NO: 927485 - protein, 163 aa, Homo sapiens
MGNPWPLLHPHPGKKNFLSTAAPEWIMVYVRTFYDVSTVTKLLSDAFLRTYPCHLVTHDCGTMWQDLVADRPVKGSYKDTKGCASNNANAGVKRRKKALEEDAGYRPSSLGQICSIFVILCGFLRHLSVISKVSPIFSQSNIDLLFNPLFERKLFLSESPLSH

SEQ ID NO: 927486 - protein, 135 aa, Homo sapiens
MTRVRGCPMPLKENMRVCKCIRRKAGENRIGLQKRNKEKKGERENHLSQHCSSLLHLPSPRAQQGSLGQCNVLLIKFPAPTLPSCNPSSSQGLQESFKAYIRLCRCVPPLLTILLGFLYIENKSKIHAHSKKIPI

SEQ ID NO: 927487 - protein, 139 aa, Homo sapiens
MGDRPLNHRPKSDILDYNFVSQFSIPHQGLLNFICASKMKSKSESYLGIQPSHILSPEHCAVLYHSPQAKVQLKLCEGRKLSHLIKRRGSKRAWKWDILVWETGLQRKCSQNVVPRPRASASFGDFLRNSNSWTPLWIY

SEQ ID NO: 927488 - protein, 157 aa, Homo sapiens
MSGTNRDPGSMAHHTLSATLHSFPDFPLSEPVTRFLLHPVVVRAESSWVALSSISGRSANGEISEPFEEVMGPLNHFVNYLVTASSPLGTHSYLLALQRAAPLTCGWLPGPKRARHPPSPDGMRAPSGGQSFLSVKCTHRSLDKHLLATCKIIVDGF

SEQ ID NO: 927489 - protein, 256 aa, Homo sapiens
MTLKTPLLRKAQLQSPFYTPAQQEFEEQQAFEKSRKFLRQLEICFAENPSHHQKIIKVLQGCADCLPQEITEDTFDPEDHPCGSVTANPTRARSPMKPPRTGLSGPPEREMPISGIDTSETSPKAPRGGLAKDSGTQGKGPEGEQQPKATEATVCANNSKVSSTGEKVVLWTREADRVILTMCQEQGAQPQTFSIISQQLGNKTPAEVSHHFRELMQLFHTACEASSEDEDDATSTSNADQLSDHGDLLSEEELDE

SEQ ID NO: 927490 - protein, 151 aa, Homo sapiens
MFPLNSLKLLFLSHLSAAADLGLRAARAVPRQWYWQRGFWELHFREMQSCCYSECSAREQGQQENCCCGCRGGTFGCLWEPIPRESQNHFHLRVVRAVPLQLQWQMGCELTLGFPLQRNAKPPPTDMFRWGQGSCTGVPDPSSEKWGWGPI

SEQ ID NO: 927491 - protein, 134 aa, Homo sapiens
MDFPFFPSNSQASLLQVYWSLLEVHARPFARISPAEATEQQRLLPVPSSGSFAPEGHPPDASQSSPGVQETQYQHLLPVRLQEASNHGRGQSGSQWEPVFHTVREQERGEERRERAHEREREEVPSSFKQPDLL

SEQ ID NO: 927492 - protein, 173 aa, Homo sapiens
MVLLPASKQIALLPFSGYRCASLSILLSSQTVSTLASSLSVATITALPVVGNWLKKKGCLSRRTLMWDVLKFKVFKQGVFETDSALRSGGALWAWRRSLFQRSTPSPKALAKSIPHTQLHCQKSADLRFVSRQGWRRELTTRQMAIGMLPSYEHFEIPQPLASAKGTSPSTPC

SEQ ID NO: 927493 - protein, 135 aa, Homo sapiens
MSQEKEFHKTISSIKAGIGHFHFFCGGMSSVEAGTGHLDVQQLVQYTNVKVMHLFNASESANGHGGSPGTRSLEGLGSEKGSWALDYMIIIRCIIKRVSKLPKSIWHIQTNSVDFAMVVVMANQSGVSRQECVRD

SEQ ID NO: 927494 - protein, 139 aa, Homo sapiens
MLGQGQQCLCWSPATGQMGLLSVAAVVGRWLESMHFPHVLNLAVEAHSSSGCRQVNCQGLKLWYWWQQPATAVAAGRRYQQGFRDVETSSAAARKRGHPKSAFFNLAQEGIQGELWGAVRRGSLLKATQLQTKASSSLS

SEQ ID NO: 927495 - protein, 148 aa, Homo sapiens
MAGRRQRRARFEASEGASLKPWQLPHDFEPAGEQKSRIGFWEPLPRFQKMYGNTWMPRQKFAAGVGLSQRTSARAVQKGNEGLEPPHRVPAGALPSRAVRREPAFSRPQNGPFFLQCAFILYPTRKQNVTRWLLLGKNYPEKKLDASF

SEQ ID NO: 927496 - protein, 188 aa, Homo sapiens
MAHVCICKKPARCAHSGPSSAGLLELAGGPLQTLFAWVSPAGATEQQRLLLFLPLEASSQRGTRQMPARALLYEVSVSPCWEVSPSQETWGAGRQGCLSLLKLRPQPPLPTGALSQGDGGFIYKPLTGAVSTVRRKRPTQASVMVDNPPTTKLEHPRWTSDCCADSESFKPVDLSLLGPWGLNIMLTS

SEQ ID NO: 927497 - protein, 147 aa, Homo sapiens
MCSFISWVFGNPVAEGHGQNTELVSGFAHSSNSSSSNRNSSSRSSIRKAYYFHSLTHSGSSTGLRAEGGMVVTPGKIPETFSDKIFNEDELVHTLCMEFSWYQHIQRKWKKAELGRGKKLSYDAISADFSDNPIGNLEARITFPELG

SEQ ID NO: 927498 - protein, 158 aa, Homo sapiens
MLSSLFCFSPVAERQCCFWFPSLINRRELLGINDWINVPFMNAVFSREGQVGTEGSGRDPQELLFHKPQISKSEPLDQTTGYRDTCNGTCTYDQFQTTDQLQIWPFVNYQGKEDLPKPESEKTNGTVSKEPWNTTGKRKRRNFTFVENLQCIMNWVHR

SEQ ID NO: 927499 - protein, 156 aa, Homo sapiens
MAFGALRWRWDRVSGCVHVVFATITSNQAAGNAASERSSNKHSLNICLIPGTVPDTGPSESIPEEGIEIMGHESSMHVIAAEDLPVGQDAEVEDSNIDNLDPVEKSMGKSALVHLLVQQILMQHRLVFCTGSEDTVMSTVQFLPIQNKEAREERHK

SEQ ID NO: 927500 - protein, 147 aa, Homo sapiens
MFRQKFAAGVGLLWRTCARAVRKENVGSEPPHRVPNRAPPSGPVRRKAPSSRLQNGRFTDSLHCVPGKATDTQHQPVKAAGRKPVPCKATGVELPKTMGTHLLHQHDPDVRHGVKEDHFGALRFECPAGFRTSMGTVGPLFWPIFPI

SEQ ID NO: 927501 - protein, 232 aa, Homo sapiens
MIRWALWIWVLLLGIIRAHFMVVVKLRFRAKQTPCYLLHTSFCKTPCYRCQSLQGATGSSSNPGTAAPETWRKAGGRCHHTHFTDENTEPLRFNNLSKLAQLEDGRARTGPRVVRLENPGPICCTKLKGQVRQEVGRIFLKNSTHWGLPSERAQPDHPIVTMCQQPLPYTLSYQGSSQYEQPLMPPLHSFNADALLVLGRDFMCVQAMSTTLPNCQMAEASPTVRSILISET

SEQ ID NO: 927502 - protein, 145 aa, Homo sapiens
MALVMAFIFHKHVEHPWPRGKKLERWARRGSSGVFVSQFCDHHAAPTGYQASGAVCRSGGRVRFQENDPREVPAEKRRQQGAGQGHPATKAKTKDCWVNLIAPVSVEGSCLKLEGAPASGNAIRRGEEKETLLDGVDELRERKGW

SEQ ID NO: 927503 - protein, 136 aa, Homo sapiens
MHVMIIFFKDSHNIISYLTSYSTNLPLSHQEVESNSSPIAGICLFLLIERRRIDAIRFLRLGHWLIYYRDDITLIGPDEKTEAQTGQETCSVAHTNSKSRCACKKQRSCFHTNALKIKHKGRKIPRAHNAKNKNCF

SEQ ID NO: 927504 - protein, 136 aa, Homo sapiens
MKLRDDWVLHDLKELWLEIWIKLQHSFMENLYDNPGEDAPIQSKQEPDLEEKKRSKINGTSRDWERARKTTKYYVMISIKYIQVEVYTLATESVAQELATSAPDGNFLAFPHGPKVHITPLNIQDFNADFFQCFKL

SEQ ID NO: 927505 - protein, 155 aa, Homo sapiens
MPASCFLWISLPVHKLKVVTEFFIFCILVGEFLMSIISPGDLWNFELERDDLGHLVEEVCKHRSIKEEVEHKSLESLQPGSVIEKKNLFSGEKFKPAAEICLSNKELNVNHQDNGENILRACQRQSWQPLPLQARSSRRKHGFIDRAQGPLLCAA

SEQ ID NO: 927506 - protein, 140 aa, Homo sapiens
MYGNAWMSRQKFAAGVEPSCRTSARVVWKRNVGLVLPSGAVRRGPPSSRLQNGRSTDSFPCVPGKATDNASCEGSWEGGCTMQSHRGGAAQGHGSPPPASVWELNNENTWTQEGEHHTLGTVAGWGEGGGIALGDIPNAK

SEQ ID NO: 927507 - protein, 152 aa, Homo sapiens
MLLEQSAQSMQEPEWAKKGPVIQISAIFALIADCCFWSQRWTQRGGISEEDMVIMGDDSCMHVISPKDLLVREDVDVEESDIDDPDTLCNEMKNTTETSQKENKEHCPNRLLRKKCILPSYGIQSEVLLHLKNEKPYKNVTLTPNEESKEEQ

SEQ ID NO: 927508 - protein, 153 aa, Homo sapiens
MIKAFQVFEEALVFWSKFLVTRAISALGSTQSPVKLWFLKTCKGITLVVLDKIQKNDLDCQKDELVSSTTSSGPQGVPPGHCQCAHKAQVSHRDVGSLLPLVGPEKPSKSQGLKLRTLRAHLVPFPTMAKQVPKVSHDPKSTGSIASTALELS

SEQ ID NO: 927509 - protein, 408 aa, Homo sapiens
MWLTCPPVAGVGGDACPAFWELPRTIGVYPLVEFPQKWNCWAKSSSRHCLPGCQWQCQAASCALLSGCFLGQQKAAPSRSVQTEARLLGQKPQQVLPALQAPSVSSALGGIQDMKQKQEHYVSPQVAPKQVRTKKQLFFNKPCSAPSRTRGQGSMLRTPVNIFRTAAKPWREEYAQRETKRQLTENDTLQVAAAADTQRAEYREVIYVGPHSESFWAACSPWAMGWTSLFCNNTVEKWNPYIDTIKNDAPAMAERVQCRAWAVASEGASPSPWQLPRGVEPTSKQKSRTGAWEPLPRFENMYGNAWMSRQKFAAGAGSTGSLHCLPGKVTDTRCQPMKGAEREAVPCKATWVKLPKTMGTYLLHQRDLDGGHSDKLESIASSQKPEIDTSREEQREQEFMLSWVGIEQ

SEQ ID NO: 927510 - protein, 146 aa, Homo sapiens
MQKNETRPCLLPYTEIKSKWIKDLNIRLRTMKLLQENIGENPQDIGLGKDFLSNTLQAKASEANMDKQEHIMLKSFYPAKEIIKVNRQVTEWEKILANYTSDKKNPWNTTNSLNRHQTSGYEELCYLSDGNNLGKSHKESSAKTLR

SEQ ID NO: 927511 - protein, 138 aa, Homo sapiens
MNFQGHSSVYDISLFNLSGVPQGADLTSPLGSDEPVQVGAAGKVLMDIEGGAKLPPHSPSRVSVSHSPTSVGLLSVISQSKAKGTIVSNLITGVKFVILKFLGICKWLRSKPRRLESFLEALNFEKLLTPLSPGIVCA

SEQ ID NO: 927512 - protein, 412 aa, Homo sapiens
MSLPWEKLPQPLQPLATTTLVSEQPTIEALTVETTVTQLQHLNTVGIIGFRGGRGQVAAVNCQKRDIQPFTRVTVHWGKRNDQTFQALVDTGLELTLIPGDPKHHCDPPVKVGAYGHQVINGVLAQIQITVGPVGPWTHPVVIFTVPKCIIDIDILRWQNSHTGSLTGRMKAIMVGRAKWKPLELPLPRKTVNQKPYHTPVGTAEISATMKDLKDAGVVIPTTTLFNSPIWSVQKTGGSWRMTVDYCMLNQVVSAVEAIIIKSPCNLNWVLSDPSSHRVGHAQQHSIIKWKWYIHDRAQAGPKGTSKLHEEVRQMPMVSTPATLLSLLQPAPMASWGVSYDQWTEEEKTTAWFTDGSSRYASTTRNWTAAALQSLSRISLKDSCEGKSSQWAELPAVHLVVHFARKEKWPDV

SEQ ID NO: 927513 - protein, 149 aa, Homo sapiens
MKQFLYCLAVIYELYVINDGTETVLKSNCYCDTKFSKNFMQNVGGKHFSQNADLNLLHHFPFFCDLANAIFGLGRPFLLKDYNSYYHQFLILVLFRIWQNGIGSGPKIMKEKEKTKEKWDGCKTYRWCMESQLPSLQIPFQFSIPFPAP

SEQ ID NO: 927514 - protein, 160 aa, Homo sapiens
MTSYLYPSSESCESFSTDPSNLSPPSQAAPCKATASPSASAPPPYNPSITSTPHTRSGLQFRSATSPPPPARQFPLKEEAGAKSTVKVNAPFLFIRPLPNQLAFRLFFIKYKNPAQFMAHLATTLRRFTTLDPERPERCLIFNMHFIIQSASDIRKSSQN

SEQ ID NO: 927515 - protein, 285 aa, Homo sapiens
MVKRKSSEGQEQDGGRGIPLPIQTFLWRQTSAFLRPKLGKQYEASCVSFERVLVENKLHGLSPALSEAIQSISRWELVQAALPHVLHCTATLLSNRNKLGHQDKLGVAETKLLHTLHWMLLEAPQDCNNERFGGTDRGSSWGGSSSAFIHQVENQGSPGQPCQSSSNDEEENNRRKIFQNSMATVELFVFLFAPLVHRIKESDLTFRLASGLVIWQPMWEHRQPGVSGFTALVKPIRNIITGDVPEEGIVIIKDDNSMCVIAPEDLPLGQDMKVEDSDTDDLDAG

SEQ ID NO: 927516 - protein, 138 aa, Homo sapiens
MFQDGRIGTAPVYSSQHERRRRRVISAFPTEEHSSLPAMEQSWMENDFDKLRGEGFRRSNFSELKEEVRTHRKEAKNLEERLDEWLTRITSVKKSLNELMELKTMARGLRDECTSFSSQFNQLEEKVSVIEDRMNEMK

SEQ ID NO: 927517 - protein, 139 aa, Homo sapiens
MGCGVDPQNRKVAESCFKVGLEDAWQETRPDGGAVGKSFIAFRTSVSPLPYNVPNIQSSVLVVADVEAESGDVKGLGPGHTARHSRAALGASFPNWKPNPVPPLLVQILEPEKKRGKLSCFSSPNLTNIPTRGDFCSDS

SEQ ID NO: 927518 - protein, 268 aa, Homo sapiens
MCLSDILREFNRNLTGYAVGTGDANDTNAFLNQAVPGAKAEDLMSQVQTLMQKMKDDHNLYSAANFVHHLRNALDVLHREVGGGLPQAGNSSSMEVPLPLQPLWVAPMELCDVRPVRPYEVPRVLVNLVDFLNPTIMRQVFLGNPDKCPVQQASVLCNCVLTLRENSQELARLEAFSRAYRSSMRELVGSGRYDTQEDFSVVLQPFFQNIQLPVLAAMPFAWHFHSEQKRSVSGPGSYSQRSKATGPKPHGWQLAEPEVGAKPPEIEF

SEQ ID NO: 927519 - protein, 126 aa, Homo sapiens
MLWATLQRGPRSVVIRRNTALVGAQVKVEKGSKQELADSLGCMRAIGSILIPEKKKLIQKEEPWTAKDRQQLYITINNTSISTYILLLLPLPLLQLHHLQLAFIQCFGSFNTAVTSAYEVGTIITI

SEQ ID NO: 927520 - protein, 152 aa, Homo sapiens
MAGYPSETKLSEEQSGSNICCSPIFAVLQPPLLIPRQTGSGVDLQQTPTDLQLRVLTIRRKTNKQKGHPHQNPICTSPSSKTKAMEQSWTENDFEELTEKGYRRSNFSKLKAEVQTQCKEVKNLEKRLDEWLTRITNAEKSLKDLMELKTMA

SEQ ID NO: 927521 - protein, 147 aa, Homo sapiens
MAGEASESWWESNGASYMVAARENEEEAKAETPDKLFRSCSLALCGSNAVAEPVRRDIIFICKSGFRGHTISNQCGHSHHSPLDSIACAVLLQPSEWTLGNASRSFWDVKIWEQSFPGPNAVLYSGTHKILPYCSHSVLKEGISSNF

SEQ ID NO: 927522 - protein, 217 aa, Homo sapiens
MLRHQPLICNDSPKESEPQFHGKLPLISSFRWVRGLTGSGVKLQTFPVSVTTLKAARLELFVPPGGFVVSLASRVKLQTFVEPSWLHPVLLAWGPRVELPASPPLCACTPQPLGGQWDWAHRGGFGCTGAHRPGEKLSTAAAGPGAKLLNARGRLRWLLRVRGPPSPRPSRIRTGPQAAWAALVPTRASPFAPPGKLREPAPALASPERGSYSAAVG

SEQ ID NO: 927523 - protein, 140 aa, Homo sapiens
MASASAPGEASGSFYSWQKVKGEQLCVGILLQGQRPLPAPPSSLVQHVALGLRDFHARPTAMGPKPSWFRPRCGAAHKAQSKSEVPIVICKAYGLVFSHGKGNFADVISKKVAAYKPGREPSPEPDSAGPFILDFQPPEL

SEQ ID NO: 927524 - protein, 146 aa, Homo sapiens
MDSSCPSTFHHLHCSHSALCSPTPLPSSCTGDSKLLSAVPMGVLLTLTSAPSLPSSFLISVALALSLLAGFKGLMNRTPNLHFFLLQSSVPCTAHSRELKNSLLNERSEQRLGTKASPRQGHGPLVSCVCLFQTTPWPINTTTNNQ

SEQ ID NO: 927525 - protein, 153 aa, Homo sapiens
MHLQHSISYTTPDVFSDSSKPICGSPLMVLWTQGNTFLRVSASQELTGNSSASLPCLQPTSLDAGQPPEVDIYAQQRGGTVHVPWRCHTCGTLLGEPTKAWGAGDSPRQGHLHQANQIIHPIVQLIYGTHRLFHEDEKAAEEKWALNAGLDSR

SEQ ID NO: 927526 - protein, 158 aa, Homo sapiens
MSVEDFQNELNMKGAIYAVANVRNTVTIDTVVHASHSLWLETMFSDDDEQGGNFEGFYMSEASMSRGATIRPNTDHKILNFEPNAVIRLDFGMTPEVAIKVLAGTVFSSELLIEGIYASNLTPLVGRFQFFEGYWPVLCHVGSSSNGSCLPLEQSGEQ

SEQ ID NO: 927527 - protein, 156 aa, Homo sapiens
MTQRSHTADWMVFSTMYHQSLPLPQPKGFTLSETISGCSSERTRGMGNVEIWINILVLSSYPGNPARKTQFHSFTLAFSYNKKSIQLPETHFYLKLNSKLWVKALERKTGSEGSRGKWSQRLKATAKASEGAQTAVSHRQEAVEIGFRPYLYSNGS

SEQ ID NO: 927528 - protein, 124 aa, Homo sapiens
MNLKTLPVFSLYKYFFKMQTLGYNLIKISNLEIMSQFFSIYAILKGIKQAELSFLPKTLHTNLFPFAFQTTGRNGLSVNFQFNVQQKYQQPQRNMFMLQDKTYSSISKNFVFLPFSFPRALSTD

SEQ ID NO: 927529 - protein, 150 aa, Homo sapiens
MWVGPAVTLTAKVRSFTPEASETTSLLGGTNNSRRAALRAVTLTAKVCSFTPEPARPRTHQKEKTPNTSEHQKQQTPDTPPLRTVTLTARVRGFILEVNTVLAVWHKLLIGQTEISLRKKEEYVFIESYYFLTPRTDFCTVRAYQIYLLG

SEQ ID NO: 927530 - protein, 303 aa, Homo sapiens
MRSGYITMWHLIPLSALLLLLPYETFHCCFPTALDFFLMQISEAFLKFPPENGLLFLLHYQAATKIAENVKQVQKPTKSFVPSVGENYRHSTPAQPMRAAAGTENCKATGADLPKALGAQPSCPCALDVGQGLKKDDFGAVRFNNWPAGFWIFMGSAATKIADSVEAGSKLGSGERLESLESLEEDRKMRESLDHCRDLLNSSAKLKSCLAYIEQPVLLCVMKEMTISWNLYLNEKQSFNIWKICNLDKWSKRKADFQGENQEGFGYLHKKEPNANNSRQWEKGLEGISETFVAALAVTGPGV

SEQ ID NO: 927531 - protein, 130 aa, Homo sapiens
MVGFSGVTCPILSYLISNNYDNLEDFDLNKWKDGVVMNCAEEGNSRLGEPGSVFGYAQFDVIFFFCHLSRDASRQLVFRDRSWLEDENFKKEMGFTLERYLRLQVLRPCGTGGKKRSPSGSLGSSSLSSK

SEQ ID NO: 927532 - protein, 150 aa, Homo sapiens
MSLLFKCVQLQSSAAQPTEHPSGILNGEQGTAGFIKSHCQIASVLTQECSSRDASGAINEMFIWALPRSTRPLSRLMGRMNGSLHILVPTHTALIMAFLHAWDVYSSPLTPAYPHPLHLPLSDATFSLKPHQPNLCHDQLAELQYAHPTA

SEQ ID NO: 927533 - protein, 136 aa, Homo sapiens
MVITAMVATIKLLVVIGCPAFLRFSSAICDSFLVCPQKHTVISLTVNQIEFLEDTMRSQQFATKRVSSLESDQADTAIYNFQPPELFIHLQRVKTDTLEDKNSIKQYKMRLLILRNGHYSWRDRVYTNGKRNNTEQ

SEQ ID NO: 927534 - protein, 167 aa, Homo sapiens
MLLNGSSWGRLCCSYLDSTGWLCSATAAAAASGEKENRTGGRCQRGVFFTNSSFAHIIPSPSPYVTSRAKTPEWLMPRLSGVAGSTEHSLIAIVLRKGGDKSKQIVDVPLPKALLRSWDISKTSASLLHDKCGHGSGWGTCWWVSAVHTHSLTRRDYGGGTTLCSVT

SEQ ID NO: 927535 - protein, 228 aa, Homo sapiens
MPEERNAVLIPTWAVAGEADLLFPSLSEQRKGQLVPADEKPERGTASSSNLPQFLAAGTPELPENRGLFSTLGPRHGRLGGGWHGWAAPDGEEGEQESEDWVMRGCSQTYGVWTHTGHPHSYQAQGGHTQQSQCTISFKFLWNYLLLGHRLGGQRVSLKAGAASQCWVVPVTHVTEDASPLLLVPPLVEMSETKWVFISFKPRFLLIKVTGTAGFAPPPPPHPCPPAA

SEQ ID NO: 927536 - protein, 136 aa, Homo sapiens
MSNSDYLPDYPLNSDLVKRLKSALDAKDEERVRDLICTEITPVDAVIELANDDWMKDPSAQLPTGMLLEDCPGGGLGEVVITSSDWTGSAELYILHSPFRPTVPKHPPEADLCKLHQSHLPSGSCWVPLMIGVGGK

SEQ ID NO: 927537 - protein, 120 aa, Homo sapiens
MLISLFICPLLQSSKLHTIWKEPFQCQSNVPANNPTTPPACWAKPTLLSSGPRTHHDPAPGGSPGSPPEAPPLHASILPDQFDTRTTTEVINNKTIPTCSSNSSWILRISLWLSRFPEYA

SEQ ID NO: 927538 - protein, 144 aa, Homo sapiens
MQGKSVVLLCAQPGDVEGGGRGPGPAPFPTRNAIHKSHPEKTTFVIMASPLPGTPVKEAVEGRGLSPGCVLLLSALCPILERGWTYIFPHALMLHHFLGSNQKCAPQRGEKSKVVLPWKKITWDFMTVSQIRIPGKERLKERDP

SEQ ID NO: 927539 - protein, 267 aa, Homo sapiens
MSQEKDFHKIHSCAFVIEQEEKKKTEAHKEGDGVKRADKILGVTKDPGTIAGLNVVRIINEPTAASIAYGTDKKFGAERHVLIYDLRDEIFDVSVLTLEDEIFEIKSTAGDTHLGEEDFDNQMINHFIAEFKYKHKDSRADIYTSITHAQFEELNAVLFRGTQDPIEIALQDTKLDKLQIHVIVLQTQTFTTYPDNQPDVLIQVYEGESAITKDNNLLVIQGKFELTGILPAPFAVPQIKVTCDIDVNSSLNISAVETVSGPEWASA

SEQ ID NO: 927540 - protein, 137 aa, Homo sapiens
MMAQGTFFFTEEAGQELGIQKAVTLALCPCEKAEGPLSWLTLKLSEDGKAKKALAPVLQHWGHKHPHLDTTAALEPKTLTLAPASACLCAPPPARGLSSSSSSSGDRLQASHTPVTCPARRMRELSCFTRTCYFFTF

SEQ ID NO: 927541 - protein, 153 aa, Homo sapiens
MKKETRSVSSDFFLYKDRNSKRMFFAQPGLTGPRTSRCFCIFALCHTAPVPQNASWTATTWNVRPQRGQPLTQHRDLVTCRHRTPTGLMHKGTGLTCLLRNAEEEKAQGKVLVTSGHPREGHLQHLHSSEKKREGGVRAPGVGNGITFPDQGT

SEQ ID NO: 927542 - protein, 234 aa, Homo sapiens
MKLREVRKLHKKSWKGSYLEDTQMYGNITPDWDRYLTNRKNSYSKNDRRNQKFKEAKRFFNSIQKDPSEFAWRDPELPEVIHILQHQFPSVQANAAAYLQHLWFGDNNVKMKVCRLWGIKLLVYLLGHRVLEVQKNACDALRNLFFGKSTGENKITMKDVEARKQMRACEGLVDSLLHVTYTCMNTSDYDSKMENCVCTLRNLSYWLELQVPQAQLLGLNEWDDLLEKVSQRRL

SEQ ID NO: 927543 - protein, 164 aa, Homo sapiens
MFPSLCPCVLLVQLPLMTLLLVRSAAALDSHRSTDPIVNCDALLQVCWSLLEVHSRPCLPGYHQCRLQNSRDCCLFLPPEALSHRGTCQMPARALLYEVSVDPCWEVSPSQKAQGAGRQEGLHLLKLHPQPLLPSGALSQGVGKALSQSPFLTYSHQEAILIPF

SEQ ID NO: 927544 - protein, 147 aa, Homo sapiens
MSQEKDFHKVIFRYSVISNRKQTKTSSIAGDCDYVSWNSGDKDNELELLSACLSTCYNTYFKTEEIFIKNKSITTWKAILNTINGSDIEEVIRNTCVALLEVGTVWEISRPLYVKKIVFHETGPSLVPKRLGIAVGTDMTNVKKKNQ

SEQ ID NO: 927545 - protein, 143 aa, Homo sapiens
MLIQCAAHHRKDVDARCRKFIYRHPSVSTSVMKCRGRRKEETERRDGCRMTCKIKMHNTKCKQRRNQYKLLCIVDGASDENWCSRGGGIFNTCCNTLGLFLLIENSSGSMPNLKERKKRAPKCICTPEIVTVLCHYEELTKHV

SEQ ID NO: 927546 - protein, 134 aa, Homo sapiens
MRKCEHNDFLTDLFYYERKIGDSSSLITVLTSDNFTPLLFNGNITHTILKMEKHFHVLFKSEMIYEMNRLCGVHCYNEKLMESRRGCYQIKEEDKENSSHDGNSDLALQRVLLSWAAVLIRKHASQMVIRADAY

SEQ ID NO: 927547 - protein, 146 aa, Homo sapiens
MPTEFHIAGASLISLANFAVFLHCSRFLDAGNARMDELLSLARRASPSRKRYRRANNCKRFLQAAECTFCIPLISNIQVISQPLLPTSRQNQEFFNLFCPETLPGALLILSATKLTSQSVLWAFPLSAGMKWSTLLPHLVLGSIRG

SEQ ID NO: 927548 - protein, 256 aa, Homo sapiens
MDQSCPRPREEEIQPQKEIAGMCGCRGEIVWGHSEKAATCKSRDEEFPHEYFYSGTGFEGNETNTASPWWGPSSVFLQAQALPSSFPDLSVLEQRMCGFSTSLPRDMQMQKRNEYFDRTRQVNEDGVRMFEGLGGQWSFVGSGGQKFEINVPAGPVSGEAFPPGLQTTAFSSCPHVDLAFPVKKERIGEEKGTGQAHAAGIWWSRDTSVLLNIILPLFYLARSYLLEIPIFLYFEEDRGALEGAKVLAIKNSETAS

SEQ ID NO: 927549 - protein, 378 aa, Homo sapiens
MAASTTLKGLTSQRKLHSHFLESVCDVSRVCLQIGYPTVASVPHSIINGYKRVLALSVEIDYTFPLAEKVKAFLVNPSAFVAAAPVDTAAMTAPAAAATPTKVEAKEEAMFESQSEDELTPFDMSIQELDNPGAKRILELDRFKEQQGQKRFQDLMGMDLTTHSVKCLLSVGIYNPIQKALKPPPIKPYREIDESVKTKTWIFNEEELDDQKIQVPPAGFQLVFLCYADNKGKVPFAKKVMATPEQGDKVKAIVQKLRFKYRSDSFENSVLQQCSRNLEALALDLMEPEQAVDLTLPEVEAMNKRLGSPLVDKFKELLYPPDYNPEGKVSNIKHNNEGFRSKRPKVEYSEEELKTHISNSMLGKFAVPMLKETCWGLI

SEQ ID NO: 927550 - protein, 209 aa, Homo sapiens
MLPTVHSVPMPHGGKINKKLNSGVLGCSSSGSGVVVMFNNRFAEKKIIILHHLNLVCHENQFWEEEDLQYVPPSAEPQASCPHIPQKEKVQPSTHGKSSILKSTVPLALSLLPVHRPFTTVGKAAAKCHDGLETAGFTGKAKIGEEDSTAGIRQAETRVLQSLHLLTSFPGGNVGREVERAFDPFDDLNVKMNPTFCFEKDVGDLDLVH

SEQ ID NO: 927551 - protein, 163 aa, Homo sapiens
MSLKEENSKDEEQDLFNEVLCPLVEGCALLGGKPTPLGCLDSSELPGGKAKSAGPETVATPPPRGSGPGDPGSVPEPLAGVTGVPAGKPCPVRKDESGGMGLRVGSSDLWAAQFCGKSTVSPAGYHAHSPPPLAVGWGLHCPVWLSEIQQMPAAMLPVQPAEL

SEQ ID NO: 927552 - protein, 152 aa, Homo sapiens
MHGRSTEGCSQYIHQVTETKRFIGLAVPCGRGSLTIMAEGKRHILHGIRQERNESQVKGETPYKIVRSHETYSLPRQQYGGNCPYDSIISHRVPPTTTFTALWLWEMKASLYAAKEASDFITSPAMADWQSSLSSSFSNSSIAPRKRHCPYN

SEQ ID NO: 927553 - protein, 144 aa, Homo sapiens
MAGPNQLCHGSLVFFSISFESTVLSGKCTRAVKEEGNTREPQWNTGLGKRPMKALEKGLELFGQGVLYTWREVSKYWKSETKGSAGTCTAVGRRIFSLKAVGKNFFLPFSIFPWLLAILGDPLAYACTTPISTSIFILFSSLAL

SEQ ID NO: 927554 - protein, 147 aa, Homo sapiens
MGKKQSRKTGNSKKQSASPPPKECSSSPATEQSWMENDFDELREEGFRRSNYSELQEEIQTNGKEVKNFEKKLDEWIPRITNPEKSLKELMELKAEARELREECRSLRSRCHQLEERVSVMEDEMNEMKKYRECHKDTPREEQLQDT

SEQ ID NO: 927555 - protein, 140 aa, Homo sapiens
MAFFSVDPWLSPEVQGKRNLVPGKPTLPTPKSQGWILLIGAFYRVLIGAFYRALIDAFYNPFASYRVLIGPFYNPSYRVLIGASYNPLHSSSPNVVHPSDKPFLKSDLRHSPNKPTLAYPESNSRAIFCALKNLKGVGNC

SEQ ID NO: 927556 - protein, 151 aa, Homo sapiens
MSLWVGARAKRNLWASGDPGGPDQCSPFVGADAWAHRGQEGPDVHLRAVDPGGVWEDRRGVPAVKRVPEGQEWVGEAGGPGPGVCRPRSCPATEGPGYQPSCSSVCPSVPVLTHSSRETFPIPRGVVRNACTSSLKLGVCISWVFWCLFSK

SEQ ID NO: 927557 - protein, 171 aa, Homo sapiens
MLGVEELRCMSAFTLYNLSSRIPAGEDWSHPTQPSSRLACSTWKSLSQTQDRDQGVLASPAFNSNMEQMTVEEGPEALPERKPRKGLSDKGIFMDGVHSCCGFDTNCANITIHELENQMGKMKRTLVTGSTTTMAYGKGAIAGMWLWLQLNLDLQMETVQSGRNLDPRLIS

SEQ ID NO: 927558 - protein, 166 aa, Homo sapiens
MYSIQTSEEDRKMWETLKLPRDLLNGFDPNVDSDMDNEVQVEVVSDGDEELIGNWSKEEISKQQSIQEVTWLILKAFNYMLSQREGLKLELMFKRETEHKCLENLQPDHVVEKRNPFSGEEFQLAAEICISNKEPNVNSQDNGENVSRACQRPSRQTSPSITGPEA

SEQ ID NO: 927559 - protein, 134 aa, Homo sapiens
MASASASSEGLRPPPLMVESEGEQAVQTSHEERRSTRGGKHKELSILTLCGSQSTRLLFLPCTVLPLRATPQHYLPGAAFKYCSAALTEHLLCRHPLAQLRMGRQQAPMTQQCLWLMASIYPEWIWDSLNIILG

SEQ ID NO: 927560 - protein, 136 aa, Homo sapiens
MPQRTSQLQSHSWETDPGPGSETKAEDPKEQKGPFIRPFDVLKNPPERLLFKSHTDVRQCTGTGIDPGDTLVSNADNNIVRTSIWEAQSTMETHKGGSLASPGPKGEKESAFLVKQRVQFQCMETVRRFWLEIKKK

SEQ ID NO: 927561 - protein, 157 aa, Homo sapiens
MEMLLTLCAPSALYQLNHAHGFPNTHVVMSLKSKFLRLIHGSRPASPLWCPTDTSNTTCQKRSSFLPSLLQTLPSSSFPFLVINTSLPQTAKPATWAPGPDTNGFESPTPDRPSMAGRQAYLPKRTDLQLHPIACSFPNKLHSSAFSHVNCLLNVCA

SEQ ID NO: 927562 - protein, 218 aa, Homo sapiens
MKVWVLLCYFRRKPTEVDENRKELKQGPWHSVRGCHRENWRVLGMLSTGLGKHRGEPAPIGCGPGTKARKKVKPIVPKLVIEEFLSTSLLLSPHPTPGSHSPRGIISPGRPHGRTGSEATNRLRGIADGRSFIPRWRRSAPPSTEKDENDQWFQQKLDCFSNDSGQVWQQVKNNDHGMVGYGGLKEAISSSLGSAFCIGLAPGQASPYSTKMAPGSPD

SEQ ID NO: 927563 - protein, 188 aa, Homo sapiens
MWYLPCHSLLLLLLLLAKKMGLADNLWVVFGGSCAGSLEVWLRIKYSKLFAAVVDSSASLLAKVDFYVNAQKLWQASDIMVEMLKSSANHDELTKDFKGAVGRTREGVQPECEGYNCCQFAEGVGLSARCLREGEVKAVLNMCKKVGEDLEMKQEDSMKKGWMEERMYKWRRCLSKESGRAYPTFLPR

SEQ ID NO: 927564 - protein, 153 aa, Homo sapiens
MTPSLLLSLIVYLPSAYFQNTELKGTANQQGNLKAFLFMTFMCIRVKRPPNRLCVSNKAVCFTWVQGASEVIGQRQSSAAKPRRSWKESESLGPEFQGLWEWLPGELDSPISSGDGKIESAIFWLFGTTVEFVLGSSGIAEENKMLRFWSGES

SEQ ID NO: 927565 - protein, 144 aa, Homo sapiens
MSACLTFPGHVTRTRFFSTTVIPIISTGFTHTEGEMKRVGNKSDKNSGPSTLAKCLRVQWYIACQDILTKVKATPAIGQWAHEQSGHGRRDGEYAWLQYVDFHSPRPTWLWPLLSAQLLAAEANTEPSIRHHSSRWSANPLVAS

SEQ ID NO: 927566 - protein, 171 aa, Homo sapiens
MLPDRLRSPVDHHRCRALGNSHSGGNRSHALTIPLKPNHPYPAQRQYPIPQYALKGLKSVITHPLQHGLLKPINSPYNSPILPVLKPDKPYRLTLTLIRLSKLPGLYCCKASQTAPITSKLLPHWLSITHPNPFSSHTAKVQGCAVGVLTQKPGPRPGAFLSKQLDLTVLA

SEQ ID NO: 927567 - protein, 128 aa, Homo sapiens
MGWAQGSDILHGQGRNLWIANIQFPNSKHTFRSLSLNAPSVESGELPLVLPVKWELRRVHSNSTVMQVELSVYILELCECISLCCSLTPGVSLSNWFMYLIFHRAACFDPRHIYGQNGTSPYWKNMSV

SEQ ID NO: 927568 - protein, 142 aa, Homo sapiens
MQVAVPELTVLCLVQSGRCGLELGTIQRRGESPQTCDEANDEVSQRKVIEDKDPFCQWDMLGIPTILVTECAWLVLASLPDASKRRQNGTNIDLSVATNTCSPPHLLIVETPLLFYAAFCWEGNQGIYPSILLLIALKENPG

SEQ ID NO: 927569 - protein, 172 aa, Homo sapiens
MAEGKEGASASHGWKGGRERWWKEVSHTFKQPDLMCPELSPGGGQRPALAPEDHCVIFLYSYLVVLPPTPSCPCACDPAPALPAGDHCLCWKLPLFLLCSFQSTVLALLILHITVQSWCIIKSINYSQDPLKAWKREEGQGRAEREKHPNPHPSKTGHKKHLKNYPHRGQVK

SEQ ID NO: 927570 - protein, 138 aa, Homo sapiens
MDGKRMVQGVHVQVCYMGKLCVTGVCCTDYFVTQGEGRQGRMKQGCNDLGPVEVSWSNGLTQGLDGVKQASTGEGMSTLIKDQESSLANNLSAGLLEFAGGPLQTLFAWVSPTEAAEQQISLPDPSPGSFVPEGHPPV

SEQ ID NO: 927571 - protein, 125 aa, Homo sapiens
MLLLFNFLVLQAPFKSHCAQPSNFFLRKIYSSLCETSRACLYFVNSSESLRWMLEVDFLMPLSAPSQEGRKLTLMVEGEGEGDTFFTRWWEGGVQAGEMPDAYKTIKSPSSLFFQNKQDLIMSIP

SEQ ID NO: 927572 - protein, 139 aa, Homo sapiens
MVPKPPYNPLGEARVLQMSSPVSTGCPAARLPAGWEAALSCCCLSGFRNGCDRSLVPSPPLLGFSFSGMSYSRSGAGCGLLLLWSPSSPCQVALAGDNTQECTAGVVNWAHNCAHKWCSWAASQPGILAAEPTHRPWLC

SEQ ID NO: 927573 - protein, 140 aa, Homo sapiens
MAHLHVGVIGPLLSSLATGGRLQRTGTDEVYINEHLVNVSNEDTRVHILPPQTKYFEINYVRKEHHLVPGLSLTVTVTFSPDEWRYYYDCIRVHCKVTSVTGVQSLLPSDMAQDGKVLGCRGPGQSQETRFAAGFPLPCA

SEQ ID NO: 927574 - protein, 274 aa, Homo sapiens
MLLLKMLLMVMLSPVTHSLYVHLVLPNRVSGPPRGYEWFRGPPVNSHVAQHTGLWTVNVDLPLFLDVCEKTCILVLRDKPQFRPCQVGGGESSDEGCGCVRKVKLKTCNGKHKIQSKIMEASPKLQARQKTSFCEKTSACFERSLWPEVSSVPAAPVLPTCFIRVPASTVICVLGFLCYFGTPEGRACGSVFAPQSPSTAIGGDRAGTQCTGSISGLEPLEKVSSTFSPVFSDVCASGASQLQEELSRCADDTHPMQQEFCAGVLQQFPSCSIY

SEQ ID NO: 927575 - protein, 148 aa, Homo sapiens
MRPAWQQLLGENAVLGWAQFSSNSVCPQAGCGGLDAHKSIYSINGLIRQSPWPAWAGRTIAGFSVRPTELMVNGGNKSCTQIIIMTMQGRKHYMPAEDDTALLEEVCRMILEEQQGEVWATNLPAAGDLQQPSARIWASWGCRAWISS

SEQ ID NO: 927576 - protein, 207 aa, Homo sapiens
MDATCLGGLGLIQQPDSQGCPFLKDHSGCREENELESTRLQVEDPEGGDCTIQQRDDKTVDRNWQIDKIFRRSAPQVLGMPFSLQLQEHKRASLNIPAYFKPLPASCSPVYLWRRESHSQIQEVEKYTSPLVGGIAKSHDKECGHREGEELGPIALFIASLFNTSAFPRRIIWDHSGIEKWLLRPKSLFHSSFFHLHVPPSNSFSGL

SEQ ID NO: 927577 - protein, 135 aa, Homo sapiens
MEHLLRSSQAPPKGVEMKWDLTRRLATARLGAQLGRKERKHVKVLRRCLQQDEWRTTQLYTHLCSNPASASYQLCNCEHTAPHPSTGDCIFIHSFAFLTAVLEKLFLFPPIAQDPLPPRPHNNSAPEIMPSLLNY

SEQ ID NO: 927578 - protein, 164 aa, Homo sapiens
MAPICDPKKQKDKLLKLYSDQQKYADHKRAKIYHNELQIEESCEYSTGWFQKSKKRHGINFKVCGDKASADHKAGEKFIDEFAKVKVIPDETLMSEEIYYILLIKHQCVGITAPERLTTADETIPVGIKDAKGRTVLECANAAGLHKCKVAVIEKSCVLTVFKG

SEQ ID NO: 927579 - protein, 141 aa, Homo sapiens
MTKTGVSKPIPLSCCSALICMWNPRPLSYAHLAGGRVKILPAHYYLHSQKCEQANPGPERRKESALQGSESRTIGPGEASLLGGLVTLAAEYPSKHSQGGYQASLQWVKEADPLSSWSATFPMKDRPRSLHPSINSDLPRE

SEQ ID NO: 927580 - protein, 138 aa, Homo sapiens
MLGPYSSFKNQTEFPIRKASPPYFRCYNKVRVQEVCLLEGIGGGVHVAYGSPAGKMWEERMFHGLHLREGQIEMQPEKVVGTELLISLSDYCQFWLRPSSCYLVTAEKVTPKHTAQQQAFCLQAPFQSQRKWSWTDLF

SEQ ID NO: 927581 - protein, 135 aa, Homo sapiens
MCVVEPATYSLISFWKTEKCPGVISDFTKADPKDRTAGQNTGYRGLQEAGVRLGKATLAQPLQQSLQRDLPFKSRKPRAGIWTQPLNPRDTHTQPGSSAPSEICLLFSVMLPIHPHKRLQTASGDWVQSSPGVGL

SEQ ID NO: 927582 - protein, 144 aa, Homo sapiens
MSVLYWKTQEWLPWVSLMDIRLHGINPTLGQAVRDTKSPPSPPHCWWGYRMGLDKNLTPATKSPGAESDCYSGRKGVHGRRLLPFCASGSMPPRDLIFALEKVSGPESVCHVKEIQAELKGTTQTPMAVDMKSIKLATEQGKRP

SEQ ID NO: 927583 - protein, 155 aa, Homo sapiens
MRSYWIGWALNPVIGVLIQRDVEIQRLRHIQGIRPCVEEGRDWSTAGTSQGTLRIAGNQQKMEGAMEDTSLEQQSPTILAPGTGFLVMQEEQCLVELVFKMTPGSSTALAGLNKAIAEIKTSKWILKKSSELPETLSRCFGRPLVVTQSDCPICK

SEQ ID NO: 927584 - protein, 162 aa, Homo sapiens
MAATEGLWLCFKTKEGEGEEGEGGEGEGEGGGGGEGEEGEGEGEGEEEEEEEEEEEEEEEEEEEEEEEEEEEEEEEEEEEEEEEEEEEEEEEEEEEEEEETMLLEQEEAGSRSLERPTRGPLGQLGHDPQVLISPLGLSCHIGQIPPQIGLQCLCKQSIKGR

SEQ ID NO: 927585 - protein, 136 aa, Homo sapiens
MRKRSGFWKGLKEINMRGIGKCEVGARGITLTSPMCCHTGASSPACPALLPSTRGPGSCHSTTRGSQFALADTVHLIQGPSWMLDLLLFCSEMSVHTCTDSTLCPQDPFEGRGFTVSTSASSALSTMRGAAVCTMG

SEQ ID NO: 927586 - protein, 134 aa, Homo sapiens
MAWSDADLDLGTSFLEDKEGSSGFSIPHSPKPYSCPPLLMPSSCSFLFKSAVTSTPSVKFGPHQLHEAISSNSESLIQVEAVTVHIVPFLNIFGCYALDSRLQGDEIVTMLNTSTFVSPSGRRNRQACNSFIHQ

SEQ ID NO: 927587 - protein, 144 aa, Homo sapiens
MSYSWYSTVLVFVLAIHYPGCKAVIVKNIDDGTSDRLCSHALVAGIDHYPCKVTAAIGKKIAKRSNIKSFVKVYNYIKSSTAHKGPKRGQGQVPRQEQDGQERVVLPEAIVLDALTLNMASHCLVASVVSSRNLLLILLKIPST

SEQ ID NO: 927588 - protein, 150 aa, Homo sapiens
MGMTLTWHFHLQESILQKKLAHVHRDVFKKIVHFRIIRKSKKSRLKKEAVKCWKTRKTPIPKKVLDQSFSTRVDHPPGHIWQCLETFLVVTIVRRKCYCHLVGRSQGFCLTSYNAQDSPTTKNHLVQFVNRARVENPVLHINKASVLKGN

SEQ ID NO: 927589 - protein, 143 aa, Homo sapiens
MITRSREPGPVTFFKVNCQSALQGPQARESDFLALPFWGAASLLGAKALKSRHLYWQAQPLSTGFQGRHPQIDTAGALMAGEQKDCDLKAPPNNLDLYEGGKKSFQEHTGKYIKVVILPDGICAPFFPMICPQRHLPKVESHL

SEQ ID NO: 927590 - protein, 134 aa, Homo sapiens
MFLLVPGASYNPGTGAAQQKLWLLTEEFSYNPNHDQAGHFNEVLETTTICPFNVCLWTKFTVCICSHGKEQGKQGGHNSQGKIGPWLPKHRKPEDWRTSKESEEKRLWGHAKDFGLSGLPFQKIIQVAMEKKKL

SEQ ID NO: 927591 - protein, 214 aa, Homo sapiens
MGTFSVLPRRWPGSSLSVKNFWPTKMQKPVQDLHNSSWQQNIDHEAVHDELPNELHSPVAIGVELPQVLSGSKQIMHCEPAEMNKLTEGKEIQADRGNRGNLRNLSLNDQLYYTGNIGPSKDVITLISRHSHQEHSRQKEQPEQRYEEGRSGMCPEIMKIIWPDWTVGHRKWMMWKEAVIPIVSMWLNCFKLYIHKANHPGEIFFLSTISEKAT

SEQ ID NO: 927592 - protein, 173 aa, Homo sapiens
MLFLRFRLPLYTTNLPISQGLLLKHSGSRSLSLSTPPIFVDVSLTHTPIRGIRLVINNSSSANSLKKLERGGCMESTPREDAVNIVEMTTKSLEYYIHLTDKAMTGFERIGCNFGRSSTMDKKLSNNIKCYSEMFHERKSQSMQQTSLTSVATMEVHPQISLQAESARNDSVN

SEQ ID NO: 927593 - protein, 145 aa, Homo sapiens
MMWTCTVGAAIGAEKRAKFGERGAISPPYPMAVGRQSGSAVKVICAGQHPLPREHDERIMALESENPRFKDLGGSDSKSARVVKETFGTVVFIVPVFRCITISGSGSSTRFEPRSTESALNLHPQQCGISMEDAQDCIQNVHGAE

SEQ ID NO: 927594 - protein, 154 aa, Homo sapiens
MGTFSPRSIISSFAEVLSSRWGDGSVVQSLTHQGSHTDFPETLEAIELDLDLSSQTGSPPIQDKQPSSPTRMMDLVWCSVQELSFQEWLKGSFAAFKFYNLLGEKTQATELLPPGALEDSPYSYFLSNPTAATCCECRLAQPPTRTHSVTVKPD

SEQ ID NO: 927595 - protein, 135 aa, Homo sapiens
MTKRKLEPKLSGHFHMKHTPACSISSSAAEESFPLSIIITGWWEVLSGYCQCSLKALGLSSQFVVNAARPETHSSEKWAPLCQRQEEEEEERRGGERTGRRGEREEKEGKEEKEEEEGDRGGGGGREGGKGREKE

SEQ ID NO: 927596 - protein, 244 aa, Homo sapiens
MSLNMFMTPSDSHTRGHVSRSEKERAWRAAEDKSTAAAAGTRLHSPSQSIPRKNYSSFTVYFYRSSSVFCCFFWYQPMDWVRRKIRDSCALGGGRGFLPEGSEAEDVDGAMLASLCIWQRNKGLLSALRGWKHNTNAFQSFFVWRADQVTAIRSCYTFEKKTFAEWRKPKGGALSAPSAALVTLIQGIHSLFISTDIESWEGSQIGSRPLRPCMHKYHMRAMDTKTNQARLFRKLCSESGGEHS

SEQ ID NO: 927597 - protein, 200 aa, Homo sapiens
MGVGHGSSIGKQTHLVISVGNNSYELQLKLGEEMTFKKRTEGSRRTNHAEMQDEEDGSINIIIIIIIIIINMQCKAPKGLGPQGKHSKFWARVILIMEKAMMPSLGTLQLNPGPGFSIENYPAQENWTIQLLLKMSLLLPRTKTIYFPLPTISPGNLFTTKFHSKNNKPYLSQKQILWSCLYGPSLRKQVLDPKERHHAK

SEQ ID NO: 927598 - protein, 145 aa, Homo sapiens
MLYVSSESFLPPPSSLLSFYLCLFTIIAMNAEQCLPIANWWGYRDETVMVPTVEQKWTGIQGEFVRLKAWHSCFGGGSLPTSAWNMKVGGFANLQNCLVEIDKGHLMRGHRQEGTEVGEEERAGGKRWEKLSGFVEICEVPFGNS

SEQ ID NO: 927599 - protein, 131 aa, Homo sapiens
MPQLTIAPRAQPHHPKGAATCRSWSLGSNLTAEHHMKGDKLTREAFPHVTQVTGDNVSKRGYPSKSCHQNHSGEQKAEKMNIKEILNSSYDKSMEEKPSGGEYMYQGNIESAGDGREGCAELMALKVSPGA

SEQ ID NO: 927600 - protein, 153 aa, Homo sapiens
MDCKRAHKEPFQGFSFQYSPEAVKLICNLYLEAISGVKMTEPQDKKNLRNIITNGGEHPTGQISPPFRTFRDFKKALCCVNPLRFGGFYAPAASINLTNIELVTRSGVLLLQKPKICDIDLVVRWQAARKLILELDLWKTMTNRGKPFGETHL

SEQ ID NO: 927601 - protein, 573 aa, Homo sapiens
MKLSLVAAMLLLLLSAARAKEEDMGTVVAIHLGTTYPCVGVFKNGRMEIIANDQGNRIMPSYVAFTPEGECLIGDAAKNQLTSNPKNTVFDAKRLIGRRWHDPSVQQDIEFLPFKVVEKNTKSYIQIDVGGGQTKTFAPKEISAMVLTKMKENAEAYLGKVTHAVVTAPAYFNDAQCQATKDAGTIADLNVMRIINKPTAAAIAYGLDKREGEKNILVFDLGGGTFDVSLLTIDNGVFKVVATNGDTYLGGEDFDQRVMEHFIKLYKKKTGKDVRKDNRAVQKLWRKPEKCWKVLEDSDLKKSDIDETVLVGGFTQIPKIQQLVKEFFNGKELSRGISPYEAVAYGAAVQAGVLSGDQDTGDLVLLDICPLTLGIETVGGVMTKLIPRNTVVPTKKSQIFSTAFDNQPLQSRSMKIEVTFEMDVSDILQVTAKDKGTRYKNKITITNDQNHLTPEDIERMVNDAEKFAEEDKKLKECTDTRNELESYAYSLKNQIGDKEKLGGKLSSEDKETMEKTVEEKTEWLESHQDADTEDFKAKKKELEEIVQPIISKLYGSAGPPPTGEEDTAEKDEL

SEQ ID NO: 927602 - protein, 207 aa, Homo sapiens
MLVGKSSNNTTTLPSPNLSRGNHCLQIEIGAGTDSREKPSSGNRHFQACESRGVLPGLLRVQRRRGLQSPFGQLQLRLGRILRSWPGSPEGDPLRWLRFRKLARVCTLTCASPVGGANTESRRLTQQSAGKGPVENDAFQLANPAEDNTCGCCPQGLEEALSRPAQTLAQHLDLHSLFLLLLPCYSQGSCFWGGEECGPRAGARTCG

SEQ ID NO: 927603 - protein, 134 aa, Homo sapiens
MAGGGTRPSPRRHLGLQLQLWANKPPLKPLEKYPFDSTQGPRAAVFIGSRRGCLGKWKNLCRRRQSCKGVAKQFAACSVPRAAATASAPQSLPGRSEGEEAGERLHSSAGCALRLPHLAQRLQQTPMSPSARRV

SEQ ID NO: 927604 - protein, 116 aa, Homo sapiens
MVKKVLFSWYYFHVIPYHSLSQFSQEPQCLSLRSFSSFKKFGLAYTNNCTSLIKIMISSSMRILIFESLQLASRCAKSLTCAFSSNPSSVMRLELLLWSILQMRKLRHREPAGTYC

SEQ ID NO: 927605 - protein, 179 aa, Homo sapiens
MLENSGSSAAGLLEFAGGPLQILFAWVSPMEAADYCLIFPLEVSSQRGTCQVPARAFLYEVSVNPYWEVSLSQDTQGSGQGCLSLLKLHPQLLLPPGALSQGDVGFIYKPLNGAAAFFSEIPYPERRKLERESGHSGVGLQAQKSKIKELALDEGLLAASSHDRRTKKGRERDKERGCQ

SEQ ID NO: 927606 - protein, 136 aa, Homo sapiens
MSISFERHVGAQEVADLEAFQISDFGFSRLSWFSGFLQLAYFLFLSFFPSFFLSFSFLPIFLPSSLPPFFLPSSLPSFLPFFLPLSLPSPPLSFSFLPSFLPSFLPSFLPSFLSFSFFLSFFLSFFLSFFLSFFLS

SEQ ID NO: 927607 - protein, 163 aa, Homo sapiens
MERNQSRKAENSKNQSASSPPKDCSSLPAAEQNWMENDFEELTEVGFRSSLITNFSELKEHVLTHHKEVKNLEKREKRVKRNEQNLQEIWDYVKRPNLCLTGVPESDRENGTKLEYSSGYYPGELPQPSKAGQRSNSGNTENTTKILLEKSNSKTHNCQIHQS

SEQ ID NO: 927608 - protein, 187 aa, Homo sapiens
MGISVRLPMALSPGHSPQGPVQQLEQESVFMSVRAECPSVRMWAWLDLRGGIQDTRASVWGRGCADARSLCTVFTKLSTSSCCQNKYDQCILPLLSPEPNKGLMYQLQNKVNGKKTNLTQLDLQNPVPHNGPQEFQMHVAFSVYNHRERETTSHGKSAGNIMIWLSLGKGPFPDLTAMPRVWAQFPE

SEQ ID NO: 927609 - protein, 154 aa, Homo sapiens
MWNSNLPSSYFPVLCCFATFGYPVSSTLEAHPGDLGVSKKRCNFNIDKEKKAIKQKQRLQLCSHKPKDRWSHTRSGKRNSQDLEFSVEGSKPKHGRSKQWVPMLHRAKIKVKPFTGNPHLFLLVDLPPHPGRDPQSEEPGPLLAQELARLAVGS

SEQ ID NO: 927610 - protein, 124 aa, Homo sapiens
MSFYYDVPQIWDSPGMDFQPIAALAAAWTAVAARKLAENRGASAPKQLLEELQRHQDALWLKWDQFGIGQFEGMPRYRLPLPCSAEASPKRAFQPDPSGSQDGGPQLCSSCGDCCRLEKVHVAS

SEQ ID NO: 927611 - protein, 161 aa, Homo sapiens
MLAVTADHLCSWAKLLLLKHLSVDTYRSSPLPPVVCVLSLGKQRPNPGEPVPTSNRSESDLPMISGALPASEISGYLSYYKALETNGTDLNADMETHPRRKASVKQYVWEQGRPAGHDHGQGMPQEGLCGDLGTEALWVPYECNSPKGDGSTRCGPIDGEY

SEQ ID NO: 927612 - protein, 137 aa, Homo sapiens
MRSLQVLVGFLHLTFTRLRGACGKRHNGGEAVGSVPLLLRAGKAGPWAGAVTTPWLSFLTCEPVTVMALTSWAVPNTPLQPLHQPITPLQPLPQPSTPLQPLLQPNIPLQPLLQPSTPLQPLPQPNTPLQPLSQPLS

SEQ ID NO: 927613 - protein, 144 aa, Homo sapiens
MSLLVHLENGHNNAQSKERVGEQPRGRPNGSLPAIEGWAGLIPRGTASKSGPQLQSPDVECAFLISLKAPIPVHNYTSLEIDDMASGFQRAPGEVFPVVVRVHLLTKGEKAGAPRLAPRVLDWGLWTPIHEGQKLKRSPGFSKI

SEQ ID NO: 927614 - protein, 214 aa, Homo sapiens
MHDPSLVTPLNFCPTSQVEGMETEAQRGAASGPGPHQMCERNLSTVPDSISGLGKAPEGTWSCTCSEFWEQRVGLCERRRALRANARLTRITHLGAAESLGNELLHVRECGRRNNGPINDAHVLLRRTCEHVTLHGKGTLQSKRLSQVTQLASMSSGGFLLERGERASIRGRRCDNRGRGWSDVLWRQRKAKEYRRSVEVGKSKETDAPQHPQK

SEQ ID NO: 927615 - protein, 170 aa, Homo sapiens
MWAERLMLPIHGCGKAARWHRSRMLTCGQRKNSLTPDSQKGPQFREMWEVLHMPLVRTLSWSGCPLPCACLDRELQRAQKLFTLLHADEQPAGACKERRGKLSPRNLSFHKPPSFLLPAPSPGAVLSDGAEQRRMTIADHSSISGRRSLASVFSPSLHTMGYLMPPRVHL

SEQ ID NO: 927616 - protein, 117 aa, Homo sapiens
MALRYRGWGHTSNANLYLSCFPGNPTCDIPSRKLITTSLKTGLSSSIAQCRVPGKLRQRKHFGPSRWGGILSPHKHESKSLWPAMPKPTHFPCRGTKQSLRINPDPLPMHAECQNCG

SEQ ID NO: 927617 - protein, 122 aa, Homo sapiens
MCISQPHEVGGGEKRGEICEAQAEAAEGPAHTHSPGCPGDTGLVFRGAQGRPVSLVAGCGHITGENTKADNSQFPTLEQKLRSDGERTSAIRTLFCGPRWQFCKQLMNICPVLHSEPLWAGS

SEQ ID NO: 927618 - protein, 136 aa, Homo sapiens
MPFPPQPRDVGAGGAGTACLDPGLSADLSRSHGAGDARAALRRHPVSRRTVEGGRQEEALRQNSQGLQLSPVATPALWFPMRVLLAGFQGGSGPTSHCSHYLPVHWVLLAPQDSQTICPILRPLKGSGSAAWSMKE

SEQ ID NO: 927619 - protein, 133 aa, Homo sapiens
MDASNTHCKFSSSSGLGSSPQDPGPGAEAQLGGPPLCMAAKGRASPEWLIGMPGKSSALGGGPAHSPHGGGLIKGLMVQWAGHQTGHLEAWGPVQLAAALLGDLKQITWPLSAPSAPCLLPVWQSFLEGILMG

SEQ ID NO: 927620 - protein, 149 aa, Homo sapiens
MQSCRQTRSLAYSCPLLLVQVGMVELQPPGSMQISILCTLGHHDGHIKSWHVCLICQSVDCAPTGPQVLFIERHARRSDSTISWEKYGFGVGPSRVLSLTALVSSCVTLEPSTLRTRDHKCKVVLYEILEQKKDIDRKTHLWIVNSVIP

SEQ ID NO: 927621 - protein, 134 aa, Homo sapiens
MIRAIEEPKAAKVFICVATLGPNLELLLPGIKGLGLRLLPSDIGADVSVNGCALQLEEDSGLHNHRVFPNMTGTKRTQIMIRDPKVGLNSLHISTAPRYRRAGRLGNCWPARGTCGVEKKELPSACREERPSLG

SEQ ID NO: 927622 - protein, 197 aa, Homo sapiens
MGRNQQTTPKSRNSKVRKKPVRWAGTKDELHIVEVEAMNYKGSPIKVTLATLKMSVQPKDSLGGFEITPPVVLRLKCGSGPVHISGQHLVAVEEDAESEDEEEEDVKLLSVSGKRSARGGGSKIPQKKVKVAADEDEDDDDEDFDDGEAEEKAPVKKSIRDTPAKNAQKSNQNGKDSKPSTPRSKGQDSFKKTGKNF

SEQ ID NO: 927623 - protein, 141 aa, Homo sapiens
MSAAHQHGTCDDHRECKVTEGKIGDWERPSDEVLWPRLLIPFFSQGGIFPNQPFADQIPHWHLFLGGPQMAQPSEEFFFIEQLSLDSVISIEDKLLMQAVLFSLILKFPNCIKLPPKCSVNKRSFLSCNWENERSYRQSEV

SEQ ID NO: 927624 - protein, 157 aa, Homo sapiens
MQGVLLGNSLQLKICQEGIESGRREDTEAELKREEAMYSAQDCCVLCTGLLCTRFIPDPNASWGRGDFIHRGTLGPGQSRVVLPMRSDQFSLSTPLSPGFSGGASLLHLLAVQPQMPNQDASQELSSYLRVGPLLDQTCTGTLAALAPQTSSNCSCC

SEQ ID NO: 927625 - protein, 234 aa, Homo sapiens
MGRHWVPAGFPGVGGKQSVDLPFWSLKDSDPFLTGPLGSVPVGILSAWNWMKGDTSSPVAPTIGTALDEIPSQNRTESFPRPTVITACVPTMFIHCPRALELASNESNQTSILPFWLVSFRRSWAHLEMPPKSQSLESGTLRIYQVVYSTEAALPHKLQYQVLPLFPPLTLSRRVSPHGHQCPMPTSSTAWLLLMFTESPRTLQSPYGEYCQDQASSYRAVGFLLAQRRFRHTI

SEQ ID NO: 927626 - protein, 130 aa, Homo sapiens
MFSSTPGLYSLDASDTPRTVVTTKYVSRHCQMSPGVGVLSTLENHWANRRLKEKCFWLQEACIKDILRKSSNLDKDSSLSFQSTQVPERRHASLVQEQKAVWQLLSSFPNVFQNDTSLSNLFDVLRKANR

SEQ ID NO: 927627 - protein, 139 aa, Homo sapiens
MLKEPVGHLTDESCESQRSEVCSGLALAADFSRDKNDGYLMVTRGFQGLHCEVRAWYLRPRINLSSHEEPYFPSEEIKMARSSQLVFLVDMIWLCPHPNLMLNCSSHNPHVLWKETSKSYFLMVDYIHKICMSTMWQAP

SEQ ID NO: 927628 - protein, 148 aa, Homo sapiens
MYFAVSILGMKSMLLKRVTEIQRSHLLLGQKESFLRSKRIQGSFILSVWGFNQYTSDLVFILLQKSSVKPFNSQNPNISPERQSCGPLSSSVVVLNTKGSHSRALRKGVTSLDLCFEKIILAAIWRITWKGKSGCVVVCRSCITGDKR

SEQ ID NO: 927629 - protein, 167 aa, Homo sapiens
MVLVMAVAVLGQLLECQAVRPGFGSVCYSPGGPVHRALGGVPRYVYVWVLAVVSIVEVIPCPRQSAQVVKAAGVLQPCCWGGQSCCRLVAVGWWLGITSFRPRWWLRVGFPGFKARENVQQPHFLGVGLLPVTPASAQEVAANSSDNCRQGMSMGYQGYRDAGTIGP

SEQ ID NO: 927630 - protein, 211 aa, Homo sapiens
MSGISTESHEGQECPEASSFTTVAGISAMLLAETLTCGLSTCPGDRDRRQRNSRQEKGRGPGEAPLSSLETAAQYENILFSHLNVVFSKTTPGPPHFPSCTHKNPRLHWQRVEKGRREEAAEDAACGAARSFHLSWFLHLLTCMLPLLQGVESCGLSKPGTPHDACVQDQVAQQAGVEASGLDLETHKAPPYHILLIKQSQTSGALSEVLQ

SEQ ID NO: 927631 - protein, 142 aa, Homo sapiens
MWVGPDKGIKAGCPSQQRQPARVPFHAMGGANNSRHAALNAATLTTEVCSFTPEASKTMNPPEGRNAEHIQTSEGTNSRHTIFKNCNTHRKGHNWRNWLFYQGFDWNGMLSFKESNLTYATNKSPLEKLASYLVYTVPAQGS

SEQ ID NO: 927632 - protein, 146 aa, Homo sapiens
MSLYRDYRKRRLQKCRLYNESSEILTRNNQAKGAEPEESGINDSQYLVLTLIQKECAQLFITDVNKQSTNRKNSSFLGEHILGKEIEDKIKKVKHMVHVIAMKEKEEKYSRKSTGETTEECGAQQPSWRLEPELKKTQNMFSKEDA

SEQ ID NO: 927633 - protein, 139 aa, Homo sapiens
MKIEIAPPPALGSPPPDNETPLHVSISSNTSLHQPRSFGLIITLRLTTTLLVNQSFLVQKHPFCPDSLMADAARAALSSRAAPQLLSFLVWGAKLAPCSANAWFEGWKRGATRLRHQSRITETSSLKGTLKIFTSYPLP

SEQ ID NO: 927634 - protein, 221 aa, Homo sapiens
MFSNRRWIQVGALKQLYGVVDQEDEAEWEVDWEEKMDGEEVEEEEKVDSEEVRVDWEEEKVEELGMVQFLWLFGGGIKAGSPGSQGLGRCCPPLLYTEGHRGLVKAGELIWAILVQACCGPLSSRLPRLGCGWVRQEEVRDLVIQRALAKEPQDTGEALGAALLQLFQHSCEERVRKPWHSKNLPSSVVRLEFDPDSESPCRLSPQCLGKRRGTRPRHSSG

SEQ ID NO: 927635 - protein, 141 aa, Homo sapiens
MPEMHSTVIELHLARALWERRPHPACQAAPCRHGVWLVSVNSMFPTTPCSRGWEGGPISRPQGQFSPARVKENIQGHLFPAPVSLRGSTFLEVKSSGATTLTSGTKHLARSQRGVFGLAWSYLWIKEPCWAVIAGSGKGSG

SEQ ID NO: 927636 - protein, 139 aa, Homo sapiens
MDCSSLRRCFLYDGLAIYISGSLLLQLGCHLLLSSAHMEDIIPEGRYETSLCLAVGEWCGQDSSGKAVMQTLSPGCPYPYHMPHPGFCTWLGHTSSRASMHTLSWPGGEEYSSEGRAKPRLRQCEHIDNYTFLNQEFKQ

SEQ ID NO: 927637 - protein, 152 aa, Homo sapiens
MPSVESLLPNREDSGVQLLGSSKGQRTEWPGQTLQRRWNLTLLHVSDRKACLPSRLPPGMQGPSQGQGVEEQLILQKPRAMLRHSEPFKSDNQDAGGKLRIPLSMGPVFKKVVVSEKKGFCEHSFWAPFIPIGTQATLLPPWIPPSFPYSYG

SEQ ID NO: 927638 - protein, 141 aa, Homo sapiens
MPVINKNKNLNLLVEKQTVSIQRAGPHSGFLFKDDLLSLIHFGTGKEYQMESDQKVVNMLSVFQPFQTWILPSYPLDAAFSWGSFLPHVFWGCLLLFKIMCIPLTPTQQLSPHGPSYSSFLLSWRYAPSCITSLCNQLASE

SEQ ID NO: 927639 - protein, 291 aa, Homo sapiens [sequence omitted]

SEQ ID NO: 927640 - protein, 134 aa, Homo sapiens
MRALGGNLGRLQGAALGNYNCKGNQYEERWSQVTTEEVAAFRGEQGCAFPKRREHIVLHATHDASAAEAENQSQCLEISRRRQLSWRARVQQQPFPQGHEGIFGRLSNLHLNDCNFSAKTELTTLNPAIFLKLD

SEQ ID NO: 927641 - protein, 153 aa, Homo sapiens [sequence omitted]

SEQ ID NO: 927642 - protein, 134 aa, Homo sapiens
MNGKSLAQLTSCDLRSKNDPEPGKQGDVSGLGSERLSTATSRRVSSMARRLRAQGKRTWDGWKGTGGELAGAGKARGREETHRGARSSSVTSARGKRGLRNPGHWALLRCPVWLLIPGSLLFIKGVRHRELLPE

SEQ ID NO: 927643 - protein, 143 aa, Homo sapiens
MQTTLLWLSAFDDFLNLGFWWFLHSLRSEEARFLFREQTNAVAKQPFAKELTVDRREPGASYQNSGKNTLKASQRVTRLPLTAQAQSCRRFQGIGLGHLPQAPSHGCHRSLIPIAFLSCPSYGSSGPRFPTTISLHTCRIIDL

SEQ ID NO: 927644 - protein, 147 aa, Homo sapiens
MLQQSPGSATTSLCTRVGTRSRERPGKHMDAWVQSHGWTAASVPESTELLPRQLCREEGSLRFLVPTGSMEYTVLAAPPLLQLAIPVVAAPDGPCLHHSYKVLWILGLNWKLYAIALVKTHCFPPHLKNAECKFQRLPTILCFHFVK

SEQ ID NO: 927645 - protein, 341 aa, Homo sapiens
MWENLELPGDLLNGFAQNVDSDMHKKVQTEVVSDGNEELAGNWSKGDSCYVLIKRLAAFCPCLRDWWNFELERDHLGYQEEEISKQQSIQELTWVLLKAFSCKRQTEHKSLENLQSDNVIEKKVPFPGEELKPAAAICISNEEPNMNPQDTRENVSRACQRSSQLLLPSKARSPRSKKWFHGPGPVALCCVQPRDLVPCVPAAPALAERGKHRAWAVASEGASLKPWQLPHDVNPERQCRREIWGWSPSGAPSIGAMRRRPLSSRPQNDRSTDSLYHAPGKATDTQHHPIRAAWREAVPCKATGAELPKTMGTHLLHQCDMDAFPVFDDIESSAESWSVIS

SEQ ID NO: 927646 - protein, 148 aa, Homo sapiens
MEHWWCLCANWCESAGGLRRLLGSVLLSWGSWTLTHYTLLSPVGGITCQGVLFWHRTVLAWEKGDGDIVKLFFLPSLMHLFLDFFSSGMLKYLCSTPRFPQMYSCPLVVFKFNALATMNNAANERSQISLVWTYGFISPGAMIPSECV

SEQ ID NO: 927647 - protein, 266 aa, Homo sapiens
MPSCELKVPPDRHQKLKTNVLHINCNANHSAILWRYSSLELKFAHTERLPHREEMSTLTDSQRGPSISNVTEGVTGEKFRLIISPIVNTPPYNIDAKTINGNMAGMEEAATFGSYMNGNLDPDEREEEAASTTEEEAKKNRWRKKKSKGAAAGQQETDKGLRASVDEGARQLERQALEKKERDDDDETEMKEEGKEEKEEGKEEEEEEEEEKEEEEEEEEEEEEEEEEEQGGGGRGRGRRRRRGGRRNNQNSNRPSLPQFQYVAVS

SEQ ID NO: 927648 - protein, 139 aa, Homo sapiens
MKSKLVNTNGKIIEQPLIKIYGRPEGVNSKGNYNRPEKLLENYVCGLTNTNTHIILAAMITENLNSIRGHKKINKLLHHNMASAMLDARPGSMGAQRIHIGPDSGRGRIPRGDSISQDLKENQALLRGGKQSGLRNGEK

SEQ ID NO: 927649 - protein, 144 aa, Homo sapiens
MKNSILKYVVLVNQSRKGKGNFKIHAFVDVAICSKWSVSSLPDDHTPHKSELCTGAREVAVEQRELLLAVNDHVESFTCEINALKDSSQVALWSFRCEMDHSSICNRPFCEALQSNQRIQEFPTPKSGIWQMVGQRNKEGMQNS

SEQ ID NO: 927650 - protein, 140 aa, Homo sapiens
MDLENLEENSGKRDKIIQFKLATIDYNYYHFLETFDIMPITHQTPKHPSYSELTEGPVESALHSLGPGSVHSLHLPLSHSPVLRFCGLKAESAVFNTLVRHNCLLTPNPTVVQWFAALVFPDTLDSRIFGGSLREIPLHL

SEQ ID NO: 927651 - protein, 174 aa, Homo sapiens
MLLAFLVLHLAMAYCGISQPPYETHGWMDGWMNGWMDGRMGGQMNNKREIPKVHQFKSNYVSGLHLGKPPSGKPPSGKPNDPHSLVPIFILLSKIAAMKDSAALKGKCECNGVSQLRLEKSKGKEYNMLINLGSPHIQHDYIVILFDAIQQRICTGLRQSELLPLPQKKFDRGA

SEQ ID NO: 927652 - protein, 169 aa, Homo sapiens
MLEPETLVCRYIASFVPSAPANVEAREKLLTELLQERSQVYANPLNSSNFFYCRRTDVTWEKNDVTRSKNEGSGWGSSRQLVRRALWKAHDPESAVLHQLRESCGAAVQEVVAVTRDFMQEGLSKVSSSKENMAFPEAPPCGFLHHQIYVALIAGCSEAGEGSVLTGLL

SEQ ID NO: 927653 - protein, 142 aa, Homo sapiens
MWDREKKKPIKGQNAIKHFTIEGNWCSVNLGSSDFLERVSLIGWRGSWGVYPSTQERTRDAGAGVEPSKALAAREQTGSESYPPMPLSTHHSLHPGDKHLSIFPKGFPGSQRPLCHAKGRPGAHESRSHEEEPSVNVPNGTG

SEQ ID NO: 927654 - protein, 154 aa, Homo sapiens
MFPALCPCVLIVQLTPMHISSIYSLPFLWLYTQYWDCWITWQFCFSFLKNFHTVLHLTTNTICFNPHLLCVAEVLPHTLLRGLGNIQYMHPVSTLKLEKFCILKPILPVRVSKKGVWVCNIYLIGLEKDEYSLSAGTLFKSCSGAGHCSAQVLQ

SEQ ID NO: 927655 - protein, 134 aa, Homo sapiens
MRTSNQRNSIKLQEPHSKSNLKHIPASYRMPGPLGMPVAADSWQSHNAQPLKEMSSGPCLPEFFGESPYCENHIFSCKNRVPMTRYEKYPGGMGDQIGAALKDAPSGPSSHMPFPFPMASALWKVSVSVTSNLV

SEQ ID NO: 927656 - protein, 148 aa, Homo sapiens
MLPLKPGNFGEDGSKGAKAKGCNGKAHAMGVSKHPLSKSAKEGGEAADMNTTPAEARAEQLTTEMGVGGQVAMDMSHLVPGDNATKCQEGKGPPLSSSALTSVSVLHGSELDYLFPSDVHLSHSCNQTTKHSSGALSPSRPRCSVFCL

SEQ ID NO: 927657 - protein, 136 aa, Homo sapiens
MIASEHTKLHKSNFKRFALAVAAVASRIFDHLGAQYFTRSCSPGPNVTKMGGGEGDSGVVLKGVRKPQQKETCVECLRLLSRETEKAFTKKGGSVSATDADYSPCSLRIWGTMSLCRKMQNFSGPKSQQYTSLDGF

SEQ ID NO: 927658 - protein, 148 aa, Homo sapiens
MLYNRAGANAAGDFKLKPMLIYHFENPRALQNYAKSTLPELCKWDNKAWMTAHLFTAFFTKYFKPTGEDKARLSLSSDEASLPSSWDENLNFLLKSFRHQSSGGIGMDGGKMEDENKLYQKNPKQTIKQRFQKCKEKVHNCATISESI

SEQ ID NO: 927659 - protein, 187 aa, Homo sapiens
MVVTREMNVKDHEKPNDQEKQQAYSRKSLLTKAVERHMTDSRHFDPGLLFIIKSSLQFSLLCHVSLLTFLEQLHTAIYMRSVPSRPAVTTPWLLPMFTQVPGALELPDSKASQACVHSFSAASSLRPRVGPEVPSKSQGPESKTLAVYLVFYCTVAELALKPQDAVLPTLPSPFQRHRSLTSQPPTP

SEQ ID NO: 927660 - protein, 135 aa, Homo sapiens
MRFRWGHRAKPYHGLTDRKRGALVNKISALVKEAPVFFTFSPPRSSTTPAYVLGSRRVVTGKEDVDSEGQDDEVSDGNKELAGNQSKGHICYALAKNLAALSPGNRDLQMFELKSDDLGCLVEEISKKQSIQELV

SEQ ID NO: 927661 - protein, 148 aa, Homo sapiens
MRSPLYYCLAPSIIGQDLPKKTVALAITVCSVFGWRKHSKNSRSLAQQLDKPDKPNSQVVSRGDVELICDYITEVQSILGNLDFQHPETWNTPLITAAEENLTEIGTISIHFLTRSTNIPAISKVITRFYGGSGCESNTDATPEELMV

SEQ ID NO: 927662 - protein, 134 aa, Homo sapiens
MSPLAIPPPPTKILLSKLVSFSLEPRRFVFQNDVVAEWRMDWIEDKHRRVHSLLERYLLVSSSSMARRKSSENGKITSRVAYVIKMFFNNSRKPQKFQCHFPTKYSDFYGDFSDGTIKFCQNKCKHYKRFPIQN

SEQ ID NO: 927663 - protein, 147 aa, Homo sapiens
MASLGFVRIFQIAKAPRILSLRLCSPFAIRLSAPAPVICFGHTIWQKLHSISSGPRFQEALNTSALLLGPRGGSMGTSLGWFDEGWETQGPTLCFKSAHEGTDFSGYSSSGWRCGCGPVPIAGVQDEVEGDGDLPASSSCQGHSATR

SEQ ID NO: 927664 - protein, 280 aa, Homo sapiens [sequence omitted]

SEQ ID NO: 927665 - protein, 125 aa, Homo sapiens
MGKLPRVENDCSSRITYHVNKSSSIQSIYGSDGRAGCSSGCIFVFGNFHGQIRLKWMWSIVSPQECDSHSCKLTVERSKSFWIGYPVSIICDIHRFSEVALKFFLLLKLCVVAVFKHRILIFHSS

SEQ ID NO: 927666 - protein, 157 aa, Homo sapiens
MTMAVLSNRKGGNPFPTQLLETQPFLLLKPQTSNAFFPPFFHTLILIRTFYLALSSKYNQNPTTSHYLQQYSHTLSHHHFFTLIMLPCSLTVYPQHSSQSKSIKTHQIKSPLCSKPPVASSTLTSMQNLNRMLLSLINPALFCHEGYRDATCSQLNE

SEQ ID NO: 927667 - protein, 151 aa, Homo sapiens
MYSLTYYLSLEAISPKSVSLKARCWQGWLLLNTLGENPFPPLFQLLVATCVPWPVSPSSIFKVHGSSLYLHHHTTSTDSDPPSSFLEGPLDYIGLTNIIWDHPLSQDPYFSHIYRILFAIEVKQIIFHDIMGITLSVEGLLRKKTDVSQPW

SEQ ID NO: 927668 - protein, 141 aa, Homo sapiens
MADVIKATTQPTWEAGDSHLKIVINDLEHGSAYFRPSAQPSIHPSICYQLFAKPPTGAKRASFCTSFPPTLRYPRGPPFRSLGPLASFFHTGLLHVVPFTWNVPLSHLPAWVLPLYLQTLNIISFHTACREKPSHISDSLF

SEQ ID NO: 927669 - protein, 135 aa, Homo sapiens
MDKKPLAHISSYYRRGNILLYYRRSKIIEGIQGCGVVENKGVVVDDQESLGGRGRNSPSLFAPTSGFLTPPTEGSVFLPLALTANTLPISEPQMGLKLAESAEPLMPYSTYLIVHHNMLMDHTTRAPKRPALLKE

SEQ ID NO: 927670 - protein, 180 aa, Homo sapiens
MPNVELSALGISDPLEGQCLISYHGAMIPATSPITFHHVSNNEGDTPTGRDPYPPRDCCPSLGWDVEQMKKHMEKKKGLTNWSLLTCEILGIHTGEFRAQRYRNGDRALFSKLLTDLHVVLALGVPMWVAPVSPIERALQNLSEVTSHTDGGAALAQEARGKKLHRLIQEHGNIPRASRK

SEQ ID NO: 927671 - protein, 163 aa, Homo sapiens
MRFLALLVCLLVLGFQGEYISHCRPCRGLNPGHSDNDLSEFWKLHCDVQQEWTKTGIATKKCGAAVTTPKMWKWLWVDDGRVWKCALAKPVLPRTDHKGITATGIHTLFCVDKRFHLGVYNPISGIAGLYGNCMFYHLRNCQTVSQSGRNISLCNKKKESLSE

SEQ ID NO: 927672 - protein, 142 aa, Homo sapiens
MNPQLYLKHYLFGFHHHKHYFGAWRCCTSSCEQNTHWDPAQCDGPKHKALKEAPPLSVEGEAAVPGDVSTESRVRWAQAVAWRVFEEEDMRPQSQVHAPLLCEQGPGLSRAPSRASSFLTPWGAQALQTLQCWLPHPHWTSR

SEQ ID NO: 927673 - protein, 137 aa, Homo sapiens [sequence omitted]

SEQ ID NO: 927674 - protein, 116 aa, Homo sapiens
MEGAGLHHFPGPSNFPVITLWSLRAYFQNTLQQGNTQKTNETTKNASSRKNDVAPGMPIVRDCGCRYLTACSQVLPLGPGSLQAEQRLPRVTTAVFRDECTCCRYKPVGDNFGENF

SEQ ID NO: 927675 - protein, 173 aa, Homo sapiens
MRAPPDKVPGRNMIHHHHHHHYHHHYHHYHNHITITVTITNTITVTITNTITLTITITITTIIAITITITFITTTITITIIITNTIITTIAIITTTVITTTITITTTITTITITVTITITTITIITAITTITITTITITTITITTITITVTITITTITITTIITITTTITSPP

SEQ ID NO: 927676 - protein, 158 aa, Homo sapiens
MKSCDASGTPDLRNPQARTVTHCNTLFGALWFLASPSFLMPSCSSCLDTGAYGGSCSGVVGKMRGHKDVSVLILRTCGCVTLYEKKGLCSCDSGYRPLDKEIILNYPVGLNEFLKVEEGGRRVGQRWGLACLCLFDEQPTEMPASQDTKASNKVLQED

SEQ ID NO: 927677 - protein, 150 aa, Homo sapiens
MSQLLSGHALWIPVSSTVLPILIFMLISAKLIGVGPGRLLKYFIFSACVAVIRTHGLNKNKPCMRSMATPPLFSREERIQNRARHCTFPSTATNHIYIPVSPKNLPCFQSYSGAPELTKTSTLKIEFPLPYTKQYDQKCPSMKIITILIS

SEQ ID NO: 927678 - protein, 138 aa, Homo sapiens
MHFVFPDDNLFDINSYIHGEGKSRKSVERGGGISSTKEAGCTLPTLAVEKKEDIAMTMSPLFFLFFESWIPKACGPLGSLKPEQYKSLLLLLRDPVKSKRMEEDYYVLFIHTYDWENSYFIPGNICYYDMLIFITAYS

SEQ ID NO: 927679 - protein, 182 aa, Homo sapiens
MCFVKQMLEGSMLVKSHHHSLILSTQGHKHCGRPQGPLPRKTRDLCSLVYLLTFPPLLFLASLRWVRTSSFSLEKFVVTDRLKPSSLNSSKSFSIQLCSIAGKELHSFGGEEADHQLHLCWSLLEVHSRPCLPGLSQVEATEQQILQNGKCCCLILPLEALSQRGTQLYEVSVGPYWEMSPS

SEQ ID NO: 927680 - protein, 147 aa, Homo sapiens
MLTSAKIYFFIPVSSAKIDYTIQGFSLNANTQGLCTDLADTSSVHAALEETIVIEKTVVIHSSQENGAQNSMQVLKGKHQGSQEADGVGGKHGQEALLWFLQERMGEAGIEWCQKILLGKGSSMGAVSIPHQGCWLPVAGSCELDDS

SEQ ID NO: 927681 - protein, 180 aa, Homo sapiens
MRILEAHIQAMTGSRGSCGYAGATPDNPRSAAALDSQRSAKLLVNCSCAGSRLCTPYEYLMPDDLRWNSFIPKPFSPSPASMEKLSSMRPVPGAKKFGDRCYRGSFCLVADPSVAHAALHAMACHMSAVSTDLVAEKLVRDDLWALLAKNVLELKNVLNKGKVKTLATVGDRKLTYFTEP

SEQ ID NO: 927682 - protein, 136 aa, Homo sapiens
MCSEFLPSGGGEAADFRDPGAQLASPSGSPTGAAGGAACQSRAVCLHSSALGWSMGLGAVEQEAALIGEARAAQEPTEWRGGSGMVGCRSRALPGGKAAKARVRRGHAHPELALARKHRVQPRFPPAPLPPHLPAS

SEQ ID NO: 927683 - protein, 141 aa, Homo sapiens
MGQEEIHHLGKTFPTTPALSLLYLAWALSQHISYPLKLYLDVCFLRDLSRYNSHEASSYLERKNNIHGKNFLLSGSFQIVADISSISDSVLHCVFGSCSDCWPSARLQLDAREAKMQDKALSEMITGKRNRNSHGESVWER

SEQ ID NO: 927684 - protein, 215 aa, Homo sapiens
MAGCRSRALPRGKAAKARPAPAGPAGHSECWAHRAHAYPELALARSTARSPGSRPRLSLHTSPQAEGASSGLGQPRKGLPQCSGGLKSPSSATKVGAQAEEARRASQGCEDCQHAVTSHSGLISTHCKLRLPGSSQGQFQDLYRRCEDSELEVTPGPCKFYDSRSVVRRGEKPKMPENSSILVRSQGRSFLEKLQDGDWFEEKTKEDPEIGPGSL

SEQ ID NO: 927685 - protein, 136 aa, Homo sapiens
MSTVISRMMLRKVISTSDLHPLWPPSEGVYQRPMPSLQYCPRCSCGDSARAAGTMVGGKATTTVEELVSGVRQVADLEEQFRSYSESEKQWKARMEFMLRHLPNYRNPPNSGGRLDQLLSLLHGLGQPPLPGLQLQ

SEQ ID NO: 927686 - protein, 236 aa, Homo sapiens
MQLRNTMVLAFRDLMSSMGTDADPWALGLRDLKSSRMKGGDLKDGQYLLAELEEGILGRGKEEEPPQQDKAGPVGRKKLEQPEMEQSYPWPSRDQGWGPGSWQEVRAVGSPGHTHSLGPSVQSEASPENAARERSRVRTLRQAFLALQAALPAVPPDTKLSKLDVLVLAASYIAHLTRTLGHELPGPAWPPFLRGLRYLHPLKEGTSPWLFCDSYWEVGEKEGRLRLMEIVLGGFL

SEQ ID NO: 927687 - protein, 173 aa, Homo sapiens
MWLPLHGSRRLLQLEPSRLLSSQQAGEKGRSRACPSHERRHLSLQASNPLWQSRGSTTVSSGGRFRCPSCRHEVVLDRHGVYGLQRNLLVENIIDIYKQESSRPLHSKAEQHLMCEEHEEEKINIYCLSCEVPTCSLCKVFGAHKDCEVAPLPTIYKRQKAGVQWHKHNLLQP

SEQ ID NO: 927688 - protein, 145 aa, Homo sapiens
MRRQVSGAFSHLHTGPPSPGAQEILICRAACTPPLSSYPPSPLAYPEVPFPWVPFLDDRWRRESRGEGTGPGRGEGKAGESNAELQGYSKEKLEIKGPQCRVRTSEASCCSDWREEHGHIGKVLPVSQGCHLGVAQGTVARRVFH

SEQ ID NO: 927689 - protein, 142 aa, Homo sapiens
MLNFSMCVHRKLWISKSAAANHDLFLIFPGKITKKSHQRQKLFNFFKQRLFENLTQESREDIDEAVCAILFKENSIVKDINQTQRQKSTKDARSTEKSVSTLVLNIGDLVLEMLPQRKVRVGDCQLIPEGSRLSGILFKAVQ

SEQ ID NO: 927690 - protein, 242 aa, Homo sapiens
MNTSFPGQLQQSWSNPCDQGLDYAPTFSSWKCELGRWTRPQGAGCLVGPSEKGTSCQGGPGHLPLCRCDVHNCWDTKHFPSELATEQTWERRLKRQDEACGFTQVEFEVPIGQPGGCHIKKAIRCAGLVGVKCIFPIQTTHSRLISYGNSLTDTPEAAQSLKSNAKPPGNQRNGFSAYWSTENNALSLVLYFLPTGFLTLSSDFDNLHNPVKNSHNSFKYMRVDDVCDDKIIKIVSLFMEST

SEQ ID NO: 927691 - protein, 202 aa, Homo sapiens
MEHTGKKVSAFMALRTQCKILGTFIQIPVNCKLNAYEIRVGPIRSLGRHEVPEYVSEGSQRNGQRAHGAYNNSESLLVVGMLPEEADLLAHSPGAGKETLDLPSNLLWKQEVWPGNQSAARSIQQGESLKCDRGAHGYQRGSTYLCLGTFTDGNKVIASFKSCKALLDIKKASSKFLVLYQAWPTVTMWVKHHGPDFCHGGG

SEQ ID NO: 927692 - protein, 138 aa, Homo sapiens
MTLEVLLPGEKRAEEEVAGSTILVQQRPGGLLCSALQVCSSAESSGPQRYLITVGKWMLIKSKSGGNCPGRLYQILEILEQATILRVLCKFPTHYYFSEFVPQMSAEHLLYIRPEVQRENKMEMAPGLQVSQEMEGGF

SEQ ID NO: 927693 - protein, 131 aa, Homo sapiens
MAKGKQTRSFFTWRQQAEVQRKGGKAPYKTIRSRENTLTILRTTWSPKDCADLVDRCHQIPASVKGEVRPSVILSPDFLGSLLELHPGYMSSGGVSCVLWPTDSSVFIVSELQLYVSSMQQEFQFGEKDIC

SEQ ID NO: 927694 - protein, 141 aa, Homo sapiens
MIVGLPSYVELDLLNGFDQNADSDVDNKIQAEVVSDEDEELVGNWSKDTQHQPMKAARKGALPCKATEAELPKAAGAHLLHQHDLNVRHGVKGDHFGTLKFNDCTIDFGLSWGLYPLCFGQFLPFGMGVFTQCLYPLVSRK

SEQ ID NO: 927695 - protein, 173 aa, Homo sapiens
MAAAMAISRTIFPLSELLLQLQKHVPLLHRTLFTQRAAWLPPWANFHTYPKGEDVAHQGTWYKQPDLHDFTLTGSSEPPSCLNAPKSLTCEAVTCARPYAKCQTDKDETGKEEKKSHYLSPEQSLEMENRNQVKLSILRDSEVMGCRCKNTELQENFTKSAICIVVDCAMKGN

SEQ ID NO: 927696 - protein, 137 aa, Homo sapiens
MTENPGSRALQTEKTLPFEYPKPSIRVSKQPAKSGAAGGPALGGESGFHRETARFIGLDVGSRGEGGLKDVKLSNRWCHLWRGRPGSRESKKCHFAIVNLSCVWMQESETQRRGAGSELVDPGCAGSMNGSTYVSPP

SEQ ID NO: 927697 - protein, 178 aa, Homo sapiens
MLTHEADPQVYTGGWSLPAKAQPQEEHSTFPSLLRVQGSGTAFPCGYGKRSGTAVGPCEDSRGARSIWDVGSAGCPRVLQRQQLPFLRPALQAPRAAFFPLVSAVGTPGVPVVRVEKRERRDMRKAQEASFACHCFSVAKGALDLRDSERILESHSSLLAVERDSKHHSAAALAPNVI

SEQ ID NO: 927698 - protein, 150 aa, Homo sapiens
MKNDKGPERLDIHESIISSWNFSNFSKGLIQSNEWKPENVPESDKDEAGVHDENDSVKYTKLPATQIKGFALRTAKAISCKSNFQQVLCARIQHAEQTAHRGQRHWRGKFYMITGVETDSQQLSALPGPLSNHPLFRSKAFHSSGILLFV

SEQ ID NO: 927699 - protein, 346 aa, Homo sapiens
MQKSTQPYSGVAPYVTAVGTTEMWPRFAGSGIVIVVNIAINISIIIIVIIIIIIIIIIANIRWACTHTAFQTLHYGLSWQSLEAEEGPEGTAQGNRPGFLGSQCWKQETVLGLVKQLRACDLSVDSSVRAAWPWQESMRQASLRPQRCRALCETSPPKLREAGGAPSAVEQVRVGLLRLLSLLRLMLPITMDTGLPPHCPLQQVCRPHTALCSRCAAPTLPSAAGVPPPHCPLQQVCPPHTALCSRCAAPTLPSAAGVPPPHCPLQQVCRPHTALCSRALNPKSPWPPSCSLRTACFLTGPLVSTHPLLIAHTYTAARVNGKREGGGCGLHTCDALPVPGHWRAAG

SEQ ID NO: 927700 - protein, 146 aa, Homo sapiens
MNQPLLASSFSAGASLPLLAFKELNRGREGANEHSAPKGGGQGATVQAAGAHCQRTFSPLLDALALPPPCCPRACLTSACQFLSAGPTLPLRELLSMGLLDATGEAHVCVGDPASLGSRPSPDLLCSGAGAMGKGFLILPQEHLAH

SEQ ID NO: 927701 - protein, 136 aa, Homo sapiens
MAEPGTEPKAPTGTMGLCLHPERVPTSLVIPKGKNRTSKVSFCDNIRFRLEVPDFAIKVRSRGDDAIQKRAEKRTAMTAFKKHQNKYIRSVSKRPLLYQKPFVVSVGGGGSQRLTEVLLSSVDHRVVFSSLLLGTN

SEQ ID NO: 927702 - protein, 137 aa, Homo sapiens
MGPSHCAQPDRLAAAEGRQLQMPTQVMALCKAAAGPDVLHTASAAGIHIWTREMQSVLHERLQLVCPHCLRCGRTKYTDNWRVSKVERSFIEQLNSSQETYKGQLLSTGRSSVQVCSSQPRREPEWVAPSHRQPPEL

SEQ ID NO: 927703 - protein, 162 aa, Homo sapiens
MAPPKPYSAAECPGRRENRFNEEMDNKERTYTLNNEFSQHNRGTVIMKTVGSVGHKQEAVHLSSNSGGQGPENFAKIRQLFGGSKKFENSYLEDYTLEMGKFRALNTYIRKSERAQRDNLRSHLKKIEKQEQTKPNPSRRKEISKIRAELNKIEKKKTTKDI

SEQ ID NO: 927704 - protein, 212 aa, Homo sapiens
MAGCSTVGPALLGGPALLGDPAHSPQLLAPVLSPSLPEASGAGRLLRVRGPDWVSTCCPGWSQSLDLVITRLYLPKCWDYRHEPLCPTQLCFFKWSLEEINFAKILRLLISRVEKIFLNSRMENKFLCLSHSACAIFLHQPKQMLVLLNAVLVEVTVEKQKLKRGKEANMMNEGSCIALSGCDDLLTPPNSSSPYPLLSSKAASVFSEKILI

SEQ ID NO: 927705 - protein, 144 aa, Homo sapiens
MEMPGCPGRGEEPSWRPSARAVWKGNVVLEPQQRVPTGHCLVELCEEGHHSPDPRIVDPLTACTMCSGKAAESHFQPVKVAGSESLFCKATGVEVHKVKEPEEDAMKISLPEHKAGQRIVESGKNGPIGLELLRVLIIVNNGGC

SEQ ID NO: 927706 - protein, 137 aa, Homo sapiens
MQWPCTKSGVRKAFSELTYGVTESIKELLPPGSCPDPMTMGVFLFCSKQGNDVTLPLTLKLHSRNFQYPGPDFIGPLIQEKQQRRLAGREIIDTHKIVKAGSRGVTSFWSCNAANALDTPAFIIKFSEGGGRNTVFP

SEQ ID NO: 927707 - protein, 173 aa, Homo sapiens
MLYTTAAVLFWHSSCKTVFPILYSPFLKQREFLPMAITVPGPWKMGESLELPRVLLNGFDQYADSDLQKVVQVEVVSDGDEELFGNEAEIPPGGLPSGALRRGPLSSRPQNGRSTDGLHHAPGKVTGTQCQPVKAAKRGTVPSKPTEMELPTAVEPHLLHQCDLDVVTEKYRK

SEQ ID NO: 927708 - protein, 203 aa, Homo sapiens
MALLHSSLDVSQRFWYGWRGQDGPIETAPVCSSQRDQCRRRVISAFPTEVPSSSPWDWFGSGCNPWRVSRSRVGHRLPGKCKERDGEHLPPPAKGSGERLRYPSWVLCFFHGFLQSTVQEIPSWAYTTRALRFKHKTGQLFGHAPPLVIPRQTGSGVDHQETAADLQKYDLAVRRKTNKQKQQQQQCQHKSLYFYLIIYSGMS

SEQ ID NO: 927709 - protein, 141 aa, Homo sapiens
MLEFAGGPLQTLFAWVSPVEAAEQQTLLPDPSSGSFVPEGYPPAGMFKSAEAVCCLLFRYALPPEVESREAVGLAELQGTLPSSSFPTTLFTPSSIPGRSQTAVLAASKAPGAWDLRSQPWEGMSWSAGCEDHGKSVVFGQ

SEQ ID NO: 927710 - protein, 145 aa, Homo sapiens
MGRNQSKKAENSKNQSASSPAKDHRSSPGMEQSWMENDFDELTEVGFRRLEAKNLEKRLDKWLTRVNSIEKTLNDLMELKTMARELHYTWTSFNSQFDQVEERVSVIEDQINEIKQENKVREKRVKKKRTKPSRNMGLCEKKIYV

SEQ ID NO: 927711 - protein, 145 aa, Homo sapiens
MDHHKVLHFPCLHIEWTEKEEEEEGHVKQANPWVPVVTAAVQASLSLGPMVVYTGTGVSGFRSADYWATRRIPWVLAVTAVSQVGGRVLGPLGIKYGLGDGSSSGRTISGYPGVGAWTLCELPLRMNTVGSLQAAPYVSLRGCLS

SEQ ID NO: 927712 - protein, 142 aa, Homo sapiens
MELAIGEAAGEEEDPASSRVQDSALPPESLPRCPSGSGCPGLRSQSKQGLQSSVRAPCPLGSAASHRRRAHPQGEKWRSPGEYFKTGLCARSARPSAAGQIICLAELGPPIFFRAKTVNSHWKKQNVASVAIEVIQECISQL

SEQ ID NO: 927713 - protein, 153 aa, Homo sapiens
MRPLMNEGESGFRTYLTRSSKNWTGFIRRTASDYEKTKPFQVGDKVMGSGWRKVGMQTVKQHRVTLIKILGNLRHQVLFYHALHLVPPSLSAHDLVLALSSNCCREVDLAQFTFHLLSLKVYGGRVVTHSSNGDFYQRQREWGYYLLNDNHSI

SEQ ID NO: 927714 - protein, 141 aa, Homo sapiens
MKYPTAAVQRIDNWEPAVRRLLLCSLRGDGCLDRMVVEVIRRGQIQDTFWKIMGKSSLSHQCPLQLQPSSPTCNQMVPCLWSILCASVFCPDESSLGTCSARAQIQPAGAGNLLWPGPPLTSGEQEPVDECFPLLFPRKQF

SEQ ID NO: 927715 - protein, 184 aa, Homo sapiens
MACSSPQRVYIGVLTLGCSRLHKASFLSTAVSRTIAFVELFSPVAGCLHCLRLLQGPFLLQAPLKIQALHISRYIDKAVIPGVEYAAPEPKKAFPFCAFFVITGHNAMSCFYFGMDVLTTGFLNILQMWQVLILCILAYHLIAIDEPDSVAGSPTVSPGLQGTATTHLLSDAGACSPAHSKPNR

SEQ ID NO: 927716 - protein, 524 aa, Homo sapiens
MPKVPELPLQLWPLQQMVSDLLACQSSNRLSPTQTMHSMLPNVSLSSYPEVQKDIKNIPFKIVCASNGDAWVEAHGKLYSPSQIGAFVSMKMKETAENYLGHTAKNAVIAVPAYFNDLQRQATKDAGQISGLNVLRVINEPTAAALAYGLDKSKDKVIAVYDLGGGTFDISILEFQKGVFEVKSTNGDTFLGGEDFDQALLQHIVKEFKRETGVDLTKDNVAFQRVWEAAEKAKCELSSSVQTDINLPYLTMDSSGPKHLNTKLTHAQFEGIVTDLIRRTIAPCQKAMQDAEVSKKPPSKAVNPDEAVAIGAAIQGDVLAGDVTDVLLLDVIPLSLGIETLRGVFTKLINRNTTIPTKKSQQASLKLFKMAYKKMATEREGSGSSGTGEQKEDQKEEKQRNDFWLYECEEQPVSHNTWDFKMRSGWGHSQTILPWHVVHNTVMALISFHQPTCPVLPSELNIVPNCHTVSSWDENSIGLTFIHSFIYILILQTTIECLQHGLYCVGIGDRMVSKNRKNPYANAV

SEQ ID NO: 927717 - protein, 159 aa, Homo sapiens
MAKSLWSKWKRKMRAEKRKKNAPEEVSRLKSILKLDDDVLMKDVQEIATVVVPKPKHCQEKMQCEVKDEKDDMKMETDIKRNKKTLLDQHGQYPIWMNQRQRKRLKAKREKRKEKNKAKAVKVAKAFLQGNYPWILNEDCSRKLTQLVHDGSGMQIQIF

SEQ ID NO: 927718 - protein, 142 aa, Homo sapiens
MTNKNAEAANEKLEASKSAITSWVQSFLEAHGFFQAICGNDIHSASFPTVRGRVLGTDNTRSNTLKTPTKCSTLTLFSHSCLDADGLVENCEYLENSGVRYQNHYVEDHSPHVQLDFSNGCSLYTETTFILLVYKHLCITSF

SEQ ID NO: 927719 - protein, 146 aa, Homo sapiens
MPLIIFSAEISQGNFCCVYFSILINSQRQHNTKIMIRKAVKEFKNNKTFTTLEYLQVKIENETMTQVAGNEGKTLIAEKAGKSPLSLLLLFQQYEVFTPPSSSAVIVGFLKPPQKQKPLCFLYSLQNHDPIKPFFFIHYAVLGLSL

SEQ ID NO: 927720 - protein, 156 aa, Homo sapiens
MALLLLQLVNQIQQRLPEVVLCAGAILMTGEEKMNSIDRISDLTEFTFGIRRQVKNLWVNEIARCDCLPKYWDAFVVRKYNRLCGKENKEAEVTIYYILYGRHCTECFEYLLSLESFQQYEVGVIKARVIDEDTEEEEEEEEEEEEEEEEEEEEEE

SEQ ID NO: 927721 - protein, 169 aa, Homo sapiens
MQDSTTRFQNKSQSAKVWQRKQTIFDLNVSDVCNGFEEKIPTKEFGNLLDLEDEEERCFLETQAKTALSCFHFQPYGLEEKTLNYHQDYMRVIIQELGTRTPMEGGVDTCAAVSWVLVDTPGPYISQEDDVKTRRSRILRHLVVSGCIQQGFKHPANLLGPEFILSNWE

SEQ ID NO: 927722 - protein, 143 aa, Homo sapiens
MVLVIPMSLGAPKASQTLAFWSKPFNKSVGSSKLSHILLSSSEPSKLFQPLPVTQFQGHFHIFGYLYNSAPNSRLLTCSHPCAWLLWGSCGRGAQGSQQLAFLHCEPVNAKTFAPFPGDPPLNSFCIHYLPTGPVSEPRGAAD

SEQ ID NO: 927723 - protein, 166 aa, Homo sapiens
MLLGLWFSSRGSPLVGGAGLSFTPFPGWFSWVTWAPVEICIMKVSFGYHSGHSILPPNTPADLPVYMHESQEISHSLTETNTKSDETSDLSCINATPWNAAVISSTKRGSEKEKETSTMQTGPWEPGLINGQFYGSFVKKEILTEPSVYFAPTIHIKKTESRNVGG

SEQ ID NO: 927724 - protein, 402 aa, Homo sapiens
MLSSCPSEVKTLLSDIQLQTPTSRCFSSLALTHGAVSRGPPSSGPQNGRSTYSLHCAPGKTADTEHQPVKAARKGTIPCEATGVELPKAMGAHFLHQLDLDSQLCLYKQHENGLIHQPYETVSSLNLFFIINDPVLEEDRKMWKSLELPRDLKSSEDRKMWDSLEIPGDFLNSFDKNADNDMDNKVRAEVVSDGDEELVGNCRKGDTCYAKRLAAFCSHPRDLWNFELKKDDLGAVQKGNVGLEPPHRVPTGALPSRSVRRGPSSFRPQNGRSTDSLRCVPGKAEDTQCQAMKAARKRAVPQRATRMELPKAVGANLLHQHEPDVRHGVNGDLFGSLRFNDCRIRFRTCMEPLNPFFPPISPIWNECIYPMPVPPLYPGNSNLLRIPGVTWPPFYSGRKFPL

SEQ ID NO: 927725 - protein, 148 aa, Homo sapiens
MLQTQAHKQSRDIAGGENGHATVRWERMRVISAATFVGPQNMTDISEATWKDDLKPRLWLPFPHASGHTLNTQNLESSDSEMMMEDSEEEGLEGEGCECVLGSLCKQHGQRCPGQRCSSQNGGESSQKLHRRFDICSIQLPYPYREPL

SEQ ID NO: 927726 - protein, 209 aa, Homo sapiens
MGEDGSPTFSDVLIFLDREPHRLRAFQVIETQDPPRRLALTPAHLLFTADNHTEPAARFRATFASHVQPGQYVLVAGVPGLQPARVAAVSTHVALGAYAPLTKHGTLVVEDVVASCFAAVADHHLAQLAFWPLRLFHSLAWGSWTPGEECPCKQKMQDLSKKVQKVPCSPNKLQVHLHLASAHTSEWPTWKNSEERNQEWWLTPVIPAL

SEQ ID NO: 927727 - protein, 146 aa, Homo sapiens
MQGWLGAAVAIPEVCSRGHCLAEVFCLFLSFFLLFLLNIAICIQSCNSPKPIRESSDLETSSRNSLTSYLSFFYLHSMKFSSNNTILQKRILVFLPPEDAVFMKANTGPSPGNKPAGAFILDFPAFGTMEPALSSSSPPQHPYSCI

SEQ ID NO: 927728 - protein, 159 aa, Homo sapiens
MLGDRPSQCTTLFLSKKMQVSVLLLATSSKHKSGDEPQKGLISPGFACEKSESDKAISFPIDLALSAAGVRTPHEDCMPHSRPRQEASGPLRPLFRDTNPRPPTAFSTIHFRLPFYDFTTQFFLKFYGISLKPPEGHLIDFLNYRTCGAFYTYICTEAR

SEQ ID NO: 927729 - protein, 162 aa, Homo sapiens
MGHVNSYSSFRIQVTYHFFSSVVHVDHGNVCALPLCLLLESRLVWVNPKDWDGDGWPLLLTTHTVPGPYYMLNKYLLTQLNEPPQVRIQMKIVHELHQCADVDLLRKVMEVKCHSGKSQNIGCRNRLFGGGSENKPSNHTDTDSPGLDGNRILLMPIKLQCQ

SEQ ID NO: 927730 - protein, 136 aa, Homo sapiens
MQNTYSIRSVMFFSKLVILVSSSFRPLFCRSTGVCWRSTLDLVCLGIIQRRLQNSKDCYLFLPLEASSQRGMRQMPAGALLLHPQPPFPPGALSQGDGSFIHKPLTGAAAFLSQMPCPERRNVERQSGYRGFPKLW

SEQ ID NO: 927731 - protein, 157 aa, Homo sapiens
MSHLVFTTLLNCTLFLTGEHLPKSLEGFFIYEEEGSGVPGSSRKGNDAIVVEQWTVIEGCEIKTDYGPLLHTLAEFGWLLTSVLPTPVLRHDRKNQVAQGIEDSDCAGFIEGRGGMQWEDDHLPEFDRPAADLLSNHLQPNSSQHSDAPSLISATPF

SEQ ID NO: 927732 - protein, 223 aa, Homo sapiens
MVGYFRLWIPGFAILTKPLYKLTKGNLADPIDPKSFPHSSFHSLKTALETAPTLALPDSSQPFSLHIAKVQGCAVGILTQGPGRCPVAILSKQLDLTVLGWPSCFCVVVAVALILLEALKITNYAQLTLYSSHNFQNLFSSSHLTHILSAPQLLQLYSLFVESPTITIVPGPDFNLASHIILDTTADPHNCISLIYLTLTPFPHISFFPIPHPDHTWFIDGTS

SEQ ID NO: 927733 - protein, 263 aa, Homo sapiens
MEDLRAQIFANTVDNAHIVLQIDNARLAADDFRVNSAAGDRDPGFQGGAALMKKNHEEEVKGLQAQIASSGLTVVVDAPISQDFAKIMADIWAQYDEVAQKNREELDNNRSQQIEESTTVVTTQSTEVGAAKAMLTELTRTVQFLEINLDSMRNLKASLENSLREVVARYALQMEQLNEILLHLESELAQTWAEGQCQAQEYQALLNIKVKLEAAIATYRRLLEDGKDFNLGDTLDCSNSMQTIQKTTTRQIDPPDSGWQSGV

SEQ ID NO: 927734 - protein, 220 aa, Homo sapiens [sequence omitted]

SEQ ID NO: 927735 - protein, 281 aa, Homo sapiens
MILVWVYHTDFLAFIVLRDLWNFELERDDLGYLVEETSKWQTVQEEAEYKSLENLQPDDEVEKKNQFSGEKLKPAAEICDMSETFMAAPPITGLGALSSSAPAVAEKGQDTARAVASEGASPEPWQLPHDVEPVGAQKSRIEVWEPPPRFQRMYGNAWMSRKKFAAGAGPSWRTSVTAVQKGNVGLEPPHRVTTGALPSGAVRRGPLFSRPQNGRSTNSLHHVPGKAADTQCQLMKAARSGALSCKATGVELPMAVGAHLLYQCDLDVKQSQRRSFWNFKV

SEQ ID NO: 927736 - protein, 136 aa, Homo sapiens
MSVVPSGRAELKNLDKKQRTSIGLKQWSQTLSVLAFGFERLVFKKSGPEEVEIQGAKKLASHSFMDADRRQENPGDWNIHSFWNLREVLELISHGYQGTAVPAVLLDHNASRKEISIIQNLFNCAVEELPLNFNCK

SEQ ID NO: 927737 - protein, 132 aa, Homo sapiens [sequence omitted]

SEQ ID NO: 927738 - protein, 175 aa, Homo sapiens
MTCDQSEFSLGTDTWTPGTSCTTPRDLTRFTGNTQNPQHNCYHQVAAPGGPIGGISHGPISSAVVDWTREEHVIHRDVEQLTVAKRLLSNVHCLEVTAAALGFPGLPRWQTESDSTRLPKALPEKDARFVSPKVSRGRCRATVVPKKSPDKHSAEGASDMKVREHLTRRAWGLQE

SEQ ID NO: 927739 - protein, 160 aa, Homo sapiens
MAERGQCRAQAMATAVRSPNPWQLPCGVESAATQKSRIEAPHRVPTGALPSEGVRREPPSSRPWNVRSTNSLHHEPGKATDTQHQPVTAAGREAVPCKATGTELPKAMGTHLLNQRDLDMRPGVKGDHFGALKFDCPVGFRPDFQKFKCEDKSVPEDIEK

SEQ ID NO: 927740 - protein, 166 aa, Homo sapiens
MTFRSLSNDFSASITDISQTLSVLQAQVDSLAAVVLQNRRGLDLLTAEKGGLCIFLNEECCFYLNQSGLVYDNIKKLKDRAQKLANQASNYAEPPWALSNWMSWVLPIVSPLIPIFLLLLFGPCIFRLVSQFIQNRIQAITNHSIRQMFLLTSPQYHPLPQDLPSA

SEQ ID NO: 927741 - protein, 141 aa, Homo sapiens
MQINGKALRVHNSPFPFTINGFLTAYSTGKQGESSISSTWCWDNWVSTYKRMKLIPTSYNILHLSPRWMLLALERRPSSSSILGLGPQLADGLLWDLAIVTSKTSEFSGIFCKLSFFYSILSDYNSSNLSDLTAICLLYII

SEQ ID NO: 927742 - protein, 155 aa, Homo sapiens
MEYYAAIKNDEFMSFVVQLIGPQKELCLSYLYLNGLQRRNGYVRRNNPPSVLRTKPHSTEKKIKTCDVTKIQLDFDENIFYSIFHNLFTRYGDVKWRMNCYQNHKAIPMATNLNGNLSWILSGTRGLTLPGVLLHSAESPRSTPSYVRGHSIFHH

SEQ ID NO: 927743 - protein, 163 aa, Homo sapiens
MRTKSDHPKYQGEKERVRTSGLQKRLRGSDNQMSLSKGGKVDQASRCGKEMDSGGLDDLLARSEREEARKGLMLPTGVNNRDDIIADQDRNSDTSAGKWSHDQNRRHLHPQGASPNEKPKTKLLNWPQTEHFLTTFSKLKSQKQLAFIVPGNKRPNALLNGFL

SEQ ID NO: 927744 - protein, 154 aa, Homo sapiens
MNAIWFYRNNQQRGLGELSRQRSLGEVSRRGSLGEVSRRGGLGELLIKVNDSQVLKKKSTLSLQVERTRSSSDRGSHFTIVGKGPQAQGEHDCLLHCLCHSGAHAKEALAIWMTILMDYPHHHYHHQSTRLKPNYTCAFKPSEISWINPNNMEN

SEQ ID NO: 927745 - protein, 152 aa, Homo sapiens
MAPNASSTPSEWHHLRLNREPKIIRIILRYRSCPQGVQTHGKDNVTTYAAVKYCCSGSISPASILLMKNKMRAIISMELGRKMIQEFRTPDNPSPKTCHHRSCLSDIREQTDSRLLVISSLGTQRLFFSPLITGSPITSCISPPASLSSPLS

SEQ ID NO: 927746 - protein, 145 aa, Homo sapiens
MLADSTSQPHLLPEKWNTAIISPDFHYQVELLPSNLSRHAVRGSKPYPSLEADSTYMFTHLLPLEGVDLGMARKHSAKLTVVNVQCAICIPQECTNMDSAHLPRNLPQLEPQCQKSGELNYAHLSPVLDNLKLHGFIKRVVIVLC

SEQ ID NO: 927747 - protein, 153 aa, Homo sapiens
MGQRPICRTPRAINRQTEPCFMERLLSPGAHTLKQTGCNTSGLLENQLLIAYPGMTQPPPLSPSWHMTVPSGCFQAGERDPFIFILLVAQSSLQLKIEARVVILSDTSDVTLQLPEMKNWDSCFIQKELEIVPRVWEDAKMVAATECWDLINK

SEQ ID NO: 927748 - protein, 158 aa, Homo sapiens
MPVANLVLPCGGLTGWKQFTCVYGFIIKHTTKQRDDGRAAEGEGWWGLLCTSTCSAAWKLIKSHCSRAFIELHLQLTPAPRGQWVGTKVPTLESLGLSGDQSHPEAILGPQPQSSHKYKLRDKDQIYFLSYYRRGHGHANAMVMTYGPVHGPAHAWGL

SEQ ID NO: 927749 - protein, 160 aa, Homo sapiens
MGNRALPLLACRGCGHTLSATKQNKFPFLWTVIKATVGVLCMYKAYFQLRSSISISYNLRSSLKPTAKLAQDLAGSEFNASSTYGVYSYDFSQGFGIFSSRWGFPCYPSIGHVSVRHGQMVFRSGVLLLVLQFVVTDQRKATVLFLWKALSDTLEKRGVV

SEQ ID NO: 927750 - protein, 281 aa, Homo sapiens
MCKQDLSVLHTEEMCFLREWVESLRVKYHLLLRKLNQKKMPRKKNLIADEPSSEESDLEIDKEGVIEPDTDAPQEMGGENAEITEEMMDQANDKKVAAIEALNDGELQKAIDLFTDAIKLNPRLAVLYAKRASVFVKLQKPNAAIRDCDRAIEINPDSAQPHKWRGKAHRLLGHWEEAAHDLALACKLDYDEDASVMLKEVQLRAQKIAEHQRKGMPGMAGMPGLNEILSDPEVLATIQDPEVMVAFQDVAQNPANMSKYQSNPKVMNLISKLSAKFGGQV

SEQ ID NO: 927751 - protein, 135 aa, Homo sapiens
MFEIGEVDLPFWGLEDGGPLLTAPLGSAPVGTLCGGSSPTFLFCTALAEVLHEGSAPAANLCLDIQGRKFEESAATSYYTKCTVLLTCYSISQVKLNFSPLLLSNISDVSYNILKISKTIVTLSEMFHQYNLYRT

SEQ ID NO: 927752 - protein, 138 aa, Homo sapiens [sequence omitted]

SEQ ID NO: 927753 - protein, 140 aa, Homo sapiens
MKHGFRKESLISISSCKWTFCINTRANGLRSHVCRPSLPCSVMRTFVNAVLIQPSSGHKRRCCKGQSQGTKEANPRGGPGPIASSAYDREAMEGLPHQLLAAIWTLLRCIPQTGKHLISPNIKLLGNLLKRPSIARGKGN

SEQ ID NO: 927754 - protein, 141 aa, Homo sapiens
MKSVYYSTLEENVHEIKLKRGTLMVNIKWQLDWIEGCKVLFLGVSVTVLPKEINIRVSGLEDADPPSIWLRKMKLNEVKLALETRFICKTAATEIFSALHFFYPNSEIFINPNDPIPEAKFIREHSIFKASRHSVMPKYKV

SEQ ID NO: 927755 - protein, 148 aa, Homo sapiens
MGTQPVSIFKPEKGHCMSPSCTLNFIDASSITSLWIPFLPPSSTFKDSDGSLRWQRGPICSSHCKDASCKWGGMTRDACSMELEGAGDRWSPTPYELVGQEPHPPRCSYYCPATTVDLDISALPGAQETSASTGLEVPALAICPLPTP

SEQ ID NO: 927756 - protein, 183 aa, Homo sapiens
MYTFLSGILTFSRGGAILKTMKNSFFEYLCWPPVGRTTAASSTACGDINMFPKEENTPSCIISTSSLLPLIGHVQLVDVCTFSTAGKLLRFGFSAMFGFGGRTLALAEKYRWMSPNQRRDFAVVKALAKLKAEDCEISFLPFNSSDDVQERRAQGSPKSGTCKRILGRHCDTQWLEEACRGAH

SEQ ID NO: 927757 - protein, 144 aa, Homo sapiens
MWQKPRECPDILPAPHRCCCGWGKDSAENKSECVINKQQLPKLCGNLKANGFISMYKPQRNFILENVPEQVTPKTFVNSNLLIFDEIVEAEVMNTKVERRGTVSGLKSIDGDELSSKDEKVRVMPSTDESRKKSVFSYLLVLVV

SEQ ID NO: 927758 - protein, 126 aa, Homo sapiens
MLLIAAGAPTLLPPQRIHGTWKSEYSVLEIAQKEVAVFCCELGFSQHKAMEETFHEEVKDFRVVCLHLAFRQCGEGCQEGQKTLNNVATPYPGGFKCFTCEKAADNYECNRWAPDIYCPRDIQPSE

SEQ ID NO: 927759 - protein, 178 aa, Homo sapiens
MVDFFIIFFVKATIVLSIMHLSGIKDISKFAMHYIMEEIDEDTSTEDLLKMMVMALIYRLLVCFYEIIFIWGAGGATPGKLLVGLRVVTCDTLVLIALSRVLVIPFSNVSITTSTIRALIKNFLIASFFPAFITLLFLQHNRTAYDIVAGTIVVKRNGKKNLLNSSIKIFRSKRQMIL

SEQ ID NO: 927760 - protein, 161 aa, Homo sapiens
MTRLGFLLLLTCEDYSALSIDAYDQELTRRLGPGICLVLAVFLSKPTAVMLGSNVGSGLCPAAVWGSVLSRALGRSVVLLRPPFLPLGAFAYPPTTAVSPWMTDLGTQVGMGACTSIAHVADPLSYKQKLNERGRGQQPRVRAWRPRPGSCKCNECFQRIL

SEQ ID NO: 927761 - protein, 135 aa, Homo sapiens
MQSIVPGCICEGVAKGDSHLSQWTEKGRPSLNLGGHNLISWQHGHKKKQAEECGKTRLVESSGLRLSPVVDTSCPQTSDCKSLRAALGLLGFRPQTAGCTVGCPTFEALGLGLASLLLSLQTAYCGTSPCDCNVR

SEQ ID NO: 927762 - protein, 159 aa, Homo sapiens
MQSSTATLRIDWQFLTKLNMLLPYDVMEERLSLNGGRRGRLRRREQQEDKQGREGPKKLTSPGKLLKDESGSLDPWEGDQLDGWCGHTAIASKKHAVHGNYYDSKHLLAELKLFLSDRLLVNGKAVIAQGDWVTYFWEDVVQVHGGEDQQLKLREKYVP

SEQ ID NO: 927763 - protein, 262 aa, Homo sapiens
MVKVKARVNRFGHIGHQITRAAFNSGKVDIVAISDPFTGLNYMVYVFQCGSTHGKFHGTVKAENGKLVINGNLITIFQERDPTKIKWDNVDAEYIWVSTGVFTTTEKAGAHLQQGAKRVIISTPSADAPMFMMGVNHKKYENSLKIISNCLLKLWCDGHGALQIIIPASTGAAKAVGKVIPEMNGKITSMAFRVPTTNGILDYTEHHVVSSSFNSDTHSSTFNDGAGIALNDHFVKLISCYDNAFGYNNRAVDLMAHMASKK

SEQ ID NO: 927764 - protein, 187 aa, Homo sapiens
MLSKRVTEVDLNFDWVILAIVMRIDLRSISGHAQCSICLYSFTSPSVKCSRSVWTRDLRKERDTETKYRERKVGRGDRRSAYGGPTPAPVCIAAIDNDSSDGSGQSKLKNFWKELIILDTIKNIRDSWEEVSISILIGIWKKLIPVLLDDVEEFKTSVVEVAADVEIASLVELLEDSKFELLTMHTR

SEQ ID NO: 927765 - protein, 153 aa, Homo sapiens
MRKNQCKNAENSKIQNASSPPKDHNSLPAREQSWMENDFDKLTEVGFRRWVITNFSELKEHVLTQCKEAKNFDKRLQELLTRTTSLGKNINDLMELKNTAQELNEAYTRYYPEELPQHSKTGQHSNSENTENTTKILLEKSNPKTHNHQIHQA

SEQ ID NO: 927766 - protein, 182 aa, Homo sapiens
MGGLPLHTCGYSHQGGRETEKRNKTQRQSIEKEQWAQETGVQHTEDLHWPRSLSSLSYYYFHYLSNGNAAGEQGDSWEKVSKKTWPQGFHEKLNAVESQKGVKWGVRSDAIRPVLGKHFCCCVEVTAGSQALVERLSKRLLQHSRCQRVHCRSSSRHEKEMNFRSILLVELIEFGNRWNIQE

SEQ ID NO: 927767 - protein, 143 aa, Homo sapiens
MASNRAVTPHGPRFHSLESAGLLSDCIEVGRPNRGIMSDRREEMTMVAFLDLVGKASTYPVKVSTRTKRYFSFLNWGIKSQEIANSTPILLNSLKVNILIVITEEFDIYKPDPGTYEDAYLIASFGKVNQKLKRMQPFFLTYL

SEQ ID NO: 927768 - protein, 193 aa, Homo sapiens
MTDVFKEYQEDQRGSVHVGDSNVKGMMGPGVNPTTPEAEENLKSCLSADIQSKGHLPSGMWRQPKDGKEWGEEYVTKDHPDKLKEAGQGRHSSLENVLCETSLADGYPVVSASLIENTFCFPLLKKWLISSPLWFVSKAKRQTVALELLESERKYVINISLILKIKATFQGSDGKRNSKERRYPCTHCLCFSD

SEQ ID NO: 927769 - protein, 181 aa, Homo sapiens
MSPSPRSFSLGLAFFLPGSLDGDTLSSPLLIFTESSFSFSALSLNFSFSLAFLSLGSSSLDLSLSARGGLSLSLAVGFCLVPVMPQEPVCMPVPVLPLLLLREAGALPGLLLHGWLLERDLQEGSHPWLLPSVCAAVRGDLTDFITGVVSVLMESFFQLFKQAFFHVSTSQGLPLLGIFFI

SEQ ID NO: 927770 - protein, 127 aa, Homo sapiens
MERYSMLIDRKTQIIFFSVSVLTVSVAKFSSLQIFHCVISNLLIISYSCHFRDGSFLLYILGIGASFSIDLGQFSIYYLDNLVFKDVWKYNLSKQYNMAIPEPNKIAGYLKGNIVSQSPQLLESDLR

SEQ ID NO: 927771 - protein, 150 aa, Homo sapiens
MNSASVSVRRGVLWEPGLVQIIFGFTEQTYFPINAKETEKGKRKGDRTESKAVPLQIKQLSGLLPNQLPTKNDTCKDLGTVHDTLGAKNSTDIGKMFGAKSIDSSFQIFTQNVQYSLKPEEKETLKPIVEKLISKGHLVAFTSTHSIPIL

SEQ ID NO: 927772 - protein, 156 aa, Homo sapiens
MDNEIHAEVVSDGDKELFGNWIKGDSCYVLARSLEAFCPSPRDLWNFELERDLGHLVKEISKQQSIQEVTWVLLKAFSFKRETEHKSLKNLQPNKAIEKKIPFSEEKFKPAAEICINNVGETSSTPPSGYPESGRVKGVRKRQNKHLKGGSRGLEH

SEQ ID NO: 927773 - protein, 163 aa, Homo sapiens
MPLTMAKQTFRLAQQPITLPVWVPTRHLKLCHEPESKEEVKTSERPCTPSLSDGSDEHLCRADGNGKTPHGTPLTWGQMKRLAHIAKDNLRSQNKLLTTSNLMVAMMAVTSLAVSLPIAEADQNYPYWAYTPFPPLMRPVTWLDPLVEVYVNDSVWMPGPRDN

SEQ ID NO: 927774 - protein, 147 aa, Homo sapiens
MQYMAMGLGDGEAWKPRKKTGFPGSGPGSPCYVQPRDLVPCASATPAMAERVQHRAWPVASESASSKPWQLRCRVEPASTQNTRIGVWEPPPRFHKIHGNAWMARQKFAAEAGHSWRTSARALQKGNVGSDPPYRVPTGVPPSGADP

SEQ ID NO: 927775 - protein, 137 aa, Homo sapiens
MGGGLHVSASLLPPPRSGGLLPGWLSPAATSGHMGQLPDTRRRWKVYSVTALTQEVPGSCLPEGSRLFPPSVQRTGARHLPQLGELARNVLQPVSLLSAAGRLTRYHENSIEKTYPHDSINSYQVPPTTHGNCGRRN

SEQ ID NO: 927776 - protein, 159 aa, Homo sapiens
MIQINFGWRPEKLVPQTPFSGMVDCTNEKHLHKGWKTEEKNADENEQREKVLRQSLQETSYSKWHSSERRYSLLGDGEETEHQALPQIPTLGLSHSPRLQAGIHRASKPAPPPELISIPLALDPPLSQANPCRLRFQALSHDQVGSSGLSQHLGRGGSD

SEQ ID NO: 927777 - protein, 150 aa, Homo sapiens
MGVMLLPTWDGSIPVKDRMMNYYKYLACSVNMWHSIKSHLNLERTRNIMKLNETISVLPVFLECFIVLFSFSEKAKGFQGSVSQSIVSMEYLHQCFWVIGYTSTPEWEALGIRLGRSNPAPKDGESITSCHPTCHNSDAHTQYSHRKDNH

SEQ ID NO: 927778 - protein, 137 aa, Homo sapiens
MGLFSNTCEFVDALLLRFQDKFGAPGPVRKRHSLLTTGGSSTRETNLIAVGQSWPPWPGKEETPWAHCRKCQPAAPGTLGHGFQSQQAAGSSDEPLTSPVLSQKGKEKAMEKLQLVPDPWEQQWVEVQFPPLSEISG

SEQ ID NO: 927779 - protein, 135 aa, Homo sapiens
MSQPTLCNCQRVIPCNLESLHELMYLIFLEYVSVILYAYDLVASLQGQQGSGFFGYASGIRHCLPPKCLNSGFHKQRKRSQISEDFKISLQIPLLPADLISLISQSNTAMRGNSNLLTTSPVAVTEIEIICFLIN

SEQ ID NO: 927780 - protein, 152 aa, Homo sapiens
MSWEFCFLAIFTDCKISLPTCIKTSVVEVALSELDGEPDEGWSGKVVFPWSLAAQQLDSPPTAPGQIPLDICIILPSMACQCLLEVASERLKLDGEVGVDPEEQGWRELAPLLGMPLGHVSLKPWACQSYTGSNRRAGSILHCQQRSELPYK

SEQ ID NO: 927781 - protein, 139 aa, Homo sapiens
MDRRVSGSPLVAVCSFGRQQPWSTMQYLSIQRRHVLTSKVPQTFHFARTCLKGNFANTHLVESVRENGQMYLSDGRARGHGGKWKTEPEIVRWVNHRMYSIAKKRSSHYSFQSVSQGGGSPKYPQFIVSWTTEAACRHD

SEQ ID NO: 927782 - protein, 175 aa, Homo sapiens; identical to SEQ ID NO: 880872

SEQ ID NO: 927783 - protein, 154 aa, Homo sapiens
MPSSHGPEQPRKKQRSSRNGDNGYEGRTLGGGALSVRACVLCEETRCSLQSQQTGKVKSAEAWPTAAPSPRCSVPGRWEFIYKPLTEAAAFLSEMSSPERRNPEGQSGYSGFVTLQWVPPVSESECQALQDLFDGHGIEKQEHDSQIGFSASEG

SEQ ID NO: 927784 - protein, 191 aa, Homo sapiens
MGNKQAYPLLQRETSLLYLGEPAVLGVQRCSWIAGHNTPQTKPFTSQSSRDSGQAIWLGLWAGLLLASSSGPIDLVYQGRQSLHEGRPEASNHRSQTKSYFLETNLALKQALNPCLQGTESTEPRLELGKSRTCVCGGWPSDRGHRGWPSIRALCSDGPKGLGRVWDLTGPYPATVSVSLELGSASAGLKL

SEQ ID NO: 927785 - protein, 194 aa, Homo sapiens
MSQKKTEIALGVLTQVRGMNLPTVAYLSKEIDAVAKGWPHCLWVVAAVAVLVSEAVKIIHGRDLTVWTSHDVNGILTAKGDLWLSDDRLLKHQALLLEGPVLQLRAFATLNPATFLPDNEEKIEHNCQQVIAQTYPARGDLLEVPLTDSDLNLYTDGKDNRDKSTNWTSFGKGSSLKLSLGYIKNKNSCVIPKK

SEQ ID NO: 927786 - protein, 267 aa, Homo sapiens
MASKIETKVHLHLQAPWKWNPSAGIWFRQALYPGYTGLLLCGAGPVSISAVVPRGSEEQERADPSSFLQILDLLLIAQEKFKTAAEIWVNNEEPNVNSQYNGENVSRACQRDLASCFQATPAMAKKGQGTAWAVASEGGSPRPWQLTRGIEPVGTQKSRTEVWEPPPRFQKMYGNTWITRQKFAAGVEPSWRTSAMAVRKGNGNRRIQPPDGFRQKQKYWSGITTSSQLVSCQRPENRYQEFNTDQTHQKGALHRWRSDLYILLYPD

SEQ ID NO: 927787 - protein, 146 aa, Homo sapiens
MGKTRCENQMQRLFRASLTWGLRGPDDNKAFLGPLDSATPVSLTIVRCLQTLTTSISGPRDLRLVILFSTAAFPRGENQKSRRKCRSRRKATLCFLQTLHLLSDTQEFLEGEENPGKSKKQEDKRQRRREPHPLGQAGAPDERAPA

SEQ ID NO: 927788 - protein, 162 aa, Homo sapiens
MNRKDIHTKTPSVRHHHQGPKLKEEFQTHRKEAKNLEKRLDEWLTRITNVEKSLKDLMELKTMARELHDKCTSFSSRFDQLEERVSVTEDQMNEMKQEEKFREKREKRKKQNFQEIWDYVKRPNLRLIGVPESDGENGTKLENTLQDIIQENFPNLARQANI

SEQ ID NO: 927789 - protein, 158 aa, Homo sapiens
MGSCAARASLTSTTPCSTVPSPIDHPRAEECERMAQDWQAAPPAAPVWDPLGEASWAPESGGECGVFISSSGIVNTPISTLCLAQGLDCNYTNQHPVFSSRFVSAPINTPYLAALLKVCKHTNQHPVFSSRFVSAPIDTLYLAAMVGPWRTCVWKLCI

SEQ ID NO: 927790 - protein, 145 aa, Homo sapiens
MKHPDTSIKLLLLLPATQSCWRPPAFLGPCSLPPLSKPAKVASANMTSASIITCSSMTLTFLPLSYKEPYDYFGPTQIIQDNLPISKSLIYSRPQSPFYQKESFLGGGAFASLVTWDECQMPQQSLEILPRCYDSLHICSKKVFR

SEQ ID NO: 927791 - protein, 135 aa, Homo sapiens
MSFWLQHHQFTMEILDLQGLPCHFSYTPGNLLSQQDTGAFGIEICYSDPSSYIRTLWSENGVTAGGWNPCLIFEDWSLTVVSDCLIGMQISYLNFAPGEMLAKRHAHKCATSVYHCHDNTRNNTQELPPLSMAMT

SEQ ID NO: 927792 - protein, 135 aa, Homo sapiens
MAAQPAEGHVQQFLLICPLPPKSEVEGSSRIKSISFMIGKYFKSRAVSTTQPYPSGDWKDCPSRSAPGKVLNQAPRNTQASTLNDVDGNRVVMINRSKREIGERKYEESRKEKSKNYRELKRWLGNLFFSMGQCA

SEQ ID NO: 927793 - protein, 187 aa, Homo sapiens
MQGKGYNVRLRLSNEAPGCHVVAEGRAEIRIRAYKSCVVCGFAFILNFFLGRSTKASSVLRPGKVNVHPGDPVTTTGPQKGRAGRACGGHSIHPPHSQNRTGWAVQANSSIPFWFYQESLGGEWRAAEGKEGGDQKEEEEEQEEEVEVKEEESGRLTEIFALPGTLLLPLDLTEPSQVLCTECLYPA

SEQ ID NO: 927794 - protein, 137 aa, Homo sapiens
MPSSAEALSPGPVTCGHRSKVGFMHYQSHRYATDMLFCVCHSHTIVVLCLELVPACGFTVSLTSRMEPQTFVVSVTALKDGTDPKSSIIMNGSNMANTSPSVKSKEDQGLSGHDEKENPFAEYMWMENEEDFNRQKL

SEQ ID NO: 927795 - protein, 157 aa, Homo sapiens
MFVITDLLKPTSDNSSNSFSIQFCSLVGKESDPSAADLLEFAGGPLQTLFAWVSPAEAAEQQILLPDPSSGSSCQTGTFKSAEVVCCLLLYYALPPEVESIEAVGLAEVWWAPPSLCFLASLFTMLISDCCASSEQAPWVWNPLNQACEGISWFDGC

SEQ ID NO: 927796 - protein, 316 aa, Homo sapiens
MWPQHGLRYLVAAVLSRWALVETWAEVDRSPMSMEKALKHLEAYNTEKEGAFASRVGWAFLTMLWKVHAQSLRDTAQVSRQLAQGKGDHILTEWLMAAMWTGWNDARELSKTVSKWQSYAELVEDTRDQRPHVELAIHWYPTNVQQVLVLVGTDADYSLVYGKRDKFLGKAAYTDGYRGQSVKMTVDYQELNKVTAPLHAAVLSITDLMDHLTMELGQYHYAVDLANASLSDDIAPESQEQFGFTWEGRQWTFTVLPQGYVHSPTICHGLVATDLATWKFPKGIRLFHYIDDIMLTSDSPADLEAVVPLLQQHLAA

SEQ ID NO: 927797 - protein, 426 aa, Homo sapiens
MALKGQEDYIYLFKDSTHPVDFLDAFRTFYLDGLFTDITLQCPSGIIFHCHRAVLAACSNYFKAMFTADMKEKFKNKIKLSGIHHDILEGLVNYAYTSQIEITKRNVQSLLEAADLLQFLSVKKACERFLVRHLDIDNCIGMHSFAEFHVCPELEKESRRILCSKFKEVWQQEEFLEISLEKFLFILSRKNLSVWKEEAIIEPVIKWTAHDVENRIECLYNLLSYINIDIDPVYLKTALGLQRSCLLTENKIRSLIYNALNPMHKEISQRSTATMYIIGGYYWHPLSEVHIWDPLTNVWIQGAEIPDYTRESYGVTCLGPNIYVTGGYRTDNIEALDTVWIYNSESDEWTEGLPMLNARYYHCAVTLGGCVYALGGYRKGAPAEEAEFYDPLKEKWIPIANMIKEQCLTQSKHAINVTHDCPECRY

SEQ ID NO: 927798 - protein, 171 aa, Homo sapiens [sequence omitted]

SEQ ID NO: 927799 - protein, 169 aa, Homo sapiens
MPLESSTPLKIWAERGLINTVVPIFSPRKQEKLEEIGAKESHEGKWVLPDKREMLSKPLITGTTPTVSSTPTSTWGPYPHQKLERRKTRTSLGRALPSVSNHQGHSSNSRKRMDSSHPGQKSTTPSRIIDSYPSANSNQEQSFSAEVGPMLYEILKSKDGLPQLVLAVS

SEQ ID NO: 927800 - protein, 151 aa, Homo sapiens
MTDVYIKRQNLEVDVHTWRVQCEYQDAIYLPKREAWNSAFPHSPRKKPSLHLAASAAVTTAAPESPCRGFETSEKTCHLESPAEGGEGVFAKIQQQSPVCRSLQSQRLHSVLRDRDLAKLCSFPRGEGFLHTPLLQDPISVILIFLKLLPL

SEQ ID NO: 927801 - protein, 161 aa, Homo sapiens
MSHASIFYGFLLRLFAGALQIRLTEDGVTGEKQIFQLIILCRVQGGILVMRPTEEIRSHYCRKGLCKRALNLAGNLFGALRMGRFPVSLLREQLSSVIYCKDTSTFPVSILLPGCSNDYWLFQACKHKNTREGRRCICLRNIIVWSNCFVIFLQKYDNMNK

SEQ ID NO: 927802 - protein, 140 aa, Homo sapiens
MSPETLESLQGEPESTARTITYHVAVKGRAGTRTQKASKQCVKHRRQRPLMQMQIDIFHQGLTVHQQIIKKLDIHFFSDEVHLEVKDLICGFEFYLFPVRAQKKNYCITKVLYHVNRFHTHTTVKYCQAAIMKQSPFSSR

SEQ ID NO: 927803 - protein, 151 aa, Homo sapiens
MFSCFSFVSRTFGFACGSHFRMTALKPLSYNFYILLVSLLAFVDLPFLVQVVIFLAFVIPRGCLLGNSELFNTLGFYQLPGQSEGYIYSETRSYVVNTTRWAEFTNRAFLMDKFGLNVDEQKPEHVAFIVPSLRFVPMAIIYAWDILTYIE

SEQ ID NO: 927804 - protein, 303 aa, Homo sapiens
MRQFLGIYQKANKLKPDKLSGFPRPFITIPVWFTSHSVACAYFKLNPETHPLHLVAARTQACELHSVDHGTQGRHSHKRMVTGRAMGESTLQRMESRNSQLLGTVGAILEQGLIPWVVGVGGSLHVQEWWKNSRGTFQAVNLKTVPDAWEVFALCPCESFPSYVSPRLASQRKQGPDGREDSHDDNSHRRGGLRTDVLMNELRFLSCIPQSGEGTTVANNSLGSPKGLLNSKGPTGHVTVQGSRSEGGSLHTEIQADAGSFLYHPGGYFTLWGSAAQENFLQLWKVYIHAVQYNSHSSQMTLE

SEQ ID NO: 927805 - protein, 157 aa, Homo sapiens
MKLPEEQSDSNIRCSAIFPVLQPLLLIPRQTASGVDLQQTPTDLQLRVLTVKRKTNKQKGHPHQNPISTKQSWTENDFDELREEGFRQLNFSKLKEVRTHRKQVKNLEKRLDEWLTRTTNAEKSLKDLMELKTMAQELCDECKSFVADSINWKKGYH

SEQ ID NO: 927806 - protein, 163 aa, Homo sapiens
MTHFQVIDTYQRTQEDWTEGPAAGKGKAPDIEPHTVVVEKPGEERGAPQRLTKRREGVWPMVVGRSQSLSWPQDATFNHAGCLALRPPSEAQPKDLQTLSEHFSFPGICWDTLSLMWACRGPLRRFQPVEVHLGPYSCGESRATWTDSLDWSKQPGVGSTFFR

SEQ ID NO: 927807 - protein, 147 aa, Homo sapiens
MHWFALILLEPCNAVQLWSLSYGTGVIRVEKGTEEGGQGAGQVIDMKVEGKDGKCNPEASRDLEKAVCPDGRDLTGMTKWHRHAAASPVVRKTLGEGEASDTSSPGTCEDEVEREGCFSSHGKTWVGAHSAINLLCDLWTSASTAVK

SEQ ID NO: 927808 - protein, 138 aa, Homo sapiens
MEDAPPPALLLPCSWISDCCASREQSSVGVGPSKPGMGYNVLGYLFFSDAFTPEAVRIMMSYFWSFSFRSLLYGHCCELPTPRPVMLRKTLKESDSEELEITQETPNLVPFGDVSRGHDTPLRATGEVSEWSGGRGQE

SEQ ID NO: 927809 - protein, 136 aa, Homo sapiens
MGRKITEPSMFMNLAPPPERTDPVTRLVRFIDDMLIGLGEQEVATTLDLLIRHFCVREWEINMTKIQGPSTSVKFLGVHGMGGDILYTVKDGLLHLASPTTKKRYNTWRNNHSWASLDFGGNLFLLWVCYSGPFTG

SEQ ID NO: 927810 - protein, 165 aa, Homo sapiens
MCPYIDFYASDGKVTSFSRVRCGHTAVQLAWNPICQGQPVGMFLGPEMWGHSCFAGLVMCLLGAAHRAISQVWDAGAKLLRGMATGGVWNHKLELGLQQIQEELEKMKKEYRNLNTWIDKANYLESILMPKLEHKDSEETNIDEASENTKSNHPEEELENIVGVG

SEQ ID NO: 927811 - protein, 139 aa, Homo sapiens
MPSFSGTRGTLKYPDNHKPGIPVEFRDKAVLGTIHRRVLAGVGGLYWGNRGQKWKSNFGYGLCCNLTFSGGRPHLAATAVMQDSVTRAPCGKPNPRKAVLDGKFVMHARPWNLNSQQFVTFSAIGAWNVFSCYHINHFG

SEQ ID NO: 927812 - protein, 147 aa, Homo sapiens
MLTLRSTTGKCYYSLSSGNPKLVVVSFHLLCQEWLSKTTLSVPKIGYPHSYGTFPVRAAESVSPFCLLVKDNSSIFKISLKHNNRALAQALSREKENSRRITTEKMLLQKEVEKLNFENTFLRLKLNNLDGDPNMSSTDIVGRGCAL

SEQ ID NO: 927813 - protein, 160 aa, Homo sapiens
MSVLPAAERNNPLQGFLSGESLILDGTTCLQRGATHCRSPLSCRTLNKAPLHLLHPLLVCVPHSSWMQDKNLGKGTTSHRGFQPENRHPKDAITQVLMPLCGLLTLSLGHSLKTPGTRAKGIASRIRLLQLQLELSSSAIGSLPVPRSHVTMTQSWKLIA

SEQ ID NO: 927814 - protein, 359 aa, Homo sapiens
MDYTQSLFKSVEGVKGRGAAIPCLACQHNDQYLVVAVAFDEQASKWYFSSLSEHTIYFDLDYILLPFKKMDFSRNLYDIGEQLDSEDLASLKFLSLDYIPQRKQEPIKDALMLFQRLQEKRMLEESNLSFLKELLFRINRLDLLITYLNTRKEEMERELQTPGRAQISAYRVMLYQISEEVSRSELRSFKFLLQEEISKCKLDDDMNLLDIFIEMEKRVILGEGKLDILKRVCAQINKSLLKIINDYEEFSKGEELCGVMTISDSPREQDSESQTLDKVYQMKSKPRGYCLIINNHNFAKAREKVPKLHSIRDRNGTHLDAEKATTSLITEGNTERRQAYLPPQNPGKIQQLEVQSVDL

SEQ ID NO: 927815 - protein, 163 aa, Homo sapiens
MLLQAPDLQSAHPLKDQVEPIAWASQARVCRPVSSSEPSVPSSYRSHQLAVLPVSPRASGSPQTTVSVQGLEGSEPSLDPNPEERLLLTVKKALPLLLPSGAYSVIGKICPKPSGANTKENVEDGELGFLFPATVTRPALQNLPALCRICTGLSFVTLKVTIS

SEQ ID NO: 927816 - protein, 135 aa, Homo sapiens
MTMAALWNRKGGKGSDKVPGPPLRSLEDSALLTGGILAIHSILARAEASGWSVSYPLASGLQTPLKCPSICPSPSPTEGRTALGYTQMQLAVCHAREIPKLEDLGTRSSSGIYWQCGLKEVTLTLEISAPSAAKG

SEQ ID NO: 927817 - protein, 138 aa, Homo sapiens
MRHQSWPTGSQNVEFRFQVAISMAEDLLKKKLNPVPNFRGQQENATERPGRRATIPGMSFPGTNLPWKRPKRGNKVASPQGLSVLISYAGKEGPSGGRMGLAEHIHTYERKLCHSVGRTKWVWEAKLVIVAAIRMHKK

SEQ ID NO: 927818 - protein, 160 aa, Homo sapiens
MAEERIAVGGVMDVNTALQEVLKTALIHNGLACGICKAAKALDKRQAHLCVLASNCDEPMDVKLVEALCAEHQIDLIKVDDNKKLGEWGGYAEATTRVQLLLTTLEDISLKVLKENENLLREGPAGVSPKEKQIGSVEGFQPEFSCEHLTTFQRPLTYLD

SEQ ID NO: 927819 - protein, 167 aa, Homo sapiens
MLSLTPPPIPQQAPVCDVPLPVSMCSHCSIPTYDSEQFDRLKTSSLNLSKSFSIQLCSNAGPSAAGLLEFAGGPLQTLFAWVKAAEAAEQQILVNSKCCCLIVPLDVLSQRSTRPCEVSICPYWGVPPSLATQGSGTHLRRQSVRSQISSCVLGESLLSSKLSDRDI

SEQ ID NO: 927820 - protein, 191 aa, Homo sapiens
MSSSGIVNTPISTLCLAQAVTLTAKICSLTPEASQSTSPPEGRNSEHIRTSEGTNSRRSTLRAVTLTARVHGFILEVIRERDVKTKAGTTVNQKLDDATGFENGERGMRKAHRQLLMDSSLEPPGGMKLCQYLDFGPMRHISDFSPSELQDDKHVLFKATKSVSCKRAENVGSSSEHQEFCVETDTLRTGI

SEQ ID NO: 927821 - protein, 167 aa, Homo sapiens
MTLLLPLVAQAQGDLNSISETGWSYWRSCRETPPTEKGWVRVRPEEALSPQTATAGVFWALTNKIQYSVCEEKEIKDIQINKEEVKLLLFTNDMIVYLENPKDSSRKLLDLINEFSEVSGYMINVHKSVALLYTNDDQAENQIKNSTPFTIAAKNKIKYLEIYLPRR

SEQ ID NO: 927822 - protein, 163 aa, Homo sapiens
MSVRSACVEGDPSGLLLLAQVASFYSLIWPRYILLIGPFYRVLIGSFLQSADWCVYKPLARHRVLIGAFLQSADWCIYNPLARHKSSASPHSTQEVQLASPLNLPSKQDTPTVVGNWAMTALATSCWILDGLDPRGNKFDKEFKNTGPKASNSKMAVTGPRKG

SEQ ID NO: 927823 - protein, 156 aa, Homo sapiens
MCPEFIASSGFLVSLTSRMKPQTLTVVRPELFVPPDGFMVALTSGVKLQNFAVSVTAHKGEETNNQKDEASSKCYTICEKVVFNPHPPSKLHTKAGPGIYCSSLCIHAYSMFSSHLEVITYSIWFAALVLICLGIMTSSSIHVSAKDMISFFLMAA

SEQ ID NO: 927824 - protein, 154 aa, Homo sapiens
MVSSFIHVPSGGGIALGDIPHVNDELMDAAHQHGTYMLKASLFKALVGREERGTMTIPYVANHSTSSELIYNGLKISKDGKTAGKIAGDAKEKTAPKKKQHKHNSYGSPPHFHLLFDLPPPPPCCSLELPAFPTTVFQLKPMWRKKSVTRFWVR

SEQ ID NO: 927825 - protein, 210 aa, Homo sapiens
MRCNRQPFSRELPCSVTCALLWPVLGCGDGCWDDHILSHSPAQCLAHGRCPVSTGKLMTAGLSPSPACLPPAQESLEEDGELSPEKGTVGWGHSSDQGVSPTSMWRQPEACFAREHPTPFREGLANDGKAGKGGVTQTVSEEAVLRVKMGSKENPGQVRSAGLNPVTSIYPGTPQGQPLLSPLMGKDRTADMPANHGSICPFPFHQVMKE

SEQ ID NO: 927826 - protein, 147 aa, Homo sapiens
MKGWPAPPHLWVLLVRWNERLRKERDTETKYRERKVGPGDRCSAYGGPTLALVSEFPQYLLIIISITISEKGMWQDNRVIMGRRDEQETDAFLLSQLQRGVPLLLILLSTDPLRVSGWGMIRSFPSHEAISQAITWGEILDTHPAQP

SEQ ID NO: 927827 - protein, 152 aa, Homo sapiens
MTSSNELNKVPGTNAGETDISDLSDREFKIAVLRKLKEIPNNTEEEFRIPAYKFNKEIEIIRKNQAEILELKNAIGIMKNASKSFNSRMDQTQEIITELEDRPFENTCLKGANLIVIAHKVEVEKEIGVESLFKGIITENFPNLEKDTYIQV

SEQ ID NO: 927828 - protein, 156 aa, Homo sapiens
MREPAHGSTPRFVWDPIQASQVEPPHLNPNLQDPNSWNPSEQPQMLGTFMCMEPIPWPALCRHVPSQKPDPQMDQSLCISILSLAAMSLFSICAISSRPGLGSAIADHGVLILPAKAEPVGFSFPITAHWDQETQSWERMVLSCMKSRPGEWVPDP

SEQ ID NO: 927829 - protein, 183 aa, Homo sapiens
MALGETGLGTQSKYHPYHNSLIPGRDIGLFREAGRELWSALNLFSMDTVSEEKEEAKPTPGCQTSGWVMMEPFSTISNIGKDQICPLFFPFTLCALRGLSLWTISTGPLMLWLLAGFGQAAAPAGDQRVGGGRDEATYPWLPLCQAAGKQRPQALLLHSGRQELSSLNGSPVWLMPRRIAVPC

SEQ ID NO: 927830 - protein, 191 aa, Homo sapiens
MSKNSLRPHQKPSRCWHHASYNIACITMRQLDLFSLYIIQPQANPGAHHSQMFIEPGSVQTQRTQQGTNQTKSLTAENSHDCHGKQLLAVVCSVWQSHWITAADQTVIGGAAGRIHRQLAAGGLHSPHHNLALVEGGDIKECCKGHHHWPWPKEPALEKGRISSWEDGAPLAPQQSTPGFQRKQENDVLSL

SEQ ID NO: 927831 - protein, 154 aa, Homo sapiens
MNECAGPHAYTDLLQNEQKQVAKELTDLAPSPRSETRFGPLSHLVTAEALPQGAIGPGAVPRERQCSNGTYYHKYQKQIKATAWRACIIISDVKEGIRISLTHEAIITKNVANGRQKSNMAQDPCPQCSCPESPCTLWVLAGPPLLLINRIWQN

SEQ ID NO: 927832 - protein, 147 aa, Homo sapiens
MVSLNEQYASIYHFPLSTVFFVSSPPQQSAWLPTAVRVVVAGSLSLGHVQVHYGPVAGGSMAADSGCSCRLGSLSRLPANPSELTALLLSPSMPVVFSVTSLLNSSVLSQMLYSKCDCLLVILIFHGGGKCQMLPVGYLEGPPQTLC

SEQ ID NO: 927833 - protein, 205 aa, Homo sapiens
MLYSKPCAFSDPELTRLEFLAPCRFLHSPFPSSPLPRDSLRTPTPSNSSVPCRTSHPSPSTAPSYSPAPPPSSPFKTHQSPRTLSTAILRSVRQPQYSHSKGGLRKGGVSCLVHQAVFGCGNEPGGRKMRKQEGSREASGKEEGGPPGCIRENLPSVERRSSRILGPASLVCVCVRCKLSEARNHIEVRSLLYPPHSAQCMTHND

SEQ ID NO: 927834 - protein, 157 aa, Homo sapiens
MAHVFSFHPPPHNSFPKVQLTAPLRMEDNQMALVDEEKVFSAEKFWLINAEGIIEFEKYYFVSSNEISGAEAITVGVHGKGLLKKVVKGPLDWDGPTGLPGIFWQCKRIHVEEEDSIETWVGDVEEEDSIETWGFLEIGQTVFLVTSCFNLLLLPLS

SEQ ID NO: 927835 - protein, 142 aa, Homo sapiens
MTWGFPVHTSALPAGAQPLLEKFNASKADWWNAEDVGFEVTMSQQEVYSTEKDESTTEGKKSRENGTCCIGMKDNLQKKSGRLSQCKKPALCNENISVNFINRDMRAHFPGLVATSTHAALKPTWLTLLGEDGYVHTLKTFF

SEQ ID NO: 927836 - protein, 142 aa, Homo sapiens
MRGWDPEPMWKAWVWQEERHFLNCKGAGSTGEKEGGGGDGRWTREQYGGLERCGSSQLMTCLYVLALLDQEKVGLSTGLSHDVAADVPWGKGGEFKSRRDGVSCYLNAVRGKRECQQEYRSSSSSKPTMIQVSLQDPEESIP

SEQ ID NO: 927837 - protein, 167 aa, Homo sapiens
MAAVQSSFGSASEGDRGKRGRGRPLFPSLSLAHACTHTHTHTDIHIYMHSLNQYPSKVHTWNIVDLSLKSNTTISPTVSVSLSFLLSLSHTHSHSLNQYPSEVHTWNMIDFTPKSLFSLWFPSPPLFYLHIRLQPVCPVVSYILNFGDCILVVVFSCFYFPEFSINW

SEQ ID NO: 927838 - protein, 153 aa, Homo sapiens
MLSIDILENIKDLKEVIACEQQYDSSYDARCDVWSLGITAIELGDGDPPLFDMHPVKTLFKIPRAATANDHKLGGLKQQTFILSQFWRSEAPHQRVSRATLPLKTLSKNPSLPLPASGGSSFSLACGSMIPISGFVFTWPPFPRLWVFFSGLI

SEQ ID NO: 927839 - protein, 171 aa, Homo sapiens
MAPQVFGQTGFRILEDMEHEGPPISRKASGYGFSEIYPYNQFGVLKIPYSLMDLLSKMVVGQPHFVRCIKPNDDREALQFSRERVLAQLRSTGILETVSIRRQGYSHRILFEEFVKRSDRPWVFRLEGGTIAGEPSSSTEYFPVFCSYHFPMVYKHWKPFYIYLIDLTWVP

SEQ ID NO: 927840 - protein, 200 aa, Homo sapiens [sequence omitted]

SEQ ID NO: 927841 - protein, 177 aa, Homo sapiens
MLCVTVEWDSTNHTSLPYDSPLDSQQGMLEENYKARGRRGTCFFRFASCSYHGHHSNRSSFWQQCLISAVAVVPVCRVPILPELASAIPSETSISRTNNAQMTVSSRTNNQNGHLLNKISPAGLTIMIKENRQKAQLPKNFHTRSKSDFATFETIVLASQYINLGSSSRITPVSESP

SEQ ID NO: 927842 - protein, 169 aa, Homo sapiens
MGKGDPKKPRGKMSSYAFFVQTCREECKKKHPDASVNFSEFSKKCSERWKAMSAKDKGKFEDMAKVDKDRYEREMKTYIPPKGETKKKDHLPGKGLTDQSSPGPLPEATAFGGVQRITVNKKRGKMKMQHRHEANNGFYLVIQSSSSKAAPDNLCLQCPQDSHQSSGRL

SEQ ID NO: 927843 - protein, 182 aa, Homo sapiens
MLSLTPPPTPQQAPVCDVPLPVSWCSHCSIPTYEFVKDQSGPSAAGLLEFVGGPLQTLFAWVSPAEGVDQRILLNSKYCCLIVFLEVSSQRDCCASNERGSVGMGPSEPGAGYNLLVCCLLRPLEKHSIRVGVTRFSRCHLSQLCLAVKGNSLTPCASWMRQCLALLWLTLSALHPPSDKPL

SEQ ID NO: 927844 - protein, 184 aa, Homo sapiens
MLLDSGHLGPDPAAPPRRPGLVHSRSLRPAGKPAPHLPHWALRPLVLPRRLRVSQPPKGVSAAPNGSPGGEICLHIRLKGVPFGEGAQAHPPRFRTGSEMERKRGTRALLPKNGKRPTATPRPRPGALRGRPGDPAAAGGARLSQAPGATWWPVARTVVPAREAPLARIPLHVGGGKTGVPEQR

SEQ ID NO: 927845 - protein, 128 aa, Homo sapiens
MLYLFLYFMLCMWIPAPCPSHDFVIQSRVHNLSYNLPSLNMKFLFIVEYTTLFFYWYIIKSLLIDNAKLRKLLGVDAKMQGRLLEMGGLMEETMKDSKGRNLMILAFLHHPRNRVENELEEDKTRDSS

SEQ ID NO: 927846 - protein, 121 aa, Homo sapiens
MEAVLGELPASPCSKEDEKSGAVNNRLVTLGRHHFLVACNQGFSEETLSNDWSVGYEVGIMTDEAGDASRSWIMGGLRCFAEKLGLGPEGDRSHQKLSKDLNPPNNNNDNNNNNSNTSYIC

SEQ ID NO: 927847 - protein, 155 aa, Homo sapiens
MSKITNHCCFKLPSFGLNCYAATGNYNRYMYLKSGAIIIESYNVDIGFGTTQPNSHKENVSENLKGLEKIVNEGIQENLGNIIEILKSRGSLPCSGRKFSNTVACSNMENRKDPFLEQIPMGHRGDVQRSTQNPPPSCWIREQADFCVRSEERRL

SEQ ID NO: 927848 - protein, 119 aa, Homo sapiens
MACQNAILFVPSFPSYLTKDISISVFCANMETSSSIPLTHMHHFVVNKTLSMSPGATNSLEEGGAHLQHLTPGSPVQGGDLLTGKFGCLISPNLTLTFDSQCWQWGPVGGVWVLRVDPL

SEQ ID NO: 927849 - protein, 141 aa, Homo sapiens
MIGDIKFQSRREHVFACNRLKCLPNCSVMFSGRDFTDLTSGSDCHTDRPGIPPVLSNAVGYNCSSFDSENGLQLIAAMVVQLCDYSNHGIICCNPTATCGCGKSSTMHRAVLGCQALYGSRLSYLSIPATPPCGVQATLSM

SEQ ID NO: 927850 - protein, 142 aa, Homo sapiens
MSPPASVIQGTHGFSHHTWTPVDIGAHVGGKENLQQPRPFGLEATFWLRSTLLSSQWDNEQKFAINLMRVGFSKDELCAANSLLSSPVYGWLNKQWCDLSPPLSSRADEGFPGEGQRRILPGGPCKQNHILSVGDSLGGRGL

SEQ ID NO: 927851 - protein, 221 aa, Homo sapiens
MAALANNSVESRQVSPYHQAMGLHGIQQCDAGSSHSPWLVRQKIHKNKALALERSSFQFRVNSTLGTSRRVTFKLRKEKKKLLHISQGKPHTNVNSTRVPPSSTDFLWETYTEPRKPPRRLHVVWLSWETIAEPLFYRSADTIQCLELCGISCPSELSQPSREWCSASGARDREQGQTSLQSASSGQVKVIEFLSPVTNSITPGSRPDLPQVLRILKPDLS

SEQ ID NO: 927852 - protein, 177 aa, Homo sapiens
MWPLWWQGLGLRVMSPAHGRWHTTFSALVPIMCGSCSLCCLLTAPVMPAMWGSLLSLAHGDRGQTYTIYLLCHVFCALRGAPYCSLSQTHCILGSGSLSECLGRSSGRSFSLDMAALLICPLHLCHSPSQPLVVSSSQTASTHLLLTGGVGLSLSFLLKLPLSAVCSPSSQRFLLVL

SEQ ID NO: 927853 - protein, 144 aa, Homo sapiens
MCPSGLGVRGSGAQDSAAALACDLSPILGPTSSSCSGHSPSAPHLRSAFPVQNENNGPLFQKLHSIKPSAGSSEHGAVCDFLGHISVRLALPPGHSEALEGPRCSGKIKELYAELDKPQSILSFVCYWLFDLGQVKKVPLFPPL

SEQ ID NO: 927854 - protein, 137 aa, Homo sapiens
MQRPFPATYLQIRQHQHISSQSAFIIRLLCTRYWPMCLGIERLLRGSLPECIKFSGNRQSRAFYNPREPWQASVGMSQKAPSKEITARGEESGRCQSQDSPVSWPRWLDLSLQVMDGYGWAFSRNVTCSNLTVRNFL

SEQ ID NO: 927855 - protein, 140 aa, Homo sapiens
MGSLIFELLQAKAFPDLHTLSPPSQPKVLLLRNLQSAVHRHALLSREGSGEKSASRFIQVVGRFCSVRLEDRHPGSLLAVSQGSFLATRGQPSRIPWSVPSIFEARNGMLNSSCALNLSDPSFCHQLEKVLCFKGLRGLG

SEQ ID NO: 927856 - protein, 134 aa, Homo sapiens
MTSQGTSSRRTAPATKPMEVGVDGKGTHDASPALRQRQVSCQDTQDSGESEIQGSSAAVQVGHMQVKLIYCRTAFLSLRGAAPHELKRKVNEKNIGLGLSPSQGHGFSSDLFVSTMSYQASNLTFLGLCFLLCK

SEQ ID NO: 927857 - protein, 151 aa, Homo sapiens
MVPTLLSFWGGLGEPLLMVEGEMGACSSYGKSQKQEHGQGVVCHTLLNDQISQELREPLKGEKPSARRSWRMRGHLDIPAPAKLPAECSRMSDLSHPTWSRSSSQWSSINRRTMTSNKSHSYCALRWLTTQQSIAELCVNKLLSSLHRVLT

SEQ ID NO: 927858 - protein, 190 aa, Homo sapiens
MPLREQRYTGIDEDGHVVERRVFRYQPFTSADLLDWKNNTPSYTEKPQALIDLLQTVIQTHNPTWADCHQLLMFLFNRDERQSVLQAATKWLEEHAPADYQNPQEYGRTQLPGTDRQWDPHEREDIQRLHGDREALLEGLRRGAQKATNISKVSEVIQGKEESPAQFYERLCEAYGMYTPFDPDSPEIST

SEQ ID NO: 927859 - protein, 229 aa, Homo sapiens
MNPLPGQGGIAGETLLKQETNKKEQVLPPQDSQSSVTHKPSTLTGNHTDSSSGGVGCPTACPWCLLATISGSWHHALLKWMLSASTQQRCEEGNGETMSGLDLAHPSCSNIWTLCDKCRRNSLKPAQSPVLPGVTAEHSPGKGWSSNAPWGGWGSMLSPKMEFCPFNKDLEQKRSMQHPATTEGDHRAEQQLKLSSCFSVASLPTSATDKGFIHQDPGFMRRSYVSVCF

SEQ ID NO: 927860 - protein, 142 aa, Homo sapiens
MYLVTVLRNLLSILAVSSDSQLHTPMYFFLSNLCWADIGFTSPMVPKMIMDMQSHSRVISHAGCLTRMSFLVLFACIEDMLLTVMAYDCFVAICRPLHYPVIMNPHLCVFFYKIVPSILRMSSSDGKYKAFATCGSHLAVVC

SEQ ID NO: 927861 - protein, 146 aa, Homo sapiens
MDPELQPVLALLSLSLSMSMYLVTVLRNLLSILAVSSDSQLHTPMYFFLSNLCWADIGFTSPMVPKMIMDMQSHSRVISHAGCLTRMSFLVLFACIEDMLLTVMAYDCFVAICRPLHYPVIMNPHLCVFFVLVSFFLSLLDSQLHS

SEQ ID NO: 927862 - protein, 140 aa, Homo sapiens
MQMHKIGIGGCPLVPRGWGRRTGWGMGGCVESWGRGEPIPSPASAASTTGVTYQLVSAQVSTYWAPPHARHSALVGRYTPPCGPPRALHWGLTLEPALVSVLQPLRYEMSTTFSISQIEASGEVGRVGPWSPRRTCQLDA

SEQ ID NO: 927863 - protein, 154 aa, Homo sapiens
MWLGQTQTLRTFRDTVPRQPSEVLRTYVPTPLNARNHALGSGWTGETRHAPSPRGGCRQQGKPLGKLGTAVHHWDHELHPALGGRFGGSVLGREEGKDIQAEGAPGQRLEGAEFVHSLTERHLDSLQVLEIRNKAAKNIHVQFFVWMYIFNPFG

SEQ ID NO: 927864 - protein, 195 aa, Homo sapiens
MEQFFSLLGGKDEGLCAPAWSPLQLILTVSPPSPSGLNQSKATFGFNRKNLELVISSFRIGSRKLGEWAQACILRGKMVEFNWYMAYGNTQLVRKERLKAAAAKFHRLGGLKQQTFILPQCRQLEPAVKVLAGFVPFGGSERDLSHASLQDSGGCQRFPAFLGLCLLHCNLWLYLQMAMVRVCVYVCLSVCILSL

SEQ ID NO: 927865 - protein, 465 aa, Homo sapiens
MQLHDLLALCFCPWSSAETNKKTVHAKYCSRFVHAPWKDGSLVHVNITKEKCKWYSERIHTALARIRRRIKWLQDGSQSLFGRLHNDCIYILIDTSHSMKSKLDLVKDKIIQFIQEQLKYKSKFNFVKFDGQAVAWREQLAEVNEDNLEQAQSWIRDIKGLAGTQPVSVATPSSGLAMGHSGSNPIYQEIWAQTSPLLKTGTTTGCIVVVIDAVVDIQGQKVLDSGAPIESPVGPETLSRIMNIIGEPIDESGPIKMKQFAPIYVEAPEFMEISVEQEILVASIKVVALTGLTVAEYFRDQEVQDVLLFIDNIFHFTHAGSRVSALLGRIPSAVGYQPTLATDMVGMMWGKNCHYQEEIYHLCTGYVPADDSTASATSFAHLDATTVLPHAVTELGIYLHVDPLDSISHIMDPNIVGNEHNDAAEVITGHMGKSVLLKETIKGFQQILIGEHDHLSERAFSDGTH

SEQ ID NO: 927866 - protein, 149 aa, Homo sapiens
MGTRSPPAQQLSFLRSGLLNILYLHMPDCPVSLLQWLFQSGERWEPLLPPKVCVSGCCLCPHVAFLRDLVYPVDLRSNLSVNRSKPLNKCFLCNKANFFTSGHRSLIPYAAGGPFRAHGNPAVPAPNPPPKAQKEQWKAETANSVAYGD

SEQ ID NO: 927867 - protein, 200 aa, Homo sapiens
MRVHRTKLEAWYQPTELENERSQLNPPYTTIKLPRASKKIKAKNNLSKGQQLRRLKEHNPTQMRKNQCKNSNDSKSQSAFLTPNNHANFPAMVFNQDEMVGMTEIEFRIWTGTKSIYVQEKVETQSKEAKEYNKMIQVMKNEMVILRKNQTDIIELKSSLQKFHNTGGAQQHKDGQQLEKDRPPNGFSMFGYKVGLLAGT

SEQ ID NO: 927868 - protein, 151 aa, Homo sapiens
MGLPESQTVVIVFALLSLSIQQSYQALGWYWGVLSKDSCDLICPQAFWPWITASAPVELWSYREEANLPEGLLVKYSGFAGSGQGHRAAKRLYPLSSATRAGRKRPLGEVELFKALGAHPLYRCALDMEHRVRRLFWSFKIWSLPCWVFYL

SEQ ID NO: 927869 - protein, 213 aa, Homo sapiens [sequence omitted]

SEQ ID NO: 927870 - protein, 141 aa, Homo sapiens [sequence omitted]

SEQ ID NO: 927871 - protein, 150 aa, Homo sapiens
MLSPLNNSRQSGPRVAGLLEFAGGLFQTLFAWITSGGCKTVKFAAYSFLWKLRPRGAPARCQQEMSFIYKPPTGAAPFLSEMPCQERRNLERQSGYSSFAVLQRALPSPNFLAALFILFVLEIQHPGGVVTRGNLLVCKLGRPWEKRQFT

SEQ ID NO: 927872 - protein, 154 aa, Homo sapiens
MDSTEWTRMAVTTVTLYDHWLTVKDLEVLKDGKDPVLAAFIKCQLKSPSALNNQQQYPDLGGSEQRKELFVWEKLREENKYLSGNPENSPRYCPRLSRQYFYKSARITLLLGLRCPLRQIQFRSQHLSPFEYLQSLLNKDGHKQAQRVKTTVTI

SEQ ID NO: 927873 - protein, 140 aa, Homo sapiens
MPIIKDRRKEPWERLAGNEALRSDWPHFTGKTALLCPGQTVNKGQCRLEECGKPQKLLRTRKESWCSATLCRVPSFLSLQPKVCTLPPSTLNALLLKICSEWASLLEGLVSQWRKLFLAASSQPSWLSRRMLLGVESGYS

SEQ ID NO: 927874 - protein, 138 aa, Homo sapiens
MEKDHEYPGMMDLEGETVRFSELERLELSFLVEPEGEQLHAEESYRGCRAEEETLMTVITFPQTFTWKFESWEVNVIPEDVNFTYRHTLSASYPIHIAKHRRSTEECKIRSLCSGSVKDMHTHIKPKYKAVGTEEHGR

SEQ ID NO: 927875 - protein, 159 aa, Homo sapiens
MTWHYWAAHYNSKVISVFMFLPQHGDSRVTALGSGCGQGLLAGLLGTPPQRDAVFPLSPPPTTTKHSGTWSKKQKRQEPSNSLQRPATPGQAEKPRAQSLSRALQPHRSPSSPAHSQAHCSLMHNSPDTCLPCTLFLLKANDLKYVLPHEYLDEHSINI

SEQ ID NO: 927876 - protein, 131 aa, Homo sapiens
MLCCPGWTQTPGLSLWYSGTWITGVSHHASRTFTFTASTAAEEERPKEATAVVPARGDDNGLVVGGGSGRGEKWTRSACVLRDQPPLLDCRFLQGTWSLLQSVRSGSECLGPEAGKYFPSMRALLEGTVGV

SEQ ID NO: 927877 - protein, 135 aa, Homo sapiens
MLTHPPLTSCCETWFLTGHRPVPVHGPGIGKPCWERRRRRRKKKKEEEERRRKKKKEEEERRRKKKKKKKKRRRRRRRRRRRRRRRRRRKEEEEEEQEEQEEEEEEEEKTLTSFSYGSAGIFESQQLQLYSTTGE

SEQ ID NO: 927878 - protein, 190 aa, Homo sapiens [sequence omitted]

SEQ ID NO: 927879 - protein, 137 aa, Homo sapiens
MNVAKNSSQRCRRKPGAYCATEIQRRESYEKEREIDNARDLWLPLFYSLLLWEKLIILALILRQSYRIDLASTLKYSLERAHGILHLTLRVKYASVKWGVMIPTFEIRYGFIGNNIGPFCKNYWLLLKAGTFFPHRQ

SEQ ID NO: 927880 - protein, 288 aa, Homo sapiens
MNNKVKAEVVSDGDEELIGNWSKGHSCYALANRLVAFCPCPGDLWNFELERDDLGYPAEEISKQQSIQEVTSLFMKADLHSNSSHHQPRRLGKKNGFMGWAQSHTAMCSLGTRCPVSQPLQLQPWLTEANVQLMPLLQILQASSRGGFHVALGLWVHRRVEVWETLPGFQRMYENVWMFRQKKFAAGTGPAWRTSSRAMQRGNVGLELPHRVPTGTLPSGAARRGPPLSRSQNGGSTNNLHCKPGKAKGTQSLPMKAATGEQPWGLYPADLSCPRPGEPTSSISMPWI

SEQ ID NO: 927881 - protein, 151 aa, Homo sapiens
MRDKRRRQTQSNGNNQLNSERGKFYRRKKTRCLQQVVGMGERRGEEKCKAVVPCSALKVWAPLPLKCWMQILAWHSWAAHHSRGASSGFMVPPKREGSRGRDLGSGNGRGPEGLSLVSQGCTPAQHKAVINQNNQSEVGRLCCGPKLDSPA

SEQ ID NO: 927882 - protein, 152 aa, Homo sapiens [sequence omitted]

SEQ ID NO: 927883 - protein, 147 aa, Homo sapiens
MLGPKYLKLENLILKLKSLKRWPKVRTYIPGFPLECYLFLNHPGPCPTPSSAYKDPRFSQQRGEAAGHWGLRLDVVDFRGTAQRQPLSSAIKSPTFTILQFVSVTSFFLDAGQELGNHECGHKRLSHWLFSCSGKGQPPHAKRERAR

SEQ ID NO: 927884 - protein, 215 aa, Homo sapiens
MLSSITLGFKDTAQYLLMFCVATESTIQKRPLSVPQDCMLWYEGLQSFTIHSTDVFVSVARCWRHYVEQNRCGPGVPVWRRHSQEKRPVQFNVMCAAIGQIQRIRGAQREASDPALGSQERLLQESGDPSETCKMSRHSPEETRSVFKVEQRGKQSMFLKHHGPGVWWSHGRRIEWALFKQMLAHIGFENLRKECRLYLKGNNFVISPRCCGGVV

SEQ ID NO: 927885 - protein, 140 aa, Homo sapiens
MNHLFRCLVDSLWCVTSARLPPCLGLCCTTCLKCSFPLLSQPNFIYLSRSSTCTVFGTCPIVVPYWKTDGLNIARRHEDTKPVVLKLEWPKTSLGDLVKGFPGISPQRCCFSSGFPSLPTLESPGEHYKNLQARTTPPVN

SEQ ID NO: 927886 - protein, 154 aa, Homo sapiens
MRAERLCFCWSPSLASSLPVTGHSGDFKPWRLKPVLVFQHLMKALNQIMKYIGKSASTAGGSSESCPCGSVAVLLADALIYPKNCECPKCERGIFCPQTYTLTGKPEGPDPRSQEKDLTLPGAEMNLESQVKYRGRSSSEKSPVGTFILQGCHF

SEQ ID NO: 927887 - protein, 134 aa, Homo sapiens
MALGSLASGPQGLCLTSLITSEAQPPTSQNGCHLCTNNAGACPVNLSPVPGGFPSLLQQASLALWVSFHVASVLLPGISGSKENTDLHFSPLKHFENTRSSREVTFGDFHSKCLIRLFLKKTKTKQALFNALIF

SEQ ID NO: 927888 - protein, 149 aa, Homo sapiens
MPAEICKKFAEGVKKFAEGVRPSWRTSARAVQKGNVGSELPHRVPTWAPPSGTVRKGPPSSRLQNGRSTDSLHHIPGKPTDNQHQPMKAAGRDAVPCKATGAELPKTMETHLLHQHDLDERHGFKGDHFETLRFDCPAGFQTCMGPVAP

SEQ ID NO: 927889 - protein, 150 aa, Homo sapiens
MAKRDQCTTQAVASEGASPWWLPQGVGPVGAQKSRTEIWEPSPRFQRIYGNIWMSREKFAAGVEPSWRTSVRAVWKGNVGSEPQHRAPTGALPRRACACLSPFAQLLKFYRKATDHQLRVFSVYWEAVFSWRQLQPIILERQFNNNLTIT

SEQ ID NO: 927890 - protein, 127 aa, Homo sapiens
MAFIGRILVQNRDGHDQQTGWIAGGPSRETLTVGDERSSHCRLNESSETFTPGEFGQALKDIKKSAKGTESRRESVKNKETWRVRKAQRPKVEEWGQEKTIRGKQVAGSDSGDINVELAVDTAGSGP

SEQ ID NO: 927891 - protein, 149 aa, Homo sapiens
MDVTSRSIIRNVKGPVGFFNVKGRWVRPHGRWEWCKEYPAGGYSSPSGFAAMHPGRTTGKGPSTHTQIDQQPPRLLIVHIALPSWADICTNLCEALQNFFSLACSLMGPSRMSLFSLYMVQDQHECILPFVNHSEEKDFQRFYASPSLR

SEQ ID NO: 927892 - protein, 160 aa, Homo sapiens
MQRAGWWELHPSRTTSPHPTPILDRFCNCLACLSDTVPVYGLRPYGTSGFHFLLWESGLSEPKCHTARKLQQPQRHMWEGVRVPGNQNKDRVVGFLTLSQCFFHSILLELSGSLAGPEIQKLGLELGTVVTYSVLYSAVAELIRKPQDKVLPPLPYHFPM

SEQ ID NO: 927893 - protein, 150 aa, Homo sapiens
MLSTGRQKFSVALVLVQYVGICRDEEPGGQLVTDKFHIDWDSVLIDMDNVIVARFDGRGSGFQGLKILQEIHRRLGSVEVKDQITAVKFLLKLPYIDSKRLSIFGKVYPDEGHNVSEKSKYHLYSTILKFFSDCLKEEISVLPQEPEEDE

SEQ ID NO: 927894 - protein, 128 aa, Homo sapiens
MVPDNRNSCCTSYHFYHLTILFTSAEHSVAVACILRVATVLYKLAYLLTILKCEKVPRWKNHTPHLSHCYPDASELPFLLTTGIAIRVLGCPPASSTLSNCCSSNPSTWIRAPTYGRRLPRSAQLGRP

SEQ ID NO: 927895 - protein, 137 aa, Homo sapiens
MKLELKNYRGDLHVSISFCLVLRKPVVPITSLQNHVSGESFPKGYLSLPSRRGQRSHGKGKLYLEAHRELSNQVKSTAQTADMAGSSCQNQPVVNDKWIRVSRRLDVMKKKAYHGNVLDLELGVIARYDYVIFLERV

SEQ ID NO: 927896 - protein, 170 aa, Homo sapiens
MSNGNPQSWRWRLVGDDQMTGEISHEWFHTIPFGAISTGTSLSWKGRSTLLLLPTWPRLSSQEGRPHHPWAVLNVQALHLASDDTTQGGEEGMPHYCRVSRKGSPCSLPGLYRHLGDGWVRRGLGPCNCPVELKVPALLGSSLLSPVTLLVWGFRHFDGAWKEWKYRFSM

SEQ ID NO: 927897 - protein, 213 aa, Homo sapiens
MKTAIYKPRREAWNRSALTASEETPASTLTVFFASRTRLLKEDYPWVWQFKRCCEQWKELRMMVKTTDKTLRVTEGWEYGLACLGAEHLFLTSWLTTNWVRDFQHCLHVRTTWEALEILGARAAPPNQLGQNLCGRDPRSSICNPNSSYHPGFGTFLPGVEARGGGKSREYEAVAEVTDAKPGEPHKEINGSNTQAEERRLNRSWGETSENKT

SEQ ID NO: 927898 - protein, 173 aa, Homo sapiens
MLTLGLWLRCIYFVYDLQWRKIFDDEPTIIRRAFYSLGNYIVASEIAKESAKSPVIVDRYWHSTATYAIATEVSGGLQHLPPAHHPVYQWPEDLLKPDLILLLTVSPEERLQRLQGRGMEKTREEAELEANSVVEMSYQRMENPGCHVVDASPSREKVLQTVLSLIQNSFSEP

SEQ ID NO: 927899 - protein, 423 aa, Homo sapiens [sequence omitted]

SEQ ID NO: 927900 - protein, 141 aa, Homo sapiens
MEKRCDLRPSHPLSPLGGLGQALLNANTRQQGPNNLLGPEHDAGSLTGFVQNLHSTGEGRKANKPSEINLKVEFCATLKNRQWSCDCLGRNGKTSQKRGKLPLKEIRVKAEAGRQAGQCREFQITGWFPPGPRVQPCWRGR

SEQ ID NO: 927901 - protein, 153 aa, Homo sapiens
MITWSEHQREAEHHQLKLDHLTAPSPWAAGLPRLPPVGQCGFGKGEIWDAEREWDNRRQGLQGFAEGGPLAKPRDVKVTFKDVGVICAEGPCVEPAAADANSLSLALSLGLPFPLGPYPASLLPPHCAFTQDCGEGYASGLRIHCRCSSQTEP

SEQ ID NO: 927902 - protein, 162 aa, Homo sapiens
MTGCLKPTPIKSRLCNRVSESLRLPRSAGCSHSVTLILNRKGKGSSICPKAFNRADTIGGTEFVILPGLEMNPKQKSSSISKLRRKLLGLLKCLVSKHLRWRVTPPGHIFFCLYWLYRTRSTQGAASVGHCLLVAMFLGKGIFFSWDSCHYSHLVATLSVYC

SEQ ID NO: 927903 - protein, 149 aa, Homo sapiens
MSLGPTLKTLKPLRMVVLENGRYLDLRMTVSKVTCLPIHTGLSMSKKEMLVVDMDETGSHRSQQTNTGTENQTLHVRTHKWELNNENTWTQGGEHHTLEPVVGLMYQWWGLYLMSGDWVKEGSPQPYIPHHVELQESRNAGLLHLQGVP

SEQ ID NO: 927904 - protein, 147 aa, Homo sapiens
MGSNPLHTACVTFVSLDPHLIKYVIAPWKDIKMHQTPCQRLPEFETYISKAVTSPVLQISYREQYLPYKTGSVTDFSSYFLNYNTKNRPLDNNAYIKPRDYISDKVQMHLETIWNSRANEVLRFCDAKQSSHRCSYLLVEKQNSHSF

SEQ ID NO: 927905 - protein, 147 aa, Homo sapiens
MESRAGGEDDPVQEVSRQDSAFYACLRSRELGLYHEGEGKQLKVCKQRISNLENCSKDKWEQKEQWSRIPLTESPQKIKILTEAWLTWKGSQAFPLLCHLGFPHYEDSHSTISYPQECFLPFLTSSLIIACPVASFLGTHSANGQGI

SEQ ID NO: 927906 - protein, 155 aa, Homo sapiens
MSLHLAALRWSPCAPGPPPAAAGVHWSSYGFTHSKSKRPDMARKSPFYAPIRNTCSAPSRLSSPLLFHFVIVLLYFSLSRAFYAAICAHLELEFRPNSKAHASSIFLHSNTWKITVGRWTEKMLPAFIMEHPGGSWRVERTSTPGPGMRVLTYLS

SEQ ID NO: 927907 - protein, 154 aa, Homo sapiens
MLDDKAMTDTHLYLIELFAVCASFVKTFSSFFPKCFIPFSVLTIPSLFGPSFGSFVTALLYLLAFLGVQYFLLDLSLDRKDSIELCMYTVVTECQVLLRLLHTFKHGLAEWSNTVLLTYSVLRAHSTNALTLHMQADAPGSEAMNAGSHREQQG

SEQ ID NO: 927908 - protein, 134 aa, Homo sapiens
MPSADMSFSGWLFYKKLPYHTQCPQYNSSSPNWFLQAACSTFKEIMQRSPLHKRGPGILGVLNSRSWAEKCKRKPTFWGQLVSAGSTLAFDQDRGSVMSPQPCGRPWVSSVLQHHLGLDPTFRDSASSTTKGGY

SEQ ID NO: 927909 - protein, 144 aa, Homo sapiens
MVASLMFSDPGFLASRMPRNGILVHAMSVTALLEAVGHGREPWNPEQWQAFSAIGSGNGRLAGSGEQRTPCWIRRDGSQRGSAVVANSSGGRIPSHRSASGLGTHKSAQDYFGSCEKGRNELTINFVSLYQQQFRCRALELEAL

SEQ ID NO: 927910 - protein, 213 aa, Homo sapiens
MEACCRVEYLMWGRESWGPGKASGVMRSESEGLTARGTDGVNPVLRAGEAFYSIQTFKGLDEANSRWKGQSILTESADSDANLIWKHPQIYSETVFHLGTPWPTPIDPHKGLGYSSGFLATREFSIIGDHQARQEDASLREGDVNGIEWELAPEQFDNSHQKESYGKTNPRCGENTGNEAPSPTVFQKLNSANNYVSLDTILPQLSLQMRSQS

SEQ ID NO: 927911 - protein, 149 aa, Homo sapiens
MSNEIEFIMKSLSQPRKAQDWMASPPNSTKLTPILLKLFQKIEEEGILPSSFYEASITLIPKPDKDVTTTTTKLQTNIPGEYDAKTINTIPANQIQQHIKKITYHDHVGLIPEIQRWVNICKSINVIYHINRMKATNHMIISIDAPKNG

SEQ ID NO: 927912 - protein, 153 aa, Homo sapiens
MDGLSPPSAQSQGSALKGVLWPWVPGPGPQTPEQGIGSCRLAIGGQRALEVPIENLSTGHPERGLSGECVNPAYYTRISLHHRVRKRGTEHLYDSTRGKEEGRKGIQEGTSRVCAVIRNSVYVSLRCTLGKAAHDFDGWGLLRGAEIGATSGH

SEQ ID NO: 927913 - protein, 183 aa, Homo sapiens
MSEKNKDPWLNPPFPTFPKKKWAIPVGSISTQPTHTIASCPRLLPTPLILPPDSASRLLLHMDSLCAVSSIPANSMPKKYAIRACFHFNVSVGSFYWSQSSRLLMPIRKSPITSAQISLVLFYNELLLHSLLLNFPLPALHYFIVLTKSLAVTFKFCRFPAMPQYWALAEANLDSNPKSSMKS

SEQ ID NO: 927914 - protein, 139 aa, Homo sapiens
MGKKQSRKTGNSKNESTSPPPTERSSSSTTEQSWTENDFHELREEGFRRSNYSEITNAEKSLKDLMELKTMAQELRDECTSLSNRCNQLEERISAMEHEMSEMKCEEKFTEKRIKKKRTKPPRNMGLCEKTKSTSNWCT

SEQ ID NO: 927915 - protein, 174 aa, Homo sapiens
MQVRYSPLGLVGRASPVANPGLSKAWARVSPAGGLQLISDQEKSCVSNTQFYYIQHVLSNHHESQCILTSQKEKGAGKMHVGGFYRPGLEVVHTTSSHISLARTQLRDHKREMDLTVCSVGGGNGEAQEPRILVLASHTTPQVVQKSIHTEDNGENIHPLLVADALAPNHKVDL

SEQ ID NO: 927916 - protein, 161 aa, Homo sapiens
MTTQKPYLKVTNIKDQREQNWMENEFDEFTEVGFRRWVITNSSELKEHFLTQCKEAKKLDKRLQEWLTIIPSLEKNINDLMELKNTARELREAYTSINSRIDQEEERIAEIEDQSNEIKCEDKIREKRMKRNKQSLQEIWDYVKRPNLHLTVRTKTMYQNL

SEQ ID NO: 927917 - protein, 140 aa, Homo sapiens
MGLPYSLFYVQLTLLGSTLLTFHFCAKASNVLPQPLIQIPFPSPECSGFTHLAPDDLSAFHPTEYHVFCSRHPSSKSSDPFPFPCLERRFKSLTNVWSSKEFLSRHNANPSSSVKHSRIAGHTIVDSLNLYSSNPVVSLG

SEQ ID NO: 927918 - protein, 145 aa, Homo sapiens
MKHISQNSLYASSDKCLAFRGPTHLLLTDMFLGSLPRPATVHIRMFPWVNAKVLPGGEKKLFKHVKVFPIQEEKINNEKENWIRAEVPQLELAKHCLQVQGSALQNATRTSSFRLFSVSSKMSYRVNLPAVLSESFQKQLLFSKN

SEQ ID NO: 927919 - protein, 155 aa, Homo sapiens
MLSRPVSVRRFLAEGLKSLAKHWPSNGISEIHQNIKMLFEKYPEHSWKKRALQRDSESSRDPQKIALTSLAEYRSVHTCKDITQYVEKNRRNDVQSSPKDRNHLCFHQPEWNNLVTHMEYSNEYFLNNKFKLTETKACPLCLDMPNKALREASKE

SEQ ID NO: 927920 - protein, 124 aa, Homo sapiens
MTKKKLLFHFMERATETQNHRQEVIKPGVESRAICLQSMCSFRCSPWPPGILPSSRSHADVVGGGDEMLWMLGKEKSISGCGESRDAPILEDQLKCYARQDSFSDPPTALELLRKHPSFPGLTL

SEQ ID NO: 927921 - protein, 186 aa, Homo sapiens
MPSSVLSPAHEFPVMTSESHHLDLITDENIRLCLQKNVRQKETAQYMLAVLFSCSSLYHHHHHHHHHHHHHHHRHHHHLHLELSSNGANSSQSSRLHVSRRMLNPNGTGDIAEVSSLASLNQVSKFVSMVEFGTLDPPTFSPSWLQVCTSISHQDHQTKGSAKTCIFLVLNRRVCDYFIAESPASI

SEQ ID NO: 927922 - protein, 139 aa, Homo sapiens
MQVVHLPPLGRKVLLRSLVLGLSTENIHLPHLGKTLLKTIAFHTLLATARNSSNFLVLRVFSRKMLSKGHFPFHPNLSHTWPLSCSTPPPSADLDTPREKVTPHWEAVLEQFQLQVIPESTAHSAYNCSSNMLSTFLSL

SEQ ID NO: 927923 - protein, 199 aa, Homo sapiens
MFSMKTGKGVPAAWWGMLNADWLLVMEKGGECSQCAAQRISRLTGRMLPPCGKGPQRVWGEVLRQWTLVCGADHHNYGLQREKEKKADCRALGMDEKELAESGLTWLHDCIYDNGGKTAAERAQIGRASERGPQRQTGGSGAEVSSQHSCIETQGWMLGSRLLGSWPYTGTLSQAPGSVWINLQCCYGCTRQQTQPKTA

SEQ ID NO: 927924 - protein, 137 aa, Homo sapiens
MSHMYHHFPGPTGPFRKAIPAYTENCPCLTLKPGRKMLTEELLCVRRCCRSKGYNDDQGRCSPYLQVVESGYRLEAGSCKMCDKCCAGSAHGIRRAGKGGWGRERTTWRKRHLSRVRKAEEESAGEREGNHDMPPQL

SEQ ID NO: 927925 - protein, 255 aa, Homo sapiens [sequence omitted]

SEQ ID NO: 927926 - protein, 139 aa, Homo sapiens
MERYLPDTPGSLKYRDAYDPQKATPTTCPLPSLQSKCQRSGHLKVYETETAKCKGVPRETPNGLRTGRGAHWGGASGSWCCLQPEGAWPLLFLGFRLNVGFSLRGGKHTSRKLMLVLCLMCSLKNHEPIKPLFLYIIQS

SEQ ID NO: 927927 - protein, 140 aa, Homo sapiens
MGAHFTGRETKAQIQGAAFMCASTRLSPQAPGAHGQQWGLWGSPCPALPTLPQAHRLPLGMWLPTCEAVSSSLRSELCRAGSSGCRNHSRRPGRSKDPPQESAEGAHFCPHLDFGLVASRTLTSSTFLFIFPFLIQTHAH

SEQ ID NO: 927928 - protein, 147 aa, Homo sapiens
MEVKKSNSRREWQQDFIIGFCIREFENCFIEWARIKAQQKWVEEEKRSCNSWCGQLIGGGCCKEEWRIGKEARGVEGYSYCEIHTILGLRLALLSPQLADSLLWDLVIVPLLKMLQWLSMALKVKYKVYKRKSDLQSPSGSDPRSLV

SEQ ID NO: 927929 - protein, 168 aa, Homo sapiens
MGEKFARFIHRLKNYPHNNIEIKPIYNPTMASKRSSEERVTHLPLQIKSYKGLSLAIAAIDSDSSDGSGQSTLKTWKGFTIPDAIKSIHDSREEITFSTLTEVWKKFILIFMDDFEGSKASVKEVTADMVEIVRELELEVDPEDGKRKSCGTAKGGNSTRNEDEMPLR

SEQ ID NO: 927930 - protein, 137 aa, Homo sapiens
MPISLMNIDAKIFNKMLANQVQQHFKKIIHHDQVVFIPGMQGWFNIHKSINVIPCINCMKDKNNTIISIDVKNAFDKTQYFFTIKKLSKLGIEGTYLNVIKSIYDRPTASIILNGEKLKETKFKANNGYTYLGAAYT

SEQ ID NO: 927931 - protein, 160 aa, Homo sapiens
MTREPIYAWWVALLGLKLAFLCLAPGPPEPSGEDPALNISQKRWEQLVAEGTCIIFSVAPLEFLKKKRLKGSNLVMLWVEGVQVLGSLNKGLDKMHKQSKEGMKQQKQKFIENESTLHRDKNLPHKIISHTKLFSFLLNLCYQKYIFTSVTLFTSLSPIY

SEQ ID NO: 927932 - protein, 232 aa, Homo sapiens
MPVTKLGRLVKDMKIKSLEEIYLFSLPIKESEIIDFFLGDSLKDEVLKIMPVQKQTRAGQRTRFKAFVAIGDYNGHVGLGVKCSKEVATAIRGAIILAKLSIVPVRRGYWGNKIGKPHTVPCKVTGRCGSVLVRLIPAPRGTGIVSAPVPKKLLMMAGIDDCYTSARGCTATLGNFAKATFDAISKTYSYLTPDLWKETVFTKSPYQEFTDHLIAKSRDGQIPAIKWHSICI

SEQ ID NO: 927933 - protein, 150 aa, Homo sapiens
MGLGAVEQGAVLVGEAGATQEPTEVGEAQAWRAAGPEPCPAGRQLRPSEKLSTAAAGAGPAEPTSTRNSRWPASTARSPGSPPRLSLHTSPQAEGASSSLGQPRKGLPQCSGGLKGSSSAAKVGAQAEEARRASEGCEDCQHAVTSQREE

SEQ ID NO: 927934 - protein, 175 aa, Homo sapiens
MYASSYPPPPQLSPRSHLCPPPPHPTPPQLNNLLLLEGRKSSLPSVAPTGSASAAEDSDLLTQPWYSGNCDRYAVESALLHLQKDGAYTVRPSSGPHGSQPFTLAVLLRGRVFNIPIRRLDGGRHYALGREGRNREELFSSVAAMVQHFMWHPLPLVDRHSGSRELTCLLFPTKP

SEQ ID NO: 927935 - protein, 141 aa, Homo sapiens
MTAWILLPVSLSAFSITGIWTVYAMAVMNHHVCPVENWSYNESCPPDPAEQGGPKTCCTLDDVPLISKCGSYPPESCLFSLIGNMGAFMVALICLLRYGQLLEQSRHSWVNTTALITGCTNAAGLLVVGNFQVLPLLPCKP

SEQ ID NO: 927936 - protein, 158 aa, Homo sapiens
MSFPQKFEAGLAGWQCPAAILGLLPRSMAKGKGEGRDAGQGMTYSGPTEYRIWTCFSAFMLLSPEHSGILIQAVDNFMEFLKAFVTDTRCQPHRHDQTCPPPNTTVYFKQQGRGRALYPTLWPSAGADTPLPLPLNGQNTLPIAAPNCRGDWEMQPWF

SEQ ID NO: 927937 - protein, 176 aa, Homo sapiens
MVNSVGDVFNEGHRVSSALYHPKVELLKVTHLVRDKVKIPLGLPVANSGALAFGQRERQHVEEKEPVWKPVARLGALLYLHPAWLIIPIQSLRLLLPHGISVTFSSIWGEVGTGLRISMSGSFGIQPRCDFPRHSLASLRTKFSPARDFSHNLTSHGHPSLQLHPSLGCKGALAAG

SEQ ID NO: 927938 - protein, 221 aa, Homo sapiens
MPRKTGSGVDPQQTPADLQQRGLTVRRKTNKQKAIASTSTKRVTTEKLHPKKGVNSNSSKLKEHVLTQCKEAKNFDKGLEELLTRITSLEKNINDPMEVKNTARELHEAYQVSIAELIKQKKGYQRLKITLMKESVKIRLENKGMKRNEQSLQEIWDYVKRPNLCLIGVPDTDRENGIKLENTLQDIIQNFPNLARQGSIQIQEIQRTPQRYSSRRATQDT

SEQ ID NO: 927939 - protein, 191 aa, Homo sapiens
MSACGSCHCLNTFGGPPNHKPSIKPNHHSPAKAGYAIVSSTSIIEATALPPSTTSQQVKLIALIRVLTLVKGLLINIYADPISCTTMLLYELKVFLTTQGSSIINASLIKTLLKAALLPKTARIIHCKGHQKASDPITQDNAYAHKVAKKAASVPTSIPHGSFSPHLVTPTYSPTETSTYQSLPTQSKWRP

SEQ ID NO: 927940 - protein, 173 aa, Homo sapiens
MTVSQTFLVFDDPDNFKEYWQEAEGDWRLEIRAEGGTEEETGTKRAQQGQVSSDKTSPAGLTGGNKTKCRLKVCGVSSAAVNTGFNRITWFLHVCIKAFAVRQAPSSFQLLNGGPMVRAGWCAERAEPAERDRREQRTGKNERVILIYKQQLSLALPFKISLHNEKNKCYFAL

SEQ ID NO: 927941 - protein, 382 aa, Homo sapiens
MTTVSLQNSTPLTRTCFRKWLVTENALPLTLNDLSSFEMKEADSHNMEVQGGGASAVIEAAASYPEDLAKIIDEGVWKKLISTFMDDFERFKTSVEVTADVVEGTREIELEVEPEDGIELLQSHDKTSTNEEFLLIYEQRKWFLQLESIPGEVAENIVEMATKDLEYYQHFVDKAVAEFLLKEIILWEKCYQTALHAKEKSFVKGIIAGLLTGACGARAVTSIWHRHGWLLRYLAWRERFGDTDSQGGVPCDYRGRDWSNTAASGGMSRIASNHQKLGRKRKTPLWGPQKEHDGQYLNSGHLASRTQCKNGLIQKAFTGKFRRRVGDSSYQRYEVLFTREYNTEDINASNSTRNKTVSHVYFASPQFLISCSAWGGCSANTD

SEQ ID NO: 927942 - protein, 160 aa, Homo sapiens
MEMSLQPRSFVNIRKEDSTNLPAHSSQSHSLFQQVLNINDHFYNKGREWLFAIELPNHLSCVRFSTAARFTIFSSSFYHCENLQREENPPQALLGVNIGGNTSPKTSFALTNCHGSPLGHFVPSKPNRAMGSKLAFASVARAVVLMLLELHGRCAASGIQ

SEQ ID NO: 927943 - protein, 143 aa, Homo sapiens
MHNRHRHIKWLAESLHWLPDCATIKDLKDAEVVIPTTSPFNSPMWSVQKTDGSWRMTVDYCKLNQVVTPIAAAVPDVVSLLEQINIFPSTKYAAIDLANAYFSIPVHKAHQKQFAFSWKGQQYTFTVLPQGYTNSPALCHNII

SEQ ID NO: 927944 - protein, 141 aa, Homo sapiens
MSPNGDMLPGSCVKERIDYLKLGAWGKKAGRHIGLTESLEFRDLLAVLALNCAFTLSKILILASLQYLQGEKRYKDGLLWRTKTSIQSNNCFWYAQNLRCLRRWEALQHYAVGLKAPDEIRSFLMLNRIWAPLLNGPGSLF

SEQ ID NO: 927945 - protein, 281 aa, Homo sapiens
MRSWPWKNSAIKAFPALIKWLDPRAAVAKAWLRFVLTLRGPAATVHAYFCQGSTGSESTPETKYPLRERGADFSPPSERKRSATALITICCHLLATGPRHSMLETGVWLRVSQAPGSCTQMQTACVFSKEVTLGGSTIIPFIKPHKKVDFIKEIYFIHALISQLQTLLELHAAWCPQSSQSRPLTAYVRWCHPSAQNAAEAPHLTENESRGCVLRPPSLGCSLTSSPSSFPISRPAPACQLPGYARDHQSHSPQGLRCCSLCLQCSCTDICLHLLQTPPPQ

SEQ ID NO: 927946 - protein, 149 aa, Homo sapiens
MGTGTAHFLPFIFSVLGTNIKIKLYIVHWLNSSIVLAVDHIKTGTGNVDQSQGQKLSHRTRTGPEQDCVTTLGREYEKLAMEEFCHQSISCIDQVVGPQSCRGQGLASTQRKREIVKQDGGKSIPAPGRNNTKQLFTDCLLDDKLSAKS

SEQ ID NO: 927947 - protein, 150 aa, Homo sapiens
MKENVVLVLTFVGGSLENHPPPQQQVGVPGKGWFVGGGGGGVFGGCSPFHSKHAWEATLPKAFGQSSVNTASQVVRPAGTEPSDPGGESGMDEFWNRWALEGPDAGDGMQRFQVVTPAGRAWVRTATRAGASLLRRCLRKPSQPGAEENL

SEQ ID NO: 927948 - protein, 160 aa, Homo sapiens
MSPNKVESDGHVVPPQNLGKVLMQDFSHPLHLTHSRGAPPTWPATLALGPLWEGTREQVSKGSSQQLWALTQEQASCKAHDQTRCEDACDPEAAERVLQCSFSSTIPSVMDGGMLAAQLAPCLVAWGSCPPPARARTTVAAFSGYPYLVGPELFSSILKE

SEQ ID NO: 927949 - protein, 150 aa, Homo sapiens
MGSEPPNRVPTGAMPSEVVRRGPSPSSRPQSGRSTNSLHYDPGKTADTQCQPMKATRRGAIPCKATGAERPKGMGTHLLHHYANRSKMYLGVKFKDKLSLGKTERRKELLKDQRQAKCTGWCCLETRKPSRDLSYDESVIGNGDLPLCFP

SEQ ID NO: 927950 - protein, 167 aa, Homo sapiens
MLKQLCKWVTGRGWNSLEGSEEDRKMWESLELPRDLLNGFGQNADNDIANESWAEVVSDGDEELVGNWSKGDSCYALAKRLVTFCPCPRDLWNFELDRDDLGYVAEEISKQQSIQEVTWVLLKTFSFIREAEHKSLENLQPDNVIEKKNTFSEQKFKLAAKICISKE

SEQ ID NO: 927951 - protein, 127 aa, Homo sapiens
MSYPSNSIVTLQPELSNISWVLSDSPSHKAGCAQHYSTIIWSSGYVIEAKQALKAQVIQRSDTNAYDFPSCCYTAFSLPACVYSLIVAVSYDKLTEASLKDGKEGKSSQWAKLRTVYLVVHFTWKDK

SEQ ID NO: 927952 - protein, 143 aa, Homo sapiens
MRWSPGLHSVHNLRRTCPPCGNWQSGNCPARGVPALRPNWIPCQVQNGEIISLLPDFLPSGELVPFCTPSPISNLGLLEKECEHPHKTYGPVESYLNLGNIVARLYYKRKYFFMLRWFPTKSNAVLENVIQRAAFGNQISSLN

SEQ ID NO: 927953 - protein, 156 aa, Homo sapiens
MVSWNSPGPCYSVQPQDMAAFIIASPAPAVAERCKGTTWTITSEGASTTPWKLPCGVEPVGPPFSRPQNGRSTDSLYRAHGKATDTQCQPPMKAARKEVVSCKAQLSLPARVSVRVIRSPAAKILEVHGKNVPFLAFSAYSFTRSCWRPGSSPGAR

SEQ ID NO: 927954 - protein, 143 aa, Homo sapiens
MLSLPLPLSPQQALVYDVPPVSMCSHCSTPTYDSLERCLLTLQGNKNGILPISSHELSQFMSFGLWASWDIWLWNGRNTLADFLIIHVIYFLLSKHCDEVGAVCLWTWHVHNGHGWSGAMKPLANTMISSLSKSILRKICSKI

SEQ ID NO: 927955 - protein, 127 aa, Homo sapiens
MSISETSSAAYSLIWLLALLHLASPFSSLKRMLPNSCSSKQLDHNNHAMIHQDPRPHNILSTICLKEDSKFFSFWTLGLSPVICQGHSGLQPQTEVCTISFPTFEVLGLGLVSWLFSLQTAYCGTSP

SEQ ID NO: 927956 - protein, 144 aa, Homo sapiens
MGKCSRWWQKRLQEEQWQPWVPMCPASSVPHVRERERERERELSPLTTPRLACMAGMGSRPVVQAKSSLPGQVGGKKSVDRAKLEQRPNWPQRFLAGEMTPQGSQDNVYCSTVFKKHSVIWAYLTACDTPLRACTGNNHFMILV

SEQ ID NO: 927957 - protein, 142 aa, Homo sapiens
MSQEKELHKTMSSVKAGIGHLDVHDENALLRLNSKMAHKLAQNPWYKIQVPLSLLRVPFKEMMASGPYAKSESDSHEQSFRLQPTGQLKLIILTTVNKNGYFWEALLFSHKETQVNEHEKYGNHCLPSSRSLGPPNSSQTGF

SEQ ID NO: 927958 - protein, 134 aa, Homo sapiens
MGPLDGLHVRAGLRERYWIASSISPGQVVLQSMFPGQMVPLAWLHIEVGSQAVLCDWVGLHAVRSSWLGSQLGGASALALWAGKTTGWALQPGDVGIEDRTRRKSHKITTSNWSSEEIKIGQSISMDSQLPKVF

SEQ ID NO: 927959 - protein, 146 aa, Homo sapiens
MGKKKDCFLDLDCTPNSARLVPGETSILCCQQEQLKERSRNTGPMRAAGPRCRRRLWKVTEGSSVPQRSNPICGNCLSGFYADRINVASQFPFPTFCDTEDPGCLRKEDSLSPRLYPPVKTSRFPGKQMILIHESCLRIAETFRVL

SEQ ID NO: 927960 - protein, 134 aa, Homo sapiens
MCMRVCMRLCACTRAKATCEVTDREQIAEEAGGKYVSVKVHSHPATPPGPTSQETQFLSGHMAFTETWFATTKTCHYRGLRQLPSRDSIETQNYALQNRETSLELRELPSIDSNGQPLDVLPVFPKLNSAAVGS

SEQ ID NO: 927961 - protein, 210 aa, Homo sapiens
MEECEQSPDNIIFIHPNIEHNSMKKMQLLPVILLGWAAGVVDWPVALPPCPEITRHSSRKPASCWSSGDEAGLSSIPTTRCHVTQAEPIRESHPGESHWWKDTLSHGGDTVSPLPVQNEKLAYKELPTFRGYEDDKPLEKGAKNEQRNKIIRQCNALGEKPLDTSRNDFEAVGVGFKDKSSSSGPRKFSISSITSTPTLSFLVNSENIQQ

SEQ ID NO: 927962 - protein, 161 aa, Homo sapiens
MKPFQPRYVQFEVVPREALAEDTGDVRNEAGFKTDDNNGLGVGLRDTTLLLSWGQCVHMFQPSKERISWPEVPPWTYRIGNSGGGAKNLSSNKPSSDSNASSSLRTNVLEPCSSKYRPLEAYYMHGIPGRPSGLLNQNCSLTRSPGDGCVHLSLGSLVIFR

SEQ ID NO: 927963 - protein, 364 aa, Homo sapiens
MGQSQSGGHGPGSGKKDDKDKKKKYEPSVPTRVRKKKKKTKGPDAVSKLPLVTPHTQCRLKLLTLERIKDYLLMEEEFIRNQEQMKPLEEKQEEERSKVDDLRGTPMSVGTSEEIIDDNHAIIQGSSGNWLLGPAQPQGACRDGVLMDDTDPLVTVMKMEKTPQETYANIGGLDNQIQEIKEAVEFPLTHPEYYEEMVAEEHELSIMFTDEIGAIGTKRYDSNSGETVDLALIRPGRIDRKIKFSLPDERTKKRIFQNHTSRMTLADEVTLDDLIMVKDDLSGADIKAICTEAGLMASRERRMKVTNEFFKKYKEMFFIRNRKAPLRGSISSEPQLPSGKWLGDSSTPEKDEVGGVAQRNPCSR

SEQ ID NO: 927964 - protein, 169 aa, Homo sapiens
MQVWKYTVGSSTRIQEVKEGEMAHILRARTQGSRGPGPKIPKQSPSPSPSYSLCPLRLSPGYPESMNLEQREEENELQRSIETGPYSRGKIKVLTGWVLIRRLWEKSTSNDFQVFDKIQFLGVIGLSRKYQCKNKSKGNNENEYEGKRSSGWVMALYCLQVAHLKQNET

SEQ ID NO: 927965 - protein, 153 aa, Homo sapiens
MIETVTQVFLKVSWVPGTVPNGKVSPGQVERGYTYGNRQVSLQRSSVGAQCSLGPQSRDSQLNEACSEKCYPAQGRDFMVKLKPSVEAENEEARNESLCAENQKLLDVGAKSTEQEWSEIELERWMGPDSDESHESLDWHGLCPGWTVGIYGL

SEQ ID NO: 927966 - protein, 148 aa, Homo sapiens
MCLLMTATLKGSWKAGCLCILASWLEAPVEDRILLFCCMCGCGFGPHWTSQYWLQFSLVSEQNKLKHSLGLERNCLEELMEKYKFCLFAYLIPVLLVYLHLLALDIVERSEETPGKALSESASKWTRRRSFQHLCISPPITTLHKVSG

SEQ ID NO: 927967 - protein, 143 aa, Homo sapiens
MKEEEFSDSVHNTFDHMWRTKEQNEAGWLLLSSADKVMKENEELRDSVSRLQKQILSLKSAKIALTESLISYREKAEIVGKQTQALIMVTVQWVKGNNQTFWELLDTGSKLTLIPRDPKCPCSPPVKVGPYGGHVLNGVLAHI

SEQ ID NO: 927968 - protein, 200 aa, Homo sapiens
MGSHGRGQVRPYGFVGNSLPPGCFHGMALSVCGFSRHAVQAVSGSTVLGPPDCSNHCLLPSSNVTSTFSGIFSAAPHFWYQFSVLVNFHATDKDIPKTEKKKRFNGLTVPHGWGGITIMVGGKGQQAKRKRACAVKLLFLKPSDLMRLIHYHKNSIGKIHPHDPSISQPGPSHNSGNYGSYKMRFGWAPRARPYWQLTKW

SEQ ID NO: 927969 - protein, 135 aa, Homo sapiens
MGPWQVSPTLPFPHGWGVLRQCTIMVEGEGEARTFLTWQQEKEVQAGKMPDAYKTIRSSISESSCCSTSLLKFGVASALDFGQSKMCVVISHCCFNLHFPDDIQAEASFHMLIRHLCIFFGEVSVKVFDPFFIDT

SEQ ID NO: 927970 - protein, 145 aa, Homo sapiens
MVNFGAMLSAVRTSCSPPESLTHGVRQAYRNHKATGNIIINIQINLKECYTFIEGSEKQITQFVVTCCKRHNSRLSCFFQMVDDVANQLTLRLKKKARRMGSVVTIDEKATSIFYVNRYRKIALSGCANAHTLSCIRVPVVQYPR

SEQ ID NO: 927971 - protein, 220 aa, Homo sapiens
MPLNCMKMVKMNLSVGTLHTLSKLQAPDLIHGSPTSQLENSVWLIKEQSFRPYPLLLPAPAQKNDCMFETLKGSHRTSCQHKHTLPISKLLLSTSYSQLIAKKQSKQMSSGILMTQIRPHSEQQEHDEKWLYHLLFGPGILPTPLHPSPALHTSKVGCLGCLLSVASCLDSYSSFDLSNLIIRPTMGLPLTSHPADPLNVGIQFSLQTLTQALEISTVVH

SEQ ID NO: 927972 - protein, 146 aa, Homo sapiens
MLRLWSSGLATGEYGVAFSGSSHRGEGLCVWLKEWTLSTGQAFQGASQLQCKPTALAGRGPVPHMALHGTQEQWQVVMEPVLRAKSNHMLLTDSDGLTCPKGHRKRDDKYIPKCMESGKPGSLAHQLSRHMVWSSLEFLGLCFLIS

SEQ ID NO: 927973 - protein, 148 aa, Homo sapiens
MLMPLCGLLWWWWCCCSGWYCYGLCAPAPQMLRHQGLLKCRCRMLFNDLKVFLLRALLKRPCPCTATPSPPVWRPTTPFRLWAPGDDWGGPATEPPASLLSSASSDDFCKEKTEDRYSLGSSLDSGMRTPLCRICFQGPEQVQDYMIC

SEQ ID NO: 927974 - protein, 144 aa, Homo sapiens
MCAEGKLSFPIYEAQGIGVIKGAPFGSRGQMGLVCGLLTVRWLISPEPEAACRLMAKPISQHCLCSRQGLAMCGCVAVWLCGCVAVWPCGRAAVRLCGRAAVRLCGCAAVRLCGRVAVWLCGCVVVWLCGCVAVWLCGCVLACM

SEQ ID NO: 927975 - protein, 152 aa, Homo sapiens
MGQESAGPNACAHIQPSPLLDMLQVQALRTVGLPISVTVGWLPVGSNLFQKLSVRTRNFQTSEKAAAEGKKPLNWSVNTEMSINRMDESIVGEQGILNDGPSETAHGPRKNLAGVNKRKEGMDVRLETTDFEHLDSLRSFLGGKAKSRFWFP

SEQ ID NO: 927976 - protein, 150 aa, Homo sapiens
MLRGIDFKMQLPVNGLGEKTGEQGLVEMKYCEELMWGSQCTTRQFIGSPRFPVSRHPRAHFADGQEAMACPACSGNLPCWSLKLPTLSAFGANPGICTNLHGSGSVCLPSGALLLTARFSLQASVERKRIYPRVAGQKRRNRFRQMKCSG

SEQ ID NO: 927977 - protein, 163 aa, Homo sapiens
MQPCGKRRSVNENGAVGENGFSYEDNSISDRVLKAVAVFKTIRKTEFPEIDLQNDFVWPEMFIEQRPKGFGVEGTAFCLTLNFIDHETEFLRETDLEGEFAPSFVEFLSLQLNLPSHLPFTLTSVWFRQYVTRPPTVAAAAAAAGLRLLSRSTSPTTLLLFFP

SEQ ID NO: 927978 - protein, 140 aa, Homo sapiens
MAAKPLSTEELHFPTISREECLSAPDQTSFPGEHCGQLEKVFTFLAKQYWDHHIRNNHNLTPVMSTVNVVDVNDGASSSITTEDAGTNSPDDLHTNIPGLFVFTLLSCWHHNFVVTNIKNVTSLLNPSIQRVQIQAETDL

SEQ ID NO: 927979 - protein, 266 aa, Homo sapiens
MNTAASVFCKAFPHRLLETLSLLQEAQRLRPRGHQCHPGYRSQERRSQCSKEPPGSELYTEPLQLMEDTYHYDLPGSSSLLKFPVPWLQNEITIPTFQSTSRLLVSTLQQVVSAKVFSMTVAAGSIITCTCQQQQQCGKVHASLLQQGASRHWSDSGDPWREQVAPCQINSHVLPVTGGQEQVLVYSSPMWDFQLLSPSAQLLCLPSVHSQCLSSEDLLGACQSSRGLVPHFCQSVEQETSRYSSGFCPRKKSSYNETFSDHQNYS

SEQ ID NO: 927980 - protein, 135 aa, Homo sapiens
MCMGYSELSCSEKTLYPSTHLSCYCTSSVLEADPVKSHENREVVAPETGKGHILQKVQVTTFHSKRKGLFILLAFQPLLCKFSHTHTPTKRHNTCKKESSPLELKCLKKSYELNVLEEIPSIAVERRQLTLDFEW

SEQ ID NO: 927981 - protein, 134 aa, Homo sapiens
MIRSSHEPLKKQAECSRGGLCSSPGFVVSFLHVLEQTTYCLSASVSSSACTDDHNPGNDTTLLRKYTMQACRFEPPRAPGAVQSSKGRWEKGSSGFEGVFCSPAEERLCILCVLVHLLEDVVVMALGSFQSTIS

SEQ ID NO: 927982 - protein, 146 aa, Homo sapiens
MRTPMNLDKATVFVGNSALSTGQPSPMGSQTLPFIRILKQRPQATWPSDHSKKKPWKIPSSPPHLPEMPKKQFNAFSQQFLRPAYSRHEIDKSNSAFIWEHMRSAQLLASARRDVESLPTGISGGILTPSLLLCFQNFLKFYFVFN

SEQ ID NO: 927983 - protein, 150 aa, Homo sapiens
MAHVYLFSCILFFLAYPLAIRDESEVGWELALWQTPLLLLVLPFASSSPYSRKHWGCSAWSSSLSFLGHKLLHKGVRTGFTSMWSLNHRHSRKFLLCVPVSLEFIADLICSNTATGSSVCNSFGRFRFNQEEDESGCPFLSTPRLFHHPS

SEQ ID NO: 927984 - protein, 135 aa, Homo sapiens
MWGDLWVCGWCQGSLDGAPGQPAEGGSLDGRCSGLTAGLQGRKKCQAELAGREEERWDSDRSLKKKHSEKSLCSLRYAAGAEPASLLTPSGNPHRKPHLVASHWGRFRLALLLFVLLSPSAVNPYIMGFSCSSNL

SEQ ID NO: 927985 - protein, 126 aa, Homo sapiens
MRKVRHTEKLHKLLKIRKLSVDPGFKGRHSALLNILYASFLCDKNKDVFVSVFVLLHQVLIQETLSCLLYTGLENLLVPSILDKEYSSCVRCFGKPTQIAKFAQCSPVQLLHSWWLSGHLPPPLPC

SEQ ID NO: 927986 - protein, 166 aa, Homo sapiens
MRPYSIFVQTRRRPIPWADQPQGHTAGLMHSVFVEMIDEIFRCVTEWETVATSLAVTLSNRSSMEPQEPYLCPRCQHCPCTAGPSGGLRGSREPLSGKGPLDYSAGVKNCTPSPWPQLPPQLGCRYSVLGLLPASREHRKPTLLGSKWPFPPGLGSENEHIASVCT

SEQ ID NO: 927987 - protein, 161 aa, Homo sapiens
MGNCGNQPCSPTKTPPTTNATHPFLPSTEKGEKPRFQPWEHQTLLGRQPVLTLSNRSSMEPQEPYLCPRCQHCPCTAGPSGGLRGSREPLSGKGPLDYSAGVKNCTPSPWPQLPPQLGCRYSVLGLLPASREHRKPTLLGSKWPFPPGLGSENEHIASVCT

SEQ ID NO: 927988 - protein, 144 aa, Homo sapiens
MGQDSRAQSRLLVSSGLLSASFLSFCHSRVPSVSSCESVSSTPREPQVTFLPSFFPQKAGAHSPCAYSSFSPGHLPSWVLRRGQRTWLLLGGSPGSSGVSVLRLMIPICLSLPGSQNFDTVVRGMRASFQFWHRHFLAVYHARY

SEQ ID NO: 927989 - protein, 171 aa, Homo sapiens
MSRYPVLAEHRSFVWSSRIPLNARSADYSAPGLEEEEGELEKGARKLQGGPSQHLTAIKVQPSSATPSPSSSLSSLTCGSQVKGRCIAIPAAASASLVPGNPATSLLLLAEVPLPPGHSMSQLPSPCLHPFPISPSPVKPSVCAPPSEDLRGFQGWSNPVCPQTEGTLARL

SEQ ID NO: 927990 - protein, 157 aa, Homo sapiens [sequence omitted]

SEQ ID NO: 927991 - protein, 137 aa, Homo sapiens
MPRPRSPLHKSAGLVQQPPLTLHPLAPSTHNRSGFKKNPHLPALPGAQKMSFQPPGLLASARAHALWAHVPEGSRAPGGGALLGGRGHGSYGIQRLFQCKEHGYASVSDSPRERVKLLTLKGKPAAQLCMGAARSSS

SEQ ID NO: 927992 - protein, 187 aa, Homo sapiens
MQAVRAVGESRQSQASPSSHVIRRANLTPTMPLPTALSLFPGSGWRFPSFCGLFPAPLAALQKDPCVARQKRLAWGPSEFPGHFPLLPLPLYFAQLSKLTQFQRCTSTNVSEKKRSSPCEEWWEECSRLWKQHLERSWIRKEPRHTRKWRTDNVGRAEYTKSGIRDDAGAGGKTKPYKALKTDQGIG

SEQ ID NO: 927993 - protein, 309 aa, Homo sapiens
MRSDDYIKNGSFPEQAVFSCLPPRETCLSPFAMIVRVLQPRGTPAAEICLSIEVPNVNHEDNGENVSKTCQRPSWQPLSSQAQRFRKKRWFCGPGPGSPCCVQPRDLVPCVPATPAVTKRGQGPVQAVASEGGSPEPWLIPCGVEAVGTQKSRIEVWEALPRFQRMAVQKGNVGLEPPHRVPTGALTSAAVRRGSPSSRPQNGRSTDSLHCVQEKERALSINPDVDYTPSEDRAKYGWFLWTKCGSWVPLGSFPRKTMGSQKRGGLKDDRERRGAGDNIVRAGEEEDSHSGKRGPEAIHDFSPTVGFPA

SEQ ID NO: 927994 - protein, 213 aa, Homo sapiens
MLLIGFYSQRNLMRENMCVDVDVDVDVDVDVDVDVDVVVDVDVDVDVVVDVDVVVVVDVDVDVVVDVDVVVDVDVDVVVDVDVVVDVVVDVDVDVVVDVVVDVDVGVGVVVGVDVDVVVDVDVDVDVVVDVDVDVDVDVDVVVDVDVVVDVVVDVVVDVDVDVVVDVVVDVDVVVVVDVDVVVDVDVPCSKWCLLFSVLTTCSPHKNLERQET

SEQ ID NO: 927995 - protein, 144 aa, Homo sapiens
MYPEEGGCDTSNITTSGGTHAWTFWGFWVKMFDCDFQKSFEMTTGFASQKLLKRIVKRLNREDGDKPGAWNNRPISTRVIIFIQGEADNGRGFYPSHSLLLISLDLHQTMNENKTHRSPAENSTKEKEQYEHEQQKIPEKKEIT

SEQ ID NO: 927996 - protein, 135 aa, Homo sapiens
MPKTVRLLRTATPAWGKQLLDALQDVWTLPLWENDSSVSTNNNISSTHATDIPLFSQCFGECLLSERGTGFRWLTFCLASSALMFMSGVSVYICTIFIRLSYQCNINASSNGFRMFFFTFSALEKSVPTSTLRKI

SEQ ID NO: 927997 - protein, 165 aa, Homo sapiens
MGLPLLEFFSLEVIKLVYFENQPMQNKNLPGEETTPPVGLRQGTQFPGIGLLVSHGATPPQREVLLRSGAAPPPSPPPPPPPSPPPPPPGCLLTCLLPKYSGAPLSTELGEQLRGDPGGHVVLGTFASHMSQDASVRPLLSVLLIICKPSTNELMPTLALSYQNQ

SEQ ID NO: 927998 - protein, 161 aa, Homo sapiens
MMCFPSEILHISSTTCLSALSGNKSGPSSAGLLEFAGGPLLTLFARVSPADATEEQRLLPAPSSGSFIPEGYLPDASQSSPVWGVCQSLLDALPREENLERQPGYSALPPVDLSLLGSIGVRAAEQDHLVPWFQPPFQGSEWFCHIGIPGTNGVQGKKSCS

SEQ ID NO: 927999 - protein, 134 aa, Homo sapiens
MSKINIKSWFLDQFIIATTQIKGYSLESWTGGFLVCWKAPSRDFVQGLTGMDIDFSFQVNLTAILSGVLGTHADKKMMYVFVGERQDSRQLLLVPTKPHDCYTKMEDVIACTYTYADLKTPSKWRESLLPTEHL

SEQ ID NO: 928000 - protein, 167 aa, Homo sapiens
MLEDRKGQEVFKDNSSTGVKSEKCGEIGVKKPAKTYQNQDAAKSNLWSSSLLHSHQCHDSLQMPENCPIWSKRERYECQEVALYGLKGRAGMHNEILKAVPPCWKDTGPYLRSFGGAFTISYPMRELRYNSYYSGTREGGTCASCTEPIQQPDMAHVKTQQHLKNDG

SEQ ID NO: 928001 - protein, 173 aa, Homo sapiens
MLFGKPRSTGFPMSKTCQMNEWMKYVGAWYPYYEMLHLVRVGKDTPVDSTVLPSSPKTCEMSGHDIITGLEDINNVRGIQTCPLSCGSLNLMKKTDKDNIMTQIKCKLVESVGKERAVFANETEVTFWDFWESLQLATGTLEWNTCSWSPEGPLKVSNYSEAPMLERSQNLPA

SEQ ID NO: 928002 - protein, 187 aa, Homo sapiens
MGASLSHDSEGIQCQLSTYGALSQGDGSFISKPLTGAAAFSFRDALPREEKSREAVWLQLSVVGSAQFELPCGIVYTVRGKLPTQASVIMDAPPPTKLQHPRSTSDCCAGSKNFKPVNLSLLGSLGLESAELDYLAPWLQPPFQGSELFSLTGVPGTTGAAAVNTFEFKCFWQMLPKMAPNTGNAQS

SEQ ID NO: 928003 - protein, 172 aa, Homo sapiens
METCILFVCLTFGHATLHLVNHKTFAGENLLTSSRNGVSQKMFGKHCIRGSSFGLFLFILDFEEDRKMWESLELPRDLLNGFDQNADSDMYNEVQAEVVSDGDEELVGNWSKDDSCYALANRLAAFCPCLRDLWDFDLERDDLRSLAEEISKQQSIQEVGYKCFWKICSLMM

SEQ ID NO: 928004 - protein, 189 aa, Homo sapiens
MNTKPQKQPQASLLRERGKSIPLTDWAHLDGELSGILDLTLSQTDYPCSLGQGLVVWIEDQTSHNIPLSQSLIQSKALTLFKSMKTERGEEAAEGKLEVNRGWFPRFKEVKISTLTGVWKKLIPTFMNDFEEFKTSVEEVNADVMEIEGALELEVEPEDVTELLQSHEKTWTDEKIQSWWVSGWVYRRC

SEQ ID NO: 928005 - protein, 186 aa, Homo sapiens
MVRMDIVRKEEECGFFQETNSRFVEKINAVDKPIARQRKKEKMQITKIRNESKDITADLLEIKRIITEYYEEWYDNKLDNLDGMNEYLGTHKLLKLTQEDIEKSTNLLQCLEVELPLVYDQQIKLSRGLTKARSDVKNHGRCYSGIVQRGEKSIPMRQVHQRALTLSLPAEHCEADLRQTQPMEEC

SEQ ID NO: 928006 - protein, 140 aa, Homo sapiens
MLWRKGDFTSASTPRELTHTEKVSGSLFPSLCCRIKETNSRFVEKINAVDKPIARQRKKEKMQITKIRNESKDITADLLEIKRIITEYYEEWYDNKLDNLDGMNEYLGTHKLLKLTQEDIEKSTNLLQVGRLNQDEKIIL

SEQ ID NO: 928007 - protein, 191 aa, Homo sapiens
MLEGFVLGPSGGSSEQITPDLGLQILCYRDSEEFKMQKQIAFKNLCDKTQMEEPCQSRSPSKIHNTHGLRAPSSAETAAVSVGSWNITVCLEPLEDPPKKVRHKQSQNMNIKIWNPSMWRTYCMSISIKNFQRNVTSPNIQNKESETDLKGMKICDLANKEFKIAVLKKFSEYQGNTEKLFKIIREIYQRY

SEQ ID NO: 928008 - protein, 163 aa, Homo sapiens
MCLYVLIVQLPLMNLREKAVSFPPLRMILAVGDFLYGVNCYSLLLCAAEDPHSTATATTVPQGILPGYHQCSIKAQGPFSQLVVNVTRPRFTLQGSKLALLSRKGPEMSSKSQCLALVTLRDHLVFCPIAAARQSHFTLLSAFLKQKQCLPIATTAVNMMSDT

SEQ ID NO: 928009 - protein, 186 aa, Homo sapiens
MALEVSLADKDAVWILWQASIGEPQWRPLGFGSKTLPSSADNCSPLERQLMACYWALVETERLTMDHPVIMRPELPIMNWVLSDPSRHTMGHAQQHSPALMASWGVPYDQLIEEEKTIALFMDGSARYAGTTRKWTAAALQPLTRTSLKDSNEEKSSQCAELQVVHLVVHFAWKEKWPDVHQSNVG

SEQ ID NO: 928010 - protein, 151 aa, Homo sapiens
MGLWLTSSVSYGSDLYGSIQIGRLCGSNPTAVSRGECLQLLKPQWFAVYRQLVLTSSIRPPSLSQGQKEFLEVALSREGSQKKDGFPLESGHLAWRTALAKLCGILLVNGLPSGRPGAVRMLPPGVLSMISCLCLLPMCSSQRPAICVSAC

SEQ ID NO: 928011 - protein, 142 aa, Homo sapiens
MTVTFHWFFHPCLPQKMQTCKQMNEGMPPLRKIQILYEHSRRYGLELELMFKREAEHKSLENFQPDDATEKKNPFSEEKLKQPAEICISNKELNVSHQDNEDYVSRACQRPSQQPLPSQALRPRRERCFPGLGPGPLCSVQT

SEQ ID NO: 928012 - protein, 159 aa, Homo sapiens
MVTDISARRNGKCRKVKEAETEEFVVEVANRKLEYFPEWKGFTNADSTWEPEDYLECQELIETFLNSQKAGKEKDDTKRKCLSDSESDDSKSKKRDAADKPRGFARGHDPERKIATERSGEWIFLLEWEYSDKADLLQAKETNMRSHQIVIASYEERLP

SEQ ID NO: 928013 - protein, 161 aa, Homo sapiens [sequence omitted]

SEQ ID NO: 928014 - protein, 145 aa, Homo sapiens
MECLFGMIPFGPTDSTCQASISCPRQRTEEAHAVETPQSLLELTLQVLINNHQALQGAACPPGCRCGAMRSPPALCFVCPVPYMRHSYNVYDAHSRDIRARLPQLVPATSRPACPAGAIAIMEAAKAPSSRSPRYLLVIQQRNRQ

SEQ ID NO: 928015 - protein, 141 aa, Homo sapiens
MDGDKTSAGHSECQRDCGPQPSAVCWCPSSLFPDHSRVSHRPSEQFCSVALADPPENSAQNLFSPTNDLENVLPDSPAEASFTWPLRSPRNPTGSSHHSFQCLHLYDSILCKVESSGELLETTDVQPHHPQPDIPTQSIPK

SEQ ID NO: 928016 - protein, 154 aa, Homo sapiens
MVNEQRYLSAQRKGDKGERTGKAVIGCHFYQSSGYKRAKTAVNLAEFGELDWRQTSLSASSKVRVEGALFLDECLDSPTGDLASLPGSGLLLVVVCTESCDVNHLWISQPWVPTPVLVEMAGGLKWTLPHSRPTESETPGVDSAICFDMIFRRF

SEQ ID NO: 928017 - protein, 139 aa, Homo sapiens
MTHSHNSSKQECPAEGQSQIDLHEAHWSLFVSVHPIFWKLQQECGPNLNTGLVAGVWDDGDETTKVVRSQMEKGLGATLMTQLYGYTKIQMVSENTAFSCALCEQREIQTALETDFFPILVTEETIGSAVLPELKFLNS

SEQ ID NO: 928018 - protein, 153 aa, Homo sapiens
MTALEYRCGYQLLGCDQYLLSDSQGPWTPCEACTSPASIPIPERVTHLITNKNHNDIWRKRPQNKGKGIFPIKENKTGGLHFHFAQDPTNCVPGLHPPTAENKQANQQTKPSIPALSHALHSTLDRVISMHYLPFSSIQSSAHSKPTLADTIP

SEQ ID NO: 928019 - protein, 142 aa, Homo sapiens
MLPDSFSSRFTLLENTKSILGRGLLGHLWVRRKLRQWAPAAADISVRSAGKDQNPGSRDVPAGVESAGSETSEIWLRCTKLEVLTPQFPDAASVAEVFPECSSAPGLQHPEVPLSSPVSCFFHHHIEPRRTLRTEGKMKTHR

SEQ ID NO: 928020 - protein, 192 aa, Homo sapiens
MRRNHSRKAENSKNQSTSSPPKECSSSPATEQSWTENDFDELREGFRGSNFSELKEDVQTHRKEAKNLEKRLDEWLTRITSVEKTLNDLKELKTMAQELHDACKSFSSRFNQVGERVSVIEDQMNEMKPNLHLIGVPESDGENGTKLENTLQDIIQGNFPNLARQANIQIQEIQRMPLLDKDAPREEQFQDT

SEQ ID NO: 928021 - protein, 160 aa, Homo sapiens
MVVEHLSDVLCLGIVPVASWLSFFTGTSSKSNTYIGPISAPRFFPESRATKTILLLKMMRGVKVSLLAARDSGDKTHAEGIDKPKATNMESCQLYSWLQIYSDLARKTTQGPAYLLYWTSYVKSKATFSYETYGEEFCFDSFSFCVCWNPWHSLADTEVC

SEQ ID NO: 928022 - protein, 138 aa, Homo sapiens
MWALKAPRSSVIPLMNPPMKQCDPSYEPSHEAVQTSRSAGSTGGKQKTAGAAGDFSRSHRALGMFKRRGRPCSSFPHFRVDSEILLLALLRVLISHSCLHLSLVHKPDLLPISTPAQLCAPAWPRSSSPVDPLGSPVP

SEQ ID NO: 928023 - protein, 159 aa, Homo sapiens
MITIYTHYLLLCGAEISDFNGKTERKEEKDRKEEGRKEKERKKERKKERKRKKERKKERKKEKERKKEKERKKEKERKKERKKERKKERKRKKERKERRKEGRAEERREEKRERGREEGRKERRKEGKEGGREKGRGRKGRDRKGNERKGKEKKERREG

SEQ ID NO: 928024 - protein, 144 aa, Homo sapiens
MGFYFFAWSCSLVWLLPLLSVPATHLRGNLPFIVLAGGHFPAKSGKGPANLSKQPPRGHLAGIDSRPCSSQLAHQENLPAVHRPRRSCSHHPDSASQAAYGGYRTPRSIPVFTQSPQYSPSVSATLGSLAPALWLLSLSHRDPS

SEQ ID NO: 928025 - protein, 144 aa, Homo sapiens
MACDYSYVPTGTENGQLVRAKGIGEGFLQQVIWIFGEPPSEHGAPPSEEGNNYFASLSLAIHTNKAGMAAEGEAFSVRKHSHRSVENSDWMRQLILHMYQSFCQQHYFFLSKPSCFNFALLILAYPRGLHLEMSSRISLTPPGC

SEQ ID NO: 928026 - protein, 176 aa, Homo sapiens
MGVPFANPELCSGEDKRHVMLTPSLPRQQLEISVAAMAFFQDLAQAHWGHFTNLVLQAALGLPSSQDPSPEQGLRAQPVDGAGMLQAASMLGASGVPRSQLPRNAASVHSQSSTSGTMLQALLFLPLTAWQTEGMLQLIHSCHLQLSKFPVLVRQRRGIKVRRCQSVSKAEKNFIE

SEQ ID NO: 928027 - protein, 155 aa, Homo sapiens
MLVFVTLVSQQSRSADSEAAMLGFVQVPDGGLVPRHVTHSLTFFARGDRSWDSEETVLDYFLKDSQLRVFKTVDSYPVTLCFFLPLPENDNGNVQKIRGRHEQMGELMSRRTEATESSLHNSSWELIKNEEVGGLKSLLEKADLGLHFEFKKGCK

SEQ ID NO: 928028 - protein, 196 aa, Homo sapiens
MELFHFVIPAPLLRAPSKGWNSQDMCALHRGYSGLSDSWKKNQQGELSEQAVFCCVKMRRASIQVEGRESKALGDERMGKGSEPVKPYAAELEFQLKSADTKATALPCPAHTPGPGTIGRKYRRTVGSIGEPGMRLLRRPPGRAVTHPAENKLKESVMSLQEKKAHVLRRLRLDQLISEDLVDRSTLKQLNLQRQQ

SEQ ID NO: 928029 - protein, 158 aa, Homo sapiens
MCTPAPGPLHLLDPTLHKCPVSEQDQGCNQHICPGYLHGALLFSRSAAQEEQTTYSSRATFKVSNFLPVAAWKAHLCPFPSTHLQDSGIIPASPAGAAFLGWRLAHPSASSQCAGEHCRWPLKLGSHTSGYYKPLETGTVFHLRVLNNTQSFTHNKIL

SEQ ID NO: 928030 - protein, 154 aa, Homo sapiens
MLSPSHGGKDKKRQTAPLNLFVMGILLQQQEGPETPGVVQNRANGVQLEGYSSPQLHTPLAHNPPFPAPPNSLCASQTSPCDAPSPGTFLDLHTLASAVSSAEDAFGSLRCPEVNFESLLLSYLFIKWANISYCVALAIKIKAENTYRGLGTEP

SEQ ID NO: 928031 - protein, 139 aa, Homo sapiens
MLPRILPELTLLLIRKAWAAPIPHGFPERSRETNYMEVRGRLAPGPVKKAPQCSVSENSMYYSTDTITLTIPKNISPLLNGAGHFKDLSKEMGVSLHKLSTADIVSRHYELKSDGKTISIKIPLGAEGGYYKLELRGRP

SEQ ID NO: 928032 - protein, 151 aa, Homo sapiens
MNGLVVPVHFIFYRRNWRAIRHDSLSASLPQEDRNITSLTSENSLASLRNKWQTLFPPGRPYEGEKAGNPRHIWKNPMAKDTNATFTSNICFQHGDGTRVVTAEGAGLERGGQELREELNSHSHAVSSMKVYPLFSWPQMAARTPVTSSTF

SEQ ID NO: 928033 - protein, 136 aa, Homo sapiens
MKSEKVENRDVLLDALIISAFSPHGMPPKVAKAAALSHGKSSQSLEEFVTHQGSGPAVHVAHFDGEPGFITVFVQNLQHRRILDFIIVFKFCTTKDPHIVSTRGRLLPCGKLPLFIPLVYQAMTQRPLPPTCFPRD

SEQ ID NO: 928034 - protein, 145 aa, Homo sapiens [sequence omitted]

SEQ ID NO: 928035 - protein, 177 aa, Homo sapiens
MDINLMTSSPGYDVLNRFKLQSTAQILVINTTINVLGMRETKGGELLTPFFGKDWGLLVGPTEMDGGHTGPVTQAVQKANVGSEPQHRFPTGALPSGAVRRGPPSSKSQNDRSTDSLHHAPGKAANTQCQPVKAARRWAESCKATCVELSKTVGDYFLHQRDLDELRTTQATKFRAP

SEQ ID NO: 928036 - protein, 194 aa, Homo sapiens [sequence omitted]

SEQ ID NO: 928037 - protein, 186 aa, Homo sapiens
MFVQPAELSGGCSCGMENDGGAGPETGLDPESGGETSSEPEEISQWGQSGWRGTHCSSDGHLLSNCSAPSLILKTVVTETVTTCEYFIKCKREKQADTRVAFSTQQGNHNVRGMYVLCVHCRGHNELHWRRVGVREGCTEEEVYELDLEARVRFHQVLSRAGGREEHRGWEKNLCPGIGIHKVMLA

SEQ ID NO: 928038 - protein, 212 aa, Homo sapiens
MNDRFLKSPLERLGCVSLFLLTVPSDAGLLEFAGGPLQTLFAWVLPVEAAEQQRLLTVPSSGSFIPEGHPPDATEFERCAGRSAALFTAGRQKCLSLLKLYPVPPGALSQGDGSFIYKPLTGAAAFVSEMPCPKRRNLERQSGYSGFPKLWSSFVLETQGPGGVDLVRLIHYHENSIGEIVPMVQLSPTGSLPQQVGIMRATTQDEIWVGTS

SEQ ID NO: 928039 - protein, 152 aa, Homo sapiens
MLIRVLWSAYTKASIVYTASLERLVNEVCCQLGEPWYSIPRISHQGADIAGQNVVSDFTLQPLRKHLCLVPEIAPPNLVEVADINGKMNLSGDGSVTLMSDGRPQETSIERNRAIKPKVLGYGTRQPDIEGTTKIYQCSFSSITGCVGSFKI

SEQ ID NO: 928040 - protein, 134 aa, Homo sapiens
MCLSDIDSLGGLFGTDVHFHSTAFCPSAIQFFPPLPLNYMAVEPLLLRTHQVSPNSRGPELPSQGAGDAVSEERKIPCSAPLSQEESSIGFTSQKSSLFFNKDGTHFLGYSERPSTRTAKSAPSTLTISNVVDT

SEQ ID NO: 928041 - protein, 143 aa, Homo sapiens
MVRLLISPHKNALSSSANRKDKCFDSKGEGAGKIQDNLMHKRISDWQHPNPSITQDLSNISFCNKDKGGGERKGGDKSSSYDDTPNKTELIPGNFLSWEVGEQVFVPLKTQQIGSYCCFLSYLGQIPRKERGEKCLLPGCHSL

SEQ ID NO: 928042 - protein, 188 aa, Homo sapiens
MVPLHSPCRLQQDSVFGTHVWLVPELTISFHFCPEITLLEKKKEGEEERRRRRRRRKKKKKEKEKEGRRKKEEEGEEEEEEEEEEEEEEEGEEEGEEGEEEGEEEGEEEEEEEEEEEEEEEEKKKKKKKKKKKKKKKKKKKKKKKKKKKKKKKKKKKKKKKKKKKKKKKKKKKKKKKKKKKKKKMMIE

SEQ ID NO: 928043 - protein, 157 aa, Homo sapiens
MGVGPSEPCTGYNLLVCHLLRPLEKCSIRVGVSRFSRCRLSWLPFARKGNSLTPCASWGIAIKIPEDVKMALKLGNRHKFKSLESSPEEKKMRESLELLRDWLNGCDQNADGNMNSKVQVDEVLDGNEEVIGNWRAHPLHLHALDAGHEAKDDYLEL

SEQ ID NO: 928044 - protein, 156 aa, Homo sapiens
MWLPVTQTAVIDVSPLGLATQQVYLASGWYWGLSTQSPVILFTAKRRELYAFHKSPWANDLHVEFYYPLSKKKHVLPRHRRERSFFWPLLKFLPLPRNYSLGQPQHILANSSHCQNIWGDKCIYPFKLFSPEAMPNICLTRNSCVLVCLGCHNKMP

SEQ ID NO: 928045 - protein, 166 aa, Homo sapiens
MKVANPQHKLYKLEATTPICEKRWKELGYWAGVVVQYILMAHTRFPRRAAQSALQHSQQCTDKIPMQLSTRVSDVGPVEPAGRKWVFEETGTPFSGIIVLEDMPELQASTHSCQHCTSLNQCHLRISQQIQGHKDISLFSSKNIIVLALTCKCLSHFELISVYGVR

SEQ ID NO: 928046 - protein, 145 aa, Homo sapiens
MREWGCCLQINRDLLPVRILVTKFSEKTENTIVFTDQQRHANVMLAVEGKGHVYCKQRCLSCHRGCWRGILRRRRRAAAAVDLQSPDPHGLSSCVIDMPMLSHDIRDSLCLEHAAHSCWPRCLLPVSPASESCYVPRKAFLDRCI

SEQ ID NO: 928047 - protein, 147 aa, Homo sapiens
MHPVHWANASDPTCKLPGPVQDQNPAVSTTCAPSSPALLQQGVHGGEGEKQDVVKWFSKCGPTGSVSITWNLIGNADSYTAPGLLSQKSNKCSRLKQMLRQEPSAVPVTATACETVDACHCCDWSGLRENGEALKTNPGCLSNCLRH

SEQ ID NO: 928048 - protein, 236 aa, Homo sapiens
MTENGELRDSVSWLQKQILTLKSAKIALSESLVSCRERAEIVEKQTQALTMRVADLQQKVHAQPRQLSTVKTFGGLLDTGSELTLIPGDPKHNCDPPVKGRAYRGQVINGILAQVQLTVGPVGPWTHPVVISPVSECIIGIDSSWQSPHIGSVTGRKTDGSCRMTVDYHKLNQVVTPISVAVPDVVSLLEQINISGTWYAVIDLANAFFSIPVHKAHQKQFAFSCQDQQYTFTVLL

SEQ ID NO: 928049 - protein, 145 aa, Homo sapiens
MGEPAVPGAFWDQVWVCRGSRSFAYTHFRSTDTELCAQGWFLPLAPQDRDMTREAAPPSHCRCCLESEAYWAALWALGLITTLRLHTRSAPDRSESNGHTSPWGWVIRSLSCDHFYGNRIPCSFGWLLGVSYKLHWKSHSEIIMC

SEQ ID NO: 928050 - protein, 141 aa, Homo sapiens
MVDPLTACTGKAADTQHQPTKIAGRKAVLCKATDVELLKTIGTHLLHQCDLVAGRQNCLSLQKLPPELPLPPGALSQGDGSFIYKPLTGAAAFLSKMPCPERRNLERQSGYSGFATLCNGEHPSPDQAQASQVGFRLLNWQ

SEQ ID NO: 928051 - protein, 154 aa, Homo sapiens
MRTCVDQMTTGYHNHIASPLLVAIQHILSFQRVALSLDQVEVRKGMEEEERRGGEERRREEGKRREERRHSGLHSFVYQINKKKFQGTVPNFKIIAILRRILNPSGPVEKSQSSTAGVEASQLGRVGRTITAAHVASTSTTVWAASSLLSLTLH

SEQ ID NO: 928052 - protein, 136 aa, Homo sapiens
MYPRQISINLEVYFAKVKNMPVTQLQEVLMTCVQGELCKTRIRRSHSEAQATEALGPNHRATQILNTHLARIGLSLRVSWGRGYHNHCCGCLKSKPSELFRGGAAVNTVAVGPSCRNSNSSEELRDRTLISLGLNP

SEQ ID NO: 928053 - protein, 164 aa, Homo sapiens
MAHTWKLIQKRRIDQAQVQGPTHSCIKMIEIVSTPHKYPRGYSLLHHQQQQQQQQQQYQQHQHLHHHSYRFSGMHVHNVQVLTGIGSAVGASDGADHSKNTGGEFSCYCGTIVHVSNNVSCASKSTGLYSKVMFLPEALVEVLWMTASTLASSASLAVAINISF

SEQ ID NO: 928054 - protein, 146 aa, Homo sapiens
MQYVIQNCDSRLLLTKITTIGNSVRISAYLLQLLFLFVFFKFLFFFKFLLSLSHYYFVAPVPWNCQRFCCFSVSSSSVLHGPSPDSQAPPASKIDKDPQEQPQILNLYFLPESQKHHLLEPEEVPNELHVTLYGKLENTVRLTLTG

SEQ ID NO: 928055 - protein, 134 aa, Homo sapiens
MMIASERRQQGNGLSHACVGMDSVVAMESVHAPHNLAGGGCRLVHVSGEWLWADLFTIMRISLERPAPMIQLPTPGALPQHAGILGDKIQVEIWVGTQPNHIIPSLAPPNLMSSHFKTNHAFPTLPRSLNSFQH

SEQ ID NO: 928056 - protein, 154 aa, Homo sapiens
MKAVMGAVTCRATAAELPKALGIHHLLQCILDARHESGPSAASLLEFAGVPLQTLFAWASSAEAAEQQILQNSKYYSLILPLEALSQRGTRLYEVYALPPQVESTEAAGLAELRWALPSSSFQAALFTYSSLSNGRCPSPHQAVASQLDLRLLC

SEQ ID NO: 928057 - protein, 139 aa, Homo sapiens
MRKNQDKNAENSKKHNASSPYDRSFSPVRAQNWMENGTDKLTEVGFRRWLITNSSELAEHVLTQCKEAKNLDKSLQELLTRITSLERNINDLMEMKNTAQELCEAYTRSGINQAEERISEMEGQLTEIRCEDKSREKKE

SEQ ID NO: 928058 - protein, 322 aa, Homo sapiens
MIKGFRESVKNQVQIFEFLEGSEEDRKMQESLELPRDLLNGFYQNADSNMDHKIEAKVVSDGDEELIGSWSKGHSCYALAKKLAAFCPCPRDLWDFELERDDLGCLVEEISKQQSNQDMTWLLLTTYSHMCSQRDGLNLEFILKMEAEHETLENFHPDKKRKNPFSGEKFKPLAAEICISNEDPNVNSQGNGKNGNAGGYLGLEPPHRVPTGALPSGAVRRRSLFSRSQNGRSTDSLRCSSGKASGTQQQPMKIANGAIFCRATGVELPSKALGECSCMLLHQHVLDSGACGKICSPLLGHAESDTSPELLGLTDIYDATFR

SEQ ID NO: 928059 - protein, 144 aa, Homo sapiens
MNIFVCVLLTGKVHRSGLAGSQKTTLNILDGLMPKCCLMPKRSTHDQVSHSQETCLYQQAPLWLLSDLCPVYFYQDIHCVRELSLGKKLDSGPMGRGSHSRHTCSTRTRKWRAKERVRGLCAKAFIGLQDIIQVGFHGSSNLQV

SEQ ID NO: 928060 - protein, 154 aa, Homo sapiens
MPPDWETPPSRGQKIPHTGEVWLASGSFPSVTKLPEEGTGSNLCCSAASAERNSVNINKNDVHTKTPFEGHQHQRPKVDKSTKVRKKNQHQKAENSKNQNTCSPPKDHNSSPAREHNWTANEFDELTEVGFRRWIITNYSQLKEHVLSNPMKGS

SEQ ID NO: 928061 - protein, 140 aa, Homo sapiens
MRILGHDYNSELAFFVHLQNAILRISLQASLSQMRKWRLLEAPQEERVEILKNTFGSPVCLIYLKQSLPTTAFNEYLLTERISEETEERGPNTGQCQCRKGTRYKKFKKHQEREGSGQKTSLRESAYHRFHAAYKFVNGV

SEQ ID NO: 928062 - protein, 174 aa, Homo sapiens
MKLGNGHQSMSPLVLGVLGCGLLTQLWPAWEALGSLHPLEKLPHSLEDGLPCIKLARGRTEQKEPRGAPPASTLGGQARGFIVPRRLHTVRAKVIPYKEIRAWLGSDTTECLPPLNRIQYSRFGAFCDEVNCHFGLLSVSATSSRVVPGNALPQNRCLADSSLPFWSQLRRCLP

SEQ ID NO: 928063 - protein, 168 aa, Homo sapiens
MLLPCWSLISGFLLATVWIPWLGGCIIPQLAPSPSSTTPLHKLYAGLHPVPVNPRGSDQAQLCALSSCHMPNAAAACSVFCPEHSVPSLQGCSSWSLNGSTEAPSPESKSCFLCMEGGPALWQFSSSCKVSTVQFGELPPPWTECCLQDSGWLSARNLEQGAAFGVEG

SEQ ID NO: 928064 - protein, 193 aa, Homo sapiens
MNVFDMRLAASPSFCLNILENHPNHQHQRPKVDKTTKMERNQSRKAENSENQSTFSPPEDSSSLLATEQSSMDNDFDELAEVGFRRSVITNLSKLKEDVRTHCKEAKNLEKRLDKWLTRINSVEKTLNDLMELKTMARELFSSRFDQVKERASVIEDQINEIKQEEKFGEKRVKRNDQSLQEMWDYVKRQTYV

SEQ ID NO: 928065 - protein, 135 aa, Homo sapiens
MAGYPSEMKLPEELSGSNICCSAVFTVLQPLLLIPRQTGSGVDLRQTPTDLQLRVLTVRRKNNKQKRTSTPKPHLYVTIIKDQRLQMTNFSELKEEVQTHHKEAKNLEKRLDEWLTRITSVEKSLKDLMELKTMA

SEQ ID NO: 928066 - protein, 134 aa, Homo sapiens
MSMVLWMRNCDLDITYDHFFHMLMFLQTNSDLMWKGVIQGCEYQEAGSLAAITGYHHSPVVSSCNWNRKQTPCHGLQVLPDLASASSYLMSHHVPLLPLGSSHAGFMSPEHTNLTLFQVFVNESVQVSFQIPGS

SEQ ID NO: 928067 - protein, 187 aa, Homo sapiens
MEGRGYNLGYMKNGFELQTVAKHFGSPSWLGAVGTCEVTNVPLSASQGTMELCLPPEFRHKQELPGGTWSSACATDFWLKQGHWAGSWHRALYGNGEWTNMTVPQHRDCSLYQGIAVGAGLLQGSKPVEFPMDLSVASAKNPGSSLGADSSTAQDRSLATYLYLSSRWDINDKEAFCNLRNRSMTNG

SEQ ID NO: 928068 - protein, 134 aa, Homo sapiens
MWVGPDKRIKAGCPTQHWQPVGVPFHTVCSFTPEASKTTNPPGGMNNSRCATLRAVTFTRKVCSFTPEPARPRTHQKEETLNTSEHQKEQTPDPPLLRTVTLTARVRGFILEVSETKNPPIPDTLTYAIHSTFK

SEQ ID NO: 928069 - protein, 155 aa, Homo sapiens
MAIGGGKECPELLEKEACIVEGELLQQCPRRVPTGIWWVPLWGEASRGRNRQQSAVLQPLLEIPRQTEPEVDLQQTPADLQQRGLTCKNAENSKNQNSSSPPTDHNSSPAGEQNWMENEFDELTEVGFRRWVITNSSQLKEHVLTQCKEAKNLKV

SEQ ID NO: 928070 - protein, 200 aa, Homo sapiens
MLNTPPEGFNLDFFHISRPVEKALCVGPAPLPSQLCNIPCSTDCIVSSWSAWGLCIHENCHDPQGKKEILPLGIMEGLWLLVIQSTLENQPVFTAFTPFHRVMTGRQGNHDRQVGACQVKLGCLSEEFKLGFRTRQRHVLMESTGPAGHCPHLVESVPCEDPMCYRWLASEGICFPDHGKCGLGHRILKAVCQNDRGMTQ

SEQ ID NO: 928071 - protein, 156 aa, Homo sapiens
MDPRNSQWLQRKSCEIPCRMDCVLSEWTEWSSCSQSCSNKNSDGKQTRSRTILALAGEGGKPCPPSQALQEHRLCNDHSCMQLHWETSPWGPCSEDTLVTALNATIGWNGEATCGVGIQTRRVFCVKSHVGQVMTKRLKRKRERKGHIMESSSITQ

SEQ ID NO: 928072 - protein, 143 aa, Homo sapiens [sequence omitted]

SEQ ID NO: 928073 - protein, 146 aa, Homo sapiens
MGPDNLSFYKGIQCFCCRSEDHTLRSTRLTGNIAEMLPDSQSTADYHSSSTWLQVSRLTDKDGDWCSCCCSGSHQFLLMLPEKAEIPQVRHLVLLSGGRSFMAWVAFVFCPPNSSWWRRKISGPAEKENSSCAPSLPTGLPVNALR

SEQ ID NO: 928074 - protein, 134 aa, Homo sapiens
MSGVGSFRWVCGLLDFKNEAADLRGGFRQTIASKDAIGQRSSKLTRVGLHSSRAIELKASVSYWLFFATELPHDRTAGFFKMKVVTDNLKGRGETGIEVYKKSELFYVVETKYDKTESQLGPGGKWWYHFFLAY

SEQ ID NO: 928075 - protein, 169 aa, Homo sapiens
MGSEPPDRVPTVALTSGAVRRGLPLSRSWNGRSTDSLYCAPGKSSYTQHQPMKVARIGDVPCNATGADVLPCGMQHSRNSWKQQRGPHQNLGDFLAFKSLPDISRHSLDMKGTHFLKGKDSTSWILDDISRPTWGQGDLTTLKGRTQAWLLVVVYKMYTKSADYRTLGP

SEQ ID NO: 928076 - protein, 165 aa, Homo sapiens
MVALPAKPLKAVEVKAEGEGNSEEEVYGKRMSYGCGFKTIWDRFHQCCNELFYAVCTHCKMYRSQEQGVGNLGTHSCDEASSVHSSKAAAPLGQGPNLYKAKEEWWKSTYVFVAPYANGLVHDSVVESQTNYGMEQMAGFRRFYSVSPAPNIIGVKNLTYTNFKL

SEQ ID NO: 928077 - protein, 146 aa, Homo sapiens
MFGLKSTEEEETTQFQSLGCGLVGQSSEKFDRLNPSSLNSSKSFSIQLCSIAGEELHCFGGGEHPKCNPWAIVVCSTFKRGLEPKQFAYIYDIPGPTQSHLHLGFFFISSIPEFLLPPFPAAEARGIVLKSKSGHFTPPLSGAAIH

SEQ ID NO: 928078 - protein, 153 aa, Homo sapiens
MQKAEGSFLCTRSVLYSKVLRQLPFALVKYTPIYLQKKLSVKQAGSSGGIPEVGVVIIGDDSSLGDIAPEDPLMGQDVEVEDSDIEDLDLVISYCTVLRVTDTVDGKTANKWGLLYSFRFVRFFGGLTFIMLNNVSLSECTAVYLSIHLLKIS

SEQ ID NO: 928079 - protein, 138 aa, Homo sapiens
MRRSQRKKAENSKNQNASSSKNHNSSPAREQNQTENDFDKLTEMGFRRWVITNFSELKEHVLTQSKEAKTLEKRLDKLLTRITSLEKNIYDLMELKNTALELHEAYTSINSRIYLCQFLSTTGSVYYLINDSLMNEWI

SEQ ID NO: 928080 - protein, 208 aa, Homo sapiens
MQPLTWQVPFSPLLSIRSTRSNLPSAGKDPADPTVLEVSVANRDTFWSLWQAPIGESQWRPLEFWSKALPSSANNYSPFEIQLLACYWALVETERLTMDHQVTNVTRTAYQELGVLDPSSHKVGHAQQHSIIQWKWYICNWARAGPEGKRKLHKEVAQMPMVSTLAILPSLPQPAPMASLGIPCDQLTEEKKTRAWFIDGSARYAGIT

SEQ ID NO: 928081 - protein, 177 aa, Homo sapiens
MSGPSGGSSRPTVPVFGFAGSIHRRCCKQFLAGQFLGFQAACLGADSGQQWVKWMEGSLSPWAASVAWMIVVVVMGQTLGSQAAHAGFSIGCNGQGNQFPCSQGVCKNAAALLLVEEDCYQWQFLFLSLHLKIDLLLVHACAHGHYHQRGDRSRTAVIAAGSYSITPGELAFRGSLL

SEQ ID NO: 928082 - protein, 239 aa, Homo sapiens
MRILWRISFPQIQKNPSKMHYQQPLRPKPPVLSQPCYRALHHPPVQPGYEALNPIPVRLDNEALNAISALNSAFLSMHQAPQKSDLQSVHQPGTQALQSMHQPGTQALQSMQQPGVQASERPAQQATARQPGLKALNFSSIQNSNFLSASGPFLRQGNMGIPRHGSFLLFYNLLYLLPLFLPPLLQLAAPVQPQPFDQAQQAADPAAAAPPDPQLNDQAPQHFSSSSHSSPNFRKPSWE

SEQ ID NO: 928083 - protein, 135 aa, Homo sapiens
MDLNPVLQCLNQEFPLFVEWNNKDSDMSLYGLGKEGPFMPETIILNLPSNFFAPSRPMHHIHIAHYLERQRTQLAWHPTLHPDRMGLGYRSSQELVTKAREGEYDDRLSQSRVVLELRPKHMSFLGERISIIRKE

SEQ ID NO: 928084 - protein, 165 aa, Homo sapiens
MSQEMQGDRKIAWSRTSLWEIAALVSKEALDKALGLPGPPRYGNINSIVHEYQCVMPPVLNLPGTPSPSLALGHPTSPSRPSDKPLFTLKTQLKRQFPCKFSHKFPCKYSSQDKTPEPIVPKVPEKSKQMPNNNMGSSSTLLAKPRALRSGGKKEAAMDKTLAES

SEQ ID NO: 928085 - protein, 223 aa, Homo sapiens
MPGGGRQSGWLNQELPERQTKWTKSLTDLSYCLGPGDPAPGSPSLSAIPAPLPVVHYCPEGPLECKPQTGRQTWEDSMRLHSNQTVLKSASLASSSNTGHSPVAPLPGNLVEADWAAQGMPVGCGEERLQGQLGWIMEARVTWGCDSRYEGREGSETSSEGALPSLPACGLGAVGEDSKGVTLDDEVNVLWLTGTGKMGGGVGLQQREAFYFIQLGRETSLWR

SEQ ID NO: 928086 - protein, 201 aa, Homo sapiens
MLTAQTQPLTRRPRGAWSHAWWFAPPRLRGRSVQLRPHDGARFLRTRPTAAAQTKTGIGPPPRGGGGGGRPGWPRPPLRAEPGSCRPSLCPTLLALVLKDKQRGRGELAAPARHPPDSRPSSHTPKPGPARAGVAASACVGTTPKACPGSFPPPPHLCKEFSRNSALWRFCSTALTSHLKGYRAWVSRVQRRHAFRLTANS

SEQ ID NO: 928087 - protein, 144 aa, Homo sapiens
MSFLEAVGIDLGLQGSECRRTVAVRSVEATGASEGFLLDLLPYPSFGVALGEGPGYLRGRCVYLQTFEQIPEDKEVGHGDLWGKGAAGRGTGQCKGPGQRACVMLEEQRGGQCGWNGEGQEKVPQPHCRTGLKMKPPLQLLRTQ

SEQ ID NO: 928088 - protein, 150 aa, Homo sapiens
MDHGENRSSIQQKEEKQSRSWKAVGPEATCSKQSVQYLLWLPPHRLASPQLPQLSEKTLDRVIPNDLKKHPCRSHSRSFFLSLLLSGYSGLSLWLQSLHNQTHTQYISEAFSILGQPQSHSLHSSHIPGCIFNLVSAPLGGVHAEKLWFF

SEQ ID NO: 928089 - protein, 150 aa, Homo sapiens
MENSFTGMRNLILMHPLVPFRSLLSWKRPQAKPFYASGAVGTVPRGCGNAECDGAAHMIKDNSMLAGVPKHILVLLAVSCEGEESEPICLIVRESKSDGKVKNTFVPDSHEITPKVIKTRGNLTYVYIPNPEPSLETVQLSYPRGSLHPV

SEQ ID NO: 928090 - protein, 147 aa, Homo sapiens
MKETSKDENTEATGNGKQGSSVAAEGKQLMRIPHEIVLSSCTKGLAGVWKAWEMSFVDLVLEGCLMLGGQVPGAWQVIVHGSGGLQGSLGNVFLDWTAKFPVKTSTTVDREDNRYWSTTSTLAFNRNSSVTEAKPCGRPVFRTFNMM

SEQ ID NO: 928091 - protein, 139 aa, Homo sapiens
MSQGKVFVLGMLKDGKALSCLLEVKVDGPVVCFSQASVIEPEALPEEGTKDLDENNNNNNNNNNNNNNTFFNSPKWYLFTFSPGRLSAAILDLTPVTLSPHVLYLKCSVQTHLSFQAHFKFSFFHETFPFYSKSMLPLN

SEQ ID NO: 928092 - protein, 171 aa, Homo sapiens
MILKPPRPCGTASPIKPFFVPSLEHDALCHEAKHTRLVHHSEKLKENPRESRAVAGPKLLHTNEVSQQISNSVLQLQGDCADSDILGTQEGQTQKAAGLITFQRPPMASVCPRWGVRGHQYPGHPFLFQSSMEMFLACCLEVILPNLLEHLQLSCPILFILETTKMMGGER

SEQ ID NO: 928093 - protein, 161 aa, Homo sapiens
MGLPKTEALTLMVKRGVDGAAVCALAHSSCPRPGDNNDDNKSWHLLSQYHVSALRFRFRRPCLGDLGRAGSDRCQIAEKDSGALCRVGHCADICRSVKYRRYKADYDSTRGGGREKTLHKVLGRSIVTWHQCVRGSRQVSATWWVSVLGMGVDDSRETELA

SEQ ID NO: 928094 - protein, 169 aa, Homo sapiens
MMGKRGCVNTPMDFSKKGKGDKRGRREGPWNPYNRPADRGRKHFKGSKLSCSHSIAKNLFRPHLMKSSGGGLVHCATNITLLGGNKHPDYCKNVEICWQFRINDYFEWANSSNSEVEHLFVAHALVDILEEGKSSKSGTCMRVGDRGKFLMVVRKQVSELLVYKHMGLG

SEQ ID NO: 928095 - protein, 149 aa, Homo sapiens
MVSEGASPKTWQLPCGIEPASAQKSTIEEPTHRIPTGAPPSGTVRRGPPSSRCQNGRSTDSLHHAPEKAADTQQQPVKAAGREAVPHKATVAKLPKTMGTHLLHQCALDLQEIKQRSSLYQGFPTRGSWTGIDLQPVRNLAAQEKVSSR

SEQ ID NO: 928096 - protein, 141 aa, Homo sapiens
MLVGKHLSGALGKAPRLSSRGCTVHMLLWEQPGRELGKGGRQGGLLNTCAPVLGGKDDLVLSWPWWGQIPLPIQMSTGVLGSFVAKIPEARGKSGLPHLHFTHTSLGVVLSTSLFCRHVKKDVFAALSAMIESFLRPPQPC

SEQ ID NO: 928097 - protein, 172 aa, Homo sapiens
MGCRGLCPVQSPLNHTTVCSGQKFPVASELFSVSRHGALASQLLAFPFAICTRYGVYILKNCGKIPPQTKDLLTQTHISVLYLFHYINDNILTCESLTDLETVLLIVLDSLKDKEWKVNLKKKQGPSIEIKFLRVSWLRCKTYSELSLIRQHSSPFPRHQALQKVLECICFK

SEQ ID NO: 928098 - protein, 172 aa, Homo sapiens
MKLDPHLSPYTKINSRWIKDLNLRPETTKLLEENTGKPLLDIGLGKDLMTKNPKANATKTKKHSWDLIKLEFCMAKGTVSRVNRQPTEWEKIFTIYTSDKGLISRIYNELIQISKRKQTIPSKNFKDMSYISSSDLHSIIIFRYNTINFTYTTIHFSVPSYCFCQEYTDKSL

SEQ ID NO: 928099 - protein, 199 aa, Homo sapiens
MRKGKILKSGQFCGGESTLQSGNCERKEEQQSIQDMTCVLLKAFSFIHSQRYSLVLELIFKREVENKSLENLQLTAIEKKNLLSEEKFKLAVEISSQDLVPCIPAVAKRGQRTAQAIASDGANTKSWRLTCAGFICCSSRKRGGTAFLQPHEVEIQVLHTVFDTLGVEILITARLPMGSPLTILWSHLIITGDDETNIG

SEQ ID NO: 928100 - protein, 143 aa, Homo sapiens
MAHVDICIMAGYFPRKTGNAWCRSSGVDNQLVFVDSLKEEPMRPLEDGQDKKTDRGWEKTLNSNHSTGNASTNICTINVSGTEEIPGIWTTLKKSGIGNVFDGCKRNMAENKIISSCPHESNNQVWKTDRGTDRQKHSGTNWQ

SEQ ID NO: 928101 - protein, 176 aa, Homo sapiens
MGDQGLAKDFWTVCSNSGGLVLGLGSDFWLLEVRNVLCWRGRGAPRWLVTTLQWLVPAKVLHRAVAAGCALMCMCQQQWQQQHTGCMLISCSRVLVGAGVLASVQAFAAVIVLVWLRRMGAPASNCVHICTDRGVSMGTECWWAQDYVCLPCVFTLVAVAAQSRDQGDYSEFSDIS

SEQ ID NO: 928102 - protein, 474 aa, Homo sapiens
MTKCFLPPTSSPSEHHRVEHGSGLTQTPSSEEISPTKFPGLYHTGEPSPPHDILHKPPDIVSDDEKDHGKKKGNFKKKEKRTEGYAAFQEDSSGDEAEKKYGMKCEGIYRVSGIKSKMDELKAAYDQEKSTNLEEYDPNTVASLRKQYLFEEAYGRTTETEKVQEFQRLLKELPEGNYLLISLFVVHMDHVITKELEAKMNIQNIYIVVSPTVQISNLVLYVFFTHVQELFGNVVLKQVTKTRRWSNVATMPTLPETQAGFKEEIRIQELLLNCLHQDLQGGIKDLSEEERLWEVQRILTALRRKLREAKRQGCETKIAQEIASLSKEAEKEILTKQEELLGMEQFLRRQIASEKEEIECLRAETAEIQSHQQQGLSETEEYSSESESEDEEELQIILEDLQRQNEELEIKNNHLNQAIHEESEAVIEPRMQPWLLQLQPDRAKQQAQEDEEPEWRGGAIQTPKNGILEPVAAK

SEQ ID NO: 928103 - protein, 184 aa, Homo sapiens
MGKPPNHHRNDQRGEELRGQELHDASTKQRISSCCDTPLTLKRGDVTHPSLAAGILHHLDMTLIHLTATLSHSPQAPQPEGWHTDALSRAQAGLLTGHVDLSIIQEVKLSTSPVAENNTEASALQDNTALLLLPNWDLPTSFLPAARPVTWIMSQFSQAREMSDTLREKRDDMLKELQDLANVY

SEQ ID NO: 928104 - protein, 144 aa, Homo sapiens
MENKTKQKSMDQIEFKKKEERPPNLISLHVLSYEMTFSKPKNQGSNSSQGVTIHSTCSMFLPPLPSPERHKEEGDWIPIPSRASIPPLGAEWEMGKCLVGALEAPNCQGSTEDGKEESSRTNDKHVENRQDFQVRGSMESSSRI

SEQ ID NO: 928105 - protein, 155 aa, Homo sapiens
MTVEFCSGFIEKVVLLHSGLRAWAQEASRLLLLYPGGWHLLGAVVRAPCNSGARRRLVAGCILFLGFHLLYPSPGGFSVAVLGSSTCPEWVTVQLRGQPPPALPWSASLLLALPGDVICPRSGRGNGMECPGAHESAGIVESWRTQRRSQKSAGA

SEQ ID NO: 928106 - protein, 136 aa, Homo sapiens
MLQLAHQEVQSRFFQHAQRTLGKLPGFLNQAETSELSDTAAPPPAAAWLLRLVHLDESDVYVFIPFLPEPLVKKVHRGIHECLANSKVLGGHEPVTLNVMLSPAGSQYDSPQITKVEAHSYKISVVWIGPGLQGQL

SEQ ID NO: 928107 - protein, 216 aa, Homo sapiens
MLIYHSENPRAFRNCTKSTLSVLYKCNNKAWMTAHLFTAWFTEYLKPTVDTYCSEKNIPFKIFLPIDNAPCHPRALMEMYKEINVVFMPANTTSILQPMDQGVILAFTSYYLRNTFCKAIAAVDSDSSDGSGKSKLKTLWKGFAILDAIKNIHDSWGEVKVSTLRGVWKKLVPTLMGDFKTLVEEVTADVVKIARKLKVEVETEDVTELLKSRDKT

SEQ ID NO: 928108 - protein, 155 aa, Homo sapiens
MLTSGNTLTYRPQNNALPGFYVFLNPVKATPKFVIDICVKIIVWTYTFFFGRGGVRNNGMEYGGWLFKFLRNWQTFSKWFQHLIFPPVIYRDQVAPHLHQHLIWHSQLLLFLLLLPTGECLMSLSPVPFLYIWYQHLFHEAKEEKAPKNIRIHIK

SEQ ID NO: 928109 - protein, 146 aa, Homo sapiens
MNSKWKPILFIWYSTEGTAFSTKELSDTTVSDHGITFVFVRFKQFVDMNLICEVLIMPHSWQSKDVITISCHPVHHCVQHETCCFDYIYPPHIYYQSIKGAETGGSSSHYDLVDGVSVMHYAVKKEDVAVYQPCDLPGIGEHVRPG

SEQ ID NO: 928110 - protein, 143 aa, Homo sapiens
MKRIWGIIVAIICSFEEQKVSGKETSYQQDRQQDKPEVKAFDGNIPWVHFDSVTLGHNCLNSGNYGPLIPCPTSVTLYAPVEATRDQKPRAPEPHVAGGYWIGQHSTKGITNFFGKQKRLVVPYMARVKSAQSGMDGVPKVPV

SEQ ID NO: 928111 - protein, 136 aa, Homo sapiens
MYFYWWRKEKDLIPALDFAFLKTTHLTFICSHFGKQGLRHLGPFHLLLDLVINGSCDVDVGAVHLNRENLKPTELSPNHKFPCADALSCSLLDPAVCRSRERCNRQCGLCDKWYEETEIKEDLNLGHPAASEGTMI

SEQ ID NO: 928112 - protein, 159 aa, Homo sapiens
MIEASFSISEAEQEILSTPSSHRQSIQAGRGSPRRWRHCLPNFRNSAVHGLLSDKPLGEPATGVLPPQYQIEDWVCTSRNTVKNAHPTLLAKGPSLQHGYHQVPQPMLWPHGRPRISGAKAHSPRDPANYAKCQVLAQAEVQGEWVCEWQVAERPLEES

SEQ ID NO: 928113 - protein, 195 aa, Homo sapiens
MPVGLLLYRVSDNPYWRVSVVWHGEQDPFNEALCPLVESVCFALGKPTCLGCLDSSELPGREARSAGLQRLQPPLPIEAQAQGDPNSVPEPLAGVIGDPAGKPCPVRKDGSGLALKRHSSCRLPQPMCSVVGTSLGMKPSSFLGSSRERVQPRVIEIGASLPQTRELSMPGSCESQCWPPLLQFSRLKKIPAERL

SEQ ID NO: 928114 - protein, 171 aa, Homo sapiens
MSADSAYSLVPCLLTSSYYSGHGQPQIPHKAKLSMMTRQYRVKEFRGRRACPSSQGSLHSGDSIRGNQNKFLIRENKQYQPTDAEASKHTPLLASPPSSSSFPPITVQVVNAPQILIWNEGMTLLFLKDLFLPLENDSVEYPPNGLYSAMKIKEILKYVTAQMNRKSIMLS

SEQ ID NO: 928115 - protein, 166 aa, Homo sapiens [sequence omitted]

SEQ ID NO: 928116 - protein, 206 aa, Homo sapiens
MFPFLCPSVLIVQFPPEKPEAVLSLEDFFVIPYLSYCTYTFLCLFSVQLQKNPTSLKFKRQINHLLPKFGGRIFVPAGCRCWNDAVNQLSPASLGPAFLRAVFTLGKLAKHVHRRQGGRQPLLGNLWPTKTAQQKESTSFRKLPSEAPEWVSFTWLCFMPNPDPISVLSGSASGSKPTSSSSISFDYQGGGENVLRQQLFTFPYLW

SEQ ID NO: 928117 - protein, 146 aa, Homo sapiens
MVRSAGFPFAFRHDCKFPEGFQSCFLLCLQNLCTQKPMPKPCMTSEPPAPFSEDRLRQAQEGRLVGRADTELKFLVLHLSLKPHSSQDIPKLLVSMRDLRYTESNGFSQSSTLIPTQCHFCSNNNSMTTNGCVNLFSYLEYRTVPK

SEQ ID NO: 928118 - protein, 251 aa, Homo sapiens
MNFEELTLNRKNAFSGPLAAGLLEFAGGPLQTLFAWVSAAEAAEQRILESSKCCCLIVPLEFLSQRITRPCEVSVCPYWGCLPVRLLGGQGPTSRGSLSILSSPAVCWENHYSLQSCQTGTFKSAEDSAAFCLAIPYPQRWSLQRLAGLLELQWAPPNCCASDERGSVGIGPSEPGTGYNLLVCRLLRPLEKRSNGERASSEYLGCWLYRYYIGDRSITAGEHKSKIPRQGEPRDLLTLHPSSWSDYMACV

SEQ ID NO: 928119 - protein, 145 aa, Homo sapiens
MHENGGLSQKHQFFHELTCEESRLHTPYKNPMPDDLRWSSFIPKASPDSLSSTMEKIVFRETSSWCEKDWGPLPDVDVLSPHLCSNCRSHPQLFSMALPSGAVRRRPPFSRPQNGRSTNSLHRVPGKATDTQHQLVKADRWRAVP

SEQ ID NO: 928120 - protein, 204 aa, Homo sapiens
MKVQGEAANADIEAIEWELLPEVTGLSFRILEDQDAVFSGEIIDSVMVNIECQLDWIEGCKVLILGVSVCCSFLEVHFSPCLLGYHQWRLQNSKNCCLLLLLEASSQKGTGLMPAEALLYEVSVDPYQEVSPSQEAQGAGRQERLSLLKLPLQSPLPPGALSQGHENFACKPLPGDAGFPAEIPCPVRRNPEKQSGHSRFAVLW

SEQ ID NO: 928121 - protein, 145 aa, Homo sapiens
MVNAAVNTYGAAPGGSRSRTPTSPLEELTSLFSSGRSLLRKSSSGRRSKEPAERQTQGKKTAQDLEVSLGPEMQRVLRSKLHMEKSVKEDRGSRWAQALGFMDSLSHVESCADLPLFQLAMGIAQIFPSARKTNLIHPHPPLCHF

SEQ ID NO: 928122 - protein, 125 aa, Homo sapiens
MASEWYKSEDGRKVHNRCCLPDGNKRVFDWLPSNSSARAVMMKSKRKWKVKNRVRVALSTENAPQIHCTKSVPIHGMADSRFVITVAPQNDIWPHGSSEENNMGTIDSCQGGGNKSNKKGTGIGV

SEQ ID NO: 928123 - protein, 135 aa, Homo sapiens
MPWELGLLNDATWLPGFSLLPRKMDGSPASLEFPGPEYAKAPGSPCMPKQPQEVCTALCFGPKALVAWAHVGCHPTLLFLTLHRLHRLPSQCQCENLDTSVEGIEFTSHFFPLLQPCGLQLLLIGHLGPPLVIYS

SEQ ID NO: 928124 - protein, 138 aa, Homo sapiens [sequence omitted]

SEQ ID NO: 928125 - protein, 139 aa, Homo sapiens
MRLKAQGHSHMNAQALLEEGDAGSSENSSEKSDMLGNTNSSVLYFILGLHFEEDKKALESILPTAPSAGLKRQFPDDVEDAPDLNAPGKIPKKDLSLQRSPNSETEESQGLSLDVTDFECALCMRVFRRIEDLIISDHR

SEQ ID NO: 928126 - protein, 172 aa, Homo sapiens
MVGTPPPASLPPCSLISDCCASNERGSVGVGPSEPCAGYNLLVRRCLALLRLMVSALHPLSCTHFPTLPSEMNWVPQLEMQKSPIFCVAHAGSCRLELFLFGHLAECFKECLNDSLLGQRGSRGWSWNLNCRLCDSGGQIPTQKEGPQKSWKEQPLPKWPSVAPPGMFRRSP

SEQ ID NO: 928127 - protein, 145 aa, Homo sapiens
MIPAIPLHPSPEVPRAALSLRAGGPVVQAGAVPAVAAAGFGVAFLRSATPGTLTFCFPGSKSAVCSSALTCHAVQGASTDPSGQGHTHWLLSIARPWSWNEVGGVYLSLPPPRCLLEEKTVSLCARALAGRCCGTAQGMAKSSFR

SEQ ID NO: 928128 - protein, 135 aa, Homo sapiens
MWLVPRHHAKRISKDWQPQWQGSIKGSFQLLVGVGVWCVHWQSMVSWARHMPCHSPEQWAPQELMFNIKFHAGAFTLHAANTIERCRENTAEDWKKLMLEQITQCGRFALQCAESTDVPNMAQLKRREEVEAWRA

SEQ ID NO: 928129 - protein, 134 aa, Homo sapiens
MGTGLMWKVESWCPGSNEKAPVAPREKGDDYDYSPSCMQLLWGSLSLYLEDSRSQDCHGLTRLLPRPESPDSPCQAIHLSTSQLPHLQNGYTVRLRGSGVGPPSPAVLAPALLSSRSCPLQTAPTWCPAVLLPL

SEQ ID NO: 928130 - protein, 134 aa, Homo sapiens
MKFSISLIISAKKPGKIWENSLDSQAETCSLCLLSFKQTESLSFSFCLCAELPGAGEKAHGNYCLPTAYDVHSRPKGSSVSLWGMLSVLSLSLQGSRLPSGPGEVQKYCPGAKGYDWKESLSIAIIAGNVLGHT

SEQ ID NO: 928131 - protein, 165 aa, Homo sapiens
MDSIPQGFETQISILTQFCRDFQRAGRQIITSKKWPQFLPGEATSQKVIQLLPDSPSWKAYPWSLVTMLRGSPGHVERPRVGVSANSPSEGPSWSRHGSWDMCPTGHRKRGEGEQALGCGRWVPGGHSPQSLPLADDVPFERHQVTAHSMQAHYLKALPHLETLQ

SEQ ID NO: 928132 - protein, 147 aa, Homo sapiens
MADRRPLRGHLAVSLALYLTISTLSGTADAMDFRDLKSPAGLQVLNNYLADKSYIEGYVPSQADVAVFEAASGPPPADLCYALRWYNHIKSYEKEKASLPGVKKALVKYGPVDMEDTIGRGAKDSKDDDDIDLFGADGRRKVKKRRG

SEQ ID NO: 928133 - protein, 144 aa, Homo sapiens
MMTMAVLWNRKGGKNLAQEYRGVGKGRTFGTTAATRNKDKDGLGQARGMQGPETRIPDFCSISGADGQAEGLPSETPFIRSSDSPKRKWWDKIVNAKRYGRPPPTTDNWSYGIVTVSSAVPRAVAFTRSQAPRCSGSREDPARG

SEQ ID NO: 928134 - protein, 136 aa, Homo sapiens
MLLSRADSGILFPTAEPAGLVAEVRSRLAGSRALVPGRLGRHCAHLGSSRASDVLSLSSCYPLQVSADLRSVLSGSLQQPSCLQLCEFSNSLPSVRKGWQLPKMINGEGKQDEGSKWSLPVPLGGNCKCKPLQKKV

SEQ ID NO: 928135 - protein, 146 aa, Homo sapiens
MEGRGCRVPPKGVFLAPNKGQKLAQSISGLRNRVKRKGKGLFSHGIGSKVRVRRDVTMNTEVGVMWPQTKEYGRLLETGKGMETDVSLEPPEGMQALILLSWLGSEKFHKAVSSELLGLYPRQAEDGTITWAKSHPPNVLLPDTSP

SEQ ID NO: 928136 - protein, 256 aa, Homo sapiens
MRPELPIMNWVLSEMSHAQKHSIIKWKWYICDQTQAGPEVTSTTRKWTAAELQPLYRTSLKDSGEGKSSQWAELQDSQDRSRNQGVKVKVAPLTITPSDTTAKFLLHVPAALHSAGVDVLVPEGGMLPPGGTTTIPLNWKLRLPPGHFGLLIPLSQQAKKRVTVLAGVIDLDCQDEISLLLYNRENEHISSSDAIQSILAASLSQMFGNTSGPAHVYLGNNWKPQAFYLGKALEPIPTWRTTNPHYHVGHSPGYAE

SEQ ID NO: 928137 - protein, 147 aa, Homo sapiens
MVFQPVLGLRWGHREPLNSHPLQVPPATSQRGPEGPAALSGATEPMAGSSPDQAYLTFPKAPEGCQGHTTASCKGTERQFASAAIRVCLPGERRGKPSLLHRLMEPTSFRTLLCPTERTAPECDFIFIAASPLLGLQFPISTLEHEL

SEQ ID NO: 928138 - protein, 142 aa, Homo sapiens
MSGVLKGCDTFSSAALQNLSQAIVCSSNPVFQGSPAPGPWTGTGPWLVRNWARQQEDHLVARKQAQGSYMMVLITQCSHFPSTVGFLSTYDETPWSALEEARGVFIWMWVKGGQGNSTGKLFLLLIEHSVNVYVTSFAFNFY

SEQ ID NO: 928139 - protein, 134 aa, Homo sapiens
MGAACRDQLAVALNPERVLTSSEVPAVWPPTVWPLSAPGAHSSASLGAVTTQPGVHVLRPVLTCQPPATLALLGLWVLTIMGRRCPQWKPLVMHLIQPQACMKPESVLASGADYPTAAADVPGCAQWPDPLLAH

SEQ ID NO: 928140 - protein, 341 aa, Homo sapiens
MGNKLPICCPLLEEGINPEVWALEGQFGRAKNARPFQIRLKDPTTFPYQRQYPLRPGAHKGLQDIVKRFKAQALIRKCSSPCNTPILGVQKPNGQWRLVQDLRLINEAVIPLYPVVPNPYNLLSQIPEEAEWFTVLDLKDAFFCIPLHSDSQFLFAFEDPTDHTSQLTWTVLPPGFRDSPPLFGQALAQDLGHFSSPGTLVLQYVDDLLLATSSEASCQQATLDLLNFLANQGRPRANTHLVEREPGAETAFKNLKAGPSTSSSFKPSDRTKLLFVCHRGARIALGVLTQTRGTTPQTVAYQSKEIDVVAKDWPHCLRIVVAVAVLVSEAIKIIQGKDLTI

SEQ ID NO: 928141 - protein, 138 aa, Homo sapiens
MSNTELRIVPKPTLPSAFHTNAKDFVTAISCPAVFSDSPSLAESDSNELRWTTKALRYPTPTYSRTNSISQLKLKNLPQSKEVLIHAATAVIKVLGRGANLSLLTEFIPERAAIGQNIIGSQKFLRRIMNDVKKNVLV

SEQ ID NO: 928142 - protein, 145 aa, Homo sapiens
MCPEFIPSVRTIPPLPPQPTQCEDNEDEELYNDLLPLNELKKTPNHTAYQPEEKMTQWLPCLPGTGCYSCVPLRPRGPCVEISLRNHCCPPKSNASAAHSPAHWMHMQSRFKSYKKAVSDKSLSHSCPPVAEYHSLQAAHASNFL

SEQ ID NO: 928143 - protein, 188 aa, Homo sapiens
MWNCQLLDSERIEAEGRNVMPENDYEVSHHKVDKAMQREGGNQRSELYYLLSVFRKEGSGFIINCDHLGLTAGPVYPGEDIPWLGCIALSLTGLLIQFRRESPPNPTCKCDPQCWRRGLCGVQSDFTACPCIRPDLVLKSKASKRFNKVKTHEMSYTRLYLPGLQAGKLLLPGTSVHSSEEWDLEIKM

SEQ ID NO: 928144 - protein, 160 aa, Homo sapiens
MQFNLALFGNTMPVNLAFCCHWLEATAFTQPLVLELTSSLEETKISVYAATLCSWSIPALQEQSQSSNTAPSTKLFSSIYGSPLNSFLRKAKNPHWLSSTFGFICPASIVFKMWKWQFSGAKKSLLEFLVCKQQKATRVSLKQANEKNNNFFISRKRNKR

SEQ ID NO: 928145 - protein, 163 aa, Homo sapiens
MYLVIGTKKQERILLMLLPGELGGVPGNKAHENVHGLLRQEPPLSSNCNKVAPPPPWLLQASLFPVQQKQHGWMQQALNQGQIRIPLRMCCCSTLGMARVFTLHSHCFLWTFKKEIILSAPFTLLSVPLHAQAITFHVSKFSLRLPSPHAAHTALRGHVIIGP

SEQ ID NO: 928146 - protein, 241 aa, Homo sapiens
MILGQLFHTSHFGKTVLGNTPQAQPNDETLPTGRTVAENDTGKVEKVTELLIYAAVPTERPEKLTVSHGSDLFHVKAFCTCHHLMEDSMDMDTSTLRPQNYLFSCELKANKDDHLKVDNDENELKLSLKTVSLVVGAKDELHTVEAEAMNYKGSPIKCGSGPVHISGQHLVAVEEEAESGDEEEEDVKLLSISGKQSAPGGGSKFPWKQVKLAADEDDDDDDNDNFDDEETEEKVPVKKSI

SEQ ID NO: 928147 - protein, 332 aa, Homo sapiens
MGSFGPCPALCPGAALHPSCLQELSTPHSGEGVTVQWEHLELLTPGANAWHEAQRLPLTSWEDFHPIMHGGGGREKGGGGDEEEEKEENKEEEENEEEENEEEEEENKEEEENKEEEENEEEENKEEEEEEEKGGGGEQGGGGGEQGGGGRGEKGGGGEQGGGGEQGGGGGRGEKGGGGGGRGEKGGGGGDEEEEEPLICVTFHWNVCGRRPESLWQTTGVSSRVQKLKNLESDVRGLEASIMGERWRPEDSASLVLPHSSACFILTMLAADWMVPTQTEGGSASLSPLTQMKEDNQSAMKQEAALTGHRICQCLDLGLPSLQSCTKLMFVV

SEQ ID NO: 928148 - protein, 130 aa, Homo sapiens
MTQVTEITGLTQGPRTGHILHFSKPDNGSLVTDIEGVTGKSKCPSTLDILHGCSDAVLAKPSFTNGLESSHDTDIRTFPVSMGMPVTLTQSQEPAQQAARARRRVGPGSQPRSRKFSRLGPLGCSHPPGP

SEQ ID NO: 928149 - protein, 131 aa, Homo sapiens
MLGSDGHSSLSATCPLQWTAMPKDFSRLQANVDSKGKEPCKYDGIPPKTQDSVYYAKEEKKKTLAEPLVQRGAEGDVYKAPTPSKETQGALDVKEEHNVQLEVPVDQDILGCYLYAKYTVVTRMLLWLSGL

SEQ ID NO: 928150 - protein, 132 aa, Homo sapiens
MIIISSKEKELPFFILWWSRTDGLNTMQVASLPLSFRFCGTRCDRYQAGMGHSLIHLVVHEAVVRCWQHAKHTPLARDTKMSGVEAQKSRFTLQTCVQPERGGLCGQQATNHTRMCFVPESGAKGLPSTLQG

SEQ ID NO: 928151 - protein, 160 aa, Homo sapiens
MPLFAEHTSKSGVATGTECIRASLAAALGCRWQCQAPRCSLGTCACCFALRLRMSPIVENRAENMQHTVRRVGEGVNGLLSCVLQQPDAGERARGSPDGVTGGLSWWEYEKAGESMGSCSMISERSQLCHGITRFVPRLLGQSSASGCHLLPEAVNGTVV

SEQ ID NO: 928152 - protein, 182 aa, Homo sapiens
MGSSSPKSTLDFLSKIPPTGSCLKFMPKLYASEISTLLMDLSIFNVKGVLKYARCLLSALSFLCCPGSTATFTELAGEMKAAPASDSLLSTPCQNLSCGPNFLVQQGVFMYGPLHTVAWTKDNDDRLAGGSNHFNENSPWQLGSSQAHISLAKIWPVDSSLIDSNNFEVSSRSEIENWPYVS

SEQ ID NO: 928153 - protein, 136 aa, Homo sapiens
MEVEIKVSTGLVFREGGSVLDIALRLEDAIAALRFRVFLLIILESKELFKNRITGSDPGNEFFRWRCKGRGREACGKMSTATETCLRKFKNASLGQWGPGGQEWSPCTTWGESMVSSPNNIFQRLPGRLMNKPFLC

SEQ ID NO: 928154 - protein, 135 aa, Homo sapiens
MLFELSLRQSSGRPGASAVSAVRSRGACDSLGPVKSRCRIQLGVGFQKESVRDERPPASDISPQSLFHLQLPGGSLSGVTLKPEDVALLLGFRAGYKLVSRRASAFVLFCLLTGLQCVEFEFTLFHDDCTKFLQI

SEQ ID NO: 928155 - protein, 131 aa, Homo sapiens
MRELSSAEVAITLENPGMENTACLRCPGMVGGDVMKSGTEKGVRGDTFVPLEVTVHRATGFGCLSATLKPPRSLHREPYLGNATSPVPGQELHVLLGKAGPLSRECFVLLEAPTFLILLASISFSCEHSVQ

SEQ ID NO: 928156 - protein, 158 aa, Homo sapiens
MILVFKFNSVFSLGQLNLLNDHWLLSMIRPQNAKDSTANGMQNTENPWYEWFRELHKINAFDTPDSLLVRGKEFVDSIHNTFDHMWRTQEHNEAGWFLLSSLDKVMKENDELRDSNSCLQKQILSLKSKIALSQSLISCRERADIVANQTEALIIPVT

SEQ ID NO: 928157 - protein, 167 aa, Homo sapiens
MSRTCWNLQSPTRPGPGPITHCSVLQTTKHVSAASTTYCSLSHPQSLILRETGNSQLDAWRHLIPESHSTTLSYPWNYLPPPGTMAASVSKQLLCFSDNSPGPSKRGNYGIYNSRQDLGGDTAKPYQNWCIQRRLTSQAGLHGTFIQTVSETQRARRFHSTVAGEAY

SEQ ID NO: 928158 - protein, 168 aa, Homo sapiens
MALGQTKTLAFTYGHLTTHVAGSHLVGCHGGEDPFNEALCPLVEKVCFTGGKPTHLGCPDSSELPEGEAKSVGPQRLWPPLPIGAQAQEDPNSVPEPLAGDPAGKLYPPGRMGQVPVLTAALPLMSSKGLESRQPQPVLVAPPPGSSAGLSRLQLRGCKNLCLLGLGC

SEQ ID NO: 928159 - protein, 137 aa, Homo sapiens
MPAASSVKKPFVLRSKMGKWCRHCFPCCRGSGKSNVGTSGDQDDSTMKTLRSKMGKWCCHCFPCCRGSGKSNVGAWGDYDDSAFVEPRYHVRREDLDKLHRAAWWGKVARKDLIVMLRDTDVNKQDKQKSQIKIAKF

SEQ ID NO: 928160 - protein, 134 aa, Homo sapiens
MYGCMCQSGFADNGNWENIQRLLLNAHSQKSRFGSRLEGGNCDVAERNKSAPQPAGIRWGSEVKPQHRNGLNIPALCWYKSLCIPCVSSQCRCHEPSIALFSPEKFLLFNCLPGRLGCQKKMPFIFKFSLSFQS

SEQ ID NO: 928161 - protein, 151 aa, Homo sapiens
MGKWCRHCFPCCRGSGKSNVGTSGDQDDSTMKTLRSKMGKWCCHCFPCCRGSGKSNVGTSGDHDDSAMKTLRSKMGKWCCHCFPCCRGSGKSNVGAWGDYDDSAFVEPRYHVRREDLDKLHRAAWWGKVARKDLIVMLRDTDVNKQDKQKR

SEQ ID NO: 928162 - protein, 176 aa, Homo sapiens
MGVQPCLGQLHCGVFLFPGHLWPQQRAPATLNWGPTLGIPSVSSQVLGTMLSLLPPPGFWALAPTSPNPMLPAGPIAIPALPPSAHTHSSGSETLPCQHQAPCYGLAHPFQGQGAAPSLTGPRHRRTQAQGASGISTALKEWTDASGGKIRCCPKHEGKFLVQSHQIRRSQWSSKD

SEQ ID NO: 928163 - protein, 155 aa, Homo sapiens
MDLKPETKKGLREKLDPIETNEIANANSHQQIQKLIKDGLIIHKPVIVHSQAQCWKNTLACRKGRHMGIGKQKRTANAQIPEKVTWMRKILHRLLRRYRESKKIDGHMYHSLYLKVKGNVFKNKWIVMEHINKLKADKAHKKLLADQAEAPRSKT

SEQ ID NO: 928164 - protein, 435 aa, Homo sapiens
MRLVAATETAAPPEQVGWRIEGDSSCIGIGASGGSSSKSGDLEHCRTQPDLGWGGTCRRCFWTSSRSDSLPAPPPHAAAPTSSRGIPQVLTHPDVESHTTPVPGSGLPVAGSRATTTLTAGSLTAGDLRRPGGSGHSSSRTTRPAASRITGYLAAGSAEQQILALYTPGQFLTDSPLPPISEFKGPLPLHPLSASRTPSAPMQRAKGACPVMETLRVQEQRQTHRTEGHKTCALAHKEKYMAYRVHYPTIVQLASYQRAAGTVQAPSSASCPPLQLTIPLRTGHSPHPKLLPLLDVPAGATPQTGPCPDSAPFSSPFLSPMSVPTPRPVLSAQDPRGSDGQISRGTWSSHSTPQDGTHPESMWVGGPFPGPRPTGLLSQPGGDGRVTGTSPSTHVDTQLGMYSHRAGRGQVAPKLSDLLQGHKSYWIRAHPYDLT

SEQ ID NO: 928165 - protein, 120 aa, Homo sapiens
MHSRAIMREPCKCLVENLEHSSFVTVFPNSWAWEQLCGRRFCGDITLENSDYEIPLLERYSIPSCINSCIDVPVTIAGICDYSGLYNKGEIKVAGTNHSNCCEQKVTSLCSLLLPCKLAN

SEQ ID NO: 928166 - protein, 141 aa, Homo sapiens
MKLPEEGSGSNICCSAIFAVLQPPLVIPRQTRSGVDLQQTPTDLQLRVLTVRRKTNKQKGYPHQNPVYKWLTRINSVEKSLNGLMELKTTARELCDTCMSFSSRFDQVEETVPVIEDQMNEMKKYREHHKDTPQEEQLQHT

SEQ ID NO: 928167 - protein, 143 aa, Homo sapiens
MSCWYSGIVFPGPSGSLLCSPGPLHTPCSQHHEPVGISAQIFISVLLLSSWTLSALLQEHTAWKKNFYQLGLKETDTTQNGKYYQRPQQSLGRRQPENAKNYKWDHSPWTGRLRRQSQCHGEPFPEAGLQSCGHINYRIEVDQ

SEQ ID NO: 928168 - protein, 223 aa, Homo sapiens
MPKAVTQHGSVSTAVTQHGSVSTAVTQHGSVSTAVTQHGSVSTAVTQHGSLSTAVTQQGSVSTAVTQHGSVSTAVTQHGSVSTAVTQHGSVSTAVTQHGSVSTAVTQHGSVSTAVTQQGSVATAVTQHGSMSIAVTQHGSMSTAVTQHGCSTQNSHLGQLHKGLLKPSPDLIQCAVAEDHFLMFARMRGMRLAGTPTVRLGPTQPGSRVLQGSALPRSRKSSI

SEQ ID NO: 928169 - protein, 158 aa, Homo sapiens
MPSSQEMGQGRAGTPGLGALQEQASDCAGSAIPFLQGWQAAGIPPRWLPQDAACWASDPNVLGPPQALWSVALRWPCSNSASQALTAGVGRVIQGGLDLESLHPECSAPGKLGIHRLDSGRMPGERRPGWAFTCCITPTKGIGDGNLAEDPVLSHRFL

SEQ ID NO: 928170 - protein, 402 aa, Homo sapiens
MMVMVVVAMVVVVVTVVVMVMVVMVVVTVMVMVVVVMMMVVVMVVIVIMMVMVMVIVMMVMVVIVVMVVIMMMLVTVVMVVVLVMLIMIVMVVVVMVVVVVVMVVVIVVVVVMVVVVIVMVVVVVMVVVIVVVVAMVVVVRMVVMVAVGDGGDGGGSSDDGDGGDSDDDGGNGGDMMVVMVVMVVVVVVIVMMVIVVTVVVVVGMVAVAMVVVVTVVVMVAVIVMVMVVVVGMVMVVIVMMVVIVVLVMVVMTVMVVIVIVVVVIIVMVAMMVVVVVIVMVVIVVVVVVVMVVVVGMVVMVALGDGGDGGGHGDGGGHGDGGHGGSDRDGDVVAVMMVVVIVVVMMIVMVMVMVMVVVVVVVFITVVKTVLQIVEAVESLTLEYKDLHFGGGKRIFTSTSPL

SEQ ID NO: 928171 - protein, 143 aa, Homo sapiens
MECKLPAVGRSWAAGPGDGSAGVSETSPATLLHSACTAFLVQVPAAAAALWVPLPLGSCSSTSMMTLFLYGVFGLFLDPVLLSGKLALGWALLLCPLFLHSEHKASALVGAADWELLLGPRQNVSSIPFLVPTARLDIDKARC

SEQ ID NO: 928172 - protein, 143 aa, Homo sapiens
MTPNSTRALQLKFFSPTADSFFAYAGSFIPQAQCSPPPQSQDHSGGVQEGTGACTQGSGGLLQEAALKHLPLGLAGGSFHSHRAPAFCGPSPGFPLDGGGSLSFLICKVGLVLTERSRVLQQVLAIRSCTQWVSSSASQALGQ

SEQ ID NO: 928173 - protein, 150 aa, Homo sapiens
MHVLKYAHLFVKDVVVFGRYTYAINYGKALNKCNETIFCREKHKIKTKKTEAKTELRLYLGHSALKVLQPDSNSSNSGGDGSTPGEDPRIPPPTLPSIQLLEWGTLLKGSIMQITNKYMKRCLTSLVIRKLQIQITMKYYCTPTRMAIIT

SEQ ID NO: 928174 - protein, 118 aa, Homo sapiens
MGKLHVSGVWCTDDFLMQVLAVLLYSLNSLWPSLTAGLILLTLSPTFVTVLGEKLGMTDCGGEWRWPAEVGPEGAPNTACELPTGTDRRVCLPHAGVGDFAIPGSWDQSLVDTKRQLY

SEQ ID NO: 928175 - protein, 150 aa, Homo sapiens
MCVSIKGKVLQTAAITHTLRAKDNGRRCSSWTPMCTGTRTTDSPHLAQQLIPRGHTGGPGLLSEDMPLPHNTYPKLGLGIGVGIPGSLMVPYEGQAGHLRNSPLGPKAQNMHGLGAGHALLTLDGSIRLLEGGSSQLPRWQAPPRAISLL

SEQ ID NO: 928176 - protein, 249 aa, Homo sapiens
MALMGGIGFIHHNCTPEFQAKEVRKVKKFEQGFITDPVVLTPSHTVGDVLEAKMRHGFSGIPITETGTIGSKLVGIVTSRDINFLAEEDHTTLLSVGSSRPDLVAMITCTDLKKNRDYPLASKDSHKQLLRGAAVGTPEDDKYRLDLLTQAGVDVVVLDLSQGNSVYQIATVHYIKQKYPHLQVIGMTAAQAKNLIDAAVDGLRIGMGCGSICITQEVMACGGPQGTALYKVAEYALCFGVSIIADGGI

SEQ ID NO: 928177 - protein, 165 aa, Homo sapiens
MSNTWQAIFRGACGRQSSPASGFVEIKESPFSVSESQIQGVSGKLGSTLEKFVITNLLKPTSVNSSKPFSIQLCSIAGEELRSFGEEVLRGGAANLHWSWVTRKALGTTRWGVPGGPGSSVSTVESPHLVPPQPAEAQARQMEEVAGALLHPRTQKLVRAQPRGL

SEQ ID NO: 928178 - protein, 145 aa, Homo sapiens
MHRAQGERASVDEEVDLCSSRYAFSEMYSHTLAALWSLGCPLVTGLQHYNPSMHGTEGACANQWRKERGSARLSGLGGRCSLINTHSPFVTGLQRYNPSMHRAQGKPFITGLQDYNPSMHPAQGQCALLEEKARLWTPPSASWER

SEQ ID NO: 928179 - protein, 1996 aa, Homo sapiens
MDKNSDPLRSALEFYLREKQSEPSSSVLESYMRDIHSDHSSSVLEPYVRDKHSDHNRSSVLESYVRGKHTDTCSSVLESYYVRDKHSDPLSSVLESYVTDIHVEPSSSVLKAYVRDKHSDPRNSLRESYVRVNHSERRSSVLEFCVRDKHSDHSSSILESYVREKHSNNCRCVLESYVREKHSNNCRCVLESYDKEKHSDPPRSVLEFYVREKHSDSCSSVLEPYVTDLLVDSSSSVLEPYVRDNHSDPRGSVLEFCVRDKHSDPSASVLESHQYSGILCGGKHSIIAVFRNPIVLEFPVRDKNSEPSGSVLEFPVRDKNSEPSGSVLESYVRDKHSDSSSSVLESHVRDNHSDHHSRVLEFCVRGKHSDRRNSVLQSCVREKHSDHSKSVLESPVRNKHSDPHSSVLESYLMDKYLEPSSSVLESYVNPDSSVLESYVRDKHSDHSRTVLEFPLRNKLLDPHSCVLQSCVWDKISKPRSSVLESYVRYKHSDNRSSVLESHVRDKHADPRKSVLESYVRDKHSDNRSSVLESNVSDKVSDPSSSVLESYLRDNHSDTFSSVPESCVRDKHFDHCRTLLESLVGNKHSDPRSSSIIESHVRDNISERHSSVLEYYMSEKYSNILGSVLESYVTDKHSDPRRSVLEFYVREKHSEPSSSVLESYVKDIHVDHSSSALESFVTDKHSDPSSSVLESCVRDKHSDPSCSVLVSYVMDSHKDPRSSVLEFFVRDKHSDIHSSDVESHVSDKHSDHSRSVLESPVRNKHSDSRSSVLESYLKDKHLGPSSRVLESYVRDKYSDPDNRSSVLESYVRGKHSNNSGSALESYVMDKHSDPRSSVLESYERDKHSDPPDPHSSVLESYMSDKHTETSSSVLEPYVRDKHSDHARIVLETYVRDQHSEPSRKVLKSCVRDKRLDSRSSVLESYVRDKYTDHSRSVLESYVRDKHSDPHSSDLEFYVRDKHSDIGSIVLESNVRDKHSDPHSSVPESCVRNEHSDHSISVLESPVRNKHTDPRSSVLESYVTAKYLYPRSSVLESSVRKTIQNLVAVLWNPIVLEFCVRDKHSERRSSVLESYVKDNHSDHRKSALESPVRNKHSDTSKSVLESYVTDKHSDPSSSVLEFYVREKRSDNHSRILESYVRDKHSDLSCCVLESYVRDKHSYNSGSVLESYVTGKYSDPRPSVLEFYVREKHSEPTSIVLESYVTDRHADPSSIVLESYVTVRHVDPSSIVLDSYVRDDHSDPRCSVLEFCVTPINLHPSSSVVESYMMDKHPEPSSSVLESYVRYKHSDPSSSVLESYERDNHSDPCSSIVEFCVRDKHPETHSSVLECSVSSVLESYVTDKHLDGSSSVLESYVRYKHSEHCRSVLESPVRKKLLDPHKSGLDSDVMDKHLDPSSSVLESYVRDKHSEPRSSVLESYVRDKPSELSNCILESYGETNIETTARFRVLESYVRGKHSYTHSSVLQSYVRDKYSDHPSSVLESYVRDKYSDHPSSVLEYYVRDKNADSRSSVLESYVRDKNADNHNRRVFWNPMGGINIQKTARASDILRFGQTCIPSSQCSGIYVRERHTEPSSSVLDSYVTDIHVDPSSSVLESYVREKHSGTSSRVLESYMKDNHSDPRNSVLEFCVRDKHSDHSRTILESPVRKKHSDPRSTVLESCVMDKHLDPSSGVLESYVWDRHSEPRSVFWNLVDKHSDNHRSVLESDVRDKHSDSCISVLKSYVKDKHSNNRSSVLESYVRDKYSDPRSSVLESYVRDKLSDQSSNPHSCVLESNVTDKDLDPSSSVLESYVMDRHSDNRSSVLESYVRDKHSEPSSSVLESYVRNKHSNKQQRDFPEFYVTEKDSELRSSVLVFYAMDIHADLSSSVLDSYVRDKHSDPSSSLLKSYMRDNHSVPRCIVLEFCVREKLSDNHGSVPESYVRVKLSEHRSSDLESPVRNKHSEPCSSNLESDVTDKPLDPSSIDLESYLRDNHSDPLSSILSSYCSGIRCEGPTIRQS

SEQ ID NO: 928180 - protein, 139 aa, Homo sapiens
MVFPWSWLLCGLGSPPTTPAKLCVVALVSGLLAGGFCPCTALPACSPRRHLDVQPLVSSADVFLWTSSHLCVCVLMLRFQGFHRHRMGVWWARVGLGNATFGHEGRSACPHLGLWVHGKLSSPKPVPGVKKVGDCCSRQ

SEQ ID NO: 928181 - protein, 149 aa, Homo sapiens
MFLSFVLFVLHLRMHCPIQASEVAGSTGTCHHAWLIFVCFVETGFRHVAQAGLKFLGSEEKQSFSGIFVRSCFTTWGKELTEVRLLTFQGNWEIAVLSSLMCRFQSDGPKPWRKTFPGHKIFKRLLDRFTSQRNSDYKFPKLLRMGVYS

SEQ ID NO: 928182 - protein, 249 aa, Homo sapiens
MGRFRSSSSLGPQAAYSYLALQGSIERVARGAEETTQMRRNQKTNPVNMTKQGFSTTPQNHTSLSAMDPNQEEIPDLPEKEFTRLVIKLMREGPEKGEIQCKKIQEMIQEVKGEIFKEIDSLRKKQQKIQKTLDTLLAMRNALESLSNRIEQVEKRNSEPEGKVFKLTQSNKDKEERIRKYEQILQEVWDYVKQPNLKIIGVPEEEENSKSLENIFGGVIKENFPGLVKDLDIQEAQKYLGILCKKVFS

SEQ ID NO: 928183 - protein, 141 aa, Homo sapiens
MHMRHAAELQWLISDMHQQDREGQPTADAEYSRTNLEGVQTLLEKMWVSSLDTRKVLNFGQTTADPSSLASERPPAGCRGSTTLSKCIQGIPGNWWGRRSLERTVCGSSGFQRVLCKDNHQTEAAMSQRDKGWAGDWGRLY

SEQ ID NO: 928184 - protein, 184 aa, Homo sapiens [sequence omitted]

SEQ ID NO: 928185 - protein, 120 aa, Homo sapiens
MCLQISQCIVKIPMHELELTRTCSQAIFWTEQPGRRWVPRAAAPGTPCLPARVTGHRPGCEDEEASLLGSTLTASPREKPQAQEATLAMSWRTYYLYTEWKPTKCQLDRWTDSGCQDGCC

SEQ ID NO: 928186 - protein, 145 aa, Homo sapiens
MWAVGAADRLCVQESERRAPAAAGCQPSNGSQGPREVVLAGDGSSDAKASAKEASPVPPGEGTELAGAPGLTRPTLPGHRGGIDGTRAPQLAQHGHCWVLEGGVGMSLQPELLPNRPLNPKARVPMVSLCPGHPGLQCSWAGRGT

SEQ ID NO: 928187 - protein, 139 aa, Homo sapiens
MPPAGLPSTRPDLKEKKEVVEEAENGRDAPANGNAENEENGEQEADNEVDEEEEEGGEEEEEEEEGDGEEEDGDEDEEAESATGKRAAEDDELRCSSCGGTVSDFVGGHCVVLNLKNRKETGLGSTSQRPWAVELGVPG

SEQ ID NO: 928188 - protein, 146 aa, Homo sapiens
MTAVALPITPAFLPARKRNEEDVAKSRHLLSLKEDSQKLQHTLSLTSHGLSLGLGLYLAVSIQSAKRERLVVTCPLNKELQALPTVFSNPSLTGEYESSKAGMGTHKRLPMSTIPPQPALQPYCPVPLRSGFCWCMSTKSCHPFSV

SEQ ID NO: 928189 - protein, 135 aa, Homo sapiens
MVVMISIRAGPRSLLDHSQLPPVCQIHLWALLPLLLHFQCPLLDVSFHFCYTASRLNRSNCVCGVSALYLPGLEMEILKPSNEGHYRIPGPSEAKCSWQNAQEVPFLPGYSAVFSYRLLKIQISVEVGSHTDVEV

SEQ ID NO: 928190 - protein, 146 aa, Homo sapiens
MRVFDFGDVNTDHGYNDFFPSSAALISVVDNHMQGMGHASALEISVERTVMLRYVFLLPELWVWSASSKPICCAAKASSWLNWSKLHGKGKKAESLEYQRGGDLTFPSVLNSVSSSLKMLARSKVKHQSSLAKWVQSVLLKMKGLL

SEQ ID NO: 928191 - protein, 152 aa, Homo sapiens
MFASGLMRRAAYCLVETVLACYPRHIFGHDENVGRYTDGKGHSEEVSDGTEEQDLEETQKLRRVESGASLKNTGRGDSQWDHLPFCLVRAPVGYLSPCLPFSALGHIPGCPKIPAPGEELSVGVSLPKCGIRKDSACPEAADLRVFRRLTPT

SEQ ID NO: 928192 - protein, 143 aa, Homo sapiens
MADKTGDAQAPAQWRIRQQTKDKKSELSHQNCALEQESTTMWDLVVIYVFEAKPRQTRHQAYSSKPSPPLLTSFSECPPSENHFTGADPPKFFCVSLLTLHLREKIKKSSPELPFFKTLCSRSGSGECGEQQGGISRGLNSKC

SEQ ID NO: 928193 - protein, 152 aa, Homo sapiens
MTPLAVENFPCVLFIRVTRLVVSLANAGDTVALQPGGMCDEFLVLEGISFSLGATLPKGRFLYSKIASFSNMHCLFPKAHYSFASVPISGYSVTTCTGFDSLGQGPGFPFGAGNIKTWGHRADPEGLLSIMASPSLLPFTPGSWTHRCQPAK

SEQ ID NO: 928194 - protein, 294 aa, Homo sapiens
MSDKLSYKVADIDLASWGHKGLDIAENEMLGLMSVWELYLGSKPLKGTHISGWPGNCHASNIHYFKDVPLNMILDDGSDLTNHIHTKYPQLLLGIQGISEETTTRVHNLHKMMAKGILKRDTDVMIVGKVAMVAGYGDMGKGCAQALWDFGDPFVITKIGPINLLQTAMGGYEVTVVDEACQEGNIFVTATGCVDIILGQHFEQMKDDAIIWPGLAEEQHGTILLVEGLLVILGCSMGHLGFVMSDSFTNQATVQIELWTHPDKYPGGIHLLPKKLDEAVAESHLGKLNMKLTS

SEQ ID NO: 928195 - protein, 170 aa, Homo sapiens
MLLVSLTRWLCHVWPGIVVEKNWALSVDRCQLQALQFSVHKAVADHTSGRPTNSDQDLFLGATLALASALELLPSPTTELVVAGCHIKSTFQPGYFLFPGEWWRGSSPHPVALPTGLTLRKVLLHFPQYSGMRGGRNAEAFSSWSSTGPMSLCPSMLSEDGMLGTAAATL

SEQ ID NO: 928196 - protein, 125 aa, Homo sapiens
MNSAVKPSGPKFFFAARFLIMVQVLNFFMIQYWTQCFSLTLPLIKNSNNSKYQYSSVKSMQSLEKQNQGQQLIKRRNRAMPFDAKLPTFNSKAQKIILHYIALVTLTTDKLIYLHFTFNIAIRFC

SEQ ID NO: 928197 - protein, 125 aa, Homo sapiens
MSSRPQNGRYTNSLHCALGKATDAQHQPMKAARREAVPCKATGAELPKTMGTHILHQCDLDVRYGVEGDHFGALRFDCHTGFWTCLGPLDLLFWPVFLIWNGCIYPMPGEDYKKINLKVRKKPGT

SEQ ID NO: 928198 - protein, 252 aa, Homo sapiens
MWESLELPRDLEGSEDRKMWECLKLPRDLLNDFDQNAESDMYNEVQAEVVSEGDEKFVGNWKEISKLQSIQKVTEHKSLENLQLNNAVEKKNPFSEEKLKPAAEICISNEKPNCNHQDNVSRECQRPLWQPLLLQAWRPRREKWFPELGPGPHAVFSLRTWCPASQPLQPWLKVAKVQLRSLLQRVQAPSLDNLHVVLGLQVCKRQELRFGNLRLNFKGCMETPGYPDRSLQQGWSPHEEPLPGQCRREVWD

SEQ ID NO: 928199 - protein, 157 aa, Homo sapiens
MRKRPSILLKSIKELKLTKSLHPDNEMPDPTFIMIASFPLPTPTWMDRAACGDLYHEILFQELLGEHTRKVERIRRPFEGGGLPLQALCYSRGTVSLLAFSAERLEAWGKFSTLLTGCLEINTVLLWGQGGNETGHSGCGLHGSGVRTVTAGFLPLP

SEQ ID NO: 928200 - protein, 168 aa, Homo sapiens
MGLGLRVFTLTSTASVLLELEGLHCPQSSAGYTCVSLLPDFCLICQPFQEGHGSVMTHRGRKYLFTHPSLILCGCLTCSSSILGSQGPDKTQGRVRELEICHALTAKLGSSQASPRGAASFCQMGTDHPSHGAGGNHYPLHPWVNHLKQKKYRTPESSIVLYQVDPFG

SEQ ID NO: 928201 - protein, 141 aa, Homo sapiens
MLRTQAGQDWQGAPPSCGELISPAQGPRFSRGTRYQIQRYTPRATFSIPGNHRRWLCAWGKPYVDRSKIPLTCHFLVIPVLDSSSARCTGGGFARESSHVCVIDPTPRHPGILRRLVLRLDFMLDICTSLTFQMAHSQFER

SEQ ID NO: 928202 - protein, 226 aa, Homo sapiens
MGGSQSYWVAFSAFSYNRRNIRALTLVLNWGGENKMEQPGQLAPLKGTSLIEVLPVPRKAGVRRVTSSTQVHGELVQPRRREWGIHSRSWAPGLRDTQPFREAGDEDAVGIIVSAPPMAVPGRQRGSNEQAMLPGGLGQLRSVVMRVGACEEGEEGEEAQSLSHNLNRAPRGGAGPRVVPCSIEPVGARNRKELHPPRAEEVMDDQLQRGAALSAESWTLLRTLWL

SEQ ID NO: 928203 - protein, 176 aa, Homo sapiens
MPEHAAVTVAPGPGRPGDNVARPGPGSFNNSEIGAATDSRVCAVTGQTCSHHPRRCVIQELAVGVLVKGVRAPLNGAKGSNGMERREKKGSRLEGVRSMGDRRQESGSLIKTRTVLPERDSTGPSPGRSLGQGQTQDTDKSSAPAPKETIHRTVGHARQQREMAGATVSGEERAGA

SEQ ID NO: 928204 - protein, 150 aa, Homo sapiens
MRREGGAAAAESSERRPGICTVALLCFLCLTETADLPNAREMHHPFLYLLLFTSTGCHLPHSSGSLRIAAKALFQGNNKEMETRKTRHWLVKPARQPHWFLLNLVKNLRDQAGLHGGGVLAGACEDKEELTRQQQWRQRDIAGFCSSVGS

SEQ ID NO: 928205 - protein, 144 aa, Homo sapiens
MWMMWTTWMRAPAGSKAPSCGKAGGTEWSQAQGPCSQTLLSDKARAPGRSMGDREESRCRPWACFLGRQKGLGGKLIPNIQGPTPELCAVWGFPGMAATPAGGTGTSYVTGFSTVLQKLPGIGSAGPRWVYELGIAFLRSILGR

SEQ ID NO: 928206 - protein, 138 aa, Homo sapiens
MSGKEHMKTLQNPPFSWRAVLAQPPRSVTPPFSGKELLLRVEIRACAQKKIATNYDTLKADKHYKHHNMKKNSSNSHLIIISLCGKTVLSFKNWVTALPAQPNTPIGTVGKTAHVQVRTLLGGVQKGDSLLESGLAVP

SEQ ID NO: 928207 - protein, 157 aa, Homo sapiens
MPAKVNTKHLQKASPAGPSPLVQGSRRANLRTILGDLLCCGLLDLASRARKPGEKSLWEDCGADAGRVQGRECRGRSRLALRRPTLPQPFDSTALQLLSETTPLLCILGSEPPQCSEFWVQGLPYSELKGASHIFLQSNGVRSTGWPGPQTTCWGLP

SEQ ID NO: 928208 - protein, 119 aa, Homo sapiens
MNDVPLCVHVCFIQSCVDGHLGCLHILAVKDVVGYLGPGELNIDPMGVEQHSFPTKGLPKAASGWRSVEFKDFKLASLDLTQTQQRQAWEGGRVILHEKLRAGNPGQREPEGTLEEEGV

SEQ ID NO: 928209 - protein, 146 aa, Homo sapiens
MPFGGSAPPAHHAVLVSPRGRILTRSAWQLFRVPQESLSTADAPSSRAPHPVLTPQSLSDDSSEGFPRADTFLETLDGGCTLLIEGSVSVSPSSHVATLGAIPLIASCPVFCLQFCLQLCTGILFDQTSFLHMVPPPFLYHCRSQQ

SEQ ID NO: 928210 - protein, 221 aa, Homo sapiens
MLIAKKMGKVSPEHVRDLHGIPPLHRLTWLQPLLSIQLQQQRTTLSPQYGTIPWRDPPAAWWQIDYIGLLPSLKGIVLTGTDTYLEYKFAISTHNAFAKTTVHELTECLSSIMVFHLALLLTKELISQQMKCGSGPILLEFTDLTMFPHHPEAPEVFAEGKENIKRVEKKGFLFSPSYYTELNIQIHSGADPKPPSGCSLVFSKEKEKKSSVSPEWAQLHS

SEQ ID NO: 928211 - protein, 173 aa, Homo sapiens
MQAEEENELRKKQEQALMEKLLEQEALMEQQDPKVRSAALMRQSPSHKSKRQQQELIAELRRRQVKDNRHVYEGKDGAIEDIITALKKNNITKFPNVHSRKRVGQGHTNSNESRSQEVSLKGPLADFSTQAALIGCQLAFVLLRHMLLKVAILSLALSPLQILETNHTDEPMR

SEQ ID NO: 928212 - protein, 141 aa, Homo sapiens
MPRISYPHLTSSADKHRTHNLQSYPSGTFQHLPNVPTLLFKQSKHQTLTIPNASKDMEQWELSFTADGNAKWYSHFGRQFGNFLKAESSNSAVTLLGIYSNELKSFVYTNTCMQMCIAALFITAKTWKQLRCPLVGKWINK

SEQ ID NO: 928213 - protein, 327 aa, Homo sapiens
MAKVLTLHQTFSDITVEGERDTSLLLCGDQQGNISATFEPFPFNLLKEFKQAISQYGPGSPFVVGLLKNAAVSSWMIPTDWDALTQSCLTSADFLQFKTWWADEASIQAAHNAQAQPQINITADQLLGVGSWAGLDAQLVMQEDAIEQLRGVCIRAWEKLTSGGEQYPSFSAIKQGPREPYVDFIARLRESLKKMIADSAAQDIELQLLAFDNANPDCQAALQPIRGKAHLVDYIKACDDIRGQNQQPIWIPSRHLKPYHEPDAKEEIPGGSQGHLNCSHVKTDTEEDPNCHEQHPLNTATYLGTDQEAITDGGRKPGESRTTSQNE

SEQ ID NO: 928214 - protein, 140 aa, Homo sapiens
MEETLRVCLVRLPSRKYEISMHTAIMNVDIVSMMKYKKHALGSRLSSALALLSLVMWPCANCWTSMSLSLPSPQAGKMRGNLRADGTAGKNPFTTNKWLPKLLIQCRSNGIWYKNETLLRKNNSFWRGCGEKGTFIHCWW

SEQ ID NO: 928215 - protein, 158 aa, Homo sapiens
MQPSVCGQTPKSPWKITGGPERWRLAHGPELSGPRALRLGPIYWLTSSLFLGQMGGGGRDEERINQRRRTRGSFNKMYSRGAKKFDYTPLLQGSVFSLRNLWNATERMVIFSEAYSFGRDAHGVVREEGDTCLASQISRINLGNQWGDRCSSQIVLTP

SEQ ID NO: 928216 - protein, 134 aa, Homo sapiens [sequence omitted]

SEQ ID NO: 928217 - protein, 148 aa, Homo sapiens
MYDIDLTYTTPDGKDKKERESVGSRAAKPWFSSGQGRQSGRGDHKQARTDKHKRECHKDGQKPRSALVNSDLGYKGILLKLGPFFRELHTHLTQMSEKVEEDPREGGIIIGLLLLHVHAADRQQHMCVFFLTPSTSQKNLSHGPSNPA

SEQ ID NO: 928218 - protein, 148 aa, Homo sapiens
MIWAVGLSQTALIILSIHHNGRGNAAGIRGEGLLLVIMCMVVLEVVLAWRQGACGHSSRWLLCAQQARVVTQGEVGSPVLCAMLTQSMVLVVAEMAGSAHQGFTCNGIWSGEQGWSTDIHIYHTDIQTAKQCGELLWAKGKLQHKEGA

SEQ ID NO: 928219 - protein, 213 aa, Homo sapiens
MVNPIALRLNSYWACKAQTQNTLVARMNPKGSGRQPGRSPPRRHSVSPPKAPNLWAKNLQQGSKKALMLAVLGSLSVSHLPSGLGTITFSFRTFRSGSEASVSERARRLTERRPAASRDTRAQRALCFPALPCGIPQVAALTGRELSGFQPLRPAGLGLQAPGEAQQVPHPPLAKRVHSPPLRGLKEGGRQLFSDHLRVPDTGLSSVLNIEKQ

SEQ ID NO: 928220 - protein, 148 aa, Homo sapiens
MSLWCHSSNKFQMLLDNFKWPVFKFPNYLICWFKSAVEPMWLKMSIQLLHFSVQEFRFGTLKIISICSYAHFVPIYFFLISFSYLFFFCFLSIFKTVVLKSFLPFEMCVRRHRDKSLSQPLHKVEIANLISSAFCASLMGSGASLSVP

SEQ ID NO: 928221 - protein, 135 aa, Homo sapiens
MLGPSVNAKFAHRGELTNRRMENFLIIDDSSQPVKPSSLEFFLLLEFLSLQKINMALGRCETPRAIATVSCCTQVHHSLAANTHPDAALGEQGMQSLFLKPDKPLLPQGTFFHRRHGAKLPVEETHPKEQKLDMK

SEQ ID NO: 928222 - protein, 138 aa, Homo sapiens
MGASHIGIHGWHLPRTLGLGDKDGKEKEVCLLSFHLTFRVFAERRKGMRDAKFPVFQNGQQTSPPPVYTQKRTMGPDSTLEDLLKGATLVFQTQERGRSFNGHHSSSQTPEFLRKDQILPAPSPFQFPIPLRATSISQ

SEQ ID NO: 928223 - protein, 153 aa, Homo sapiens
MVTEMEVTHEDSEGTRKRVGSISAARGTWPWLQQTKDGQEYFSHNVSTDISRMLNRGIHHNQKNARSVPPQQGLARTPKTKKKFKDSVTPYHKFTGALHPPNSVMPHCGHTDEGRIDETEKVPKGIIYNIGLDTVLNQIRLSKFPFLSSNKGS

SEQ ID NO: 928224 - protein, 136 aa, Homo sapiens
MCKSNMLLPFSWGSSPHSFWCSGSPCDLDLQVHGCNLVVPPPHPPSPLILPHDCLSGGEVSKVVPAGPPSLPFCSACQLSTGLPQSLGTSLCYRIAEILIDSKHYQRSFYHRFLEKIEEIYAKNKSQSLPYTIHKN

SEQ ID NO: 928225 - protein, 118 aa, Homo sapiens
MKNKHFEPRAVERHWVVQGSLGHLFIQEEMVTPGPKGVVGIRKLGEGTPGGENVKDKGLDGIQRVANFASENSPRMHVKVPGLRHQVDIGISGPGVVMSEVLDNSPKAGAYFKGGKVK

SEQ ID NO: 928226 - protein, 145 aa, Homo sapiens [sequence omitted]

SEQ ID NO: 928227 - protein, 305 aa, Homo sapiens
MLQNVSQSCLWPSCACAPDSINALECISAIVGLCPQLTVNVLECTSAIVCMCSRLTVNVLECILAIVCVCSGLTVNALECTSAIVCVCSRLTVSVLECTSAIVCMCSELTVNALECTSAIVCVCSRLTVSVLECTSAIVCVCSRLTVNALECTSAILCVCSRLTVSVLECTSAIVCVCSRLTVNALECTSAIVCVCSRLTVSVLECTSAIVCVCSRLTVSVLECTSAIVCVCSRLTVSVLECTSAIVCVCSRLTVSVLECTSAIVCVCSGLTVNALECTSAIVCVCSRLTVSVLECTSAIVCMCS

SEQ ID NO: 928228 - protein, 141 aa, Homo sapiens
MNPSDMDPKAQSSIGVTESLQLGNHPALTHHAHLHLLHLQEAAGWQERREEPCDKEGAWESGPILRIGHYKYRCKTQGRLTRTALLQGALGREHAEGRAYTGQCKLATHTWPVTTHVTGLPGTLHSAVSSLKSLDASRPDT

SEQ ID NO: 928229 - protein, 118 aa, Homo sapiens
MPGLVFDAGNATMEKANLVAKCNQQALKMPSGLGEMHSIQQGEPKVKTVPRSRSNAAPAPRCEPSCGRGFLSPGVCLVQGNLQRRCPKTCQMGTWRYMWEAAFKRETNRTPTSREQLS

SEQ ID NO: 928230 - protein, 287 aa, Homo sapiens
MVAETWGKGPGIGGPGLHVEWPLGPGIARGLCLASPPSALQPGDPGGCRHLLPPLPSLFTDPQLQPFSSCVRVGRCNSSCVRVGRCHSSCVRVGRCHSSCVRVGRCHSSCVRVGRCHSSCVRVGRCHSSCVRVGRCHSSCVRVGRCHSSCVRVGRCHSSCVRVGRCHSSCVRVGRCHSSCVRVGRCHSSCVRVGRCHSSCVRVGRCHSSCVRVGRCHSSCVRVGRCHSSCVRVGRCHSSCVRVGRCHSSCVRVGRCHSSCVRVGRWNSSCVRVGRDETISPQDEIQA

SEQ ID NO: 928231 - protein, 249 aa, Homo sapiens
MEPNYRELEPDGTEPEPDSMEPDGGLEPNGSMEPNSTEPELTAQNLIMEPESTEPELTARNLMSARNPTAAWNPTVHNRNQQYGTRTDSTEPEGTELDGTELEPDRWNPTAQNPMAQNLRAARNLEDAGGDWSMNSGRRTYLVLDKGAQGAQAKGAWCSMGHRTKNVGRPVSMDRDIDENAQLTGRQLGALVKGDKERHRRAGGTGSGAECGTGVSRQTWPSEPDDLRATTLRDVEKGRAAQMQTKAFQ

SEQ ID NO: 928232 - protein, 145 aa, Homo sapiens
MDPNYNDRGAAGLDRAAAASLSPSPAFPRGSGQPGVASATRSGDAVTPELGCSQGPHSVSSCGLQTPPFPARLCLSKQELKGCGRGKFAEAMGTSLLQAPLPACPQSPSREPLHPDPTLPREASQAQGLARGGPHCLTLLPVIKV

SEQ ID NO: 928233 - protein, 153 aa, Homo sapiens
MSLHELCLPSCSIYSYILQAFRGVNISYGNVKPMFLEAVGAGNGKSSAAVNMGKTPMYQDVEDSNSRRFLVRFCARHWRLVWWDFMLLTFLSHYFSCDCQLLALYSEVGERTTAPATGEGMLLTAREVPRRQQSNTGTLATPTTSGELHVTRA

SEQ ID NO: 928234 - protein, 143 aa, Homo sapiens
MRKKEDSRGTQRRAWYLSEKYRKDAECSPVWNNRNQSSLNLTYFSQSLYKSTGNFLPSFHSFSQEPGPPETCLGLRKGEQLVKTHGPHVAKKRGTVASPSPPSVERLQELPSVAPHAEHSRHSKQPELLEQQAVILLEPGMAE

SEQ ID NO: 928235 - protein, 266 aa, Homo sapiens
MRKGHFEEDLWNFELERDDLGYLAEEIFKWQNVQEEAEHKSLENLQPDDAIEKKNPFSEEKLKLAAEICINNEKPNVHHQENGKNVSRAHQRPSRQPLQSQVWRPRKEKWFPEPGLGPSCCVQPRDLVPCVSVCLAVAKRGQGTAQAVVSEGVSPKPWQLPRGVEPAGTQNSKTEVWVPPPRFQMMYGNTWIYKQKFAAGVGPSWRTSARAVWKGNVGSKPPQRVPTEALPSGAVRRGPPSFRPQNGRSTNSLHCAPGKATLDASP

SEQ ID NO: 928236 - protein, 150 aa, Homo sapiens
MPDTPRPTVGSRAAEASPTGTAPCSVAPALINRPKAEECWAHGWELAGSSASGPGTGTTRRNQLASNHKPTPAGRNEQLQTGRANNSRGAALRAVTLNGKVCSFTPEASKTTNPPEGRTFEQVRTSEGTSSGYAVFKNCNTHGEGLQLHS

SEQ ID NO: 928237 - protein, 194 aa, Homo sapiens
MLTLMHIPTRYMQQCTLTRLGRLETSTGNGGEAALYTQGPPAPSRAQPRQLRVHSRQRVHSREREHSREREHFRERVHCREREHYKEQKPDWETRSSFPCSQPRPSRRPCGFCLTSRPCFPLSGFHRCLPLPAAWLRSRWAPPPISSIASVQHKDQDLSLKSVCSTRGNRRSAALLLAPTGPSGIYNVSNKEIT

SEQ ID NO: 928238 - protein, 121 aa, Homo sapiens
MLGLAASYFWASHGIEFSSAKEALALTARGPAMRTKGMEGPGTTPSQCSCGADAAAVPLLFSKYQYFDSRGMFISIVFSAPLLVNAMIIVVMWVWKTLNVMTDLKNAQERRKEKKRRRKED

SEQ ID NO: 928239 - protein, 155 aa, Homo sapiens
MRPSEIVPRDLRMKDKFLKHLTDAGYTSTRKTGFLSIDSCPEHIHEKGVFLYHWKSYSVHMPISRPLPPLRWLLLEAGAVTLKDVVMSVGLRLLYGSLRAHVLLCKRHSDALQKSCGRIPLIVPSTLHITLPITRQPHQSLTDDEMQVKSQKIFL

SEQ ID NO: 928240 - protein, 147 aa, Homo sapiens
MLIPQTMGKMSPGHVRGLHGSPSHHRPGSLGRKNGLVGQAQGPHAVCILLDLVPCISATPTINKRGQGKARPMASEDVSPKPWQLPCGVGPVGAQKSKIEVWETPPRFQRMYGNAQTFRQKFATVPEAADPPGNIGGCEWYLPRKLC

SEQ ID NO: 928241 - protein, 140 aa, Homo sapiens
MKTKFLIYYLSKLYFDIASMTRNEKKIAFYFLTFKRSRTMLLQKSELLPSCTSILVFRFFCSFEVLPEVHQAENTGALVTSAKLTQRVEVSRQQKQAEKIREAHPPLSAAHVTSRKTEAIKAGHWADEIKFLKPYTESST

SEQ ID NO: 928242 - protein, 141 aa, Homo sapiens
MMCVGYFLKDRNCLSTTAEQQLIGLVDIWDEEIFLEENLQAEQASKRQLSLATHDSKNSSSPYNRSSICKPRVEDQGCCYHPTMHRRAPTAKNHVAQNVNNGVFENPWEWKRLTLRKQNHKLKVYFLMGEMYSEVQNIHQL

SEQ ID NO: 928243 - protein, 144 aa, Homo sapiens
MGWAAGKTSDMPWRHFPLCPHSKKNRVICQFMKPKWRIMEKFPCRSLAAAKANSQDEVYSHSYFSTMCLTLPIQKCLFCDLENGLFISFPPSKITFFSFTECRIVVVWRKPEVLWKQETQTLHCNGTRRNSLISHCTVTRHKGD

SEQ ID NO: 928244 - protein, 218 aa, Homo sapiens
MAPKSLPLRAELSMKIFNKWDQDPETFLQRIITGNGTWIYQYDPEDEAQSKQWLPRGGSGPVKAKVPVKAMAVVKDFGDSQSILFIDFLEGQRMITSAYSLKSIQGSPTLRQMHYQEEWMREQPIDQPERCIPDKRIGRVEAAWPSICGDNEWSNSFGTKQKALGVGKGPWRQSRHSSHKRKFFVMNRSSENSSILDANVHEENGNIHQPGSLNNCID

SEQ ID NO: 928245 - protein, 141 aa, Homo sapiens
MMLLLPLMKTVVINERQRQRAHHNRSMSSGKNCENHHTVNLSLKTSSAPNEYKRVKANICAMADKALHNQSRLLPPSLASSLPFSSPAAVHFTPSTPRSAASLLKSARPRTHWKEETLDTSEHLKEQTPDTPSLTAVTLTV

SEQ ID NO: 928246 - protein, 148 aa, Homo sapiens
MGDSENSGSPWNAHVRGRSCLANPCQGECGAGHRGHNLDQQGSEEERKMWESLELPRDLKSSEDRKMWESLELPRDLLNGFDQNADSNMHNEVQAKVVSDGDEELSKDLWRFEIERDNLGYLVEEISKRQSIQEEAEHKIWKICSPTM

SEQ ID NO: 928247 - protein, 169 aa, Homo sapiens
MILFIRSNINRSCHSLPAYKVSTEKSSARHIVTPLKVDSLLAQDRSKNAIKESHPGIRDTQEPAYCSVLVRFHTADKDIPETGQFTKERGLLELQLRVPGEASQAQWMVKVTPHMEADKRRELVKGTPLFKTIRSHKTYSLSQEQHRKDLPYDSITFHQVPPTTCGNSR

SEQ ID NO: 928248 - protein, 177 aa, Homo sapiens
MLFPFSYRQSLFQLPAAVATTSSSTLASQPALPLRCPQMTRQIPEVLVYERASDADCILGRHTYCNENPEIIHTDFKLCHFFIGVLCLLLDFHLVIGIVSFWWVLGLTDFKNEAMDPRAIFLSTPYSVHFYISLYGFVLSLTDLVFVSFSSCKCVFIPQQPALNSHSPENVHDQCHH

SEQ ID NO: 928249 - protein, 139 aa, Homo sapiens
MWIPHHDADSRAKSWSVASLLKSARPLTYQEEQTTLDVPPLRALTLTAKNLGAKYQAPVSQLIATSTAAGLKTQVSGFLGKGSLVTPDSLELGAWFAWNKLPLFLYFWAEPTVNRKESHSAPGRTGKGAGFRECIGKGH

SEQ ID NO: 928250 - protein, 138 aa, Homo sapiens
MALSAKFMLEEGSYKHSCGDQYHTVPVPSLPTPVPSRHYTGLHLKPVWYWVLSKACGNYSSLPGVGEDVMQALLGLHSWCHTGSPAPQMHCVIQTNLQVSLKDCSPSSLTATHIYSGPRPLYIQPVGEPARTQIPPAG

SEQ ID NO: 928251 - protein, 161 aa, Homo sapiens
MSWVQLAGTSRKYEDTLRESSRHNSREGAVCKEAGAGGKFYRVLLLGLHAEQDHFKQHLKCDHKRNFISFRPSLEKSQLSHGLNPPVEIKAAFTAPDVGHQSLAFLFFGVITSVSISDITWHSLCVSLSIFSSCYEDTSHIELEPILMTVSYFFCKHSSFK

SEQ ID NO: 928252 - protein, 167 aa, Homo sapiens
MVAKTKMLLVHIKVFEASRTAHLVLTLTFQRKILRSRENKANLPGQCQKGRTHLAYSEISQFEVKSKHLVSIGSKKQVFFLHNGALSPIKKNEAMLFICLTFKKIKTDSRQNDGTMDKEQTQRFPSLLWTPPCEFPQRGEHRCESELAGWSSGKPSPGSLRAWIPRG

SEQ ID NO: 928253 - protein, 180 aa, Homo sapiens
MSRRSAAQSSARPRELAGPRAGSARETEGARGELRLAQTPGAHALPGLEERPGHLSRGSLWLRASASVLPGPGQLPELAASPLWCIFRAAPRWAERSALSRDCAPPGGLSALAAEGTSCGLHQRAAGKALRWRPGQGRLLTRCPRLKPRQFSGIKREPDPFFLSKANLSSWPGSFINKQS

SEQ ID NO: 928254 - protein, 148 aa, Homo sapiens
MDPVLGAGHSASFVPQKSKGESLLPHAVCGWRAESSSSLSSLGKDNSKEYYTTWRNRRKISRDTKMTQVLKNMIHATKNTLQLSLKRKRLGVNIPVAQMAVHEWALVRRMVSRWSPASQRRRLCNRAWRPSEDLRQGEEDNFTRDKTA

SEQ ID NO: 928255 - protein, 258 aa, Homo sapiens
MVLLTSGMKPENPVNEQLLGVLSGISGRSCLHRYHPFSLLIPNYMFQVVSEAQDFPELPHREHSFSALVCLPALKIPECEDFNLFEGQPDSSLSLKVQHKCHVLWKVFLNSPGQKKKKKKKKKKKKKKKEEEEEEEEEEEEEGEEGGGGEGEGEREEEEEEEEEGGGGGEEEEEEEEGGGGGGGGEEEEKKKEEEEKKKKKKKEEEEEEERKRKKKKRKKKKRKKKRKKKKEEEEEEEEEEEEEEEEEEEEEEEEEEE

SEQ ID NO: 928256 - protein, 226 aa, Homo sapiens
MALLRRLPGAPWKVVHLQGGLLEVPLSPDIVPLVVIQKRRRLDYKLHRTIPNIDGKGNRIGTWTIHAHLIYLHECRGPGFSGSIVASAVSSRISADMSGGIDGGGGHNVNADGDGGADGGGGDGGDDDGDGGGGDDDGGGRGNGGDNGCGDSGGGEGGNGDSDSGSADGGNGDGSDGTGSGGVDSGGGSGGDGDGDGNGDSDGDGGSAGDHQCHLAALHIPKFKNT

SEQ ID NO: 928257 - protein, 179 aa, Homo sapiens
MDLEERAKVTSGVRPGCPGHCSSYGSICHNGGKCVEKHNGYLCDCTNSPYEGPFCKKEHYCSQINRGALAPPLLKLRFWFIYSPRCMTLVVYLNLKIPWFPHLRDVGSAGLFHRESCLTFDEHSTKNMGQPTALDAQGVLLIVARWPWRIIMVTRNHLQVKYLYPFWPVVLDAQITQPI

SEQ ID NO: 928258 - protein, 184 aa, Homo sapiens
MRPGQNYGTMGTVVALRTNREKGGEMENEFLLPINVNLAQQVPEQVSFVCLFAAKNLMDQQLRLSYNFSPEVEFRVIRSLTLGKVTENLGLDSEVAKANAMGFAGCMSSVQYNHIAPLKAALRHATVAPVTVHGTLTESSCGFMVDSDVNAVTTVHSSSGTLKSMHKGASVTSTTFCVFKKLPD

SEQ ID NO: 928259 - protein, 155 aa, Homo sapiens
MFPLLCPCVLIVQFPAMKTALRETCSQDSTRSHPRLTVTTTKVAVMFTQVPRALQSAGGEASQPCVLLFRAASFLRLQMGPEVLFRSQELKSKTLEVYFVFCCTKTELVLKPKDSILPLFSSLSTGRGASPHGHHYHSPMGSHARWFGDLNISEG

SEQ ID NO: 928260 - protein, 138 aa, Homo sapiens
MVGSAQFKLPGSFVYTVKEKEEEEEKKRGRRRMKKENGEEEGGGRKGGGDEEYGEEEEEGVEKQEEERRRKKEEERKSRSKSEFSSWFRSIAGVLKNLVFRITRIVILVLSHFCRLCQREDLGLKADVQIPLSRGMFS

SEQ ID NO: 928261 - protein, 155 aa, Homo sapiens
MLVGTLTSCCLFCVAGIEPLDREEKAVPMTCHALNLDDLVYSSQQTSSKGPIPAPPPPQEDLGSEELTDPLIQSSQPYREALSLSLPYRIPADEWVCTIIGDNMVHTLSPGLSVEALPGREERWLQLSVGRKDGECGVLRASLVVTPTWAQILPF

SEQ ID NO: 928262 - protein, 134 aa, Homo sapiens
MKRDRQSNAFPPSKMPTPWECLGSAMQVSTRPAGSPEGGTLTKLGRRLPGEADVNCSFEGWLRSSQVTDGKDRGHSMNKHAEEVGLKVTSHIQKPPRGCQPPVFSLAYNKTIATAQYYIYFPKCTSVCNEMKKQ

SEQ ID NO: 928263 - protein, 137 aa, Homo sapiens
MEYSGMIIAHGSLDLLGSNGNTRLLFQRQCAPWEAFSSASSSAGYCSTWQAAAHGAGNMWSSCLGSFPWCPSGGYTMSSEPHCLPVSGFYWHPREWIPTGHLSGLLYHLGIGSYQESIKHCIGQFTCILSFNPGNNL

SEQ ID NO: 928264 - protein, 175 aa, Homo sapiens
MGDARMNGTSEQVKKEAQSLNQRNYKWEVEFELSLKKARMIWIAEGSNDCKSCCSGTCHFSSFTFSIIIINTLITTLNITIITIITTTKLTTINSNITSIITIIITIITIIITTITTIITIITINTIITVSTIITIIINAIITIMTIIIIITIIVIIAIIIIFFILKIIPLLSNE

SEQ ID NO: 928265 - protein, 133 aa, Homo sapiens
MQDQGVPTCKLKFGKPSTISRIALSTAHLPVPSPECILCLVHSLKLCRDDNQDLDAFKSKTGLFAYGIPYVHTHGHYHIGAGGPCLRLKNPTDAPWMGQTEHLPFLLGKRGKVNSPVGLDATNMAADSGLCLL

SEQ ID NO: 928266 - protein, 145 aa, Homo sapiens
MIELEQRLVDSKNCLAFLIEYVNFSPADMRLNNSVFQWYGRMGEIFEEHRKIIEEKIEQYQEGLKLRCERFVEELESYAKQSEEFYSFGDLQDVQRYLKKAQILNGKLDLAADKRKLEEKEPYPLPYKIFTEFNCILYEKENENI

SEQ ID NO: 928267 - protein, 165 aa, Homo sapiens
MEQKGCGLQGLTQRQCGQMPTGSHFCLATAVYTAPLQIRKWCLWVGYGQLIGQLLHAEPQVGSVCLGAGPAEWRCNRAAYQPHRPPGSSCGKDWEPLSASGPDWNGKEGKQAGISKASSYPHSLHEQPSRIWALAHLVPQPDTFLPISWPMPFQFPGGASLQFLF

SEQ ID NO: 928268 - protein, 142 aa, Homo sapiens
MGCICLSHREMVTRRWVYKADIWVGRIEELGGGGALDTVSRAINPASGRRGSKLDSKCTHTHNYKNSLHSGNSLVLCTDREGPRGRSATVENTVNACGPGTSDHHSGLHGDVELSRGLGARWLPKGQGGISDSSWIPPKNVP

SEQ ID NO: 928269 - protein, 173 aa, Homo sapiens
MSHEVQRERGQRGLGKYPWSPMDQRPPLPSVTTGPGIHHCVPTANCDYLRTDTLAWSPALCRCGRQVLDDGGPTPRGLGLSLQLVQQSGHSGAAPSQGLQCLPTDDATRGQLQLQLLAGSTGFCTTCSPQPGATFPCANQYPSMDRNGAESPLGGTSKYPSMLVTRPVSNVLL

SEQ ID NO: 928270 - protein, 149 aa, Homo sapiens
MYSNLYVCHFSLFTLFMNHCWGTSAIVWRCSKSAGYNTLTGGPGQSTDVVAVGSALTQGASSSSGTAECMWGSGPGCQWRQKGVSMHAYWQKQQHCEVYACVSVGGVLVFLRGQVADGVGGSAGCTCADTTVEGCRQVHTSKAVGGGCN

SEQ ID NO: 928271 - protein, 221 aa, Homo sapiens
MRDPNTKRSRGFGFVTHATAEEVDAVMNTRPHKVDGRVVEPKRPVSREDYQRSDNIFELYGKIKGIEIITDQDSGKKRGFALVNFDDHTVTGNDHNYEVRKALSKQEIASASSSQRGRSSSGNFDSGLGVGFSGNDNFGYGGNFSGLGGFGGSCGGGGYGGSGVGDNGFGNDGSNFGDGRSYNIFGSYNNRSSNFGPMKGGNFGGRSSGLYGGGGQSFDKP

SEQ ID NO: 928272 - protein, 228 aa, Homo sapiens
MDMESAWKIISRFILHHVCEDFGVIAATFHPKPIPGTWNDAGCHTNFSTKAMWEEKGVKYIEEAIEKISKRHQYHIRAYDSKRGLENVWFLTEFHETDGRSDPSGADAAIMPAAVGEAPPGLCAPWSRWEPKTGEAVASQPQLRTQASLCSREPGKPPLPPDCFCYLASPGSWCPLRFWSKVDAEPRHSCDLTMEYVQGLGLNGSAKVLYFWNPLNDFYEFSYHFALG

SEQ ID NO: 928273 - protein, 159 aa, Homo sapiens
MCALDINTRCGACHFSIHTQELISRPHLESTFKMQSHSLLAYKVSAEKFVAGLWSAGVVQVMAVAVVEQPTGTQAVHGSVCIGEPGFIVLPQPGGHELSLRTGCNPALLSQNGSLDQKVGRVEPLPDKQCGEKAVGCVVTPHLSLTEAHCRAVSIVLDV

SEQ ID NO: 928274 - protein, 162 aa, Homo sapiens
MTQAWKKQGTFYRKTVGNCLEIALSSYQRMCKNDLSQDVREAEGIPQEKATFDVRQEGATIMDDTDLRLLDILQNITFIHYINDIMLTGLEEEEVGGILKAMMEVVHPGLGMNRTRGHKQVPEQVAQIPVASTTIALVIIPWLMPRTVCGISCKQLRKEEKG

SEQ ID NO: 928275 - protein, 230 aa, Homo sapiens
MVGAPPPALLPPCSLISNCCASSERGSVGVGPSEPCTGYNLLVCHLVRPLEKHSIWVGVTRFSRCLLSQCCLARKGNSLTPCASYVRQCLTLLRLMLGALHPLSDKPQSQNGRSIDRLHCTPGKATGIQRQPMKAAVGAVPCTGTELPKALGPHLLHQHALYARHGDKGDYFGALRFNGCPAKIIIFDLMGPVATLFWPISPIWNKNIYPYLYPHCILEVTNLFFDFTGS

SEQ ID NO: 928276 - protein, 137 aa, Homo sapiens
MTPDHKEYYQITAIQKKGVSFGALSYAAWFRGGVMPAFPWLPQLVSQYVTCPLSPLSLDLVQHWDSPNSCSPFGLDCLSSLLGDTACCSPRCSHKENKGKLKILLVRSKLSTCEDKTYRAENVLPKESFFVANFSQS

SEQ ID NO: 928277 - protein, 147 aa, Homo sapiens
MSVSEQMGRTEDEFVHLNGNGSLRIKIFEGSVKGVEEKKTECLSLIIFLWLLLDDDDDDDDDDGNDDYYSRVFHDRKFAAFKGDAGSAQNWRSSCMNFGLDCCPWSQLSAVALLQTFTLLGIFLMELPGASAQRESWGHCCTECEPE

SEQ ID NO: 928278 - protein, 204 aa, Homo sapiens
MFHLKLSEIISGGKKCTRGRRVEIYTVRRWLSASQKKRPHQNPTMLAPWAQSSSFQNRETSHSSRVLQAIASALPQATQLAVMIDVGVPCESSSPERKPGRWEDIINHCNIFCTNKILNWKFSPQTLNPKEGHQKTRAIEHKRKLAEVQLKRTLGPVEGCRDSPTGLSENDNSNILKPAQQQANKEDNHSCTFPKVAAKKRNRT

SEQ ID NO: 928279 - protein, 159 aa, Homo sapiens
MELAVLEVAVEKKKEPESLNLNLTKFLEPKQQFQGSERFKDLYNAGMKSEESSCEKFYKANGLVSSTNKLKEVEYYKGPLSLLFHCYELPTVSDQSFCLPRRAPDYLFIRNNYYCSPCHSQKCPDLYDYCTQSHYPSACITVQTHSQTILHPTVYIEFV

SEQ ID NO: 928280 - protein, 303 aa, Homo sapiens
MACGNRQWSAGDTDHTSRAAASGPQGGGEFPKKTLRFIQLFFIDTIIIIVITVNTNAGSSPHSRLQEACVPTLGIPPPEPEGCLVWVSAPHQTSASDPSQCLPPRPVPPTQVNASHLGQCPQPSQCPQPGSVPSTQASPIPPGQCPPPWSVPSTGPMPPILPMPPNWVSAPHQDSAPDLGQFAPPRPIPSTWVSAHNHVNAPHPDVCSPPTTRLVPLNQASAPGSLGFAPQLVTAEAALQEDEPRGPQGVPAERGVSQMLLGAHPFRAPSGQAFPGSCGSRRDAVCQMQTPGSVSSGAGMRGG

SEQ ID NO: 928281 - protein, 299 aa, Homo sapiens
MDESSLLDLLECSVCLERLDTTAKVLPCQHTFCRRCLESIVCSRHELRCPECRILVGCGVDELPANILLVRLLDGIRQRPRAGTSPGGSPPARPIPGQSAAPTLAGGGGGAAGSTPGSPVFLSAAAGSTAGSLRELATSRTAPAAKVSICLGGSGHGTWECVGGCLGVGGSDEVRRRPRVVLRWPTPLLLFLQLRLLGGGIRPLGSSPLVHVCPILLWSGHAFLSRRSPPIPWPDLLPCLLNLASPLRLPRNGDLLPLGPQTLPLHTLGLPREKLALNVSDRALMAALGSPRASCLRCG

SEQ ID NO: 928282 - protein, 138 aa, Homo sapiens
MLCLVGAGHHGWEQPLGKVLSNCPAQGVSALRRCRWWGSGHSHVEPAQKFPESRIASAFVQDIRWFDTLSHNTQMLSIVFRLSPGFSSHELCSSHLWGETRKLVTLERGLVGLPLEFRVTWDKSFCPVRRQVFLQGAR

SEQ ID NO: 928283 - protein, 461 aa, Homo sapiens
MSCTGSAPRLHRSCINRRERPCTGSAPHLHGSCINRRERPCTGSAPRLHGSCINRRERPCTGSAPRLHGSCINRRECPHARSARHLCGGCIKRRKHSPHRECSTPAQELHQQEGTSLHRECSTPAWELHQQEGTSLHRECSTPAWELHQQEGTSLHRECSTPAWELHQQEGTSLHRECSTPAWELHQQEGTSLHRECSTPAWELHQQEGMSSCKENGNLSVVPLWESMLKGLEGGLENQALLFAVFPGLYMVTIPGNLTMTMVIILDTHLHFPVNFFLRSLPLPGPWPCLHHPNALVNFSSSSKVVTFAGCAARFFFSLLSTTETFLLAVMAYDCFVAICSLVWCPVTTCLSICIILGPGTYCRVCLSSIVQTGLMFQLPSAGTNHIDHSVTCPSCSGWPPGTMESMEQGKVVSVFYSLVIPMLGPFIYSLRNKDMKEALRRLGQRQALMGRMLIFHSILK

SEQ ID NO: 928284 - protein, 188 aa, Homo sapiens
MRWCLQKSSSGISVAPVRFGARERSSGHGVDIPGGALLSLQHRKVCAGRGEWQAVASPTVPTHLESRIHSHTTAAFKPRPSLSAAKVGVQPLHPRALRPRLLHRPSLHPGPCIQGSRTRGFCTWGSCIRGTCTQGSCTGVPAPGAPEPETPAPAAPAPGAPAPGTPAPTAPAPKAPAPGTPAPKAPEP

SEQ ID NO: 928285 - protein, 148 aa, Homo sapiens
MPLHPSLFIYASSATALAWLLLDTHVVAQKHHCPLTVHLQLMSFPEMNNKYIAPRVSPAIPKNSNMRRKKIVQPQKSEKNSKPTVRELDFHIHDIPLPKTAQHKGHGKCPPDSQFLRWKNQRRCQISVAVQQHHAVGGLFHTFPGHKL

SEQ ID NO: 928286 - protein, 322 aa, Homo sapiens
MRLSTPKHRGMSGENVTKVSTFILVGLPTAPGLQYLLFLLFLLTYLFVLVENLAIILIVWSSTSLHRPMYYFLSSMSFLEIWYVSDITPKMLEGFLLQQKRISFVGCMTQLYFFSSLVCTECVLLASMAYDRYVAICHPLRYHVLVTPGLCLQLVGFSFVSGFTISMIKVCFISSVTFCGSNVLNHFFCDISPILKLACTDFSTAELVDFILAFIILVFPLLATILSYWHITLAVLRIPSATGCWRAFSTCASHLTVVTVFYTALLFMYVRPQAIDSQSSNKLISAVYTVVTPIINPLIYCLRNKEFKDALKKALGLGQTSH

SEQ ID NO: 928287 - protein, 145 aa, Homo sapiens
MGQQGLTLWEQPPSQEVTEQGALLTTVAPSASVHCGLCLRPSSETYTLSPSVFLSCCRGRPRGSRIVGEGVSPGATEAHGDWACLWPHSWGTLIGFLQPVATRQGMEAATAQELSEPPCFVPCAQPCAGEALQARVGCAHTGGCS

SEQ ID NO: 928288 - protein, 134 aa, Homo sapiens
MEEFFNPRLFQATGNKDWLLLPEAAELGKPSIQMSHYPPVHRNKILVLQDSGFPYVCINVAAFDDIVRSQGTEHGTSQGGATGAHINPGGMWSSLSFSPFQQAVLSEHLQGGNIKPQALPGRHSPWQGTGRLWG

SEQ ID NO: 928289 - protein, 156 aa, Homo sapiens
MIGIKPLEIRSWPSSPAHCRLPWGSCMFLQIRPIIYLPCSCDYRVVGIPTSGGGHPYSRWWASLQQVVGIPTAGGGHPYTRWWASLQQVLGITPFPSHNGRIRHYRNNSFCFFSTSIIHSDGLISVSTHKPHFISHVKLLYECCRIFAVTLMSSPQ

SEQ ID NO: 928290 - protein, 160 aa, Homo sapiens
MLDFSGKMISDHSSHCPFLNYPDSQSCSCSQLSGVTSHESLHCQGNSCFSMCLVSLGLLQPPGQGLSWNVLPCVSGALLPMMRALPLIPLTCERQEPAELFLLPSLLLKGRAPPFVLSLAVVGFRPTCCEFLDSDLYRSSHRIFKGWVIWFGCVRIQTSS

SEQ ID NO: 928291 - protein, 174 aa, Homo sapiens
MAGYSSETKLPEEQSGSSICSSPISAVLEPLLLIPRKTGSGVDLQQTPTDLQLRVLTVRRKTNKEKGHPYQKPICTSPSSKTKDEWLTRITSVEKSLKDLMELKTMARELRDECTSLSSRFDQPEERVSVIEDQMNETKREEKFREKRVKRNEQSLQEIWDYVKRPNLHLIDVP

SEQ ID NO: 928292 - protein, 123 aa, Homo sapiens
MCKTFLERTTNMLLKGPKEEFEEEKHQCFGQEYLDNSKFSNILAFNGFWVNRHCEKRKEQSRQCRSVPVTSVTCSKDRFMSRINANIRDDTKNGNATAVTSEKMVAVETTGNSMGAVGALKED

SEQ ID NO: 928293 - protein, 157 aa, Homo sapiens
MGPSSGFLDVQLQAVHPGSPAELAKALECTSTRGRNRGSGCGQYAINICGMNTAQEEESVTYSDVCQPPGVAQLDANIQFTLCSSCAEWPDAWVLIVVCCGLNIPLAFSQEEVASPEIHEGQLKSLALAPQRFCSCQLRFSEPTCLCLQIWGPCFAW

SEQ ID NO: 928294 - protein, 129 aa, Homo sapiens
MGVCSSQCPVLLLSSWSAPPVIPFSVSHGIVGICSSQCPVLLPSSWSAPPVIPFSVSHSIVGICSSQCPVLFPSSWSAPPVIPFSISHGIVGICSSQGPVLFPSSWSALPVSLRACLSAHAVLVHRGVP

SEQ ID NO: 928295 - protein, 139 aa, Homo sapiens
MPETPGPYARLRNVPTHHPSMKQKTPIIEFAATNPNSKNSSPAAAKIMSQAKTAFKLDGKIRTFSDKQKLRDFINTRPVLQEMLKGYLNLKEKKLASKKKSSEGTELTSNSTWKNIEYHNMLCSVAGEELRSFGGGEEL

SEQ ID NO: 928296 - protein, 302 aa, Homo sapiens
MALSKYHLPISPVLLLSSWDGMSFTTRSTFTNYWSLGSVQVPSYGARPVSSAASVCAGTGGSGSWISMSRSTSFWGGVGSGGLAMGMARGLAGMGDIQNEKDTMQSLNDHLASYLDRVRSLETENRKLESKIREHLEKKGPQVRDWSHYFKTIEDLRSQIFANAVDNASIILQIDNAHLAADDFRVKYETELAMCQSVESDIHGLHKVTDDQCHSAAAGDRDRGSQGRAALYKEEPQRGSKRPTSPDCQLWLDRGGRCPQISGSFQTSRSNVMSWLGRTERSLTSTGLSRLRRDHSGHHAVH

SEQ ID NO: 928297 - protein, 141 aa, Homo sapiens
MPACRSHHHGSRKDLEREGLATSLEILYRCKFPPPQSACPAAAISKYGIKWFDFLQGKLKWKDGQPAYGAVLPMSETFSALYWLCQRSTTYVPALSSLGKSFQLQEAMHLHFFALKITNLRRVISQPCQSSVVWLYAHGRT

SEQ ID NO: 928298 - protein, 136 aa, Homo sapiens
MGREESILPKHAVQAESHGTHAKSVTKTGAVLTQGDIDQKWLLLVISLVTAVIFHCHEPALRCFVLRRPTTFCPVLANPSHFPAANGEEAWLILLSSHVEGAAEGRPPLGKGRLLSAELKVKPATKSQGQIITWGL

SEQ ID NO: 928299 - protein, 141 aa, Homo sapiens
MCRVTARALITVPVSVQGCLYHNRPSDGRCPQSITARGQEAWWEPVNDSALWEGYRGGWGTHLLCATPSSPGPACSVGSQLPVLSQPSGLVLWRHCLWTTELPHVSQPDTHGVIPPPRAGPHPPCSAPLSGQWKAMMLMES

SEQ ID NO: 928300 - protein, 164 aa, Homo sapiens
MPKRLNPNTDPCMPERRARHWVCEKIRAENAYLEFYEDICESQVSLKHLVLQIMSSGHSFPLPWSWMEGSTQALSNGMLLADTAQGDLQLPEGSLLTSEPTQVYPRPTSFVQASIPSRQNPDSNSDPSDSKPVTQLLIVGPSLHCYLNSESAEEDTEKGKPYCS

SEQ ID NO: 928301 - protein, 218 aa, Homo sapiens
MVLIAYKYLLLLAHHCPFVFSSLVAFQNIGQLPNNLKSADFGNYKTGWYCLVLGIRKSIRPKHSSANEAEVCMIVHPPGEAAVMKSVGPGEEERIKPSIVSRCQPGRQIREPIPVGGPEWRVPRGGPDDSSVRREQVVCREHHHKCEVRCQHLPGIIAALVSPCYIGRVTVSHWLHEVADLIREWHHLQPRQTLGPRHLGRLTRSSVRTRCGSEFTPG

SEQ ID NO: 928302 - protein, 159 aa, Homo sapiens
MGLWDRIVFQKQHRSTLHCEEVMQKPTSILKGMHEEPNGEAVIRVKKVFIVILLQSQILKDEVGLTRGSKEEENERQEGKVFAAEELESKCSPTSVRPLFLGPQLENIPSTLAANDWVLASAVVGRSDECHFQVLLELDLADPRKSSGGPRGLWSSSSR

SEQ ID NO: 928303 - protein, 171 aa, Homo sapiens
MVVKARRAPALWKRAEAGGEKAYVWGLRASSSPLVPQCQSRAWAGGLSWRPQHPHRSNLQPPVLPSWQMRSTRASGLCASDTRGVPPWPGPSLQGHQESGASGQGLPSGVNARLTQDCPIVSDYAGVGSVIGHSYSIRDLSLRNICRGLAIRSLPASPGSLTTSPFIPHSH

SEQ ID NO: 928304 - protein, 163 aa, Homo sapiens
MDPTEFQNPQPSFPGFQRPTNPITQIFLRSFARAAQIIKILELDLEICCVMRLDLNVTGTWKPCYTEKSGYTDIWLMYSVILIPRAGKGMKYKSFRLFGEPDQITKLVMSPGWGHWQLLGSCCNTCLLLIQQANKLRELLELPGWIWSLRLTVFLMDVGLRTG

SEQ ID NO: 928305 - protein, 144 aa, Homo sapiens
MLKQSINEFTQAQAKIGKVGAILICERALDCLLLRTCVDFMRQPQNWSAEDSPVAQQQAASCTSMPLTWSLYAGTSTTSQVSNYNHHSHTMATPRNLCGLCPTEDLQPMAYLSGGEFQVCTQGAWEVVKAKYLTSEISVMGGNF

SEQ ID NO: 928306 - protein, 142 aa, Homo sapiens
MAPGEDQALSFWIPSGLVASIVDIVMCLHPNLILNYNPRNLYVSKERPGGGALSPSLSTSPSCHLVKKVSCSPFAFCHDCKFPEVSPRREELDLSLNQQAYKPTRPLGQGSPTPGPWIGSGGLVAVHGLLATGPHGRRCNVY

SEQ ID NO: 928307 - protein, 127 aa, Homo sapiens
MGKLDPHLRILPTIVDVFFMLLPSFVNLAKRTLLNIPAFCHIFINIKQGLADIDSSICSSEGNRGVKWTLFYGLRVTLPSLIDDCSVFQAEGQFPGGIVGRQVASGEAAKRVIGTFCQQLKHRQHGS

SEQ ID NO: 928308 - protein, 142 aa, Homo sapiens
MPLAVNLSKRKSHHQSKVMGPRGVVIPLNSQVSSILISDFFTSVSWNHTLRPPIDTRDMEMEIMTFILVVNMKRQCRRQDDDQEQAEVNKNQGPCQKEACRTEALMGPGLGPHNGRGDANVSQLGISGKVCFSAKDGYLFFG

SEQ ID NO: 928309 - protein, 146 aa, Homo sapiens
MPKWGEECLQVSVWGHLRVGICECVSACGYLHVCICMWVSARGYPCVGICMWASVFCMWVSASGESLSEIKSRGRMECGQLQARPCCDMTCMLGTGRSKKCVRDAGDADSEGSQGPGKEHVVSASLDAPLLRLSSDQNCILDQPLR

SEQ ID NO: 928310 - protein, 142 aa, Homo sapiens
MALKEFQKLKFSEIVNTPGRQLNLKIKIKFWCDPDEDSQQRRAGPGRTTEVLNRSMLGCSSEWGPSLLLLSHLLQGYTGVLLFSRCWAITFHHDFWQNQIGLTILLAFPLRPQEGAPESYLHMGKLKWLALCNWTEGLGCSK

SEQ ID NO: 928311 - protein, 138 aa, Homo sapiens
MGIGPLGYSIAWATEEKVLGSRDFSPRALEDVAGIPPRDSTLRCPDACPLLDGEHGAFLGCWPTNAKRLAHSPSRHSQEPCLEPSVSCRAWDISEESEARMPELRGALDSETRLREGSTSDNWLREGGPSNAAQPAPG

SEQ ID NO: 928312 - protein, 134 aa, Homo sapiens
MVVTHSISFSEELANPPRPGKSPSSWQQVSQAQGEGSACFLSGPHNALAWQGVPPGAGAERVAEEETPPRGTRDQESQQGLQKSPDSGFSLLSGDMEPYRGANFLWVINKQFLAEGPPHWTWEAHTTLPLTQAH

SEQ ID NO: 928313 - protein, 149 aa, Homo sapiens
MLPAPTNLVNGFVTGVLLFAFLYGIPHVWAKQSFVEHLHALPPFNSRRAWEVVFYSYLTEEEMLQEVFQDLLQVHFLPPLQMANRPEFSMKERATDSNGAALRLWTPTIRVGPKSQLCSSLSACYSDIPASDPADRSCSCSCKCLPWLL

SEQ ID NO: 928314 - protein, 178 aa, Homo sapiens
MQAGSISRSKVPQNWNGGRISQSSAGTKIGDGAQIKKAWFPEGPEPPERTTLTLKCESGYTGSCKGSWEQGPPLSSCELQLMKPCSVKGPLQGSPAAIELTEDNVRRGPTAAPLASPQPWTQDSQASKLQTGSFWQTVHPAGSLRGSFLCKAKKEERGSKPALHLSFSPIIHRYIYKG

SEQ ID NO: 928315 - protein, 138 aa, Homo sapiens
MSLLRPHSLILVLKLRDAADQTDVASLTLKDPAADKLLECVQTESSCYNPDIRPCCTDSVAPGPGTWTPTRSRTLYSHLKSMTLSLAAAPQRNSPQSLLLWVIHSRFKILAVVSGQVRVTCHAKVQDKLGGHSGCCED

SEQ ID NO: 928316 - protein, 141 aa, Homo sapiens
MILVVTSASAAFSFEGEQQQQCQLLCPVFRAGASQSPFFSSILAAAYSMCCSDIREDLQGGPLKWRSGSLELHLWVPTGFLVLESQPDSLDLSVEAGSHLDVFQFVGLGGKKYGGGKIVQTSENVPWPYAFLWTGGWEMLG

SEQ ID NO: 928317 - protein, 149 aa, Homo sapiens
MMVIKLKEKLLAASSLLPSGEVRDAWRTAVAAPSKVLPGCRPGKELRNMMTVYLNMDKMREGFGNIRVAPKKGIPEPKPAAQLLLVAQVLRLRNGEAPSPLFSTQLIGRGRKLAAGERSWAKHFSTGESEDSSNRSQAGLTPATSVSHS

SEQ ID NO: 928318 - protein, 258 aa, Homo sapiens
MVIVLVADDNGSGHDGDGGGDDDDDDGNSDDNIGGDGGGNGNGNGDDGGNGGGDDGDDPAGGGSVDGNNSGHGSGDDVVREVLLQGDTGHSSEIELLLCFPFGFYPYAVIPLAGNLEGREMTPRSQLETKTISYQKTSFGASTHPMTNHTVRLSICPASCRQDQCLSNRSFCTLGEGTLAPSQGFAGRELEGQQDGEEEGALQANWRQSGKLPETPAKTAERAWGSTEAYMTSRPRVTGFQKAGKLMTCISVPLCPYR

SEQ ID NO: 928319 - protein, 116 aa, Homo sapiens
MAMKLFLNTGFIIIQVWRGQQIRTQPPLKRWFITHSPKRRRHNMPWVVSKAPDFEAPEIQKIKRHDEYRSRGIPEGGIVIIGDDSCMHVTAPVDLPVGQGVEVEDSDIDDPDPVEA

SEQ ID NO: 928320 - protein, 136 aa, Homo sapiens
MVLTMQRSQDRIHPHRKKSIHNLPWAPSNDSGHTSPLSGDRPSARGVFAHNGWQALAFIFITVLKVNGICHILSWLTLMWGEFPLPNDRKSWNPRINIKPESDQLLEVKPFVGKAENRLLNCKEKVPGHPKGQLPN

SEQ ID NO: 928321 - protein, 150 aa, Homo sapiens
MKAAVQMLAPTEDQTRGHSMVLQWEACGDAQGFQGNQDLKWLCHPVLQTLDGSSWTWIKLRICAEVRAACLANSWISGEEIGTPAQGEGGGMDTEEQSRGQLHSQVWRAAVGEALSGLSAQQLRGGYHKNIREARWVGGVLDREAASRMG

SEQ ID NO: 928322 - protein, 145 aa, Homo sapiens
MAGVWSPTDQHFWHPAHENRIPAPDNGTAGCYQGQEVQLGQWKKSKLAADTAQWTGRQETGPTLGWTGVSERAKGRIQTWKHDGASYETGSKASPSLWIWSISTLTCQCTIAQFSPDLLGMTRGLPIGFSEYRLITLGQWLVEVF

SEQ ID NO: 928323 - protein, 145 aa, Homo sapiens [sequence omitted]

SEQ ID NO: 928324 - protein, 117 aa, Homo sapiens
MGIYKEMNIAFITANTTSILLPMDQGVFLTFKSYLRNIFHKALVATDTDSSDGSGQSQLKTFWKKCIILDGIKNICDSWKEGDIATATPSFSNHHPDPSAVISIEAKPSTSKKMMTC

SEQ ID NO: 928325 - protein, 141 aa, Homo sapiens
MDIDKGDWATKQKSAFGRYQPAREDATGSRTTWASVGPGNGVLFVQGPWRQPLCESLLLLLINQLTQICPVALSSMTLAQSLARPPWPTEPKCILPRTVRVAPPCDHVITGHSLHALIMSITTRATPERIQDHCLMLSRCC

SEQ ID NO: 928326 - protein, 200 aa, Homo sapiens
MPSTFQYLEAAIPVSTVPFMDQFICQSSLQEELGPSWRPAYACQPLWPDDKRAAHSWERTGKSPCAEPPWSSILGLFAPAHSPWWCCTLTRAPRLFLAPAFSAEFQACVWLYLLGRLTGSSKPTNVKPVCPDFYPKPDDCFIPCLEKSPLPTHCLNQSPCSHSIKVEMTESLLESRSSHSVSQQHSSSSTQRTAVHGGRA

SEQ ID NO: 928327 - protein, 133 aa, Homo sapiens
MQLSHQPGNCPLPEGPGRSTVPQQQQSRTPGFQRETSSGQSAVTADSTRPGGAVLERGTLVIQWHQRLIVTSGTPTEKGFRGCPCNGSPASPPLCSLFLLTCQELTEGLRGASGPAHNTHGAAADWGDLPHGI

SEQ ID NO: 928328 - protein, 162 aa, Homo sapiens
MRVWGRPQEIVGEHGYKFLLWAAGFRLFGLKSHQSPQVFADLPTSLEGAASLSDPSILPSSCPAQQRFMDSCGVQGTVRPWYHNELGGESSPVNEHFISPFRTQSDNVVRVKIIYSLFQTKDLSVGEMRSEAAGSALSLSLHRVTVPEMHTSCLCSLVLDRS

SEQ ID NO: 928329 - protein, 128 aa, Homo sapiens
MSHLWQKCKKPSQTTWVQVRTVLASCLLTFRGQESKSCDKPLNQPKIDCPPHIAPGGTKESHGTSSSCMIYYREGEGRAPSGDPANSLTLPALQTSILLHVSQPKGWLGIEADKKPSWSHKSKLNSPI

SEQ ID NO: 928330 - protein, 130 aa, Homo sapiens
MRDPAPMAQSSPTMSQPQHWVLHFDMRFRWGQISRQYHKPFQFCLFIIPSHSHPHFHFMEKFIVYKCSSCLFDQLQILIDWVPQHYFYFLKFLFILQQTLYLNLSFTICSSSTPENTILQLNSLEKKQNQ

SEQ ID NO: 928331 - protein, 154 aa, Homo sapiens
MNRLFLFSFGWSSFISTRLKRLKSRCQQSWMEIMGKVNLLLKLLRFLAEFSCFSLYDEDPYFLNLWLPSSSSQKWWLFFRLQISDFLFCPVFLESLEISNCTHSKREKRTGRKFATILERRMKESPKEVTAVAAMFKEKLEYKNEQAQTEKRSR

SEQ ID NO: 928332 - protein, 140 aa, Homo sapiens
MQVCAAVAAWHEVGGRGPAIRACVCTSGSSSTGAELAGRVLAGALCTCVYLGSSGHAGQGGKDARLCGNCSGDARTLASLYDHPGLNAYEQYRKRQLIGQNIMNLADGGRVGSYLTSFGTMNAKRAIIIYVNSLMAKNTK

SEQ ID NO: 928333 - protein, 150 aa, Homo sapiens
MFPFLCPCVLIVQFPPMIENMRCLVFSFQLYQISLVLSLKGCFAFQLLYCFTGFLKFLGLDFDILLNLSGLLSCPDSEFYVCHFSHLSLLKSHGWGASMAICRASWSVSVFLMVWCLGEKLILAAASQPSWLPSPKNIFYKQYKLSVQYL

SEQ ID NO: 928334 - protein, 237 aa, Homo sapiens
MKDLKFLLPFRTKQEKIQRPPPEWPPKWHFHDRLVITKGLLQFAGSPLQTLFTWVSQVEAAEQQRLLPAPSSGRFNPEGHWPDASWSSREWGVCRPLLGGLSQSGSPGGSATVFRAGRQELLSPLKLHPQLPLLPGALFQGYGSFIHKPMTGAAAFFSEMSCPGPGGVGTRGNPPKPKPSALVWLEAADQSCSYSVILPDPYLPPNKFKSYVNLSYQRLQFEILLGFDDNKSEMERD

SEQ ID NO: 928335 - protein, 143 aa, Homo sapiens
MLKTLNKLGIDGMYLKIVRAIYDKPTTNIILNGKKTGSVPFENWHKTGSPRVAAVSGIVHIENLDTCYTFLNTTRLREQGIIIGFVCQGGYFKHPNDTGSKSLYHGKSDGENFILSMQVLESCPWRIPDPTQTVPSFSLHCQD

SEQ ID NO: 928336 - protein, 152 aa, Homo sapiens
MRYEREITLAPFWLLSQYMQTDKLYITCGHCATSLVPSLSTMSELLLQRTVFVALEDTSLSLPSMCLDIALVFQRPYILCAPREQTIPRLLGSSSRASVRGQILLSSALEVDEEIYVSGYYGVISPALTTSDNPVLTSMLQKSAFPVYSRTT

SEQ ID NO: 928337 - protein, 141 aa, Homo sapiens
MIHGSRNQGEEVEVAPLTINPTNPLRKFLLPVPATLHSAGLEVLVPEGGTLPPGDTTTNPLNWKLRLPPGHFGLLLHLRQKTKKGVTVLDGVIDPDYQDEISLLLHNRDLAVVPFQPSAKSLSCLTQRHFGSLLGSLLQVP

SEQ ID NO: 928338 - protein, 179 aa, Homo sapiens
MIAKALISFVFPGEIQQWMQGRLEGDQDGEQSKGQAMQDLASHVEDFDLHSKSTGKPVTEEDGEPWGMMPMAIFHCSCPTRKTTWVSHRVELCLFLISRQISLPIQMPERVVGSLIARIPEVHSESGLPCHHFTHPFPRSSSGPGTSSGTQQPHAGFQASSFFSFGICITSSQLVVFSL

SEQ ID NO: 928339 - protein, 146 aa, Homo sapiens
MPPLVGPELVLSSGFMVLADFNNEATDPRTLGMMQQETPHQMGCLSHGLPSLQTISQINVMLMQEVGSHGVGQLYPCGFSGYSLPPDCFHGLAISVCGFSLCMGKAVGGSTILGKLIIMVKGEANMSFFIWRQQGKVLSKRGKSSV

SEQ ID NO: 928340 - protein, 142 aa, Homo sapiens
MRIGLYAQENLASLSRVGWSVASALPAQIQAKHGLQLGISLSKLYVDPGIREAVPWLQPCLYSWYRGSQNGSQLKLLQAWLPVGFCLHQKLQIDVNELLYGVWRLSFHNNVCLFLSFRYFLYIVSQKGHLLFFYQLHSAITF

SEQ ID NO: 928341 - protein, 167 aa, Homo sapiens
MRVTCSCQANLELYQHSVHRELDGFSLPQDIVPTHHVDDDMLIEPEECVFTPMISLSHSEFKMYTSWTVVIQARLHNASTGLAPSCLKLSYPVLGHQTLQPSPPTSPKDFIQQLLMTSSVVGSRRSSKAILKAKLAPKKVIVTVWWSDAGLIHYNFLNPSKTIISEK

SEQ ID NO: 928342 - protein, 152 aa, Homo sapiens
MVRPACFPFAFCHDCKFTEAPRDTSRTACRADVSRNVIQDVDPGMGAVGLCLVPIVLIPSCTIPEYYPSCKAKSSLLAPLPNQKEEISSGAVSCTPWGWASLLYFDPSTTQHTLLLVYARDLDLHNSLTLSQATRYCPKMDCPLRRRFGSSA

SEQ ID NO: 928343 - protein, 146 aa, Homo sapiens
MCNCYNYDIVTIVFTITIITTISSTSSITIITTILSIIIIEFVDFILLAMTCGLRAVQSSCGECCWAWDTPFRAVGSSLAQSTSRNAIQKPRPRIRDPKSLFGADTHEAELAPMVPDKVPFTFASAFLKKKEFLPEATTAENGNVS

SEQ ID NO: 928344 - protein, 134 aa, Homo sapiens
MCPEFLPSGGFVVSLTSGMKPQTLTVSVTAHKEGFLYPGFLPWCTGRIESHVGLENECKILLSGGSSGEVRRDGMGRCSPGVRPLTGQGCPPTPQPNSALFYFACGWPGSVSVPVSVFLSMSSHPGIPPLMCSS

SEQ ID NO: 928345 - protein, 351 aa, Homo sapiens
MHSAPPDIRPRQTCTVHLLDIHPRQTCTVHPWTYALDRHAQCTPRTSALYRHAQCTPGHNTLERHAPCTPRHTTSTDMTCTVHPWTYTLDRHAQCTPRKYTLERHAQCTPGHTPSTDMHSAPPGHTSSTDMHSASPRHMPSTDMHSAPPAHTPSTDMHSAPPGNTPSTDMHSASPTHTPSRDMHGTPPGHTPLTDMHSAHPYIHPRQTCTVHNPDIRPRETCTVHPPHIRPRQTCTVHSWTYALNRHAQCTSRTYILDRHAQCTPRTYTLDRHAQCTSWTYTLDRHAQCTSWTYTLDRHAQCTPHAYILNRHGQCIPQTYALHRHAQCTPRTYTLDRHPQCTSQTYALLCS

SEQ ID NO: 928346 - protein, 174 aa, Homo sapiens
MLNAHRGLIIPGRSLGWRPSVPMGWCPLTDGCKASSGTQIPMTHMGVHTPQPVSLSGPAELARKSSTLEGRRGQIFVFRKFIRENTAFGNRGGTQGGDRRGGHVKMEAEIGAVGLQPRHSWGPQELEEAGGGLGSSGCCNKMLPTGQLQQQTYISHHPGAWEVQGQGAVRDVFQ

SEQ ID NO: 928347 - protein, 197 aa, Homo sapiens
MATWRPQLVESGAAGLLVGAGCPLLFLGVLGYLLWLPMQPGRDLSVFEDSQEQAVAGVEKDEPRSLTQCHLLSHPQEFSVQEQDAQFPGSLLSWQGVETSQSSPCTSSGNLPSTTRDNPQAANPLTATSTSSWQVFLKVASGCGEAPTAPPRWSTELASVLGSCRRRFFLLGRKMAPGSAVALPPLAVRCLCNQSKP

SEQ ID NO: 928348 - protein, 150 aa, Homo sapiens
MVLLIWTAICQCAPRDLQVVSSQIGPRGGNCWCVRATLEYPTPLLTRSGLGAVGGSASQKEHMQNELGAPTSRPAAPLSTSCGRHVAICVCARLEEAAKGALAKCDSKDTFLRNDLRFSFHIKFLPYDPRRLVHALTRPCPHTHAFCLRG

SEQ ID NO: 928349 - protein, 159 aa, Homo sapiens
MVLGAEVIFITTQVETHAPKYLFNAVNTGAIRNTICGIQNVLMHITSFDFGRQRADHVSVLQMRTLMPKELRAPSRIPYKIRGGFYDRSPLAHRALFPSSSEKVMSRIPKVSVSNEVYDLAHCIMGDSAAAVPDITNPSQQEVISCMSAETLIPNEVMT

SEQ ID NO: 928350 - protein, 205 aa, Homo sapiens
MTETFMAAPPTTGPRPRRKKWFHGLGPGSSCCVQPRDLVPCIPATTATAERGQGRTRALASEGGSPKAWHLPRGIELASTQKSRIEVWKSLPIFQKMYGNAWKSRQKFAAGVGPPWRTSARAVQKGYVGLEPPHRVPTGVLPSRAVRRGPPSSRPQNSRSTNSLHHVPGKAAGTQHQTVKAAVSILQSHRGRAAQDHGNQPFAST

SEQ ID NO: 928351 - protein, 166 aa, Homo sapiens
MLRFSQACILILAHLHLQTPAQVKLQSTSIHSGFPLSHHKQSPCTKCAQLKHRGESHVLFKADCVLCISNCSLMIPIPQLSDKHFIKESPKVIAEIQISRLHLHCPVSSYPQNTLKDNSQIQVLLQVHLITTASERHAFQNKRLSVDLLQRSMAWQTSSLPGPLYT

SEQ ID NO: 928352 - protein, 141 aa, Homo sapiens
MRLSPTTTRDILATVWSMDGGCQGPSLSIHLLKDILVVSSFGSYEYGCYKHQCADFCVDKFSIHLGKYQGIRMLDHMLKFSSSSMLTHVSVLHSFLWPNNILLCGYSIFFIHLSNDDVLDCVHLLTFMNNATINICVELYV

SEQ ID NO: 928353 - protein, 177 aa, Homo sapiens
MDPMQRQEPQPWNGKGVHSASKELGNELIPESSEMNAALSFNLAICPLMANAQKTMTLQAPTRSEGLLSLKEPQYNIPFCLEQFLPFWHQLLSMYGTTQAARFEPQIVVQKYHSSGKQIRTSQETGAEGYKMSPGHRDIPNGKKAIKDYWRHLEDTRFTLKRPHHPKMEQLELQLGR

SEQ ID NO: 928354 - protein, 120 aa, Homo sapiens
MLSRKAGFNHIVIAQKCKHICESVLINASASLGEKYRRYRWKQASKNLKAPIISHVCVNYFELMKMKYDQECTSLATAASFKQLVTFMWDSTEQATSSQKAPSGISGSHFHNQVTFYFNY

SEQ ID NO: 928355 - protein, 154 aa, Homo sapiens [sequence omitted]

SEQ ID NO: 928356 - protein, 136 aa, Homo sapiens [sequence omitted]

SEQ ID NO: 928357 - protein, 177 aa, Homo sapiens
MAPGEVLAARGLAKPCKGQGCQEGGDPGSNELSMKTDSRLNLLDDGTLMIQNTQETDQGIYQCMAKNVAGEVKTQEVTLSRIKSSCGLSSIWAPSGCKLCSDPPVLSMAIAQKRSWALEEQRIEALGVPTMALGNDTDQFMPLDGSACRPVQKPVESEPLPREAAGVTSSLKPSGCL

SEQ ID NO: 928358 - protein, 154 aa, Homo sapiens
MSDLLTHTGGSTEHTPHNDHEKEYCERSPVSWKSFELVLSLGGERKVEGQELKKPTVGYYAHYLGDGITHTPDLSITHRTHVRNLYMYLLNPNCSTICTSNSKTGHLPKGKEVILPKRHMHVGYRIKQKWFFYSIEYYTAMKKNKIMSFAATWM

SEQ ID NO: 928359 - protein, 149 aa, Homo sapiens
MSDHGALGKCYQVQQEVSKVRHLRSKSQEMVVMAPVKSEGWSDILGYLGPDSCTPVPGPLDPRGFCNIFRDRDVAPDGWELAWLYQSGLSVATSWPGTDSQAMMFSCETQFHQYQHQTRPLRDHDEDKTKTIIAQTKHIVHITKIAQHH

SEQ ID NO: 928360 - protein, 287 aa, Homo sapiens
MIEGHFRDLHSSPSHHRLRDLGEKNGFVDQAQGPVALCSPGTQHPYPSCSSSSSGGQGTAWAIASEGEPLTRFQRMYGNAWMSRQKSAAGVEPLRRTSTREVWKENVGSEPLHRVPTAALPSRAVRRGPPSFRPQNGRSTGSLHQAPGKATGTTCWFIKAAAGAVLCRATGVELPKALGAYPLQQYDLNVRHEVKGDFGVLIFNGCPGKTNCPHPTQDIHPGGVMLLVLTRTLQDSNPNKEDNRNTREMRNKVSETYITHPCSNGFATWVVATRIQTQNPNIWKIKA

SEQ ID NO: 928361 - protein, 167 aa, Homo sapiens
MEGGKDERNWGERQRRGKEKEGRKEDIVYLRTGKEQVEWKKEREGSSFTLARTFPCSFQFSRFSQASKPTKSKRHTFTGEITNRSQPSCGPLCICALDTSFSFVSVDETSVFLAEDDTSTCLHPPFSPTQEHCSSNFSSLLFSTSFSLSTKSFLSALKNAVVSLHLK

SEQ ID NO: 928362 - protein, 139 aa, Homo sapiens
MTQSPDSLAVSLGERATINCKSSQSVLYSSNNKNYLAWYQQKPGQPPKLLIYWASTRESGVPDRFSGSGAETTLTQSPAFMSATPGDKVNISCKASQDIDDDMNWYQQKPGEAAIFIIQEATTLVPGIPPRFSGSGMYQ

SEQ ID NO: 928363 - protein, 327 aa, Homo sapiens
MLVYHATSPQGFLSPPPFPTHQARGFTPTQDWQIDFTHMPHICKFKYLLVWIDTFTGQILQAVSQALDIQWKLHTPYHPQSSGKVERSNGLLKTHLTKLSFQLKRDWTVFLPLALLRSRACLQDATGYSPFKLLYGLTFLLGPNLVPDTSPLDNYLPVLQQARQEIRPTANLLFPTPDSQPYEDTLAERSVLVKGLSPQTLQPRWTGPYLVIYSTPTAVHLQDPPHWVHHSGIKLCPSDSKPDLSSSSWKLQVLSTTSLKLTHISENSNNPYEPNMFLHSIRSIHPYSTFCNRALHSHPHYLDCAPKLVIPTIFCLVILLFTILNYS

SEQ ID NO: 928364 - protein, 138 aa, Homo sapiens
MFLKSSFLEILAGSTCSYSVYLKKKKVRMWSTFHNDTVIEVDNRNGEKTKKSYATVDYSHPCSDDVIPLHLYGRPFPKRYHQHQGSEIQLVTAKFAACAKTSLARQSEEKRDIFVWNVIFRFMLFCALKFTTQKIIKY

SEQ ID NO: 928365 - protein, 154 aa, Homo sapiens
MGAAHQHGTCIYIEICYFVRAVFPTAACSCSGGVSLLPANYWKFLPRGILEPLSPPFSPNTGTSSERTAEGADLASVLRMKHAVQGSKLQDEIGGQHKIQVMKTLPIKQFAEKKLAKSYQNQDSHKSDLWSSSLLHSRQCHDSLQMPWQHQELP

SEQ ID NO: 928366 - protein, 154 aa, Homo sapiens; identical to SEQ ID NO: 889699

SEQ ID NO: 928367 - protein, 137 aa, Homo sapiens
MEGPALRIFGFNIRLASWANAWPNRWGLPLNAWVAPAFARMSLPNKGVGRSGIIRKACEKSKVPQSQLSGWEKYLVTGCPRTPQIVTDLEDRTGDGQAYPGLCEGDGMGWHLPRAPSVLLLGSSDPVPIVKVLGHQF

SEQ ID NO: 928368 - protein, 146 aa, Homo sapiens
MGPRALSMTRDEVAGSPRWKTIAGVKDETVCPSDLWRTPALSLMGAGERAAHPGVRGVIQGSKEGHLRRPLGFLCCCCSCYPLDLVRARVFWSPAAHPAPLCPENVLETQSVEGGRQDPVECRQKEPGFQEPAWRKRTTWCFEFDF

SEQ ID NO: 928369 - protein, 185 aa, Homo sapiens
MMLPEEGSGSNICCSTASPCDTQANSININKKDIHTKTPSVGHQHQRPKVDKTTNMERNQSRKAENSKNQSASSPKDRSCSPATEQNWTENDFNELTEVGFRKSVVTNFSELKNILTHCKEAKNLEKRLDKWLTRINSVEKILNDLMELKSRARELHDACTSFSSRFDQVEERVSVIEDELNEMK

SEQ ID NO: 928370 - protein, 176 aa, Homo sapiens
MHVLGPLLNEEAQGILWVLAGPVGDGVVTALGHTLQDSKGGNKLSASAQYGNRLLLHHTVPALFNPGGIPGPDRKKDIQADDTDPECGSTRGLLWAKHPWTPLLLCPHPLFTSSFPPNTTSPHAMAETGACVASKPSEGGSGVISTPSRGGRTPPASFAAPPFLPLPLLLLVQKIK

SEQ ID NO: 928371 - protein, 153 aa, Homo sapiens
MVHLSVPDHNTDSTKEVQRNSVNWGYHRGLQTPNLQQEVDVQPALTDTGPSALRANAPCMACQEIKFSPTSELGDLYVFTRACDQTYTLSGADTVVASKEKHFGYGALGSRAGLYDQTWVRIRTLTPSRYVTFVSDSISATDSKAVVHNGSGR

SEQ ID NO: 928372 - protein, 144 aa, Homo sapiens
MQLSPLCLYMCEILGSALPRNLLRSPPSTKSPFFPMGFCAGTSFFGNILPGMTIILIHKNAQRKETAQYMLVVPFSCSSLYHHHHHHHHHHYHHRHHHHPHLELSRNGANSSQSSRLHVSRRTLNPNGTGDIAEVSALASFLEV

SEQ ID NO: 928373 - protein, 125 aa, Homo sapiens
MGRGETEECDEVGVQGQWDRLSGWESGLEEVAAGPDYFSHTLIPWDPQGTEGSAGSNLSPRSCGSLRGPWQREGGRGKEQEGAREKAGQTHPFYQKPAPSITNSHDNIINPLMRTGPITLKYPSS

SEQ ID NO: 928374 - protein, 338 aa, Homo sapiens
MCPRHTEPWNLTGISEFLLLGLSEDPELQPVLPGLSLSMYLVTVLRNLLIILAVSSDSHLHTPMCFFLSNLCWADIGFTSAMVPKMIVDMQSHSRVISYAGCLTQMSFFVLFACIEDMLLTVMAYDRFVAICHPLHYPVIMNPHLGVFLVLVSFFLSLLDSQLHSWIVLQFTFFKNVEISNFVCDPSQLLNLACSDSVINSIFIYLDSIMFGFLPISGILLSYANNVPSILRISSSDRKSKAFSTCGSHLAVVCLFYGTGIGVYLTSAVSPPPRNGVVASVMYAVVTPMLNPFIYSLRNRDIQSALWRLRSRTVESHDLLSQDLLHPFSCVGEKGQPH

SEQ ID NO: 928375 - protein, 139 aa, Homo sapiens
MLPGHANVTCICHCSQLSDTCCLTPTLHLSSFSEKSYKRSLLEGNIPCEKPDFNTNVALKKLAFLARQTRPQNINSSDNICVLHEETKELFLGATASAGTGKRSKRAFPTTTRQSSENDPTFRKDERHVQRAVGDVPHA

SEQ ID NO: 928376 - protein, 191 aa, Homo sapiens
MVIMVMLMMVVMVMIMLKMMMVMMFGNGHGDVKDGDGDDDGDVEDGDVDVGDVDDDDGDGDVEDADGDIEDSDGDVNDGDVEDGDVDVGDADGDVEEDDGDDDGDVEDGDGDVEDGDVDVGDVDDDDGDEDDGDVNGGDVEDGDVDVGDADVGDADVGDADGNVEEDDGDSDVDDSDVEDGDGDVEEDSQP

SEQ ID NO: 928377 - protein, 196 aa, Homo sapiens
MAIAAQGRNAEQLGSTLCLCPVHAGDRPLGKLAALLAWPARQCGAGSVATVASYSCAACGQLGLRPPPGAFSGPERTQRPETFSCVACSSLDLCQDLSELGCLTTGVGEGSHRYRLSAMAGGQMGTSPCWWVPARRDEDSKESGRIPTILKMPGGQMEAEDPRPPPTGGSIDDMPPLGEGETLTLTKFTMNPLGKL

SEQ ID NO: 928378 - protein, 148 aa, Homo sapiens
MSESEKAFCSPQQVGEVMKTKQFHCKSCWHLGWCIMRLGLWLWSPTTTSWFFTHHPGCPSYKGNIFCKHLSVFPLHVTGTLLQPALGTNFMLRAGAAGSDAAGAQTLRPVHTGPDPSPAPVRRPGAMSVLLLLCLTEGIPDFWSHLLP

SEQ ID NO: 928379 - protein, 154 aa, Homo sapiens
MVSVTALKDGLSVICSFRCSDVSGVSSFQNQPSGCVRAGHRGYEGLAWAQRPDTDDMCPLWSGHSLVLYILGRHETSFNMCKKYIGSLQKEGEILCETGEKMKTDERRTRKSSEEEVYTSLKQLPQHHLEGFLEQSAGPSPEEVWGESNDNLHY

SEQ ID NO: 928380 - protein, 196 aa, Homo sapiens
MPDTFYTFTHLGLPPAFVRQALSFPLPDVENEAQRDKIPKFTAEGYHITTEESEPSQRRMQEEDWDGIRRLSHALALGSLSSSNLEGNVRAHEPIVPCVYFPLEQGFGPNPSKVELSQEQRSWLPVAASLTFPSCLKSTCKGARAKRPHFPFPRPYSLGVRNIPFTPPILQCKTTGSRSVVHQPTGQQGWTEVLGL

SEQ ID NO: 928381 - protein, 148 aa, Homo sapiens
MSSPALSSPGCIPRISPVVAGSTFPGVESEETKYRSGLSSLTGDKEVPTPCGSSGDHIGNPDLDSHPEKQSLPTLPCWWGIRGGLPESQNFCPCPVETTPPPTPMVSMEATKEAKTESLGALWEGDTTSLWEVSPSLSCQEPLECPLL

SEQ ID NO: 928382 - protein, 168 aa, Homo sapiens
MSPLPQTDQRPLNLSLRQLWRSLDPPLLHPGLVIARVKSTISPLKNSALFAATDYGGTGLSDIEQNSYDQGILRMCGCVWLCGKICSVPLPWFLEDEWSFVFFGLKKHHPDLYLYLHLAFSLWKSLWLKSLPAAFQKAKEATYLGLFLKQPRCQSSCCELFVPLSSPH

SEQ ID NO: 928383 - protein, 164 aa, Homo sapiens
MVLYRGLTVGFCCQDFGHSAVAGLEVLVTGCRCKAFSIAGCGIIPKMKPPLLRAALTAGKIGRAASGLIPTSHPHSTPMDKVRQPNSQPYQRPQTQFLLVLSTRSQFPASPWNMSNMTITSLCGSQGSPHCLDTAQPLVVHSVPKCKFCVALHGVQCLLPQAPF

SEQ ID NO: 928384 - protein, 136 aa, Homo sapiens
MSYDCAAANQKPQAKKISRLYFIQVVGNKCETVHLVFIYTCIFTFCTAVDYILGEKYSYKVKDQEEDVPHVVRLGEWDFSRRSSGLQDKVCSITPSSCHALLPGPAVTSDGMQNRGAFGELQFTSMGAQGCEGLTQ

SEQ ID NO: 928385 - protein, 164 aa, Homo sapiens
MARQIKRGPQRVSHLPHSLHQILLCRLGNLPRAFLGMPIVHWSPTCALGELGGAMGNACLMQGRSLPSSAPVVTWESICEVEGCKFCYSPFYVSASLIFPGQERYHRGKQCRFDSNTSSDGNSTGRTGTSVTSLSCSKLLGKASRRLTRKVLKIQTKSLKCWKL

SEQ ID NO: 928386 - protein, 187 aa, Homo sapiens
MCRLVTYVYMCHAGALHPLTRHLALDWAAGQRCPPPPGRGSWPGGGCPPLPDGSCRAEMLLTSRTGRLLGGGAPHFPEGAAGQRRSSPPNLPDGVAAGQRHSSVPRRGRGRAEALFTSQTGRRGRGPPHIPDHGQPGRDAPYFLDGVAAGQRLQSRHFGRPRQAAGRCSDAAEDKCRIRQAGQSNWG

SEQ ID NO: 928387 - protein, 159 aa, Homo sapiens
MGGIGLGNSKLSFLPFRVFSINLSSIWSSCESEASFLSLTLFQFRGTCADLLTGISHDAEIRSTNDSITQKIMKIKYKNTLLISILAAVNRNLDVEGFQNNPYIFLLCLTVLPPHSKCESHGNSEINILNAELCLRVSLEDPHSFNIKHIACVLVIPLH

SEQ ID NO: 928388 - protein, 162 aa, Homo sapiens
MLALLIHPFLKIGISMDGEAGKRASFPMRSPEPPSPSRTWGTSFSIWDLKDVLLHPGLGRCLIHPGLEGDPIPFRSGGNSSSSGLGGHPSPFRTWGASFFIQDWGDWGASFSIQYWGSSSSIQDLRGVLFCASLDGRLSYAVIQKVRLTHVVVLNSGISSLF

SEQ ID NO: 928389 - protein, 141 aa, Homo sapiens
MAPVLATVRAGMGATESLPVRTQGSPGFSKLDCCLRCENTQAQRGMASSDPQAGSDIPTSKEPLCPACRSLAQANVAIMGITPGFPKALSVTAWEPILPGDAASRRQVITTQARYEYLTYLMLNDLTGASAVSEEMCSFRA

SEQ ID NO: 928390 - protein, 139 aa, Homo sapiens
MRHEGSAESWFSQAPGELDTAAFREVQGLRQGPQGCPGRTRREEKGRTTSGSGQTTRERRHTGKKEKAKEAQKENLKPRSVLWSPSNTTGLTTWTLRDKVPLSLHPSPAITGPRALHEASARQVIHHSWPMYGCADAPV

SEQ ID NO: 928391 - protein, 153 aa, Homo sapiens
MGVVTAPASQRRPPSVPVGDLGHFLSKQRHRLCKCIGSQGQTHVLEVQEQRRAWESRIWEQISYIFGGILPIPRAVQYSLHYLNLTMIYKINIIILIIKVKEMEKEPATVAHLDSKLCRMDSVNVRYLMAFPQFLRLSSDLKNNFPACSTGRV

SEQ ID NO: 928392 - protein, 151 aa, Homo sapiens
MGRKVQPSPPVSVASQALRQSAKSHEKQCATETMTGVGIFFLNIQALSMLQLEAQRDIKLSRFKTKRDEAKSRGEAGARMQRQQGAGTPTWCLVDQGFEEDGHEKENSKQRDACYHPAGGKRQCGNQGGSDRRCYVVKGPHDRVAGASPEQ

SEQ ID NO: 928393 - protein, 135 aa, Homo sapiens
MPLFYIKFFLLRRQELRLLQTHTDLPPVIISSVKNKRSSLAGIEECRTRELSWLLSKGILEEELDASWSSVRNINKGFNFMDRALAHPLRIHRIPPCMLPFLANAFPWDLLVHFLSPGVRLYPIMFGQAVRKSHH

SEQ ID NO: 928394 - protein, 147 aa, Homo sapiens
MVREFFKEAKTQRKLRLLLLLAGYVPGPEQELITQNTCFFKRQLEADYYRYPQHLLQIGRERGKEALLEVLPSLPVAGVAVTQALPWLSQLSHNHCTLSPPSLQILSPHNVAAARKWARAGVDNSRLSYPPQCLFPLYDVKNRYIIL

SEQ ID NO: 928395 - protein, 181 aa, Homo sapiens
MTAVWQVRTLLIVYQVKQNYKIELVLPDVTISRSLEGLSDNNKYKMNMKTARCMKRLGVWAFRWHFWCYLYQKANPEMQQGSDLPGHVMTLALAVAAVLREACKQEVGTVDWEDMASDHKENQECGVFRKTGEESVSDRSKQQTVLNAAGRSNKIKMGKWPPDLAIKRTLMTSRKTTSLEW

SEQ ID NO: 928396 - protein, 173 aa, Homo sapiens
MISDHKPGFSCFSFLSIISFHPQNNFMNKKTSQAQTSGAGALEMWKGRCPRGPDLTTAGFHLAFLSDACWLWGTLNYNAHALGSWMFVEERQGFAHPLEREKEEEDVLQFTCSQHYIVARSGEKNFWAILKNMSPLPKHYIVDILGFLLHSSSFSTTLFLVVVIHFDDFSSYP

SEQ ID NO: 928397 - protein, 139 aa, Homo sapiens
MCHHFPNAKFVERRWKRVDPLTACIVCLEKSQTLMGWKSQPMKAARREAVPCKATGVELPKTIGTYLLHQHDLDVRHGVKGDHFGTLRFDFPAGFQTCMGPVAPLFWPMSPIWNDYIYPMPILSLYLGNVVLFFKLLLF

SEQ ID NO: 928398 - protein, 156 aa, Homo sapiens
MQGFLRQEHNQSCLQEADPSPSSSMGLPAIQHQAHQVAEKPSASGFPFWMQPWTLSSFSRWYFQGQREFSDTHCKSHIKSLLSSQSTGAALRSLVLSFAQLTGGCHMAAAAEDCGEPVSDVPMQNGSIHTSNLSGKEVECRSSGYGKLSRPRGKCF

SEQ ID NO: 928399 - protein, 151 aa, Homo sapiens
MWTKEGQEVVPTVTGAQKDGLLVPGFSNLTTPCSNKCFHSPQAGDGSLEGLMLVLNPPPCVTPTPHSSLDQSHGTTQGLGRIIASWDQKVPEGKENRIWMSIRRLSYNSFSECRLLPHSSSLFLAYVPSLRPVPSVLTSLQLLPYILQSRG

SEQ ID NO: 928400 - protein, 170 aa, Homo sapiens
MGLSPPIQSLGGSVCLAALGQMFLPCQAPLLQVCWSLLEVHCRPSLPGYHQWRLQNRKDCCLFLPLDASSQRGTGQMPAGALLYEVSVDPCWEVSPCQDARGAGRQERLRLLKLHPQLPLPPGALSLGDGSFIYNPLSAFLSEMTCPERRNLERQSGYSGFVELQWAHPV

SEQ ID NO: 928401 - protein, 165 aa, Homo sapiens
MAWLACLAWLAGWFFWLGCLAGLAGLPGFACCLAWLAWLPGWLGWHACLGWLAGLTGLAGLAAWLAWLAWPAGWLAGGPGWLGGLAGLAGWEAWLAWLAGRLGWLGWLGGLAGLAGWEAWLAWLAGWLGWLGWLGGWLAWLAWLAWLAGLAGLAAWLAWLPGWLG

SEQ ID NO: 928402 - protein, 124 aa, Homo sapiens
MTAFSGQGTDFSNFLLIRDHPPWTGSGQFWRLCLYRGETGFIMSDLLTHTGGSTEHTPHNDHEKEYCERSPVSWKSFELVLSYTLYTSGMYNAQRLGDGIIHTPNLSIVQYPQDTKLPVDPLNL

SEQ ID NO: 928403 - protein, 224 aa, Homo sapiens
MTLRGLPVVAIGESARPDLGLAPWVQHDRGGQGLALGQRTLSDGLQLLAFQGRLINLTRVIRKTCRWEYQVETKDTFLEELLFEPALRTGGDRTGEEEGVPYEQRLATTPSNTPTGPLWHPCPVPVTTQFFPLDPGIQSKQGGPLLQLTANNYNLEPKQHFGSWFGTTKRLGSQKGLSSQHLGFGTPQEGGGSFRHLAPQVSAIQVLFRPAQKSSLDPARTGQN

SEQ ID NO: 928404 - protein, 147 aa, Homo sapiens
MGQVWVHSGSRAQPSLLSQGEQDTRLLLELSGMAKLEAELIPEQGTRASLRCWAGFWCGGWAQILLSLWLWEAFLGTLLTANTRRAYDMGPLPHDVCQVSARDCWERLALGWVDPHCLLAPAPRWCSPHPSDVHPCSALGLPSFHRV

SEQ ID NO: 928405 - protein, 130 aa, Homo sapiens
MAQITFLQGERKGQENLKKDLVRRIKMLEYALEQESIIVNEVKGVVDRTSIVETEKRTGRRSKSKTELLMLQKNYLPSSGFIKASLSGKTWASQTGLRIITRCSAHTTRGRCTLASEVAPENPLCLIPAS

SEQ ID NO: 928406 - protein, 137 aa, Homo sapiens
MRAPTQLLGLLVLWLPGARCDIQMTQSPSSLSASVGDRVTITCRASQGISNNLNWYQQKPGKTPKLLIYAASSLQSGIPSRFSDSGSGADYTLTIRSLQPEDFANYYCQQSDSTPPTAGKGIKYPQDSFEIIYSAVG

SEQ ID NO: 928407 - protein, 183 aa, Homo sapiens
MAGWLGWVAGLAGLADWLGWFGQLCWLAWVSWLALLGGWLGWVTGWLGWLAGFGWLTGWAGWARCLAWPARLAGWLAGLAWLAWLVNWLAWLAWLGSLGLLAWLPCLAGWLGLLGCLAGLAGLAALAGLAGWLAWLTWLFGLAGWLGLLGWLAGLAGWLAWLAWLAGRLGWLGWLAVLAGLAG

SEQ ID NO: 928408 - protein, 189 aa, Homo sapiens
MRIIESWGGREHGLSLITKDEIKQMWSFCIMEYYTATKKNNVMSFAATWTQLKDIMLSELMPGTENEILHVLNWIKQMWPFYTTEYYTVMKKIKSCLCSHMDAARGHYAYDSGAGELITSLSRESMELIYNRSRDPVQILLKYPRFTELLGVGKKNSLTFRPQGKRETPRWPYTSAVSQKTGGVSLFPK

SEQ ID NO: 928409 - protein, 223 aa, Homo sapiens
MTLRGLPVVAIGESARPDLGLAPWVQQDRGGQGLALGQRTLSDGLQLLAFQGRLINLTRVIRKTCRWEYQVETKNTFLEELLFEPALRTGGDRTGEEEGVPYEQRLATTPSNTPTGPLWHPCPFPVTTQFFPLDPGIQSKQGGPLLQLTANNSNLEPKQHFGSWFGTTKRLGSQKGLSSQHLGFGAQEGGGSFRHLAPQVSAIQVLFRPAQKSSLDPARTGQN

SEQ ID NO: 928410 - protein, 136 aa, Homo sapiens
MNLKLENLGSEKHTALRFRRWSHDLEAGKHFCDGWAAGPLRKYLCTPTKKTKALIADPKGNRKGCTTAYMTSGGTKEQHEQGAMVMGIDWVLAACKGSVLSTLGTLTHLLSQQIQDVAGFMNINTHLRLLRAFAWP

SEQ ID NO: 928411 - protein, 290 aa, Homo sapiens
MAEEGNKLASQPSQPNQPSQSASQASQACQPAKPAKPASQPNQPSKPSQPSQPASPGAPASQPTQTAKPAKPAKAAKPAKPARQPSKPSQPARQGSQASRPSEPSQASQASQLASQASQASQPAKPAQPASQPAEPAKPDSEPSQPSQSASQTSQPAKPASHPAKPATQQSQPRDPSQPAKLAKPAKPVSQASQAGHPTKPAKPANQPDSPARQPAQAAKRPKPASEAGQPSQASQPSQPSRPPSQASQASQPARQPAQAAKPDKPASQASQPAKPAKPASQPRQPSQPS

SEQ ID NO: 928412 - protein, 116 aa, Homo sapiens
MGVVLMHDYPWPDQGSAAYAQTSSCFSRGLDFWEMATEQAARIHISRFREIHLWIQMHFFFVHNFSSHCYYALGILDIILQLTLYGPFSPSLLYLNLGRQLRLQMRQTSWPGISIP

SEQ ID NO: 928413 - protein, 145 aa, Homo sapiens
MYSTKGPLKVTFLGVDGWWLKKLGSLGWLCWVAGLAGWLAGLAGLAGLAGWVAGWPGWLDGWLAWLAGWLAGWLAVLAGWVAGWLGCLAGLLAVWAGWVAWLAWLAGWLGWLGWLAGLAVWAGWLGCLGWLAGLAGLAGRVTWLA

SEQ ID NO: 928414 - protein, 174 aa, Homo sapiens
MDPLNCAILLGNPFGSPPIVCELCFHLLNLAAAHFSGPCLFLLELSFHSLSTTAVCRRRIPAIDFHPSGSGRVSAAFLIQRGTHCRFLANGGNERTSFCCVPKIHLQKEREEREKEKREKGKRERGKRERKRERGKKEEKRESKKEEREGRERGKRERGKRERGKRKAETERER

SEQ ID NO: 928415 - protein, 147 aa, Homo sapiens
MFLSSSYRDPLGHWQQQQEAALQKLCSQQQQQHTHKQPWWPRLRDPRPAPSTPSPLVSHTVGEVGPRQALRKAAWPPKGSWNIRSKNHLWRTAKLNDLPKLLDWEVMESELKHGTPSFEPCDFSTKPVGVLNKSHISSCECVVVKNT

SEQ ID NO: 928416 - protein, 145 aa, Homo sapiens
MGTHLLHQHDLDVRHEVKENHFGALRFDCPAGFWTCMGPGDGSFIYKPLTGAAAFLSEMPCPERRNLERQSGYSSFAELRWAPPSSNFPADCCACRENFKPVDLILLGSMGMGSAEIYHLAPWLQPPFQRNEQFCLAGIPGTTGV

SEQ ID NO: 928417 - protein, 141 aa, Homo sapiens
MADAPPPASLPPCSSISDCCPSSERGSVGVGPSEPCAGYNLLVCHLLRLFEKHSIRVGVFRFSSYLKECGYCNLSCICFKGNPKHHSAVVLTDSQMYHLHGLGQGLEEFSGLQGGGASPHGHCYLRPTKSTARPPLMFPKA

SEQ ID NO: 928418 - protein, 149 aa, Homo sapiens
MEAKKSHSLPSTSWETAESSGVIQSKSKGLRTKGPGVGSVNLASKALSGYYPLGLDDSVLPQILDLLAKHTHGERHGRMERGVPGRVRCQSAPTGLCLPIRLLGGHRSGTHLRRQSAGSQISSCMLGEPLLSLKLSDRDMNRLLQDQNC

SEQ ID NO: 928419 - protein, 185 aa, Homo sapiens
MNQIPHLEMQKSPVFCLAAEICISNKELNVNHQDNGENVSRAFQRPLWQPLPSQAQRPRRKNGFMGQGPFCFVQPRDLVPCDPAAPAVAKRGQGAAQAVASDGGSPTRWHLLSGVEPAGTQKSRIEVWEPAPRFQRMYVNAWMSRPKCAAGQNPHGEHLPGQCGREIWGGSTHTESPLGHFQVEL

SEQ ID NO: 928420 - protein, 134 aa, Homo sapiens
MNPYVDLSLAFSQSQVYLSLLEASCVPFPVTLSNFKTLKCRGLVLQTSLSYLSAFSAMSQRKLSAFACLCGSSRTKDCTLPFTCKYKQHTSFLSITAGGSTGDQALFNRHYIGYTLESNSALHGGCKGGRTNMG

SEQ ID NO: 928421 - protein, 160 aa, Homo sapiens
MIRQSVRCAPDSARSPLPLPIRLKACNCSCMAKCPEQFEPARGLSLTLLHYRGSRIKLSGLYTNCLAASLTSLSHPPCQLECPCGGQEVSHAHLPEASGKSRLLLASPTHRFPWSHRSGKQGFPELVVILGFPEECVFHITMVTACLTDIGKEICSQLNS

SEQ ID NO: 928422 - protein, 149 aa, Homo sapiens
MATKTHKLLTLRVHSLMGKDHINEGKIIPGIITTTTPAGDRSHSMTALCSTAMPPPTCTQDKLEMPSLYPCSPGPLLAQIPGFSGKETKHSKEAEVQLFSQVHHKQKIPVCERKKNEDRYALFMLMIKKEEIPMGPAVSISTGPGLGSA

SEQ ID NO: 928423 - protein, 142 aa, Homo sapiens
MVYLAVIFLLPGQLNLLNASHTLIFLLDPLTYSQYHIIQVLLYNCLMCVKFLEANASTGQFPSLGQFWLNFSLLTTLTTKRKEIMAFTATWMELETIMLNEVTQEWKTKHHVFLLISGSKAMRMQKHKNDTMDFEDFGGKGG

SEQ ID NO: 928424 - protein, 143 aa, Homo sapiens
MSSASIYEIQHQQGFLALLGIEITSNEEDQRSPPREAAFDLNLKYEEDFHQQVWGEEDGGILGERRVSKCLEAKEQQQNKTIRIIRSVSPARFPSCGFPEKGLQHWHSPCLSALCDNQCFSQGIRENRQTLDMAVPNDQYWKG

SEQ ID NO: 928425 - protein, 179 aa, Homo sapiens
MSWKADLYGLPQLGSPGFLPGGQWASCGSIQSLKARSPVGSLSLLLSQAHNSLIASSVLGVKKGHPMPCKSTCGSTRLAKHRQGQIKEYKLATPASPSNTLRSSSTLWKLCPFPLHNKSCCCPLFSSVPPLKAVTFTTKVRGFVLQVSETTNPLEETNSRHTKTFKMLLGCEGADFVQN

SEQ ID NO: 928426 - protein, 171 aa, Homo sapiens
MPIAAHSAPSWVLWFRASAPVVQPDTPEFRCLHLCSSISPDHLPVGSYGPLPSSLGSPGPLLNSSGSDSQKEVPLTLTIHLAVCLALTLTVSPEIILNFLLAPAQLWVGSVPAHPSPTLPSHQACTAASPIGLPCRLRSIRQFECSSKTEWCRLNLRGGFCLFYESQRALG

SEQ ID NO: 928427 - protein, 162 aa, Homo sapiens
MGSTKPDARYNLLVCHLLRPLEKHSIWVGVSHVSRYLLSQLPFARKGKSPDPLPFLVEEALNSLATQESLHDFPKFNFPAESLPLQKATTHIRQLIQPTHTCTSCVLPSPHLLNTHLVITPSPCSHSSPGVVKLLLLRATGTAPYLMVFPKLCPHLCKEFLY

SEQ ID NO: 928428 - protein, 185 aa, Homo sapiens
MKSRSARAGLDLGPQQSELMICGPLSQPCGTLILPPISNGNSAFPVHRPKHGVIFDSLFLVSHPTSSPSRIPVESVLKVDRESTPFASLPLLTSLVQATLVSHLESCHHLLSDCSSSALAVLDVDIHIWPQIFMRSTNSLKNVEKYEEEKLLLFYNNIVMFYKLTSVKRNEHRSYTDAQIPTEMV

SEQ ID NO: 928429 - protein, 249 aa, Homo sapiens
MHVECAITLGKRDSDLCELRISLMKYLRTVHTRKDKKQYLMAPTPDESTGGPGQLSETHRHWATEDWVKAKCTSQSLHHCVRDSCFRFIESPLRVTTSLAQMEQQLSLRDMGPTSGRGEACLLSYRIQEGEAAALGDNVMVTADVEVGELPTPKLTDSTFCEESTANKLVCHAKDKGRLPLGDAWEAANEKCPGGAMLACLNISSALTWQPLQQLPASGRDGIYILVLGMARHMASCMHAGKKQSPEEV

SEQ ID NO: 928430 - protein, 211 aa, Homo sapiens
MSVVESFERAAFYSVLGRKPNYVLENNAVYPGNTQQSQGTLNKEQLLVPLSLNAGILITIDGKAKVHKGCVFKAAVSLLQCEFSRRWTDSLLDVSPAPGMRSPEPGLLPHRDRQWNDSGTTRAQDSERPLRPDPDSPASEDEHGSNFLATEKMLANCLTHRGELQKTLYRPDALARRGAKAAPWRERGWSMSWGLQASPSLLRGHRTSEES

SEQ ID NO: 928431 - protein, 181 aa, Homo sapiens [sequence omitted]

SEQ ID NO: 928432 - protein, 137 aa, Homo sapiens
MENGKSTINLSPQITKKSGQNRGDTIYRHWQQAVQNLPPSVLSSSLFPRRKHLRMPGLTALVQFSDGGAGKNIIRTWPPYKGIGFLNISYIRLLHPCLPVESQALISCLGHCENSLPGLSSSVYPTLVPSPHCSKTT

SEQ ID NO: 928433 - protein, 147 aa, Homo sapiens
MLTADSEFPPALGSPDAIWELRPRVRNLRNLSCAYCTVAELAAEPQEKVLLTLPSPFQKQRNLSSWPPLLQAYGSGLFSGPGPHWYSLPSSANLALEMRKAVAQRGKDMRSSIQQSVRSGILLKMTQVSLDADSFIPLESGDNCSPG

SEQ ID NO: 928434 - protein, 160 aa, Homo sapiens
MWELTQGAALKISKASHSDWQAGGPFPLSIAGLRVTLWRRGATCLPSSSPVPPLLLSLAKFLPVPCLVEIFQCVLSLFPKKTMLAASCQEVGAGSWGLGEDLHPKPPPLATAFELKESGDAAGGTFAGLCSGKADLTEGDQQPHRRDSRPQRSFSVFLAP

SEQ ID NO: 928435 - protein, 146 aa, Homo sapiens
MRPPPSLCVPGVKGSSGQQEGLRRMAPLMPKPETRESSRADGCCHPCTCAWPSCQDACAMGHPYSPCPVLRPQGLMLSRLGHKSLAQKVLRDAVERQSTCHEAWQGLGEVLQAQGQNEAAVDCFLTALELEASSPVLPFSIIPREL

SEQ ID NO: 928436 - protein, 149 aa, Homo sapiens
MPEPPPPLWTPVWPQPPRRAQPPAPRHPVPSTTQGLRSAGAQRRTGRQLHLPPRCRIHWVKPAGFLTLVGTWRTFMVCECTNRHSVSSYSGGDLENLCVHTLYLANLVGTWRTFGSSSGIVNAPISALSKQTTRLSVKWTNQQDVGGAR

SEQ ID NO: 928437 - protein, 152 aa, Homo sapiens
MHGKIEQKAQRLPIYSLPHTPTASMLINIPHQSGTCCYRFQALDAGWKADATPCPTELIFSGCGQDKRISKEESLKDSAKKEITHREVSLSGAGGTKQGSGGCGWCNMILIHAQIQNRSPKEVRGSREPSQLRAFLPHCLHSWAKLFVWIVE

SEQ ID NO: 928438 - protein, 173 aa, Homo sapiens
MSRADPIGSWGSKSAHFTPWLQLSVQGWAQDSSIQEEPGQDFGGKGQTEAVSGGNFRFNMMLHPLLRPEELEPKQPSQMASPGGQTRPSLKRETSGAPPKPSSACSADSPIAVECCVKDQREPSKEATVAAEAKWKVCREPGSPSPSADTATNGLSTRCLNFYICEMGWPSDL

SEQ ID NO: 928439 - protein, 135 aa, Homo sapiens
MQEEAGAAKSQAQILAASSCLAVAPGSSVSPSRWCALLAPLQSSAPSAGPGLPLGKSYLVTVRRRHGRASLELQCNLAALLPGWGLQALNLHVIYGLEGPTQVCKEGESLAVESVSFPWAVVRWIPASKSLYLFG

SEQ ID NO: 928440 - protein, 139 aa, Homo sapiens
MYPVHIQFSLNVPRVSFMAVFVVLCFATHRLPCSAPPCQSKTGGLEQLGESPKPFAQPPRPCIHVLPPAPLTRAHWAFCKHLCCAVVLPPARPCTCSLPGTPFASLSLHSQLIVYCPLCSPEAIQILVQTGSSPIFQLP

SEQ ID NO: 928441 - protein, 168 aa, Homo sapiens
MREEGSPEVAQASAAYLSSILDSWASSDCFPSFFGKKTEKPAAVFPDSSGIHVQNVQVCYIENCDKIEKFIERTKLPKLDSRNNGTSITNNEIELVIKNVPPKKSSGPDGFTSEFYQPFKGKLTLIFHKVLKKNRRKGNTSQLIIKQDEDNIPKKTISYIDQKSPIKC

SEQ ID NO: 928442 - protein, 151 aa, Homo sapiens
MQLAVFGKRDPTCLCWAARPPRLLTLLQSWESNHLEVAFSSECPVRCLTGTNCTVVNINTFLSTHPPNKFTEVLTSSVPSWYPGSCPTSRKTGSHTDLKDGECGGLLSGGDGFQWDRWGAAKGMEREGDLTLEYGHPPANLPSNHPQLNSS

SEQ ID NO: 928443 - protein, 155 aa, Homo sapiens
MRQKVGTRVHVHNVQIYKVSPRGAESLVQIVEEDLEGLRKGRMKKVTKSLQATAAWCSQDRALHGLFWPPACPRADGQVALAWYLPIPSVSLRFSAVLQLEGRAMNIKAGLADVLLTGNLLRKKHFSMCGEDARDSPKGPSQFGPFSPLPQPSWH

SEQ ID NO: 928444 - protein, 155 aa, Homo sapiens
MVDEKQSCPWVLPLGIPTACSFLAKLSLLTDVTFTGNARWSILCFEFWDLDDQLEQIAVCGGGRCFLYESRMRKCQPGSRSMNMQVSGAMGRLSDVWSPDLLPRDMDEAGNHHSQQTNTGTENQTLHVLIYKWELNYENTWTQGGEHHTLGLVSG

SEQ ID NO: 928445 - protein, 146 aa, Homo sapiens
MGEEEELKGRPRRRRARLAYLQREPTLQMEQPVAPSHGPLVGAELCPRGVWTVDIVHRNQRHHSLGFYQQHLNWLDICGDASQGSSKSSVQQAALPAQPPSPPPDKHPLTQADTAPALPTGPKTTESITSTHPSLHQLSPNPGVQC

SEQ ID NO: 928446 - protein, 182 aa, Homo sapiens
MIGKIGSLCPTPEQAVGDWGPGHEMTSIGLLLGVSAAKLGTMDMSITRLLSIRIPALLPPTSTELDVPHNVQVAAVVGIGLVYQGTAHRHTAEVLLAEIGRPPGPEMEYCTDRKSYSLAAGLALGMVCLGHGSNLIGMSDLNVPEQLYQYMVGGHRRFQTGMHREKHKSPSYQIKHIAVRTG

SEQ ID NO: 928447 - protein, 350 aa, Homo sapiens
MVFNDYPKINDWEYLLNSDYHQSVESHLLNRSLCLSPSEASQMKDEDFSQNLSLDSSTLLFTHIPAIFFVLRLVYEELKLNTLMGEGICSLLNLSFSWQETTQRLSELLDKCAQLIQSIALYILGDESSVSDESSQYLTRITVGFTLRDLETLPFGIALPIRDAIYHCREQPASDWPEAVCLLTGRQDLSKQACEGNLPKGKSVLSSDVPSGTETEEEDDGMNDMNHEVMSLIWSEDLRVQDVRRLLQRRAPPRNTTVDLNSGNIDVPPNMTSWASFHNGVAAGLKIAPASQIDSAWIVYNKPKHAELANEYAGFLMALGLNGHLTKLATLNIHDYLTKERACQTGMRAL

SEQ ID NO: 928448 - protein, 123 aa, Homo sapiens
MAGEASQSWQKTKEEQRDFLHGSRQEACTGELPFIKPSDLMRLIHYYKNAMVKTCPQDSVTSHWVPPMTHGDYHNSRHSIKVRGDLYVSPDWLRSNSLYDYSTVCLVIHLLMAIWAISNFVVQ

SEQ ID NO: 928449 - protein, 146 aa, Homo sapiens
MLPAWHRQHSQPAPPSSRPPAPWARSAHPGARPGCTVEGFARIREWGRRKEEGGTGKKKKGGGGRRGYPVQSLSQLLLLGWGAPRGLPGIQLGRAGTRGKGFSPRHVHGRTVKICLGWPISSFAPIKRKSPRNSIKATLANALFEA

SEQ ID NO: 928450 - protein, 153 aa, Homo sapiens
MTWIIWHFSCLHSFSLLLSCEEVPSTKTLPIRLKATSTAQQNPPHSLLFNSFAQPDSSWMPDKALGAGARGCPIDPPLSCLTLKPSMNGKLKEHPLMQALWVSKCHGQPPDAAAGPERVLLLPVAKKPSYQPLYLLTCMLPLPQGVESYELSK

SEQ ID NO: 928451 - protein, 139 aa, Homo sapiens
MNYHIYHILKICGHHIMEAVECNIKKFMLNSESNLELLAFFKWVRNVDRIRFRKGTDLQQTSKDDDERKGDTRKLNVAANSWINWMGKKPEVRSVALKTSADSEEEMKGSCDLEIKQMHQRKSLIHSWSHCIKGIAFSI

SEQ ID NO: 928452 - protein, 186 aa, Homo sapiens
MNGIEWNHRTESNVIIIELNPMESLNGLEWNHRMDSNGIIIEWNRMESSNGIEWNHHRMKSNGMIIWTGMESSSNGIEWNHRMESNGIILEWNLMKSPNGHEWNHPMDLTNGIERNHHGIDSNGIIEWNGMESSKKGIEGIHRMESNGIIEWNGMESSSNGLKWNNLRKESNGIEWNNQMDSNGII

SEQ ID NO: 928453 - protein, 152 aa, Homo sapiens
MSSDCTPFLALLQQINLCHQFTKSTHERKNGISLNIEFFKDSINANGEKIEKIQINISRNDKGDVTTDPIERQILPRDYYEHLYARKLENLEEINKFLDSYNLPRLNQEEIESQNRLIMSSKTESSYKDYQPKKAQDQMDSELNSTRCKKKR

SEQ ID NO: 928454 - protein, 155 aa, Homo sapiens
MAGWTQSWCTSVLAYKRVKETLPSQLSPPSMYGFDDDRRRLGSISHKPTLCFQMTRVEIDGCSFQCCPLYKDIPPFMLLMVPPGLRFLILLIQKIVPFHTDASYISGQGMWLALILWPKSVQLGKYFIPISLISLESDTFCFLQVTSSGYLSFNV

SEQ ID NO: 928455 - protein, 143 aa, Homo sapiens
MFNVRYTAIVTGRIQSLIFFVLRLSCVCPYTFKSVSVICSFSTVSRHTQHYPQRLRELRGLRKRLTNPVSQKETFNRDLGTEAMSWQPREEVVDPSTVILQTQSLFLPQGRNVWDSRLFRERQGFTYRRDLCDQNSDHSTQVR

SEQ ID NO: 928456 - protein, 151 aa, Homo sapiens
MSEDAKGCHTDPLHWLAEGSRLTQKCRASTELLTLKPSTAKSTVTLFLGLQGSQASPDAATCICMEFAPASAQKRSPWLLHLSPVCSLPQGQHDLFNYRKDKKQTPHVVTRRWEWNNENTWTQEVGHNTLGTVVGWGEGGGIALGDIPNAK

SEQ ID NO: 928457 - protein, 201 aa, Homo sapiens
MKGSRKTLTSLVVPETPLWVIPDNRNLPKVLKCQKAALLSLMLYALREPIAGHIIMQAATCKLGMATKVSLLQDEAGLALWYVPAAGRSGLPSSQYFFRHHVSGKVTPFPGLIASWGVTGYELSKQQWEFVHLTDSVATVTYQGAQWNIAAFYPLNRTSLIKDRPQGPVHLAKLQAIILAQDAWASNEAIYTFRIDSQAIV

SEQ ID NO: 928458 - protein, 160 aa, Homo sapiens
MSSLDDLVKIGLYFVSSKSKTREAENIFALLIFHHRPTLPPNPGIQVTVTNRCHGPQEEPQKDSSAAALDTHRSVNLVANCICEGSRLCVSYENLMPDYLRWYSFIPKPSPTTLIHGKIIFHEINLWCHKVWGLLPWTIDRYFYFMKNPPLKQWAKVGVM

SEQ ID NO: 928459 - protein, 159 aa, Homo sapiens
MVAYACEEASRNFYSWLKAKREQAVYMVEEGAIESEGEGSGYGGEFRWLGVVQRLTSLFSKEGHGCPQPKAGWPAFSNWVQLHEKVGYYVVLKATVIFEDKKDKDITCILSCQPESETASAKLTETVKEIEPNQLHLASNLQVVLVHFGVYAELTLQGT

SEQ ID NO: 928460 - protein, 138 aa, Homo sapiens
MWQHITQTPPQLCFPRAIAAPAELSFGPHSNPTDEEGSVAQRGRHWTQASERLRGKVCIWCSFQRSPRLHCCFLYMLGCHAPGNPTSISVERLCTSAPPPLGGMFHPVLFRTKDLSGVFCLRSPRLHPAGKTHSKVKL

SEQ ID NO: 928461 - protein, 226 aa, Homo sapiens
MSYLSPECGQVSYKPATPTGKQTSPQLAPPCSTNRELSYVESGLLTCQPCPCKSVWLLRLGGWDEQTQLRLLVVNAPGTAQAASTRDRRVMCRCVCAGGDWGVHGRITAVSACIAIGPSSLCMRLCDLTPSVKKPATGHRVYLKSYLDDICTRPIPNKVALTGTKADPAWSAALRGPLLHILHLLLPQLNPSNGFPGNVAGPRAPLLCAAFGHDTLFPSHYSSSHG

SEQ ID NO: 928462 - protein, 200 aa, Homo sapiens
MSLLLLGLSTMQKGGPASVLTSVASAPTSTRAMGADTSSTGAEKTDGRCESIAGEKWRKCRFLFLRPTGIPISSCLINSPSTCRPPSDNHLLKEASLAALEPVVDEPPVYRVGAAGKLHLHGDFLDGFWFRIGVQMPIDVDQGTECRGPTGRSLGPLAHPSWSGDQGHGCQFPGSSNILDSQCCRLWHPKKEHTSYAFIL

SEQ ID NO: 928463 - protein, 314 aa, Homo sapiens
MLMNYSSATEFYLLGFPGSEELHHILFAIFFFFYLVTLMGNTVIIMIVCVDKRLQSPMYFFLGHLSALEILVTTIIVPVMLWGLLLPGMQTIYLSACVVQLFLYLAVGTTEFALLGAMAVDRYVAVCNPLRYNIIMNRHTCNFVVLVSWVFGFLFQIWPVYVMFQLTYCKSNVVNNFFCDRGQLLKLSCNNTLFTEFILFLMAVFVLFGSLIPTIVSNAYIISTILKIPSSSGRRKSFSTCASHFTCVVIGYGSCLFLYVKPKQTQAADYNWVVSLMVSVVTPFLNPFIFTLRNDKVIEALRDGVKRCCQLFRN

SEQ ID NO: 928464 - protein, 159 aa, Homo sapiens
MQKEAAAVCLDNTLVGNMTGVVFGSFLTTTSSQVLFYFLNTPATSASLLLPLSFSKPPSFQEKPTNSSLLPYSRPPQPSKRLTSITNNQLEQYNDSQSDDQDGYRVTEEWVAYTAGRHWTKDDSHTRWDRTGSWKVASRNLNFGSSLQNCESADSVSPI

SEQ ID NO: 928465 - protein, 188 aa, Homo sapiens
MDLWGLMVHPYLISLSTARIFPQMTEYEDSLPLDLLNFNMTFSCLTCGKLFKMGHKAAKTTRNINNAFGPGTTNKLTGQWLFKKFCKRDQSLEDEEHSGWPLEIDNNQLRAPASVNRGDPVLFHNDAQLYVAQPTLQKLNGLGFKVLSHPLHSPDLSPTNYHFFKHLNTFCGENAPTTSRIQKMISKS

SEQ ID NO: 928466 - protein, 315 aa, Homo sapiens
MPLFDKRFEIINAIYEPTEEECEWKPDEEGKISEELKEKAKIEEEKKDEEKEEPIGIPEFWLTIFKNVDLLSDMLQEHDEPILKHFKFIKVKFLDAGQPMSFVLEFHFEPSEYFTNEVPTKTYRMRNIKKQQKHKGHGTVCTVTKRVSNDSCFNFFAPPEVPESGYLDDAAEAIHAANFQISHFLPECIIPRSVLYFTGEAIEDDDDDYDEEGKEADEEGEEEDEENDPDYEPKKDQNAADKCGRRRGRRRREEEEEEEEEEEEEEEEEEEEEEEEEDLQLFDAFCKKKIKVHFLWSDAHSCPILLLPPLIFLGH

SEQ ID NO: 928467 - protein, 276 aa, Homo sapiens
MGREVSSPHGTCFVAYPIGLLLPFSVTGAWCGRSLSLASSHHLLGGSFLVVPSTPYRPLRQDCWAWSTAQAVRRPGEGWKGFVMRLVGCPVDPTVPDYERDKLLLANWGLPKAVLEKYHSFGVKKMFEWQAECLLLGQVLEGKNLVYSAPTSAGKTLVAELLILKRVLEMRKKALFILPFVSVAKEKKYYLQEVGIKVDGYMGSTSPSRHFSSLDIAVCTIERANGLINRLIEENKMDLLGMVVVDELHMLGDSHRGYLLELLLTKICYITRKSAS

SEQ ID NO: 928468 - protein, 144 aa, Homo sapiens
MSRPAQSSDDQMGKRLSWDCLRKHRWVLYEKRSWMSHVGGGTDSGAPGHSIRLVIHSLACDKWFQGGGLQRPGSPCMVGQAPFGFMDYLGLELPQDPDPRNGDDDEGRQIKMAARDVVANIGVAMTTVMPVIVELRKQAVRKGR

SEQ ID NO: 928469 - protein, 143 aa, Homo sapiens
MSQADWLKQQKCIFSQLWRLEIQGELATGVLSSQRSSPLTCAGSQRELLREDIKGSNLELLHIAEAETQDSFQTPLCAFCISPDPYPSLQDSSSLILPKYCSPISLLDYFFYFSSSKLKKKKKLKGCTATIINLSNSSLHCGK

SEQ ID NO: 928470 - protein, 127 aa, Homo sapiens
MQTKSQTTRNRLRFRSVWSTGVCFPLGPISIHDDGIKIVNGITPTKLLSYIHSFQEDIIFGGTTFNLMLFPEMTFFFLHLATVKPKVQGNQDTECATEMLLELATYIKELSVPQRDAVSHLFFQNLM

SEQ ID NO: 928471 - protein, 154 aa, Homo sapiens
MGRCGWVIHCGILGHLLALSEPPFSYPRNVDLDPVISNHPRVCDSATKKSKRQVQDSMCLVAGESSLSPQLTAQLRKFLPPTPLLTPFNIRTEFSHIVALTHFLYTCCFLSLECHLFLYLENPCPLKTQVRSHVVLLCYHLMQSVIIPSLLFCI

SEQ ID NO: 928472 - protein, 232 aa, Homo sapiens
MAAATESNPVHPSSRATAQPLLPQSEHFTRDPESPHPLPTTSQCLANTIGGLRTHPPGPAPYACSAQACSLGFWGSDSTIHHHWHLSMPPGRQKAGQPNLLSSPQLIPPHVQPVGLGTFLNNPSQPPPTPVQIVWEPEGCPTTATAMAYSMPAAKEPEDLPTCPACHCSYWLLSKPPGVQESAHLDPLKTVLVYVTLGPKDRHTQPANAPTRASGLAHLVSPTPTKLHHSLH

SEQ ID NO: 928473 - protein, 140 aa, Homo sapiens
MRTVWSLADHLKGENNGIYWEKRIKGKQRLSTKPEPLVVRFSPRSFKIPGSTQEEEGPGSSLLETVRTSVAPPQGALLPVHRRVAVLPGSPSHPAVSLSFAYFFYLCQTQPNRLRLLPHYLATFFASTFLSIYSVQRATR

SEQ ID NO: 928474 - protein, 127 aa, Homo sapiens
MSGGISYHPRLDNEADKLAIPVPVAVAIPNPITAYAAVLPSPSHFDGFGSVIVPLWLPKCVWNWWVLGLTDFKNEATDPRGLKLQTFAVSVTALKAAHLELFVPPGGFVVSLASGVKLQTFANTLYH

SEQ ID NO: 928475 - protein, 140 aa, Homo sapiens
MGEESPLLGCFSSTHWRPLKTLALSWAPGLQLTRTDTIYQHSSQEGMISNFGLTLCGSWPFPRVFGPIDETAGPHVPIPGLEARGLKSRCLQSHVLSEDSGGGLFPAFSGIWQPQVFLVLWQHKKLNWIKDCRGVWCGMS

SEQ ID NO: 928476 - protein, 338 aa, Homo sapiens
MGSFSLKSPVLTCDFWCGCYQGPMRDGIVSVPSHFSGPHSMQALTIIISSPSEPHFVRFSVYQCLSLCDTFFNKPSCIEKRAVGHCSLHFRALILSSVPKEHKNHTCLFSILSCKPSHTVLEQKCPGLSSPQHQQCSSIDQLEPQSGSLNSFPWAKGQLPQVSVLHRGLHTPARSYHLKSLHGVTAPGMLSTSTELGNGKHFLKITLLFHPGILRWISLVSLIHDVCKARPLPYDSKGLPGLLLLWPSPSNVQMWYMTQLPALRSCNDHLLCFFYKSCPPKFENDGLIVGIFWVGPYIWMLWNRSVVWSTRMYSCLVGGRGSTRKMGMVVAKGATGMV

SEQ ID NO: 928477 - protein, 178 aa, Homo sapiens
MIQTVSHPIQPHPHLDPFLTTQSVSMIQTVSHPIQPHPHLDPFLTTQSVSMIQTVSHPIQPHPHLDQFLTTQSVSMIQTVSHPIQPHPHLDQFLTTQSVSMIQTVSHPTQPHLDQFLTTQSVSMIQTVSHPIQPHPHLDPFLTNHPISFNDPDSQSPHPASASSSSGPVSDQPPNQFQ

SEQ ID NO: 928478 - protein, 171 aa, Homo sapiens
MMTMARPGRIPHHLIHVAAVLDCVIALILVHHLCSYFGEGTVQQVTKIFDSEINLLCVSASIKSLNMFSCFIHTGLDHLTFPWQTFVLQLIQNDKLKSKANVLKWTTEVTAAPVTTETQLQAVNKCQMAQSRSLKLLSPGLVCWYPYTSCVLERLYYILHLKMETRASVLS

SEQ ID NO: 928479 - protein, 195 aa, Homo sapiens
MEEIGFFKKPFNLWNFELERDDLGYLVEEISRQQSVQEEAEHKSLENLQPDAAIEKKKLFSGEKFKPAAEICISNEEPNVNHQDNGENVSRVCQKTSQQSFPSQARKARREKWFPGPDPGTHYCVQPQHCIPATAAMAKRGQGTAQDIASESGSPQHWQLPCGVGPVGVQKTRFEARYVAPAGLQSSRDLPASVP

SEQ ID NO: 928480 - protein, 186 aa, Homo sapiens
MQLFSSNFHDVTWAMSIFLPLASLKLPFSFCFPVGPPHSDLALRWSYQLQSAFSLVIHTWVKDNARHVLPLTCLAINLPCETETTAFRPCPSQSVCEVGASSSCAHDYNTLPTDPFVLAKEVCPNLKLHHESQELPSTCDHQLSSPTDFCEVPWEARDINSSCIVWKMRVWDGIRHSQVAAQGGCT

SEQ ID NO: 928481 - protein, 160 aa, Homo sapiens
MYGNAWMTRLKFAAGAGHSWGTSARIVQKANVGWEPPCRVHTGALPCGAVRRQPPSSRPQNGRSTNSLHCAPGKVADTQYQPVKAARREAVPCQAMGVELLMTMGTHHQFDSHLRCGVKGDHFGSLRFDCLAGFQTCMGPVAIANHEKREEYFWQKEQHV

SEQ ID NO: 928482 - protein, 268 aa, Homo sapiens
MGKKHSRKIGNSKKQSTSPPPKERSSSPAMEKSWVENDFDELREEGFRRSNYSELQEEIQTKGKEIKKNKKKRTNLQEIWDYVKRPNVRLIGVPETDGENGTKLENTLQDIIQENFPNLARQANIQIQEIQRMPQRYSSRRATPRHIIVRFTIGERKEKMLRAAREKGRVTHKGKPIRLTADLLAETLEARRERGPIFNILKEKNFQPRISYPAKLSFISEGEIKYFTDKQMLRDFVTTRPDLKELLKEALNMERNNQYQPLQNHAKM

SEQ ID NO: 928483 - protein, 140 aa, Homo sapiens
MNKYFWYIYFIISFPHFIISFHHFISSFHHFIISFHHFISTFHFIISLHLIISSFHFMISSHFITSFLHFISSEHFISSFHFISSFHHFISFHLIISSHLISSFHLVISFRHFIFSSHFIISSIQHFNYFIISSFDFIIS

SEQ ID NO: 928484 - protein, 181 aa, Homo sapiens
MAATTFLLCPHVVFPLDCEATGQRGRYGIGKEPVVAAYVQLHMQSGEQVEFMVDSFDGDFPALKGNNRTFSMWNKAEVLTAGLKEEGKMVCGSGPGPPCSVQPLDLMPCIPAAPAPAVAKRDPRMVGPPTTCTVCLEKPLALNGSHEGSQCGGLYKVTGVQLPKAMGASPLHQHALNGDKG

SEQ ID NO: 928485 - protein, 1169 aa, Homo sapiens
MSEKLSSSCSRPVLGHVQKAHLASLVNYDNVVDTGSETDEEDKLHIAEDDGIANPLDQETSPASVPNHESSPHVSQALLPREEEEDEIREGGVEHPWHNNEILQASVDGPEEMKEDYDTMGPEATIQTAINNGTVKNANCTSDFEEYFAKRKLEERDGHAVSIEEYLQRSDTAIIYPEAPEELSRLGTPEANGQEENDLPPGTPDAFAQLLTCPYCDRGYKRLTSLKEHIKYRHEKNEENFSCPLCSYTFAYRTQLERHMVTHKPGTDQHQMLTQGAGNRKFKCTECGKAFKYKHHLKEHLRIHSAITQLRNKLENGKPLSMSEQTGLLKIKTEPLDFNDYKVLMATHGFSGTSPFMNGGLGATSPLGVHPSAQSPMQHLGVGMEAPLLGFPTMNSNLSEVQKVLQIVDNTVSRQKMDCKAEEISKLKGYHMKDPCSQPEEQGVTSPNIPPVGLPVVSHNGATKSIIDYTLEKVNEAKACLQSLTTDSRRQISNIKKEKLRTLIDLVTDDKMIENHNISTPFSCQFCKESFPGPIPLHQHERYLCKMNEEIKAVLQPHENIVPNKAGVFVDNKALLLSSVLSEKGMTSPINPYKDHMSVLKAYYAMNMEPNSDELLKISIAVGLPQEFVKEWFEQRKVYQYSNSRSPSLERSSKPLAPNSNPPTKDSLLPRSPVKPMDSITSPSIAELHNSVTNCDPPLRLTKPSHFTNIKPVEKLDHSRSNTPSPLNLSSTSSKNSHSSSYTPNSFSSEELQAEPLDLSLPKQMKEPKSIIATKNKTKASSISLDHNSVSSSSENSDEPLNLTFIKKEFSNSNNLDNKSTNPVFSMNPFSAKPLYTALPPQSAFPPATFMPPVQTSIPGLRPYPGLDQMSFLPHMAYTYPTGAATFADMQQRRKYQRKQGFQGELLDGAQDYMSGLDDMTDSDSCLSRKKIKKTESGMYACDLCDKTFQKSSSLLRHKYEHTGKRPHQCQICKKAFKHKHHLIEHSRLHSGEKPYQCDKCGKRFSHSGSYSQHMNHRYSYCKREAEEREAAEREAREKGHLEPTELLMNRAYLQSITPQGYSDSEERESMPRDGESEKEHEKEGEDGYGKLGRQDGDEEFEEEEEESENKSMDTDPETIRDEEETGDHSMDDSSEDGKMETKSDHEEDNMEDGIFDSTEIANPDYPDL

SEQ ID NO: 928486 - protein, 181 aa, Homo sapiens
MPYIHSVPTSGLPCVPVTVAAKTDSGVQVADEVCHIFCDIKVHKCSTSEEIKKRKKTVIFCLSADKKCIIVEEGKEISAGDIGVTITGPFKHFVGMLPEKDCCYALYDASFETKKSGRVLFVCLFLWAPELPPLKSKMIFTSCKDAIKKKFQANGPEDLNWACIAEKLDGYLIAAFEGCSV

SEQ ID NO: 928487 - protein, 212 aa, Homo sapiens
MSLHAWEWEEDPASIEPISSITSFYQSTSECDVEEHLKAKARAQESDSDRPCSSIESSSEPASTFSSDVPHVVPCKFTISLAFPVNMGVFQPALLLLLLFCWCTLLTRAGNVECSASHNIKLQGTGETGLLFHMRLKRDFFNLYLQGQKGKYASLIEKYKKHPKTDSSVTKMRRFYHIEYFLLPDDEEPKKVDILLFPMVAKVFLESGVKGL

SEQ ID NO: 928488 - protein, 144 aa, Homo sapiens
MKIAISTIIIANCGFKKGEEERYKEEEGKERDKEETEGKEEKQGFHNKVPQTGVAHTKEMYYPTVLEPGIPKSKCQQGWFRLRAAGEGSVLGLSPWFVDSHLLPASLPSASFPSFRKRVSVSKFPLFIRAPVLIRAHPNDLPLT

SEQ ID NO: 928489 - protein, 161 aa, Homo sapiens [sequence omitted]

SEQ ID NO: 928490 - protein, 182 aa, Homo sapiens
MMLVVDSLAWALTEHVVPGALSSASTEALSLKKAALPSPGVLQATRSFHTGQPCLAPLPPLPEYGGEVHLGLIPEEFFHFLYTKTGITGPYVFGTGLTLYALSKEIYDTIDLEKSQQAVGHKCHYLFDAKRNNIAMTLENTLQEWLHRVYKEELPERLQLLSIEVFYIHNADREMRKIQPQT

SEQ ID NO: 928491 - protein, 137 aa, Homo sapiens
MKLQSMNLFLCQFAEHSQEQKTKHCIFSLIKELNNENTWTQGGEQYTPGPVRGWCDYRGCWAESFGLASVALCTSVNRFCIGLYGPTYKPVDDTYGQWGDPWRAQWSELHAQPQGDKKKMGGARQGWPIYSFPDGGH

SEQ ID NO: 928492 - protein, 163 aa, Homo sapiens
MAGRRREVAWPQRDSLMMSRGYPARILLRTCTEFTPAGTSASVWFLYPLTYVLPPMKGGSQWVRVSGVRSCRHPSSQPLPALIHSFPHSFAHVLPSAEELRSVVSVVQGASKKSFLEVVLQMLANATFDYNLYERESTFFSQEAKASKTSLEEKLLCETLDRS

SEQ ID NO: 928493 - protein, 200 aa, Homo sapiens [sequence omitted]

SEQ ID NO: 928494 - protein, 137 aa, Homo sapiens
MTHNCCVLPPAVPERVSITRHCCRGCGGSSGFSDSRLYFLSLQCPFQGYEDKTRYPEKSLPVATTASGPQQVLTGYSQCSLKAKGLISQFVVNASRPESLSSGKGGLPPVPKQVQKCHPIAKGYPNQKLIGTLGNVV

SEQ ID NO: 928495 - protein, 152 aa, Homo sapiens
MDLRSMDVCTSWHMTCHWALGLLPEVRADFSGAMSPELRSEEEINYVKIREKSISGINMCQCLMARGNKTCVNMATFLEKALVQKCTHFLVVICGDQFNSMVKPELDDLKELLLYGILPIALEKSDFFFWSMFPTLQNEGYFPEGYCTGSDL

SEQ ID NO: 928496 - protein, 140 aa, Homo sapiens
MGDPCTVAQVSTRAHSCSIAQDPVCDSNCQVLTKVRGESMGQWQVAGKTLVEYFDMALLSLWAQIESFRRQPHDGAVVIDREMELNEGKEVVIDREMELNEGKEEEKLAKIGLNTVNEETNVRREDELLVTRYTPAEGKD

SEQ ID NO: 928497 - protein, 165 aa, Homo sapiens
MPRSYPLVGHKIMDEANSHTGPSAAGLLEFAGGPVQTLFAWVSAAEASEQRILVNSKCCCLIVPLEVLSQRSTQPYCCASNERGSVGVGPSEPGTGYNLLVCHLLRLLEKHNIRMGVTRFSRCRPSPLSLARKGNSPSPCAFQSLQRVVIFLLAEGLPLMFMASD

SEQ ID NO: 928498 - protein, 128 aa, Homo sapiens
MSVDWAALPSEVLEENPFPCLFQIPELNSLVNDAFLHFQTQQCNIFQILLSLLHCLLPSVLPPFSYKSLVMHLVLAWKLQKTLLFSRNLTTFAKIFLSYKVIFTVSRGQNLCIWRPLFSFPSFVWVLA

SEQ ID NO: 928499 - protein, 176 aa, Homo sapiens
MLIPKIMGKMSPGHVRDLHGSPSHHRPGGPARKKWFQVPFPAQSLCCVQSMDLVPCVPPSPTVAERGQHIAWAMASEVGGPKPWQLPCGVEPACAQKSGIEVWEPLSTFQKMYGNAWMLTQKFAIWVGPSWRTSARAVHKRNVGLEPPHIVPQWDTAYWSCEKRATILHTPEWEIH

SEQ ID NO: 928500 - protein, 134 aa, Homo sapiens
MPAVSSTYNHPKCLQIAPKACGEQNNHRNPSVATLYEICPPQCSRNLSCPASHPLSPRLTSAEAEVDLLCPQPCFVLAASCPKLAPPPPSFCVSAVSLTVCGPLILLGVNGPGVWMDEELESSPKPYLKIIPSK

SEQ ID NO: 928501 - protein, 138 aa, Homo sapiens
MKSVYYSTMEKSRKNTEAQIFGYKDSLKKLQNEFPVRGEEKVRERVMRTEILVGSRQMSSVHYDLGQSFRERVKIPNSFMGPESRKDLRLFLGRRYGPLLTFVLYADVMAEGQAAIFGLRGRKHTLRMMNKSGSLMNS

SEQ ID NO: 928502 - protein, 220 aa, Homo sapiens
MYPTYIIDTSTGKNISLWKLLYKIGKSDSYTSCGNINSCSSGKRLSSADVSKVNRWGPGRPPFRKAQSAACMEISLPVTTEENRENSYNRSRSSSISSIDKDSKEAITALYFMDSFARKNDSTISPCLFVGTSLGMVLIISLNLPLADEQRFTEPVMVLPSGSNPRGLTPPVKDEECTICVKKFQGGMNQTPHLSHCYPDASELPFLLTMGIALRVGIEQ

SEQ ID NO: 928503 - protein, 147 aa, Homo sapiens
MGKAWYMGQNALFLTAHEPFIIFSGGLSYDKACRRPSLTIMHGKAITVLEMDHPIVEFLTLCETPYPNEFQEPYAVVVLLEKDLIVVDLTQSNFPIFENPYPMDIHESPVTCTAYFADCPPDLILVLYSIGVKHKKQGYSNKVGIEQ

SEQ ID NO: 928504 - protein, 199 aa, Homo sapiens [sequence omitted]

SEQ ID NO: 928505 - protein, 486 aa, Homo sapiens
MTTDDTEVPAMTLAPGHAALETQTLSAETSSRASTPAGPIPEAETRGAKRISPARETRSFTKTSPNFMVLIATSVETSAASGSPEGAGMTTVQTITGSDPREAIFDTLCTDDISEEAKTLTMDILTLAHTSTEAKGLSSESSASSDGPHPVITPSRASESSASSDGPHPVITPSRASESSASSDGPHPVITPSRASESSASSDGPHPVITPSRASESSASSDGLHPVITPSRASESSASSDGLHPVITPSRASESSASSDGPHPVITPSWSPGSDVTLLAEALVTVTNIEVINCSITEIETTTSSIPGASDTDLIPTEGVKASSTSDPPALPDSTNTKPHITEVTASAETLSTAGTTESAAPDATIGTPLPTNSTIEREVTAPGATTLSGALATGNPLEETSALSVETPSYVKVSGAAPVSIEAGSAVGKTTSFAGSSASSYSPLEAALKNFTPSETLTTDIATKGPFPTSRAPLPSVPPTTTNSS

SEQ ID NO: 928506 - protein, 129 aa, Homo sapiens
MLMEAQRGQITCTFTQLLALRCCDSLMRIQQAFFYPRAAFISAPALKFPSYLVWSLASGHNSSRPWHMEGPRAFGLANVPGFDWDAESQDDEDGRMLAIRVVPYWGAVSSPQRLRIRMDVGVLAHLLST

SEQ ID NO: 928507 - protein, 154 aa, Homo sapiens
MALKAKKEAPAPPQAKAKVKTLRAKKAVLKGVHRTKPPSHLPIPQRPVIHIWWPKTLRHHRIKEYKGAIGAAGEAAMLQGKTSRICQCLEPGLTLADFRCWISGAVYAKHLDAATVFLGGGGGHEKLPKLPHPQFSVYHRACFSSLATDSLIRL

SEQ ID NO: 928508 - protein, 161 aa, Homo sapiens
MLSMSRFRKGDIAEIEVCYLKCQGDSAFLSSPWLILKSSTGSHSAFTISTVLPSAEYHMVDSYSSPSPSTMSGNTMRPSPEAERFLEPGFLYSLQNQGKNESLFFINHQPQVFVYSNTNGQRHQGPILLPNVATKLKVPTRYPAGTLSKYLVDEIQCKFSD

SEQ ID NO: 928509 - protein, 222 aa, Homo sapiens
MLPWKKHKFELLAEAPPRQASKPKGYAVSLHYSALSSLARACPEGALSRVGSMFRSKRKKLHITSEDPTYTVLYLGNATTIQARGDGCTDLAVGKIWSKSEAGRQGTKMKLTVSAQGIRMVHAEERALRRPGHLYLLHRVTYCVADARLPKVFAWVYRHELKHKAVMLRCHAVLVSKPEKAQAMALLLYQTSANALAEFKRLKRRDDARHQPQELGANTPSR

SEQ ID NO: 928510 - protein, 586 aa, Homo sapiens
MGSGYVISALKDKMSPCESVVMACREQLSKNQVKWGFAGITCVSVVVIAAIVLAIALRWPGCELEACSSEADMLDYLLSLGQISCRDALEVTWYHAANSKKAVTAALNSNITVLEADVNVEGLGTADETGAPIVAHPPAIYSDDTLEQWLDGVLGSSQKGIKLDFKNIKALTEWGKVRRPMWINADILKGPDMPISAEVSATQFLALVQEKYPKATLSPGWTTLYVPMFPNRTYTRAMVEKMHELVGVVLQRVTFPVRSSTVRAAQAHSSWLLSQSERYSLTLWQAASDPMLAEDLPYVQDNTAVHHVYCDIFEPFLLQFKQVASTWQGAMRLREDGCRAVAYRRCFMNSSHLTLAIWGPTVNATWKQMYYTGGSLIPLLQLFEGDGLLNAAPGWQHPEVGVLPAAAGRTSQTLERPFANSGARSPLAVPGLAGIPVQPWLLASACVDGANISHGSFSVLGHMAGRELLTAVAEVFPHVTVAPGWTQEVLGSGYREQLLTDMLELCQGLSFQMQARPRGHSTPGAVARLLASSPGATVTVEHSPAGGNYACERTALLGARAVDRTRIYYTLPQGYHKDLLADVCRN

SEQ ID NO: 928511 - protein, 213 aa, Homo sapiens
MLRFPRHAPLFSQKPERRQIEPFPGFLVSFLVLSVLWHFPAQSGSHQAVSIQCGTFTSQVPRALPSSHNAPQLGSNYTWPVIVRGKRQSRFKGCCCFPTGRCQMGASDMLMSWTDVIPPPHSSITRYELCDLGWKPDAQNEKGLTWVTDEFVVVRILTARLSWVKWCPRNYPVPVNVALFGHRVFADVINKSRSYWITVGSEFNDWCPCKKAT

SEQ ID NO: 928512 - protein, 122 aa, Homo sapiens
MGEDGELCVTGMTKTGDRERVELKPRVGEERGEGFEWEAESDDISLLHVNAQRTSHTLRQRTPRCQSLKATEVAPSHLIQKFCHPMCLCHGLEEAAGAAAGMAPDPVDFPTWSWSKAYTGAI

SEQ ID NO: 928513 - protein, 154 aa, Homo sapiens
MPWAPVNSRAAEHLDRNPQEKAGAPQPPAASGQDSRATGPVGSEALRGALVTAVIVKAAVIVKAAVMKKVEPTGGKVVTLPANAFISFTSSRALQVGLWNKGSLQTMQAIFLVSVGTVLTATIPLHTTIQKSLNRAPPCGCLLTAGLGCMVTLA

SEQ ID NO: 928514 - protein, 139 aa, Homo sapiens
MRDSQLAAQLKGHAGWRANTVAGTGSGPGFSAHPLMGFLKQPPHSTVSLPPPCCPQKPQKPTLLQPEGPSKASMRSSLLCFNPRPPPWLPISSGSDAQHPHDETASPVSFKKTPMLKLHPDPKIRMQRGAGGWGTGRQA

SEQ ID NO: 928515 - protein, 142 aa, Homo sapiens
MNQESLSLQALASLTAQPLGRVLPLGGGPDAGPSVTALKAEGRPRVEIISKGVKKAYPLYRGSPGDYEVPRTSSNTVHTPYHSFYPEADAIPLREPADTEARETHHSLRHRRFGSVPAEVGVKPFKKTPEPLRVPAPHSTPQ

SEQ ID NO: 928516 - protein, 423 aa, Homo sapiens; identical to SEQ ID NO: 744021

SEQ ID NO: 928517 - protein, 230 aa, Homo sapiens
MTSAALVPQRHKHEEWMDAILMATCTITKLLCMQTRSDLLTNYILFSCSAFKEKRWLQQLEIARVLAKKSISNLTTRGGFCRIWIPRYGEIARPLYTLIKETQKANTRLVRWTPEAEVAFQALKKALTQSPMLSLPTGQDFSLYVTEKTGIALGVLTQEAIKRLSLAVQKPKEVTVLHCQGHQKEKERETEWNHQADIEAKRAARQDPPLKMLIEGPLVWDVKDKVDTEK

SEQ ID NO: 928518 - protein, 194 aa, Homo sapiens
MLPVLHKRRIKMCPSSLINTCRFEYSPEGKGNTGQWAVEKFAAATGATPVADGSISGTFTIQIQAAFWEPCLLVLTDPRADHQPLTEACYVNIPTIALCNTDSSLHCVDIAIQATTRELIEWEGQSASEKAVTKEEFQGERTAPAPEFTAPQPEVAVWFEGMQMPSVPIQQFPIEDHNTAYHGKLVCSCHCLGH

SEQ ID NO: 928519 - protein, 244 aa, Homo sapiens
MIVRLPQPHGTGSEEDRKMWDSLELPRDLSNGFDQNAHNDMDNEIQAEVVSDGDEELVGNQSKGDSCYVLSKRLVAFCPCPRDLWNFELEKDDLGHLVEENSKQQSIQEVTWVQLKAFSFIREAEHKSLKNVQPDNVIEKKIPFSEKKSKPAAEICISNEEPNVNLQDNGENVFRPCQRSSWQPLLLQAWKPRRKKWFHGVGPGSSCCVQPRDFVPCIPAALVMAERGQGRACLTCFDLEKHRK

SEQ ID NO: 928520 - protein, 168 aa, Homo sapiens
MRRLPDIDSSHWFLLIPTSVCVVQTSPAVPAFNVMATKWVCGPPVPVVSGDWGVISASTLAGTGVLSSSATVAAALADITCAYEPVIVIISHSGELNTSSVAGGSIEASLRTETTPEPMAIPGSWWSGNSTMPRATSSVNELQSCSCAGKAGTEMSLRLQIQTVDLTK

SEQ ID NO: 928521 - protein, 124 aa, Homo sapiens
MWDQVFCQAFLETDLWEICQKKSGSNVLQKAALLGGVGSEVGGDGEVHSDSLWKPDPLIQAQPVDAAMEDFDSWKSDAKSWGSQTSQGRGAARGCNSNEDLSSLFWWLVLGYLAIKCTPITTTS

SEQ ID NO: 928522 - protein, 159 aa, Homo sapiens
MLGTVDWSCSYSLILELPNTPSLSITQHSSIPHRKHPLHSDMHRKEAANWREDSLTLSPGSTPKVASAALSPPLPPSGAVTHSREDEVFTYGISALTERPKGACLPLPPYEDTQKPPFMRNRAVRFQSSVSVPPHACIREDHSSTGPAQPGKGPVGIEQ

SEQ ID NO: 928523 - protein, 137 aa, Homo sapiens
MSKSFLRPSPEAHASSVILVQPEKLNMYSKGQPDEVSDGNEEVMGNWSKDHPCYALAKNLAALYLCPRALWKAELKSNDLGYLVEEMSKQQSIQEMAWLLLIAYDQILEQRTDLNLELLNQTKIWPEKASSLPYLSP

SEQ ID NO: 928524 - protein, 311 aa, Homo sapiens
MGESLQCGQRGADEIIDESREKRWGTKSLRDLYPSPRSTVIKWQGSSSNPGGAQVYCRVSSPLGANLGTAVDVRGVVGEINMIHVEQLPYRLLQKAFSLGTQSQPNAYCSCLLAGSKDFGKGTSNEIGKGGKCVSGNFEETGNERLEIRQSFTFYFTTLCLCEYKAGSWQGCESELSSQELSREIPSICFLNYHPEDTGGKSQGIKIASERASCGRMNYGVDLKSYPTHGPWAACGQDGFECDPTQPAEPSVFWGRFVFFLPRDYGPEKVSSSSHQDQDRGPALGQKHGMWVSTQWGTGQYGLSHQTVPEP

SEQ ID NO: 928525 - protein, 177 aa, Homo sapiens
MLPAALRLGHITVLRGEVQPFLPCATGQMIPAFGEFGKSKQCFRPKGNFYISIGKKAAALACEIDHGEEKAYFWSGSRTQSESYGETRRYKPSIHTCKMYLGLVQKRGITGSGGSQVRGGFKDFSDWQLDEKTSFFQEAFPAAPWVSIASSVDQLEQDWRGNELDIAAEPLRRDCTH

SEQ ID NO: 928526 - protein, 161 aa, Homo sapiens
MSRHLTCLTATRETNPILCRQGFHAEEGNGLTHVYESDFGCCIANSLKVGKAEKREEAVAVILITKKKLQQTSGAQNQGCPYKKHSKHFTHIILSPSSSQLSTKMDPLGCDLLPVGKNRLEGFWQPLPPKTSAVLTTAANTCSFCHQGPPFSPVIANTGIS

SEQ ID NO: 928527 - protein, 163 aa, Homo sapiens
MAICKPGSVSSLDTRSASTFILDFPGSRTGSEEDKKTWESLELPGDLLNGFDKNADSDTNHNVQAEVVSDGNEELVGNRSKGDSCYVLAERLAAFCPCPKDLWNFELEIDDLGYLAEEMSKQQSIQEVTWMLLRAFSFIREAEHKSSENLQPDKAIEKKNPIF

SEQ ID NO: 928528 - protein, 124 aa, Homo sapiens
MFLLLNHLKSVLHPAAINKVMSPHIPCFVLHLERNPNFYKVLCYLSPTYLYPCFLPLALWSLVQPHLSFPQFLQDTHVASSAFHVFHSSPPSIGRSCYPPSHKSVTASITDWKCTHTHTHTFAH

SEQ ID NO: 928529 - protein, 156 aa, Homo sapiens
MSGWLQLHLGSSCPANSEGPGLLLVPGSCRLRGVCSPGHASLQPGAGAPGPSWPWAGIQGRGDIATSSFHGPGAQWWSWAPPHLAHSPTPCGASGSGLGTLGLTTGSIRLSSHPDVGQTLGTLPHAEPPPKAQEPSIISGVGVPDLLYLPVSIVYI

SEQ ID NO: 928530 - protein, 145 aa, Homo sapiens
MKCSEGGHQVFNAEEHNNNSDDGDSGDGHHLSNSNYRPAAGPGALCVKKALLMKMRKMTYLRECQMKRTVGRDNGFAVHGKQLQRHRSGGCKAKWKMRVMQVALGPEKAQDRLRPMRVELSRKSPSEAPEAGMSAKGTEWNFVQY

SEQ ID NO: 928531 - protein, 148 aa, Homo sapiens
MEVILLHLSVLGSKALKALSSDVPGQEKMDILAPEECALPRHIFVLLRPSLNWMIAVHIDEEPDFSWINLLCINKATDQWLFEGLWTPLRASQNEERCRLLNLKSLALELENGTMGQECKQLLEAGKGKKMDSCLDSPEKSAVLTLWL

SEQ ID NO: 928532 - protein, 139 aa, Homo sapiens
MAGCRSQALPHGEAAEACREFKCGAGGPAVLEDPAPPLQLLPWVLSPSLPRAGGAGWLLRVWSLQRLCTPRTCTGLRAHSPGSRPCLSLHTSTQAEGAGSSLGKPREGLPQCSGGLKSSSSAARVDAKAEEVPRASKSC

SEQ ID NO: 928533 - protein, 134 aa, Homo sapiens
MILWLYNPGVPNSRAVDQYDLLPFRNRLHSRRSTNPINSACEGSRLGAPYENPMPDDLRWNSFIPKPSALLLLVHGKILLELMPCIPWLVAPSSIFKGSSLAFCFKVTFPSSVSNLPLPPSLKSTCDDIQGPPR

SEQ ID NO: 928534 - protein, 155 aa, Homo sapiens
MYYQAQCQETDMDEAGNHHYQQSITRSENQTPHVLTHKWELNNENTRTQRGEHDTPGPVKMPENSQKEAKCEDAGQRIQITLERQQCCNTRWSLLEEEAKPTICALQSFLEKRESSLTALMMKILTLKGIFSKSLRSRSFLTIMIQRILYPSSRK

SEQ ID NO: 928535 - protein, 160 aa, Homo sapiens
MGGQLGQGGFGKGNIGLGKRGCKVLTLGHSSRLEGGALPGGKNQVHYYIRSSSKREMYLAVHYFDEHGYNSSKHTAHAHPPSTRKALRMQVVHPNGIMKGKGHKRPENHCMNIPGKPKEFTGLLKEATCFCKFRETAEKLSPRSVRGKCPPPNTHPHWGN

SEQ ID NO: 928536 - protein, 172 aa, Homo sapiens
MHKLLVYLHHHMEAEHESSENFQPDNAIEKKNPFSEEKFKLAAEICITNEELNVNPQDNGENVSRICQRSTWQPLSSQADVGEKNGFVGQAQGPLAVGFRQCVSIVEIQQVEVTQNTARRSMERHMEEVIVELRKSQTWKHSKSTPSRKNIMCHDPRIRMKFQELEVIPGTG

SEQ ID NO: 928537 - protein, 176 aa, Homo sapiens
MAPTYFLRNWKIKLRKVKLLVSQYDTGFFLVILPARDLWLAMHLPGSCLGTLPAAGGAPLTWFTQAESGLCTGPASNWARCAQLTCVIVSTCVWQFLSSCPTSKKNEAVLKNGDYFCEIPLLSGIWKILFGINEYHAGHAQSCKWETSSLLLSVNPSFVHEGVEDQGDEIVCLRLP

SEQ ID NO: 928538 - protein, 240 aa, Homo sapiens
MLGCSDGYLRRGYNHYKTLGMFRVTVKQTDFILSIKYRESTQCIVIRAEVLASAERVAVNAGVDVAMDVDVGVTVNVNEHVAVAVAVAVDKDKDVDVTANVDENDLDVDVAMDVDEDVAMDVNVAVAVDVAVDVGVDMDVTVDVDGDVDVAVDVNVAVDVKEDMDVDVETVDVNEDVAVAVAVDVAEDVDVDKDMNDVDVTVDMSVYVEEGVDVTVNVDVTLYVDVAMYVDEDVDVIVSS

SEQ ID NO: 928539 - protein, 154 aa, Homo sapiens
MPLLICTTLLLCHLSANGTWGFYGYSMCILPHEFNTFLTLYQGPEVRPLTTAWNGRKGQYKSQSSKLARQDIKWPLKECIYLSETVNFIYQGVRGLNIPFSLRALNGFLRKNVKQGLNTILYFCCDHPEHMTTSKPYDSSLLNIEVFMYIGPTS

SEQ ID NO: 928540 - protein, 137 aa, Homo sapiens
MELLLLGPPTDTCSNPLLLPCHLQEMLPGVGKEVGRPNGDFKSGFISYLEKLGKPHTHTQIHSKQDVLGSKEGQHMLTCSPCGLDCLSSLGLQGTVAHGGKACRNSSSNHWDLDSFLARAGLNAPPVGSCRLNLHPL

SEQ ID NO: 928541 - protein, 138 aa, Homo sapiens
MGQYGTRVHWGGPVNWVPRGVLDLGSTGVGLDLVSAGTDLEPESSGAGLANNRCVKDFSYWNCREEMIAPFLFKISLVKLVVSTDARSVFSGTSPIPHTANPNFIPMLQFSEQNSGKRESGIHRSQGPPTESGGIVTL

SEQ ID NO: 928542 - protein, 139 aa, Homo sapiens
MLQCKMFSVVILLKCINVSHQKHRTKDIRGKNQMEHVITVDTMLNYLNKPCSARKKEQLLRKEECPNSQRQECVITPNLQRVFSRVFNRACPVRYTNICSINLDAPVFGAYIFRIDVSIAGLIPLSLYSALICPFFNCS

SEQ ID NO: 928543 - protein, 130 aa, Homo sapiens
MGYVLKCVFVVAGSFGFNSIALCTSVSRFYIGLFSSTCKLVDGTYRQDSDVASVAGYILDPCLLEETLCCISQWVDLWNAQWSEFPVQLQGEEMGAIWKDCMVPPGVFGMLALEEICHHLGNLTTWNPPF

SEQ ID NO: 928544 - protein, 577 aa, Homo sapiens
MVLQTFCMEVTLLPLDWDLLAKAVLTPSQRLQFHTWWSEEARLQAQLNRSNGILITQAQLTGSNSFSDTYAQLNFDALTTEQVTKVCMRAWDKLRATDQAPVSFTMVKQGHSELYPDFLAKLQDAVEKPVSDEHAQGILLRMLAFENANHECKMAMRSVQRQNLPDHKVLPAYIKACEGIGSDTHKAILWARAMKDTNQTGPTNSSLGACYTCGQLGHTGKNCTVENLQAAKPAQHTWPNAAPTVCPRCRKGPNIKWDTSNSHQCCISTSGGPNATPSTNKSTSSQTKWVPASPSVSVQSLSTSTVGGGVVDLCSTILLNLLPDSLPLIVPTGVTGPLPQGSVGLVLGRASTSAKGITIHTGLINSDSVDEIKLIVSAKVPVSILAGESIAQLLLLPNIVLNKGDKARGPGMGSGGEKAAYWINVISKQRPTCTIHIRGKKSEGLVDTGADVSVISSSLWPSSWLKHPANMGLVGVGKAEEVYESTFILPCTGPDGQKGTIQPYIMPIPINLWGRDLLAQRGTEINIPHNSYSAPSQHMMENMGFVPGLGLSPKHEGITKPLPVTIKENRAGLGYPF

SEQ ID NO: 928545 - protein, 130 aa, Homo sapiens
MCQKFFQDSFKTQQLGFRVTCKGGFSPPQGSCMPAASPKLLNQTFLVPKSLPKDMENGYKICVQIQKKAPPLSPLNHGDFVKFIAHKGQKSKTDAQVAQRAKLAANECALVLCLGASLEMLEYEERRAVQ

SEQ ID NO: 928546 - protein, 147 aa, Homo sapiens
MRVNWLFLLPLRLLVNNILIQWLQSSFRAQPLGLSESVGKYRASVVLGITDSLCVECCLSSQELVVAGSPLMGTPVFLVGGGKSQACGGNEASARLVVAANIVLLSGIFLSFVQCINLPSSYQSRICVKDTIRIGYEYTRHGSCERE

SEQ ID NO: 928547 - protein, 168 aa, Homo sapiens
MTRNSGVPKSCPDNHPYSSGQHKWLMCPEEEDSQLSECSSLRLNGPTHGNYSLINVLDSDQITTLSFEGNGLMDAHDYVTTQCPEQAQGILKYEPSVQHGMQLASLVLGSGLGPGGTQVNEACSLISRKYFHHIINVSMEVSTGPPMRARGGAHGQPGGSESASWRKC

SEQ ID NO: 928548 - protein, 136 aa, Homo sapiens
MVITFSILLMFEGRGKGEQEWTTFRAPYVKYSEKHLLLSKGSPPAEKEEVEPCSFLRKATPTRNLAQTEEELSVFLLTVRPPASVLLEFAGGPLHSLFAWVSPAEAAEQQRLLPAPLSGSFVSEGHLPDASQSSPV

SEQ ID NO: 928549 - protein, 947 aa, Homo sapiens
MCLNLMQFHTVGTKTKLSTLTLLWPCPMTFVAKGRRKAEAENKAAALACKKLKSLGLVDRNNEPLTHAMYNLASLRELGETQRRPCTIQVPEPILRKIETFLNHYPVESSWIAPELRLQSDDILPLGKDSGPLSDPITGKPYVPLLEAEEVRLSQSLLELWRRRGPVWQEAPQLPVDPHRDTILNAIEQHPVVVISGDTGCGKTTRIPQLLLERYVTEGRGARCNVIITQPRRISAVSVAQRVSHELGPSLRRNVGFQVRLESKPPSRGGALLFCTVGILLRKLQSNPSLEGVSHVIVDEVHERDVNTDFLLILLKGLQRLNPALRLVLMSATGDNERFSRYFGGCPVIKVPGFMYPVKEHYLEDILAKLGKHQYLHRHRHHESEDECALDLDLVTDLVLHIDARGEPGGILCFLPGWQEIKGVQQRLQEALGMHESKYLILPVHSNIPMMDQKAIFQQPPVGVRKIVLATNIAETSITINDIVHVVDSGLHKEERYDLKTKVSCLETVWVSRANVIQRRGRAGRCQSGFAYHLFPRSRLEKMVPFQVPEILRTPLENLVLQAKIHMPEKTAVEFLSKAVDSPNIKAVDEAVILLQEIGVLDQREYLTTLGQRLAHISTDPRLAKAIVLAAIFRCLHPLLVVVSCLTRDPFSSSLQNRAEVDKVKALLSHDSGSDHLAFVRAVAGWEEVLRWQDRSSRENYLEENLLYAPSLRFIHGLIKQFSENIYEAFLVGKPSDCTLASAQCNEYSEEEELVKGVLMAGLYPNLIQVRQGKVTRQGKFKPNSVTYRTKSGNILLHKSTINREATRLRSRWLTYFMAVKSNGSVFVRDSSQVHPLAVLLLTDGDVHIRDDGRRATISLSDSDLLRLEGDSRTVRLLKELRRALGRMGLHTLGHGSPEEGGSCVSPVTHSLPSQHLLQLAAQLTHGRTTYPGDPVGKGGTTHQACA

SEQ ID NO: 928550 - protein, 177 aa, Homo sapiens
MHLWEPGALFSCNPLDHHQHTKDGPAKCKGSLAACTGELLPWRNKPGPLPALSRPLPLVFGERGWTHIFLDSCLTPELVPCSHSLHGDEARTQDHPLPPGDTAPTTGSGTGLVPFSRLGVRHNFFLLIHPWSPALTQMSEAAQVSKEHMGLVKGQSPLTWPPVTTWVMRAMAAGFPE

SEQ ID NO: 928551 - protein, 151 aa, Homo sapiens
MKSSFRLENPRRELRLLFLGKWSQSFLIMGEKDFFPPLCQHCLRQTPGRAAPSAGMRWSSPGGQQGLGPPAFQLLGGGQGLHQGCAGLNRYLHRYSLPACPPAVWVARAARFLYVSVHLRVCFREINTLLRATSWPGRCPRPSQATALLPT

SEQ ID NO: 928552 - protein, 145 aa, Homo sapiens
MMLAWAQRPDTVSQQGAQHQELHGVSGVFRLFAVALNLPRTHRVTLEVSRKREETVFKQITLVATCLWLGNPSLAKDLKASPSSHLVGSGYTSQVHWVCFSLSSSATTGRSRHLDGTIYEEWALVRHQSWQCLDLGLPNSRTVKK

SEQ ID NO: 928553 - protein, 141 aa, Homo sapiens
MCTLHLQSGPSAAGLLEFAGGPLQTMFAWVSAAEAAEQRILVNSRCCCLIVPLEVLSQRGTRPFQAKYCLSKLGELKTQVSGARNLRENSPMTSSYNQETSESNGLSGYLTRSPGVPGGCQSFSSNPTSDTRSVKRKLQTS

SEQ ID NO: 928554 - protein, 154 aa, Homo sapiens
MLLSLTNPCPYVIEELKEITRKKLQTCNLPLRKGQFHTRELAELPSVHTRELADRLTGSCMFKFTLYFIGQKDLRSLLEIPTIMQMKKSKPKPVAPAPAEQLEQRWLHRAELGPDWKQRPLKCLLTLCLAERVEETPLENKLYLCQHRQMGVRG

SEQ ID NO: 928555 - protein, 142 aa, Homo sapiens
MHLNCALPGQPMPEDQALQLTLLLPAGHFDPVFLVLFEVSPQPGVDNWWKTMVIMISPLFIFSALLRSCLTCGPQPPCQVESAACSAAGPRSFTSQEHQTDDLLFTVVPGAPTPRMSYKQVSKEILGEAAKMVAKLFRNIEV

SEQ ID NO: 928556 - protein, 171 aa, Homo sapiens
MTCQQPQDLRLKAPLQAWLRVGLLVLSTLVKVRAGCALEAWSARAPSEERMNERVNTGLGACRRFFAGESSRRQLLPGVWREKTGAVGRSRTGPQAQQLYQVRQECGLVLTRFHSHGLPSLFSACFKTNHPGFKRSHMKVFSSFALFLLQHLSGQTGESGSLVWKNETGWA

SEQ ID NO: 928557 - protein, 163 aa, Homo sapiens
MGETVQWLWHGFDKDKNTGQPSSWAPGECLWVHNGSATEVVEVAGHGICKPQVGQPPGKLAQVCGGSTAGGGRVTGSWQWQAPRRDTGKQLEMMEDDDKQKFKQLYREPGCLGMLRISQRAEHRVQSEDLQVWESAAELQEVPETPLHWVLVLSTFTKGQGEG

SEQ ID NO: 928558 - protein, 148 aa, Homo sapiens [sequence omitted]

SEQ ID NO: 928559 - protein, 162 aa, Homo sapiens
MEMYRCQEGPGGLQCISALLLLCVQFIFPMLPLQTSSCPYRPAPTDPNPIVQSWTSGPQRGTNKSMWKIELTKQPPTMWEGHQRGMNTKQRELREGSNSLCPGQPHPESYPAGRPFLLIIREEKMHLTGSLIYEGFFLCDRGQYDYTLLNILKSIYLSFTKD

SEQ ID NO: 928560 - protein, 140 aa, Homo sapiens
MRNRPKPRAREGKGEDCFDIGTGLKSYESDYYISLTSYESDKEDENENVQMVYPETANTTRGMQLPYSPFGLATDSSFLEHELLKVFKVISGLSSRQCHDWSWVMVQRTGSSTHAIYLIHLEATTVLVRVLKRNSNNKID

SEQ ID NO: 928561 - protein, 171 aa, Homo sapiens
MGKKQSRKTGNSKNQSASTSPKERSSSPATEQSWMENDFDKPNLHLIGVPESDRENGTKLENTLQDIILENFPNLARQANIQIQEIQRMPQRYSLRRATPRHIIVRFTKVEMKEKMLRAAREKGRVTHKGKPIRLTLISRQKLYKPEESGGQYSTFLKKRIFNPEFHIQPN

SEQ ID NO: 928562 - protein, 152 aa, Homo sapiens
MPLCKGLRSHSSSFWAPLYPIVRQWPHFYFSNNAGNQCFPDHACGLASQSSGNVERANQTIKKYLMKETLTLILCLETGYVVPKDKKPLEPLWIRSYQVLLMTPTAVNLQGLSVDLPLQGQGGTSTQQRTLKPVNQLETFICCSEFSSFTFE

SEQ ID NO: 928563 - protein, 181 aa, Homo sapiens
MAHPCLLSDVASSPAGCCSSILRADLLHLVHLDSHTNLLWKYLTDTVPPPPTNDTLSVLGYGLEVDMWAAGVILYILLCGFPPFRSPERDQDELFNIIQLGHFEFLPPYWDNISDAAKDLVSRLLVVDPKKRYTAHQVLQHPWIETAGKTNTVKRQKQVSPSSEGHFRSQHKRVVEQRERH

SEQ ID NO: 928564 - protein, 375 aa, Homo sapiens
MLQGVDLLVDAVAITMGPKGRTVIIEQSWGSPKVTKDGVTVAKSIDLKNKYKNIEAKLVQDVANNTNEEAGDGPTTATVLACSIAKEGFEKISKGANPVEIRRGVMLAVDAVIAEPKKQSKPVTTPEEIAQVATISASGDKEIGHILSDAVKKVGRKGVITVKDGKTLNDGLEIIESLKFDRGYVSPYFINTSKGQKCEFQEAYVLLSEKKISSVQSIVPALETASAHRKPLVIITEDVGGEALSTLVLNSLKIDFQVVAVKAPGFCDKEPAQRYGSMTIAKNAGVEGSSIVEKIMQRSSEVGYDATRVGDFVNMVGKGIIDPRKVVRTALLDAAGVASLLTTAEVVVTEIPKEEKDPGMGAMGGMGCGMGGGML

SEQ ID NO: 928565 - protein, 161 aa, Homo sapiens
MLLIYSSFWWNTSYSGNPKRLQGGSVKTKRSEEAAEEKSEAGRGWCMRLKERSLLHNIKVQDDAANPDVEAAANSNKNICDSWKEVKISTLKGVWKKLIPTFMDDFEGFKTSDEEVTEAVVESVRIKVEPEDLNKEMWTLYYKKNEPYDDREEELGPSIIL

SEQ ID NO: 928566 - protein, 231 aa, Homo sapiens
MPNKDRLKKENGYIYTMEYYEAIKRNEIMSFCYGWIFVLRAPKVVAAAPKTAASLLFSHLGFLASQIPRNGTLGHAVSVIALLEAVGHGRELWNPATRVQLDEDEPGHLALQEQWRAFSVIRNCDGCLTGSEAQQTPCRIRSGGSQQQVCDGSEQQWWTTLATWQAYLTMGLLRSSRTETLSAQEIASADGSQFTSSRMPMTVLHPTWRVSQIMATLKPSTTCDDASWTTW

SEQ ID NO: 928567 - protein, 146 aa, Homo sapiens
MSILLGCHNNTMPQTGWLKLQKFIFSQFWDAKSPRSRCHWHWCRDLQNPSCKRPHKLHDTWVCKEGSLERQQGQDSSLKNQTELIELNNSLQEFCNTVASIDSRIDQPEERIPEVEDWFFESTESDKNKDKTRQRMNKASNKYKIM

SEQ ID NO: 928568 - protein, 134 aa, Homo sapiens
MEWSELQGCKSLFHFVDRQLLSIICEEANGFYGYITTVEPPLLVMVAVEIVDKCSDPGHSSVELTRFPDILIIGQKKGMLKGPYYQSPMELPLSYPFHPYLYFSFIKVKTDQKGNYSYNCLNVRAFDESRHCSS

SEQ ID NO: 928569 - protein, 182 aa, Homo sapiens
MSAPSLYLGKILCCMRRSWRFVNALGPWSVSLHQNPGAAFLDDLKNPCELKPEDLMQTSPLKQTMLGIKNLSWNSKSEHQLSLRLYYNYTILPPSNGCLWMNKGKVLDEEMQKKKHFDLFQDVFSIQSQSFPPIIQQNMLLEAVVLAFHFVHGATEKRLLVTHISSISRDLLDLTLAAGCFS

SEQ ID NO: 928570 - protein, 134 aa, Homo sapiens
MGKNQSRKAENSKNQSASSPLKDCSSLPATEHSWMENDFDELTEVGFRRSVITNFSEVKKHVLTHHKEVKNLEKRINSVEKILNDLMELKTMAQERCDTCTSFNSQFDQVEERVSVIENQINGIKRETSLEKKV

SEQ ID NO: 928571 - protein, 419 aa, Homo sapiens
MVRAAGSTGGTVTVRRIRAMVTVSFGGTWERTDIFIQDSPAQQTATLPSAKGMSTLSPTAEQRRPLIPTPNTEEFDPKDSALSSAEPVQIEAANRATGSDPQEVGEAFIVSRHVKDWDSGSVCGIIQIWCHIWYGKQEELEMLLRDQHDGDDINREIFEVLHEFDHGLRDYLRVRTKFFCSPCLSSTAFLAKSKSSYWELEENPTGLRCGVSLREEVCTTVEHGNMQQGCGNSANSTRICCPVQVNRPQTAQSGVGAAGRRAALHQTPLPDVLHILGQSDKGEEDHLTDGDNCLTHIRYSHWTLLRMAKFGTDIKIKCSYKIKDNTGDRKAEVRDDFIHTVPQTDCWGNISERKFHAGPALEGHACDKSLKDKHPNLQGPHRGQLEANKAIKEAQKAQREREKLMGKVSHLSPCLWDND

SEQ ID NO: 928572 - protein, 158 aa, Homo sapiens
MEGEVFGYRDHNVRKAFCLVASVLTCGGLLLVFYWRPQWRVWANCIPCPLQEADTVLLRTTVRAFLFSILKAMIVSSVLPLWHNSVAGIIFQKDEFQRYMRKKVFCLYLSTLKFPVSKKWEESLVADRHSVINQALIKPELKVSYLKGMVLCMFTEKA

SEQ ID NO: 928573 - protein, 117 aa, Homo sapiens
MAVYPVSTTWRLARAISLVALTSWLSSPVNTMRTHATPHLPKSLDAFCMGMSSTASNRNCVWLTGARIGEDVGSSQNQRKSAKSTHKSQRADSPLLGTEGHSSGSHGSSTADQNHCI

SEQ ID NO: 928574 - protein, 363 aa, Homo sapiens
MEDGGDGGGGEGEVGDGVDESVGTGNEAGGGGVGGNGGGGGGGGGGRSGGGSGGGGGRSGGGGKGGGGGSDEVEVVEVVVVVVEEEKVMVVVVMMEVVMEEEMMVEEEVMVEEKVMVEEEVMVEEEEEMMVEEEEEMMVEEEEEMMLEEEVTVEEEVMVEEEVMVEEEGDDGGGGRGDDGGGGGGDDGGGGGGGGKKVMVVEEKEVVEVEEKEVVEVEKEVVEKEEEEEVEKEEEVVEVEEEVMVVMVQLAAMHEEAVVLPAMMVTCGRRGSGRRGAGSGRTALAMVEVLLTQAEWHNDQLVFKEIIILLHDQALVLSGHADVATLLLLQRTMAIAMIVDQVVMPIAHVIWLVEQLSFIADRL

SEQ ID NO: 928575 - protein, 208 aa, Homo sapiens
MIKPSLIAEKTELKIAESREGYRPIAKHSSVLFFSIADLANIDPMYQYSLTWFVNLYINSIHDSKQDIGFIEDSFFKLLHSGVHVQVCYTDTETKYRETTVGPGDRYSAHQGPAPASTSEFPQFLLIITFIILAKRSVEGEQGDNKEKISKKHVSGWGTVRSFSSHKAIFQTITWGETLDNTQLSRAEAPAAFRSALCPWFAETRECR

SEQ ID NO: 928576 - protein, 139 aa, Homo sapiens
MVQASTPAALVAFLAPALQAASPVFSSYKHSFPSAMFLQQLAPAVHGSQKCPWPAASPGTPFEQFHSRVPPEKHLPMKAFPGTILGGFVTSSDTEASQQLLCHSVSLLRDKVGPLDHDAPQEGPGYGKKDLNLVIVVTS

SEQ ID NO: 928577 - protein, 317 aa, Homo sapiens
MYTPFDPDSPENQRMINMALVNQSAEDIRRKLQKQAGFVGMNTSQLLEIADQGFMNRDATSRRESHKEGERQARQNANLLAMAIRGIPPEGEGKGGSGKNTQEALARDLQKFPAKHLGCVLLLYVDDLLLGHSTAVWCAKGMDALLRHLEDYGYKVSKKKAHVCRQQPWASVDWELYVDWSSFINPQGERCAGYAVVTLDAVIEAKPLPQGTSAQKTELIALTRAQELSEAYKFMELLLLRIFTENAFEDFTEMLKCGGNTYLLVLVCTYSGWVEAYLTRTEKAYEVITCGSRTGTEPLCGHGGKDLRPLSGPPPRL

SEQ ID NO: 928578 - protein, 190 aa, Homo sapiens
MNCCHSLFALRITDLCPLGRKGTEKQPRGLQQYQLLCACSVPGLTWLYEWHLQVPDLHFIFSQGKFPHSHSSFPLLWLSRPSKLQMDLTEINMVVPHSNHKQVKKLQMDKHHLTEYILALQKLLSALAELWEWALGTQDSIVELVSSCVHKHFVIWAHATVHQTYVLGNWFHFVYTSLIIQNEFLFFLGC

SEQ ID NO: 928579 - protein, 144 aa, Homo sapiens
MQAGHSLSLGKSQIATDNVVLGHEGRGPPQQFGSLADCQQSKRSRAAVQSTLSVGLQVLWGQSLPDSLLFFSASQLLTVGTPTDPGSVPSVFHTELVHSLTRQQSSFDHGDEDNILAYVNAMRWARALIPPNDRIYQKSVGNEV

SEQ ID NO: 928580 - protein, 148 aa, Homo sapiens
MGMFTQCLYLRLYLEKISKKMNVRKYENTWKLNNMLLNDQMVNEEIKEIKKFLEINENGNITYQNLWDTAKVVLRGKFITIRSYIKNVERLQINKPTMHLMELEKQEQTKLRTSRKKEIIEIRAEINVTETKTKQNSSEAALWRGLCG

SEQ ID NO: 928581 - protein, 144 aa, Homo sapiens
MGRHIHSFNYFLKLTWSLRKAFHCWWWVCRTQKLITYVKERSNETNAKSALWLNGLQKSLFTSLIMGHGFCFGNCKENRLSVEIQSVGRAPCEGEGTEFHVGQIGYEISKSRCPMDFGTQERELGLVCGIGLSSIPELRIEEVS

SEQ ID NO: 928582 - protein, 121 aa, Homo sapiens
MRNIFLQRTMNKEQQDFLLKNASENELGVYLNTQEAELAYQCPRIGGCRRHHYGLNIGVSKAHVLETNTQCDSIKRWGLWEVNEIGAPEKRLEGVPLPFLPCEDTATRRHLRSRAGTLTRH

SEQ ID NO: 928583 - protein, 177 aa, Homo sapiens
MPVSTSLHHLLPRPSLLLPSLYLGLGREVSEVSNGASPDSHHTATHGENLRFGIAGATYSGCTTRWFKNQQSAVQPRRPNDSWLMKTTREKDSLLLGKLSISTGPARCQGLGYQLGARSNFDMITEDTHQLTQQQLCGCASKTPGSTCLQRCPRTERKLMPVTAVCKVNPSGSRMNH

SEQ ID NO: 928584 - protein, 156 aa, Homo sapiens
MNTTDLTFNWNEIEQKSTTWVTEEDSISKKKKTKLDKIIENLSEVIRELPRQCRLRGSRFGEAGPYRGIRGKSNQRVQANILCQFAFEVYADSKGEQRRLSNWSLMIIIGINKQNFNDQTLDPSSCLKHCHQKSRAQGIHRFILRVFLINLENICG

SEQ ID NO: 928585 - protein, 152 aa, Homo sapiens
MNGTMAKPGKLLQFGPHNSFSLAVLSVVRRLFSGVPGFYLLNSGSNPHSQLFTEQRTREAHEYGGSIAVKDGGVRCARRAFEAVRKTPGCEGCRYGLQMTKVARESKNLQARAKQPFAEKSLSSKCLAATSYSHGIDFRPLEKLFAVTYFFT

SEQ ID NO: 928586 - protein, 174 aa, Homo sapiens
MEQVQRVRETHSPFAPLPITAVASQEKFRPALQTQQLLDAGEPLVTTEQNRFPVKHQGDLSFPRGEDFSRQNRLRGRDGERKRLQDTESLHLLPPPTLLEIDNRCRKEKSVQRQKTSVRPSLLSAERVLNRRWNNGGSTLEQRKSRLIYPLCIWVVLTAVSCIHWLEQDLTILN

SEQ ID NO: 928587 - protein, 160 aa, Homo sapiens
MGFPAMAAVMPGSPAFQCIQSTILIVRGFPSCRWTQPKLPVPWGCPSSCLSAFQGWDFGYKDTFVGYQRDVCTPLFIAALFTIAQIWKQPKHQLMNELIKPNVMCMEYTFYSDLIRKEILPFVTTQINMEDIMLSKIRQTQKDQYFMISLLREIFKKSNS

SEQ ID NO: 928588 - protein, 137 aa, Homo sapiens
MSQAAARWWISAPALQKVSFIQQAFRIKHRQLLMSSDFLDKFTTTGKASKLFNGGKEQFYQNWRWENWIYTCKILMLDSYILTYAKINSKWIRDLNIRAKLIKPLEENIGEKLHDIGLGNNFLDMTPNAQATEENNI

SEQ ID NO: 928589 - protein, 150 aa, Homo sapiens
MSLGERGPERQCSLTSFEAFFKEVPLCPAPGSHKLRLHASGTEEHGPHTAHCRGIADESLGKAGATGRVAFWQMAGAWEMHIFSRLSYVVLLSSRSQSTGCTPQSHNWAQTGKAGCQHLAGHGRGPQSELTKQSVQAWLQERQKALGANT

SEQ ID NO: 928590 - protein, 134 aa, Homo sapiens
MRLYSPLPLTVGLISGKNDKSKVLTKCICISLSHFPVIAIKNKNQQQKENPPRPSPRECAWAGPLKGSGRHACLSSSWGGATLAQLRSIWTGLQPTDPQICERAQPKAVEVSIPPARVQTPAPANIYRISSLNS

SEQ ID NO: 928591 - protein, 145 aa, Homo sapiens
MLLVICFLGHSDFNPEDGGGMNTFQARPVGYKTLAEVLTVLQKLDGCVEKSQLEGNSTKHLTGVPQNCSGTWMKLETIILSKLTQEQKTKHRMFSLPIPRGDCQRLGDPRPDFIKHCFRVQSACIFSQREFLQVDFSLLKLLVFV

SEQ ID NO: 928592 - protein, 130 aa, Homo sapiens
MNWTILDSTYKSDHTVFIFLYEKLKNQKNDEIVPHSLLVTSYTLSVHKINYCRLESTEARNILSAKTGLRERRQTEGAVWPWAAAISLSSQKGRHLYFVCAFAFQVTTQAALHGLSAYKLNKQIGSQAPD

SEQ ID NO: 928593 - protein, 210 aa, Homo sapiens
MDTAINTQLPDLRFAGYVTRTSLVAYSVLRNGCHLEIHKSMKQHISDDDSDSDSSGSGGGSDNGRGHMVGSGSGGDNVDSSGGDGGCSNVVAGSGAGGSSGNVDVVAGGGGNVDVVVVLSVAMLLVMVVVGSNIGRGGGNVDVVVVVVAMLTWLLLVVAILMLTVVMMVAMLLLLVVGGGSVVSDGENGGGGSGGRNGDIHKLGNNLGPD

SEQ ID NO: 928594 - protein, 130 aa, Homo sapiens
MRLSGPVSTKAGSLQEATTDHGRHSLESDSLQEAGLEKHRSASLQESCPPPSPAHEIIESDSFGERKAYHRHTVSGVGSCQWVRGLANFKNKATGLEDLPVKCSTATLYSLSAATVLGQGTQSPVAAVHG

SEQ ID NO: 928595 - protein, 124 aa, Homo sapiens
METFKKWLTEEKDPLKWNYPGFSIESLISCPQTTMVGHSVSCAGYSTSIVKRRNMFSDPRNYGDLLSFFSQHLLSISWVRDFKEPQRLSYYFIRGFIAQNDAQDPSHQQKNKTVSEITQFLQNA

SEQ ID NO: 928596 - protein, 203 aa, Homo sapiens
MTLTAPYAGRIQVALGLQTWPQGRQREKSSPSVPGGAETRRLHPGPLGPAQWPDLTSVPSLNALSTNTVAWEVLSLGLQHVNFEGDTLQPMAASSTPAVIGPLVLPLDSTVCLRPLRSHFPAAIGAAHTTLMVLWTSRLHQDLLPQARLQLSLVELPWVGTCLLWIDYPTVANTLLHFQIGLVPGNFCSTASAYQACLIPPAV

SEQ ID NO: 928597 - protein, 160 aa, Homo sapiens
MLSSLEKDCVQVVYFRKSTRDASEVLVRVNREGGKANAINATHTIHCSYTPPPPPTPPALPPTLLPFLLHPSPSSYTSPLPPTPLSLLLHPSPSSYTSSLPSTPLPFLLHPSPFYYTPPPPPTLLLFLLQPSPSSYTPTPPSIPLPLQKPEGQKPTVAAR

SEQ ID NO: 928598 - protein, 143 aa, Homo sapiens
MLRNPELEEKTVLEAGACIWTGHCSHRRNTSKDQWARAHPQGQQHAPEEADVMRCQPDLLESPGSRPGKGPKCDGDEDSPALANRGREEKKHILWDQHNVFLPERVVPPYTGPLMTILHWAASPEVPGPMAMSSHNSNPHSMA

SEQ ID NO: 928599 - protein, 148 aa, Homo sapiens
MRAQMTKTLLLGIFLLDFHLQSLWTVGQVHPTVMDTSQNQPEKSKTCEWIAGPALCDSSNINHKYGLSANCTRIQETSFFSETGLESQFSRKTRKHGCCDQIKKLPEIQYGAGECSTVSYNTDLFHRVLPAACYHSFHEYLNPDFSGT

SEQ ID NO: 928600 - protein, 131 aa, Homo sapiens
MSLGQRIWVKCKQKCCETQDIRGIPGPEYSYSDQSRLRAAVSHALKIRRSLSADLAGPIMGRKNCQGGRVAGHTAPVTSRDSARGCEPGHRAELAAPGDPENSSRPAVTPAFPAAERSQVRLPDSQSTSSF

SEQ ID NO: 928601 - protein, 118 aa, Homo sapiens
MGYSTWVKVFFTLRKQLCSPLELTRVRCNATSYTRQGVALALFYRSPKYSCWNVSGPQQLLFTEEQNPGVMMANWLLGDGPVLGLGTLQECQRQDIPHVLEFGGSPLNPGEAVDREPV

SEQ ID NO: 928602 - protein, 215 aa, Homo sapiens
MGSFSSCQRSGLVQRQSNRRRGRCSSWPLGECSDDAHLLTTLDSSRGPTDQMDIRGTIPAGPRRQQGTPLAAPPEAFCTPARSCPVAWYLQSQLLPAWPSPRRWNIGEVITKSPTSPPAASSSRMTGAVSPGGQSLGSAKNTVNLNTTNLCGWLNHNRKAQCLHPGVCKFTQVCAFAVIFTRMIAPIFTHTIAPGGCCLSAFSNSDQGQASSKPS

SEQ ID NO: 928603 - protein, 115 aa, Homo sapiens
MCEHAHTHTHTQTDTHEAAMSTEDSWRRAEDILREADTAAAALIPRPTSSLDALIISIQALLLAQKPSTIQLGLQVTAPGGHLYFTQSCGTVKMTTEAETIQSDLMINGKVMTAS

SEQ ID NO: 928604 - protein, 134 aa, Homo sapiens [sequence omitted]

SEQ ID NO: 928605 - protein, 135 aa, Homo sapiens
METYRQRGPIWVLIQFQETAQPEKIRTTGVRSGFELPMKCVSFHFGNCFSDVPGCGVNPWTHPQWIPPSWICTARILLSPDSHSGLPWNGLPRVQTGFGSKDCRPQEAGSSACQLQPASLSGTFWVLCKFMEMVL

SEQ ID NO: 928606 - protein, 134 aa, Homo sapiens
MRTQYTRSDSRASGLCPGWIQSSISWRKMSLEKVLGGSDICPSPFLPSGKIRMAKGDGQREQPEALFVSFSSFGLFSIWSGRRILLTSYLCWQNSSGVWELEGRKVLMLTSGFCGYIGIKRENIPICGKYTQVF

SEQ ID NO: 928607 - protein, 144 aa, Homo sapiens
MRYLHTFKESSFKILINDIEKREWNSLTASSNHSKHHQSWDKLVLVTTGWVAMRTHPHFYDMHARNMCPGYESQGKTEKLGQTEGNCRDQQLKAPRDSEESFSRTDTLGIVVMQGRFLALLRKELNSQLVVEKSSFIESEVFNH

SEQ ID NO: 928608 - protein, 173 aa, Homo sapiens
MSLCMHTVTQPPARAPLAKECGWNLDMMTGVSYWCETQLGVGREGAAHKQGQLSPGSRVPGSQDSKEPYSKFKPGLSVPSQHCLIQETCLDKANLPPSLDFPGMLRSRTSERRENRKERLPSLHQASLSHGGACTLIKKWGFQGTATHTLLKELCSHLNLARDPAQRSPGTER

SEQ ID NO: 928609 - protein, 136 aa, Homo sapiens
MVMRSPHPCGTVSLLNLFPLYITQSQGWPHHPAWALILHASSSNSSLPPCVDSSSPPPWATILPAALSSWADISMPNLAPIIPLRATVIPSPSRDICSALILLCHSGWSASGTIIAHCSLELLGSSISPALASQCA

SEQ ID NO: 928610 - protein, 161 aa, Homo sapiens
MRPSAEGQVGRFHLLVTVNNTAVNMGGTFQKPPLWAGLLSLFSMSCCKPESPEPMGLCGGGPQPPGQGRKGRPCWAWVLTRQAPILSAPGNPVGIALSAPAVCLRPPWVSPFLNAPCTHPCPSSPGAGIRPVMDAVLLLREAVSVGIKKEKETHPAFFHSA

SEQ ID NO: 928611 - protein, 152 aa, Homo sapiens
MGILTQRPGLGLQITRKCFLALRRAGEKLISVKLYPNTDPCADWYPNSHPLNGPEIFQEQIQMKVILEWKCVERQNCHSLKLVGESGTIILGNHSAVCTEAKSMLHPEPSNFVPRCMPNKGGCVCTQMWGNIHRSQNSCEYKDLPAVNKGRN

SEQ ID NO: 928612 - protein, 137 aa, Homo sapiens
MLSVDLHFWGLEDGGPLLTIPLDSAPGNKTTTERPVEMKGSLDQWNSHITRLRHLTTEFFLLRRQEFRLLQTRPDLPLVAQITSAAGNKFIDASNSSKLQEVKCQEVDFTQKYQSEYILSPSSPRIHTLYRLKVAAN

SEQ ID NO: 928613 - protein, 126 aa, Homo sapiens
MRSVTIEAQHHREGFMPPDDCGQAWIISSLPQEAGGTECSLTPPRKGDSLSRSAKNMSAEESTYDISLTPFQSWEKISTSSSIPLGSMLPSPMLTMEFIQEGTENALFRSTQFPTCIESNSNRHPQ

SEQ ID NO: 928614 - protein, 376 aa, Homo sapiens
MLIGAQEVTLNAVFLKKREISERVKVRSSVVIEDKSTRDPEYIYSQPYEQGTLDLKDWKRIGKELKQAGRKGNIIPLTVWNDWAIIKAALEPFQTEEDSISVSDAPGSCLIDCNEKTRKKSQKETESLHCEYVAEPVMAQSTQNVDYNQLQEVIYPETLKLEGKGPELVGPSESKPRGPSPLPAGQVPVTLQPQKQIKENKTQPPVAYQYWPPAELQYRPPPESQYGYPGMPPAPQGRAPYPQPPTRRLNPTAPPSRQGSELHEIIDKSRKEGDTEAWQFPVTLEPMPPGEGAQEGEPPTVEARYKSFSIKILKDMKEGVKQYGPNSPYMRTLLDSIAHGHRLIPYDWEILAKSSLSPSQFLQFKTWWIDGVQEQV

SEQ ID NO: 928615 - protein, 161 aa, Homo sapiens
MGRNQSRKAENSKNQSASSPPKESSSLPATEQSWTENDFDELREEGFRRLKTLNDLMELKTMAQELRDTCTSFSSQFNQVEERVLVIEDQMNEMKREEKFGEKRVKRNEQSLQEIWNYVKRPNLRLIGVTESDGENETKLQNTLQGYYLGELPQLSKAGQH

SEQ ID NO: 928616 - protein, 154 aa, Homo sapiens
MRACMCTCVCDMVWICPHQISCGIIISDVGELRGGKAKSAGPQRLQLPLPLGAQAQGDKGSVPEPLAGVVRFLAGRSIPVWKDGSGSVLKRHSGHSLPQLVGCHTTLLFFPLCGSQQLPNHSCWENLDTLVDSAGFTQYYGSFQWEPLMVRGCF

SEQ ID NO: 928617 - protein, 141 aa, Homo sapiens
MSTCRCTDHTLLLINGLLYKEDVVHIHKYRTAIKMNGTMSFVTTWIQLEIVEISFSPVLKACSDVTLRNNSNCDSKRQTMEGLWLLLGEEKGNEIPEADWEINCLCLLNLLENPNVPEMRWPWICISPLRVLTIELENYKP

SEQ ID NO: 928618 - protein, 147 aa, Homo sapiens
MTRGHPKQFSMSDPFENSATLSGRIPAYGSILCPCRCGLRHGRNTESSSGPGHLFFTWTCVPHPFSRSSEVSLQRVASRGLWHLVAFQVQDVVGGVLEMRLSYSKANFVASVGIDEGWVSCWGESQSLAFLALGKLLWKREQNDSLP

SEQ ID NO: 928619 - protein, 142 aa, Homo sapiens [sequence omitted]

SEQ ID NO: 928620 - protein, 140 aa, Homo sapiens
MVFHISGLLYCGSKQGAWLTCDALLWYAESDVKVRAINVIQSTLRKCYLDWDGYISITDNFMGLLPQCFSGMGQFASIFLLLGTLSPEETLLEKVLLLYALSLFYYLILFLITGRIHASVAPLNSESPKNPKHTAFSSHH

SEQ ID NO: 928621 - protein, 147 aa, Homo sapiens
MRFDPTLPGVPGVSAELCSMAPQDLGMSKSSLWGATALLSGPKRGPCEDFTTLTPWFPTAMFLSEIAKFSKPNYIHFNFESKSKQMSCSLFPWERVLRSNKPRIFSSSREAGNHHRTKCSSASVRANSFGCTSRSPEAKVTREKQEL

SEQ ID NO: 928622 - protein, 190 aa, Homo sapiens
MSIIASSSSKVAAKTQYDEDKSTSHYANPNQEARGKEAQAQNKTKKCGEGMGMQELIMLSSISLGPMRSQVLVDTVHTKPKDRPGPYAAGFAGTWTHLLETWRFICDTCHHQCLHAPSRSLRTGLPCLPVPLYIFQGAAMPAIAGTHAHCLGPEGGLSHLLPLPMHTVQGSYKLTSSACHCWYTCKPSGA

SEQ ID NO: 928623 - protein, 135 aa, Homo sapiens
MNLIPELPGGEATSAGPQRLRPPLPLGAETQGDLNSVPEPLELLEILQQEALPTEEGWVKVRPEEALWLQTATVGVQLKFPVLAAATPTRSSNGLDSRQLQQLLVAPPPRSLVGLSRFQLKGCKNLHVLGHSLKC

SEQ ID NO: 928624 - protein, 259 aa, Homo sapiens
MTRQKIVGMTSFWGTVQVGLMSGMRLGLNKMERPYRSSNGLPGGTAINKPGVIRVRNREEGNVGKWGERQVDQRDAVMRVKCGIRNNVRGHIEVRARNNGNCGRLNKEASKSIRAAAAAAWRHDGQPKTVRSSYLDKKATGRDPGPCVRIPTSQPCPSAVCNEKGWDESGRARMGAASKAVFKEWKEEWGKDLGSMGSARFPFVSLYNGFVRMAKPGLPRQSGSVSLQPLSQEDLGRSQQRALGQSSRGSGSGCQGLGL

SEQ ID NO: 928625 - protein, 341 aa, Homo sapiens
MRIQIVWLFELFEIRCEFLDEFFYFCKKLLDFESNINLDKPLLATLQVAVQLLSDTGQAILHLQEKNEIGNTGICHLGMSRHPQLQNFMEGVVLVGGTAHQGTDPPVPVVAELLSVFWQAPFTRTFLWYVHHPLLMSLMLHHLLPKLLLNGHPYLVLILVHVGTVNMAVPDIDRHLHSLGYLARRGLPGAKPQDGHLGAVGEDKVARHGCRTPQTPARNHTLKCLISKLSGKPKRVPTGALPGGAVRRGPLSSRPQNGRSTDSLHPALEKAARTQGQPMKAAGREAVPCKATGAELPKTMGTYLLHQHDLDANSLGSPQGKVFNEPSLAGEGFKREDYAKF

SEQ ID NO: 928626 - protein, 149 aa, Homo sapiens
MRKSTSIQNIHFFVVLAKQLMKLAFDNYCRLMRHQKDVVTSKGGWPAQKARTGAKFEGSATGYIIFSNLLELVLAAEFERYGKYRKKKLILLVTTDTHQWLSAETEVLSGDLVRKRQCPAGELIWDILQGQLKSRGRGNFERALIASTI

SEQ ID NO: 928627 - protein, 353 aa, Homo sapiens
MDPHWDLDSNHADWSHKHLLTCVLEGLRIIRKKPMNYSVMASASSCITLTEPRVHLTIEGQEIDFLLDTGVVFSVLISCPGRLSSRSITIRGILGQPVTRLINEALIPPYPVVTHPYTLLSQIPEEAEWFTVLDLKDAFFCIPLHSYLQFLFAFEDPTDHTSQLTWMVLPNGFRDSPHLFGQALAQDLGHFSSPGTLVLQSKAQFCLQQVKYLGLILARGTRALSKERIQPMLAYPHPKTLKQLWGFLVITAFCQLWVPRYSEIARPLYTLITETQRANTHLAEWEPGAETAFKTLKQALVQAPALSLPTGQNFSLYVTERAGIALGVLTQIHGTTPQQVAYLSKEIDVVAKG

SEQ ID NO: 928628 - protein, 139 aa, Homo sapiens
MNGLGALNGGQKQKGSWVERGRSPVKPHLQARDDLKSGGQAASSVDWNENLTVFFLGLPMATHGPISTYFLTSEACVGSGLVVQAEHSPPGQVGRMSPVGPRKTQIKAPLATEVSCWQSDTPRIRCIIHETVIELPGLF

SEQ ID NO: 928629 - protein, 148 aa, Homo sapiens
MLCCLEILPPDTLSHHSSSVFCKVIGHWQMQRCSLLGHYKSNLRSSSQPLNLTPGPEGELHLPWESGLSGDDRGLPFQGEIAFGRKLDFNLQALLEQLSQDELSKFKSLIRTISLGKELQTVPQTEESQEAITGPGFELWQIAWKSQR

SEQ ID NO: 928630 - protein, 157 aa, Homo sapiens
MARKSGHSLAGASCFRVLPMVNWHGEWGKSVGKKCGSGFRTGQWMEIGKVLRQMLEKYYIAGNRMLRAILVMAQKRRAIRKTYFLRDFGGEFPQAPGSPEMQFFSLFPSLSKGKGVSPMATTTTALGEHCQTITDVPLRLEGSSIGLWKTTNVATII

SEQ ID NO: 928631 - protein, 140 aa, Homo sapiens
MSSVKAGTGHLDVLGLLGLSESYIFTCHKNKPCKGTMQTRYEASFPKGLLLDLATDRSTEVGPMQADKLLEKPLENSALRYSRNKKCMVSLKELARPEFQLVPFLEVCQQTGEGLEVSQADVDAYQEKWFEANILDMLLQ

SEQ ID NO: 928632 - protein, 144 aa, Homo sapiens
MVWTVETVMFSVPGLLEPQSEGRLKYTLGMVLLPLLMTQQSKTTGGNPLPSIGFPGNTIKDEKFGAEGLLGSTLGDEDECVGPGEQPMTEHHSVYSPPLKGLTLALSSLPLVPFEGSSEKEMHPLLKFYTIPILCFGLNNWLSH

SEQ ID NO: 928633 - protein, 145 aa, Homo sapiens
MLEMAVTSANHLCQRYSISLGCLLAKGELPSWASGKLPGEKSLSFPLHPEAPAWAKNVQECGIWRNYTSELPGYIQTAKNRSWPNWDASVEQQICTLLAVMQARWSTSDTQGWLEQCSLGKIHGQGSRNRRKTTHPNVLHTATTL

SEQ ID NO: 928634 - protein, 215 aa, Homo sapiens
MKKDYFIFTCIFPSWKQDVELQQKKIGRDRQKGNTERSTLWRVERSKYKKKRNVLGEERFRKFLLYKSMQINMQLSIAGDEDKNDEGDNDKLYFIVLQFDGITILQDVRSKCINSPMQRADAEFLERKDCQPHQGSVTWASLDIGVHILLCNLLVFKTDCRQAKCQRQALRFDPSALGKLTLWFSPMHLVFLICLQGLGGGGWVERSTGLGLKQV

SEQ ID NO: 928635 - protein, 150 aa, Homo sapiens
MALACSRKFISEVFFWPHFHPISFVSQTWKSGLNYILCLCHLFTSLRKLSSASIWRRRALLQHLFCIQVIFTTKTKDMEPLGNGPCQLGAKIVVRKRSTGVETQHVLKVVSVENLILLFPVVTDDLITLYKPEGRQDRTRSGSVLGERKD

SEQ ID NO: 928636 - protein, 186 aa, Homo sapiens
MRTSEGTNSGHAAFENCNTARVRGFLLEVSETKNPTNSRHNSKLFKLSSIIFHCFLHCCAIKYFIPKSTQYFIFLDIIFFMPEEVKLLKEKVQKITEEVEHELSPEKRMELQPVVEGWLAEAFSNGCLAKTMGFSISDEIGKLWELLCHGIGIVLPMVHRKVYFIMVDIKIKTRKLSYINLLLVSY

SEQ ID NO: 928637 - protein, 146 aa, Homo sapiens
MSFSELILNEINLNIKKLNYVAKKNQDLNENFFHFVNCTSKSTSPKQPHVTQGPTIFKISSLFAFWIVNLGRKGSHFCTTAFAIRAIATFLVLFSSVHTDLGKITPCQFSAWNSSMAYGCPWTIILSKLSQGQKTKHHMFPLIGGN

SEQ ID NO: 928638 - protein, 171 aa, Homo sapiens
MAFSQMRGSWTCLNTGWGQGRRDRKPVAFILKGSMRPLHIQHIVIDTMNQCSVLQDVQMAQSPSDCDDKGWERPSSKVQGYLCQQDSRSRTRAGWKTPTVVGRHVPVKIEKESIRVQRSSYVRLGHFLFTGDYKTFAASSLGADAILGLSPPAPRRSLKQHVAAGRGGSRL

SEQ ID NO: 928639 - protein, 175 aa, Homo sapiens
MRYSDKWRLLQLESWFKGLQVQLGPLLQRVQAIALVTSTWCVKSAGFQNATVKKAWQLPPRFQRMYQKAWVPKQKPTAGSPCMGVPLYGSPCREPLHGKYQGGNVGLEPLRRVPTGDYLVELWEGGYHPPDLKMLEPLAACTLSMEKPQILNSNSREKPWELYCTKPQGWSSPRP

SEQ ID NO: 928640 - protein, 154 aa, Homo sapiens [sequence omitted]

SEQ ID NO: 928641 - protein, 167 aa, Homo sapiens
MLLACAMGIPFIISDFRSYLVMPFVQMIKLKLRETKTSQTPEPCPGPAPQSLALPSPPPPGPPTEISLLTTISSAGVEGIYPLGWILLPATEDHGTFNYTRRPPEAACFIPISLSTFLSNKTLDGFKYPSCMLPASPDESKPAKTIPFLMLEIVEDANPATEMGGCF

SEQ ID NO: 928642 - protein, 145 aa, Homo sapiens
MKDNSRTLGAFFEGSCQGKMGQRAGWCSGQHKALSDAQACTLSSPLFSARPAWAQRWTTAGPARLSSLILGCSTHPEQIHTDSEEVQQGSDCPREKGVAGTQDAPKEGRLSKEPEDLRLQRDIMGPLRNSFLLVHKAQPEPTRAG

SEQ ID NO: 928643 - protein, 166 aa, Homo sapiens
MLLLVVLVVVVVMMVVVILMMMVVLMEVLVVVLVVLMVVLVVVMVVLVVVMVVLVVVMVVLVVVLVVVVLWSQQSLELLKQGRDIDQEFSNLGPGCYGFLKLFDGVYENKSAICPRWGRLAGWGRLGDRAYYVKKEGPKWSLADLFYGKAQAGTSPSQSNTAEQPH

SEQ ID NO: 928644 - protein, 155 aa, Homo sapiens
MAHLAATLRCFTALDPEGPEGRLILNMCFITQSAPDIRKKLQKLESSPQTPQQELINLAFKVYNNREEFARQQCISELQLLASAETTDNHVSNVQKIQNIQATAPRGSFKTSSRALFVWAPTGGRTVQLTLPPLLRTLEPKPNVPWLTPSQIPSA

SEQ ID NO: 928645 - protein, 127 aa, Homo sapiens
MWYQIILKIEEIQYVKLFVMIFSAGIFQWYIELLEYSMVQRKIYMATFTKQIHIGHKFCVPSTIIWLIFKCKLLASLITIYVQFSSISHPVYLLFIYTFNNYLLGAFKCQALRQTFLNLTVWLMKHD

SEQ ID NO: 928646 - protein, 130 aa, Homo sapiens
MTLESLEEIQDVTCAWKELNRKLSSNTASQITSVCLLKGNMGVCFDVPTTESERLQAVWHDSNWILSVPAKLPEIEEYYDGNKSSNPQRRNGWSSGWSGGSGQSGGPSGGLSGRQSRQGSHSGSRQDGRR

SEQ ID NO: 928647 - protein, 138 aa, Homo sapiens
MAAGFPQSKQVKEQERTLKAETTIFLKPNLKSSIPFLLLYSVIHKSKLKERIYTGHKYEEELYFTPTHRSKWYLQSLERPGVFCYFQSSCGYLHERYNHWSNARDHYCSRILTVKKPFFTGLLKSIIFRFLQNSQGRS

SEQ ID NO: 928648 - protein, 157 aa, Homo sapiens
MGSQRSGPSQPPQPPQPPQPPQPPQSRWPPGPTFLLKPSFSQSFDSARLRRPYGLVLLPGPVEKVHQVGVGIGVSELRLSLGRACFGCCGGWRSGSQANGVMFPGGLWLRLLCHAGHQEEQQLWSKTGWISFLDLLPISRVTLGTLLNLLGPYFSHL

SEQ ID NO: 928649 - protein, 159 aa, Homo sapiens
MCVSGYGSHLVTRRKLLRITEMQPLKLPNHCQQLPNHCQQLPISRHLGRGPTLNSARQAHFGGAKANMSWFGDKTIPCAHTMETFQSIVTTLESTLHHSLRSRRRWMMSKAVLFASGCEKPCVWSCCVTYQCPPHLKNWHPRVFGRSRHAMWFKMRVSD

SEQ ID NO: 928650 - protein, 234 aa, Homo sapiens
MHAVIVQVCVLVRFHAADKDIPETRQFTKERGLIVLTVPHGLGSLTVMAEGKQVPSYMDGSRQRENEEDAKVETPDKTIRSHRFSLDLIVHITISILGKPFNKSLGSSKLSHIFLSSEPFKLFQPLPITQFQSHFHIFRYLLSSAPLYSYQFTVLVHFHAADKDIHETWQFTKERSLIGVTVPCGWGSLTIMAEGKEEQVTSYMDGSRQRENEEDAKPETPDKTIKSRETYSLP

SEQ ID NO: 928651 - protein, 136 aa, Homo sapiens
MFNSYLTDCDEKKVKETSTDGEDSLEARFVDSDQGTKDAEVDSADLQVKSFLVDESCNLSVIKELKMLQWIQLTCRCSHFLVDKGVSLRAMSCGPLTVFNPGGNPLGLNVYPNLCIQVISQKPGQLAGCPVTQQKQ

SEQ ID NO: 928652 - protein, 138 aa, Homo sapiens
MVPVPAQPFAYSCKGWNAAGLSEWSLIPWALKGLVNSSACSRQFLHSFTHALPPEGIECGCPSYQSTPDVLRCGNWNAQVLGLAGRFGVSRGRLHSLCPTAFHSSQDGERRCLQSLKAQKECYSQCSFSFAVHGQLEC

SEQ ID NO: 928653 - protein, 167 aa, Homo sapiens
MIAEERDKFPTSQQAVPSMYPHWDLNSDHGDWSPIEIRRKFQKQALGPEQNLEALLNLATSVFYNRDQEEQTQKEKQDQRKAAALVMALRQTNLGGSERTENGAGQSPGRACYQCGLKGHFKKDCPMRNKLPPHPCHYAEESLESTLPPRTRVSGAEAPNQMIHQQD

SEQ ID NO: 928654 - protein, 146 aa, Homo sapiens
MGCTHCPTSPNCKIGPPILNSGSANLGNRCLQIIDSVVDYLYLDATENPRTLIKDIWENGMNVGLAIKLGTTVEYLALCTNKIDMALVMTVEPGFEEQKFMKDMMPKVHWLQTQLLSLDIEVMVEQPVMRAENLSQTTSLSIEKAN

SEQ ID NO: 928655 - protein, 141 aa, Homo sapiens [sequence omitted]

SEQ ID NO: 928656 - protein, 139 aa, Homo sapiens
MQPQPRLPAAAESDSGDTLTQWPVLYEIGETQPLGQSESVLQEEVGESEIIKAKNCKAMKGDLGTCGAGLGLSRQYFCLDTFFLLQSGNGDTRRTHKLEGEDGAFSFLQACICFLFLTDFKGLLRGHQNQPADTSSSEV

SEQ ID NO: 928657 - protein, 153 aa, Homo sapiens
MRLNSRGKLVQVNSRFNSPTTQDLVYIDPSPDYCVRNESTGSLGTQGRLCNKTSEGMDGCELMCCGRGYDQFKTVQTERCHCKFHWCCYVKCKKCTEIVDQFVCKDLFYVVFSSIPGLYPLDANNILPFVTIKNIYKHAKCALGSKITPSLKP

SEQ ID NO: 928658 - protein, 181 aa, Homo sapiens
MFQSLVAAHLCETPGKSGRSPPQPLPKHGIYSYPSEVGFVRGTQIGWPSGNFQGSRYHTLGTASLKESGSSKDKSSRATRSTWVSRPTFLCNRKQRAATGPANKNPKISNKCSLGYTVGQLRIAAETGAGLALSHYSECQPSSRSTPEEAGGSKHDVKGPGCALSCGPMEWEQDGPSSEEA

SEQ ID NO: 928659 - protein, 154 aa, Homo sapiens
MLPNLLEESQRKAESGPNPDPKRGFLDLTHERIQGKSIVQSKSKFTKKWTGSAKPKFTQAQSHWAGSFTTSTAAANEEACVVQVHCLLGLMPKAFGTGPLHSFVRYSDHLLGSLGVPWIPIRPAGVISLALKVGSHPWAFHRIWNLHPAAQSPH

SEQ ID NO: 928660 - protein, 287 aa, Homo sapiens
MSLQPVAYLSKEINVVAKGWPHCLWVVVAVAVLVSEAVKIIQGRDVTVWTSHDVNGILTAKGDLWLSDNHLLKYQALLLERPVLQLCTCATLNPATFLSDNEEKIEHTCQQVSAQTYTTRGDLLEIPLTDPDLNLYTDGSSCVEKELRKAGYTVVSDNGILESNSLTPGTSAQLAELIALTWALELGEGKRVNIYTDSTYACLHAHTTIWKEREFLTSEGTSIKYQEAIRRLLLVVQKSKEVTVLHCQGHQKEKEREIEGNRQVDIEATRATRQDPPLKMLIEGPLV

SEQ ID NO: 928661 - protein, 144 aa, Homo sapiens
MGSLDGKHDDNRGLSPQKMHKHKPILSLPPVGSPGFSVAHVLVPSLLIVNTLSSLASDIPPLQFSTWISKTHHHTLEIVLSLSIWGWDMLALLSLWMKEELGATGCYTGWASPQERDRKTGVNGHTCETTTGPGNGREVCDRAQ

SEQ ID NO: 928662 - protein, 186 aa, Homo sapiens
MPESPTPLLGRGILAKAGAIIHLNIGEGTPICCPLLEEGINPEVWATGGQYGRAKNAHLVQVELKDSASFPYQRQYPLRPEAQQGLQKIKDLKAQGLVKPCNSPCNTPILGVQKPNGQWRYGKITRPLYTLIKKTQKANTHLVRWTPEAEEAAFQALKKALTQAPVLNLPTRQDFFICHRKKQEYL

SEQ ID NO: 928663 - protein, 143 aa, Homo sapiens
MQEQWQAFSPIGSGNGRIAGSGAQRTPCRIQRGGSQRRLDEKHGLVSAQLLMRAFVLPQNTAEKVKGEAGIYEEEPNLRHTLPLAPEHQVHTWWEFINNSEINTKESNASFFHLSPGTFSNPSQLSLHSLQQDSGTQTSVFFL

SEQ ID NO: 928664 - protein, 149 aa, Homo sapiens
MLLKVCKVCVFVRHTTKNLWRSLACEKAWSTHAWWICGYTVKKHLNKIWKEIQEGKLCEVKGWEWEANDIAWTLQMDLSTPVYPELGTEASPRIGTNGQCHSHYILVKGSYKASADSRRGKIDSIPPIIMQNNVRKKVHVCYLEELGQM

SEQ ID NO: 928665 - protein, 150 aa, Homo sapiens
MEEATDCAGKRNRTYLMLRSSQPSGTPLQRFNLIHLVATGISCFLGSGLLTLAVYLSCQHCQRQSQESTLVHPATPNHLHYKGGGTPKNEKYTPMEFKTLNKNNLIPDDRANFYPLQQTNVYTTTYYPSPLNKHSFRPEASPGQRCFPNS

SEQ ID NO: 928666 - protein, 121 aa, Homo sapiens
MPLTLKVLLLIDLEPWYSKGGAVGPAAEALLRSLLEMQNWGSTPDLLHQNLHFKETPNLITGTLKFKKHDNIIEQSYYTIFNQEINIDIVKNNYLEMYPGFWMYQWFIPLYCWVVFYGIDV

SEQ ID NO: 928667 - protein, 178 aa, Homo sapiens
MPVLQDTLGQPRPSKGPTCPSWSPNGARLWCALIPEVVALKKLDPGGQRAASPPRHHLTFKFCLDRLLSSLPAPVHVQVLEINFSFLHAYIYADPLQRHLVTHKSQNPKELLHRILPGLSHQGILLMIPKLHCPMQVSIISRLSLFRITTLLILGLLVQTHGSRVMMSKSSGKVYNLP

SEQ ID NO: 928668 - protein, 164 aa, Homo sapiens
MAPLHPHFPRIGLGSGRCHTFSPAPPRRKPNPEVAYGFPKVPGLWTSVRSASPALIGCLRHRSLRPDLRRPGSSPLSLQGWCLAAPPTLGLVRGEIRPCALVGLRNSGRAVSGHGQGPQAGAGRGPGAGARLEACLLCAPARAGPWNSLWPPPSALRHTDADAL

SEQ ID NO: 928669 - protein, 146 aa, Homo sapiens
MKLVLGICKEIGGWNPMLLHRARPISKTESKKEGTSNFWHLPIGSEMSIQYPGLGNPEVKHYHFLEAFLKHAGTVGDPEQLFHLGTAGPRIGSLETADPLGMKGVHSGQKEKMRLSMLYKPFIHCYIKDSEKSCRKVPVCVACDTD

SEQ ID NO: 928670 - protein, 140 aa, Homo sapiens
MLQVWNLRYAQRASWGCVTAQRLHNFQSCMEDVSGYCPNKHQEEGLAGLFPWFRDPIKYLSFFSQNEPLFLSYIFIWYPEAPGFPGICVKNSSYSIHSFHTQPLPTDRPSERQPATVARACAPELWRSGKDSGFPTDPLS

SEQ ID NO: 928671 - protein, 132 aa, Homo sapiens
MYAPCWVTTLVCPRLISGHRVFLQWLQLLTQCISCIASSLIIFTPVYLHACVFITCCPQGQEPCLPCSLPQHHPLEHNELSPTSAGATPCGQGWRRVLERFHAQSEELISLRIKWVLWTVKEFLVYFQGRYL

SEQ ID NO: 928672 - protein, 228 aa, Homo sapiens
MAKGDPKKPKGKMSAYAFFVQMCREEHKKKTPEVPVNFAEFSRKCPEKRKIMSGKEKSKFDEMAKVDKLVPNPSFGSHCLDSSCSVPNSALISNPQTLVSLLEMSQKGWVRCRLTCNSEKPPYITKATKLKKTCSNALVGLGHSRQQRCPHKDIGQKGQQCWGQRWHCWSLNNVSGVSSNPRGPACALLCLCLYLTPTVPPGAKGCAYRDTHLGYQSWNGTLGVSTPA

SEQ ID NO: 928673 - protein, 166 aa, Homo sapiens
MLCLVEAGPLPHPTEGWVSPQVHDRLDRYCCGFEPEPSDPCVEERLREKCQNPAELRLVHILVRSSDPSHLVYIDNAGNLQHPEDKLNFRLLEGIDGFPESAVKVLASGCLQNMLLKSLQMDPVFWESQGGAQGLKQVLQTLEQRGQVLLGHIQKHNLTLFRDEDP

SEQ ID NO: 928674 - protein, 148 aa, Homo sapiens
MRPTARPGSASLEEGWRCLGNRSKRRPPADAVKRGAAAVSTFGWTSVIAFVLPAVAQQTFEATSILRLGARHCVHGSCLQDPVSLTGRKPARQQEHSLDPAKSEQQRVSWEGAGAPRSSETPALRSAGCDAWHAGPSALRLPHLQKER

SEQ ID NO: 928675 - protein, 358 aa, Homo sapiens
MSSEDDQRLPFILPDGTEKGYAYVDFNYSGNLLASVGSNPDYTLTIWNWKEEQPILRTKAFSQEVFKVTFNPDKEEQLTTSGSGHIKFWEMAFTFTGLKLQGSLGRFGKTITTDIEGYMELPDGKVLSGSEWGNMLLWEGGLIKVELCRGTSKSCHNGPINQIMLYEGEVITVGSDGYVRTQDPECLFSFHSGAIEAVAVSPLTYLMATTALDCLYSSNDHMDFKLQLKCPFSIPPCLSGRLHISFYDSAQVNFTGAQIIVGFEDGVVRILELYDPKGLTIFAGRKKILDADIQLKQVFKPHTACVTALAYERDGEILATGSKDQTVFFFEVERDYKPIGYINTPGPVCQLMWSPMSH

SEQ ID NO: 928676 - protein, 142 aa, Homo sapiens
MGRNQSRKAENSKNQSASSPLKKYSSSLATERSWMENDFDELREEGFRRSVITNFSELKEDVRTHRKEAKNLEKRLDKWLTRINSVETLNDQMELKTMAQELRDTCTSFSSRFDQLEERVSVIEDQINEMKREVQRKTSKKK

SEQ ID NO: 928677 - protein, 145 aa, Homo sapiens
MAASAESSRFSGKWGKAGSHRPHPAVMQTKGPVSLSPSPAKSPKSVSRWRASGLENLPRLPAFQLRKKRTWFVPCLWSLHTGFVPSSDYPSSQKVGGTVPEKRVLMWDVRESRREYKGPIITGLPIHAKETGLYFNVEEKPLEGF

SEQ ID NO: 928678 - protein, 203 aa, Homo sapiens
MSYVCEMWEFGEVVSNILSFHKHMDTVTNFFSMFFSQDSHLPLSIPETLATKSSYKTVEYDDDLDNNPFKASLFPETEQYSRTLKNYAKSILPVLYKWNNKAWMTAHLFTAQFTEYFKPTVKTYCSEKKISFKMFLLTDNAPGHLKALTDTYNEIEAFMPANTTHILQPMDQGIILTFKSSYLRNTFHKTVVAIDSDSSHGSE

SEQ ID NO: 928679 - protein, 157 aa, Homo sapiens [sequence omitted]

SEQ ID NO: 928680 - protein, 151 aa, Homo sapiens
MSSLTTILEGARLPLVHGSHWLHGVHSPGHIFPTATAGEVQVMPHPGQPHTNKFDALSAGSVSPGCAFSRVLEGSQDTARSEVEAAAEAPGLEWVLPSHVRVAEVHGQAALLSSSSLINIHVYQAPVPHNSTPLVPHTPIAGQTRQATEGE

SEQ ID NO: 928681 - protein, 158 aa, Homo sapiens
MWYSSYGIYECSCHNHLCVGFCVDVNFQLNWVNTKEYNCWIIWNLWIHKVLCCYQGGDITPISKSPQLAENCSGLDHSVEKLVTNAIEEKYETKSQTLPFNQYLLYTQFVSLINVAGVPAMDRPCTRHWVDKGGQERPGPPHLDWIFCFGRSAVDVCS

SEQ ID NO: 928682 - protein, 136 aa, Homo sapiens
MPEPPPSPPPAMGSCAAQASPTSAAPCSTAPSPIDRPRAEECGRTARDWHAAPPAAPVRDPLGEANWAPDFTPEASETTNPPGGMNNSRRAALRAVTLTAKVCSFTPEPARPRTHQKEETPNTSEHQKEETPDMPP

SEQ ID NO: 928683 - protein, 141 aa, Homo sapiens
MDLGKRAVWALDVDLESASRRLQDPGYSECDLQVVMGSKWAPFLVMQKPHPTVRGQRREDQGSLQQCSPVQPKNQCQSKSRSEKAQHFSFCAEKTGYYCLVLNKELLYEKDYSGAIMRETEGSKGGIRRPIKRHCNHPNKS

SEQ ID NO: 928684 - protein, 135 aa, Homo sapiens
MFSEQKCRRSFFQSTHAFVPCFGSLKAGLSSLLIGLFCGWFIPPLGARVVFFLPPQPDLWDLFYSPGKLHNLDKHKAIKRFLAPAAAAAAAAAAAAASTIHWAATEEGTRTNQSDDRLLCCFDTPHSSLGDILYD

SEQ ID NO: 928685 - protein, 149 aa, Homo sapiens
MNAFALQSRKAFLLAVGCGGASVLSVPGGPESRPGSLRGEEAPLHHPAYFLQALAYLLAALLAVVNNAITQLQRLSTQSQSCCSGRELLLSLGATSFPLKPSPRVLEAGKTPKIPDHCNHPSFRVPSFRALPRDIANISLARTMSHGHP

SEQ ID NO: 928686 - protein, 140 aa, Homo sapiens
MALWYVAEEISKQQSIQDVTRVLLKAFSFIREVEHKSSENLQPDNVIEKKNPFSEEKFKLAAESNEELNINPQDNGENVSRAFRIKHIEPQLYKKRYMKMESLQISSYFNENNFAEKVTLFPHLRIEEVEIDLLFQYDSY

SEQ ID NO: 928687 - protein, 127 aa, Homo sapiens
MVGPCSKILEASSVTHLSGPAKGSKQQPHLPLTPQAPLDLLGHMAQVAEQLAQQPGPVAEPSVLEPTKNWQPFGSLAEGKLLLVGLMDRNGVKGICQVNGCILGTRKCGANMEVLPAAKYVYANYAF

SEQ ID NO: 928688 - protein, 162 aa, Homo sapiens
MVERPFEVTTTMPTRIHGSRNQGVEVEVSPLTNIPSDPLAKFLFPAPSTLCSAGLELLVPEGGTLLPGNTTMIPLNWKLRLVPGYFGLLLALSPQAKNGVTVLAEVIDPDYQDEITLLFHNGGGEEYARNTGDPLRHLLVLPSPMIKVNGKTTTPQSRQDYK

SEQ ID NO: 928689 - protein, 139 aa, Homo sapiens
MPEPPTPSVGSCAASGASQTSAAPCSLAPSPIDHPRAEECGHTARDCQAAPPAAPVQDPLGEATWAPESAVTLTAKVCSFTPEPARPRTHQKEETPNTSEYQKEETLDTQPFKNCNTHRKDYDADLIPVKGNEERGKIG

SEQ ID NO: 928690 - protein, 818 aa, Homo sapiens
MVLRARCGGATHPFIWCPTWVLFSRVKVRSSVVIEDKSTRDPEYVYSQPCDLKDWKKIGKELKQASREGKIIPLTVWNDWAIIKAALEPFQTEEDSVSVSDAPEGCVIDCKEEAGRKSRKEMESLHCEYAVELVMAQSMQNVDYNQLQQVIYPETLKLEEKGPELVGPSESKPRGTSPLPAGQMPVTLQPQTQVRENKTQPPVAYQYWLPAEFQYRPPPESQYGHPGMLPAPQGRAPYPQPPTMRLNPTAPPNRQGSALHKIIDKSRKQGDIEAWPFPLMLELIPPGEGAQEGEPPTVEARYKSFSIKMLKDMKEGIKQYGPNSPYMRTLLDSIAHGHRLIPYDWEILAKSSLSPSQFLQFKIWWINGAQEQVRKNRAANPPVNIDADQLLGTGQNWSTISQQALMQNEAIEQVRAICLRAWEKIQDPGTACPSFNTRQGSKEPYPDFVARLQDVAQKSIADENARKVIVELMAYENANPECQSAIKPLKGKFPAGSDVISEYVKACDGIGGAMHKAMLMAQALMGAALGGQVRTFGGKCYNCGQSGHLKKNCPASNKQNITIQVTTTTGKEPPDLCPRCQKGKHWASQCRSKFDRNGQPLSGNEQRGQPQSGPTTNWGIPSSALCSSGFSGKTTPTVPSASGNEPVTTIQQLSPATSGSAAVDLCTIQAVSLLPGEPPQKIPTGVYGPLPEGTVGLILGRSSLNRKGVQIHTGVVDSDYKGEIQLVISSSIPWSASPGDRIAQLLLLPYIKVGNSEIKRTGGFGSTDPTGKAAYWASQVSENRPVCKSIIQGKQFEGLVDTGADVSHCFKSVAKKLA

SEQ ID NO: 928691 - protein, 193 aa, Homo sapiens
MAAEDELLLPRLPMLLETGKQLLDEVELAAETTGYQIVQEKVFKGLGLLEKERPPVKSFILTRNTAQAKLFGASYPSLATMTVSDWYEQHRKYGALPDQGIATATPEKFRKAAQQQKYQEVKEGEDDEHSTEFGSGITGRTPILGAMATDRTWADLPPTRQDCRVHTSPTKENHAVFPSLGSRFSCVQRRQRC

SEQ ID NO: 928692 - protein, 135 aa, Homo sapiens
MAAKDRREIKHSAGGPALLGDPAHPPQPLAQVLSPSLPGQQGRPAAPSAGPAKPTPTRNSSWPASAARSPGSRSRLSLHTSLQAEGASSGLGQPRRGLLQCSGGLKGSSSATKVGVQAEEVPRASESCQHAVTSH

SEQ ID NO: 928693 - protein, 190 aa, Homo sapiens
MCPARSLLLVATLVLLDHLSLARNLPVATPDPGMFPCLHHSQNLLRAVSNMLQKARQTLEFYPCTSEEIDHEDITKDKTSTVEACLPLELTKALCLSSIYEDLKMYQVEFKTMNAKLLMDPKRQIFLDQNMLAVIDELMQAPGRAPGFACKGPVCISANIAGKQARLVPDYDPLIRAVTIDRVMSYLNAS

SEQ ID NO: 928694 - protein, 149 aa, Homo sapiens
MGCTHCPTSPNEMNQVPQLEMQKSPVFFVNHAAICRPELKIAWKKRTLTCIFENGNKFNLDTLRIEFNNSDPQNDSVEFPGFSVCLIHFRLGAEEAGNQKPPMAGKGALSPNPEHKKTQKTEKKHVSENDMVIASKYEPLLHNLSPSKA

SEQ ID NO: 928695 - protein, 155 aa, Homo sapiens
MSTWTPSRHQMCRPKPNIVACRIQLTVNKLTYILKLLLDYSSPHIDLTTGPSAASLLEFARGPLQTLFAWVSAAVAAEQQILVNHKCCCLIVPLEVLSQRSTWPCEVSQAVFWENHYSLQSCQIGTLKSAEVTAVFLFVCALPPEVEPTKAGRPS

SEQ ID NO: 928696 - protein, 269 aa, Homo sapiens
MAVARVDAALPPGEGSVVNWSGQGLQKLGPNLPCEADIHTLILDKNQIIKLENLEKCKRLIQLSVANNRLVRMMGVAKLTLLRVLNLPHNSIGCVEGLKELVHLEWLNLAGNNLKAMEQINSCTALQHLDLSDNNISQIGDLSKLVSLKTLLLHGNIITSLRMAPAYLPRSLAILSLAENEIRDLNEISFLASLTELEQLSIMNNPCVMATPSIPGFDYRPYIVSWCLNLRVLDGYVISQKERGSMVMWAEIKVWCKERPTKRDETCLR

SEQ ID NO: 928697 - protein, 184 aa, Homo sapiens
MWESLELPGNIFNGFDQNADNDMDDEIQAEVISDGDEEFVGNWNKNFEIEGDDLGYLAEEISKQQSLQDVTYVLLKAFNFKRETEHESLDNLQPDDVIEKKNPFSEEKFKPAAEICIKGARPKHWQLPGGVGPVGAQKSRIEVWEPLPIFRRMYGKASDGEKGSSQTTRAFSNKSIVRRSKFES

SEQ ID NO: 928698 - protein, 153 aa, Homo sapiens
MSGSGQGHIVEYGRRKNFHNYDTIRCSRLISHTDTVLALKSAMSLSETKKEWCGRRPVMKKHLGKVRKAAGGDRTNVQLPLGWKGQHMEVHIVNFCSNNCHRNIPGKPKEFTEPLKEEACWKAIPGLILQASLEKGRQPVKLGRGHRVKEVPS

SEQ ID NO: 928699 - protein, 143 aa, Homo sapiens
MSCQPMKAAGGKALPCKATRAELPKTMGTHLLHQHDLVVRPGVKGNHFGALRFDCPAGFPTCMGPEGTEAACKVITQLFPWNHKPYCGMKRKVPRAPWLRRLSILNKLGELVILTQDDRMCKVKRSLARWAEGICHAELRKLG

SEQ ID NO: 928700 - protein, 171 aa, Homo sapiens
MLNSQNVIVTLGPERVGSLPGKRHGQEAMGSEVGSCLRLNNIRQQGGRAPPGGACELLVSLLPPWSGTMTAAICGYPISRLSRWCLAEAFLGLDACGNPCGLLFWKQRFCAIFQQLCDTKNEIPRIDRTTGSDERDPMQGYAICIRCYKCTFVCARKNNQQHEVESLGSYK

SEQ ID NO: 928701 - protein, 143 aa, Homo sapiens
MAVSESAGVFPNPSPPLESRSKGKLVSQKEITFSPATRGPHHQQEGSKELGAIRKEEVEEPSDILKWLWLRGSLILFPFTKSRAVMLSRLKCKGTLVQDAGALSLKWKQSGKDQKTVEGRPGLNRLEEPLGKDMDEIGNHHSQ

SEQ ID NO: 928702 - protein, 190 aa, Homo sapiens
MGGCGTLIHMYREILGRAFLPFPLPQLSPLITHRRDKQIENNYITISCTHFHYPCDTDRAIQGIRRTMHSLNNVLNTTFQLFSPKFSGKLDELDVIRYSSVRAIPTDENIMTMFYGHLLSPMFHYHSFLLSCYRSPRTYISHKHILISFTYAHYSDTSQYAHLLNFLSDPPTPHSARHQITPPTAIYQSQ

SEQ ID NO: 928703 - protein, 148 aa, Homo sapiens
MTGPGARWFPSCMQAPFCISLMANGDEKLVGNWSKGDSCYVLAKRLAAFCPCPRDMWKCVLERDDLRYLAEEISKQPLNGRSTSSLHCVPGKATDTEHQPLKAARRETVSCKATGVELPKTLGTTSCISVTWISNCEWLLNAEDNKSG

SEQ ID NO: 928704 - protein, 135 aa, Homo sapiens
MHTLPPLPRWRMCACALQHATAAAMNGPYPPTVTPLSMGNAQKETSSPISCPELPLLLVQLHAQRTSALCLPKPHLHTDTAAGHIDAGSSCTPCHATTTTTTVNAHTEASTSVAISALPQSMSMYTRGHRTKPGA

SEQ ID NO: 928705 - protein, 171 aa, Homo sapiens
MILHLKDAFFCIPLHSDSQFLFAFEDPTDHTSQLTWTVLPQGFRDSPHLFGQALAQDLGHFSSPGTLVLQYVDDLLLATSSEASCQQATVDLLNFLANQGYKVSSEIARPLYTLIKETQRANTHLVEWEPVAETAFKTLKQALVQAPATTLTGKVHSFTPEASETSLLEKV

SEQ ID NO: 928706 - protein, 139 aa, Homo sapiens
MSQMANWKDCGWVLKQGFECFLRLCEQLGFLLLVTLKLNIKLSFKEKVLEHLFPSRLYLGSIDPSTEKSPLKPISLMNIDVRILNKILANRIQQHIKTLIHHDQVVFIPGMQGWFNLCKSINVIHHIHRTNDINTLLSQ

SEQ ID NO: 928707 - protein, 130 aa, Homo sapiens
MERLIRPGSNHQGLECNSEKCELGPTGAIKISCLQKEIYNHINMSSYWIGVVPNPLIGVLKSSAEIYRDTSREEGNAMMEAEIGVMQLEAKECRGCSNHQQRGEISVTISSRPSRRNQACKTLDFALLAS

SEQ ID NO: 928708 - protein, 163 aa, Homo sapiens
MIRHYVSILLESDKKLTQEQVSDRGANHLVVSMQGTRHPQSLSHKPAKKIDVARVTFDLYKLNPQDFIGCLNMKATFYDTYSLSYDLHCCGAKRIMKEALHWALFSMQATGHVLLHLLLPAAAPRCHRGRASPQGQGLIPHPDLSEDTAVKAQALAFPSEGLD

SEQ ID NO: 928709 - protein, 720 aa, Homo sapiens
MVLRARCGGATHPFIWCPTWVLFSRVKVRSSVVIEDKSTRDPEYVYSQPCDLKDWKKIGKELKQASREGKIIPLTVWNDWAIIKAALEPFQTEEDSVSVSDAPEGCVIDCKEEAGRKSRKEMESLHCEYAVELVMAQSMQNVDYNQLQQVIYPETLKLEEKGPELVGPSESKPRGTSPLPAGQMPVTLQPQTQVRENKTQPPVAYQYWLPAEFQYRPPPESQYGHPGMLPAPQGRAPYPQPPTMRLNPTAPPNRQGSALHKIIDKSRKQGDIEAWPFPLMLELIPPGEGAQEGEPPTVEARYKSFSIKMLKDMKEGIKQYGPNSPYMRTLLDSIAHGHRLIPYDWEILAKSSLSPSQFLQFKIWWINGAQEQVRKNRAANPPVNIDADQLLGTGQNWSTISQQALMQNEAIEQVRAICLRAWEKIQDPGTACPSFNTRQGSKEPYPDFVARLQDVAQKSIADENARKVIVELMAYENANPECQSAIKPLKGKFPAGSDVISEYVKACDGIGGAMHKAMLMAQALMGAALGGQVRTFGGKCYNCGQSGHLKKNCPASNKQNITIQVTTTTGKEPPDLCPRCQKGKHWASQCRSKFDRNGQPLSGNEQRGQPQSGPTTNWGIPSSALCSSGFSGKTTPTVPSASGNEPVTTIQQLSPATSGSAAVDICTIQAVSLVPGEPPQKIPTGVYGPLPEGTVGLILGRSSLNRKGVQIHTGVVDSAL

SEQ ID NO: 928710 - protein, 134 aa, Homo sapiens
MGDDQCSFVGISKTGRPLRCKDWKPFPPAERARVRHLEALNGAGSRGTRRGRLSVWAQQRLEGGGPGSPQGERPPLNQLTWDPWVNAGQEMRLTSKTLGPWAPYNPGHDSPPHGASLAPGQPPAITAKEQESPE

SEQ ID NO: 928711 - protein, 154 aa, Homo sapiens
MIIKHNDEITSIEQSWKEQRGEEGSDSTPNTLTPTRPHPYPQLRPEEKTIMTERSAAVFIQGLVAGHAGATHTAACSPQGLDHSVLVEAGAVEAAGKEAEDGVGVYWRWHSCHSRVFIEGHYELKENQLNIQLEISLGLQACKVQQCIPLPLKE

SEQ ID NO: 928712 - protein, 172 aa, Homo sapiens
MMTMAVLWNRKGGKTKGNLILVIIEDVEESIEWKTLQKKKQQKIKEKLRIRTKAAVKIQAWWRGTLVRRTLLHAALRAWIIQCWWRMTLSRVLEKKRQAALIAYATRERAVIKLQSLVRMWRVRWRYCQVLNAIYIIQGHWQCHNCQTCALLQGHCVVTATHLQFHIEIINS

SEQ ID NO: 928713 - protein, 138 aa, Homo sapiens
MPAHVSRRSSTSNFTKIINLTMPKPHPKPINLEALEVGPWYHCYGRYGIFTDRFSTSPGTWYAVIDLANTFFSIPNSHTGLLLAPQSHKVILCGAHGLCICCSVLHILTHIFTWWPLLNIQTCPKCLFLRETLLHHPD

SEQ ID NO: 928714 - protein, 181 aa, Homo sapiens
MGHRTLASTPALWASIPCPRSELRLDLVLPSGQSFRWREQSPAHWSGVLADQVWTLTQTEEQLHCTVYRGDKSQASRPTPDELEAVRKYFQLDVTLAQLYHHWGSVDSHFQEVAQKFQGVRLLRQDPIECLFSFICSSNNNIARITGMVERLCQAFGPRLIQLDDVTYHGFPSLQALAVAL

SEQ ID NO: 928715 - protein, 120 aa, Homo sapiens
MPKRKAEGDAKGDKAKVKDEPQRRSARLSAKPAPPKPEPKPKKASAKKGEKVPKGKKGKADAGKEGNNPAENGDAKTDQSQKAEGAGDANIDLTPLSPDICWDLTPSRWLPVCQAIWTFQ

SEQ ID NO: 928716 - protein, 134 aa, Homo sapiens
MIVDLSVIARFMGVEAQAPHNVSTDIIGGEPYPNEDESSGSLVGHHPGRDIGVSLLQPHEGGNSVKVPYKPTCMTLDLSAIYHYLCYCLEASYKDYPSCDPHHSECLALYAFIYCCYLNYKTINNWILDHYRWK

SEQ ID NO: 928717 - protein, 151 aa, Homo sapiens
MASNLRLLGNLQVCCSLLGVYSRPCYTWYHQWRLQNSKDCCLLLPLESSSQGGTGLMPARAVLYEESWCTVLGESSLSGSAALFSAGRQERLNLLKLCPQQSFPPGAVSQGDGHFFCKLLTGAAAFPSEMPSPVKRNLEKQSGHSLFAALW

SEQ ID NO: 928718 - protein, 163 aa, Homo sapiens
MNQGPCLVKSSGWALCAGGLDQPLVLTEDFSEPGDSKGKGCKTANITPPTLSPPNPQTLGALSQRVMELLLAQYPWQGVGGDPGQEDSSSEEKQSSLSGMCNAATSSWLEFQASGSYPVTSEVLWKKPGYLRLLGLRVYLSGCSAKTPHSSVYLTEGPSGVGS

SEQ ID NO: 928719 - protein, 216 aa, Homo sapiens
MRIAANQSRAFNGNFLKWLDLTWEESSADSQLFLEKMDHSHHTGMSCMDSNSTMQRPHHHPTTSASHSRGGGDSNMMMMMPMTFYFGFKNVELLFSSLVINTAGEMAGAFVAVIILAVFYEGLDSPREPAVTKWNHPYVDTQNCWAADAELSSPPANSAAHHPGGHKLPPHAHLHDLQWVPLHCSNSRGRYKILPLQLEEGSDWLPKDEASEGEKA

SEQ ID NO: 928720 - protein, 150 aa, Homo sapiens
MAAARLHDRLVPRRRERTAEREKEKRKRKRRNKKKKEEKEKERKRKRRKKKKKEEKEKEKEKRKKKERERERKRKRKKRKKKKKRKKKKKKKKKKIIPHIFLNLKPPRFVLCRVGSISLLALAQSCGGESMVVHIHVDGTILHIKNKEYS

SEQ ID NO: 928721 - protein, 169 aa, Homo sapiens
MADEWSSLWGHYHPKKRAANGRFFCSFNQATPLIGIITETMCHGYQQGFCYFADPKESIPEEVIVIIGDDSSMCVTDPEDHSVGKHVEVEDSDIDDSDPAGASAAGLLEFAGSPLQTLFAWVSPAGAAEQQILQNSKCCCLILPLEPLSQRGTWLYEVSVGPYWEVSPN

SEQ ID NO: 928722 - protein, 179 aa, Homo sapiens
MGQRAINNEREEGEQSHQKGPCSIAKAISVALNNLGHIGGNQQRRDVIWEMIPLMPMPLHVLNDSHLEAPREEWKAVPDILNITATCFSTLTENNSLTFSTYNSVISKHKKPIQVMPEKGIVCFQASRTQDLGITYVDTSNCWYNVTRLNPVESLFTRYGYTSLQHAIKGPQKALNIEV

SEQ ID NO: 928723 - protein, 200 aa, Homo sapiens
MAKATLSCPSHKPRSLSLWLPLPQAHRKCAPLWPRAGPERPSKNQGLELGTPRAWCSTPLWLSWYLSCPNWCLIRICDPNIHCLHAQDSARTYLRTVVRVTYTAFQVCLETQSTLAHGGEACWSSIADCWDWQFYSGWGWSKCSLHEWASTEFRLGLLSAVTGQQGVQCTVSQALRLPFLKYTDSPCHTVIVVRMEEGWH

SEQ ID NO: 928724 - protein, 162 aa, Homo sapiens
MTINFTFRLQAHWTKIFLVLGAWQNRGRDITDMQVTFFYCLPGVFSLLRGPGKCLIFIFELSNIASDDFGAEFGLQSSRLLLSLGENEMEEPEGRWNGKVVFLSEVGPLSGLGSPSTALAKLRINPPVDGLPACRCLLVCSCTGLLQAGLGRRGNLEWERLS

SEQ ID NO: 928725 - protein, 150 aa, Homo sapiens
MYPDWKTSPSRGLQTPHTGELWLASGRCPSGTKLPEKGTGSNLCCSASSAGDTQAIRLWSGTPANSSRPAGEEPDPREQNWTENDFDELTEEGFRRWVITSSSELKEHDLTQCKEAKKLEKRLDKLLTRITSLEKNINDLMELKNSMRTS

SEQ ID NO: 928726 - protein, 137 aa, Homo sapiens
MLSPLNIIAGEKEAESEDEEEEDMKLLGTPEGGSKFTQKKVKLAADEDDDMMMQMMMMMMMMMMILMMRKLKKKLQSLLQHMRILGDTIQVEIWVGTQPNHIIPPLAPPNLMSSHFKTNHAFSIVPSTYEPVKSKAS

SEQ ID NO: 928727 - protein, 153 aa, Homo sapiens
MQKSPIFCITHAGSLQPYLLLMNKTSDLCQYGSAFLCLLGFWNKELKVTYLKYNGTHASSDRTATPAYAFYLLGAQYNIMVIDLGVNRVYILIFWRDAEYEMTNGSHGRVPPCFSSFAVNGSLSLVQCCAGSCAGGLNAPWITSWIMVLAKAL

SEQ ID NO: 928728 - protein, 142 aa, Homo sapiens
MRGSSIINASLIKTLLKAALLPKEAGVIHCKGHQKASDPITQRNGYADKTLCLAFSFSIHTKLYPGHHQPFYTTNVSSNNPTISPLITKYSFSLISPTLGSHADPNPSRSSPEKHHPLSLHTTPRKFLLPQHFNTILRYFSY

SEQ ID NO: 928729 - protein, 156 aa, Homo sapiens
MAAETGSLGYTAASWAPGYVTQWQLRSQGGTRAARALGKRHSSSMTLGVVEHTGKSGTGTRVWHAAQQQLQPHGWCSITVAQILGLKHVWDGYNSILDQEDKGPNLEMVEEKASVSLGSRGWYGLYTSSGMLPYGLLQERKITVTNFCVFVIPGTT

SEQ ID NO: 928730 - protein, 173 aa, Homo sapiens
MWVCWPTCALILACFSEVLARLCAAVAEIPTKRFFSPGAVQQVPEGPRRNQHKHCDRYLPYLGLQQLGCLHDMQMGTSFKEERMNALALAGQTLTAMGRGPAKEEPDRSEWVVRGRTRNIFQRSKMQKADTAYWEPFSLLSLGKQQMGVCCSPFSCRNSEFPLYPISSFGSNL

SEQ ID NO: 928731 - protein, 171 aa, Homo sapiens
MCVLDFPHPVDSSCKKKQACSNRILQGQFVSQMSAEALGDPIKLDPNPNAKPYESLESTEQLLSVPTPYIIMPHSAFMPSYLRVLSGSVLHHPFQEQSPFPSLGLHKNPLAFRRFGIIGLTKEAPESSLTPSHHMRTQGAVGSLQLGRSPSPEAAHAGTWSWTSSLHICEK

SEQ ID NO: 928732 - protein, 135 aa, Homo sapiens
MLCSSVSVGRGVKVPPVSVWSRGHAARVDLGGSTDEAFVSLLQFRPQANVHVMWYSPHTAGGVLLCVFDEQEDVLHFKSELSRGKNIHPSEDKKHGSGVTKDLLIIPWSTVKTLDSIYETNIRRLRKMENSRKIS

SEQ ID NO: 928733 - protein, 172 aa, Homo sapiens
MPGPGQLALFQRQFVQKAASSLVLEGTEKDLPPCPCDWGAGRGCVWPCQHLPWAKSNRRPVGYEPSEVHSVHLPKSTDLGRDWIQVGAGWKQRVASRKWAVGMAGMVEMGNIPGTCCQPTAHQAGAGRASTQRGGEGVNSPVFLGHIAYPIFWEARPRVWRHGSSYGNYSYI

SEQ ID NO: 928734 - protein, 174 aa, Homo sapiens
MVTSPPILPSNKLQRERRTRGPSDSSSLYQLTLRICQLLQCPVRLLVGTCCVLVTPWWQALYGFQGWHLERDEGQPRLQEASGKLDKWTVTGQCTVEVAETQSVNEESTVSKGTISIGVPSLPTPKSQLFPLGCIISLISLMLWQNLVEYADFRPKHLQLQGAEPPADWQIRPA

SEQ ID NO: 928735 - protein, 130 aa, Homo sapiens
MSLAREWLIHLILQNGKWKNCNVDSPAAFGRSCCCQGEEALLGAAHRSKKQAGKSFNKGTKRRGDVIRVQVPVPSEENRNQDRSCPRETETIEKGVPGVSGRHKGIFSLWAEQTKIFPHRICEEILNTVD

SEQ ID NO: 928736 - protein, 164 aa, Homo sapiens
MKEKAVLSEIEGTRSSLKHLNHQLQKLDFETLKQQEIMYSQDFHIQQVERRMSRLKGEINSEEKQALEAKIVELRKSLEEKKSTCGLLETQIKKLHAKTFEKCGPYKQGKEDRLRGEKRKELWHGKFYLGQKGDRPTLFGLGGEVSKRLTENGFPVGSFSCGDF

SEQ ID NO: 928737 - protein, 157 aa, Homo sapiens
MQQKGVVYEPGSKLSPDTKSASSWYSDEVMSNGATGPVPGESQNLFGFSRCLDCCLCSEFIWRSYLGSAIQRDNWLNSAISLSFWVGTAITSDWTKPQEDHSLARTSSNSTESTSSEKHNWEMLTVLIRIYTITNGNIFKLTNARKKFKGKIHEYLP

SEQ ID NO: 928738 - protein, 131 aa, Homo sapiens
MSLWYMFNFTATVTFIVKVAPASDFSPVFKAAHYSFSVPETLGGKENHHFGFDPTRGSNTPKLIVKNPFNFECRAEVQQQYHLVVHIIDDNLKYGKSTKPRTGTAVIDIYVRRANMPPPPTTSCEVKSYRI

SEQ ID NO: 928739 - protein, 156 aa, Homo sapiens
MCYFVTERGTVFTATRLDVERAGFASVQSFSIKARDCDWQCAAILVTAYTHGINDNSPFCDQYLIRHTLKEEIAKDTVVAKLLCRDLDEPPDTIHYAPSSGPVGSGQLFEQVPNAENVIQPEDMAETTGNISLSLALTPDFCDKLHKLQAGLLHIL

SEQ ID NO: 928740 - protein, 150 aa, Homo sapiens
MATPARAALQTPPQQTLWATHQLACCPNTSLSSPPCHLKCPWWSRGPPPSRVPKACDKSRLLLASSTHPFPLSCCCSKVSPAAGLYDYSHFTDEGTEHKRVQACLRRHSFKGQNWKVNSKANAFTSLPIVITNTEFFSSTQSRSSLYSLP

SEQ ID NO: 928741 - protein, 306 aa, Homo sapiens
MYLGTLFARSERLQLCLSADGGAKRQEHLSRFSMPDLSKDSGMNVSEKLSNMGTLNSSMQFRSAESVRSLLSAQQYQEMEGNLHQLSNPIGYRDLQSHGRMHQSFDFDGGMAGSKLPGQEGVRIQPMSERTRRRATSRDDNRRFRPHRSRRSRRSRSDNALHLASEREAISRLKDRPPLRAREDYDQFMRQRSFQESMGHGSRRDLYGQCPRTVSDLALQNAFGDRWGPYFAEYDWCSTCSSSSESDNEGYFLGEPIPQPARLRYVTSDELLHKYSSYGLPKSSTLGGRGQLHSRKRQKSKNCIIS

SEQ ID NO: 928742 - protein, 146 aa, Homo sapiens
MCTGSILSTAGTWEGSAWSGPPLARVHPGDSCAMVQPDLVSMHSSHEFLLHETVSELSLALAPPVPSAITLHLLITVLNDFYHLSGSKIEESFTFFFNVFKMPPTKAMATHEGDIALTTCSSTDWACEAQGKNPVMDNAGNAESHP

SEQ ID NO: 928743 - protein, 144 aa, Homo sapiens
MSTRVHQKTRTIMFTAALFELALIESLGKSLELNSLGLGPRQDQGKKDKILAPWQVTQLAELGILLWERVGKFILARKSLGTQKPNQMLDNPFVQTHGESCQGHRLQIRLRHFKKDTKNLQLKQLRWGQGKGKSWCSNSHKLKR

SEQ ID NO: 928744 - protein, 155 aa, Homo sapiens
MEILFCLLLAGHYFMPFLTISTPDPASYSKVLGFSLMETEREHQKRSDAIYKERGLIGLTVPCGWGSLAIMAEGKEEQVLSYMDDSRQKDNEEDAKVETSDKPIRSLTLATFQVLSKHMWLADIQVSSPRKFFWIAVGAEFQMSFSILIWGVGIT

SEQ ID NO: 928745 - protein, 149 aa, Homo sapiens
MFGKPDTRVTCPHSQISSSQFGASSGFHNLYPRSKSSHKGTLACEWLPDCCLCGRCEQETNYSIMLTSKENGKNATFQTTSQETPAAFVIYSQTLIAVNLDRGAKSGLDGFGMRNKGLRSTTKRVCHLERGSFSSRQTFTAAAPDNICL

SEQ ID NO: 928746 - protein, 141 aa, Homo sapiens
MCWMRPHEMEIRLPDLALKRIFSFLDLFGLLQVSQVNKVAAHLKCPIWMGASDGYMIVFTSGPYLLLFSITGFLLQRFEDHQAAINNFWVDPCYVLTTSENSVHVYMWEEGGRHPYLRSCCHLENTWHDHTTDRFSEDRYQ

SEQ ID NO: 928747 - protein, 148 aa, Homo sapiens
MLADAAGAWEPANLAPPPMLHPVQAVTGGGRALVTLRASRACGQELALHAKVPGLTLVKSDPTGRLPEASEEDKEKGSPRLQSKIQAPHNARGPASIFSLASGPIANPTHEGYCFGIIVYGTPGSHCSMLCRLHLPPCRSLRGPQSTS

SEQ ID NO: 928748 - protein, 176 aa, Homo sapiens
MAPGTDPPAALEGTSYKPWQLPHSIMMSVDTWNARVKETWQLSLRFQRMYSKAWIPMRKPATVAGPPQRASPMAMLGRNVELEPPHRAATGALPTGAVEMALLPSRPQDSRTTSGLHPELGKAAGTQLQPMRAALGLYPGKPQGSSCPRPQGFTPYLSVPWVQGYDTRKEDETYLK

SEQ ID NO: 928749 - protein, 155 aa, Homo sapiens
MKQSQIPDDYLWQSEKRGRGRSAKCDKQLKDGAEMREVQGEREHIDYYVASKVSFSSDSTPKGFVTPHLLQLLCCVYTPGSPSPLDSVQETSHKVEIVTEFSWSFPSPCGLSPAPPAALPKDSCETKTEMASLRTESGYRALPAASSTPVFHLAL

SEQ ID NO: 928750 - protein, 160 aa, Homo sapiens [sequence omitted]

SEQ ID NO: 928751 - protein, 144 aa, Homo sapiens
MEIFYNAFTYANEADAVTIDGGLVFEAGLAPYSLKPIVVEIYGSKDAVPTFPEGISHELPQPLDTQGEVEGKVFPEVKKDYLGLADVQVFLLSCVPCEDMKNFPRLCQLCAGKGTDKCACSSQESYFGYAGALIIEISNLITFS

SEQ ID NO: 928752 - protein, 158 aa, Homo sapiens
MAGYSSETKLPEERSGSNICCLPISAVLQPPLLIPRQTGSGVDLQQTPTDLQLRVLTVRRKTNKQKGHPHQKPICMSPSSKTKAMEQSWTENDFDELREEGFRRSNYPELKEKVRTHGKKVKNLEKKLDKWLTRISNAEKCLKDLMELKTKARELHDK

SEQ ID NO: 928753 - protein, 307 aa, Homo sapiens
MTDQTLVNLTVCLLEFAGVHSRPYLPGYHQQRLQNSKDCCFFFLWKLQPRGAPRRCQLELCCGFVYTVRGKPPTQPSVMADAPPLTRLQCPWSTSDCRAGSENFKPVELSLLGSVGLGSAELDHLAPWLQPLSRGVNGSVLLPFQVPLGYERKLLQLAQSLFKGLPNFVVETQGPGGIGTQGNLLVCELQRPWEKPSIWAGMHGTSWHSPSGLPLARRGSSLTPCASQASLSPDNVESQHTAGNSASQKEFPLLISCGATLSGTVMLQLPNSGWCQLYLTESFINQTTDTDPGRPFPVSARAVALQH

SEQ ID NO: 928754 - protein, 141 aa, Homo sapiens
MIAPLHSSLRPCIKKQRRRRGGEGGGGGGERGGGGERGGGERGGGGEIGGGGGGGEIGGGEGGGGGIKTKAGKQKEVKKGETMRKQTQVTRPCQGSGKSGSSTLPIHSTRPCIHFDVYYLQNRSSEGTVPDLKGNAFNILT

SEQ ID NO: 928755 - protein, 256 aa, Homo sapiens
MDPRKVNKLRAFVKMCKEDPSVLHTEEMRFLREWVESMGGKVPPATQKAKSEENTKEEKPDSKKVEEDLKAEEPSSEESDLEIDKEEAAHDLALACKLDYDEDASAMLKEVQPRAQKIAEHRRKYERKREEREIKERTERVKKAQEEHERAQREEEARRQSGAQYGSFPGGFPGRMPGNFPGGMPGMGGGMPGMAGMPGLNEILSDPEVLAAMQDPEVMVAFQDVAQNPASMSKYQSNSKVMNLISKLSAKFGGQA

SEQ ID NO: 928756 - protein, 134 aa, Homo sapiens
MKVAKQALEGPLKGILGIVSTRLSPLTLTVTLILPLLMLGLALLSMTTLLSSFPDMTMNLATATGLKLDGGGEGDKEAKHTAKGVAFQIKETQSVVKYSYQKPGPYGKRGSSQAESESLIQIQTNGDTKLNLPY

SEQ ID NO: 928757 - protein, 143 aa, Homo sapiens
MQTCPKDTWLTVQFSQAVGRATELQRDYDLSLPLPWLVEKDHQTCARDLRTQAVDQSSCGHWQLMQWEDYGNSDPTGFLLCPACTWGILNPEEIAVPRPIKIMQQLGNQAIRPVTSTGDPRLTRFRWLYRPESVQEHSTKGKR

SEQ ID NO: 928758 - protein, 203 aa, Homo sapiens
MSTTTTGPWEVLPGYHQCSLTSQRLFSQLVVDFAGLGLTLQGSSLPSGPGPTVCTTGPGMGASRLCLVPYPTVAKLVFKLENKVLFTPFSSFLKQIEEASLGVTSCTAWGWGRDDTRTPLVTPAGVSLGHVPPKATGSKPIIALGLALELQSLWPRLPLKFIEDPRALYPIVVRLAETQVPTTGMGNSPLSRAHLNAPSVGMG

SEQ ID NO: 928759 - protein, 139 aa, Homo sapiens
MSFLMLRLCVDQSASGCDWSRACRLLQSHFAGKSKPGHNQNQSIKQSKSSQKQKPKCRYGHTMGDQAMLPLKWSRQIPKTNPVKQFKPSQNQNQSADKGMPCVIRPHFHLNGVGKFPRPVLSSNSNQVKTKTKIKPKCR

SEQ ID NO: 928760 - protein, 148 aa, Homo sapiens
MERALGIWTSEIWVERRKTRASLGRTLPCAANHQDCCSYSKKGWTHHTRVKKAPPPPESWAIVPGENPTKLKLKKFNSFRLFCYSFFIPRPIADHLVINITKSILPPTIAFNACLVIPCGDLPSQRQFSTSQKYFFPSRLSSDSTLVN

SEQ ID NO: 928761 - protein, 170 aa, Homo sapiens
MDEAGNHHSQQTIARTKNQTPHVLTHRWELNNENTWTQEGEHRTLGPVVGLFSHCYEEIPEVECGRAWSACCGAEWAGKSDTDALELLPSALCKMNENKPGDSQNLEQAGFKPTPSIECLHVDFPVGNKCDNCLAIPITNTYKEFQENMDFTIRNTLRLEKEESSHYIGH

SEQ ID NO: 928762 - protein, 150 aa, Homo sapiens
MRPLTEEETHVMFEKIVKYIRENLQLLLDRPDRTYCFWLHNDRVDYVSEKIVKLDANISGDKLVSLGTCFGKVTKTHKFRRASVLLLFAGLTKMKSRLSLNSLPNVESTAQLLQQLALMTLDSFYLNHILGHKEEIDKQVFDILVGSLKS

SEQ ID NO: 928763 - protein, 192 aa, Homo sapiens
MGLQASTEKCLQRVLLCDPSSGLAAVDTRTCSGGGSGGGKWTLPHNSTKSICRQPVTRAENLPQTMSLPIEKASRLRGFRHLREPIEVIQFFKGSVDSLGFPVGEKGWHVFTPSYLEPELWTSVFVTQNFLPPCNGPSTFPRQNLFLPFIQGTSRRVGPTYDSEWRKYFRLKTIHSMHFLEQIDLIVNIRLT

SEQ ID NO: 928764 - protein, 305 aa, Homo sapiens
MGQVWALVHSTLEPFHPNDEEEGKYNELTEDMTEQVCLPAKAKAAKEEEVPPYPSAPPHYFEEKEGHWVKSSCPSDRAVPRVTALSSIQAGIQQARREDGSSNGKASYSGSKGKVFQTPYTSAQKAELVAIIEVLTAFDIPINVISDSSYVVHSTQLIENAQLRFHTDEQLMTLFTQLQTAIRSRMHPFYITHIRAHTPLPGPLTPGNQMADRLVATAISNARHFHNLTHVNASGLKRRYSITWTEAKAIIHHVETDAEGDPNCHEQHPSNAATYLGTDQEAVTDGRRKPKESGTTSHNESAFSP

SEQ ID NO: 928765 - protein, 140 aa, Homo sapiens
MAQATYPLSALLSSVANGSVNRPHCLGFFYGNTLFEEPKKQCQAGVRTSSDFFEEESPFLHSQAMSEWIKKNRVPFYEILSAKLMELALPGPLESASSESEGEGTRMGQSIEIHRPDTGRAENGSGGQMEDIPKAKPVSS

SEQ ID NO: 928766 - protein, 174 aa, Homo sapiens
MDSETDMVQQIRALDSDMQTLVYENYDKLPSAKCISVSGIGGFLVSLTSRMKPQTLLMYSKLIPSGGVRGLAGSGVKPQTFTCGATKPTPTRNSSRQASSTHSPGSSSHLSLHTSLQAEGASSDLGQPRKGLPPCTRGLKGSSSAAKVGAQTEEVPRVSEGCEGCQHAVTSHKE

SEQ ID NO: 928767 - protein, 135 aa, Homo sapiens
MQLTCGNMSQNCSWISYKRLPHFNRTIQMGNSTLSILSRSIHLRRFYLVLSFVFLISQLSQLSLQLSFICGRCEVLLDMISSLSYKRERRCWLSMEEQVNCDQADLEQDFGKVQSLTLTSGSIPVPNVHGNEFTL

SEQ ID NO: 928768 - protein, 140 aa, Homo sapiens
MVEGKGGVSLLIWLEKEEDSKSPLAKAGYSLPVELIPSPRVVRGQECVLVHSCSVQDSQLPIPSAQLLFLPSIHFQCLASEDLLGVSPSSRSLSGSCSTWSTNRVVIKKPKLLSQTSFVNSSKLLTSLYLYFSMHEMGFQ

SEQ ID NO: 928769 - protein, 143 aa, Homo sapiens
MPLYLLVPLHLLLGVKSAGLTIKKERCIRNGYSKEKMKLIVVSHGLHVNDLQHKLTLFTKETYTYLARDSEKQKQGYLAGLEGAHANRVNQQISDNLGNYLIMYGCLLNQTESKEFFLFTTVYQKHIAVEKVQQKDKRRKDFT

SEQ ID NO: 928770 - protein, 130 aa, Homo sapiens
MHVTAFRAWVTSTLNSGEFSLRSREKEDSSQEGFPGPITERMRRQRSRSGTQLRWHFYGNTLFEEPMKQCQAGVRTSSDFFEEESPFLHSQAMSEWIKKNRVPFYEILSAYGYPRCLQMLSNAVGQGSGT

SEQ ID NO: 928771 - protein, 331 aa, Homo sapiens
MLKLYNGLSEGEAVRLLAGTDPLDPTDLNGAHFNPEVYLDKLPRECPLAQLMDSETDMVQQIRALDSDMQTLVYENYDKFIPATEIDKQHKTTSQCQVCKCVQNWWVLGLTDFKNEAADPPGVKLQTFSVLQLIKAVWTQRVSSNKIYCKEQKNKASTLDIKVLQVPSRLRSTAGFTQWIPHRSCRWSCRPVPLRVPTLFIPWVVDGTGCHGAGGGARRGGSGRTGAHGGGRLRNGGLQCGAAKPTPTRNSSRQTSSAHSPGSGSRLSLHTSLRAEGASSDLGQPRKGLPPCSCGLKGSSSAAKVGAQVEEASRANEGCEGCQHAVTSHKE

SEQ ID NO: 928772 - protein, 344 aa, Homo sapiens
MSSSPNLDVSNEITEGVYTPCDIGSNMILSPPGLPTWILGKISQRGYTFPTLLGVISFFSFLDIRKNITGVLHDYFDIGSNIILYFPGYWAQKHKRVYNPFDIGSNSILSFQDPELQPVLALLSLSLSMYLVTVLRNLLSIPAVSSDSHLHTPTYFFLSILCWADIGFTSATVPKMIVDMQWYSRVISHAGCLTQMSFLVLFACIEGMLLTVMAYDCFVGIYRPLHYPVIVNPHLCVFFVLVSFFLSLLDSQLHSWIVLQFTIIKNVEISNFVCDPSQLLKLASYDSVINSIFIYFDSTMFGFLPISGILSSYYKIVPSILRMSSSDGKYKTFSTYGSHLAFVC

SEQ ID NO: 928773 - protein, 158 aa, Homo sapiens
MGVTTAYITDTTTPFLGLGIQQAKEKGHQNKEDTEMRIHDDWVVQRAIDAYKAVIGHYSQEHAFYTCKKDQERLLCQAARMRDDSAIPLHVHNHLGNRGRGETDVSPAQDGEEEVRGGVEVGVRADSRDAEQVPQHCDQIHGQGQGQQSEDRLQFWIL

SEQ ID NO: 928774 - protein, 422 aa, Homo sapiens
MRVSAKQAFCLSRTCTVGGHKVIHQFWYMPDCPLTFLGRNLLSKLRATMSLTKHGSLLLKLPGTGVIMTLTVDDLLLGHPTAVGCATGTDAPHRHLEDCGYKVSKKKAQICQQQEALECGSQQQQLFHELKEKLLAAPALGLPDLTKPFPLYASEREKMALAATALLVQEANKLTFGQNLNIKASRAVVTLMNTKGHHWLTDARLIKYQTLLCENPRITIEVCNTLHPATLLPVSESTVEPDCVEVLDSVDFSRPDLWDQPWASGDWELYVYGSRFFNPQGEREVQEAQKAASAPFRASVLPQAPDLGPTSSKEEKDFLQVDFREMPKCGGNKYVLVLGRTYSGWVEAYPTRTEKTREVTPVLLRDLIRRFRPPLWIGSDNGPAFLAALVQKTAKISETISQGCVNNPCDIWSNIIVSPHEY

SEQ ID NO: 928775 - protein, 334 aa, Homo sapiens
MRSCKYPGPQLTPGSRWNTQAPGEHQAPGRCWTPVDIRPQVNTHDSGEQKAPGEHQTLGGYQTPGGNQALGGHLSSGPKVDTLSPGAIRLKANARTLVDNRPQVNIRLQTQGPMFIPSLQMYVRPQVDTRPKVYTSPEVDIRSQPSMDLSKHDKSQRHDSSSPAEDRAPIPTASAAWPEPPCASSTGQPIQYARSTCEAGVGELHIQDALPEDHGTYTCLAENALGQVSCSARVTVRGKPDPTITLSLRPRLLCMTGSSGASTECSVTGLPSDKQEDTSLHSLGLRPVRNISLSRSSPLLPLVWHQAMVGSMDVEPAAWVFLLCEMEMLTVTVL

SEQ ID NO: 928776 - protein, 223 aa, Homo sapiens
MGRNQCKKAENTKNQNASSPPKDHNFSPAREQNWMENEFDKLTEVGFRRWVITNSSELKDHVLTQCKEAKNLEKRLDELLTRITSLEKNISDLMELKNTAQELPEAYTSVNSRINQVEERISEIEDQLNEIKLPTKGSPSDQQWISLQEPYKPEESGGQCSTFLKNFQPRISYPAKLSFINVEEIKFFTDKQMLRDFVTTRPALQELLKGALNMVRNNRYQSL

SEQ ID NO: 928777 - protein, 136 aa, Homo sapiens
MERYHVASCEKESALAAVQQFGDLWYLSEVNDGMTLEGKGKILHRQQAVPTVDPHWDSDSDHGNWSHRHLLTCILEGLRKTRKKPMNYSILSTITQGKEENPSTFLERLRKALRKHTSLTPDSVEGQLILKDKFIT

SEQ ID NO: 928778 - protein, 207 aa, Homo sapiens
MASPSGSSEATGKPRGRDGGPRREEDDVPPEEKRLRLLLERGSAQPEDCEDGEDAPRPGRKKTGTQTGGDGRGVSDVGAGVRGCQGRGVGAAGGSVAGPGLKLVIERQLRRARSDSSLAAPRKEGIWIFKLKIWPKAHCCPQWPPDTFLFPFSFYGNTLFEEPMKQCQAGVRTSSDFFEEESPFLHSQAMSEWIKKNRVPFYEILSA

SEQ ID NO: 928779 - protein, 218 aa, Homo sapiens
MSPQLLSLYGLCLGKALEGFEQASAGSKPSSSCVEERLRGWKRGDQLRSYGKSRWEIMAASTSILAVGRRKVAGFRMYFGDTSSTATHIDDHQKYLQTLPDVPGCGGEWYTKSPQENRPIMKSLTLPALSLPMKLVSLEEAQARSLATNHPARKERRENSLPEIVPPMGTLFHTVLELPDNKSDFSSNPFQSVKVFTSPLFACGCPSSVAVVQEPNRT

SEQ ID NO: 928780 - protein, 136 aa, Homo sapiens
MNHPFPWGKCPQDVTESASPRIDPSVILGPPDKIFMEDILLICVNAAPVAQRRFSEKDCWCQPLKLKHKKGGRQVHRTSKKCPRASGWSNYHVDGNSSCIIHCADFLVNLYYNLSWSYLFIPIHNGAFSDEVVYEH

SEQ ID NO: 928781 - protein, 153 aa, Homo sapiens
MSMDKDIEDDGIGNGRRRCMRGWILEAEPTGLGNGMWAEGGCVVWMELRSLSFHWAKSDADADSTTPNVELICRMSPSGSDLKCVVTNGQMGGGCEGIFWAAELCTVKELQAPYQKTQGRGPSFPPSSVVKEDCEVRESWPGSQETPDLETWK

SEQ ID NO: 928782 - protein, 148 aa, Homo sapiens
MRAHLIFCSYEEGANPKPRWPPKGVGPVGAQKTRVEAWKPSPRFQRMYGNAWTSRQKSAAEAEPSWRTSTRTVQRRNVRLETPHRDPTGALPSGAVRREPPSYRPQNSRSSVEATGTQCQLMKATKGAIPFRATEVELPKSLGAHPLH

SEQ ID NO: 928783 - protein, 152 aa, Homo sapiens
MKSFSFCLSGKVFIFPSCLKDIFARYTILGFQRMYGNAWKSRKQFAAGMGPSWRTFARAMQKGNVGSEPPHRVPTGALPSGAVRRGPPSSRPQNARSTNTLHCAPGKATDIQCQPVKAAGKEAIPWKATRAELSKTMGTHLLHQCDPDPVEL

SEQ ID NO: 928784 - protein, 143 aa, Homo sapiens
MGARLASPTLWELDEDFHYELIPTPLANSTAQQKQPYSPLEHNPIGLRSTPPIPQQAMAGLAQGESELRPAQPCPDLMNTSPRQLRPSSNVTATTTAGALLQVSPPGWKPANSGHYSNSWQNNASSRKEKTTANTTHCNTLAN

SEQ ID NO: 928785 - protein, 138 aa, Homo sapiens
MLGYFKNRMPFLILRDRTPINCFTCQHTCNKIFPKKTGFPNPKLLTISLAMGSSFSLRLTLMDSCACPGYWPGTSQDFYQFALLEASNPGASELERWQGSDYTISKSRICVVNTLWNGQICFGWADREPTSVNMQRLK

SEQ ID NO: 928786 - protein, 143 aa, Homo sapiens
MNFMNLFQVDLSSDVAWDPDYGDSGSTRWPPSSRQEVTSFLLIDENCHVAPPITREPRSSHFPVAKGRGKLASVSNINDNHDFQHCHTCVICGHPEELQDLVWLHSAGILVLGIFSGSYPKYKFPTCLQLSDIFKTLTPIKIT

SEQ ID NO: 928787 - protein, 145 aa, Homo sapiens
MQALGLSTLGSVHRSLKCYIFFGEMPVQDVAGGTDISEKMGASKDISEPMRGLVGAVKKEKPNDALATEMLSHAQIQGKHHFSNLSDDSPGPTGPEIVRVMMGQKKVQGTKMVGKDSMDERVVLEQKGETDLGALGCLRIENKKL

SEQ ID NO: 928788 - protein, 146 aa, Homo sapiens
MKGVIGCVIGREKQASSPPLSAPNSGERGMDASQQANSSRASHPVTSYYICKCIFHSWYPPPDTLALPTSFYFQCKVSFWWLLLFKKKKSKKKGSFMLLSACERETFYLCFIMGPSKFGQDGTLNVMASCCVSISLKKREPACACT

SEQ ID NO: 928789 - protein, 156 aa, Homo sapiens
MVFSTIQDVQTLSGLLVENVDDDDDAGFAKIVVSPLAHQCQAYPAESNRSRGLSPGLGPKRRYRELRERLLLREVFSADSSSSASMSPGAPPIQGGAKLADVPAWPQRDRAPSRLLESLIPELNSWMAYLDLLWAKGEPTALKGESQPRQHLPQLT

SEQ ID NO: 928790 - protein, 154 aa, Homo sapiens
MCQVINDPVSFVQCTFVAKLLASVPFLQEQFGHSQHLGCLLGPAGAVHFPQRVCGSSRDSRNKLSPKHSSLKLQTQSHTASGNGLAGWFCLGVSKRSQSNCQLGLLSLKTTWGWRVHYTWTWLLAVGFISSAYSLFYRLMMWLTSRVSDARHTQ

SEQ ID NO: 928791 - protein, 185 aa, Homo sapiens
MGPARNLNPYPRLRGGMARAACTSMEQVGDSPSQAQDLGIRTVHPREPDLRVGLEPKLGIVTAQQGELNTYRNTLAAERRYSLQVSSELFYHSIKLLFILLILHLSTYFILPGHRTRTQDPPNAVEAACMHAWSSCSLAESPHPCQHLELPTPLQQLVQLIQEEEITRAHEYQVAIFEETVLEVC

SEQ ID NO: 928792 - protein, 143 aa, Homo sapiens
MKSASYVSPLDYGSHHALLILFSLVPEPRCLRAAKLLGAMLLKHQRIPWGSWSNADAGSVDADQGIISWQEASCAESGSIPTSYFSCKMGNSNTIFWTPVPTSPAAFHPVPPKLEDFWAPQTAARDFWKVSQSYDCIFRKHRL

SEQ ID NO: 928793 - protein, 203 aa, Homo sapiens
MDPIKHQRGGVNLQLIGTSFSPSTSEDLEDNCSGKEKIEEAILKISGPGRWGPVLAFGVSSEYLGLPELGNGPLGSVVFLVCLGLDEKPVSVPVQPTARMEWTSFPSNMTLKVWMHIGKGMEVIQEMEENVYVDSVRIQLEDTQLVSAAEVIACFVVERNPQEMQKSSVLIVVFYEPCLNALIGNIRVCCMLLRASHSKILEA

SEQ ID NO: 928794 - protein, 141 aa, Homo sapiens
MGYLIDILIFIGFLCHEQRDLDETPGISVTDFGSLTSNVLPQLLIAQLPWARSLKSPPKQLPTQFWLEISFSLSLAPLQLVSTVFLIAYEELSLKFDICIPIGIFVCRLIKPNQWREEGPRLFQFGHSWGFVIAAVELSEC

SEQ ID NO: 928795 - protein, 245 aa, Homo sapiens
MVSALKSYWEQCLKVVLGMGSFLNQGNMGQNWSVEEKHYVQLLKVLLKQTGAQAESKNLKESVVPPTAPIENKKQEREDKNWPIPPPPVAETSVPPPSVAETETPIQRILRSAAMAGEPLGPRAFPISIPHTLAAEMLTFTLAFENANADYERALAPVRCTKNLGNFLRACQDVRTELHCSSMLAEVIANLVVDKSKRSQGEVKRALVKWNLKIAPEKVQTTSPYQYLGSIVNGEECTASESSSL

SEQ ID NO: 928796 - protein, 140 aa, Homo sapiens
MVNTVAHTHFPKRKPGLRGGEVVAQSHELGKVELDFEFKVKERGPIVGKHPPLPFLSSQALLKPLIGVCGFKCSLTSGHSSRLRCPQGRKEEDCPGVFFCRGGTWSTEVCDSPVSGDSLGCWGCLVQPRRMETPSLTKIL

SEQ ID NO: 928797 - protein, 134 aa, Homo sapiens [sequence omitted]

SEQ ID NO: 928798 - protein, 281 aa, Homo sapiens
MSGAATGSWQISATYSRLVEHSGFLAWPQESQAVHKHSLFLHPLIPVTLPFPLPSQMPIEKLQGKVYVTGMEEFLWKRCVRKCRKKETSGNDSYFELRIAPGDVETVLEEGKNGGEPLGGGLAMLSPEYSRGLFQEKHNFCPQALGSPERTGPASEVEGPGSAPKPWALLRGQDQPLKLKVLVYQIGKGPFPRPFPEGVAEMGTVDSVQIVNEICRKFRTFHLYSGYCETLPRCPLQANASLHAPTPIDGNRGAGTQIYSPFWELELPAQAMPPSQGWLSQ

SEQ ID NO: 928799 - protein, 142 aa, Homo sapiens
MPQGQIPQSTISAAAGCCEAEVPTLTAMTTTAGTHPHVPPAGLGTGPLSQSHLNMDQEHLGPRGLSHHCYCHNPHFLLPRGPKNLPNHPNYCCHSWHPSKAPGGPRINPSGLTNTSTAAANNGAKGLAMAFQSPAKLHHNLH

SEQ ID NO: 928800 - protein, 135 aa, Homo sapiens
MNPGKTGSFSSWQQHFLGPECVQKHCPGARAKNRRLTTLPSALAYCGLAGNQDTRQSFIYSSLSSYGRKKSFGALLISSERCVAFPSTGALGGHSRFIIWFNFNIFVSQGIRRTGGEIGKGRVGGAVRTHTTFIG

SEQ ID NO: 928801 - protein, 156 aa, Homo sapiens
MACRNLSVPVGVLLRGCVPLNFQPLVSSTIGVFLLMSSCLCVTKKPVVSTIPVAFGCSQNNVEKLVWAQGSFKPLLSSLDYLGGKMSVLTGEQGRRMNAWIPVLAHTSDSDRVEERTNRRSSRALTWNSLFHEDVSSCQCSPGAGLPSIRPRQVLF

SEQ ID NO: 928802 - protein, 236 aa, Homo sapiens [sequence omitted]

SEQ ID NO: 928803 - protein, 134 aa, Homo sapiens
MSFAAIWMELVTNILSEDKGLNENMFKVLLLAMAEAQRRENRPKENGLTMRQAWKGRRGNGKDQEVFAQQADQDGPLANFSHPFQTHLPTHMHSSFPYREPYCMAKPITGQLLVASNSSKEHGIFESRNSTSPG

SEQ ID NO: 928804 - protein, 147 aa, Homo sapiens
MVMSSVQPEDLTMLNIHVPNTGAPRFIKHVLSDLQRDLDSHTIIVEDFNTTTLTILDRSLRKKINKDIQNLNSTLDQMYLIDIYRTLYPKTTQYTFFSAPYDTHTQKQYFVSFNPIKLTFNINHHSSVKAEMYITKPPHQKIRKISN

SEQ ID NO: 928805 - protein, 192 aa, Homo sapiens
MKMLASSDPPAVACQNTESFAGRLTAGSRSFAGRLIAGSRSFAGRLIAGSRSFAGRLIAGSRSFAGRLIAGSRSFAGRLIAGSRSFAGRLIAGSRSFAGRLIAGSRSFAGRLIAGSRSFAGRLIAGSRSFAGRLIAGSRSFAGRLIAGSRSFTGRLIAGSLELIEERTIKLGPLMLSEVLMANCLSSFQCES

SEQ ID NO: 928806 - protein, 154 aa, Homo sapiens
MVNEEDFIADESHSQREGERDGAGFGEHGLWLPVAAVERASSHGVCRYVVALLLGSLGSLPVTPVLVPGSSSSSCYGYGWGEPVLKVCASLLLAGRGHRQRHMFWPPLVAATVAAARMKVLDPYWPSLPPPHWKDWDVVSCSHFVVTFDLSSSS

SEQ ID NO: 928807 - protein, 185 aa, Homo sapiens
MDTGKTSIQAPLLLLAWLCLIIFTEVPANSGPFKHSLLIHVMVVWREGPEFIILMKLDISLFCSLASVGLPRSCENSSKALISSCSCYPLWVAVLNVHHSSEIPVTTTLLSADDLACNCVESIEVLRQKLFSLPHHPGKVYWFQKNIFEILLDHGSKQKDDQSQGAAKSQIAIILLSVTVYDFKN

SEQ ID NO: 928808 - protein, 138 aa, Homo sapiens
MVRRWGPVKIQGMESQQIFLRMLQLNCYYYLHCYEIIILLPYTNFQNILATFRDYTCFVETKECYVCVWVSAVCHRGIMSPDGKGGYEKQACGNLQKFWRALSEHSRYQHSRTHLCPWISQSGSGWWEETRGKSCVLL

SEQ ID NO: 928809 - protein, 206 aa, Homo sapiens [sequence omitted]

SEQ ID NO: 928810 - protein, 256 aa, Homo sapiens
MSSPSLSPGDPADHTAQLMWTVLPQGFRDSSHLFGQALAQDLGHFSSSGTLVLQYVDDLHLATSSEASCQQATLDLFNFLANQGALNKEQIQPILGYPYPKTLKQLQGFLGITGFCRLWIPGYSEKARPLYTLIKETQMADTYLVEWEPEAETVFKTLKQALVQAPALSLPTRQNLSLYVTERESRFVENGTQRAGYAIVSDVTVLENSVAPTFPGPLQPWPPLFNSAKDPRHFARAPLTSIRGPPLQTKAINYLG

SEQ ID NO: 928811 - protein, 152 aa, Homo sapiens
MKPLKSKLGKLCKSNSLCSSTNYIHASKNDIPVMYSIDLTEQKIILEIPSRLQPNTKGTQLPHGFSEKEQRADIPPHPFPSKIGGGTQTSGIGKKNKELTFHPHLGGAGSIPDHGNKAGRLIGAAVAEHSLSSGKAALHEIEHAKGLAGVMN

SEQ ID NO: 928812 - protein, 351 aa, Homo sapiens
MVNSSWGVGDLIHNRLPDEYLRGKDRQRALIAAVRHHLKKVNYQKFDTLLAAFRHYDKASNGGELFGNAWAYRSQQFGVDQGSANYSLWAKSSPLFVCVNKDELQEACDQANLSLDDKLLDQLFDYCDVDNDGFINYLEFANFLNWKDKMLLKEYEERVIIKGRKPDCVNPTEANVEEPEQTLLIKPEDIVLKEAGSTEKTLRTLLRPSDKVSNYYKTTSSEINAIVGAIPSTCYPICGVPTIRSDIPAPRIRRISDRTNYGEEGSAYSLLYPTIFARKGVFERDFFKTRSKEEIAEILCNIGVKLSDEEFENVWNLASKKHHRGEVCVENIRNVLDELRHADRIKCKTLM

SEQ ID NO: 928813 - protein, 135 aa, Homo sapiens
MVYNHIIGKQQQFDFLFTGNDDVDDDNDNDDDDYYYYYYLRQDLTLSLRPEYRGDQHQKPKVDKSTKMRKNQRKKAENSKNQNASSLPKDNISSPAREQNWMESDFDKLTALGFRGGITSLEKNINDLMELQNTA

SEQ ID NO: 928814 - protein, 135 aa, Homo sapiens
MLQLYLLLSRLNPCAPTATECMHTCGPTGQGFCYNPVCAHEPGKPNPCMSLELMSPDTDPDLEPLCTLPSWHSHSYPWEEVFPYLGQSLKFGRASGNRYSTLHLQVSEHGPWTSIISIIWELVRNVEYEALLQNF

SEQ ID NO: 928815 - protein, 167 aa, Homo sapiens
MSPGEIKRRVQVLSLDQYNIGKSLPHVTRLWQNNQGFKTGKTEASLLGSLLAKLQTNFAIQKGWMHKASPSLSWVKLGAWESPSHYMALHWGHGLWQFQCPNLSTDFSESGFIFFWDAGASQLVSDVLQRKYAYELCLNQYVRGRSVQGFPFHHLADIISPQNFLCF

SEQ ID NO: 928816 - protein, 137 aa, Homo sapiens
MLNHGDDNGHPFHFPDLRKGRSTDSLHCAPGKAVGTQSQPVKKAMGPVPCRVTGVDLPKALGAYPLNQHALVVEAIKVVAFNVWTNSFQEGLVELASWGELGGKAWEVPICISAASRLFAPLTLQCDEAPRCTCMPT

SEQ ID NO: 928817 - protein, 144 aa, Homo sapiens
MDNEVQAKLVSDGDEELVRNWNKGYFYYALPKRLAAFCPCPVELWNVELQRDDLRVPSGALPSGALRRGPLSFRPQNGRYDNSLHCAPGKATDTQCQLMKATGREAVLCKATGVKLPKPVEAHLLHQCDLEIAPATLTFSSYSP

SEQ ID NO: 928818 - protein, 143 aa, Homo sapiens
MSCIYQYSLIQNDFASGIGSFRWVLGLADFKNEVTDPHIQMCPVFLPSGAFVVSLTLRVKLQTFRSVLQLMKAAPQLFVPPGGFMASLASGVKLQTFPVSVTAHKRGADPKSEQQQDSLLRVKKQSFYSAEGDPTDILRATNH

SEQ ID NO: 928819 - protein, 715 aa, Homo sapiens
MEWNALEWNGVEMNGIEWNGIEWNRKEENGMERNGKNGMDCNGKISNGMEWNKMDSNRMDWNGMDSKGMDSNGLDWNGMDSKGMDSNGMEWNKMEWNGLESKRTECNGMEWNALEWNGVESNGIEWNGIEWNGIEWNRKEENGIQIEWKRMKWNGMERKNGMESDGTQWNGMDSNSIELNGLAMNGVEWNGMDSNRLYLNGRESNGMASNGMEWNGLKLQWNGTEWNGPEWNGTEWNGEEWNGMEWKGIDQNGMEQNGMEWKGMECNGMEWNRMEWNGKEWNGMEWNGMEWNGLKWNGIEWNGMYWNGMEWSRMERNALEWKAMQWNALNRNRMEWNGMEGTRMKWNGMDSNGMEWTQMEWNGMEWNELKWIGIEWTRLELNGKEWNRMEWNAMEWNGHEWNGMEWTKERKRMEWIQNGMEWNGFRMECNGMEWSGVDWSGMEWNGIEWSGVEWNGMKYNGVKWSGVEWNGMEWSGKDLSGVEWNGAESNGMEWNVMECNGMETNGIKWNLIEFETTRIKLNRMQWNGVEWNRMECNGKDLERMEWNGMEWNGFRKMEWNGMEWNGFRKTEWNGMEWSGVEWNVMEWNRMESNRIEWNRVEWNRMESNEKMDSNGIESNGIKWHQWNRMECGEEEWSAVEWSGMEWGGMEFNGVEWSGMESNRTEWEGMELTGVEWSGVEWNAMEWNGMHWNRMEWNGMEWNGMEWNGMEWGNEI

SEQ ID NO: 928820 - protein, 145 aa, Homo sapiens
MVEWISRFRPTHRCWEGPEDIPLTNALQNRFARAAPASLKIPVIALFFMSDLTVGTTVPQLQNLNTMRIIGSQGGRGQVAALNCQRQGDLQPFTRVTVHWEKGNDQTFWRLLDTGSELTLIPGYPKCHCGLPVKVSLQTAYCGTL

SEQ ID NO: 928821 - protein, 168 aa, Homo sapiens
MLLPFIHLKGEIEVLVCWAAGPDLSLAVELEKTPQFLFEIIQLDDVSLGFNYKSWCPEPIFGKTEKYEGFFLRTFPASFFSTFYLDPPPTSPRLVSSFTSSTCEQQRLRNILSLSTLKSLQMELILESRKNPAHKPDLGPKPQSSVTQIGPHPSRTDSIMLSQGEKSL

SEQ ID NO: 928822 - protein, 162 aa, Homo sapiens
MLLPFIHLKGEIEVLVCWAAGPDLSLAVELEKTPQFLFEIIQLDDVSLGFNYKSWCPEPIFGKTEKYEGFFLRTFPASFFSTFYLDPPPTSPRLVSSFTSSTCEQQRLRNILSLSMELILESRKNPAHKPDLGPKPQSSVTQIGPHPSRTDSIMLSQGEKSL

SEQ ID NO: 928823 - protein, 140 aa, Homo sapiens [sequence omitted]

SEQ ID NO: 928824 - protein, 160 aa, Homo sapiens
MGNGASRTPRVLCSWSYPTGGFAPPEEALSQPQAPRGPPHPGKIREDRDTQHDRLLGPCMVGQPGPTQVGPQGQGVLAPPTSQGSPWWGWGRGPQVAGVAWEPQAGAAPPRQPVPPEACARQGQMKGIPAPSQELQKPGRSSALPSGLLLDDLLVSPEFL

SEQ ID NO: 928825 - protein, 120 aa, Homo sapiens
MGTLQCGRFGNWQGERRHHLGLPPFPACFRVPAELWEQTVTGPCLRSVYEGIVTYLCTDHSCDVTVFKLRLKGNCDRYLHCSPRGFVTYLCSDQPREETLDCTLHRGDFTTYHCVDYKVM

SEQ ID NO: 928826 - protein, 202 aa, Homo sapiens
MAAWEPQAGAAQPRQPALPETSMRQVQMKGIPAPSQALQVSGRSSALPFGLLLDELLSTPEFLQQAQPFLETEAPGELEALEEGASLEAPLNEEEYRALLEEISDAGFGQDRVVAERWPLFRGEHLAGYGGACLPPAPSTGLTGLGFLPYSSRPGEKLHTMENCHSFLGILGMAEPAQACAHCAPQLMCKGASWPLSALVRP

SEQ ID NO: 928827 - protein, 146 aa, Homo sapiens
MERLMVERRHLALFAGLLARPALIAHPGQNLDKSPITWVISAELCQNAAFWQSLDNGYITWVISAGIHILDKSDNSWVTSEEICPNVSSSQSLDKSYITWMIRQRYVTMPPVSISQTRVASPRWSVQRYVSMSPVGEAYTRVTSSR

SEQ ID NO: 928828 - protein, 699 aa, Homo sapiens
MPPRRDVLTMDSSALPTGGIVKYFCTNNPESNGIIIEWTKMESTSNGIKRNYRMQSKRIIEWPRMESSNGMEWNNPWTRMQSSSNRIEWNHRMDSNGIIIEWNRMESSSNRNEWNHHRMEMKGRIIEWTRMESSNEIEWNNPWTRMQSSSNGIEWNRKRMELSSKGIEWNHQMESDGIIIKWNRIELWNEIQCGHHRMDSNGIIIQWKLMESTSNGIEWKHHRIETNGIIMKLKWMDSSSNGFAWNHRMKLIEIIIIWNRMESLNGIEWNHHQMEMNGIIREWNRMDSLKGIRWNHRMDLNGIIEWTRMESLFNGIEWNHRMVSNGIIIKWNRMESPNRIEWNNHRMNSNGIILKRNRMELSNAIEWNYRMQSNRIIEWTRMESSKGMEWNKSNGIIIEWTKMESTSIGIKRNYRMESKRIIEWPRMESSNGMEWNNPWTRVQSLSNRIEWNNRMDSNGIIIERNQMKSSSNGNEWNHHLMESHGVIIKWNRMESSNGLECNKHRTELNGNIIGGKRMQLSWNGIEWYHQMESDRIIIKWNRIELWNEIQCDHHRMDSNGIIIQWKLMESTSNGIEWKHHRIETNGIIMKLKWMDSSWNGFEWNHRMKFIEIIIKWNRMESLNGIEWNQHQMEMNGIIREWNRMDSLNGIRWNHRMDLNGIIERTRMESLLNGIEWNHRMVSNGIIINGIEWNHRIESN

SEQ ID NO: 928829 - protein, 278 aa, Homo sapiens
MDSNAIIIKWNRMESSNGLEWNKHSTESNGIVTGWKRMESSSNGIEWNHQMESDGIIIKWNRIELWNEIQCDHHRIYSNRISIQWKLMESTSNGIEWKQYRIEKNGIIMKWKWIDSSSNGFEWNHRMKLIEIFIKWNQMESLNGIEWNHRQMEMNGIITEWNRMDSLKGIRCNHRMELNGIIEWTRMESLLNGIERNHRMVPNGDIIKWNRMESPNRIEWNNHRMDSNGIILKWNRMELSNAIEWNYRMQSNRIIKWTRMESSNGKEWNSQELEWSRH

SEQ ID NO: 928830 - protein, 159 aa, Homo sapiens
MESKRIFEWTRMESSNEIEWNNPWTRMQSSTNGIEWNRRMDSNGIIIKWNQIELWNEIQCDHHRMDSNGIIIQWKLMESTSNGIEWKRHRIETNGIIMKLKWMDSSSNGFEWNHRMKLIEIIIKWNRMESLNGIEWNHHQMEMNGIIIEWNRMDSLNGI

SEQ ID NO: 928831 - protein, 170 aa, Homo sapiens [sequence omitted]

SEQ ID NO: 928832 - protein, 140 aa, Homo sapiens
MESKRIIEWPRMESSNGMEWNNPWTRMQSSSNRIEWNHRMDSNGIIIERNRMESSSGIEWNHDQMESNVIIIKWNPKSPSSIGTEWNCHQMEFKGIIIKWNRMESSLNGNERSHHLKESHGIIIKWNRMESSSNGIEWNH

SEQ ID NO: 928833 - protein, 144 aa, Homo sapiens
MFKSAEAAPTATPSPGALSQGDGSFIYKPLTGAAAFLSEIPCPERRNLERQSGYSGFAELQCAPSSSNFLGALFTLYEREAGESTSELYDVRKTHQPLVALRVEEEATSQGMWAASRIWKSQGNGFTPEPPDRNMALLHLDFSF

SEQ ID NO: 928834 - protein, 190 aa, Homo sapiens
MGLLLVLHSSLQMAGLLPGAWISVAASSPKWAPAGSLDKQHYICTMTKWDKLQPNGAKSKSIGGWSGFQSAPGPTFGKPATRNNQDLAKQDSVGRWVWLAVNPGNFGFIGLQEISINSQDRAGYVHIRGATQPCAHFSAATSLSLSRMHFPYSVCLSHIQAPHRYSILKRLFYMYKVKIHLSLSSFPVEL

SEQ ID NO: 928835 - protein, 398 aa, Homo sapiens
MGLQLQGPQTGTSAPPPDLQLHGPQTGTSAPRRVSRCTACKLEHELPAGSPAAWPSNWNISSPPDRQLHDPQTGISAPPRGSKVHSPQLATSAPHRVSSCTALKQEHLLPTGSPAARLSNRNISSPQGLQLHGPQPATLAPHQVSRCTALKLQHQFPPGLQLHRVNLEHQLPAGSPAPRPSNCNTGSSPGLQMHGPQTGTSTPHRVYSCMALNWNISSPPRSPDARPSNWNISSPPGLQLHGPQTGTSASRRVSRCTALKLEHQLPARSPGARASNWNISSLPGHQLHGPQTGTSPPRQVSSCMALKLQHQLPSESPAAWPSNWNISSPAGLQLHRPQTWTSAPRRVINCTALKLEHQLHPWVSSSTALQLDHQLPPGSPAAQPYNRNISYLTGLQLR

SEQ ID NO: 928836 - protein, 642 aa, Homo sapiens
MGLQLQGPQTGTSAPHQISSCMDLKLEHQQPAGSPAALPANWNMSSLPGLQLLGPQTGASAPHQISRCMALKLEYQFHPGAPGAQPSTCNISSPLGLQMHGPQTGTSAPCRVSRCTACKLEHQLPSGLQLHGPQTGISAPPRGSSFTALKLEHQLPNQVSSSTALNLQHQLPTRSPDARPSNWNIGSPQGLQLHGLKLEHQLPGPQTGTSAPRPSNRNISSPQAAPLQTATSAPRWVSSSMALNLEHQLPRTRVSSSTALNLEHQLPPTRVSSSTALKLEHQLPAGYPVARPSNWNISSPPGLQLHGPHTGTSAPHQISSCTALKQEHQLPTGSPAARPSNCNIGSPLGLQLHRVNLELQLPPGSPAPWPSTCNTGSPPGLQMHSPQTGTSTPHRVYSCMALNWNISSLPRSPHAQPSNWNISSPPGLQEHGPQTGTSAPCQVTSCMALKLGHHLPTRSPAAWPSNCNISSHQSLQLHGHQTGTSAPPWVSSCTDLKLEHQLPAGSSTAWPSNWNISSTPGSPAAQPYNRNISSLPGLQLHSPTTRTSAPCRVSSCTAVNISSSPSPQLHDPQVRTSASPQVFSCVTLNLEHQFFSGVCSCKTLKLHQLLSSSAAARPSNYNISFPPGLQFHDPKSRTSAPS

SEQ ID NO: 928837 - protein, 152 aa, Homo sapiens
MSYKCWAVRKGNVGSEPPRRVPPGAPPSGAVRRGPPSSRPQNGRSTYSLHCAPGKAADTQCQPMKAARRETVPFKATGAELPKTMGTHRLHLCDLDVRPGIKGDHFGALKFDCPIGFQTFMGLEESRSRDETVIENRPLIPDLSAELKDFLH

SEQ ID NO: 928838 - protein, 140 aa, Homo sapiens
MSKELILSIPLKGFKIPNRRVKHDGHFTVIQLVGMLRGIASGMKYLSDMGYVHRDLAARNILVNSNLVCKVSDFGLSRVLEDDPEAAYTTTKYQKAEAEEGVTKSQNVNQILGEFITLTVGGKVVQMEKKKEKRHGNAKK

SEQ ID NO: 928839 - protein, 196 aa, Homo sapiens
MCTQRDGLKLELMFKREAECKSLENLKPDLLVEKKIPFWGKKFKLPAAEMCLSKERSNVNRQDNGENVSRAFQRSSWQFFPTQAWRPRSEKWFHWLGPGPHCSVQPEDLVPSVPAVPAPVMAKRGQGTARAIASEGASVRPWWLPCDIGPAGVQKTRIELWGHLPRFQRTYGNAWMSRQKSVAGAEPSWRTSTSAM

SEQ ID NO: 928840 - protein, 153 aa, Homo sapiens
MVPLVGHSFLNGAHSLDFHSITFLIDSHTRGQRNNSMFSKRPGEHVSRVSPLSLGVRHFGKLLEDGDSLVVKLNSLRGNTRSVKYINGLYKNMMLIHDCETCIRVCLAHIVTGRTYPYLYRSAATSILASSEERISLRGIMQKERLGQVSEQE

SEQ ID NO: 928841 - protein, 215 aa, Homo sapiens
MGKKQSRETENSENQRASPPPKECSSSPAMEQSWTENDFDKLREEGFRRSNFSELKEKVRTHGREVKNLEKRLDEWLTRIITNAEKSLKDLMELKTMARELRDECTSFRRSRISLNRPITGTEIEAIINSLATKKSTGPDGFTAEFYQRYKEELVPFLLKLFQSIEKERILTNSFYEASIILIPKPGRHTTKKENFRPISLMNNNAKILNKILAN

SEQ ID NO: 928842 - protein, 138 aa, Homo sapiens
MDRPGKGTTSSHSGLWEWDWKPSPQPSGIPGLKVGPHQAPTPFCSGTCLPPAAIDGIKAWPQLCSKVAWVLTAGELERVLSSSSREPYLFPITEIILLHYLIPFVLQNVVLYILFICFGNFRPEDKYFHVSLSWSKVT

SEQ ID NO: 928843 - protein, 142 aa, Homo sapiens
MTNPSINPMGFNFKLYTQSKILSSTYLKYTMHYCYCHHTMQEYQKLFLLSHCNIVPIDQPPLISPYPTLLSSRNHCSTLNFNEMKIFYSKYGEWANPRSAQQSDLYLIKSINASREKESICVRNSNVQDKAKQQVVILMGAK

SEQ ID NO: 928844 - protein, 188 aa, Homo sapiens
MEEVPKRDHQCGSIGKGLVLRSPVWNVPANMFCHMSATFISNNTAIHELFRCILGPFMAMFRCKDFLQWYLGEGKDEIEFTEAESSMNNLVSKYQEHQDAMAKEEEIWEDWAERERHGRFRRQEDVGRFGTCWRLVDGFDQNADSDMGNEVQAEVVSDGDEELVGNWNETLDLDETVDLDILVNAGMN

SEQ ID NO: 928845 - protein, 197 aa, Homo sapiens
MNVGNKLPICCPLLEEGINSEVWNLEGQFGRAKTPHPVQIRLKDPIAFPYQRQYPLRPEAHKGLQDIVRHLKAQGLVRRCSSPCNTSILGIQKPNGQWRLVQDLRIINEAIIPLYPAVPNPYTLLSQIPEEAEWFTVLDLKDAFFCIPLHSDSQFLFAFEDPTDHTSQLMWMVLPQGFRDSPHLNHCFLPTVNSWTQ

SEQ ID NO: 928846 - protein, 146 aa, Homo sapiens
MLAWPPAAPARALGSLSSLMPSFRRSPAALTPGLLRPLAKVCSPMDAGRGLSLSALTQLRLKPQSSHLLPPVYPPAPLPPPKDVPLHSRSDSDASAASVALGAPASPAPGKRPLSRGWSLENCERAAENQILKCRSRWAAFLRGPV

SEQ ID NO: 928847 - protein, 135 aa, Homo sapiens
MEFQEWKEHQRKCKHRNKNDRMVETKPNQDVDLGHINVIELLHSLFNLVLVGFNIHNEHKCVVVFYLLHGRLSGYLGCLRSRSVFGRRKVGDVRIFFFLWLWTPFNTAFLAFKAFALASALGGAGASFFAFGAML

SEQ ID NO: 928848 - protein, 207 aa, Homo sapiens
MLATGPQLVMLLCNDVALLTSQAPDSPATEVLPCFGVHGRLTGGVGGPSDKQTTHFTASKEHLTIFRAPKGKEVSFAVHYHTEFNSTGHFGNGLAFIPCLCQAVDSICLVTTTQLCHLVLPKCEQGAGFCQGQCVVLPTCCRQDHFMAKTFDESGSFLSLGVVMSQMPLLLSTAAPQLPFYGDEEAVSSTLTRNHCPHLGTTRYPHI

SEQ ID NO: 928849 - protein, 135 aa, Homo sapiens
MPLSGILSSEEAKIEVVVDAYRFVTSNLGRAPHRIERAELYYWHHVWSSADMDSVADLKIWQLKTVISNTFPTSRTSINLGPNNEQALTNSDQALRNWQFLLPVSSDTLETTMLFVTLVYMCHVCLLHPSTRHLH

SEQ ID NO: 928850 - protein, 139 aa, Homo sapiens
MIKIDVFVKEEETPEKFVSMHAQRKGCMRSREKAATCKPRREASPETNPFGMLILDFRIPERVALVATCPWFGSPHTVTDPEASPSGHLVLLDWGLTLVQCLLARRCPPNVHGLNCNREMDLGRHPTTVVPWSHAAEIC

SEQ ID NO: 928851 - protein, 145 aa, Homo sapiens
MAVVGWACGHVLQPLGSWCDVADGSGTVGATYRNPCSPCYVGGDCDRLGRPVLMGFSCGDIGRLSQPDLRPQQEGSGANGGRLSWVIFRLMGWMLEYLGDGTRLINLSSGPLVVHSGAGYGRKRWSGPKVTGGMLRCEPLSASSA

SEQ ID NO: 928852 - protein, 155 aa, Homo sapiens
MGRNQSRKAENSKNQSASSPPKERNSSPATEQSWMEDDFDKLTEVDFRRSVITNFSKLKEDLRTHHKEAKNLEKRLDKRLTRINSAEKTLNDLMELKTMARELHDACTSFSSRLDQVEERVSVNEDQMNEMKREKKFREKRIKTNEQTSKKYGTM

SEQ ID NO: 928853 - protein, 139 aa, Homo sapiens
MVIFFTHSILYLENFQSVQDPQLQVKWTLLEVHSRPVCLGLSSRGCRTVNIVEQQMLLPDRSSGSFVSEGYPAVCHLSQLPLARKGNSLTPCASQVRQCLALLQLMLGGLHPLSCTHCPTSPGFIFHNPFSPNGVSSHS

SEQ ID NO: 928854 - protein, 138 aa, Homo sapiens
MSFNTHREVRPRTHQKAETPNTSEHQKEQTPDTPPLRTVTLTARVHGFILEVSETKNPPIPDTKLPSVYIFDTCYRASFIPYLSDASYNSHTLILYPRAAIPGWAFVHFTKNLSQTGNSVPVTNLAPQDPLKEILFPN

SEQ ID NO: 928855 - protein, 236 aa, Homo sapiens
MQKVGSYGLWQLHPCGSAGYSPHLRCFHGLALSVGFPGTQCKLSVDLPFRGLEDGGPLLTAPLDGAPVGSLCGGSNPTFPFCTALAEVLMRALPLQQTCAWASRRFHMSSEIKVEVPKPQFLTSVHLQAQHYVEAAMALGLHPLKPWPKLYSGVTGSGTHLEKQSGCFLVVQLCCVVGDPSLSRLSGLSRAGRLELLSCLNHRDVGHPSHWGLGPSQADSSLLLLTGWNLPLGLNL

SEQ ID NO: 928856 - protein, 347 aa, Homo sapiens
MEWNGMEWNGMESTRVEWNGMEFNGMEWNGMEWNGMEWNQPEWNGMEWKRMNGMEWNGMEWNGMEWIGTERNGMEWNGMDWSGMEWNQHEWNGTEWNGMEWKGTEWNQPEWNGMEWNGIHLIGMKWNVIQWNGVESTRVEWSGMERNRIQWIQLESNAMNLNGMEWNGMESSEWNGMEWNGIELNGMESTRLKWNGMEWIGTEWNRMEWNRMEWNHPSGKEWNRKEWNVIETNGMQWNAMAWNVVNPSGMEWNGMEGKTGMEWNRMKLTLVEKNGMEWNVMEWNQLEWKEMQCNGMEWNAMEWNGINPSGTQWKVIEWNGMEWNQPKWNGFEWSGMEWNSTECNGIK

SEQ ID NO: 928857 - protein, 143 aa, Homo sapiens
MRDKHSDPRGSVLESYVREKHSEHSRSALESYVRDKHSEPRNIVRETCVRDRHLDPRNSVLESHVRVKHSDPHSSVLEFYVSDNHSDSSSRVLYSYVKDKHSESRSSVLKSYVKGKHTDPSINVLESYVRDRHSDPRSSVLES

SEQ ID NO: 928858 - protein, 1971 aa, Homo sapiens
MERNQPEWNGTEWNRMVWNGIEWKGINPKGMEWNGMEWNGMEWNGINPSGMQWNEMEWNGMERKGTELNGMESTRVERNGKNGKEWNTMEWNGMEWNRMKWKGMEWKQPEWNGMEWNGMEWNRMEWNQPEWNGMEWNGMEWNGTEYNGMQWNHPEWNGMVWNAMEWNGTERNEIQWNRLNASGFEWNGMHWCGMEWNQQEWNGTERNGMEWNGMEWNGMEWNGMERNGMESTGVEWNGMEWKPPDRKEMECNPKERSGINTSGMEWNGTESNPMDSTGMQCNEFHWNGMEWNGIIRVEWNEMEWNRIEWNGIHPIEMEWNGMELNGMEWNGMVRNGIERNGINSSGKEWNGKKWNVIERNGMQWKAMAWNIVNQSGMEWNGMEWNGMEWNGMEWNQLGVQWKGMEMNGMEWNGTEWNEHECEGMEWNGIEWKGTGQNGLEWNGMNTSGMEWSGMEWNCIQRNGMQWNGMGWKGMERNQPEWNGMEWNGMEWNGMERNGLESTGWNGMEWNGIEWKGTGQNGLEWNGMNTSGMEWSGMEWNCIQRNGMQWNGMGWKGMERNQPEWNGMEWNAMEWNGMEWNGTERIGINRMEWNGMERNRIQWIQLECNAMNFNGMEWNGMESSVWNGMKWNGIELNGMESTRLKWNGMEWNGMEWNGMEWNGMVRNGIERNGINSSGKEWNGKKWNVIERNGMQWKAIAWNVVNQSGMEWNGMNCNGRKCNGIEWNGLQWNGMESTRNGMECNGMERNQPEWNGMEWNEWNGIYWKLMEWKGNKPSGMKCNEFQWNGMEWNGMEWNAIQLEWNGVEWNGIAFNGMECSGMEWDGKEWKGINLNGMEWNGMQWNGMEWNGINPCGMESEMEWKGMEWNQHEWNGMEWNGMEWNGINQSGMEWNGMQWNGRHWNQLEWNGTECNGIEWNQSGWNGMEWNGVEWNGMECNGIEWNGMKWNGMERNQPERNGMEWNGMEWKAMEWNQHEWNGMEWKGIMEWNGMEWSGMEWIGMERNSTEWNQQEWNGMEWNGVERYGKEWNGKESTRRVWNGIWNGMEWNGMEWNGNNPSGMQWNEMEWNGMEWNGMEWNGMERIGTERNGTELNGVESTQVERNGMEWNGMEWNGRACNQLSWKVEWNGKEWNGMETNGTEWKQTEWNGMQWNGMEWNGMEWNGIQPNGNNPSGMAWNGKDWNIIEWIGINRLETNGKEWNGMEWNGMEWNLHEWNGMEWNLMEWNGLEWNQPEGGMEWNGMEWNGMESTRVEWNGMEFNGMEWIGMESTRVEWNGMERNECNGMEWDGIEWNGKERNGMEWNGMEWTPMKWNGMEWNGLEWNGTELTRVEWNVMEWSGMKRNGMESNRVEWNGMECNGKEWYGINPSGMNGMEWNGMEWNGKEWNGNITSGMEWNGMECNGMEWNAITCNQHWWNGMEGNGMEWNGMEWNGMEWNKRAWNGTESTRLEWNGMEWNGMEWNGMERNHPEGNGMEWNGMEWNGMERNGTELNGMESTREWNGMEWNAVEWNEMKWNGMESNGMECNGMNPNGMEWNGLEWNGKESTRVEWNGMEWSGMEWNAMDWNGMEWNKPEWNGIEWNGMEWNGTEWNKPEWNCMEWNGKEWNGMETNGTEWKQPVWNRMQWNGMECNRMEWNGMEWNGMQWNGLAWNGTESTRMEWNGMQWNGTEWNRMEWNQPEGYGMECNGMEWNGINLSGMQWNEMEWNGMVWNGMEWNGMETMQCNGIKWNGMHWNGMEWNLPEWKEMEWNGMEWNGMESNGKEWNGMETNGSEWKQPVWNGMQRNAMEWNGMEWNGMEWNGIEYKKMERTRNEMERNEMETTRVEWNGTQWNGMESTIVEWNGMEWNGTEYNGMERNHPEWNGQIWNAVEWNGTKRNEIQWNRLNWNGMESTRIEWNGMEWNGKERNGINPSGKEWSGMYWSGMEWNQHELNGTEWNGTEWNGMEWKGTKWNQPEWNGMEWIGMEWNGMQWNGME

SEQ ID NO: 928859 - protein, 658 aa, Homo sapiens
MEWNGMKWNGMERNQPKWNGMEWNGMEWNGMEWNQHEWNGMEWKGTECNGMECYGIHPSGMVWNGMEWKGIKWIGMEWYQPEWNGMEWNGMEWNGMESTRVERNGMEWNGMESTRWNRMEWNGMELNGMDWNRKKFKGMESTRMEWNGMEWNGMEWSGMVWKGMEWKGINPKGMEWNGMEWNGMERNGTEQNGTEWNGINPSGKEWNGMEWNGMEWNGIACNQLWWNGMEWNGMEWNGMEWNKREWNGMESSRDEWNGMEWNGMEWNGMEWNGMEMNKTEWNGMEWNGMETMQCNGINWNGKNWNGKEWNHLEMEWIGTERNGMEWNGMDPNGMEWIGMEWNGINWSGMECNGMQWNGMERNGMEWNQPERNGMEWNAMEWNGMESTLVEWYGMEWNRMERNGLNPNGMERNGVEWYGMEWNGKESTRMVWNRMEWNGINGHGMERNQPEWDGTEWIGMVWNGMEWKGINSKGMEWNGMECNAMEWNGINTSGMQWNEMEWNGTEWNGTELNGMKSTRVERNGMEWNGMEWNGMEWDQPEWNGMEWNAMEWNGMESTIVEWYGMEWNGMERNGINPNGMERNGVEWYGMEWNGKESTRSVWNRMEWNGMESTRVECHGMKWNGMERNGTEWNGIERNGINRVERNGMEWNGMEWNGME

SEQ ID NO: 928860 - protein, 207 aa, Homo sapiens
MERNGVEWYGMEWNGMESTRRVRNGMEWNGMQWNGMEWNGINTSGMQWNKIQWNATEWNGAELNGMKSTRVERNGMEWNGMEWNGMEWNNMQSTLVEWYGREWNGMEWNKRAWNGTESSRMEWNGMGWNGMQWNGMERNQPEGNRMEWYGMEWNGTEWNGINPSGMQWNELEWNGMERNGTELNGMESTRVERKGMEWNGMELNGME

SEQ ID NO: 928861 - protein, 136 aa, Homo sapiens
MVMNNATPNHRLLSRGNSVSPFHRPPPSPKSPIQAQIPAPTPNPRSNPPSAIPNLRSSPESAIQPGPPQPSAATLPASDLLDPLSLARALAAPLHGGGRPPPRSRSQAARRQVGLQPGAVAAGLAGSPELKQIWAH

SEQ ID NO: 928862 - protein, 130 aa, Homo sapiens
MSTVCQCVSTAQINPTQPPSVILECASSCPAVHTHSSNGLTQLKPCLPHEGASLQAAELACLQRHGPGLRLSGFTVLHCSHFLYPPGLRTVTAHLAEQGQRSADDPYVSTDSSFASTHLTLHRPGPGAGD

SEQ ID NO: 928863 - protein, 138 aa, Homo sapiens
MGHGTSSPVLLLSSASLMSWTCGETPDLAHGWFCSVPAQTGDALGDAVCSSRAFRHRGLEPLHLGCDRGLRSSTVGEGLLNKKGTATPCGADEQIDDSAFSWSVMEEEARTHASISNSAAPHLPLGENALKAQTATYH

SEQ ID NO: 928864 - protein, 168 aa, Homo sapiens
MSSPAQATISLGNPSVDRALRVPKAAACPQGRPPWGMVWLQDRLLTGACAQRGLSLVTSALQPMASTVHHLHSAPGNASTTVSRLLLGLPRPLPVADVSTLLGDIAKRVYEVISVQVQDVNECFYEELNACSGRELCANLEGSYWCVCHQEAPATSPRKLNLEWEGNG

SEQ ID NO: 928865 - protein, 603 aa, Homo sapiens
MCQHMDAGGVRMEVVSVTNGSIVVEFHLLIIADVDVQEVSAAFLTAFQTVPLLEVIRGDTFIQDYDECERKEDDCVPGTSCRNTLGSFTCSCEGGAPDFPVEYSERPCEGDSPGNETWATSPERPLTTAGTKAAFVQGTSPTPQGLPQRLNLTGAVRVLCEIEKVVVAIQKRFLQQESIPESSLYLSHPSCNVSHSNGTHVLLEAGWSECGTLMQSGASVSQRTLPCRPLFVSNPTWPHGAQRLRVQGPAWGTRGGESQHLPPAQPGTGHRGLGRMGLGVQGGSGKLPGGAGGFRGSPCRLWVGEVAFWEGARPRKEASVVPRLLRRPPGGRALAAGGCLQGGWAVISGSCGFSAVSLNMTNTVVRTTLRNDLSQEGIIHHLKILSPIYCAFQNDLLTSSGFTLEWGVYTIIEDLHGAGNFVTEMQLFIGDSPIPQNYSVSASDDVRIEVGLYRQKSNLKVVLTECWATPSSNARDPITFSFINNSRHCHCLALLCGQLWALQDFQASAVMDLGFGEQMRCPVLDFHGACGICDCPVPNTYTNVIENGNSNKAQFKLRIFSFINDSIVYLHCKLRVCMESPGATCKICLFLLSSELFSWVTKL

SEQ ID NO: 928866 - protein, 188 aa, Homo sapiens
MKRWAKNGWTASNRNEAGFISLMSGKAEFREKHTNEDQNRFFRIIKNAIDNRYVPTTNIYVPKRCFTMHRVKIVGDTVRGKRKSWTIKECLKENRLLKVTNRTQVDPKFGCLPGAAERGPVGCVIVSGGLGCVCIVNKCDCGRCPAPSDSKFCLLWASAKHGHLIKRCLNVGHVLDARVAMRVRVSER

SEQ ID NO: 928867 - protein, 131 aa, Homo sapiens
MCLMLVDAINQFSKFLPTYTLACNDSSHTCVGIDYINIIIFTSITSQSLAAHFLLWSMAPEHTAVSRGEELLALSAGISMKPIIGVIRPCSCSACPWLAPVASPAGAAEAASASNESKDSEHRAQCFTALP

SEQ ID NO: 928868 - protein, 260 aa, Homo sapiens
MKHAAPPRQSAPESMKCAAPLNRSALEPVQRAAPHTRSAPESMKPAAPHTRSAPESTQHVASPRHSVLESMQRAVPHTGSAPESTQQAFLEPQAEGYPKCKNGGACNPTEHPPLSRCPGRPTQHGHSASSPGASRLYPKEVTLGDVRCVGCHEPSQGCSLLGKESTVLLPAKLAAPLHEGADLPHTTTVAGIAVGQQGQRQLHSEKQQMIPVPECGLGMAERTLEPGSHLEGNKAVWQPPGRTHGIEDQMCQPHLGARNH

SEQ ID NO: 928869 - protein, 244 aa, Homo sapiens
MNARTELTDPVSYNCFSSHLCYLDQPGRDLEERREPGGQAVDLRAAAAVLVRSMATGPSRQASPALPSMRSLPALDRDYWSLCREREQKGREPGASRGDEKQQETPGGRGREAMIGGENGKEGEGKRKPCFTQGVGSNVTSCCSRAPGGTPQRRRKGVAHSELSCGGTWLINSLIVLEPAGAVLSVTDQSGPRTPKPRPMANTTEVASECLLKDPKGNVGTGSETGAFMDQRISEGGNGIGVPA

SEQ ID NO: 928870 - protein, 143 aa, Homo sapiens
MDMRPGDEDADVLREESREYDQEEFRYDMDEEATVHMAFLLSWRVAFVLLERVRPFPAVYKPQVWGVTVQRATCPVAAQGHASMSPPCINAFLRGGFGTSTLEKPFNSTCSSPSWELLLLLSEIMVEPWFRVKNSSGQKYRYN

SEQ ID NO: 928871 - protein, 172 aa, Homo sapiens
MLWLTRVRTQTNEATDDPTGHVTWHSAALRIRVLSEPSGDAGYCRGNEKYMPPNYMKGKKTTQVPVTHRSWGGFNQDRELLEGLQLGGKLMALLSPCRKDPALFQSLPSHLQAQRGKQAGLSTSRAPKLRWSQNPGLPPELGSLERGAGGNAAASQVCDRVHAKACCMQPVS

SEQ ID NO: 928872 - protein, 259 aa, Homo sapiens
MVYRGCPVRLRAAAPSGPSMAPIAPSSAVCCRALAGISTCMGGSLGCSPDASWDRCAFTGLRLCTCLFTSRAGRGGGEVPRGHRTAKHVPSSTCRQQQPPSPCDRDAHPCQRARARVRGSKRCCHWPLSLGPHHPIVPMAAWEPRTARAPPPAPSHGGPWHSQVEPFMGARRGHLEKSITSNCDKDFGTVALCAHRGSFKSMKELCKGGADSTELPASQRAWTSLEIPRMQMKRTVQHRLSLSGAKIEKNFGAFPPQVA

SEQ ID NO: 928873 - protein, 143 aa, Homo sapiens
MAAVLKHTQIYLIFQGLFLKGWQSQLSPFAGECHCVHSNLGASQWEALAPPANAFAIARESVNTQLYFQPTLLSCEAFRGILPPGGFSFCIVFEGHLLGGSTLAPTSHLCSLQPDPLLTGPALPFSICWPEKPLWPQVWWREG

SEQ ID NO: 928874 - protein, 172 aa, Homo sapiens
MADSTIGAGNIQDEPGMPCKCQNKKKCSKTQEGKQAHLWGVSQGHRIQPKELPMANAGTLGATFSKVVWNCSPQYESIQNKQKWWKRQIRGGEETNVPCQIPNDVGRRPLEEVLWTPHPKRGLCTVTPFQSTRPGDREREGDLTVGKPDSQHLSQVAKVNVNRKDSFGSVCL

SEQ ID NO: 928875 - protein, 145 aa, Homo sapiens
MGGRVGAATGSIDGGEERGAKQLSSSKGREGATCPVSRRDDPGQALQPLAKQVPRQHWTWGSPLGELSLMPTALDVDQSGVMKSDLSVTQRQATWDEALGRGHSVPQWLFDRSPAPHCVALRGHFHQPLSSSTCDQVQEVPEPAS

SEQ ID NO: 928876 - protein, 160 aa, Homo sapiens
MTQWAFPFLSLAIRPSILIAWGSPGPKSDCSEVHAVGGDRAALEVAKEKQAEEASPSRLGKKFPHITYVTLATRRTIFTVEILRLLKTFARILLLKAAPFDSQLLKKLWDIFKAFYIKKRHNILLWVCVQGPGRAQLPRFCVADAVGSALTHTDVLHATG

SEQ ID NO: 928877 - protein, 176 aa, Homo sapiens
MELAGQASPVIPPGPHLHIVLFQPEPLELIETQAHAPASGAEIQLFPVPAVEPVPAPGADSPPGTALELEEAPEPSFCCPGTAQDQPSEELPDFMAPPVEPRASALELKVWLELEVVERGDQHSSSQKLPHCSQSWAQAAALLLKSLLLLLLGVFACLQEVLESKKRSLFAERGIM

SEQ ID NO: 928878 - protein, 303 aa, Homo sapiens
MLFSLYPQGLVSTLGALDSGASLSKLWRVAWHESRQIWEGTWQDSPWKLCPRVHRDLAPAVMFIHSITPCSPSLWKVQEEGLQMWGLALVAEGSKVMGIEKTGWQEQGQNGSGVLGVLLGPEEDCRGVGTRQGGGGGGECDCSFTVIRVDVEMQAESSKLAQGSVWGGGTPSRGLRVRLIHPEVPDTLVGTGRLILELLLEGPCGSRPLALCSDHRAQDTCPAFAATVLLALGAAAAGPLEEEEGWPGWDPAPVPSLLEGESLSMRCPPPCSLTVRSHLPMLSSRLSPVSYPLQNLIAVVPYA

SEQ ID NO: 928879 - protein, 149 aa, Homo sapiens
MSCSSASALSTRTLCGAQEQGVTPLGPTTSSCAPDSCPEKIVLRALLKRGAGMPEQDKDPRVQENPDDQRRVPEGTGDAQSAFRPLWDNGGLSPFVPRPGPLQRDLHAQRQGEPLMLPPPLQLGSGVTAEDLDLEKKVALWCKSALRVL

SEQ ID NO: 928880 - protein, 139 aa, Homo sapiens [sequence omitted]

SEQ ID NO: 928881 - protein, 326 aa, Homo sapiens
MAPHEDTVHNITNEDASHDITNEDAVHGIANEAAAQGIANEDAAQGIANEDAAHGIASEDAAQGIANEVAAQGIANEDAAQGIANEDAVHGIANEDAAHGIANEDAVHGIANEDSVYDIANEDAIYDIANDTVQGTLTRMLYTTSLMRTPYKASVMRTLYMTSLTRTLYKPSLTRTLYTTSLMTAPYKTSPMRALYTTLLMIPTRHANADTVHDIANEDSVYDIANEGAVYDIANDTVQGTLTRTLYTTSLMRTPYKASVMRTLYTTSLTRTPYKPSLTRTLYTTSLMTAPYKTSPMRALYTTLLMIPTRHANVDAVHDIANEDTV

SEQ ID NO: 928882 - protein, 191 aa, Homo sapiens
MSPPSPLVAPQEAAPDLHLPQGSGGWGGRRAEADPAVGKGAAQVLLTQEEKGGKEGLIQGYSTFSLEMDEMSVCSLKESSWLCPPTGRQWRPPSVKAVPLVLWFGKPASSTASGTSAPFAAEQIFTWVSFPPSLSELLSVRKRTLAVREENYELTYSFMLPSPVCFLLQKQQLIPCYSRLSKSASSGKEPH

SEQ ID NO: 928883 - protein, 166 aa, Homo sapiens
MQGGLKQHEADHGPDLHWLVLAAAADGGYKHSCAKLKPCDPESTTLKASGCAKRRAHRNLINPYLNAFKIPESRRPIPDHTGSPTPDENGHGGAACAQLVYIPLLPQNHAVPRATPLTLLEPIPFPRGLVPSVQRQTETRSAPVHLGSSANTTCRSLLERQAEDRT

SEQ ID NO: 928884 - protein, 170 aa, Homo sapiens
MERLSAEGKFFHRSCFKCEYCATTLRLSAYAYDIEDGGVCRVALVSDEPETVSIPAAASKPAMHLPLGPLVSLPLLHPSLFPQSNRRDFKRCDLDLTSVLAAAVQTEPTTLSQVERALRVHPSLCRQLPPACCTLCSSVFPSHKHDEATAPLGRGSAVSSPGAHPLVSTG

SEQ ID NO: 928885 - protein, 209 aa, Homo sapiens
MLSLPLPPNPNRPHCVMLPSLCPYVLIVQLPLMSENMAVFGFLFQWNPFPIASFCQGQGKAENSENQSASSPPKESSSSTATEQSWTENDFDELTEEGFRRSNYMTHAQASVANLIKRKKASVIEDQMNEMKREEKFREKRVKRNKQSIQETWDYVKRPNLRLIGVPESDGQNGTKLENTLQDIIQENFPNLARQAKIQIQEIQRMLQR

SEQ ID NO: 928886 - protein, 134 aa, Homo sapiens
MRAMKSGGVKGMRKDKLRSDPSAAALLEFAGGPLQTLYHRQISPVEYHQWRLQNSKDGCLFLALEASSQSSTCQMPAGALLYEVSQGSGVVLGDMLLSSEPQAERFVSLLKLRPQLPLPPGALSQADGVLSINP

SEQ ID NO: 928887 - protein, 145 aa, Homo sapiens
MPLLTYLMDIPSKVKNKLLHLAPPTTKKEAQHLVQAAVQATLLLGTYDPPDPMVLEVSVADRNAVLSLWQTPICESPWGPLGFWSKTLPSSADNCSPFERQLLACYWALMETDHLTMGQQVTMRPELPIMKWVLSDPSSHRVGHA

SEQ ID NO: 928888 - protein, 149 aa, Homo sapiens
MVLSSDSLDSRLDSLVSWFCPKQGSHNEFKLHGIGAIVYYLHCCIPVYWEYLANTIQERKQPLECSRIQLKKCRNTTGEKRRVTMQEGWLGDGTSESFETARGKEAGGKCYQLGGRATAVPMACSVEDPAALAAEDLSIPQGSSTLQLS

SEQ ID NO: 928889 - protein, 396 aa, Homo sapiens
MSQQVTMRPELPIMNWVLSDSSSHNVGHAQQHSIITWKWCISDWAQAGPGGHNGHGGRDGGYAWIQQCGLPLTKAELSVATAECPICQQQQRLTVNPLYGIIPWGDRPATQWQVDYIGPLPPWKGERFVLIGTGTYSGYGFAYLHAMLLPRLPFMDSRNALSTITVFHTALPLTKHSLYSSWIDRMVGRPFEVAITTSTRLQYFAGPGHHTPEDHVCSESAPNVWYCFSHSQDSQIQDSRGGCESGTTHYDALAKCLLSVPTTLGSALLVILAPEGRTLLPGDTIMIPLNWKLRWPLGRFGVLLPLSQQAKNGVTVLAAVIDPDYQDEVSPLLHNGSEEEYAWNIGDPLGCLLVLSCTLIKVNGKLYPIQVGLQMVQILSGSRPAEVLAEGKGNTE

SEQ ID NO: 928890 - protein, 775 aa, Homo sapiens
MLLIGDLSNFLITKKAASDSSKEQVANSRESSPSPKEVNDSPRAATKSPESQNLIDGTKKPSLKQPDSPRNISSDNSSKGTPSSPAGSTTAIPKVRIKTIKTSSGEIKRTETRVLPEVDLDSGKKPSEQMVSVMASVTSLLSSPASAAALSSPPRVPLQSAVVTNAVFPAEPTPKQVTIKPVATAFLPVSAVKTAGSQVINLKLANNTTVKATVIPAASVQSASGIIIKAANAIQEQAVMMPASSLANAKLVPKTVVSSLQNSVVETFNKVLSSVNPVPVYILNLSPPANAGITLLMHGYKCLECRDSFALEESDPALQQMEHVHRSNVQPLYKEPHCLQQMQPPFPSPNSSSSSSTLQSPVGTGIHTVTKIQSGITGTVISAPSSTPSTTAMPLDEDPSKLCRHNLKCLKCNEIFQDKRSLATHFQQAADMSGQKTCTICQMLLPNQCRESISTNLPTPALSAGPSAEKRGQQIHEWERETGKEISISFEKKSMETKKVASPGWTCWECDHLFMQRDVYISHLRKEHGKQMKKHPCRQCDKPFSSSHRLCWHNRIKHKGIRKVYACSHCPDSTGTFTKGLMLEKHVQLMHGIKDLDLKEMTDATNEEETEIKVDVKVRSPKWKLKEPVLEYRPPRGAITQPLKKLKINVFKVHKCALCCFTTENLLQHLFVVHKLKEPQPVPKQNGAGEDNQQENKPSHEDESPNGVMSDRKCKVCAKTFETKAALNTHMQTHGMAFIKSKRMSSDEKYWDARRQPPTYQCSRLCIAIGRYLKH

SEQ ID NO: 928891 - protein, 165 aa, Homo sapiens
MHTYIQNTGHMKGAVKSSTARAAGQRPGPLRQMQNSGSHVPRQPGGALSGHHVAPFPSPAHLPGVLLAVGLATVLLMGLGLLLSPSLPHACPMQAWKTQWRRLGQPQVPAEYVILRDSLLFYEDLGPWGSGEGADSKKAMSRGTGTMLVCSQPLLNNTCYFPFTR

SEQ ID NO: 928892 - protein, 169 aa, Homo sapiens
MLNLLYPCSINGFTIVDATKNIHDSPEEVKIAALMGVWKKLILTLINDFEGFKTLAEEVTTDMVKTARELVLKVEHEDIAAILTDEELLIMNEQRKWFLGMESTPGEDAVNIVERTTKDLEYATNLVDRGVAGTKPAISPRCACTPESRAGVKTWVWMVYLGSDSKKQE

SEQ ID NO: 928893 - protein, 142 aa, Homo sapiens
MVKLDLDDVLYKSILLSRKGEEHGVIGQEEKKTEERRGLSHKQAEEKAAVVCDGHGSSGVQCGVSPRGETERETEKSITSSCTAIFESDAPEPHDPVKFDVPLSQIQCWESSVICLDLAALRTGQILTPIQGLDMNRQQLGF

SEQ ID NO: 928894 - protein, 152 aa, Homo sapiens
MSQPGPSPCPTIFLTPAWSCPALAVPWPQPCLLPGLALSLPWPDPRPTESVKRPWTCLAVICPGPVLSPPCSGPTLAMLGPGPSFGPALALCYLSPALALNSPWPYPHPTLALPYPGLALPWPCLWPALALVLPWPYPCPGPSLAMFLLCLQ

SEQ ID NO: 928895 - protein, 158 aa, Homo sapiens
MEVCKHVPASRRQPDSTEKLSSSPTSPLTLASSQSPRTDFHWIRLRHIPLPEPITTSSLARPGFHEAPSGSGWGHLLQKDMGKTRKWEEGCFLLKNRDAITTRALMIEANIHESLTTCQWLPIYPGLWPFPPFLKHTTPISAQCYGLNVSPKVHVLEI

SEQ ID NO: 928896 - protein, 139 aa, Homo sapiens
MNTLLLTLISAFICIAGTSRKRRGMSTGPCQEVVGSGSKGTFYDRRSLKTPWLQDEDMKRKFQDLLSEENESTALSQVLAQGPLESSRERSIARLGVEFVETGWLAADIFMRTAGTLVHNNRPGYILILALIKIQVYSL

SEQ ID NO: 928897 - protein, 166 aa, Homo sapiens
MGGNQSRQAENSKNQSAASLPKDCSSLPAMEQSWIENDFDELTEVGFRRSVITNLSELKEDVRTHCKEAKNLEQRLDEWLTRINSIEKTLNDLTELKTMARELHDACTSFCSRFNQVEERVSVMEDQMNEMKRATPRHIIVRLTKVEMKGKILRAAREKEFHIQPN

SEQ ID NO: 928898 - protein, 164 aa, Homo sapiens
MSFVFGLQDRDAGLRGGQVGGQVGGVHHSQAVSIQASMTTGLPADPCPTEEPQALNQLPTHHPLGLHLLPRPSPPLELPLSTKGAVAHLTFQPELSGTLLPPPLPEEAAPMPVKFFQLLEPSGTPGLSMSCLGGCNGYACFSVSLHQSVNQSIDQSSINQLSTY

SEQ ID NO: 928899 - protein, 265 aa, Homo sapiens
MPLPCGAGEAGRAPSLWLAGQGTCSSSSHGGFPQSEDLDRGRCVLNPARPYSRSPKGTELTQGKVSVVYTVIYPGSWGSQALQEYAQNSHNSTMKRKGPIKQGAFEHFSREEPHTASELMPGRRAPGKREPQLSETRTRLAPTATESKHHELLGRGESDPPRRWRERVGSERCPHTDLGTDVHGNTIPSLTDGTRNQPSTAGGRDKTGFTRQHRFVQPNSETRCPAGKPRKHAQPVTETCRHNSVPRGCRGGARQGSGPVERCHG

SEQ ID NO: 928900 - protein, 155 aa, Homo sapiens
MPVIKLEEAATDFIFHRHPSHLCSRSVWPQPPWPCGNPAAPCGSGPGGLRWPCLQEPGLSRHSRAETTNEQLPWLPQSPPQGPWLLTLQTQLFPGALLLPRPPPRLHSSLRCAHRGQLNATKNNAKFWRAGREVRVDLGAGLQQEGWAHPPLAAH

SEQ ID NO: 928901 - protein, 122 aa, Homo sapiens
MAPDGPHLQASPASAPALQRDLQLMQSSRHGSRDFCGSHPGSQSSDTPAAVRELPTWRGAAIGTQRGSPTTDEKQNPSDGHMGVPGRGTFPSRAKRTVACEVSEQRASSATLGFLTPEAMSH

SEQ ID NO: 928902 - protein, 149 aa, Homo sapiens
MMNSYTALNALLRCPSTSLEGLDPSSLWMPSSSSDTLSCPTLRLVLWKPANVQLVLEKGPCHPEAPEPRPPYSGCRPFPHLWQPRHPWAQQEQPQCPGMKHLLCFRPSWSPSSLTNSDLLGQSCFYPHLVGGKTGSEGPGPQVSQLPGA

SEQ ID NO: 928903 - protein, 280 aa, Homo sapiens
MPYSLVLTWWKGLLPDSAGCRVPWKPAHPAGVTQCPVCIQTLALSSWGWARKGEQVAGGGWAAGSQSCRRCWDQDATLATLGVVCSTGAAGGGGRVLHGQVLLTGYGGVLGRQEGANADTQEPQEEEEEEEQSTGYPDGLGQTEGTAVASNQPPEPCCLGPQSAQPDLQSRFDQLPDLPIVSCNVNLFKRAPEAIFKLGGWSPMLMEPAPSSQLCLLPPQPWFWEPVAPTLQAGQQQDYFLSLGEAGLCQLRSVPTAAPTREPQEGGEGPNPEREWISIC

SEQ ID NO: 928904 - protein, 148 aa, Homo sapiens
MALLVVVLVVVVVVMMEVMVVGHGGDDCSHGDDSDCHGDGPRPQPWTPKPCRCSLGCSGQFIVSLGVRSLFSAMESRVGLSTEGAESHWLRPGFVEGAAQPQASGSLGWHPVETWEPSRLSQEGVHRGEWTVRLEQVWVRELFLLLRT

SEQ ID NO: 928905 - protein, 246 aa, Homo sapiens
MLLRPGLALLPSFNDIGQGWRLRHFVSWLWYEREVTLLERWIQDLCTRVVLRIGSAHFYAIVWVNGVDTVEHEGGYLPFEADISSLFQVEPLPSHLCITIAINNTLTPQPCHQGPSVHDRHLQVGTILPPLHAPTFPPHPVVFLPGTGWPSQRGGPGSGEACELRSKDPWQGPSEPQFSRPRYPKGYFVQNTDFDFFSYAGLLWSLLLYTTPPTYIDDVTVTTGVKRDSGEGFCCEPPHMAGIPCL

SEQ ID NO: 928906 - protein, 157 aa, Homo sapiens
MFIKVMFGAGCSVLVNTSCRLVNLTAHLRQKAGLPPDATIALLAEDGNLVSLEEDLKEGASRAQTMGNSLLKERAIYVLVRIISKRERTWPPPAMSPYWRTWMTITQSWQRNCAGCQASPLWATTGGSVWALGEAAMSKAPLQGPERALIKGMDCTL

SEQ ID NO: 928907 - protein, 148 aa, Homo sapiens
MWMSASFTRGVPEALEAGPSVGDIPGIPSPGGDFPSPRGMNGLTAPGSRPRSASSPQAFRDFPDAAQTGSGREGATEPGLCGTQHQRLPPTREGSVVAVTQRRPAPRRRWELSCPTAALDHSPVHFHSLLALQASLAVPDHRPMKAPG

SEQ ID NO: 928908 - protein, 178 aa, Homo sapiens
MAPYPSRDEAQFIPLHALSPCTSCLWATCPQGLQSRMRCWEAPKGRRRGPEQVQWFKRAQLPFSGPLGNFSSSGKPHPSQVHRVWPLIEPLVNFLNVFSTNVYTTCIPFGLDHCDFPMVDCCSSREESVSSPRQQSRRLKSQGLVDLCPVNLNDKVQPRQQAHELPLEPPKSSPKISA

SEQ ID NO: 928909 - protein, 207 aa, Homo sapiens
MKLRTFAPPPDSGVQLASPRGSHTRATRAELPASPVRVHAPLSPWAVDGTGHRRAGGVACRGSLGREGAHSAGEHALGMVGCRSRALPCGEVAEAWQEFECAGLGAKPLTATLSVGPTEPTPTQNACWPVSTASSSGSRPRLSLHTSPQAEGVSSSLGQPREGLTQCSSGLKGSSSVVRVGAKAKEVPRVSEGCQHAVISQCDRFLN

SEQ ID NO: 928910 - protein, 129 aa, Homo sapiens
MKGGVLTARSPLVLLHAVGAKPGGGVVWKSFRNRKSVLLSSVPIGVIRTNTRSWGATKSRGDKGMRKRQFERQSGTRGRHEGGGCEGLELWESTLFIGVQTNKQVEASYCDQPNDQEGQRNGYRNRDGQ

SEQ ID NO: 928911 - protein, 136 aa, Homo sapiens
MNRCMYDRKLPEAREEESESNRPNNWSRSIAILDKHRHSKVPLDQKPPKSKGLQPNGSMVTLQTRSFVVSVFVKTSSLAATGGNRPGSQALGDPGSVPEPLAGVIEVPAGKPCPGSFCDTTVELNSCDRNYMVCKT

SEQ ID NO: 928912 - protein, 138 aa, Homo sapiens
MVELVCLIHNHADFELQFPVTANTFIHNTLSRRQEHPLKTADLNLQVQKCYSDKDGGLDKKMTHMLPDLAHQNLTEPTVFQCVAAYAPAPPDSFLTWCTTLQLKIPAACNLSLANELCQGLALNVYPVQSLLQNLLMN

SEQ ID NO: 928913 - protein, 184 aa, Homo sapiens
MKAAGREAVPCRATGAELPKTMGTHLLHQRDPDARYRVKGDHFGPFRFDCPAGFWTCMGTLAPFSVKNDGGILMGIGKTVWRFPKELKEGLPFDSGVPLLCIYPEEKKSLHEKDTCTCMFIAAQFAIAKMQNQPKCPSINGWIKKLWYIYMMEYYSVIKMNELMAFLATWMGLEIIILSEGTQD

SEQ ID NO: 928914 - protein, 144 aa, Homo sapiens [sequence omitted]

SEQ ID NO: 928915 - protein, 140 aa, Homo sapiens
MRKNQQQKNAENPKGQSASSSPSDSNISSSRVQNWMEDQMDELTEVGFRRWVIKNSAELKEHVLTQCKEDKNLDKSLEELLTRMTNSERNTRDLMELKNTAQELCEVYTSINSQIDKTGQHANSRNAENTIKIRHKKINS

SEQ ID NO: 928916 - protein, 237 aa, Homo sapiens
MWTRTGCFVRSEEDSMEEFTESEGLDIIILHGSEQHAWTFSICKGTMQQRLTVESAVHIKTRQCLRCANGDYGIAMADVRLLAESARHDGNTIGHKSTEVLALTWMLPLKLVVANAVAALSEIAESHPSNNLLHLNPQFINKLLTALIECTEWGQIFILDCLTNYTPKDDREAQSYGHTHGLAWELTEAQGTSVEFREIFELKAELNSDKKEKEEEAVKKVIASMTVGKDVRCAGGV

SEQ ID NO: 928917 - protein, 167 aa, Homo sapiens
MVWLCPNPNLILNSHMLWETRCRRDLLNGFDQNAKNDMDNEIQVEVVSDGDEELLGNWSKGGPCYVLIKRLESFCPCPRDLWNFELERDDLGYLAEKTSKQQSIKEMTWVLLKAFSFKRETEHKSLENLQLDNAIEKKISFSEEKFKPVAEICVSKEELNVNHQDSD

SEQ ID NO: 928918 - protein, 143 aa, Homo sapiens
MQKAIVPARHTHVKDSETVKRRHRGRNAEEGGQRDQETTENRMTNASAVIQTEEESWLCKKQMIRCSLWTRGKSGAPGTPKWDQNRNLSRKTSVTRTEVETEAIRGVEALRDSTCGWFSTSKSLRASMMVNSLVKPGVPFPNL

SEQ ID NO: 928919 - protein, 143 aa, Homo sapiens
MVGGKTKPKTPMSSRDPAAGHRMSLVPLSVGVLAWKCSGGEWGKSSLKPWDSIWVGWFPDTMKVRAILCQPCCWGWDVGLLSVAAATGRWLSGSCTWVSFVMELASLVHCIAHSLGCRTLVWARVLETRSNRWSSRHHAAVAL

SEQ ID NO: 928920 - protein, 137 aa, Homo sapiens
MYIKQIYMYIKQIFTEHVLDPWPSAKHSSDADPSSRSPESTQRAPFPSWRPTSQSKQKVTRNAAGTQHPVSQSLKKGQSAGPPLMPVLLDTKDWKHQCVSGVQHGASSENCCQGVFMDVPTGLSLLSALLQLLPAIK

SEQ ID NO: 928921 - protein, 171 aa, Homo sapiens
MGYVKVVANIVHPMGFSDRGHKLQYSSFCSCNTTPAAIWRFLLIAILGHSMFISHMDAIPHNTHICTALKQLKFKTKVVHTRDGTGESFTREMEMELSIIKGFLEDNGLEGHWEGGDIKEKMTSCGEDVEKSKPSYVAGGNVKWGSHFGNYFGSSSESSAGSYYVIQQFHS

SEQ ID NO: 928922 - protein, 138 aa, Homo sapiens
MLDTEESSWALLLPSYSLSTHLMCSHTIFQGTLRTSPSFHIYGNHACQLRSRLAFWDSLLTALLKSIFAPIRSILHQPEARKRIFLESRKLGKVPGGKVHKCGRPCKNVAPRSFSLTAVYTQAPAICQNSHLSLPTSL

SEQ ID NO: 928923 - protein, 143 aa, Homo sapiens
MRNKSITYVIQCVVFCSSSLSRLRQAAKANWIVGSMRLTSNINLKSFRTANEKINRVNRKPAEWEKIFANYVTSRGLILGIYKEFRQLNNNNKINLIKKIHVLNVQVCYIGIHVPWWFAAPINLSSTLGICPNAIPPLAPHPL

SEQ ID NO: 928924 - protein, 154 aa, Homo sapiens
MSSTEMAKECNGLRHKTPIPGKALPYSQKDAMHGQQSQGESRQTGLSGSDSSKLTFHNHHPAQQTENPVFTRFCLSQTAKCGFRSPKMASTQAAVEVQRKSVQKWVQGGFGLEVKKVDSYTVCKKKLGIEKVPDWLPSACPPLSMAPAMSPCAK

SEQ ID NO: 928925 - protein, 141 aa, Homo sapiens
MFLDDLAPEFSFAAAHSKAEAAAEPRGRIWEDLQRGVTGKVDLGEEVDENIPEEVALGISGFETKDEGSYKQECNMHDKEWPSQLQLEVGIQDARAQEGSGGTIGALSASLFLEPVAFRTALRLLKLLGTIDKILNMEIGN

SEQ ID NO: 928926 - protein, 153 aa, Homo sapiens
MAFTVHISIGFWSRALNHSLTSFKHSFVFLSSSEPSKFFQLLLITQFQSHFHIFSHTQVTGIASRQPFKRERLDQNIDFRSFVFLSSSSVDVGHEFLRYRCLLEAMRQLEDAESHENAETQSRHPCIFYSTPATTYCRFLALQGKLTFQCVYS

SEQ ID NO: 928927 - protein, 321 aa, Homo sapiens
MCILIKAVPSTKRPKSSGNSKPSPALTASRQLVRKECDLGALGPVAAVQSEDSFVEGSAEGTAGPEPLDLRLVEGVVQEVDFLGCLTMYFRGLPASSPSGSEWSACPQGESCCQLGKGPNSWVTASCTELALPFSMLMAPLSKLLEMVSKCPRNLSQGPAAEMWSVVPHAGVLVGVLPWAKLCLGKLICIRSLQLELLAILACQVVGLWVELEGSHNGQGCDSLWGCDEGMGLGVRVIVAHEVPVVGGDNYVLLLLVDVLSVQLTNAGATSIGQDDATHIPQGLCIAILLNGGTDLLGAWSNSELGLALEAMGQCLLGHTC

SEQ ID NO: 928928 - protein, 155 aa, Homo sapiens
MDMRSDTRVKAMPVKLNKMKTSYPQLYEPISSAQQSHVGSSYYMGQCRYKTFPSSQKVLSDSITLELLQGVKEIREEKEFLRSIASHYKSDFLYPSKRDADKKLFFSVIKILLTVDLYCFLYGTSHVSVRQQKDGALPSCMSNRLPSPGLQCTEV

SEQ ID NO: 928929 - protein, 163 aa, Homo sapiens
MKLFLKCDFVQGLGHWEHWDLYSLEQCLLTLLVTTYGNLPPDSRSVCLPPLVHQRMSAVSVSALPRLLNEPPQLGDLDGPCLFTGCKAKQDAGCVDEEPPETLPHDLGLYSDSHGSVFPWVLDKAVVSLHLTATDHSEIKASACPPCLEWRRREGFSGSPNVS

SEQ ID NO: 928930 - protein, 147 aa, Homo sapiens
MEVLTSSLIKSSLCPNGRTYPSLRPLDQSCKDEKQKYHWWIASCPGSQPATTLPKSQPFLGNGHWPRAPTESLMIQTGNLGFEQSYLLLPERRGQIASSRGTADKRHRLTWAALARQPSYEITAHWHQPKPLSSPGLMTRGWFPVGN

SEQ ID NO: 928931 - protein, 149 aa, Homo sapiens
MSLEFNVILLVYFCFCCPSFLCHIQKFIAKTNIQKLFSYGFSRRFMVSGPMFKYLINFEGFLYGMRARVFMGKPGAWIYEGRPTTSLERQQQQKEEEKEEEEEEEEEEEEMEEEEMEEEEEEEGEEEEEEEEEEEEEEEEEKEEGEKEK

SEQ ID NO: 928932 - protein, 167 aa, Homo sapiens
MGYHCRNVKHCLFSAKSKLHPFFPEPEQYSPHWPWHIQFASFPFDSNTVRFYKCQPHDGASLLRALYWSSLSIFLTITYRALLLSLSTVALAVLTPATLAFRSMLLPASGPSSRTLPSSWNSYSTSALNSPYFLRKAFSALPEQGWAVIESWQQAHISLPLIFSRIS

SEQ ID NO: 928933 - protein, 155 aa, Homo sapiens
MTNVSSNNPTISPFTTKSSFSLISPTLGSHAAPNPARSSPEKHRPLSLHTTPKNLRHPNTLLLFHFIFLNIRRQECQASEPKLSHHIPCDLHVHIQMAARLHPGEINSHVAQTKPIWWSLHTDVHESNNTRSRDFKISRVFRVFGGAVERHTSQT

SEQ ID NO: 928934 - protein, 390 aa, Homo sapiens
MCELLYQPLPKERPKGYLWRSGENTCVNTHGDTSEKTHENTSVNTNENTCGDACENAFGNAYGNACRNTFGKTYGNTSGNTCRNACGNICEKACGDTSENTCGDTCGKACRSTFGNTYGNTYGNICRNTCGNIKNTCVNTSKNTCGNTCGDTCGKAYRNTFGNTYRNTYGNICGNAYGNAENTCVNTSKNTCGNTCADTCGKACRNTFGNTYGNTYGNICKNTCGNIGGNACENTCAITKNACENARVITSENTYENACGDTSENTCENACGDTCGKAYRNTFGNTYGNTYGNICRNTCGNTCGNASENTCVNTKNACENARGITREYTYENACGDTSENTCENACENPCGDTCENTMGMPVAIPMGCLWKAVFLEKMAMDLLPHKKKMS

SEQ ID NO: 928935 - protein, 245 aa, Homo sapiens
MCAEVGPALCRGMERNSLGCCEAPKKLSLSFSIEAILKRPARRSDMDRPEGPGEEGPGEAAASGSGLEKPPKDQPQEGRKSKRRVRTTFTTEQLHELEKIFHFTHYPDVHIRSQLAARINLPEARVQIWFQNQRAKWRKQEKIGNLGAPQQLSEASVALPTNLDVAGPTWTSTALRRLAPPTSCCPSAQDQLASAWFPAWITLLPAHPWETQPVPGLPIHQTCIPVLCILPPPHPKWGSICATST

SEQ ID NO: 928936 - protein, 195 aa, Homo sapiens
MTGLLLGNPNDAIALIFANDFLEVGLGGSQGRTAGNEKTQRSPHISNTPLSTDGIGEVLTEELTLAELNFRGGTGRWHERSCWKTFPVPRDWGSLTIMVEGKEEQVPSYMDGSSRQREHEEDAKVETPDKTIRSPETYSLPREEYGGNCPMIQLSPTGSLPQHMGIMGVQFKMRFGWGHSQTISLTKMAISYDLI

SEQ ID NO: 928937 - protein, 161 aa, Homo sapiens
MCSLPQMCSLPRMCPLPRMCPLPRMCSLPRMCSLPRMCPLPRMCSLPRMCPLPRMCSLPRMCSLPRMCPLPRMCSLPRMCPLPRMCSLPRMCPLPRMCSLPRMCSLPRMCPLPRMCPLPRMCPLPQMCPLPRMCSLPRMCSLPRMCSLPQRCSLSQVCSLS

SEQ ID NO: 928938 - protein, 149 aa, Homo sapiens
MLTMHQANGDTAANRTKSLTSRCLHFSTERQTPNKLPGEHIVQGLVDQNKDLELATGWEAKEVCTKARHNPIEQAVERTNFGDGELTCQLGVGGGGEVLAHFGLSQSNTQGKQPWEHSAVKQVNRGASVHCHPQGLLPGTGGRRQAATG

SEQ ID NO: 928939 - protein, 205 aa, Homo sapiens
MLKGACLLISRRQLRTMCINMVHHKMHIILLSPDVDILPHGQALKGACPKPPNCKQPIDCFVVTPILSIWCQYPFAPSALTITGDGLKETHPQDCWIPSRLTPIPGTHNDPECHCDCSRRPTDDDYFSDRRRWKPLVLHTCLNILIRVNSKFMEELERLLPSSRFKGSRSSDSCDSPVHLFNAASRQQGNNCLSSNSRTKQEAHQ

SEQ ID NO: 928940 - protein, 145 aa, Homo sapiens
MVNLQGLGLNRGIPGRQAAPQEPEWSEGSEERHEEGGRWEGCERGTGGRGKVSQPRAELSQQEFAAQPGLGASLQLRAFGTAWPPPPVPTLALPFGTPEVLALGFHLPLLCDPATGKRPQVSFCSSAAYGVHSDPPKRQLCCRGW

SEQ ID NO: 928941 - protein, 358 aa, Homo sapiens
MPSDKTIGGGDDSFNMFFSEIGAGKHVPRAVFVDLEPTVVDRSSGTGWQLSWESGRALVKPHVRSCEVHTGTYRQLFHPEQLISGKEDAANNYSRGHYTIGKETLSWTGSTNCFGGGTVSGFMSLLMERLSVDYGKKSKLEFAICPAPHVSMAVMEPCNSILTTYTTLEHSDCAFMVDMSVQPGHRKAYHEQLSVAEIASAHFEPANQMVKCDPHHGKYIACCMLYRGDVVPKDVSGAIATIKSKRTIYFTDRFLALLWQVGINYQPLTVVPGGNLTKLQWAMWMLSNITAITKAWACLDHKFDLMYAKQAFVQWYMGEGMEEGESSEARKDLAALEKDYEEVGMDSVEAEAEEGKEY

SEQ ID NO: 928942 - protein, 137 aa, Homo sapiens
MYNIVYDITDVLDGIDLVEKKSKNHIRWIGSDLSNFGAVPQQKKLQEELADLPAMEDALDELIKDCAQQLFELTDDKENERLAYVTYQDIHSIQAFHEQIVIAVKAPAETRLDVPAPREDSITVHIRSTNGPIDVYL

SEQ ID NO: 928943 - protein, 547 aa, Homo sapiens
MGNLCGCIQGDSKKPSKKHVKRKPYSTTKVTSGSTFNENTRRYAVHTNQCRRPHGSRVKKKRYPQEDDFHHTVFSNLERLDKLQPTLEASEESLVHKDRGDGERPVNARVVQVAPLRLESTPHEDTVHDITNEDATHDIANEDTVHDIANEAADKGIANEDAAHGIANEYAAHGIASEDAAHGIASEDAAQGIASEDAAQGIANEDTIQGIAKEYAVHGIANEDAAQGIANEDAAQGIANEDAAQGIAKEDAAQGIANEGAAQGIAKEDAAQGIANEAADKGIANEDAAHGIANEDAAHGIASEDAAHGIASEDAAHGIASEDAAQGIANEDAIQGIAKEYAVHGIANEDAAQGIANEDAAQGIANEDAAQGIAKEDAAQGIAKEDAAQGIANEGAAQGIAKEDAAHGIANEDAAQGIANEDAAHGIASEDAAHGIASEDAVQGIDKEDAAQGIANEDAAQGIANEDAAQGIAKEDAAHGIANELYTTSLTRTPYKPSLTSTLYTTSLMRALYKTSPMRALYTTLLMAPTRHANVDAVHDIANEDSV

SEQ ID NO: 928944 - protein, 137 aa, Homo sapiens
MQTGHEPVLVHGLGVGDHWPTVFSTVTCCTENLQSPQAHKIQPSQYFSSMPAALPNKRILNFLQKHLLGFLWDTVRNCRHRSIIITAATTGDGYRHQKRKSTSPLLRQCDFQSAPLVARCDTPLNNGKKWKHQEIDP

SEQ ID NO: 928945 - protein, 796 aa, Homo sapiens
MHKELPALAACGLVADFDPVGEEETADFGPLVLDSDSDDSVDRDIEEAIQEYLKRGPAMHSLPGLQAEAVDVSGNWLTAVPNCPVFPKTCTWLRWCGPGSQVGSSKDQGSASPVSMSRADSFEQSIRAEIEQFLNEKRQHETQKCDGSVEKKPDTHENSAKSLSKSHQEPATKVVHRQGLMGVQKEFAFCRPPPVSKDKRAAQKPQVQGHDHDHAGEGGQHKASNPHRPSEAVQNKSGIKRNASTARRGKRVTSAVQAPEASDSSSDDGIEEAIQLYQVQKTHKEADGDPPQRVQLQEERAPAPPAHSTSSATKSALPETHRKTPSKKKPVPTKTTDPGPGDLDADHSPKIPKETKAPPPTSPASRSKFVEWSSCQADTSAELIPLFYSPNVPSRSDGDSSSVDSDDSIEQEIWTFLALKVQSRSLLARGESCPQAAQGPLSPPGLSSQTGSPKAPLSKTLDPLLAAKGSIEAAAKAQPARPRDGRAPLGWDLSIQGTASEAPGGEGAARVPGDTRTSQGQGPGHSHQGLVKVQVKAQEEVQGAQGCVQEEGQVQHLPDALPGAAGQAPERVEKQAPAGAEELPKSKRDSCEGSRKKPPSVFGSRAERTKPRPSCLGSLSDNSSSVDSDDSIELEIRKFLVEKAKESGSEGPTRGLPSLPLAGFSPLLSTQLFHFGKGVSWGGRETGLFSPYLGLPLQGLSFSAFRESQARPSPVFGSPHLLAKKDCGHRPSRKDQDTLGRDTSDFSNTSAEVLLLQWRQLSSEGIRPRAVGSRPGFHAFVESGIADVTGSPSQNN

SEQ ID NO: 928946 - protein, 159 aa, Homo sapiens
MAPDISGNLSNTEWLMWNGADAVPTLSENSPSGQRDVSLDKRSDGIFTNTVTENLLETPLEKQSAAEGLKTLTILPACWSSKEEFISPDLRVSKSDSTFHNQASVETLCLSPSFKIFDRVKEIVINKAYQKPAQSSIQMDDKILKTTTRVGKVPLLLKG

SEQ ID NO: 928947 - protein, 136 aa, Homo sapiens
MRECTDASYDGQGKIIPRPLGGVSGPWRSLVLGHAGLFSGPLVLYSGTGCSGVISRLPAVECSGGYSSGGSGWWEPVPNSIPPLLLMFLLSSELSLNLPTRLPLPTCHCPCLSFSDLSHHHPLVCYVLATTASLQF

SEQ ID NO: 928948 - protein, 146 aa, Homo sapiens
MKSSCLLQGTVIWYPQFWLLRQVKNFVKNYSDAEIKVREATSNDPWGPSSSLMLDISDLTFNTISLSEIMNMLWHRLNDHGKNWRHVYKSLTLMDYLIKNGSKKVIQHCREGFCNLQTLKDFQHIDEAGKDQAIALNMGVCRVFLS

SEQ ID NO: 928949 - protein, 136 aa, Homo sapiens
MVSFNVRFMFYISPQSYTNGRRQVKNFVKNYSDAEIKVREATSNDPWGPSSSLMLDISDLTFNTISLSEIMNMLWHRLNDHGKNWRHVYKSLTLMDYLIKNGSKKVIQHCREGFCNLQTLKDFQHIDEAGKDQGQF

SEQ ID NO: 928950 - protein, 292 aa, Homo sapiens
MGKLVLEEVAGVQLTMDDDIAALVVDNSSGMCKAGFAGDDVPWAIFPSIVGCTRHQLHVAPEEHPVLLTEAPLNPKANCEKMTQIMFETFNTPAMYVAIQAMLSLYASVRTAHVQGLHTTAEREIVRDIKKLCYVALDFEREMAMVASSSSLEKSYKLLDGQVITIGNERFHCPEALFQPSFLGMESCGIHKTTFNYIMKCDVDICKDLYTNTVLSGGTTMYPGITNRMQKKITALAPSMMKIKIIAPPERKYSVWISGSILASLSTFQQMWISKQKYDQSGPSIVHATKPS

SEQ ID NO: 928951 - protein, 776 aa, Homo sapiens
MPQWVMPRALERKASWRRCQGSDEEKYGKGDRRKECSGEEAALAKAGSLPGSAPLSPRCPQLTQRLDLQGNLLKVIPAAAFQGVPHLTHLDLRHCEVELVAEGAFRGLGRLLLLNLASNHLRELPQEALDGLGSLRRLELEGNALEELRPGTFGALGALATLNLAHNALVYLPAMAFQGLLRVRWLRLSHNALSVLAPEALAGLPALRRLSLHHNELQALPGPVLSQARGLARLELGHNPLTYAGEEDGLALPGLRELLLDGGALQALGPRAFAHCPRLHTLDLRGNQLDTLPPLQGPGQLRRLRLQGNPLWCGCQARPLLEWLARARVRSDGACQGPRRLRGEALDALRPWDLRCPGDAAQEEEELEERAVAGPRAPPRGPPRGPGEERAVAPCPRACVCVPESRHSSCEGCGLQAVPRGFPSDTQLLDLRRNHFPSVPRAAFPGLGHLVSLHLQHCGIAELEAGALAGLGRLIYLYLSDNQLAGLSAAALEGAPRLGYLYLERNRFLQVPGAALRALPSLFSLHLQDNAVDRLAPGDLGRTRALRWVYLSGNRITEVSLGALGPARELEKLHLDRNQLREVPTGALEGLPALLELQLSGNPLRALRDGAFQPVGRSLQHLFLNSSGLEQELTLGPGNSLQICPGAFSGLGPGLQSLHLQKNQLRALPALPSLSQLELIDLSSNPFHCDCQLLPLHRWLTGLNLRVGATCATPPNARGQRVKAAAAVFEDCPGWAARKAKRTPASRPSARRTPIKGRQCGADKVGHGAGGTRNYR

SEQ ID NO: 928952 - protein, 242 aa, Homo sapiens
MRLASGAPGLLVRSEQAGFGSWEPLAKSLEDRARGHSEGGDSVLIFGRGQSVTHTGLPIMASLANTAISFSCRITYPYTPQFKVFTVSYFHEDLQGQRSPKKPTNCHPGLGTENQSHTLDCQVTLVLPGASATGTYYCSVHWPHSTVRGSGTFILVRDAGYREPPQSPQKLLLFGFTGLLSVLSVVGTALLLWNKVRDQCSQPCSPSTRHATGCPPALCRAFGGPWLLLHPPGTFGAKPGGS

SEQ ID NO: 928953 - protein, 132 aa, Homo sapiens
MFSSARWQAQYLTGSFSILTLLPPSTLKSHMAKIHDVPNGSYRQCHYCRNGDWFFEMFFTLLHSDNLLTPPGSMTTHDSTSPCPPPRGGLRAQGLFPPTSECIPNQSAAPIPYYTLLTPLHSHPPTANQIIH

SEQ ID NO: 928954 - protein, 223 aa, Homo sapiens
MSRIISLPILRNQEFGPNEGPGSHDVGSKTRVGLTPTAFDPNRSKHLSPRGAGSPLRPRAFPSQAQPKATALVIGSRAGPQIREGPSVPRNTAQPLWEVSQSDVTATWYPDGLPLDLQRVCVFRPEREGQQTQGDQSESRSGILLPCTQLIGSRRTNQNPELGFCKQNAEENFVFPVPRRASLSRTEMRSGQEESSGGIGALGLGSSCLSEYSVWNLGNSTSQ

SEQ ID NO: 928955 - protein, 193 aa, Homo sapiens
MELAGALPLLSCKSVTSAATQVVAADLSLPVLLRGKQGAKNFIASGSSGKTCIHTAGEGTWLTISTFHIVFIASHLHLAVIDLVHAKPIKKPAGQQQASTICSSIICRANLHTVFWQFVCICRADYHIPLYTGISNLTNDISVINNICQRGGPASSANLKDLENHELEEQLAELQSGFKELVLSPTWGASPSP

SEQ ID NO: 928956 - protein, 155 aa, Homo sapiens
MSVRVARVAWVRGLGASYRRGASSFPVPPPGAQGVAELLRDATGAEEEAPWAATERRMPGQCSVLLFPGQGSQVVGMGRGLLNYPRVRELYAAARRVLGYDLLELSLHGPQETLDRTVHCQPAIFVASLAAVEKLHHLQPSGHGKGIQSPGLASV

SEQ ID NO: 928957 - protein, 168 aa, Homo sapiens
MAQSQIQLYIKRGCGPVPSSLNHAGSGHTSLLSSKQLVLRLFQEASHLCALAQCPGAWCPWQLRGSVAQSRCLVFTEDAGHGLKPPKRFGSHDFLPSSGAGDVDECQDNNGGCQQICVNAMGSYECQCHSGFFLSDNQHTCIHRSNAGPCVNPAPPLPRWKPSHGRLY

SEQ ID NO: 928958 - protein, 187 aa, Homo sapiens
MGGVGSIPGGSVDVDECSEGTDDCHIDAICQNTPKSYKCLCKPGYKGEGKQCEEASGLPSIITLLTLGHNYLSWSPTELWQSLHHDPVIIIICIITIIIIIIITIIIITIIIIIFITIIITTIITIIIIITTNITITIITITIITTIIIIIITIIITIIIIITIIITITITIIITIIIIIIIITCSH

SEQ ID NO: 928959 - protein, 153 aa, Homo sapiens
MGCLNCYLGFQLGLLPKSLFWGECLPAASEHSSNTLTTNDDDNGRTWVLRAYYVPGLGYSTFLNSYCFLLTQVYKGGGFCHDGHFTDGETEAQKKGPLGQVHIGAYSRVRDGLNSRVWALDHYPAAGWLWELGPPKTGQGRRLQGSGVLASFF

SEQ ID NO: 928960 - protein, 134 aa, Homo sapiens [sequence omitted]

SEQ ID NO: 928961 - protein, 211 aa, Homo sapiens
MVGLVLLGLGLALAVIVLAVVLSRHQAPFDPRPLPTPLLLLTPRSARILDISVASYELTQPSSVSVSPGQTARITCSGDVLAKKYARWFQQKPGQAPVLVIYKDSERPSGIPERFSGSSSGTTVTLTISGAQVEDEADYYCYSAADNNLTVTQADGEMRHKPLAICVTFFLQPQEDCGQSHEQVWPSTPRSETLRPPSFQISTEALQKVDQ

SEQ ID NO: 928962 - protein, 210 aa, Homo sapiens
MVQVPAIAGPENRTEGWKMCSLSPVHKTVPCVHATALTPDLSMLSDRTITRNLAGVTRDHPSSGAHMLCRDHDPGTLGPWDPGTLEPCCPQALLQALLQSYSPQIPSSEASYELTQPPSVSVSPGQTARITCSGDALPKQYAYWYQQKPGQAPVLVIYKDSERPSGIPERFSGSSSGTTVTLTISGVQAEDEADYYCQSADSSDHAHDLV

SEQ ID NO: 928963 - protein, 175 aa, Homo sapiens
MAWALLLLTLLTQGTGSWAQSALTQPPSVSGSPGQSVTISCTGTSSDVGSYNRVSWYQQPPGTAPKLMIYEVSNRPSGVPDRFSGSKSGNTASLTISGLQAEDEADYYCSLYTSSSTFHRGPSSWGTETKTCPGLSGPLLALKMLPRPVQAASCSFVASRKLTPEPAVSVDSQQG

SEQ ID NO: 928964 - protein, 133 aa, Homo sapiens
MAWIPLLLPLLTLCTGSEASYELTQPPSVSVSLGQMARITCSGEALPKKYAYWYQQKPGQFPVLVIYKDSERPSGIPERFSGSSSGTIVTLTISGVQAEDEADYYCLSADSSETAALSLGGPETDNHDHMLWR

SEQ ID NO: 928965 - protein, 140 aa, Homo sapiens
MHPQGELQDGHCPQGSWAQSALTQPRSVSGSPGQSVTISCTGTSSDVGGYNYVSWYQQHPGKAPKLMIYDVSKRPSGVPDRFSGSKSGNTASLTISGLQAEDEADYYCCSYAGSYTFHSGPSSWGTETKTHPGLSGSLLL

SEQ ID NO: 928966 - protein, 195 aa, Homo sapiens
MSTSPQGHSFQFFCAFSIIHDILFTGLCALPVLTQPPSASALLGASIKLTCTLSSEHSTYTIEWYQQRPGRSPQYIMKVKSDGSHSKGDGIPDRFMGSSSGADRYLTFSNLQSDDEAEYHCGESHTIDGQLIIAMSVNFKNILDVINNRLDYVKQKISKLDHVALENIQNAAHKEKTMTKMKKHYRIFIKKMKYV

SEQ ID NO: 928967 - protein, 146 aa, Homo sapiens
MVGGKTKSTVLQEPGFLGILLVTGCHLSPSLCGGGHQDSDLLPLIHSAGPLKATPLVTLFPPSSEELQANKAMLKENGTLVTKGIETTTPSTQSNNNYAASSYLSLTPEQWKSHRSYSCQGPGAAGSQGRGVPSHPKSSSPSADTQ

SEQ ID NO: 928968 - protein, 166 aa, Homo sapiens
MSTREVCTVILLLLARCSVWHPQSLHRYWISLNVPDYKVQVEETPALELRLAAETSHCLFPFSTGHLVCDLGDAHKGPPGFVFMAGGVTCSHSSFTGCTSVAIVIVPSHYPERCYISFQISLVEMIGPEIGPRWGDPYTRGLGPGSCCISPEFCQEDWYSYVDIKF

SEQ ID NO: 928969 - protein, 157 aa, Homo sapiens
MTLTAKVCSQRDHEPSRRNNNCRRATLRAVTLTAKVCSFTPEPARPRTHQKEETPNTSEHQKEQPADTPLLRTVTLAARVHGFILEVSETKNPPIPDTSDIRAETALVVTCLDDATRPAQNLLLAERSDWRFQHLFILVPAHSRLHAVSCEEWPTPG

SEQ ID NO: 928970 - protein, 116 aa, Homo sapiens
MTLTLNVIMTALRIGPECRGQSTEEVFADITRGFCRSWLFSRQIHRAYPNVVCVCEPNKYPGCSLQIHRAYPNVMCVCAPNKYHLLNLEKSLQNFPVISLKNLEGLKYTVIFSSSY

SEQ ID NO: 928971 - protein, 164 aa, Homo sapiens
MMSMTQNPGAPPALSAYDVACCHSTRRYNSVRTQQVGPHQTPDAGALIRVRTQQEGPHQTPDAGALIRVRAQQEGPHQTPDSGALIHVRAQQEGPHQTPDAGALIRVRAQQEGPHQTPDASALILDFPASRLVHTYSGILFSPKKEGNSDPCYNMGEPRGHDAP

SEQ ID NO: 928972 - protein, 285 aa, Homo sapiens
MAVDALLKREVSRMVEWRVSPFPQRLSLHLDIDYLPDRCTWLSKRRLQLGVAKQNINVRTQQVGPHQTPDAGALIRVRTQQEGPHQTPDAGALIRVRAQQEGPHQTPDSGALIHVRAQQEGPHQTPDAGALIRVRAQQEGPHQTPDASALILDFPASRLGEGPQLLSTCSDEEGVSPQPCSCPAHIWVTLGMTDVQCGWPRMNAGGQEENMNACGWWQGDSSRAFGHSLKFLCQSLALLSLVLRLVMQCRRDGWVQEARGSDPSCPLQKPQFRRSPEREVGVEGS

SEQ ID NO: 928973 - protein, 148 aa, Homo sapiens
MVILVMCFTLSTLIALMFRLHDWILQHNVATKKQDDEFSQIEHNHKTKIQIKKQNTASISESNFIHFWSLAKIKQCFCARCKLSVDPPFWDLEKGVSLLTAPLRSAPVGNLCGGSDPTIPFCTALAEVLPNILGTYIGHIFQEKGVEK

SEQ ID NO: 928974 - protein, 146 aa, Homo sapiens
MASMALEAVSPHPEGCQQREEPPFEESAQGSGLQCAGQNGVLLMGWVPHPGPVPCSGHPGHRPYALSCLLWLSKSGLWWSDRAHQLMSIHHLGDPGDRQDVIGTKDYAAPLPKPCRGSSFSPEMQASVLPGLCKAPDNLTGSLHLL

SEQ ID NO: 928975 - protein, 140 aa, Homo sapiens
MEGRKERIKGGGVSRKRREEMKKGKERDEKKERRGEEKKGEEERRGEDRTGKERKGKERKGKREGRKGGKGKKKERKKMKERKERKKERKKKKKKERKRKKERKRISISDSYITPSPRESINGSSLKKKLIMICDLAETA

SEQ ID NO: 928976 - protein, 126 aa, Homo sapiens
MSLRPSQTTFHSLEVQADNCEHSLQVFTSIRVAPTNPSSRFPRAALDTTHAPASRLPSTPSHQYQASLPKDFSNKPACKPYQTGHRQSLDELTGEELCCRDHSVNAGIVPATSNAQTLINGHKDYE

SEQ ID NO: 928977 - protein, 144 aa, Homo sapiens [sequence omitted]

SEQ ID NO: 928978 - protein, 134 aa, Homo sapiens
MGPTGPLPPAEGLAEDPVTPLCLCDGGQGRELDTRLAAFKASCAIRCRWLWTCALASQSLTVLLESGNASALPGCCREGGDGLCRGPELRGTGTTISCIPITWVMRPPRTPGDGSGRDSCCPVPLRPGGPKVQV

SEQ ID NO: 928979 - protein, 139 aa, Homo sapiens
MPCLLESAFLQGVLVSLFEKDIRNSDFSIQCAHFHWGIITSRTSKLTGIGDEFLNTTPCSGKNTEQQVFTFLAGGNAKWHSHLGRQFGSFLQSQTQAYHTIQQLPSWAHSRDLKTYVNVKTCMQQFIAALLIIVKNMKQ

SEQ ID NO: 928980 - protein, 293 aa, Homo sapiens
MGRNQRRKAENLKNQSSSSPPKECSSSPATEQSWKENDFDELREEGFRRLVITNFSVLKDDVRTHHKEAKNLEERLDEWLTRINSVEKPLNDLMELKTMVQELHDACTSFSSPFDQVEERVSVIEDQMNEMKQEEKFREKRVKRNEQSLQEICDYVKRPNLHLIGVPESDGVNGTKLENTLQDIIQENFPNLARQASIQIQKIQRMPQRYSSRRATPRYIIFRFTKVEMKEKYPGQPERKVRLPKKGSPSDLQWISRQKFYKPAESGGQYSTFLREREFSTQNFISTQTKLHK

SEQ ID NO: 928981 - protein, 133 aa, Homo sapiens
MLLDSGTFLEKGTVSYGGKTGLEKGLCLGHHPPGPLRVEPWRQTEAAPRSSESIRLGWDANSVPLQPVENKAIHIFLNTNDSCRNSKMKNVCASKDTIKKVERQLTESEKIFAHHLYDKRFVSRTYKKTLATQ

SEQ ID NO: 928982 - protein, 120 aa, Homo sapiens
MGKKTPTQLLESERTGESRGGEVAAEEVVKATPKLVPNVMLGEKTKGPAESSIKWHSGILSDSTDVECGRAIPGYVPVSGHFSLPRKTSAAKRVNQVLTAPSLGYMMQKKTRGTHHSVIP

SEQ ID NO: 928983 - protein, 143 aa, Homo sapiens
MPESLTLLLGRDILVHTGASILIAPGQTLCPLLMEANINPEMWATQGRIGQAITARPVQIHLKNPTSFPNQRQYPLKPELGKDTFLRKETREPEYDCEQVIIRTYAAREDLRETPLENPDWTLFTDESSFVEQGIHKAGYAVL

SEQ ID NO: 928984 - protein, 133 aa, Homo sapiens
MRLVLVSSLTEEETKAQRNRVISGRRRFSWGIWQCLGNTLGCLWVKARDATAHPAVHRTVPATKSDVAPNVHSAVLGNPGPRSHRLSSQSLDLNLELSATLFCDHYPRFTCERKRRLQQAPIPPDKAEYWGSF

SEQ ID NO: 928985 - protein, 232 aa, Homo sapiens
MPADHGEALASASVGSHHQKGKPLKKVPTFCRICDLLRFRPETEPPQLTHISRGIKGWALGIRLSKDNEHSPRLVASFSLVAWGCLQVNLEPDIQPSSAPRWPRRLHTELAVLTGSWDPVLDTCWWSRHCAWDVRGQQPRTSGSCRLAGEGWGHFDEVKCEMDKMLRRMREQPRCPQAVGHPAGIRRSPKQEPAVSGFMPPCESHTVQGPGRAWKLSDLATSGQTHLGPPHA

SEQ ID NO: 928986 - protein, 301 aa, Homo sapiens
MFVRSQCLEFLIVHTLAFAAVSYLNFGLSKWVFPSGYEVMVIAIFVGICLTLTDQGLQAYQPNASTLINLMLPYHSLSACDPLHRVFDVLAACEFLGWQLAFGMWTSCLFLWAFSSLERISDMSGSNNAIYDPDSEAISCHFHNIQLATCAITLAMGGGSTEDTSDNGLGPTLLHSDLVLTNDTVSSDQFLTWLVFAAKNFHRDSSVGCLTGDFHPGSAWAPQEDSEIHNNKLSGIWPGPDVGSWLTSPDSGFTWVGEGRAPGNAEMVATEVKAPWVIPGPPPGICKDSRPLWLSGPLLLP

SEQ ID NO: 928987 - protein, 153 aa, Homo sapiens
MRLCCFTPPSWWSLGVGEKIHPQITLSFNYFKFQNEFVFLLEIFETTNIQFSPNIPTSFSIAKASPAMCRTSVSPNLEKYLSLCLSFMTLTFSLEFCRMPLFLSLFDVSSVFNSDYAILVEIPKSHAVFFSVPHGRRPMASTCPVVKLLRITR

SEQ ID NO: 928988 - protein, 174 aa, Homo sapiens
MRFNILHALIKPVTSWFLPCSLQMCLQPSLLCGFAISIRELQILLGMQRKLAQQSLLPSPPSWAASQLAWAKSTCRSDFVQVPGLSLPVSYPHSCLPQLLLPLKTQSQPRYQRREGHGQDTVSLHTVHGFLWRDRKKMLTHARPFQTVAQAPGLCCPPQGHPPCMAQVPEMWPV

SEQ ID NO: 928989 - protein, 137 aa, Homo sapiens [sequence omitted]

SEQ ID NO: 928990 - protein, 188 aa, Homo sapiens
MKIKFMYFNKILKVELLADSLAHNKNSLILAIIINITNTIIITIITITTIITTMITITIVITTIITTTTIIITTMIITTITIITITIIITKIIITIIAIITITIIIITTIIVAIITTITIIITTIIVTIITNITIIVTIITIITITIIITITTITIIIIITIITTIMITIIITNIMIITTLTIITIIS

SEQ ID NO: 928991 - protein, 143 aa, Homo sapiens
MVRAGLAARGCVRDTGGPMDPREATSAVRSFVDEVECFLNPEHCAGHGSFVNYHRRISGNFRRCKMLGAECESPSPAGRGLLGCGKFIARKNDLVKVGSGHSGHLGHNAVAAAFGESYDPRWVSCPTAWHAGSQGFAEGLRRA

SEQ ID NO: 928992 - protein, 241 aa, Homo sapiens
MPCVGKKAQWAEAGRWVRGSECHGGSEGHRGILSQRGQARSHGLEAFRGQPLPVVLLAGGHALGLSFQILIPAKDPWLLLIEEHQSVGIYQFTYKWGAGVTYFNPVNWLSPTATAVTTMKLPWNARASTFIAPLPSKVDEQYSDCGPDHPQAPLHLSAHARALSSFSPGHLQKPQLAQPSPAHGYHSPVCLPHNISPNPRGLFLVVLASLNVSSAGAARGGWSPDLSPCLATVPGPWKSPW

SEQ ID NO: 928993 - protein, 246 aa, Homo sapiens
MKAKLGASPRGEGVGVDFSLVQVQLSGFPPPSWVPTAEVKEVAVDFSWVQVQLSGFPPAKLGTSPRGEGGSWVLTPEAKEAGFDLSWVQVQLSGALPAPRTLTGQPAVSFSSVSCVPTSPGDSHLFGNARPLISHVFVLGCQYTLIKHSRRAAGIQEPPLPIPCARTVPTSCEQRWVTEASLHDFQPRFFICNVVTVPGSVIIHAGARRTVRQQKKGSRYHQQPSEQVLKRSGTLTSLSKDADMFS

SEQ ID NO: 928994 - protein, 251 aa, Homo sapiens
MSVEVPPPVCSCCGVCSNGTLQDTSDLYDALSGSAASVMKTCKTEAPFGQLLVLRHHRESGIHTPILGKEAKELALQLLWAHLSFRRNNACVESSLKNTGFNSWDTMAKFNDLLILDMMVRGEGREGPGPADIGGDGIKGQSIWLHWRLFEEIRHVTPGFPSAISAKARNRDDYLGKICRGAHCLMELIPMESYKGLKNILLAGKLPASLYQRVKRKKAIGPQRFHRHKTSSKCYPAANICFLLFKKKDGF

SEQ ID NO: 928995 - protein, 168 aa, Homo sapiens [sequence omitted]

SEQ ID NO: 928996 - protein, 135 aa, Homo sapiens
MNAQGGGCNVELCSSISQARVDLMNGFEKMQNFLYESTYILTPFAQPDVPVRTQFGKPTLRHSGLGGLIDSCHNLFPGASLSLQPLELSGMLKVYNPGEVIPKQWMVHKSRAPSMHTSGRGKRAQSSYHWTNMMA

SEQ ID NO: 928997 - protein, 136 aa, Homo sapiens
MHLDIKEASEAKLLSFHLIDNSHRAGIIPGLALFLNLISSPSLTSTAYVHVLGQPSSTKQHPPSIWNLMKVAAHSFAVLKNHLGAPDKTFTLWALTGTMGCEPESTSPQRKNDPLNLIKIKNVCFMNKTVNGDKTS

SEQ ID NO: 928998 - protein, 158 aa, Homo sapiens
MSWRYCLFSSCLTNVYRTSATGFRAHQKPRRPSLNYICQDPFPDKDTRHEQICLTRPTLMRIPGSCSGKAELDLLEPGLAPEEVERCVCSHTEPNLSEPRKWAEEQERRFFKPTIPKPLSHGYFSRAAPPEAHGAGDEVLTPSKKLMKVAGESSGAKS

SEQ ID NO: 928999 - protein, 355 aa, Homo sapiens
MAADGTGLCPGTVPGKEDMAADGAGLCSGTVPGKEDAAADGAGLCPGTVPGKEDMAADGAGLCPGTVPGKEDMAADGAGLCSGKGDMAADGTGLCPGTVPGKEDMAADGAGLCSGTVPGKEDAAADGAGLCPGTVPGKEDMAADGAGLCSGAVPGKEDMAADAQALSQARRTQLLMEQVSALLGGVHIPTRGPVSIINKEDTNQIDLPACNKSQRMGFHLVNVGGEWERRTIWITAFPSALVRKGILSTAFGNKHTCHLQVKSATDVVFPGSGGEEDLDSGFILWTTEFCKFVDWEELGHICFAKDRGGRLGEKQLSVDWPGSVGGWRQGCQRPCRFPWEICMALALLPVPLIPP

SEQ ID NO: 929000 - protein, 240 aa, Homo sapiens
MSAGRGGREDRQPWRGSSTLEDNHEDDDGDEDEDDGGDGEDDNNDDDDDDYDNDGEEDEENDGDSGDDENDNEENEDDMVVMDGDGNDGDDDDGDENDDDGDDGEDDNDDDNDDDYDNDDEEDEENEDDMVTMDGDDGDEDDDVGDEDDDDEEEVGDGDDGVNGDGSDGDEDDDVGDEDDDDEEEVGDGDDGDNGDGSDGNDDNEEEDGDDGDDEEVDSLYVTGSENISENADKMVHGCP

SEQ ID NO: 929001 - protein, 154 aa, Homo sapiens
MLQVLGLWGTAGCLILPGKSERRLESSWNLEKHFPFSSIVHLPRVSEEPLLFVLSGKRIFFHIHVHFITVLGTLKGDKGHWDIETSIWEVKLKGFNETIEYPYPTIKYPYLTIKYPYPTVEYPYSTIDYVCPGDIHNSSDQLNSCQVSFMRISC

SEQ ID NO: 929002 - protein, 175 aa, Homo sapiens
MRFLLQNAIAKKNVPNTTHWLTTGFRARGGLSGITNIGMASPVWGSCKGLGGCGLGHHSIRLGEPGDESLSEKCDLFPGAVGAPSLPDEGGDRQEEQDGQEEQDRQKEQDGQKEQDGQKEQDGQKEQDGREEQDRQKEQDQQEEQDREKEQDSQTGGAAFWDPNKQSCPKYPQGS

SEQ ID NO: 929003 - protein, 140 aa, Homo sapiens
MGTSLWRIFENNLSKISGCEHTAETPFDLTFCNCGTTLGSQQEWPSDPWGQCELFPRQVFYRPLQLALETSGCARRNKKHNRPQLLGGSGQIHEKPAGKTWLSVALRLPAGSPQRLLQHRPPAIPILANFSLCPSVSACN

SEQ ID NO: 929004 - protein, 138 aa, Homo sapiens
MHQLRRNARCGEGQNKPQTELTNRSGMARAAEKAGGGRVLPGVLSSLAGLCSPLKGEPLQAEKEQLPPAPAVSLQGWPRLYRDCQSLAAANSRPGSSWSPEDALKTVALAPVLRGLGSKANCALYCPQGTVQPLYPIS

SEQ ID NO: 929005 - protein, 214 aa, Homo sapiens
MERPGSVVLPGGLGPFFSESVGFRPYFPSFQICLHLVFHAVSALQGWKASGSLPVGSNRYIEGQSHSGRRPFQLSGKRAKLPHYILKAECCAAATDFMLNAGMRRPSQGTPSLLPAPLSSVCFGELLFTNTTWLLGPGRLIPLFWDFRMANGSLDGCKTEGPGGRPLLHRKPSKYNEPRVASVKHNAGILGANSLVLGGGPHMLAEGMNEQMNE

SEQ ID NO: 929006 - protein, 165 aa, Homo sapiens
MDRRGSTQGTIDPGDNRPRVQQTQDAIDPGYNRPRTQETQGTTNPGDNRPRVQQTQDAIDPGYNRPRTQETQGTTNPGDNRPRVQHTQDAIDPGYNRPRTQETQGTTNPGDNRPTVQQTQDAIDPGYNRPRTQETQGTTNPGDNQPRVPQTQETTDLGHSRTRMQ

SEQ ID NO: 929007 - protein, 182 aa, Homo sapiens
MVSAHHCRQQYACAGLMDREGEAWKAEPGSGAWRLGDDINGQWKMRLEKDDIRGKITTLRWSQGPQGEGEAQGTPSMSLDTQASEPSNFLRDRKWDSEKSQCHLWPPPRQLYSFFVLQLESTRACSDMHTSMPSMPNTLIISENHLQSSPYLIVLPSLTLVILQTVGSPNPDEVHTFGFYAS

SEQ ID NO: 929008 - protein, 133 aa, Homo sapiens
MEMTAVSSGPEVSCSVMAGGFHEQQRGSPQILIFNRAGGDKRPPAPQEMFRDADARGGRGGLQVGWGMCLGSSHLGQGKQQPAEAELGFPGFHPGDPPPPTALVLGSRLQPTGPFYFPPAPVLQWEMNSNTPL

SEQ ID NO: 929009 - protein, 152 aa, Homo sapiens
MAAGDRVLRGISGEGGCSLMEDVGSQLIPVAFPDSHSDNVVDLEAAKDMGSVAATIKAHGVHSIPVSTMVPPHQSNLSAPDLGCVHGARGSHCALPWAQSAVVALLILADTGAGLVKWALPCCICPAFRSTLDGFCLLVKANIMTSSLPRGL

SEQ ID NO: 929010 - protein, 320 aa, Homo sapiens
MLGPGCFSLRQIATAANSSAATNSYGKYQTHRRVCQSLRVPASCKVEDLSKEERSKEECEGHSTLAAAGQRGSPGPSAGPAGGLLKEGTHQTGALGPQRLPSSFTQNKSGNNSNILIDVRSQRYRQQSAFTPVVMRRPCQPELCRYPCWSRICNEIPHPRSGQLAAGTCEIVTLDRDSSQPRRTIARQTARCACRKGQIAGTTRARPACVDGAWTCRLPSGGSGRSQHFWRLPEAMGDWVYSHILSQVVGPGHPGPLMAWGSTAQGEGEETPAFTGTTPAQTPWLLLEQTVSEGAGRMQSGQQPSLFCGKSFCVLQSLEK

SEQ ID NO: 929011 - protein, 242 aa, Homo sapiens
MPHIFLRRKMKEAGERRPGEKNQNCRLFLGPAGPACASARRDFLDLVTRRQRTSQNAGTQAWGEGPSTGLKSGAREEAASVPDSPLGQASCLRRAGLQPSVAAGAASSSSSSEDSRANATVGGGWARPGSHRLRIADARCRPPPMCLSPASSGRLDRPKLRMPRPEAVLHGPQGNGVGGRQRTGEVRGEWRTVAETWALQGAKATPGAPQGLCLSGDLRSKERERPRLPNGAVGLEPTLNRT

SEQ ID NO: 929012 - protein, 197 aa, Homo sapiens
MHSFWIRVVPKSKDWCRYTKRKIWKISLLEGGVMTETEIGVVQPHAKKGLQPPGAVRGRKILPTAFSESKALPVAGHRTSGVRSSGLWKAEAFDKPTSWRGECPTIPTLVPKSGIIVLFNLCQFAKQRKTGLPLGYTVLRMQDGGSARSQLQEICISKGNSAPDQIIKDCNLNSWELSAGAFKAKPTINKYGGQQLG

SEQ ID NO: 929013 - protein, 178 aa, Homo sapiens
MVVPKILLTALGPSQHPHPKGETKATHPVPCVAPSPGSPPWPSPSKGKSLEVGRPDEQVLAKAWEEMVSPDYDQNLQVGGTARQLIIALTCRDEEEGRAAGYKLISFAPQQLQIIPGASAQIPSLGLMMPVLDTQVPVATCGTRHKEWTLNHNECKGQRHLTLHPARILWWPWVLLGL

SEQ ID NO: 929014 - protein, 443 aa, Homo sapiens
MRQLSGLKDVNIPNQVCREGLRTPGSRDSRSEKTQVSGLGDVNNPNQVCREGLWTPGAGTGGLRRDREGLRTPGPRDRRSEKRQVSGLGDVNIPNQVCSQGLRTPDHRDRRSEMGQVSGLKDVNIPNQVCREGLRTPDPRDRRSEQRHVRGLKDVNIPNQVCREGLRTPGPRDRRSEKRQVSGLGDVNIPNQVCREGLRTPGPRDRSSEKRQVSGLGDVNIPNQVCREGLRTPGPRDRRSKMRQVSGLGDVNIPNQVCREGLQTPDRRDRRSEKRQAPGSRDTRSEKREVSGLKDVNIPNQVCREGLWTPGPRDRRFNKRQACPCGSRFLDLMARLLLADLVLGTPEVQEAARHRGGCSSHGAGWRAWGWAVSTGAELHTGGPEPHLWVSFCVSLGSTDSAVSPRDIGKGSISSWGPIHRFQATVMGIGSRHGGMAPTLAVSP

SEQ ID NO: 929015 - protein, 136 aa, Homo sapiens
MPPPSGTVVLSGAFTAESPTILALGIGFLEDDISTDGRPRLCCAHEFPGDATTKYNKLGWAQAGVKSILSLSWGLKPETKVGCTPCRGSREDLSCPLALLAVAVTLGANLSTSIFTVPRCLLLCVHRSSKDTSHWT

SEQ ID NO: 929016 - protein, 291 aa, Homo sapiens
MLLQPETEARGNVFAHLPQLPGADLRQSSRLLVADGDQVSALSLRDLLSTCEARTGNLGVPVIFRFEPESQLAEQSPRPTYQQQSQVGGKAKAKAADPEALVPSIHAVNRQPASGAPTLSTGSQPLGHPHCQQAASLWGTGREAVGAPACAPPWQAPEGTHCTPGWRKGTLGKPMSPAVSGSLSPVYFPILCGAQRKTQVKASATWQDTAELVPTVGRDWHNTSPLCRVPMEHPHHRRKSPLFSPRGKVENSSSPTGLSLSGQLQHPQSGRAQLFPAHRLHPTVCQQTPSC

SEQ ID NO: 929017 - protein, 232 aa, Homo sapiens
MALGSAFHSILDNEFFFQCGLALVVNVVAPAAKTEGANAGTRKQGGRPGSRPPSCESSEDSRFFPLHISQDLAKGSEWKTGKCHIGRMSDMGISPSLGKVANVTILHIGEKCRFCGADGAVNSGRCRVTTEFRNTDGDGVRAMENQLMGARLSVTSAGNGKWEKGSAFHLAPGADGSCGSPAPSCGGRILPGNNKMQPDLIPQPNIKAPARKHYQEIRGETLGSGHFSFQGT

SEQ ID NO: 929018 - protein, 131 aa, Homo sapiens
MISIIITIIIITTTIIITVTMITITTTIITMITITITIIITIIILTMIITIITVITIIITITITMITITITIIITTISSSTIITMITIIITIITVIITITITFITVTTTIITITINTNNIIIVFQLGSSDH

SEQ ID NO: 929019 - protein, 325 aa, Homo sapiens
MKGRYAARPPPALSSLHLFQRTMCSAVCQSWQRTLLLCKPPNPEPTVHLPPVAEPTPGPCPHHQGQEATGKVLPQLPQLPLPVATPEPPDVALPGVGASFSGSGSVGRGFPGLLTSGSSVVDITWGLRPRCAVMLALPGDTGMSLPLQASPPGSVLLGCGPDTPHPAPELSGKPGGLRTGSAVAEHRQVSKLPVGLTRTLPGSGPHVAPCAPSLGSKAWTTDAEQFDCLIMPRASISPAADMTTSAQYFSEKGKLKPKPGFVVSLTHPTRGLPGKPDAFVSLGRGEDFSSMVTEDECLCYEVLGTCTNSGSELSPPGPHGQAGPW

SEQ ID NO: 929020 - protein, 125 aa, Homo sapiens
MWVPQPIWSSERGRRRDVCSRLREKGKTQAGASGNCDTPARACGRPCTDAVSVKFECESWGPPHQASIRVAGAAALRGIVRVDRGKQHSLRGPSRLEDAKVTTTSGETATAVGAAKRGAGDRRVP

SEQ ID NO: 929021 - protein, 234 aa, Homo sapiens
MKGDVRETFVATEGLPCILMVWLLKTHNRTYMKKAAACDHGGKKCWEKPSSVARGGTGMEWMALKGGQDAWYCSMDGMDGTGVCMGWMELGCGRDGLHWGVDGMDGTGVWTRWMELECGREGWNWNVDEGMELECGRDGLHWGVDGMDRTGLWKGWIALECGRNGWNWSADGMDGTGMWTNGWNWSVDRMDCTGVWMGWMELGCGRDGWNWSVDSMDGTGALPWMMRNLSRYRG

SEQ ID NO: 929022 - protein, 165 aa, Homo sapiens
MKISFKFNKNLSSPSESVQEVWMPTLHGLPCVRSQAGLWLQGPLLITQMSPNQFSVAPQMGPWSPALSRGPASPTLSPARHQESWKATHPQIMAATAMRAVGFPGLEETMPLQALAHKPQSEEEPMDFTTSGSPGLMSTTTDTEWQMASMEAQPQDPTGDSWTLV

SEQ ID NO: 929023 - protein, 157 aa, Homo sapiens
MGQGCLLPRAPSWNPALASPRWSIAAPLWPPLTLIGHPHPAILLPRCLARIGDLYQNLDKRVLWSLLPWPWGLTHTSILLTQRCCSLNSSYCMPGAAWLLNKATNRRDEEWNCWSHFNAMFNILKTCRIVFQSGFTLLHLTNSVRGFPFLYILTKRY

SEQ ID NO: 929024 - protein, 247 aa, Homo sapiens
MFPVLRPQGYSSSWSPVSLTLCLVHSGLNPPGIHVNVLDQLAFTPIPQPQLKCVHQIPGKAWLDWAQSGTEPGGLQTGLAPCTHYIHPSRVFLQVPGYICAAAVSGPPPSCLASPLCACAHGLSRDRDSQPDFLESTSLLDFLEGQVLALVACMLPGPGSSEAGEQLEYKLNPECSGNRGEFQAAVTLQPRLLCVSRTFHTSCVLGCHLRWEPRKPGSVYRCPFHGALSCRRVRVKQPQSITVYEIE

SEQ ID NO: 929025 - protein, 139 aa, Homo sapiens
MAFSATSLVEVLPKAASVSDFWNGGYLERKSTVLQHQEEQKSSLIIMSWRLNMKLDENQSWGVVVSSNTERGKHSRGKSLLQLRKASVVETCLLMRKLIPEEAQCRAPRHRGTQTDKQMVRDKPGGNSWIKEMLAPGGS

SEQ ID NO: 929026 - protein, 148 aa, Homo sapiens
MCSGLTQGASPTVPPLLISWASFWFFGTWTLASLPVSTLQPQSQPCSLPLASLCLHRSPMDWFCFLCASPSVGKGVLPQRELGTKWTWRRTSFTEATFLSPEGAQHRHSGSYILGVGSKDFTDRTPLSNQARMLRWSHAITLTPYLYF

SEQ ID NO: 929027 - protein, 238 aa, Homo sapiens
MSAVLEKWAEQAKGTGEGDSGSADASRVQRGPCELLHYTDASRVQRGPCELLHYTDASRVQRAPCKLLHYTNASRVQRAPCEILHYINASRVQRRPCELLHYTDASRVQRGPCEILYDTNASRVQRGLCEILHYTNASRVQREPCEILHYTGCRQVPCELLYDTNASRVQRGLCEILHYTNASRMQRRPWSFSIILMPPGPREGPAISSIIPMPPGVSLSMWSGEDSRGRIAETLYHS

SEQ ID NO: 929028 - protein, 144 aa, Homo sapiens
MWQMLHQIHRWWVCAGFTASAIGRVFLLLVSLCFHGKQAKEAAITWPGGSECQEGEGGEGLMTWPGGSESQEGEGGEGRNRALSPNHPFEEQVVESTKVRVDSAPPKTFRLWHLSPAHDSQVPVHGLRPLREAPLQQASDVPLS

SEQ ID NO: 929029 - protein, 137 aa, Homo sapiens
MTSHWVALLEAAPAYDQTASALEGSCPECRLPGRPRAGKGRAVGRVQKSQTQPKEGGPECLSDDHVGIARRNTQGGGSWQVGSGDGSFICRQRERPGARSPSTPGLQRPGTLKTGSHEEGYQLPGRGVLFPYGLPFS

SEQ ID NO: 929030 - protein, 176 aa, Homo sapiens
MHLTFSTQYAKIPASDMHRMHLTFSIRYAKIPASDMHRMHLTFSIRYAKIPASNTHRMHLTFSTQYAKILASNTHRMHLAFASSESLGVSSPSLESSLHLVKSESPLTPPPSTSLYPTWSQSKICSHFRKPNHLDTWGVDGDDLQGVDSPGRLRAVLSQHQMQQAPRSELGYGSAL

SEQ ID NO: 929031 - protein, 250 aa, Homo sapiens
MIHSCEDAILDPPFLPLLPISVGTFLGLAVRHVASIGTGHRLLSHAGLSGECDTVFTPMTVKTSGAEDLFCARCTSDTLSVKCLFQISQFSVDPSFFVSLVCMSLLCVGCNLLDEQVLFIILFSSTSTVGYKWHREDRFSRGFVPGRCHGSETARKERQALQRQRPAPDRTWEEGAQTRCWWEKETVLARWKTCGSYPATLTYVLYDSAQSWGAQPTERPAHSLKDAHRDVTALLFLTTEKGNGRNTRLW

SEQ ID NO: 929032 - protein, 157 aa, Homo sapiens [sequence omitted]

SEQ ID NO: 929033 - protein, 129 aa, Homo sapiens
MVSNSGEGTGSPPSPAWQVCRRARAHISLWCPGRLSSASPAFPLRPPSLLNLSRRHIELRGPWKLLGLCSVCYYLETFHNRLLLNKQEDLAIFHPHSHRDTGLKLSCSRSSGQGHAEENVFQVPSTSYK

SEQ ID NO: 929034 - protein, 221 aa, Homo sapiens
MIITTIMTITTIIFTITTIIITIITLIITTITIIIPITIITTIASVITIIIITIITSIITLTIITIIITTITIITITITITMIITITITITTMNHHHHDHHHNHITIIITIITITIITIIITIITIIIITFIIIITVIITTITITIIIIPIIITTITIVIIITITIIITITIIIITITMTIITVMIITIIYHHYHQIMNYLLLSVDNYHRTRFLYLGTIDI

SEQ ID NO: 929035 - protein, 157 aa, Homo sapiens
MVKQRPEKTLHKSNENIDKICPSQLFQNIGGSPKACSCSGSIQEKQLNLENCHSVTCPAALWEGLAGRACPDSICSELVVPRACADDGMRPHWELLGIGGVPIHNHTSIGPSIQNMSRALIDPVMYVESTSRKLFCKYDSSAVADVCSHMGWLTLSP

SEQ ID NO: 929036 - protein, 144 aa, Homo sapiens
MTKWGFSQENEAPRTCRVGYMFLQAGLPQSCSVGYMFLQAGLPQSCSVRYMFLQAGLPQSCSVGYMFLQAGLPQSCSVGYMFLQAGLPQSCSVGYMFLQAGLPQSCSVGYMFLQAGLPQSCSVEPLQGLVPNAVVETESLHPVR

SEQ ID NO: 929037 - protein, 145 aa, Homo sapiens
MPCMFFCSGVPLENAGSVYVQVSFFLVTGVPRLRRLTTCVLQKLLCGDSDQRRCHSDPAMMLQDRTHGANAWAPGTGQRPQAGCPRGAPGLPEQRPQCPQQPLHRSGLCICLHKAIFPGTCFLSVSPPLPIWTRVIGLRAYPAPV

SEQ ID NO: 929038 - protein, 215 aa, Homo sapiens
MLPLLRDGSERDSECLPVYLEMRAGEDSQVLGLSNRPPMAPPRASQCPEPQQCPSDSRLVACPHLGGGLPGLPRAPPMEQLRHPACDPRSSAFLELSVGPRGWRLRPAAPTLLTALHGEPLAYLGDAQPSGPGVRTAALTEKWIPEEACKGPWGVGVQPLATLIGFECVELPVLDISCEWNHTVPVLLYLTSHTWCNGLQRVGCIRCQSFTSPRG

SEQ ID NO: 929039 - protein, 154 aa, Homo sapiens
MSCFRHLCEEADTRCGVDEVSRRMSHVSGGGPIDLSDTDSLQAWINMTSFLCALGGVCLQQRRNSGLATYSPPMGPVSEHKGSMISVMSSEGNADTPVSKYMDQLLSLMVCKLEKVGLQIRTNGKDLVGLELSPALYLMLFNKLKRRISKFFDS

SEQ ID NO: 929040 - protein, 143 aa, Homo sapiens
MMPTDFSKLCLGSAVNGVVHFWTLGPTPGVCQGLSGLWPQTEGCPYNGFIFDWLHLAINPEEEEEEEEEEEEEEEGKGKRKKMKKEEGEGGQGGETTSESNWARRTLIWKQNTESSLGVISSITASSNHVKSSQSEKNSSSIC

SEQ ID NO: 929041 - protein, 2994 aa, Homo sapiens
MKQTVLDIPYSKGSKLTQQPCSGIRCEGQTLRNQQQRSGILENSSSVMESSVRDKHSEPSSSVLESFVIDKHSETRSSVVESYVRDRQNVAAVFSNPISSDLESYMKDKHSETSSTVLESHVREKHSQSSSSVLESYVRDKHSEPISSVLESFLRHKHSEISSSVVESYVRDKHSEPSSSVLESHVRNKHSEARSSVLESYVSDKHSEPSSSVLESFVRHKHSETSSSVLESYVRDKHSEPSSSVLESHVRNKHSEPSSSVLESHVRDKHSEARSSVAESYVSDKHSKSKSSVLESFVRDKPSDPQSTVLEYYVREKHSETSGKPSSSVLEYHVRYKHAEPSSRVRESFVRDKPSDPQRSDLESHMRAKHFEPSRRVLQCIVMEKHSDQSFVRDKDSEPISSVLESCVRDKHSEPSHCVLESHLRDKHSDTRRSVLEYYVRDKHTEHSSSLLESHVRDKHAEPSSRVLKSYVSEKQSEPRSSFLESFERDKPSDPRRSDLESEGQNLRTQQQCSGIPRERKTLTTQQQCSGSLYEGQILKLTKSVLEYYVMEKHSESSNSVLESLVMGRHSDPRSRVLDSYEQCCGVLCEDKHSEPSGSDLEIYVRDKHSETSHCVLVSYMRDKHSDTRRGVLESYVRDKDSETNSCALETFVRDKHTDLSSSILESFVREKHCDPPSSVLESYVRDKNSGPSSSVPDSYVRDKHSETSSSAQESFVRNKHTELSSSVLESYVRDKHSVHLKSILKSYVRDKHSQPSNSFLESYVSDIHSDPSSSVLESYVRNKHSEPSSSVLEYFVRDKCSEPSSSVLESFVRDKRSEPSSSVLESFVRDKHTEAISSVLESFVRDKHSEPSSSVLESHVRDKHSEPSSRVLESYVGEKQSDPKPNSRVLESYVRDKHSEPRNSVPESSVREKHSEPSSSVLETYVSDKNLEHSSSVLESFGKTLRPSNSVLESCVRDKHSEPCSSVLETHVTDKHSGPSSSVPESFVRNKHTETSSSVLEPWVRDKHSERRSSVLESFVREKLSESSSSVLEYFLRDKHSEVRSSVLESYKCCGIVCEGQHSEPSSSVLETYVSDKHLEHSSSVLESFFEGQTFVPSKQCSGILSEGHTLRNEEQSSGIPCEGQTLRTQQKQVSGILCEGQTPRPSSSVLESYVRDKHSEPSSSALESYVSDKHSEPSSSVLKSFVRDKHSEPNISVLESYVREKHSEPSSSVLESFVRDKHSELSSSVLESFVRDKHSEPNSSILESYGQHSEPNSSVLESLVRDKHSEPRSFVLVSQVRDKHSHPSSSVLESLVMDKHSEPRRSVLESYVRYKPSDPRSSVLECYVTDKQSEPSSRVLYVMESYVRDQPSEPSSSVLDSFLRHKHSEPRSSVLESYMRDKHPEPSSGVLESFVREKLSDPQSSVLESYVTEKHSKPSSRVLVSYMRGKHSDHHSSVLESYVRDKHSDPRSCVLQSYEREKHSEPSSSVLESFVTDKHSDPCSSVLESYVRDKYSNLHISVLDFYVRVIHSEPSSSVLESYLRDVLESYERDKQSEPSSSIPEYFLRDKHSEPSSSVLESYVWDKLSYPSSSVPDCYQCSGIRCEAHSEPRKIVLESYVSDRNSEPSSSVLESFVRDKHSEPRRSFLEYYVRVNTKNPGADKHSEPSSSVLESYLIGKDTEPISSVLENQQQSSGILCEGEILRIHQCVLESIVKDTHSDPPRSVLESYGQTETNRSVLESFVKDKHAEPRSSVLEFYVRDKHSVSSHSVLESYLRANIPNLVTVFWNPIEKHSEPRSSVLESYVREKHSDPRSCDLESYLRDKHSEPSSSVLESFRRENIHTLITVFWNPMDKHSEPSSSVLESYESDKHSEPISSVLESFVRDKHSEPSIIVLESFVRVKHSEPGNSVLESYNAAAVFWNPMCVTNFQNIVAVLWISMSWTNTQMAVRDKHSETNSSVLESYVMDKHTESSSSVLESFVRDKHSELSRSVLEYFVRDKHSEPRNTVLESYVRGKHSKSNHCVLECYLRLNIQNLGEVFWNPNVLQCFVREKHSDSRSSVLESFLRNKHSQPSSSVPVSFGWEKHSQAHNSVLESYLRNKNSEPSSSALESYMGDRHSESNSSLVESHVRDKLSELHSSVLEFYVTDKHSESSSSVLESNVRDKHSEPSSSVLESFKQCSGVIWKGKISHPRNHVLESHAREKHSDPRSIVLESNMREKHSEPSSSVLEAFVRDKLSDPRSTVLESHVRDKHSEPSSSDLESYMRENHSEHSSSVLESYVSDKLSELRSSILEFYVRDKHSEASSKHSSSVLESYVSDKLSELRSSILEFYVRDKHSEASSSVLEYYVCYKHSEPTSSVLESYMRDTPSEPSSSILESFVRDKHSEPSSSVLESFCSGIPCEGQVLRTQQQCSGILCEVQQSEPSSCALESYVRDKHSKPSSRVLVSHVRDKHSESSSSVLESFVIDKHSDSRRCVLDSYVRDKPSETSSSVLESYVSEKQSEPSSSVLVSFMRNKISDPRRSVLESYVREKHSDPSSSVLQSFWVLECYLRDKLSDNRRRVLESYVWDKNSEPNSSARESFVRDKHTEPRSRLLESYVSDKLSETSNSVLECYVTDKHSDPAAVFWNPVDKPADPRSSVLESYVRDNHSEHSGWVRESNVRDKSSKPSSSVPESCVRDKHSEPSHCVLEYYLRNKFQTLVEVFWNPISVLKSYVRDKHSEPSSSVLESFVMDKHSDRPRSVLKSYVRDKHSEPSSSVLESFVMDKHSDRPRSVLESYVRDKLSEPSSSVLESYVRDKHSENGSSVLESCVIEKDSEIRNSVLESHVRAKHSEPCSSVLESYVREKHSQPSSSVLKSSVLDSYVREKHSEPNISILEFHVSDKHSEPSISVLESYVGDKHSEPSSSVLEPYMRIRSSVLESHVRDKHSEPSRSVLESYVRDKQSETSSSVLESYVRDKHSDTHRIVLESYVIEKHAEASSCALESFQRKNKQNQPQCCAIICVGKTFRHS

SEQ ID NO: 929042 - protein, 2979 aa, Homo sapiens
MDKHSEPTSSVLESHVRDKHSEPSSRGLESYVRDKHSEPSSSVLESCVSDKDSELSSSVLESQVRDKHSEPSGSVVESYVGDKHSEPSRSVLESYRRDKQSEPSRCFLESYQRDKHSGTHISVPESYVLEKHPETSSCVLESFVRINKQSQQQCSGIVYPRSSVLESYVRDKLSKPSNSVLESYVRNKSTEHSSSVLQSYVSDKYSKLNSSVLESYVKDKHSKHSHCVLESYLRDKHSDTRRSVLESYPCSGSYVSDKHSEPNSSVLESYVSDKHSEPSSSLLEYHVRDKHSETSSSFPESYVSDKHSEGSSSCLESFESFVREKHTESSSCVLETYVREKHSVPPRSVRESYVRDRQSEPSSRVLEFYMRDKHSECNSSVLESYVLDKYSEDSTIFLESYVRYKHSEHSSILPEYYVGDKHSEPISRILESYVRDNTQNPAAVFWNSKTQSSVPESYVRDTPSEPSNSVLKSYVRDKHSERRSSIWESHVENKHSEPSHCVQESFLRDKQSETSSSAQESFVRYKHTEPSSSVLESYVRDKHTEPPSSVLESYVVLESYVSDKHSEPSSSVLESHVRDNHADPSSSFLESYVRVKHSEASSSALESFVRDKQTGSSVLESSMRNKYSEHGSKIVESYVREKHSDTSSSVVESFGMDKHSDSHIHSSILESYVGDKHAEPSHCVLESYPRDIHSETCRSVLESNVRDKHSEPSSRFLESYESDKHKPAVVLQKSLDKNSEPNSTVLESFGMDKHSERRCSVLESYVRDKHSEPSSSVLEYFMMDKHSDPRSRVLESYVRDKHSEPSSSVLEKHSEPSKSVLESYEKEKHSEPNSNVLESYVINKDSEVHSSVLESHVRKKHSETSSSVLESYVSDKHSETSSSVLESFVRHRRSDARSSVLESYKHSEPLSSVLESYVRDKYSEPSSSVLESHVRGKHSEPSSSVLESYVRGKDSEPSSCFLEFLVRDKLSEPRSSVLESHVRDKHSDPSSSVLESFGMDKHSDARSIVLESYKLSVILSEGQTLRNQQQFSGILCEGHSETSGSSLESFVRDKHSETSGSSLESFVRDKHSEPHRSVLESFVMGKHSEPRSSVLESYVRNKHSEPSSNLLEYNVRDKRSEPSSSVLESGMIDIDSELLSIVLESHVRIKHSEPSSSVLKSYVREKHSEPSSSVLESYVSDKPSETSSSALESSVWDKYPETRNRVLESYETFVRENHSDTRSSVLESYMRENTQNTAAVFRTPNVLESHVSDKQSELSSSVLESYVRDKHSESSSSCLQSYKYSGILCGRQTLRNLQQCSGILCEGQTEPSNTVLESFVREKHSELSSSVLESNMRKNHTDPLSSVLASYVSHKHSEHRSSVLESSLRDKHAYPQNSVLESYVRDNHSEPSSSVGQSFVMDKHSDRCSSVLESYVRDKHSEPCSRVLESFMRDKTSDPRRSVLESDMRDKHSEHSSSVLESSVRDKHSEPSSSVLESFVMDKHSDPRDSVLESYVKGKHSEISSSVLESSMRDKHSEPSSRVLHSFVRDKHSEPSSRVQECYVREKQSEPSSSVLVSYMRDKHSEPSRNVLESYMRDIHSQTSSSVLDSYGRDKHSDPRSSVLESYVKGKHSEPSSSVLESYVRDKNSDTHSSDTESFVRDKHLDPRSSVLESFQYSGILREGQPSSSVLESNVRDKHIQPSNNVLVSYVRNKHSEYSSCDLDKESELRSSVHETHVGDKRSEPSSSVLQSCGRDKYSEPSSSVMGSYARDKHSEPRSSVLESYVSTNTQNPTAGISNSGCRTNTQNPAAVFWNPINSSSVLESFVREKHSDPRNSALESYVMDKYSQPSSSVLESNVRDKHSEPSSSVLEFFVRDKHSDNRSRVLESYVRDNHSETSRSALDKHSETSSSVLDSFLRDKHSGPCSSVVESHLRDKYTEPSSSVLESHVRDKHSETSSGVLESYVKDKLSEPSSSVLGSCVSEKDSEFHSSVLESHAVTSNSALESFVREKHSDPRNSVLESYVTENLSTPSSCVLESYLRDKHSNPSHCVLEYYLRDKHSDTHRNFVESYVRANTQKPVAVLWSSLEKHSESSSRVLESCVRDKYSEFRGSVHESDECFGILCEGQKTEHRSSVLESYVSDKHSELRSSVLESYGYSDTRNSVLESYVRDTHSVTSSSVLESFVKEKDLDPRSSVLGSYVRDKHSEPISSVLESYERDKHSETSNSVLESYVRDKHSEPISSVLESYERDKHSEPSSSVLESYVRDKHSEHRNSVLEFYVRDRHSETSSCVLEWYVRDKHSESSSSVLESYVIILESYVRDKHSETNSSTVESFVRDKQRDPNSSVLESFLRQKHSDTCSSVLESYVRDKHSEPSSSVLESYVREKHSDIRSSVLESYVRYTHSDPSSSVLESFVMEKDLDTRSSVLGSCVRDKHSETGISVLEPYVRDKHSEPSGSVLESYVRDKHSEPSSRVLEFYGQTFRQSQKCSGILCEGQTLRNHQRRYGILCEGQTESSSRVLETFVREKHSDTQSSVPESHVRGKHSEPSSSVLESFVRDKPSDTRSSVLESYVKDQHSETSSSALSVLESYVRYKLSEPRSSVVESIVRDKHSESCNSVLESYVRDKHCEPSSSVLVSYVRNKHPEHSSRVLESYVRDTHSESSSSALEKHSDPRSCVLESYVRDKLSEPNSSVLETYVRDKHSEHSSSAVESFMREKHSEPDPRNSVLGSYVRDEHSGPCSTVLESCVSDQDSEIRSSVHEFHVRDKHSEPSCSVLESFVREKYSEPRSSVLESYVSDKHSEACNSVLESFVRDKHSEPHSSVLEKQTEPSSSALQSFVREKHSDPSSSVLESYVREKHSDPRSSVLESYMRDKHSEPSSSILKSFGREKHSHHRNSVLESYVREKYSDYRSVVLKSSIRNKHSEPSSSVLEPFVMDKHSDPRSSVLESYVRDKHSEPSSTVLECYVRDKHSERSSSVPESYVSNKLSELRSSVLES

SEQ ID NO: 929043 - protein, 1193 aa, Homo sapiens
MRDKQSERNNSVSEPFVRDKYSAPRSSVLESYVRDKHSEPNSSVLESFGREKHLQPRNSVLESYGQRLRPSSSVLESCVRDKPSETSSSVLESYVSDKQSEPRSSVLESYVRDKHSESSSSVLESYVRDKHSESSSSVLESYVRDKHSESSSSVLESFLRDKNSEPSRSVLESYVREKHSNPLSIVLESNMRDKQSERNNSVSEPFVRDKYSAPRSSVLESYVRDKHSEPNSSVLESFGKEKHLQPRNSVLESYGQRLRPSSSVLESCVRDKPSETSSSVLESYVSDKQSEPRSSVLESYVRDKHSESSSSVLESYVRDKHSESSSSVLESLLRDKHSEPSRSVLESSVRKKHSEAHSSVVESFLRDKHSERGSSVLESFVSDKHSDSCGSVLVSYVRDKHSDPAAFFLESYVRDKHSEPSSSVLESYVRDKLSEPSSRVLESYVRDKLLEPRGSVLESFVWDKHSETLSSVLEAHKHSEPSSSVLEFYVSDKHSEPSSTVLDSFVRDKSSDPRNSVLKSYVREQHSEPSHCVLESCLRDKHSNTRRSVLESYVSDKQSETSSGALSVLGSYVREKHSDPHSSVLESYMSDKHSEPTSSVLNLFIVLESNMRDKHSEASSCILECHVREKDSEPNSSVLESCLRNNPWEPRHCVLESYIRDTYSDTRRSVLEYYVRDKHTEPSSIVLESHVRQKHSELSSSVLESYVSEKHSEPSSSVLESFVGKKPSDPRISVLESYVMNKHSEPSSSVFDSFVLEKHSDHCSTVPLSYVRDKLSEPSSSALESYVRDKHSEPSSRVLESYVRVKHSEGSSSVLESYVREKHSEPSHCVLESYVREKHSEPSHCVLESYLKDKHSDHCSTVPLSYVRDKLSEPSSSALESYVRDKHSEPSSRALESYVRVKHSEGSSSILESYVREKHSEPSHCVLESYVREKHSQLSHCVLESYLRDKHSDMCRSVLESYKCSAILCEGQHSEPSSNVFESHERDKHSELGSIFLESYVSDKLSEHSSGVLESFVGDKHSDDHSSVLVSHVRDKHSETSSSALDSFLGDKQTEKEDSFVRNKHSDPRSSVLECYVRDKPSEPSSRVLESEVSDKHSKPSSSVPESFVRDKLSNPRSIVMESYVRNTHSESSSSVLESFVMDKHPDTLSSVLERYVMDKPTEPRSSVLESSVRDKHSEPSSSVLESNVRDKH

SEQ ID NO: 929044 - protein, 1563 aa, Homo sapiens
MGGTTIPNPAAVLCNPMEKYSNTRRRVLESYVREKPSEASSSALESFVRGKQSEPRSSVLESFVREKHSDPRNSILESYLRDKHSEPSSCVLESYVWDKHLEPSTIFWNTTVLESHVREKPSYPRSIVLESNMRDKHSEPSSSVLEPLLRDKHSDRHSSVLESYVRDKCSEPSSSGLESYVRDKHSEPSSSVLESSVRDKLSQLRSSVLEFYVRYKHSEPSSSVLESFVRNKHSEPHSNVQESDKDSETSSTVQESFLCDKHSEPQSSVLESYVRDKHHNPCSSFLESFVMDKHSDPRSSFSESYVWDKHSEHSNSGLESFVWDKDSEPSSSVLESYVRYKHSETVAVYWIPLCTGILSEGKTFRTSEKLSHPYSSVLETYVRERNSDPRSSALESYMRDKHSEPSSSLLESFGREKHSHPRKSVLESYVKEKHSDPRSIVLESNMRDKQSEPSCSVLEYYVSDNTQNPGTGFWNCLCGPVIQNLVAVFWNPISPVLESYVRYKLSEPSSSVMESFVRDKHSDPRSSVLESYVRHKHSQPSSSVLDSYVGEKHSEPNSSVLESFVMDIHSDPQPSSSVLESFVGYKHSEPRSSVLESYLRDKLTEPSSSILESQVRDKHSETSSSVLECFLRDKHSDLRSSVLQSYVWEKHSESSSSVVESSVREKHSELSSSVLESYVMDKHSDHCSRGLKSYVKDKHSEPSSSVLESFLRDKHSEPRSSVLESYMWDKHSEPGSNVLESHVRDKHSEPNSSILESYVSDKHSESSSSVLEFFVWDKHSCPQSSALESYVREEQSQPSSSVQESFVMDKHSDHTRGGVLESYVRDKHSENSSGAMETFVRATNTSQSFILDKHSEPSSSVLESYVRDKPSEPNSSVLESHVRDKHSVPNHCVLESYMRDKHSDNRRSVLESYVRDNTQKPPAVLWNLLDKSPERSSSVLESCVSDKHSEPRRNVLESFVRDKHSNPRSSVLESYVRNQQLFSGILSSDKYSDTRGSVLESYVRDKHSETSSGDLESFVKHKQTEPSSCVLESFRVLESYVSDKHSETSSSVLESFLWDKLSDAQSSVLESYVMDKHSDPISNVLQSFVMGKHSDPQTSSSVLESLEREKHLHLHNSVLESLLWEKYSDPRNSVLESYMRDKHSKTSSSVLESYVREKHSEPNCSVLESCGSDKLSEIRSSILESYVRDKHTEPSSSVLESYVSDKHSESSNSVLESYVRDKHSEPSSSVLEYFVRKNTQNTAVVDKHSENCSSVLESYVGDKHSDPDSTVVECSVRNKQSDPRSSVLKSCVRYKPSQLSSSFLEFYVRDKPSEPNSSVLESYVRTQKQLSGILCDGKHSDPSSSVLESYVTDKPSESSNSVLESSVRDIHSEPSSSVLESFVRDKPSESSSSVLESSVRDIHSEPSSIVLESYVRDKHSETSSSFLESYVRDKHSETSSSVLQSYVRDKHSEPSSSVLESYVSDKHSEFCSNVLPFYVSDKHSEASNSLLESYVREKHSETNSNVLASLVRDKHSESRRSALESQVREKHTEPSSNVLESCLSDKDTELRCNVLESHVRDKH

SEQ ID NO: 929045 - protein, 1303 aa, Homo sapiens
MRDKHSDLRSSVLESYVKDKHSERNSSVLESYVKDKHSGPSSSGRECFLMDKHSEPCSNFLESYVRDKRSEHSSSVLEYFGQTLRTQQQWSGILYEGQTLRTQQQSSGLLKPRSSVLGSYVRYKPSEPSSIVLEFYMTDKPSEPSCSVLESYVRDEHSEPSSSVLHSYVRDKHSETCSSVWESHIPAAMFRNPSGGTIIQTLRALLCNVMDKPSEPSSSLLESYVRDEHREPSSSVLDSYVRDKHSEPCSSFLESKVRDNHSEPSSYVPETYVRDKHSDPRVSVLESYATIKHSENGTSVPESFVRDKHSEPCSSVLESYVRCKHSDPHSTVLECYVRDKHSDPSSSVLESYVRYNPSEPSSSVLEFYVKDTHSEHSSSVLDCYVKDKHSEPCSSALESYSYVRDKHSEPSSSVREFYVRDKPSEPSSSVLESFLRDKLSDTQSSVLESYVRDKHSEPCSRVLESYVWDKHSDPHSTVLECSVRDKHSDPCSSVLESCVRYKPSELRSSVLEFYVKEKPSEPCSSVLESDNHSDTRSSALGLYVRDKHSEPSSSVLVSLVRNKLSEPPSSILESRVWNKHSEPSSSVREFYVRNKPSEPSSSVLESFLRDKLSDTQSSVLESYVRDKHSEPCSRVLESYVWDKHSDPHSTVLECSVRDKHSDPCSSVLESCVRYKPSELRSSVLQFYVKDKPSEPCSSVLESSSVLETYVRGQHSEPSSSVLECYVRDKHSDPHSSVLESYVRDNHSDRRGTVLESYVMEKHSEPCSSVLKYDVVDKQRTQQQWRITQNPASVFWNPMGLTNPQNPAAMFWNPMGGTNTQKPAAVFWNPFVMESYVRDQPSEPSSSVLVSFLRHKHSEPRNSVLESYMRDKHPEPSSSVLESFVREKHSDPQSSVLESYVTEKHPKPSSCVLVSYMRGKHSDHHSSVLESYVRDKHSDPHSCVLQSCEREKHSEPSSSVLESYVKDKHSEPSNSILESHRDKQSEPSSSILESFVRDKHQEPSSSVLESYVWDKLSDPSSSVPDCYGQTFRTLEKFSGILCEGKTPRTQEQFLENVVREKLSDICTSVLESDDKHSEPSSSVLESYLIGKDTEPISSVLENQQQSSGILCEGEILRTHQCVLKSIVKDTHSYPPRSVLESYDKHSDPSSSVLESYVSDKPLKPSSSVLEYYVRDKPSELGNSILESYVRVKHSEPNCKVLESYCSGVQSEDKHSENSSSVLESFVRDKHSDPQSSVVESYVRGKHTERGSSVLVFSLWDKHSEPSHGVPEFYMRDKPSKTRIIVVESFVWDKHSDTHSSVLES

SEQ ID NO: 929046 - protein, 540 aa, Homo sapiens
MFIPHKGFQNNATGICPSYWIPEQYQEGPNVFPSHRFPEHCFDSLNVFPYQRIPEDCCWVLSVCPTYRIPNHCNEEQCYECLNVFPSHRIPEHCYEGVNIFPPKGFQNTAAGIPEHCCCVLSVCPSLWIPEHCYEGLNVYPSQMFPEHYYWILRVCPSYWIPEQCCECLKVFPSRRIPELSYEGVNVFPSQRIPEHCCSVLSVYCKTLLRGSECLSLIKVSRKLLLGSEWLPSYCLPKQWYECLNVFPSPRIPEHCYEEHSYEVLNVYSSQRFTEHCYGVLSVFPSYWIPEQCCEFLNVFPSYRIREHCYEGVNIFPSQIIPEHCCCVLSVFPSYRIPEQCYKVLNVFPSHRIPEDCYEEHCCWVLSVCPTHRIPEHCYEGLNVYAQQRVPEHCYWVLSVHTSYWIPKQCYQDLNLFPSHRIPEYFNEGVNIFPSQMFPEHCCWVRSVCHSYRTPKHCYKGLNIFPSHRIPEPCYKGLNVFPSQRTDQHCYRVLFACPSKGFQSTVADFLVFVPHRIPEPFSEVLNICPQIGFQCTVAGF

SEQ ID NO: 929047 - protein, 2206 aa, Homo sapiens
MDNHSEPSGSVLESHVRDKHSEPSSSVLESFVQDKHSEPSQCVLESYQRDKHSDTCRSVLESYVRKKHSETSNGALELFVRKKQNPAAAVLESYERAKHSEPSSSVLESHVRDKYSESSSSVLESFVRDKPSDTRRSVLESHVRDKHSVTSSSALGKHSESCSSVLESYVKDKHSETSSSVLVSCVRDKYSEPSNCVLESHVRDKHSNLETLFWNPMDKHTEPSSSVLESFVREKHSDLRSSVLESYVREKHSEPSNIVLESYVRDKHSEPSSNVLESYVRDKHSEVLRSVLESNVRDKHSEPSCSVLQSYVKDKHSEPSSSVLECYVSVKHSEPSSSVLESFVRDKHSEPHSSVQQSYVRDNCEPSSSSVFESHVRDKHSEIRSCVLESYVRDKHSEPCNSVLDSFVTDKHSDCRSSVVVSYLKDKPSETRSSALDCLVRYKQAEPSSRFLESFVKDNHSNPRSIVVESNVRDKSSETCSSVLESYVRDKLSDPHSTVLECSVKDRYSDPQLSSSVLEFYVRDKPSETSSSILESHVRDQYSEPCSSVLECYVRDKHKKPSSSVLASYMRDKHSEPSRIVLESYVRDKHSQTSSSVLESYVRDKHSDSRSSVLESYVKDKHSEPSISALESYVRDKDSDTRSKTSSSILQSYVRDKRSEHSSSVLELVDRDKLSDPSTSFLESYVRENHSELSSKSSVRDKYSEKRRRVVESYVRDNHSDPSSSVLESFVMDKHSDPSSSFLESYVSRKPSEASSSVLKSYVSNKLSDISSSILESYVGDKLSEPSQCVLESYLRDKHSDSRRSILESKLRDKHSETRSSAQESFVRNKHTKLSSCVLEFYVSLKHSENSSIVSDKHSEPNSSVLESYLRDKHSEPNSSVLESYVRDKHSEPSRSVLESFVRHKHSEPSSSVLESFMRDKCSEPHGSVLESYVSEKHSEPSSSVLESVESFVMGKHSDPRSRVLESYVREKQQELSSSVVESYVRKKHSEHSSSVLEYQPRSSVLESFMRDKVSDPRSSVLESYLSDKHSESSSWVLESYQCSGMLCEKHTLRDDSSVPDYYVRDRPSIPSSSDVKSYESFVMDKHTELSSSVFESYVSDKHSETCSSVLYPIEGKHSDTQSSVLQSYVRDKHRESSSSVLESFVRDKHSEHHRSVLESYVRDKYCEANGIVLESDVRDKHSEPSSSVLESYVSDKHSEPSSKPSSSVLESHVREKHSDPRSIVLESKMRDKHSEPKSCILESHVRDTDSDPSSSVLESYLRDNPSEHSNCELESNLRDKHSDIRRSVLESYKQCSRIIVREKHSNTRSSVLESYVRDKHSEPSSSVLESYVSNKHSKLCSNVLIFYVRANTQNTAAVLWNQPSSRVLESYVRDKLSESISSVLVSYVSDKHSEHSSSVPVSFVLESYVWDKPSEPSRNFLESFVSDKHSDRCSSVLVSYVRDKHSECRSSVLESYVSEKHSEPRSSVLESYVSEKHSEPRSRVLESYVREKHSEPRSRVLESYERNKYSECSSSVLESYMREKHSEPSYSVLESYLRYKHSDTGKSVLETCMRDKHSENSSSALESFVRDKQTVHSSSSLESYVRENLSGPRSSVMKSLGQTLTPSSSVLESYVRDKHSEPSSSVLESFLKDKHSEPRSSVLESYVRDKHSEPNSSVFKSHDKHTEPCSSVLESYVRDKRSEPHSTALEFYVRDKNSDPPSSVLESYVRYKSSEWSSSVLEFDVKDKPQNLAAEFWNTNCVLEFYMRDKPSEPSSIVLEFYMRDKHSEPSSSVLESYLRDKHSECSSSVLKSYVRKNTENPVEVFWNPMGELSFQTLIGVTESYVRDNDSDPHCSILESYLRDKHSDLRSSFVESYVRDKHSECSSNLLESYVRDKHSEHSSSVPEYFVRDKHSDNLNSVLKSYVRDKQSEPSSSVLESYSSALESYETDKHSEPCSSVLHSNVRDKHSDPHSTVLEFSVRDKHSDPRRIVLEYYVRYKPSEISSSILLFLNPAAIFLESYVSDKHSEQSSSVLESFVRKKHSEPHRIVLESYMRDKYCEANDIVLESDVRDKHSEPSSSVLESYVSDKHSKTSSSVLESFVRDKHSDPRSCVLESNVRDKHSYHNRSVLQFFLTDKHSHPLSISRESYVKPSSSVLESYVRDKHSGNSSSALESFVRDKHSECSSSVLESFVRYKHSETCRRVLECDVRDKHSESSHCVLESY

SEQ ID NO: 929048 - protein, 234 aa, Homo sapiens
MNVCPLDRNTEHSGWFLSVCPSQRIPELCCWVLRVCASHRIPQHCCWIRSVCPLHRIPEHCWWVLSVCPSHRIPEHCCWVLSVCPTQRIPGYCYCVMSACPSNRVAEHCYEGLNVCPSAKITEHCCWVLSVCPSHRIPEHCFECLNVCSSQRILDNSCWFLSVCHSHRIPKHSCWILFVFPSQRNPEKYCCFRSVCPSDWIPEHFFVCLNVSPSDRTPEHRGWVLIICPPRRIP

SEQ ID NO: 929049 - protein, 1589 aa, Homo sapiens
MRKHSNPCSSALESYVRDNHSEPRRSVLESSVREKHSEQSSSVLEPYEKHSDPCSSVLESYLRDRHSEPSSSVLESYVRDKHSEPGSSALESCAIAKDPELHRSVLESYVRDKHSETSSSALESYLRDKHTEASSSVLESYVRDKHSETPSCVLESSVSGKHSEPSSSFLDSYMSDKHSEVSIKPSSSVLESFVMDKHSDPRSNVLESYVRDKHSKLSSSVLEYYERSKHSECGSSVRESHVRDKHAEPGSCVLDLYVTEKHSEPSHCVLESYLSDKYSDTHRSVLESYVRDKHPESSSGALESFVRENHSDERSSVLDKQTESSSSNLESFVTEKHSDPRSSVLESCVWNKHSEPSSSVLESYVRDKHSELSSSVLESCVSDKDAELRSSVLESHVRDKQSEPSISVLESYVRDKHSETTSSVFESYVREKLSEPSSSVLESLVREKHSEPRSSVLESNSALESFVMDKHSDPRASFLESYVTDQHSEPSSSVLESNVRDKHSEPSSSVLESYVREKHSEPSSKPSSGVLESFVTDKHSDRRSSVLVSYVRDIYSEHSSSVLESYVRDKYTEPSSSLVESYVRNKHSEKRSSVLQSYESDKHSETSHCVLESFLRDKHSDTHRSVLESYVRDKLSETRSSSLESFVSYKQTEPSSSVLEAFLTEKHTDPCSTVLESYVRDKPSEPSSRVLESFLRDKHSESRICVLDSYVRVKHSEPSRRVQESHVMDRHSDPGNSVMESLCEGQTLRTQQQCSGILCEGQTLRTQQQCSGILFRDKHSVPGSSDMESYVKYKDTEPSSSVLESYLGDKHSELPSSVLESFVRKKHSEPHNSVLESYVRHKHTEPSSSVLESYVRDKHSEPSSSVLEYYVRDKHSDTHPHSSALESYVRDKHTEASSGVLESYVRDKHAEPSSYVVETYVRDKHPKPSSRFLESVKDKHSDRRSRVLESYVRDKHSEPSSSVLESYVRDKPSYPHCSVLESYVGNKHSERSSSILESFLRDKYSDPRSNVLESYVRVKHSETRSSVLETFVRDKYSVPHSSVLESYASDKYSYPRSSDKDSEPNCRVPESYRRVKHSEPSSSAQESHVTDRYSDPQNNSSALESCVRDKHSEHRSNILDSYVRDDHTEPSSSVVESYVRAKHSEPRRSVQESYIRHKHSENSSHVLESYVRDKHSEPSSKVPETFGEILKPSSSVLESYVRDKHSEPSSSILESFVRARHSESRSCVLDSYVRDKHSEPSSSVLESYLKTSSSALETFVRYKYKDPHSTVLESYVTDKHSEPYSNVMESYVRGKHSEASSSVLESFVTDKLSDPFSSVPESYVRGKHSETSSSVLDSFGHSDPRNSVLEPYVKDKHSETHSSALESFVKDKPSESSCNVPEFLDRHSDHCSSVLEFYVRDRHSETSSTDLEFFVRDNHSHQFSSVPESYIKEKHSDPRSNVLESYVRDKLSNLRSSVPESYVRDKHSEPSSSVLEYYVTDKQSEPRNSVLECYVRDKHSDPRSSVLESYLRDKHSEPSSSVLQSIVRHKYSDPHSSVLESYLREKHSDPHSSVLESYVRVKHTDPSSSVVETFVRDKHSDTVCSVQEF

SEQ ID NO: 929050 - protein, 444 aa, Homo sapiens
MEYEAPRFSHLRQHQIIHTEEKPYQCEECGKDFKQSSDLTIHERIHTKERPYKCEECDKAFKQSSKLNKHKKIYTGDTTYKCEECGKAFSYSSTLTQHNIVHTEDKPYKCEECLTQHNIVHTGDNPYKCKDCGKIFKWSSDLTIHQIIHSGEKPYKCEECGKAFKQSSKLNEHMRAHTGEKSYKCKECGKAFKQPSGLTLHKRIHTGENPYKFEECVVFKPYYTQDNSYKRIHTGEKPYKCEECGKACKQSLGLTIQKRIHTEEKPYKCEECGKAFYCSSNLIQNDIVHTEEKHYKCQECGKAFKKSLDLNVHKIIHSGEKPYRYQEYGKVFKLSSKLNEHKITHSGEVSYECEECGKGFYCSSSLTKHTIVHTEKKLYKCEECGKAFKWSSELPIHRRIHTEEKPYKCEEYVRVFKHSSKLNEHNRNHTGEKPYKYEACGKAF

SEQ ID NO: 929051 - protein, 134 aa, Homo sapiens
MQSFPLFPLLSKEREASPHDHWHHRTMGTTARLLLMFPEVPGALQSACKRLGTGSDLSFFQVREPSSSDGLDSVPQISLPQAFLLMVHFEMLVVSAIDRGGFSSCIPPVNQNGLEDFLSLATNNLLFECVFKAS

SEQ ID NO: 929052 - protein, 139 aa, Homo sapiens
MPAVKAAGMGAVFCKATGVEMPKAAFTFTHDSLTHLERLPVLQASFMLMLETWLAEFGTMMEVLNIENWSHEEAPVFTKHVTQCREDMDEAGNHHSQQTITRTKNQTPHVLTHRWELNNENTWTQEGEHHTLGPVVEGE

SEQ ID NO: 929053 - protein, 153 aa, Homo sapiens
MAERGQCTARAVVQLAPPQGASHKPWQLACGVKPACPRKSRIEKGNMGSESPHGVPTWALPSGTVRGEPPTSSRPQNGGSSNSLHRLPGKATDIQWQPTKAARRKAILCKATAVELPKAMGTHLLHQCDLDLRHGVTPDVIETTLAIDRNCII

SEQ ID NO: 929054 - protein, 194 aa, Homo sapiens
MSLHYIDSEENPHWALPSGAARRGPPFSRPWNAGSTDSLHCALGKAADTQCPPMKAAGRRAIPAKTQGQRYQRPIRTHLLHQCDLDMRHGVKGDYFEDKTCEVNVLQDTDIRLQKTEVEQAMQEQWRASSLIQSGNGQLTGSEVQQTPCRIWKGGSQWQVCYGSDRQWLTASKSSPGSGTNTDQKSAQLQDLIE

SEQ ID NO: 929055 - protein, 142 aa, Homo sapiens
MENFPNGEFPKWREADPTVWYPQVTFTRPDADDKFQRLFLLGNQELGWGWEWQDKKEIKIHLQPKKGQVAAQEGFSISCPMAAKLQATCSQSRNQNLLPKHQLFELSVSTFHLFCPGSCSVTQGEMQWNHHDSLQLQPPRLK

SEQ ID NO: 929056 - protein, 135 aa, Homo sapiens
MNNSSMKLEYKEITGEEGQRVTKGHYLYQRVKDTWNSIASGHGVEDQAGQRGHPSECGKAWGLTAQAEWGGHPYRESAWCQSPYKRGDGSMGSKSLGGEFSKCGPWTSITWKLSEMQILDSHSRPTESRTWTWAE

SEQ ID NO: 929057 - protein, 226 aa, Homo sapiens
MLALPVEYLLSTTVKSSGAYLSTQPPLGDDPTEGFSRLYPVKAIFSSGIQRDVGPKPNNTVVFADLREPKDHCVFPGYHWWLFRAQGLFSQSMMNPAGTGSFPQGSSHLKLSNGDTSTSVAITTGCTVSDLNPAQDWALPKILPFRSGPSAAGLLEFAGGPLQTLFAWVSAAEAAEQQILVNSKCCCLIVPLEVLSQRSTRPVLIAFVDKQIFRGPCSSLIWKFFA

SEQ ID NO: 929058 - protein, 149 aa, Homo sapiens
MTKRKREEGEGISLVSLLANPIKSFLKVNSKSYKCTRFPKVDEKMLENYAELRRNRVLAEEQLTTEEQKIQKDDVIMASKDNYLTIQGLTETLRKAIRPSNSFSQLLAHFMKQIAMWETTTCQGTEGGCGPIANKELRASMNWILPTVM

SEQ ID NO: 929059 - protein, 137 aa, Homo sapiens
MHSKSCGELHGKAAAVCKGGSGRCGHIRRCLGSSGSVTCEHSKTAILLLCAHSCAEGLRCSHTSEQECFVSWKPTLILCVKHRLSAFACSPHGPDCHTPGCLEEFGTKHEKSFSTIEGTLLCPFTHQSFLVNGFPAF

SEQ ID NO: 929060 - protein, 145 aa, Homo sapiens [sequence omitted]

SEQ ID NO: 929061 - protein, 164 aa, Homo sapiens
MICGKVWGPGVAHSLTISLGGGGSHGSMSLPGVLWNIKVGIAVGRPLQSLPDHSAEQGQSFLTAPHRGSSRGQPKSSGSIWKLKEALSEVSHYNLRWGQIPFFRARAGESEKRAMSAGVASAGAVGERSTGTGSAGERSWYLALQQQGEVCPERHDYNFHGQSL

SEQ ID NO: 929062 - protein, 146 aa, Homo sapiens
MARNVGFRQDRLGIPHSRLGGVLEALLSTQDLGSVQSSSSWSRREDFRSHGGGERVKENGPRKGTATKPAHLSFAIIGGLTTLLQPCFFFHVKLCFKCLSLRIRCRRRFNRPLWEDFISPFFPFLFIFSNLTLFIVISVRPTDITA

SEQ ID NO: 929063 - protein, 144 aa, Homo sapiens
MPRQLLECPESCECLLARSRNKALLMREGRMAFTHIRGSCSELQICTCTNQIRKLWKLVDPLGTMLLYNDAKTLKNKQKNNLHELYQRSVEWTRWLSYKEDCCSLHHPLNVQVGKVQGLFSGSSFNKFPQVEIIKGPLRSQAVT

SEQ ID NO: 929064 - protein, 147 aa, Homo sapiens
MVFRPEEALWNYNEVMGFEEEDHSEGVSGRATSNSVDGVRMSRPINQPGRLHPHCKSEGDFQPHFLLAVESKQGINLAEEEGFYPATCKHPSSLEDSRLTPSSTQNTAPSSGPGTLCSSIAGSGPPGAPHLQWLFVKEVSLRYIEIR

SEQ ID NO: 929065 - protein, 135 aa, Homo sapiens
MITIALLSSLGCGKDMGGNLWKDYSMVQGCANKTICLLIDFENSASCSWRPGHRYPCSSLLHLNGTSNMQWPHTYKFQGGHQRIRPETKWCAKRKDRIHQAPGPQLEGIKGKEKGQHHSDLQGPLQKVLPGNSGL

SEQ ID NO: 929066 - protein, 144 aa, Homo sapiens
MFSTPFSASFLTMMLKTDIRYSLITKKALTCLCGNREWNGPQAYYSSSMEKWPDCYMGAPNSNLTTPQIESLQGQLKAWQWNCPCHPCTNEGPKTLSALSIPPTSCSQPKEKCPVSLPRVPPAPYCSSQDRKPLAWAHRTDPPS

SEQ ID NO: 929067 - protein, 128 aa, Homo sapiens
MNKDDGPETTEIYPKRIKIPFHSGSVQLFYEFRRDLKSPTRELGTWLLVFFALARAQTVRSSVESESHHSSDQNPRRAPMFLGKKNTVLLTACKVLCDLSHSMEESLKGVVLKQLDIYMQISKPKPRP

SEQ ID NO: 929068 - protein, 159 aa, Homo sapiens
MDVSIFVAFSVFPESKRWTALLDWGSSPGEYPAECFPTWFHSPHHFQNEWYHLLLVPLVEFGCESVWSWTFFGDVITDTVEIPRIIRGNNEQVYDNKLENLEEMDNFLEAYSFPRLKNEEIKNLNRPITTNMIEAIIKGLPAKKSPGPDGFTVEFYQTF

SEQ ID NO: 929069 - protein, 175 aa, Homo sapiens
MLPAVGGRRLRQEMPPSVPQGPLQRPDALDEAWRHFEAGPDSGTLAWFWGWWPGIWGLLCHLPGQAWVLVPAMAPALMPPGLCVKELSYSCQAPDGCLTHSSLRAFCFSSLSLTLLTWRMRTITISGLEGAQRSGHRALWARCVFLLPSPNFPPLSYLQRILCETHGDRRVVTPR

SEQ ID NO: 929070 - protein, 136 aa, Homo sapiens [sequence omitted]

SEQ ID NO: 929071 - protein, 144 aa, Homo sapiens [sequence omitted]

SEQ ID NO: 929072 - protein, 139 aa, Homo sapiens
MSLTSSELLLPVATAKRREQQLQLLLFLDSGEESGLGARPTVQGSQWKMLEEGSAHSLTVISRLPSAVEPSLASSFQVIRWRARCREDCSHAQERLASELRVITHWQNAVQGAGVTVSEERGTMMLWSGSELSNLSSPE

SEQ ID NO: 929073 - protein, 210 aa, Homo sapiens
MPLPRGPQPAWALRRGQRTEARQGLVTIVLVDQLAVYAITTTLIDQLTVYPVMTALIDQLAVYAIRTVPIDQLTVYPVTTAPVDQLTVCPVTTVLIDQLAVFAITTGLNDQLTVYPVTTALIDQQTVYPVTTVLIDQLTVYAVMDALIDQLAVYPIMTVLIDQLAVYPVTTAPIDQNAMKHRARDSNHAEESDAQLKTSLPSLLPRKNGC

SEQ ID NO: 929074 - protein, 166 aa, Homo sapiens
MLPDDTPRKWMPAALGQLHSGQPGGRWGSFSSLWKYLGAVHLVFHFFWEERDAEIWTDVDSGNWKGHHFGICTQQGLYEKGNLQAHVTPKREHQNCTEIICKSMYTKIANTNIQVYPLSLLLGITILVTAEFWRGHIQTTGDIYQDSTAKSCISVKKVEISPFTGR

SEQ ID NO: 929075 - protein, 162 aa, Homo sapiens
MCSHCSDPTYKREVILFLRWIGLRKKEMWEPGWVPFRGQVIPDYKLCRQYPQRQGPRVLAKLNISSHPKGLRDGGAAGRGNMPFAEKMHSASCGVGDSMGLGQDFIQKKEVTLHLYELGAGVRTRGHGRLRGYMGKKTRDSRKPTGYLEKSPDVRECLVGFF

SEQ ID NO: 929076 - protein, 138 aa, Homo sapiens
MVGSQEGTYGSCNVFVDKPAFPEYKVSDAKKSKFILLHFSTFKAGWDWLILLATFYVAVTVPYNVCFIGNDDLSTTRSTTVSDIAVEILFIIEGYILTVKMRGCLETFSSSEAVKSLRLECVFWLNVSTFALDEFVCS

SEQ ID NO: 929077 - protein, 149 aa, Homo sapiens
MAGKCHSSYNPIALEKAEVNFDDIILNFRTTYVSKSGQVIFEARSICIHYVTTWFIIDLIAALPFDLLYAFNVTVTVRLLRLLRLLQKLDRYSQHSTIVLTLLMSMFALLAHWMACIWYVIGKMEREDNSLLKWEVVVNENYITAAITH

SEQ ID NO: 929078 - protein, 200 aa, Homo sapiens
MRKNQCKKAENSKNQNASSPPKDHNALTAREQNWMENEFDELTEVGFRRWVMTNSSELKEHVLTRYKEAKTLEKRLEELLTRLTSLENNINDLMELKNTARELHEAYTSINSQADQAEERISEIEDQLNEIKCEDKIREKRMKKKAKSLQEIWDYVKRPNLLLTDVPESDGESGTKLENTLQDIMPENFPNLARQANIQI

SEQ ID NO: 929079 - protein, 211 aa, Homo sapiens
MLLNEWPCGIWIQYCKYEAFPGSCSAWQSAAPSSQQLPLEHRFPPLARFRNICSFFSVWLLQCVVPSSNQQRAASPGATSDSFVARSQRHWGEDVCRVPGTERPNHGIPVGPSEDQRLWYREQGLDFLGICLLACQVPYPAPIETPNLRLQRRPAEQQSSRPADQQQQNNQAEKGRRGGTSGCRGEFGQGPIGRLGCFQLLATISSVVMSL

SEQ ID NO: 929080 - protein, 858 aa, Homo sapiens
MEWNNPWTGRQSSSNGIERNHRMDSNGIIIERNRMESSSHGNEWNHHRMEMKGNRMELSSNGIEWNQHQTEKNGIIEWNRRESSNGPEWNHLMEWNGIIHGLECNHHRMESNGIIEMESPNRIEWNNHRMDPNGIILQWNRMELSNAIEWNYRMQSNRIIEWTRMESSNGMEWYHRIESNGIIIEWNRMESTSNGKKRNYRMESKRIIEWTRMESSNGMEWNNPWTRMQSSSNGIEWNHRMEMNGIVIEWNRMDSLNGIRWNHRMDWNGIIEWTRKGSLLNGIEWNHRMVSIGIIIKWNRMESPNRIEWNNHRMDSNGIILQWNRMELSNAIEWNYRMQSNRIIEWTRMESSNGMEWNKLWNEIQCDHHRMDPNGIIIQRKLTVSTSNESNGNTIELKRMLESLSNGIEWNHRIESNGTIIEWTQMELSSNGIEWNYRMQSNGIIECNRIESSNGLEWNHRIKLIEIIIECNRMVSLNGIEWNHHQMEMNGINHRMDSNGIIEWNGMEQSMNSNGIIIEWNRMESSSGIEWNYDQMESNNRMELSSNGIEWYQHQTEKNGIIEWNRRESSNGFEWNHRIKLIEIIIEWNRMVSLNGIEWNHHQMEMNGINHRMDSNGIIEWNGMEQSMNSNGIIIEWNRMESSKSNGIIIEWNRMESTSNGKKRNYRMESKRIIEWTRMESSNRMEWNNPWTRIQSSSNGIEWNHRMDSNGIIIERNRMESSSDGNERSHHLMELHGIIIKWNRMESTSNGIKWNHGTELNESNGIIIEWNRMESTSNGKKRNYRMESKRIIEWTRMESSNGMEWNNPWTRMQSSSNGIEWNHRMDSNGIIIERNRMESSSDGNEWNHHRMESNRIME

SEQ ID NO: 929081 - protein, 207 aa, Homo sapiens
MEWNNPWTRMQSSSNGIEWNHRMDSNGIIIERNRMESSSDGNEWNHHRIEMKGRIIEWTRMESSNGMEWNNPWTRMQSSSNGIDWNHRMDSNGIIIERNRMESSSDGNERKSNGIIIEWNRMESTSNGKKRNYRMESKRIIEWTRMESSTGMEWNNPWTRMQSSSNGIEWNHRMDSNGIIIERNRMESSSDGNEWNHHRMESNRIME

SEQ ID NO: 929082 - protein, 722 aa, Homo sapiens
MEWNGMKWNGMEWNEMEWNGMEWNGMESTRLEWNGMESNGVEWNEMEWNGMEWNGMEWNEMEWNGMEWNGMEWKLPELNGMEWNGMEWNEMERNGMESTRWNGMDWNGMNEMKWKGINMNGMEGNGMEGMEGNGMEWNGMDRMERNGMEWIGMECNVMEWNQPQWNGREWNGMEWNGFYPNGMEWNEGNEMEWNQHEWNGIEWNGMEWNGMEWNGMDLEWNGMEWNGMEWKGMETKGITWIHPEWNGMEWNGMSKLNGTLRSGMEWIWNGMEWNGMERNGNEGNNMDSPRMEWNGMEWDEQTEWNAKEWNGMEWNGMESTHGMECNGIGMEWNGIELNGMEWSGMESTRVEWNEMEWNGMEWNGMEWNGMERNGKEWNGIKPMEWNGLEWNGMVWKGMESKRVEWNGMVWKGMESKRVEWNGMEWYRHERNLMEWNGKEWNGINTSGMEWNGMEWNGMGQNGMESTRVQWNGKEWNGINAINPNGMEWNGMECNGMKWNEMEWIGIKWNGMEWNGIEWNGIFPNGMEWNGMEWSGMEWNGVKQSGKQWNGQEWKGMELNGMESTRLEWNGMEWNGMQWNGIKPSGMEWNGIERNGLEWNGLEWNQPEWNGMEWYKPECNGMEWNAMEWNGMEWNGMEWNCVEWNGMEWSVKELNRINQNGMEWNGMEWNGMEWNAMEWNGMESTRMEWNGIEWNRMEFTHMEWNGMEWNGMEWNAMEWNLPE

SEQ ID NO: 929083 - protein, 2812 aa, Homo sapiens
MERNGINPSGMEGNAMEWNGMERCQTEWNGMERNGMEWNGMEGIGINTSAMEWNGMEWNGMEWNGIYQNGMEWNGMEWNGKEWNGIYPNGMEWYNGMQRNQPECNGMEWNGMEWNGMEWNGINPSGMEWNGMEWNGMEWNGMDWNGIEWNGINWKGMKRNGIKRSGMELNGMETTRNQPERNGMERNGMKSNRVEWNGKKWIGMECNGMEWNGVESLRVEWKGMQWSGMERNGINVSGMEWNGRESIGMETTRVKWHRMEWIRMEWNQLEWNGVNTSGMEWNGMEWNGMEDNAMESTRVQWNGKEWNGIVWNGMEWNGMEWNGMEWNGKQRNGIEWNQPKWNGMEWNAMERKGMKWNEMELNGMEWNGMEWNGMEWNGIEWNGIYPRGMECNGMEWIGMEWKGMEWNGVKQSNGIDWNGTNPSGMEWNGINPNVMAWNGIEWNGMEWNGMELCGMEWSVKELNRINPNGMEFSGMERNGMEWNGMEWNGMESIHMEWNGMEWIGMEYNGMEWNGIIPSGMGGNGMDWNGIEWNGTEWNGTERNGMEWSGMEWNGMDWNGIEWNGINWKGMERNGIKWSGMELNGMETTRGMQWSGMERNGINVSGMEWNGRESIGMETTRVKWHGMEWIRMEWNQLEWNGINTSGMEWNGMEWNGMEENAMESTRVQWNGKEWNGIVWNGMEWNGMEWNGMESNGMESNGNGMDWNGTNPSGMEWNGINPNVMAWNGMEWNGMELCGMEWSVKELKRINPNGMEFNSMERNGMEWNGMEWNGMEWNGINSHGMEWNGMDWNGMQWNGMEWNHSEWNGREWNVLEWNGMEWNGTERNGMEWKKHEWNGMEWNGLEWNAMEWIGMECNGMEWNGMEWNGIELNGKEWNQPECNGMEWNGMELNGIYQNGIEWNGIEWNGMEWKVPEWNGMERNSMAVEWNGMEWNHPEWNGMEWNGMEWNGMEWNGKEWNGIITNGMEWNGMEWNGMEWNQPEWNGRKWNQTEWSGVEWNGIEWNGMESNEMELNEMDWNVMEWNQTKRNGLAWNGMEWNGMEWNGMEWNGMETTRVEWNGMEWNGMEWNGLEWNGMEWQEPECNGMEWNGIQRNGINWIGMETKGMEWNRVNLSGMEWNGMEWNRMEWNGMEWKLPNGMERNGIESSGLERIGLEWNKINSSGMEWNEMEWKVMESNAVEWKEMDWNGIKSTPVEWNGMKWNGMEWIGINPSGMAWNGMEWHGMEWNGMKWNGMERNRMEWNEMKWNLFNTLGMEWKGMDWNGMESTLVEWNRMEWNQWNLLEWNIMNWNGNGMQWNQPEWSGMEWNAMEWNGVEWNGMESTEWNEMEWIGMEWNQPVWNVEWNGMEWNGMELYGINASGMQWNGTEWNKRNEMEWNQHEWNGMEWNGMEWNGMDGNGMEWNGVEWNGVERGGMELNGSTRMQWNRMKWYGIEWNAMELNQHDSNGTEWNGVEWNGINPSGMERNGMEWNEWNGTKWNEMDSTQLEWNGMKWNCVEWNGTEYNVKELNRINPNGMEWKGMEWNGMEWNGMEWNGMEWNQLEWNGMDWNGMQRNVIGREGNVIEWNGMEWNQPECNGMECNGMEWNGNYQNGMEWNGMAWNGMECTRVEWNSATEWNGIEWNGMEWIETEWSGKEWNQPEWNGMEWNGMQWNGMEWNGMNGINSTALEWKAMEWHGINSRELEWNEIEWNGIEWNGINLNGMEGNEMEWNGNESTLVEWNGMEWNGMELYGINASGMQWNGTEWNKRNEMEWNRMECNGIESTRLKWNGLEWSGMEWNQPKWNGKEWNGMEWYGIECSGTKWNGMDSTQLEWNGMEWNCEERNGMECSVKELNRINPNGMEWNGMEWNGMEWNGNVIEWNGMEWNQPECNGMECNGMEWNGNYQNGMEWNGMAWNGMECTRVEWNSGMQWNGMESPRMEWSGMEWNGIECSGMEWNQPECNGMEWNGMEWNGMEWNGINQSATEWNGMEWIETEWSGKEWNQPEWNGMEWNRMQWNGMEWNGTEYNGMERNGMEWNGMEWNGKEWNAIIPKWKVMEWKGMERNGMEWNGMEWNGMESTRVEWNGMEWIGMECNGIEWNHSEWNGRECNPVEWKGMESTRVEWKGIEWNGKEWNRINPSGMEWNAMEWNGLESSQMEWSGMEWNGMECMEWHGMEWNGMEWNGTEWYGIECNGTKWNGMDSTQSEWNRMEWNGLEWNGMQWNGMEWYQLEWNGMVWNGLEWNAMEWKEIIPSGKEGNELNTINPNGMEWNGMEWKGMEWNGMEWNGMESTRVEWNGLEWNAMEWKVMEWNHSEWNGRECNRVEWKGMESNRVQSIIMEWNGMEWNGMEWNLPLWNEMEWNGVEWNGMEWNGMEWTVPEWNGIGMERNGITPSGMEGNRMEWNGMEWNGMECNGINPTAMEWNGMEWNQPEWNGMEWNQHEWNGMEWNAMKWNGTKLEWSGMEWNGMESNGMEWNQSECNGMEWQGMEWNGMEWNGFNPNGMERKGVNPSGMARNGMEWNGMECNGMEWNGMELNRINPNEMEWNGAKWNGMEWNRMESFRVEYNGMERNGMEWNGMEWNGMEWNGINSRAMEWNGMEWNGMEWNGINPSGMAWNGMEWKGMVPNRMEWNEIDWNGFNPIGTEWNGMELCGMEWNGKELEWKGMEWNGNEWNGINTRGMEWNGTEWNGMEWNGMEWNGMEWNGINPGGMEWNGMDWNGMEWNGMESTRMEWNGMDWNGMEWNKGMESNRVEWNGMELNQTEWNGMEWIGIEWNGIIPNGMERNGMEWNGVEWNGMEWNQPECNGMEWNGMEWNGMDSTRMEWKGMESTRVEWHGME

SEQ ID NO: 929084 - protein, 2937 aa, Homo sapiens
MEWNGMEWIQPEWNGKEGMQWNGMEWNGMEWNGMESTRVEWHGMERNVMESTRMEWNGVESTRVEWHGMEWSGREWYRIEWNGTKCTGMDSTQLEWNGMEWNCVEWNGMERSVKELNKINPNGMEWSGTERNGMERNGKEWNGMESTRVECGMEENVIEWNNGTEWNGMEWNQVGWNGMEWNGMEWNGMEWNQPEWNGMDCNGMERNGMESTRVEWNGMEWNGMEWNGINPGRMAWNGIECNGMEWYRIEMNGTKWKRMHSTHLEWNGMEWNCVEWNGMEWSEMNGMEWYGIECNGTKWNEMDSTQLEWNGMEWNCVEWNGMEWSVKELNRINPNGMEWNGMQWNGVEWNVEWNGLEWNAMEWNVTEWNHSEWNGRECNRVEWKGMESTRVEWKGMEWNGKEWNGINRSGMEWKGIKWYGMEWNGINSSAMEWNGMEWNLPEWNGMEWNGMECTRMECNGMQSMEWNGIVPNGMDQNGMDQNGMEWNGMEWNGMELNGKESTRVQWNGMECNGMEWIQPEWNGKEWNQPEWNGMEWNRMERNGMEWYRIEWNGTKWNGMEWNAMEWNGVESFRVEWKGIQPKCNGMESNGMEWNAMDSTPMEWKGMESTRVKWHGMELNGKEWNGMVWNRMEWNEMEWNGMEWNGMEWNGMEWSGIIPSGIEGNVFEWNGKEWNQPEWNGREWNGMEKNRMESNRVEWNGKEWNGMEWNGMERNGIEWNGMEWNGINSSAMEWNGKERNCVEMNRMEWSVKELKRINPNGMEWNGTEWNGMEWNGMEWNGMEWNQLEWNGMEWNGLEWNAMKGNGREWNGTESFRVEWKGMNGMESTRVEWNRKEWKGMEWNGMEWNGMEWNQPESNAMEWNGMEWNQPEWNGVEWNQPEWNGVEWNQPEWNGMEWNGMEWKGIEWYGIECNGTKWNGMDSTQLQWNGMERNHSDGMEWKGMGWNGMEWNGMELNSINPNGMEWYGAKWNGMEWNRMESFRVEWNGMEWKGIEWNGMEWNGMQWNGMESTRVQWNGMEWNGMQWNQPEWNEWNGTKWTGMDSTQLEWNGMEWNCVEWNGMERSVKELNKINPNGIEWSGTERNWNGRECNRVECKWNQHEWNGREWNGMERNGMESTRGEWNGMERNGMEWNGMEWNGMEWNQPGWNGMEWNGLEWNAMEWNGIIPSGMEVNVTEWNGKEWNQPECNGIEWNGMEWNGMEWNGINQNAMEWNGVELNGMEWNGMYPNGMEWNGIIWLEWNGMEWNRMEWNHPEWNGEEWNGMEWNGMEWNGMEWNGMEWNGMESTRVRWNGMEWNGMEWIQPEWNGKEWNQPEWNGMEWNRMEKNGMEWNGMEWNGMEWNQTESNAMEWNGMEWNQPEWNGVEWNQPEWNGVEWNQPEWNGMEWNGMEWKGMEWYGIECNGTKWNGMDSTQLQWNGMERNHSDGMERNGINPSGMEGNGMEWKRIEWNQPEWNGMERNGMEWNGMEWNGMELNSINTNGMEWYGAKWNGMEWNRMESFRVEWNGMEWKGIEWNGMEWNAMEWNGINSSAMEWNGMEWNAMESTRVEWYGMERNVMESTRMEWNVVESTRVQWHGMEWIGREWYRIEWNGTKCTGMDSTQLEWNGMEWNCVEWNGMERSWNGTECNGTEWNGMEWNGINSGGMVWNGMNWNGMQWNGMEWNGFIPIGMEGNVIEWNVNGINTSGMEGNGMEWKGKEWNQHERNGMEWNGTEWNGMEWNGMESTRVEWNGMEWIGMECNGMEWNHSKWNGSECNRVEWKGMESTRKGMESNRVEWNGMELNKTEWNGMEWNGIEWNGIIPNGMERNGMEWNGMEWNGINPSAMEWNGMEWNGFNPNGMERNGINPSGMAWNGIEWKGMEWNGMIWNRMEWTEMEWNGMEWNGMEWNGMECNGMEWNGMQWSGYILRGIEGNVFEWNGKEWNQPEMEWNGNEWNGMEWNGMEWNGMENNRMESIRVEWNVNEWNGMERNGMEWNEINSRGMEWNGMNWNGVKWKRMEGNGMEGNHSEWNGRELEWRGMEWNGKEWNGINTSGMEWKRMEWNGINTRAMEWNGMELNGINPNGMEWNEINPSGMAWNGKEWNVRRNGMEWNGMEWNGMEWNGINPSGMEWNAMEWKVMEWNQPEWNECNGMEWNGINPGRMAWNGIECNGMEWYRIEMNGTKWNRMHSTHLEWNGMEWNCAEWNGMEWSNQPEWNGMERNTMEWSGKEWYGTEWNGSKCNEMDSTQLEWNGMEWNCVEWNGMEWSVKELNRINQNGMRWNGTERMGMEWNRMEWNGMEWNGMEWNGITRMEWSGMEWNGMEWNGMESTRVMDWKEMEWNGFNPIEMEWNGMELCEMEWNGMEGKGIEKIQPEWNGLEWNVMEWNGMEWNGMEWNGITRMEWSGMEWNGMEWNGRESTRVGKEWNGMEWNGMEWNGKEWNGITPNGMEWNRMDWNGMERNGMEWNGMERNGMEWNGMESTGVQRNGMEWNQPEWNGVEWNQPEWSGMEWNGMERKGTVRIRMDWNEMELNGFNPIEMEWNGMELCGMEWNGMEDSTLMEWTVMEGNGMEWNGMEWNGMEFNEINSGGMEWNGMDWNGMQWNGMEWNGMEWNHSEWNGRECNRGEWKGIEIEWNGLEWNGTEWNGMEWNQPEWKGVEWNQPEWNGMEWNGMERNGMKGKYSSGMERNGINPSGMEGYGMEWKEIECNQPEWNGMEWNGMEWNGTESPRVQRNGMEWNGMEWNGMESTRIEWNGMEWNGMESTRVEWHGMERNGMEWNGTEWNGMVRNRMEWNEMERNGFNPIGMEWNGMELCGMEWNGGINPNGMEWNGMQWNGMERNGMEWYGIEWNGTKWNGMDSNQLEWNGMEWNGIVWNGMEWSVKELNRINPNGMDWNGIKPSAMEWNGMEWNGFIPNGMERNGINPSGMAWNGIEWKGMEWNGMIWNRMEWTEMEWNGMECNGVDSF

SEQ ID NO: 929085 - protein, 1269 aa, Homo sapiens
MAWNAKEMNGMEWYGIEWNGTKWNEMDSTQLEWNGMEWKCVERNNQPEWNGMERNTMEWSGKEWYGIEWNGSKCNEIDSTQLEWNGMEWNCVEWNGMEWTNGMEWNGMEWNGMEWNHPNGMEWNGMEWNGMEWNGINSSGMEWNGMDSTLMEWNGMEWNGMECNRMEWNGMVWNRMEWNEMEWNGMEWNGMDCTRVEWNNQPEWNGVEWNQPEWSGMEWNGMERKGTVRIRMDWKKMEWNGFNPVEMEWNRMELCGMEWNGMEWRVKELNKFNRNGMEWNGMEWNGMEWNGMKSTRVEWNGMEWIGMECNGMEGNGMEWNHSEWNGRECNRGEWKGTIEWNGIKSCGTEWNGTESNRVKLNGMDWNGMEWNWIKQSKIEWNGLEWNGMEWNGMEWNQPEWNGVEWNQPEWNGMEWNGMEWKGMECGMERNGINPSGMEWYGMEWKEIECNQPEWNGMEWNGTESTRVQRNGMEWNGMEWNGMEWNGINPNRKEWNGMEWNQPEWNGMEWKGMEWNGMVRNRMEWNEMERNGFNPIGMEWNGMELCGMEWNAGGMERNGINPNGMEGNRMVWKRIEWNQTEWNGMEMNGMEWNGMEWNGMERGMEGNVIEWNGNGINTSGMEGNGMESTREQWNGMEWNGMESTRMEWSGMESTRVEWHGMERSGMVRNRMEWNEMKWNGFNRIGMVWYGMEWNCVECNRMEWSNQPEWNGMERNTMEWSGKEWYGIEWNGSKCNEMDSTQLEWNGMEWNCVEWNGMEWSVKELNRINQNGMRWNGTERMGIELNGMEWNHPNGMEWNGMEWNGMEWNGMEWNQLEVEWSGMEWNGMEWNGMESPRMEWSGIEWNGMEWKGMEWNGMEWNQPECNGMEWNGINPNGMEWNGINPSGMEWNGMEWKGKERYGIEWIGTKWNGMDSTQLKWNGMEWNYVEWNGKEWRNGMEWNGINPSGMAGNGKEWNGMIRNRMGWKEMECNGMEWNGMEWNGMEWNGVESFRVEWKGMKSSVMERNGIKPSAMEWNGMEWNGIYQNEMEWNGMEWNGMASYRMEWSRMEWNGMEWNGMEWYGMEWNGINASAMEWNGMEWNGMEWNGLNPNGMERNGIKPIEMAWNGIEWKKGMYSSGMERNGINPSGMEGNGKEWKRIEWNQAEWSGMERNGMEWNGMEWNGMESTRVEWNGMEWIGMESNGRELKGMEWNGMEWNQPEAIVWNGMEWNQPEWNGVEWNLPEWNGMEWNEMDRNGMVRNRMEWNEMEWNAFNPIGMEWNGMESLRVEQN

SEQ ID NO: 929086 - protein, 262 aa, Homo sapiens
MGRERTAGSRASQQASALWQGQEETWNGKEWNGINAHGMEWNEMEWNGLDWNGMEWNGMEWNGMDWNAREWNGMKTTHPDGMEWNGMEWNEKEWHRLEWNGMQWSGMGWNQHKWNGIEWNGMVWNGLEWNGKQSTRVEWNGMEWNGMEWNGMKWNGMERNVMEWNGVEWDGINPNGRKWNGIEWNAMESTRVEWNGKEWNGMEWNGMERNGKEWKGINPSGMEWNGTEWNGMEWEGLERKGINPSGMEWNGIEWNGMEWKGI

SEQ ID NO: 929087 - protein, 136 aa, Homo sapiens
MHTISDFAMFSPVLSQLVRICCLDISSKGLMRKIFPDLYFQHCFSIASIQKDSLAGYKILADMFPLEDLVGQCHQKYSENQGTLSLSEENRNFKTERIEEEEEEEGLEEEKEEKVEEEEEGRTSPGLSADICQGKH

SEQ ID NO: 929088 - protein, 374 aa, Homo sapiens
MPRGLKGSKKDGIPEDLDGNLEEPRDQEGELRSEDVMDLTEGDSEASASAPPAAKRRKTHTKRKKERKPTVDAEEAQRMTTLLSAMSEEQLSRYEVCRRSAFPRARIAGLMRSITGSSVSENAAIAMAGIAKVFVGEVVEEALDMCEMWGETPPLQPKHLREAVHRLKPKGLFPNSNYKRVMQTGVSAEMFAIPRGLKGCNEDGIPEALDGNLEEPRAQECELRSEDVMDLTVVDNEASASAPPAAKRQKTDTKGQKERKPSVDAEEAQRMTTLLSAMSEEQLSRYEVCRQLAFPKALVARLMWSITGRSVPENMAIAMAGIAKVFVGEVVEEALDMCEMWGEMPPLQPMDLREAVCRLKPKGLFPNNYKKVMF

SEQ ID NO: 929089 - protein, 173 aa, Homo sapiens
MFAMPQGLKGSNKDGIPEDLDGNLEEPRDQESELRSQDVMDLTEAKRQKTDTKGKKERKPTVDAEEAQMTTLLYAMSEEQLSRYEVCRRSAFPKARIAALMQSITGRSVSENTAIAMAGIAKVLVGEVVEEALDVCEMWGETPPLQPKHLREAVRRLKPKGLFPNSNYKKIMF

SEQ ID NO: 929090 - protein, 138 aa, Homo sapiens
MLAQRLGVLPGGDGSGNGGSNNLGGNDDGGRGDGSNGDGVSNDGRGDDGGGRCDNGIEGMVVMVVVIMAMGEVMIIVLVVVVEVVVMAEGMVMVIILVVLVMIVEVMMVVVMMVIVEATVMLLMMMVVVVVVMVWLCG

SEQ ID NO: 929091 - protein, 149 aa, Homo sapiens
MGHLFICREDISLTSALQNRFVKAAPASLESPVIALLCMSDLTVGTSVTQLQNLNTMGTTGSQGGRGQVAALSHQRQGGCSDLGPRTHPVVISPVPECIIGIACLSSWQRPHIGSLTAKKTDGSWRMTVDYYKLNPVVTSISASVSDVV

SEQ ID NO: 929092 - protein, 165 aa, Homo sapiens
MSFSAFLYILTLNSCLPLEILLTQWLKLSKGTRALSEECIHPILAYPDPKTLKQLRGFHGITSFCQIRIPRRLLLAVQKPKEVAVLHCWGYQKGKEKETEENHRADIEPKRATRIEAVKLQIVLEMEPQMQSMTKIYCGPLDWPASPCSDVDDIEGIPPDKISTA

SEQ ID NO: 929093 - protein, 197 aa, Homo sapiens
MGKRLWNSVTGRGWNSLEGLEEGRKMCKSLELPRDLLNGFDQNAHNYMDNEIQTGPLYCVQPKDLVLCLPATLATVKRGQGATQAVALEGAGTSLGSFLSHVESVGAQKSRIEVWEPPSRFQRMYGNASMSRQKFAAGEGPHSEPLNGRSISNLYHAQKSHRPSKPAHENSQEGGCTLQSHRIGAAQHHGNPLLALA

SEQ ID NO: 929094 - protein, 149 aa, Homo sapiens
MRSCGITQHLPFYGHSAFEAIGKVKKLSLINSSFLNPGETIISEKYTQQIHEIHQKLQCLQLPLVNRKVPILLHDNAQPHVAQPTLQMFVKDQIVVGLEIKISFSQRDSRVGKSRKTGHKYQSESGTWKAKRMHERTLPELLHDNSSFT

SEQ ID NO: 929095 - protein, 135 aa, Homo sapiens
MVMRDTSSRPHCYTPTGTITVYKCHGNVRKPKPTKTKMVTRVTSGRPHCYTPTGAMTVYKCHGNIRKQADEDSKLPDLWLNGRFSVSWNIDSQEKNAPELIPKKAAGGGEGAYNGKAGATTRVEHLKQRNFCIAN

SEQ ID NO: 929096 - protein, 300 aa, Homo sapiens
MESYVRDKHSDHNRRVLVSYVRDKYSEPSSSVLESYVRDIHSDPSSSVLESYVRDKHSDPSSSVLEYYMGYKHSDHSRRVLESYVRDKHSDAPSSALESYVRDKHSDPSSSVLEYYMGYKHSDHSRRVLESYVRDKHSDTPSSALESFVRNKHSDTSSSVLEYYLKGKHSDPHSSFLESYVRNKYSEPSNSILESCVRDKHSDHSRSVLESCVRDKLSDHSRSVLESYVRDKHSNPRNSVLESHERDKRSDPHSSLLESYVRDRHSEHSSIVLESYVREKFRPQEGSSGILCEGKTFRPQ

SEQ ID NO: 929097 - protein, 139 aa, Homo sapiens
MGRNLGQYAAFKGRGSCGFPQCIVPLVHCPPCVVHDGGSDSVLKAGKKTGSKDFLIIMQEEEKTTITAIVFGTVLSFKMEIAPIHQALHSSLSPTPGGHLSSLQLYEFNYSRHLIDKWNHNRPPSFFCMWKSSFSNTNS

SEQ ID NO: 929098 - protein, 182 aa, Homo sapiens
MLGIIFRWDMMNNTTGCTETVILEVSKSHRATESHRCLRIPPPGTLRGSRTAAGPRFAVPVPVHVYADIGFTLAMVPKMIVNMQSHSRVISYEGCLTRMSFFVLFACMEDMLLTVMAYDCFVAICRPLHYPVIVNPHLCVFFVLVSFFLSPLDSQLHSWIVLLFTIIKNGSFCLTIKLSPPF

SEQ ID NO: 929099 - protein, 183 aa, Homo sapiens
MPLATSAIKGDRPIIWRTGYQTAHRMAVMHPQIPSEMGKLRLAGGGPEAVKPGQGLRKYLSLGMGPPTLPSLTFMCRLEPRYTVKMATACHQCAAMKRQGSPGVDRRRWDMELGRGDARTRQGTTWVQDTQVGLCPELAIFGKNGQETLVQYEAPAPATDRDTEPAYALPAAGMTSATPHPQG

SEQ ID NO: 929100 - protein, 135 aa, Homo sapiens
MRELLCNNRPEQLLQETATIKAPIAPADPWSQEVIYNFCKAVSSVSCMPFNIHFNSNIPPESSGDWRMQQPCKVEQSILGSIPGPCHTALSTENSSGAFGDPYGPGWLPVPRCLCCFPCLLSEPNMEEEVAVLGA

SEQ ID NO: 929101 - protein, 439 aa, Homo sapiens
MESSRNPPPEVIWLHNGNEIQESEDFHFEQRGTQHSLCIQEVFPEDTGMYTCEAWNSAEEVRTQAMLMVQAVSKDNGHFEVLQNEDVFTLVLKMVQPWHAGHYEILLKNRVGKCSCQMLLMLENSPAKALLQGSEPASCEGLCGGGVGADGGGSDRYGSLMPGWPARGQGWPEEEDGEDMRGVLKRCMETRQHTEEAIHQEEMEQLDFRDLLGKKVSTKTLSEDDLKEIPAKQMDLLLGGKKKLPAENGSSSAETLNAKAVASSKPLSNAQPSGPLKPVGNTKPAETLKSTSKEELKKDLKNDVNCKRGHSGTTDNEKRSESQGTDSPSLQGEAARSTITWTLNGKTLKTTKFIVLSQEGPCSGALGTCTKAGAKGWDPGLCGTCPHLGIRLAEPLMAPPPVAPQRRPEPELIPSSSVERALFTGLEVGDTEAQASEEL

SEQ ID NO: 929102 - protein, 295 aa, Homo sapiens [sequence omitted]

SEQ ID NO: 929103 - protein, 148 aa, Homo sapiens
MQLQSTWQIWPAAIATLEHTAGFMGTVNASSRAQRTSDRAVNCNSRAHCRSDGAVNCSSRAQGRSDGAVNCSSRAHGRSDGAVNCSSRAHHRSNRAVNSNSRAHSRSDGAVNCSSRAHRRKFRSGTSQTALAPSHLHSEAILQSEWQA

SEQ ID NO: 929104 - protein, 208 aa, Homo sapiens
MDWNQPDYNATEWNGREWNAMENNGMNWNAMEFNGMEWNGMESTRVESNGMEMESNGMEWNKYEWNGMEWNGIEWNGINSSGKECNGKEWNGMEWNGMQWNARVWNGVNASGMEWNGIECHGMEWNGVEWNKHQWNGMEWNGMEWNGMKRTGMEWKGMEWNGTEWIGMEWNQHDWHGMEWKGMEWNGMEWYGISPSGMEWNGMEWNGT

SEQ ID NO: 929105 - protein, 735 aa, Homo sapiens
MESKRIIEWTRMESSNEIEWNNPWTRMQSSSNGIEWNRRMDSNGINIERNRMESSSDGNEWNHYRMESNGIMKWNQMESSSNGIKYNYGMKSNMETNGIIIEWNRMESLNGIEWNHLQMEMNGIIKQWIRMDSLNGIRRNHRMDLNGIIEWTRMESLLNGIERIVIEWIECNHRMVSNGIISKWNGKESSYRFEWNYHRKDSDGINIKRNQTEWNHRMDLNGIIEWTRMESLLNGIEWNHRMVLNGIIIQWNRMESPNRIEWNNHRMDSKGIILNWNQMELSNAIEWNYRMQSSRIIEWTRMVSSNGTEWNKSNGIIIEWSRMESTSNGIKRNYRMESKRIIEWPRMESSNGMEWNNPWSRMQSSSNRIEWNHRMDSNGIIIERNQMESSSNGNEWNHHRMEVKGMETNGIIIEWNRMDSLNGIRWNHQEDLNAITEWTRMKSLLNGIEWNHRMVSKGILIKWNRMESPNRIEWNNHRMDSNGIILKWNRMELSNAIEWNYRMQSNRIIERTRLESSNGMEWNKSNGIIIEWTGIESTSNGIKRNYRMESKSIIEWTRMESSNGMEWSIPWTRMQSSSNGIEWNHRMDTSGIIIERNRMESSSNGIEWNHQMEADGIIIKWNRVELWNEIQCHHHRMDSNGIIIQWKLMESTSNGIEWKHHRIERNGIIMNLKWMDSSSKGFEWNHRMKLIEIIIKWNRMESLNGIEWNHHQMEMNGIIIEWNRMDSLNGIRWNH

SEQ ID NO: 929106 - protein, 146 aa, Homo sapiens
MARDQQAAPPAAPVQDPLGEASWAPERNEQLWTGETNNSRCATLRAVTLAVKIAASLLKPARPRTHGKEETPNTSEHQKEQTPDTPPLRTAPTDILNGIMNTGAQRVEGRKGVRDEYLPVEPQGANINDLNTSKNEIWNKQKVRRR

SEQ ID NO: 929107 - protein, 150 aa, Homo sapiens
MDQSAGCGFTPEAIETTNPLGGKNNSRHTTLRTVTLTTKVCSFTPEPARPRSHQKEESPNTSEHQKEQTPDTLPLRTVTLTARCCEPLKGTEIVHSESSDFKAVACQCSQLNKALPSTTRCLRGFVCSSSCYNYSPQKCIVHCKINKTII

SEQ ID NO: 929108 - protein, 138 aa, Homo sapiens
MTATYLTHCKEMDTGEPGYGLACAQMEGVKLLTLELALQAGCAAVRGSQLLRGATEPEQTVEIKANSVKSYSTHTTSLVPQETSRIKTLAEWKCSHTSSYCVLEDALMSLKRGRGKSFEFSSAVTRWRCVKGYFLPGC

SEQ ID NO: 929109 - protein, 148 aa, Homo sapiens
MERKTNTKQRRQHQQQKNKLMKMRNNQQKNAENPKGQSAFSPPNDHNMSLARAQNWTEDEMDELTEVGFRRWVIKNSTELKEHVLIQCKEAKNLDKRLEELLTRITSLERTINELMELKNTVQELHVSIDKSTKWKKGYQSLKTTLLK

SEQ ID NO: 929110 - protein, 260 aa, Homo sapiens
MSRALDVLQMKEEDVLKFLAAGTHLGARAIAAFKNPVDVSVMSSSNTGQRAVLKFAAATGATQIVGRFTPGTFTSQTQAAFREPRLLVVTDPRADHQPLTETSYVNLPTIALCHTDFPLRYVDIAITCNNKGAPSVGPSWWMLALEVLRVCGTISLEHPWEVMPDLYFYRDPEEIGKEEQVAAEKTVTKEEFQGKWTAPAPEFTAIQPEVGDWSDGVQVPSVPIHQVPTEDWSAQPATEDWSAAPTAQATEWVETTTEWS

SEQ ID NO: 929111 - protein, 134 aa, Homo sapiens
MKDETSNSEGAKATGHELANQPPQQLMPAGQWRPEVTRDIAAEASENPGYSLKSRTQISPPTAALRLPLYPVGRLGKSRGRRRPYQEAAGKLQSYLEKPHYLQGKGPIPSPSVFLTPSSIPEKGPHQTLNLLVP

SEQ ID NO: 929112 - protein, 166 aa, Homo sapiens
MNIKQVFALMEKVLLVWIEDQISHNIPLIQSQIWSKALTLFSSLEAEIGEKAAEEQLAANRDQFMRFKERGQLHNINVQGDAASVDVEATASSYLENLSNFNDERSYPKQQIFNAEETAFCWKKMSSRTFTDAEEKTVPGFKTLQDRLPFLSGTNAVDGITLKTEL

SEQ ID NO: 929113 - protein, 552 aa, Homo sapiens
MMCFPDFPFPDDFPNFMHNSKIQEYIIAFAKEKNLLKYIQFKTFVSSVNKHPDFATTGQWDVTTERDGKKESAVFDAVMVCSGHHVYPNLPKESFPGLNHFKGKCFHSRDYKEPGVFNGKRVLVVGLGNSGCDIATELSRTAEQALGWVLKTVVNITGMIPALEQELPLEKKDKQVIQALNAMIPKLDASQRSQSNGQKGLTAERCLLTPLSAAGVIDPFLKRDLGCSPEYPLQMVTNFMVELVFFKVMISSRSGSWVMSRVWDNGYPWDMLLVTRFGTFLKNNLPTAISDWLYMKQMNARFKHENYGLMPIKRVLRKEPVFNDELPASILCGIVSVKPNVKEFTETSAIFEDGTIFEGIDCVIFATGYSFAYPFLDESIIKSRNNEIILFKGVFPPLLEKSTIAVIGFVQSLGAAIPTVDLQSRWAAQVIKGTCTLPSMEDMMNDINEKMEKKRKWFGKSETIQTDYIVYMDELSSFIGAKPNIPWLFLTDPKLAMEVYFGPCSPYQFRLVGPGQWPGARNAILTQWDRSLKPMQTRVVHQSHSCDNPLIH

SEQ ID NO: 929114 - protein, 134 aa, Homo sapiens
MVYRASKVIGQPQSSAARLRRSGKESESLGPEFHGLWEWLPVGSRTDGTWLRRNPGLRAFLGLVARFLALVASSWGRQAWRNAWSLRFRRLEVLVCWRCGWGLSHSGGKELQLRNMLLFGCLYSIIVHLEGEVN

SEQ ID NO: 929115 - protein, 142 aa, Homo sapiens
MGQKRLVSVPGATRAIAEFSSEAEQCAQLGQILRLLGPKLKQLGHPTGREVKCSECACSFECGHSGSVLSTSHAFAHFILTPPGDTHVNAINRTQKIQLLIQKASENSPCINIQCSSINHLNVPHGNLAQYTFLGSSEWFLP

SEQ ID NO: 929116 - protein, 304 aa, Homo sapiens
MWSQEEPTVEWTAPQLLPPALGPNINTDVGVGVDIGEGVGIGVGIGVDIGEGIGVDVGEGVGVDVHIDVDVVIDLCVGEGVGVDVDAGVDVGVGVDAGVGEGVGVDVGIDVDVGVGIDIGVGLGIDISKGAGVDGGVDIGVGVNIAEGVGVDVGVDVDVGADMGVGAVVGVGEVGVDEDVGVSVGVDVGVDVGVGVSIDISESLGVDVGVDIGVSVDVGEGIDVDGVGINVGVDVDVGVDIGVGISIDIGERVGVDIGVGVDVGVDIDVGVDVDIGVGVGVDIGVSIDVGEGIGVDQDLGMLLL

SEQ ID NO: 929117 - protein, 175 aa, Homo sapiens
MTNSIITAFEKARPAGHKGGSRAATSHTETESSVGSQSGDVRPAQPEVEKGWLWTVTGEEEVSLQGDDLACALEAGECVRKRCAQAEANGVEILGHPWLLGLFLMPLRLDSGLTLSPATHVFAGVSCSTWVGLHEGTVELGMNYFKRLFLVCRELPRLILTPLGPYFFDHIHRDG

SEQ ID NO: 929118 - protein, 121 aa, Homo sapiens
MLLLFFQTYHWLKKQGHLFQAEPETCCGPCWSTLPFTIRFSLSPSLKKAREPVNTARESNPVVVCLPLERAAHLRLQGVPQLELLQEDTFPTPKKGPNRVVTARQDGHLACSHSRKASNSH

SEQ ID NO: 929119 - protein, 505 aa, Homo sapiens
MEGLEEDRKMWESLELPRDLLNGFDQNADSDVNNEVQAEVVLDGDEELIKFNLAAEICICNEEANVNSQDNGENVSRACQRSWWQPLLSQAWKLKREKWSCGLDLGPCCSVQPQDLALCIPAAAVPAQAGVKGGQGTAQAMTSEGASPKPWQLPCGVGPGDAQKSRIEVWEPLPRSQRMYGNAWTSRQKFAAGVEPSWRTCARVVWKRIGAVGKGPLSSSPQNGSSTDSLHCAPGKAADTQHQPMKAAGAEVVPCKVTGVELPKTMGVHPFHQCAPDMGPSAAGLLEFARGPLQTLFAWVSAVVAAEQQIFVNRECCCLIVPLEVLSQRSTQPSQPYTLSYKWKPWEFSEVRGKDRSSKGIPGPLSRTQCPLQQVIRRQDTGPSSLFPIMEENIQIDPFLGQLSKCLILYCSILKALTMEILTAGLFEYLSRLRGSQLSGSNQRQMFSAQCSRQCKSLILERREIHICPGPGGPSQTAAGKLSPSGTQGSFWVEKAENDIWGVWI

SEQ ID NO: 929120 - protein, 275 aa, Homo sapiens
MSQQVSMAVTLLSQKAGSQGLSPDALKQAKLLQANIPSANIPSATSSLSPVLTPFALKPDGTRLFPNVMSPLASDLLPQMPGSMLFQSPFSIVALEPSKKGKRKPPNISTVDLKPKDEAVLYKHKCQSSLPSVMTALLAAQPRQQAKQHGCMWCGKNFSSTGALRIHGWTHTGEKSFVGNICGRVLPPKPNTRQTLAQPRWRRNSLNVNGTYGTFYCVPTRPRGHLWEQLVCGVLMNGISVLIKKSQRAALPLLLCEDTVRSQQSVTWKRALTRT

SEQ ID NO: 929121 - protein, 147 aa, Homo sapiens
MEQNIMHRAKSRHSSRSCTPPLACIFGNRLWGTIPRGQKGFQENKCKKEHNTKMYKNRENQDYKRGTNETDECTPEEAWLIQQIKLQLVKTEFHIKQEEVTKKKELITKTKKRSQAALQEAMETNRKRKEEKGTCHMAVCEQYKTKL

SEQ ID NO: 929122 - protein, 354 aa, Homo sapiens
MMVLQEPVQAATWQALNHYAYRDGVFLAERLYAEVHSEEALFLLATCSYRPGKTYKAYRLLKGHSCPTPQCKYLLAKCCFDVSKLAEGEQILSGGVFHKQKSHDDIVTEFGDSACFPLPLLGHVYCKTDRLAKGSECYQKSLSLNPFLWYPFESLCEIGEKPDPDQTFKFASSQNFRNCLPNSCKAQVPNHSLCHRQPETILTETPQNTTELNRLNLESANSKYSLNTDSPVSSIDSAVISSDTVPLGTGTSILSKQVQNKPKTDRSLLGGPASLSPLTPSFGILPLETPSPGVGSYLQNYTNTASVMDVTSTGVPPKKSVARIVQIGAKSVFSQSGNSQEVTPILAQTESSGP

SEQ ID NO: 929123 - protein, 165 aa, Homo sapiens
MSLLFSFLNPRGLSLRASSAAILLQPTTGDCGGGGGGGGFVFQLLFCCCCCCCCCCCCCCCWCSKAPTAAVGFSVGEIWERTDAASRSISCQTSLAQRPPPAACHLPRSSEADAPPPSHPATLLRLAYARRPQGSRRSLPPDAPGGPDGWDETGPPQTVLFLGVG

SEQ ID NO: 929124 - protein, 139 aa, Homo sapiens
MFSFPFCKLEALGDSESKEESNSENLKLSPEGWVRVAKQEGGRNGLEGARDAARRPVVVAAVWERWNGGLGYGMGRHGERLVKLKYWDLKQQFWGKILSSVEYEGPVGCQRKYIDWAVGHVNMDSREQETDLSNKGIAW

SEQ ID NO: 929125 - protein, 144 aa, Homo sapiens
MAFSVLISCPGRLSSRSVTIRGILGQPVTRLINEAVIPLYPVVPNPYTLLSQIPEEAEWFTVLDLKDAFFCIPLHSDSQFLFAFEDPTDHTSQLMWMVSPQGFRDSPYLFGQALAQDRGHFSSPGTLVLQYVDDLLLATSLEAS

SEQ ID NO: 929126 - protein, 132 aa, Homo sapiens [sequence omitted]

SEQ ID NO: 929127 - protein, 154 aa, Homo sapiens
MGIQSPAHVKCLVVILYHILLTLPGCPGPLCCPLDIELLQPFLDSYTCYGWGPFPDSSHLNRTFTLIGAECLWLNGPCFIGELIEDNLMEVSASDSVLHDEEDVKVPENKLKLYNLAEGFRLFKTAFDVFYDMPTEHEDDEDEHLYDHPLPLNE

SEQ ID NO: 929128 - protein, 144 aa, Homo sapiens
MGGDVSKRDKRLTKCPGQCEKKCGIRSPTKSPHWGTAKWICEKRPLSSRSQNSRSTDSLHHAPGKASGTECQPVKAAEGIVPGRVTGAELPKALGAHPLHQCGLDMSHGESKMSSSYIHKICLYIKDDNVEFYLSHVLLENSEG

SEQ ID NO: 929129 - protein, 169 aa, Homo sapiens
MCFVKQMLEGSMLGWGSHGGPPLGQCRRKMWVGSSHRVPNGTLPNRAVRRGPPSSRPQNGRSTNSLHCAAGKAADTQCQPVKAARRGAIPCKVTGVELLKAIVAHLLHHCDLDVRHGIKGDHFGTLRFDCLARFWTCMGPVAPLFWPISPIWNGCIYPMPVPTLYLGSN

SEQ ID NO: 929130 - protein, 144 aa, Homo sapiens
MLVSAQSLERAEVARRSWCVSTAPSVCTPSQAAAVPRLSPNFALRLEWALTAGRSQAVGAGTCRDAWVFRHGIGSRHMQRCLSLQPWIEQLQLCPGAQVSCLLCGVGELGLQPLFGWLQLCLGGNVGELCSNTFLLLESTTSEL

SEQ ID NO: 929131 - protein, 178 aa, Homo sapiens
MSVLRVSLGGHTLIVIPEVLLSSVDECSGAQGDWSAGLEVDVFLGAHGEDVVVEQEVCASVPEIAAEEEAYEEDADSEFPELWMDSAAGSAAGLYPSARSMFSPYREGPIRGPCALAPNPSSERRSPRPIFDLEFHLLEPVPSSPLQPLPPSPSPGPHARPELPERPPCKVRRRLFQE

SEQ ID NO: 929132 - protein, 283 aa, Homo sapiens
MMSIGTLLAYTLVSVCVLLLRYQPESDIDGFVKFLSEEHTKKKEGILADCEKEACSPVSEGDEFSGPATNTCGAKNLPSLGDNEMLIGKSDKSTYNVNHPNYGTVDMTTGIEADESENIYLIKLKKLIGPHYYTMRIRLGLPGKMDRPTAATGHTVTICVLLLFILMFIFCSFIIFGSDYISEQSWWAILLVVLMVLLISTLVFVILQQPENPKKLPYMAPCLPFVPAFAMLVNIYLMLKLSTITWIRFAVWCFVDWLSYAKARCEPAATQAALPAIRQRKTP

SEQ ID NO: 929133 - protein, 181 aa, Homo sapiens
MQLPEEVDLVSQPFQARLQLCLVHVSFIHVLLDEDKFILRFCTLIDLILILVLEVLHQPLHIAKLRLQLQLLLAQSLQLPPKVVHVALKYVDPSHLLLLQEAPLGLQHLVLLLQEPYLVDEGGKLVVEGLDLLLLLGVHGLDIGIYLQVNRAQQALHIVENGVSISSSIYPLSYNQSNYTL

SEQ ID NO: 929134 - protein, 152 aa, Homo sapiens [sequence omitted]

SEQ ID NO: 929135 - protein, 139 aa, Homo sapiens
MKSYFKLNLLANCPLPSDEGFRPKSEVYAASLLEFCRRSTPANAFCLSITSRGCRTANIAEQQILLPDPSSGTLSQRGIWLYEVSERKSLDPWRFPGEAMPCLALAKHPLSMDCIHFPTSPNEMNQIPQLEMQKSPVFC

SEQ ID NO: 929136 - protein, 191 aa, Homo sapiens
MEAKQKGFPLIKPSDHMRLIHYHKNSMDETAPMIQLSPIVSLPQHKGITGATIQDVTLQRPHTGTTEWTKHQRWWPALPTLGALSCLRQVPLVASGSLEFQACGSYLVRCHGRGDLRSMLIGSLDLAPFLGVCTDVPPYLSCSHLCEGSQEYVKLLGICACLSRCSAVTPYSSVYQTQGPGGVGSQGDLLI

SEQ ID NO: 929137 - protein, 138 aa, Homo sapiens
MREAKNSPTDLFHGTLNSSGLNLDGSLLRDLASSPQCNGAVSLFPGRSAGREIIDTHKIVKAGYRGVTAFWSHGANNALDIPAFIIKFNEGGGREALQLQYWLLPLHQGAQMTYTAGIHRSGDGCPSHQELSRLRGKF

SEQ ID NO: 929138 - protein, 145 aa, Homo sapiens
MTPWQLTSPLCLLESEQVMGYVCGCSGDVVGQGQRIPGQGSGTSGMQLGCFPQEWPGRQSWEEPADKGVIGSNAPLSSGCGSSAVSQPCRQQELQPLSARWRALCDRHLQLHFPAASQHSKTFRALTIVPSDSLALLQLLSSFST

SEQ ID NO: 929139 - protein, 150 aa, Homo sapiens
MGFKLIWVEDKGVPPEAGLEPCQKEDSEEPDKCSRQWKGSLSVDVPKSIHSPTEGHLDLQFLAMMDNTTKNTYLKDFNEAFKITDRILRGENDFSAFGVPEALSRGDCQKLLATVAFSSSEGWKREQLQASEAFGGSDAGSFQQGQWIPT

SEQ ID NO: 929140 - protein, 154 aa, Homo sapiens
MGRNQPKKAENSKNQNASSPPKDHNSSPVREQNRMQNEFDELTEVGFRRWVITNSSEPKKHVLNQCKEAKNLEKTLDKLLTRITSLEKNINDVMELKNTARELREAYTSINSRIDQTEERISELEDQLKYSVKTRLEKKELKETNQAFKKYANM

SEQ ID NO: 929141 - protein, 352 aa, Homo sapiens
MEWKGLEWNGKEWNGMEWNGMESTRLEWNGINPNTMEWNGMERNGVEWNGINPSAREWNGMECNGMESSGMEWNGMECKAMQSTRLQWNGMECNGINPSTAEWNGMECNGIESSVMEWKGMEWNRMEWNGMEWNGINSIAIEWNGMELTRIEWNGMEWNGTEWNGMEWNGKERKGMEWNGMEWNGTERNGMEWNGMEWNGINTNRMEWNGMEWNGMQWNRIIRNGMERNGMERNGMEWNGMEWNQLDCNRMEWNGINANRMEWNGMERNGMEWNGTERNGMEWNGMEWNGINASAGEWNGIEWNGMESTRVQGNVMERNAMEWNHPEWNGMEWNAKPWNQLDCNGMEWNGKE

SEQ ID NO: 929142 - protein, 205 aa, Homo sapiens
MAKRGQHRAQAIVSEGANRKHWQLSRGFEPVGTQKSRIEVWEPPPIFQRMYGNAWMSRQKYAAGAEPSWRTSDKAVWKGNVGLEPPHRVPTGALPSGAVRRGPPSSRPQNGRSTNSLHHAPGKATDNTSLLKQPGEGLYPAKPQRQRCPRPCEPTSCISMTWILHDILEMSLPSHVDTSLLGINHSSDDLFSSTVLSLKYFEEQG

SEQ ID NO: 929143 - protein, 573 aa, Homo sapiens
MGPSQKLLGIYRKYMTCRADLQCVYFLQYTPDHVVGPGADIDPTQITFPGCICVKTPCLPGTCSCLRHGENYDDNSCLRDIGSGGKYAEPVFECNVLCRCSDHCRNRVVQKGLQFHFQVFKTHKKGWGLRTLEFIPKGRFVCEYAGEVLGFSEVQRRIHLQTKSDSNYIIAIREHVYNGQVMETFVDPTYIGNIGRFLNHSCEPNLLMIPVRIDSMVPKLALFAAKDIVPEEELSYDYSGRYLNLTVSEDKERLDHGKLRKPCYCGAKSCTAFLPFDSSLYCPVEKSNISCGNEKEPSMCGSAPSVFPSCKRLTLERQGHKQPPPTQCLCQRQLTEYGPLEIFCPQALVYYIALNPRNQIPKFKMGRKAAETTRNINNAFGPGTANERTVQWWFKKFCKGDESLEDEERSGRPSEVDNDQLRAIIEADPLTTTREVAEELNVNHSTVVRHLKQIGKVKKLDKWVPHELTENQKNRRFEVSSSLILRNHNEPFLDRIVTCDEKWILYDNRRRSAQWLDQEEAPKHFPKPILHPKKVMVTIWWSAAAGIGQQKGPNSSPRQCPTACCTTHTSKVE

SEQ ID NO: 929144 - protein, 164 aa, Homo sapiens
MGLKLPGNCLEKEEHILKVCELFKIEHTLSSWTPYHFLCQIFDINMQSSLDEESKHLVERNGYHRHIVILPPKVFTSDRKYSDYIFNERTVKKVKPCPGVGHWRTGHPFITDEIDHEDYGGGFPPSYIFGCWFGGNHQRQRKEMLRQADWFSWMKRNRYKVLVW

SEQ ID NO: 929145 - protein, 119 aa, Homo sapiens
MQGTGDSPSFSETERPLGLVSGSKPITRGHQGAGPQGAPGWIANICYRTNWFVSPLCNNIPITVRQQDLQQRKFHNHSTPSEDTRGDPQIHLTKEFWAGAFKGIVEGKGLENWGCWPNV

SEQ ID NO: 929146 - protein, 620 aa, Homo sapiens
MLLTCLGKDYLSDLCVSMNKSIPVTQELICKAVLNPTNADILIETKLVLSRFEFEGVSSTGENALEAGEDEEEVWLFWRDSNKEIRSKSVRELAQDAKEGQKEDRDVLSYYRYQLNLFARMCLDRQYLAINEISGQLDVDLILRCMSDENLPYDLRASFCRLMLHMHVDRDPQEQVTPVKYARLWSEIPSEIAIDDYDSSGASKDEIKERFAQTMEFVEEYLRDVVVLRGGGFLPMTPMAAAPEGNVKQAEPEKEDIMVMDTKLKIIEILQSEAKSRRTWSSDGQEKMSVPAPEQVDSVFLHLFALSRPSVDWMVPTHTGEENTPLDLDDHGGRTFLRVLLHLTMHDYPPLVSGALQLLFRHFSQRQEVLQAFKQVQLLVTSQDVDNYKQIKQDLDQLRSIVEKSELWVYKGQGPDETMDGASGENEHKKTEEGNNKPQKHESTSSYNYRVVKEILIRLSKLCVQESASVRKSRKQQQRLLRNMGAHAVVLELLQIPYEKLVNSGEDVLVFYNDRASFQTLIQMMRSERDRMDENSPLMYHIHLVELLAVCTEGKNVYTEIKCNSLLPLDDIVRVVTHEDCIPEVSEPSLAVPFSLLCGVCCRGSLGDMVVAGLGEPSWL

SEQ ID NO: 929147 - protein, 138 aa, Homo sapiens
MPSQKASVESCIRVLSDVAKSRAIAIPVDLDSQVNNLFLKSHSIVQKTAMNWRLSARNAARRDSVLAASRDYRNIIERLQDIVSALEDRLRPLVQAELSVLVDVLHRPELLFPENTDARRKCESGGFICNAGNALKYL

SEQ ID NO: 929148 - protein, 151 aa, Homo sapiens
METSDLRDEERALPALAMAHCQQEDPASPGEEEGASNLVIDLIMNASSDRVFHESILLAIALLEGGNTTIQVGRQLGYWYGIPAEQEESLFWEPDVWVVLSMWERSEASSGVRAALLLHVGVRELLALKKEGGSDLSPAGVPRDTALLRKL

SEQ ID NO: 929149 - protein, 467 aa, Homo sapiens
MLDGLSWCSGGSWKPLRRGICLHRACTLHKADSKEVNEDKKSEKFFKVFYDRMKVAQQEIKATVTVNTSDLGNKKKDDEVDRDAPSRKKAKEPTTQITEEVRDQLLEASAATRKAFTTFRREADPDDHYQPGEGTQATADKAKDDLEMSAVITIMQPILRFLQLLCENHNRDLQNFLRCQNNKTNYNLVCETLQFLDCICGSTTGGLGLLGLYINEKNVALINQTLESLTEYCQGPCHENQNCIATHESNGIDIITALILNDINPLGKKRMDLNNASKLLLAIMESRHDSENAERILYNMRPKELVEVIKKAYMQGEVEFEDGENGEDGAASPRNVGHNIYILAHQLARHNKELQSMLKPGGQVDGDEALEFYAKHTAQIEIVRLDRTMEQIVFPVPSICEFLTKESKLRIYYTTERDEQGSKINDFFLRSEDLFNEMNWQKKLRGGFQRISNNTERHSSGISQTWA

SEQ ID NO: 929150 - protein, 280 aa, Homo sapiens
MSFWSSISFNLAVLMNLLVAFFYPFKGVRGALPFEGFQKGRGTLEPHWSGLLWTAMLISLAIVIALPKPHGIRALIASTILRLIFSVGLQPTLFLLGAFNVCNKIIFLMSFVGNCGTFTRGYRAMVLDVEFLYHLLYLVICAMGLFVHEFFYSLLTLPFNGDWCAWSTKIEAPQLAAFGGSERKAPQELGQPRNSRVTQPHCVLGTPDLLSRTYTKRSVFEAVIQQLSGSPFLVNTCSDHKRLSPKRQEMPLWSTPPCPSRHFDLSSNLPPVGLASFLFI

SEQ ID NO: 929151 - protein, 209 aa, Homo sapiens
MRWGALHIETGESLASEFLFSDVCRVESGENCSSPAPREELVPAEETEQDKEHTCETLLMCIVTVLSHGLRSGGGVGDVLRKPSKEEPLFAARVIYDLLFFFMVIIIVLNLIFGVIIDTFADLRSEKQKKEEILKTTCFICGLERDKFDNKTVTFEEHIKEEHNMWHYLCFIVLVKVKDSTEYTGPESYVAEMIKVLEGFLEILCRLYP

SEQ ID NO: 929152 - protein, 142 aa, Homo sapiens
MTKAAGITVLDIKIFHKVNRTACYVAQKQTPGPSVNYSRSGNFHLRNIINSFMVPAIWLANCLFTELKFYIQKEEEELAFSLHEHTLERSCEDTATARGGHLQARKQTLTRHSSCCHLHLGLQSFQNSSNLYYIVGHLLAMV

SEQ ID NO: 929153 - protein, 183 aa, Homo sapiens
MGHEFKMGCKAAKTTCNINNAFGPGTANECAVRWWFKKFCKGDESLEDEERSGRPPEVDNDQLRAIVKADPLTTTEEVAEELRGDYFTVIQHLRQIGKVKKLDKWAPHELSENKKNRRFETSSSLILRNNNEPFLSSIVTWDKNCILPDQLSGWTEKKLQSTSQSQTCAKSRAWSPFGGLLSV

SEQ ID NO: 929154 - protein, 141 aa, Homo sapiens
MPLHSSLGDNGRLGMYYSEECNSRCLGNMKHGSSQTTHSGKTAFRGKQCLSRNLYERRAPDMEIPREEDKRHKEQQTQSTLYENECGNRKEDHVARAESAGEKVEGNEVRKVAKGKIRVLLRQQLCAETTIHIKVEEEKLP

SEQ ID NO: 929155 - protein, 193 aa, Homo sapiens
MNTEWIIAVTQEGLSCYYNLPIKEKAHRGCVKSRIENLVSIDKIQYEYIVHKLEFVEDISNQKENGDDKIDRYTNTFRTLSLLVVISISLDFSASSLSICLQWKIRGVIDINLFSSYLKEKLNDTENPHLKNRKKEVIKYNTETTVILPDAPLAALLMDSFGARQEWAAWGPRELPGPFYGFLYPFILFGSLN

SEQ ID NO: 929156 - protein, 151 aa, Homo sapiens
MQLVSQSQDTNNLHTYVVYRKALVTDPDYCITQLPFGEKQQKPYKNQLEPCKNQHKRDFIVSLILAIKGLDPYTTGLRTSNDVVRAFYLYIFLFFLSVFLNVGLIFFLLFLIDFLRLRAKLDLGRPRLADFGLQCHRDTIQCNTVEYNTIR

SEQ ID NO: 929157 - protein, 140 aa, Homo sapiens
MHYSSQHSPSWLPLARGGSSPTPCASWRKCLVLEFLAFLWAELGSEAKEEKEEERTCRLLGKCVDAENHSLVIGGLFPIDSRTIPANESILEPASAKCEGMEARNGYSFNIHPEGDIWEQETEKVDTEARESAGPVEMRA

SEQ ID NO: 929158 - protein, 164 aa, Homo sapiens
MEGVKSGKKDALPREEEYREAVWLQWLCGTAICSAQSKLPGSFVYTVKGKPPTQASLMLDTSPHTKLEHPRSTSDYCAGSEYFKPMDLIWGWDLLSKATWLPGFSPVSRGSEWFCLAGVPGAIEVKKQTSKQTNKQKLPQLAQCLPKLPSSFVLETQGPCGVVI

SEQ ID NO: 929159 - protein, 191 aa, Homo sapiens
MSDLGPLNKEIKGWCYHYCKNNTKPLFWRGVADAEIPIFDLGWKKYMMKSCGEDGFHIQVRLHPFHVMHINKTSCAGLTGSKQGTVARVHIGHVIVSIGTKLQNKEHVIEALHRAKAKFPGHQKIHISKKWGITKFNVKTWWLRNGSFQMTAGSSTSPVVPSGQVVGPALMRASTVLPLLRPNNKSYFLST

SEQ ID NO: 929160 - protein, 262 aa, Homo sapiens
MNKIEKYHFHSISSVHHSLVEFHLKELRNKDTNIEVTFLSSNITSSSKITMYDSDEIRCEFGDISRVGMLDMNSAVRHYKFLLEGVHFTPKTVATSWCSFWLTQSHTARYENPGATILLQCPLVYSKKSTTTFLVIFKAVGVGRGAGEGDTKDCGKELTPWCMTANQCHQQSPIGAKGEVQVQQRYGKGIIAHATPQCQINQVKFKFQSSNRVWKKDRTTIIGKFCTALLPVNDREKMVCLPEPVNLQASVTVSCDLKIACV

SEQ ID NO: 929161 - protein, 137 aa, Homo sapiens
MKSCGEDGFHIQVRLHPFHVMHINKTSCAGLTGSKQGTVARVHIGHVIVSIGTKLQNKEHVIEALHRAKAKFPGHQKIHISKKWGITKFNVKTWWLRNGSFQMTAGSSTSPVVALWTSGGPCTHEGFHCAAPPKAQQ

SEQ ID NO: 929162 - protein, 145 aa, Homo sapiens
MPDLQETPSELSFQDFEYPDYDDYRAEAFLHQQKRMECYSKAKEAYRIGKKNVATFYAQQGTLHEQKMKEANHLAAIEIFEKVNASLLPQNVLDLHGLHVDEALEHLMRVLEKKTEGIKDKVVKKTHNPCLYWSLLSSGVYHLVG

SEQ ID NO: 929163 - protein, 299 aa, Homo sapiens
MKPEAPLCLSGTPVLICIFLMVNDVEYHTVAAASPCTMSSYCSAALLLRLSQWKKRLPCWSLTVSPACTKLDLLGTTPPEPCSPPSLGAPGTRARWWAWRGIIINWDDMKKIWHHTFYNELRVAPEEHLVLLTEALVNPKANREKMTQIMFETFNTLSMYVAIQAMLSLYASGCTTGIVNGPWRWGHSYSAHLRGLSPPPCHLHANKVLSSGTTMYPGITNRMQKAITALAPSTMKIKIIVPPERKYSVWICSSILASLSIFQQMWINKQEYNKLAPPSSTANASKWTNVLVEDKSVAW

SEQ ID NO: 929164 - protein, 245 aa, Homo sapiens
MISFKILLLIDNAPGHTRAMMEMYKEINVVFTPVNTISILQSMDQGVIFTFKSYYLRNTFCKTIPAIDSDYSDGPGQSKLNTFWKVFIILDAIKNIYDQWEVKMSTLTGVWKKLIPVFMDDFEGFKASVEEVTADVVEIPRELELEVEPEDVSELLQSRDQTRMDGELLFTDEQREWFLEMESTGEKAVNIVEIITKDLEYYINLLDKAGFEKIVSNFERSSTVGKMLSNSITCYREIFCERRVN

SEQ ID NO: 929165 - protein, 146 aa, Homo sapiens
MEQRVIEGKLDKGGSDPPSVFRLLMGTGKSYFKIRNFLVMTGWAPSDGTEADRHFYCCLLSIPKHPWCKKTFSHQYQQRVSVSQSHQFQNQQRHCDDIKGALAKRMQQAEKPEQAGCIVLMHCLYFSVVLVIHQGISFSNFPNLLR

SEQ ID NO: 929166 - protein, 138 aa, Homo sapiens
MIGSFLRPPQQEAAMFPVQPAELQSSAPGSWQREQDREGKVKIKDGKNGQGQDKDLHARNMKEELDCEGKRKEVDVEKHLKISHGPLRWIPNKLRINCDKVNQERIDISTGSQGRTTDISSRCQCFMVGTRTCDLLVN

SEQ ID NO: 929167 - protein, 151 aa, Homo sapiens
MGWKVGGFQGFWPANMAWAMTVAMVEQSSVSPYALVLAVAEIWWVGQSPCLQVSGYAKGGREEESILGRTKCHKKNEMEAENSSSVCFSHYKSKYIASPNCQGDWNMPLSYEHTKKNEVVYEHLDSLCNPELSTDTKKTQSMTPQIGCSEL

SEQ ID NO: 929168 - protein, 139 aa, Homo sapiens
MHTRTSKCLNHSGQAFLQNRLPQELATSARNLATRPRNAHSPGFHLSHVPSVRDPTENRTQLKTDTARSPRKPIGPSQVLWVTLTVEDTSTPSLATNHAPLTISLKPNHPYRTQRQYPILQCALKRLKPIITRLLQQGF

SEQ ID NO: 929169 - protein, 146 aa, Homo sapiens
MPCVSREVKKEPSTERQNQPFKVLATKTVSHEALDAGIYSAIPTEKVDGTCCYVATYRDTFRWSSASQRQRWRWRVMAAWRCGGGCEHLEDGSHYVAQAGLELLGSSNSPTSAYQAAGTTGLHHCTPPIQVHIPRNEDNAWHKVGI

SEQ ID NO: 929170 - protein, 147 aa, Homo sapiens
MSCHFFNKIHFLLWKITGEVCETCVPLKSESEELAHGDKRSQLKIPGRRETHIGKQKGTCKVYRIMAYKMLQVVLCSTLLIGALGAPFLLEDPANQFLRLKRHVNLQDYWDPDHSSDVWVNTLAKQVFVLETNGPSPFIFLNSHCIS

SEQ ID NO: 929171 - protein, 219 aa, Homo sapiens
MEQSWMENEFDELTEVGFRRSVITNFTKLKEDVRTHHKEAKNLEKRIDQWLSRINSIEKTLNDLTELKTTAQERELCDARTGFNSQFNQVEERITVIENQINEIKFTNVDMKEKVLRAAREKVELPTKGLTADLLAETLQARREWGPTFNILKENNFQPRVSYPAKLSFISKGEIKSFTDKEMLRDFITTSPALQELLKEALNMERNNQYQPLQKHAKL

SEQ ID NO: 929172 - protein, 137 aa, Homo sapiens
MSTGTQCLAPPYEIAGPLVAYNAHQGKLQAPACNSNPKELKCRLTLAKPQGLPNPTATDTSAALEHAQGLQPACHLIQGPRPLYSADDDADQNILTSRENLSSISSLWLCYLKNLGILCSRCCLYRRNGKFFNNLCP

SEQ ID NO: 929173 - protein, 153 aa, Homo sapiens
MGKPPTQASVMMDVPPPTKFKCPRSTSDYCAGSENFKPVDLTLLGAMGVGSTELDHLAPWFQPPFQGVNGSVSLAFQAPLGPKHHLKHEYSFNSGEAGEQSRKAPAMTFGGDDSYHSGHPYSSMTNTTGSAVRDQVQNPRSTTYQICKLQPYI

SEQ ID NO: 929174 - protein, 185 aa, Homo sapiens
MIQLPSTRSLPQHMGVQNEIWVGTQPNYITNNQRNANENHNEEEKHLDFKAACDTRSANVPMTESHVPWKKTSHVLVTIPELLAYSSITTCDTGVFWVTVVTTTGPNRSYVKDYWSFIKQQLRNHMPICLTLIASGVMDGKPGATVQQVAFMASSLLAVTGIYQCSPSAICIEVKVKGWRADLEG

SEQ ID NO: 929175 - protein, 167 aa, Homo sapiens
MCIFITWECCVVLRRKSLNTFILDWQEKGDNSLTKRNRSLQANRGSIPGQAQVVAKAGLNLGCAPPVGLHSPWIVLERLSIGVSMLHSYEGSSSCVYAGVIGDTRIPSPRSFMITEAACLLKYRPYNFGSICEELEVGIGEDYNWERETNWEMSVGGEGEAYRWMCE

SEQ ID NO: 929176 - protein, 227 aa, Homo sapiens
MATSKLNHFVLVAIGERKATEQRIFTTEKLEEQFLPSNTRSFSLAASSGQSYCCMCSQKFKFSEPWELMDEPQAPLGVHENVHSCDLLVKSPGSGFSAEILYKLFDLSGPQFPHLQNEDNDSSCRELCCEFNALPLDCPGCCFGKSLQGERVTAAGESSLCKQHQQWMRPPQGWKKTGKKYFSEKQAGSEPAFTYGVGNELDAISRINCKSENPFKHITILENQQQL

SEQ ID NO: 929177 - protein, 143 aa, Homo sapiens
MAPVPAAACLLSIMLHPPPPISESKGKMQVRVKVQRESLVHSGFSWGFCNCAFAQELQREGTESFDLSKKHDLTLKSIILQMTYFAFKRRKKCWQSAVLQVADRMTVVPSICSGICKGPISATNSSYISAHSPEKPTTPHYRS

SEQ ID NO: 929178 - protein, 143 aa, Homo sapiens
MILLCIHGNMTQPSEPNPLRSKKETFSPKGILPKEKPIQISRMRDDVTPEHQETAHLALALGKGECGNIKVGTESTGKNDQVMEAVQRVKLSQREQVSFENHFYTQRAYSLDWKMKQHSETENSTGSCMSHCYMNITEGERLM

SEQ ID NO: 929179 - protein, 224 aa, Homo sapiens
MIVPLHFSLGDRARPCPKKTKQKTTTTKTRKVEKLPPPLGLRWVTLEASTALGLTNTCSDYFLATDKVHSRPKGSSVTGGPRNAIWKPEPRVRNLNEEIKGHYHKIMNVHESVSGCLLPHKLINKGAVPKPKASQLFSVLPTEERGRKTCLTCEERSPKFRQMGESLRDELDGLSGYILKPQRAVRRGEQTGKDQETRHGEFNVKPNFQRIGRIQDCQSVNLCS

SEQ ID NO: 929180 - protein, 149 aa, Homo sapiens
MKCPFFPSTVVTRCDALHTELDEISHTGGPICESHGARSRKAPPLIILLSNWTSQITWILHKTKATVLPQKHILETQERHSITANKRVFKFTKRVEVNFSKVSQKESGNRQESDVHLSSITNIYLFCNEEELKERKIEGCMFQRGFQAG

SEQ ID NO: 929181 - protein, 130 aa, Homo sapiens
MVVGSTINDVLAVNTPKDAAQQDAKAKDNKKEPLCRQKQHRKALDKGKPEDVMPSVKGAQEHLQKVPLPSMYNKSGGKVRFTLKLEQHRLWIGSKERTEKLPMGSIKNVVSEHMEGHEDYHMMGFIDFCI

SEQ ID NO: 929182 - protein, 298 aa, Homo sapiens
MWRHGGDTGELQELERKLEDQLVQQEAAQQQQALASWQQWVADGPGILNEPGEVDSERQVSTVLHQALSKSQTLLEQHQQCLREEQQNSVVLEDLLENMEADTFATLCSQELRLASYLARMAMVPGATLRRLLSVVLPTASQPQLLALLDSATERHVDHAAESDGGAEQADVGRRRKHQSWWQALDGKLRGDLISRGLEKMLWARKRKQSILKKTCLPLRERMIFSGKGSWPHLSLEPIGELAPVPIVGAETIDLLNTGEKLFIFRNPKEPEISLHVPPRKKKNFLNAKKAMRALGMD

SEQ ID NO: 929183 - protein, 275 aa, Homo sapiens
MGVKMLRMPPASTFNRNSLYFHATAPLGIPLPTEYDSRGAVPGAQPTRQVNVALGLALHNGIFEMDKCSLSLSFQATELWLVWPKEVYGGLSELPLEYSSDLQQEPCLLITCEGGSGCAKALLLSSVGMLLAAAAVIRQLGGVHFACTSAPQHPAAVGGNLSSQHIKMCSHPSTRGRVVSLPVAPSLVPKATAMGGECPWDSRDAKAQGVLGPREECSLVWLGSQNGSLLQLLRTGKKVWDTEWTPSLEQCLPTVSMQFLMLVSGARKIEGLSHG

SEQ ID NO: 929184 - protein, 140 aa, Homo sapiens [sequence omitted]

SEQ ID NO: 929185 - protein, 141 aa, Homo sapiens
MNAQMRAPAPKDPSKNSETQGKVEPQVEGALMPESLPGGRPLPGHTIGGYGSSLGARIRELLQGPADFGQEDPNLLGLCTYCVPGANTPDFILSSQQAREHREAGAKSASSCLVCDPAQSRRSRNIDDLKSPRCRVWTWAG

SEQ ID NO: 929186 - protein, 141 aa, Homo sapiens
MMPPNMLCGSGAIGTAGKQNEEQDLRGSMWPVLLPRAVFYMLQAFLCVAQGMSVELILSYSPIWGSGSKNSGDWATILEEGEKGACELSEGDWILFPLTKTVWPARLDPRWNPAENVTWGLGPSPPGIRGGPRLTTSLQSC

SEQ ID NO: 929187 - protein, 137 aa, Homo sapiens
MTSGVIQEEDRKMRESLKHPTDLLNGFDQNADSDMDNKVQAEVVSDGDEELIGNFLGAKPQRCHLPPDPAAPFGALLLHLAGPSQSSQDTGCEGTVRRGAQAVMFAHPPLTCCVAQFLTGQGSVPVHSPEIGDPCHR

SEQ ID NO: 929188 - protein, 1543 aa, Homo sapiens
MGQTKSKIKSKYASYLSFIKILLKRGGVKVSTKNLIKLFQIIEQFCPWFPEQGTLDLKDWKRIGKELKQAGRKGNVIPLTVWNDWAIIKAALEPFQTEEDSVSVSDALGSCIIDCNENTRKKSQKETEGLHCEYVAEPVMAQSTQNVDYNQLQEVIYPETLKLEGKGPELVGPSESKPRGTSHLPAGQVPVTLQPQKQVKENKTQPPVAYQYWPPAELQYRPPPESQYGYPGMPPAPQGRAPYPQPPTRRLNPTAPPSRRGSELHEIIDKSRKEGDTEAWQFPVTLEPMPPGEGAQEGEPPTVEARYKSFSIKMLKDMKEGVKQYGPNSPYMRTLLDSIAHGHKLIPYDWEILAKSSLSPSQFLQFKTWWIDGVQEQVRRNRAANPPVNIDADQLLGIGQNWSTISQQALMQNEAIEQVRAICLRAWEKIQDPGSTCPSFNTVRQGSKEPYPDFVARLQDVAQKSIADEKARKVIVELMAYENANPECQSAIKPLKGKVPAGSDVISEYVKACDGIGGAMHKAMLMAQAITGVVLGGQVRTFGGKCYNCGQIGHLKKNCPVLNKQNITIQATTTGREPPDLCPRCKKGKHWASQCRSKFDKNGQPLSGNEQRGQPQAPQQTGAFPIQPFVPQGFQGQQPPLSQVFQGISQLPQYNNCPPHKRQCSREPPQKIPTGVYGPLPEGTVGLILGRSSLNLKGVQIHTSVVDSDYKGEIQLVISSSVPWSASPGDRIAQLLLLPYIKGGNSEIKRIGGLGSTDPTGKAAYWASQVSENRPVCKAIIQGKQFEGLVDTGADVSIIALNQWPKNWPKQKAVTGLVGIGTASEVYQSMEILHCLGPDNQERAATVEPPKPIPLTWKTEKPVWVNQCPLPKQKLEALHLLANEQLEKGHIEPSSSPWNSPVFVIQKKSGKWRMLTNLRAVNAVIQPMGPLQPGLPSPAMIPKDWPLIIIDLKDCFFTIPLAEQDCEKFAFTIPAINNKEPATRFQWKVLPQGMLNSPTICQTFVGRALQPVREKFSDCYIIHYIDDILCAAETKDKLIDCYTFLQAEVANAGLAIASDKIQTSTPFHYLGMQIENRKIKPQKIEIRKDTLKTLNDFQKLLGDINWIWPTLGIPTYAMSNLFSILRGDSDLNSKRMLTPEATKEIKLVEEKIQSAQINRIDPLAPLQLLIFATAHSPTGIIIQNTDLVEWSFLPHSTVKTFTLYLDQIATLIGQTRLRIIKLCGNDPDKIVVPLTKEQVRQAFINSGAWQIGLANFVGIIDNHYPKTKIFQFLKLTTWILPKITRREPLENALTVFTDGSSNGKAAYTGPKERVIKTPYQSAQRAELVAVITVLQDFDQPINIISDSAYVVQATRDVETALIKYSMDDQLNQLFNLLQQTVRKRNFPFYITHIRAHTNLPGPLTKANEEADLLVSSALIKAQELHALTHVNAAGLKNKFDVTWKQAKDIVQHCTQCQVLHLPTQEAGVNPRGLCPNALWQMHVTHVPSFGRLSYVHVTVDTYSHFIWATCQTGESTSHVKKHLLFCYNGSSRKNQNWQWTRIL

SEQ ID NO: 929189 - protein, 442 aa, Homo sapiens
MFYAYVTAAAAITTSTTALQLLNISQFSENFHVEQCLKRLKNMNLEGSIQDLFELFSSKVLYKGVLKRLILLYEPLFGLLQEVARIQPMPYFKDFTFPSDITEFLGQPYFEAFKKKMPIAFAAKGINKLLNKLFLINEQSPRASEETLLGISKKAKQMKINVQNNVDLGQPVKNKRVFKEESSEFDVRAFCNQLKHKATQETSFDFKCSQSRLKTTKYSSQKVIGTPHAKSFVQRFREAESFTQLSEEIQMAVVWCRSKKLKAQAIFLGNKLLKSNRLKHLEAQGTSLPKKLECIKTSICNHLLRGSGIKTSKHHLRQRRSQNKFLRRQRKPQRKLQSTLLREIQQFSQGTRKSATDTSAKWRLSHCTVHRTDLYPNSKQLLNSGVSMPVIQTKEKMIHENLRGIHENETDSWTVMQINKNSTSGTIKETDDIDDIFALMGV

SEQ ID NO: 929190 - protein, 816 aa, Homo sapiens
MSYGLLSGEAFQCTQKHHCYCNSRGVSGLQRALPHSQLQVTKYDAAAHQGFLIPNFPITTVFKAKDMAKPTTEFHLEGPFPGTTSGSKYHISQSPLRKGLTELGPRPLRTEHHPGAASTSEGKPGIVQGFSPCDSLKYGLVGRERPDRPPARHPVKVRSSVVIEDKSTRDPEYVYSQPYEQGTLDLKDWKRIGKELKQAGRKGNVIPLTVWNDWAIIKAALEPFQTEEDSVSVSDALGSCIIDCNENTRKKSQKETEGLHCEYVAEPVMAQSTQNVDYNQLQEVIYPETLKLEGKGPELVGPSESKPRGTSHLPAGQVPVTLQPQKQVKENKTQPPVAYQYWPPAELQYRPPPESQYGYPGMPPAPQGRAPYPQPPTRRLNPTAPPSRRGSELHEIIDKSRKEGDTEAWQFPVTLEPMPPGEGAQEGEPPTVEARYKSFSIKMLKDMKEGVKQYGPNSPYMRTLLDSIAHGHKLIPYDWEILAKSSLSPSQFLQFKTWWIDGVQEQVRRNRAANPPVNIDADQLLGIGQNWSTISQQALMQNEAIEQVRAICLRAWEKIQDPGSTCPSFNTVRQGSKEPYPDFVARLQDVAQKSIADEKARKVIVELMAYENANPECQSAIKPLKGKVPAGSDVISEYVKACDGIGGAMHKAMLMAQAITGVVLGGQVRTFGGKCYNCGQIGHLKKNCPVLNKQNITIQATTTGREPPDLCPRCKKGKHWASQCRSKFDKNGQPLSGNEQRGQPQAPQQTGAFPIQPFVPQGFQGQQPPLSQVFQGISQLPQYNNCPPHKRQCSSRFMYYTVSPSDTRGIVTDKHL

SEQ ID NO: 929191 - protein, 515 aa, Homo sapiens
MQLNLALYTLNFLNIYRNQTTTSAEQHLTGKKNSPHEGKLIWWKDNKNKTWEIGKVITWGRGFACVSPGENQLPVWIPTRHLKFYNEPIGDAKKRASTEMVTPVTWMDNPIEVYVNDSEWVPGPTDDRCPAKPEEEGMMINISIGYRYPPICLGRAPGCLMPAVQNWLVEVPTVSPISRFTYHMVSGMSLRPRVNYLQDFSYQRSLKFRPKGKPCPKEIPKESKNTEVLVWEECVANSAVILQNNEFGTIIDWAPRGQFYHNCSGQTQSCPSAQVSPAVDSDLTESLDKHKHKKLQSFYPWEWGEKGISTPRPKIISPVSGPEHPELWRLTVASHHIRIWSGNQTLETRDRKPFYTVDLNSSLTVPLQSCVKPPYMLVVGNIVIKPDSQTITCENWRLLTCIDSTFNWQHRILLVRAREGVWIPVSMDRPWEASLSVHILTEVLKGVLNRSKRFIFTLIAVIMGLIAVTATAAVAGVALHSSVQSVNFVNDWQKNSTRLWNSQSSIDQKLANQIN

SEQ ID NO: 929192 - protein, 810 aa, Homo sapiens
MGQTKSKIKSKYASYLSFIKILLKRGGVKVSTKNLIKLFQIIEQFCPWFPEQGTLDLKDWKRIGKELKQAGRKGNVIPLTVWNDWAIIKAALEPFQTEEDSVSVSDALGSCIIDCNENTRKKSQKETEGLHCEYVAEPVMAQSTQNVDYNQLQEVIYPETLKLEGKGPELVGPSESKPRGTSHLPAGQVPVTLQPQKQVKENKTQPPVAYQYWPPAELQYRPPPESQYGYPGMPPAPQGRAPYPQPPTRRLNPTAPPSRRGSELHEIIDKSRKEGDTEAWQFPVTLEPMPPGEGAQEGEPPTVEARYKSFSIKMLKDMKEGVKQYGPNSPYMRTLLDSIAHGHKLIPYDWEILAKSSLSPSQFLQFKTWWIDGVQEQVRRNRAANPPVNIDADQLLGIGQNWSTISQQALMQNEAIEQVRAICLRAWEKIQDPGSTCPSFNTVRQGSKEPYPDFVARLQDVAQKSIADEKARKVIVELMAYENANPECQSAIKPLKGKVPAGSDVISEYVKACDGIGGAMHKAMLMAQAITGVVLGGQVRTFGGKCYNCGQIGHLKKNCPVLNKQNITIQATTTGREPPDLCPRCKKGKHWASQCRSKFDKNGQPLSGNEQRGQPQAPQQTGAFPIQPFVPQGFQGQQPPLSQVFQGISQLPQYNNCPPHKRQCSREPPQKIPTGVYGPLPEGTVGLILGRSSLNLKGVQIHTSVVDSDYKGEIQVVISSSVPWSASPGDRIAQLLLLPYIKGGNSETKRIGGLVSTDPTGKAAYCASQVSENRPGCRPLCRKQYEGGDTGREPIMLNRPKMPNKAYRLR

SEQ ID NO: 929193 - protein, 222 aa, Homo sapiens
MLWELQLYVTVSGTILKMIKEAGAIISTRHCNPQNGDRCVAALARVECTHFLWPMCIGEVAHVSAEITYTSKHSVEVQVNMMSENILTGAKKLTNKASHPFGAGGGGPEAVQNPEVERMETNWRNGDIVQPVLNPEPNTVSYSQSSLIHLVGPSDCTLHSFVHEGVTMKVMDEVAGILAARHCKTNLVTASMEAINFDNKIRKGCIKTISGRMTFTSTYFLS

SEQ ID NO: 929194 - protein, 131 aa, Homo sapiens
MAALPACGWSAGPGGPGDSVTPRFPPHQPSSLQQFARFGRNFFRYLTCLMGPCRLLDKIAGSLQLAAPAADLCAPQGGLRWGFLEVWVLADGVSRTLQNVASEIGLGHSGTAPASRRKSRGPWKEGLGKGW

SEQ ID NO: 929195 - protein, 137 aa, Homo sapiens
MGFQECQAKQEAPWKLPGPKDAGHVVASRTRAARLTSRAGSGGLPRPGTSPSPTVTVGDGGSHGFTTSCRCAGLRSRDRWGRHQKNGAQGTWRGAQMPERQRQSPSGSSPSHGRAVERHRGPVPAGPELPEPACSLL

SEQ ID NO: 929196 - protein, 134 aa, Homo sapiens
MTPKTGLCWSPAASVSPYCSQPAGPDSLPLLSHHPDKTHQLGHLSSPQWGPLFCKCPKNAMGLSVSVLSRETESRRRWLAGDLGRSCRRPSSPEHRAGSLPSSLGAFFLSSPSTAQMRPTHTVEAKICIIVLFM

SEQ ID NO: 929197 - protein, 174 aa, Homo sapiens
MQDKVLFTFLSPLLKQKKGLTFFAENCATWGWGRRDASTPLVTLAGVPGNTEFNVLSLPQEHRFSLLAMKLLPGDWGGVISVIRDCFSYPLQYLFQRYEENLPEYQCHHISDPYTSGPELLSPGLSPIPGLGLSLEKDNKFGFLGFYFQFSETPLAFTLAPVPPTSARGPEHLE

SEQ ID NO: 929198 - protein, 281 aa, Homo sapiens
MNVDVKIDTSWIFQDMEDSAEERECLQEEAAGRPDMDMGALRRQLESSEQKLSAAEDKYVTSESGLRSRIQELELSERKLLRKVDQLSTHVAQERSAWLQAQEKLAALQGELASQIREESVARRQQWRLRRLQERLRRKDEALGQQAVALERCRRTQRRQLGLVQRLERNVRCLCRAAGLLLAQRGHRGPRLSRGATEAAAELRALQARAERIEREREEAARILHEHRATERQLPGHLEELRCCIYGLKLSDIGLQGPGGGTLPKKPMPCNRNLETHVSYW

SEQ ID NO: 929199 - protein, 154 aa, Homo sapiens
MRYFSDFSLLPGDGCCCFPSWTEENSCLYGFFCKLCGEAGGALPAAAGWASVWIYRLEMEENQLKNEMQDAKDQNELLEFRVLELEERERRSPAFNLQITTFPENHSSALQLFCHQEGVKRNGWAQNLARKEKKERGVLSRGKAVALEIGCECF

SEQ ID NO: 929200 - protein, 886 aa, Homo sapiens
MARSRQSPEGPCTWSRIRPGRASSVLAPGPETTSELPRDLAGSNREQVPSLEVDPEIQARRPTLPHAGPEGQEPAWDSALVSGWKDIADKGKDNRGRGAAHWQLQGAGMRWPLQAGAALLAFKPPLPEGALLLSEEHVQRPWGGTSCVLCGKELVPCAAGEETRRTPGEPSLDEQILLLVCGCPPEECLDESLLRMDLAWISENLAADPAAEAFLLVQTSALPLWGPAGDSASWRPLLLQEVPSDGQKIQEELATRSPPPPKATGHPGWDCHQTRGRGASLFHEAPYISNHPFLKKHPKDLKDTWNNGGGSLAGRTEEGKARGTLGRKGKNLGDKYQLSQESHQNLSLENGAGAAEDVQDQNGASETKAATCRPGSWQEFLMPLLQGEASVSKEGPESLSRRERVEGYVWGLRGGLSSENEEVAPPATFSRAHETKEPWPTDSQLLAGKVRATGRTARGKEENQVWLGNALLLQGGSLEDKGLEEEDEMPHQEASGLGCRGAPEEPDSQEHESKEMLFFAGETGLPLFPRFALSVEGAEPTDHGHPQAVSKGHNRCALTIDELAQDVEACFQQLSTLQPGSRGWQCSASACRGENWSFAQKWHSGWERAHSQQVWGNWGICSNEEAKSKESGEGDKPGKTTALGTSEVPGNPGTLPHWDEASPNPPQGPAEPWGALERVRSRFHQLISGLKKQRSQILHDNTKLHGDQERFHERVCALEREREREVTKISRLERDNHRLVGDISQLKKELDQYLQAISDLEDCNGKSYCKILELEEENETLKGNLGQLQKATSESVRKSKDTMEQVTLENWKLQTLISELGVSYKELIKDIVLGIEDMIRALSGENEHLLRRVHVLEREVTLQRSTDQGRLDSCFQEPVGHPWRRK

SEQ ID NO: 929201 - protein, 180 aa, Homo sapiens
MVGLLGNAWVPGHYCVELSSAPVVAAHPSLVTGLALPSCAIFAQATSVWFLSQAAKLCLQIQNLVYLSEIYGSRYSVLPSSSMCAHNGIKNKLCLRMAGTGYDQTLKRVDKMMGNAWRFGPNVCGRFTALFLNRINTPRSPSVMRFKGTLTPERIHQLDRNVKDSESEMALMNLDIETKY

SEQ ID NO: 929202 - protein, 138 aa, Homo sapiens
MALLAYWIGPRAWTAQGTEVPGGGLASPGSAAGTAAAQEEIQGCRLTQHLISTDMKENGSERMCMGREEVPGNWSTQGQWGLWACDVTSIPKESMPRCLKHPDVQRMSGMDRNSPRTEVLADSSPKYACKLLNLFRLN

SEQ ID NO: 929203 - protein, 135 aa, Homo sapiens
MGGMGAPLGRLVGPRTHHAERPTAVQPLAARCWGCGMSMDSGVRIPAFKAPLLTLLAVWPGRPTVKSGAIVLHVCGWAPSPPFYSTTPLFLIKFTFKAPLPLTGAVMRGAEASDLGMDEGRALAVSCSWRGQEGL

SEQ ID NO: 929204 - protein, 136 aa, Homo sapiens
MIGVGATSRQSRRTCSTWWEDNSPKPRGSADAPAPPGGKITALSLRGPQTHLLHLEGSSLHRDLGSQPGLQFVTEALGDAEEDEDDEDFVEVPEKEGYEPHIPDHLRPEYGVLSPSTIALSKGAERSQHMPGVMGR

SEQ ID NO: 929205 - protein, 161 aa, Homo sapiens
MLFAGGGAWPLLFLDGDLGFQPNHVVEKKNPFSGEEYKAAEICISKEPNVNSLDNGKNASRAFQRPSQQPLSPQAWRHRKEKWLHGPGPGPHCSVQPQDMVPCVSVAPGPAVAKRSQEPRMGDPLTACTIHREKLQALNARTGKQLYSFLYSAEPQEWHKT

SEQ ID NO: 929206 - protein, 149 aa, Homo sapiens
MGNEIRLYQYNPKGKAQSKQWLLRDGSSPVKAKADQLSAKVMAKIFRDAQGILLVDCLKGQRTIRSAYYECFKKVSQGFSLKKNAWKSFSRVLYHDNVHAHSSHQTENFAKSHLQAAETANARSVIVNGVCFYMLKENKCTMHNNVIDF

SEQ ID NO: 929207 - protein, 211 aa, Homo sapiens
MVCIIKQSREVSASLRNKEKEYKERNFTAGPLGMTSHIGRTMMMTPSRKTSKFLLGILKGEGVYEQGARLSKRHHSILMPPDMSDSCKKNASHINPGDEKNLSLNFTHLCNFSLILTRKNAVLFMEDVWTKKKRIWGNRRKSLQIRFPRDRVGGEGDGQRCSFACHLSSVENASMCQWLQMDSWLCSRGLEEPSPKAISIDTGTSDNLRGY

SEQ ID NO: 929208 - protein, 146 aa, Homo sapiens
MWYSLLFLGYKPIQHVTVLNTANNCNTMMFVCLNIEKLRYPPESPRGRKRDSVLIVNGREAYKFPETDNTALFIGISTLIFTAIIETVLSEAEVIGVSILQKRKLRSREVKKLAPGGRARKCSERCACHGGSHALSSRVRCAAGEG

SEQ ID NO: 929209 - protein, 308 aa, Homo sapiens
MRCRRIEVNVKLRKAKRNDQMLKRRNASSFPDVAASPLEKNRKNQGTVNWSVDDIVKGTNSNNMESQLQATQAAMKLLSREKQPPIGNIIWAVWLLHHDDPEVLADSCWAISYLTDGPNKRTDMFLKIGVLPQLVKLLGASELPTVTPALRPIGNIVTGTDEETQVVIDAGALAVFPNLLINSKTNFQKEGTWTMSNITADPQDEIQQVVNHGLVILVILDAISNIFQAAEKLGETEKLSIMIEECGGLDKIEALQNHENESVYKALLSLIEKNFLVEEEEDQNAVPETNSEGCTFQVQNGTPGTFNF

SEQ ID NO: 929210 - protein, 162 aa, Homo sapiens
MVSLPAQECPAPGTLSATPLALPCQSSTPTHWQDSNLGRTDPPAWHGPLSCLQASFLMELSTKHIPHPPEAHDLTPTPKKTESCEIRSFCLCTFSLCLPSCEHQTYSCLIRTGSSASSLRSPGLEQQGWRRKEKNQSPLGGPSCAPGAVMGWRWLCFSESTQ

SEQ ID NO: 929211 - protein, 152 aa, Homo sapiens
MNAMTSRRTWAPSARNSSLDLTEIHPLKPASQARCEYCVTRMRSNHLTQDVAAPTHAACAPHSSPVSPASCSRNLLTGTQQAGNLQRWNPNKFKKHNIMNARSISGISENLGAARTPPPGGQQKMWTDAAGPVGTQEEEQGEVNCGLFRGWG

SEQ ID NO: 929212 - protein, 142 aa, Homo sapiens
MPLARALPPCAWIALGLAPTFLAQGLAWKCSPATLQHVFVLQSTDKKKGGKFQPFKKLFGKRKKKDPSLFRVPSLGKKSYSHQSVSNGTFSSDEETLEDNLRFYKALGNSTLDQIAAFLIMSPVLVIDSCPQTCIYETCTIF

SEQ ID NO: 929213 - protein, 137 aa, Homo sapiens
MSSQKQVTSKWLHKHDDIVHGVVWLFQAPVHRQVLGRACSWTRHVTPKGMRWHPKRGAQTLKPRKGRFYLLISSFSSAIRSPRDSDMLTALSAPCPALAGGSGAGSALPLLPVMWGSRPPPEDRGPQCYSLLSTCVQ

SEQ ID NO: 929214 - protein, 137 aa, Homo sapiens
MKHKFSNLTVPKNQRKMMIKMKTHGSSKSRIDSSIQHAYQAIADIETARWKSLPGKTLARLRTGRNAHWGGATEVCAVCSQVDPGPSSSWVEPGIQSVSQEAHWQEGHSLTSPRVSVSPFSFFSPNKPCPTHPSNGL

SEQ ID NO: 929215 - protein, 171 aa, Homo sapiens
MAGYSSETKFPDERSGSNICSSPISTVLQPPLQIPRQTGSVLDLQQTPKDLHLRVLTVRRKTNKQKGHPRQNTISMEQSWTENDFDELREEGFRQSNYTKLKEEVRTHGKEVKNLEKKLDKWPTRITNAEKSLKDLMELKTMAQNYVTNAQPSVADRSPGRKGISDARSNE

SEQ ID NO: 929216 - protein, 158 aa, Homo sapiens [sequence omitted]

SEQ ID NO: 929217 - protein, 300 aa, Homo sapiens
MDSQALKKALTHVPVLSLPMGQDFSLYVTEKTGIALGVLTQVKGTSLQPVAYLSKEIDVVAKGWPHCLWVVTAVAVLVSEAVKIIQGRDLTVWTSHDVNDILTAKGDLWLSENHLLKYQALLLEGPVLCLCTCATLNPDTFLPDNEEKIEHNCQQVIAQTYSTQGDLLEVPLTDPNLNLYTDGSSFVEKGLRKAGYAVVSDNGILESYPLTPGTSAPLTELIALTQALELGEGKRVNIYTDSKNAYLVLHAHAATWREREFLTSEGTPIKHQEAIRRLLLAVQKPKEVAVLHCQGHQKGK

SEQ ID NO: 929218 - protein, 158 aa, Homo sapiens
MDNVSRELTGFRRWIITNSFELKEHVLTQCKEAKNLKKMLEELLTRITSLEKNINDLMELKNTAQELHRAYTSINSQINQAEEKMSEIEDQLNEIKHEDKIREIRMKRNEQSLQEIWDYVKRPNLHLIGVPENRPTFKFRKYREHHKDTPQEEQPKDT

SEQ ID NO: 929219 - protein, 144 aa, Homo sapiens
MRSDGFKSTWHFLCLHSFSLLLPCEEVPSAMIGSEEDRKMWESLELSRDLLNGFEQNADSDMDNEVQAEVVSDGDEEFVGTGIKVFLLCFGKRLAAFCPCPGDLWNFEVERDDLGYLAEELSKRQSFKGKQSIKVWNICSLRMQ

SEQ ID NO: 929220 - protein, 149 aa, Homo sapiens
MSIKLDSSLMVTQGLLVKMLRRGPLGSTPVGQLRLYCMQKFSLSTQMSMRVMKSSAAGIPEIRGENGPLHAYLIYLFPRSHLGPGTSSGTQQLCAEFPASSSFSPGEVQLIPSLAYLSSSPYDCHPCGCPTPTDNWTPKEQGPVWWTLF

SEQ ID NO: 929221 - protein, 137 aa, Homo sapiens
MQHWKSDASSIIYLGTLGRFTYHHQPHFICEMEIRAAQSSSLSEVLLPPRKPLDAVPPFPSAFNFNTSDKPVVPQGGRYSRQIQIQLRSITSCVIFGKLNNSLEPQLPLLLDEEHKSPRCLWDFVHVIFAAKNNLLL

SEQ ID NO: 929222 - protein, 136 aa, Homo sapiens
MAEGKEEQVTSYMDGSRQKERACAGKLPLIEPSDLLRVLHYDENSAGKTRPHDSITLHWVSPTTHGNYRSYKLSHMSCFSQYYEVDIAVCQLQVSFILVISVRNLHILACWGDKRCVELSRVIESDADLGFEPSSI

SEQ ID NO: 929223 - protein, 164 aa, Homo sapiens
MLLTLHSAQDNATSKNNPVPNVSGADVKKSCIKTKKPDEFGVTKERCRRGGQSKVYELYCFRIRTVSRDWDEGNLALSITLIPGFSPRNEFLPPQGFFMRWCLTTTPCSFIPGCCPPADTVPFPVYIAFIPDYLVHSSFFVYLPTQHGDDEDEDLYDDPLPLSK

SEQ ID NO: 929224 - protein, 174 aa, Homo sapiens
MAPPGACRPGQCAPRTVVLSTAPYVKNFSRIHHSIWICINKAEVLVMTTPWITPAPVFLEPQSFADLLNGFDQNADSDMENKVQVEEVSDGDEEQRYGLESELMLKREAEHKNLENLQADDAIEKKNPFSEEKFKPAAEICVNNEEKNVNHQENAENVSRVSQRDLQQPLPSQA

SEQ ID NO: 929225 - protein, 136 aa, Homo sapiens
MAFFHSIQCIGYSDVLVVEGVSSELKEAHQEHYILFTIPITLYGFWDIPILLVVAGLCWDVLLVSTILTYESRVSFGEVGGFADPGKLHGHSDSTAKKSRARSDPGDQFYSSSYCADVKTFPEIGLPEFISLVVLP

SEQ ID NO: 929226 - protein, 148 aa, Homo sapiens
MCLGSGECKIHRSDVKYFQKHLSESDIPLHTAAMSVWLTWEKCQKGWHEMMVEAHFPDGVDVIWQSIYELKSLSDCGSASFAFQEGYTYMDVTKKQKKNEDCHQVNGSAIWMGLEFLCGPKSAQSPLHHGSRPDEFLIQMSTWKHHSA

SEQ ID NO: 929227 - protein, 134 aa, Homo sapiens
MENPNGMFSLCCMVEVLVPEPGIWALLRRQQQTTEGVADVKQIMNSINYSYDISRTEMEEMRPHTKEYRQYLKDAKGKERDSPTEPPEENVTLQIPCLLVQTCLRNGKEANRAEVDVAKGEEAIELEGENVTTG

SEQ ID NO: 929228 - protein, 192 aa, Homo sapiens
MLVKVLHMDSGSGICSHIHVSSVMAVQQDVCTLELGTVERKLGKPGASRSQPPYFKPSSRLTAVDRCGQRKMLQQNKPKTDLPERVNKTKVDPLTTTREVAEELNNDHSAVVRHLKQIGKVLKKLYKAISPSSCDVQQKVDFIQQLATTNSVVGPGRSPKALSKAKLAPKKSDSHCLVVCCQSDPLQISESW

SEQ ID NO: 929229 - protein, 138 aa, Homo sapiens
MQVLVSYERSSQVVLGQTHNSAAWFPMWMMKKKEKNKMMMMMKKRKDYKILMKKGMRMKAKKRKMMMTIHSYLFLSEQKLYGINTTKFCGRKEKPSPFALLEAGECQTPVVARQVKPDYACSIHCGNYYIFAMPNKWG

SEQ ID NO: 929230 - protein, 154 aa, Homo sapiens
MAGTLAGLSFQLSDSASARVLSLFQHPHDVGAVVLFLDLRDVQCATLRIKSDPAFKFGFKVLRFSGIPFYNLLVESIKPGNVGTKGKLPLHLLKVCQKSLTRGRLRRKGIQINLTCKQSLPNEEPKIQGKLSIFMLRFNKVWTVMEKYDWTKRV

SEQ ID NO: 929231 - protein, 253 aa, Homo sapiens
MGQTKTKSKYASYLSFIKILLKRGGVRVSTKNLIKLFQTTEQFCPWFPEQGNLDLEDWKRIGKELKQAGRKGNIIPLTVWNDWPIIKAALEPFQTEDSVSVSDAPGSCIIDCNEKTRKKSQKETETLHCEYVAEPLMAQSTQNVDYNQLQEVIYPETLKLEGKGPELVGPLESKPRGPSPLSAGQVTVTLQPQAQVRENKTQLPVAYQYWPPAELQYRPPPESQYGYLGMPPAPQGREPYPQPPTRRQSYGTT

SEQ ID NO: 929232 - protein, 192 aa, Homo sapiens
MFFSGKPEAGSLSPDHTSKENKKAITVIITIIVVIIINNIIIITALSAPKLWTFEEVFETWNWPCRLSEGPLANPEHWPSLPVRCCAPDLGVENQPAKQVPRRSPHHHLLSHLTKDQRVGHRYPEQRKALLKSPSLLVAEPELEVKFPYLSACHLSPTLPGKQKRERQGEFGEIPDGSMSKVLEKLPAAERN

SEQ ID NO: 929233 - protein, 393 aa, Homo sapiens
MVTLFRAVEEHCPWFPEKGTLDVKLWDCVAAKFRELVPTGNYVPVTVWGDWALVRAILMTYQSCDPLQLPQVSESGNPLPLPQLSSPTRPLLSAQPLPSPTPPPPEDGENSISNSGDFGLTSPPDDLISFHEEPILVAPEARTRTAQDHNYANFSLFKALQPLAPEPSNGPRTKLQFTCNSAGLPPSTAAPHPPVISVPQPVTLPSTQPASLYPSSCMDAPAILVAQDCANNHQYAFTSSAPPMPLLTLSYQSDILNFNAWAYPVALEPPNAQGVGVRRYAPLNLTFLKEFKDACTQYGPTSPYVKMVLQTLCTEVILLPLDWDLLAKAVLSPSQHLQFRTRQSEESPLQTQLNRADGILITQAQLTGPDNYSDTTAQLGFDALTTEQVTKCV

SEQ ID NO: 929234 - protein, 175 aa, Homo sapiens
MAPFNITFSDPLAKFLLPVLTTLCSAGLVPEGRMLPPVDTMIPLNWKLQLPPGHVGLLLSLSQQAKKRVTVLAGVTDLNYEDEISLLLHSGGKEEYAWNTGDPLRHLLVLPCSVIKVNGKLQQPNPSRTTNGPDPSGMKVWVPPSGRKPQPAEVLFEGKGNTEWVVEDGSYQYQL

SEQ ID NO: 929235 - protein, 150 aa, Homo sapiens
MAGFVYIWIKNGILLPPWPATPPTCAYANPQTLGGRQTSDWKWSRTHWQKTQVAGRQEDVEESMPVEEHMTDASRPAGHQPAEQGRVWPGQLKESPSHGQRGNYSPSGSPSAESYFHSIKLCTHSPSPRVIRFFPVHQGKNPRIQKALCP

SEQ ID NO: 929236 - protein, 141 aa, Homo sapiens
MARGHGTRDYKAFGRIWKFPLLGIKPKVYDPESVGYKGECRRVAGTDYVGISRNLDFAPGVRMQTFQVTILDDLGQPTLEGPEKFELLLQMPMGAVLGEPNKTTIFIEDTITDYQRINLSLLIDAAYETLFNSLSPYIKFL

SEQ ID NO: 929237 - protein, 210 aa, Homo sapiens [sequence omitted]

SEQ ID NO: 929238 - protein, 153 aa, Homo sapiens
MRETLAEEEEEEEEEEEEEEEEKEEEEEEEEEKEEEEEEEEEEEEEEEEEEEEEEELLLFQPDISCGGTKERSDPPVHISHGSKIYPLWCYTLPWVLQHFVWLCVDRSLEMRMVDMPRGTSRLCLCEGGQFVTQSNSAAAPGAEQSDPKPPNS

SEQ ID NO: 929239 - protein, 181 aa, Homo sapiens
MILRKGQTSYTELTDKEKLLERTPELTANAWDEAVPGYTCAKPAHIELVTASRAECEAKGTWSRTQEVSDPQFLKNIKSLAPESHMGRKKQWVLEWARSFGWEKKEGKEHLSKINFYPVKIQCGDTGVVWMQPTVIKFSHYSNLKSMRAVKWILDLAMRKALGVLSELCHWRGKDQHQLLT

SEQ ID NO: 929240 - protein, 146 aa, Homo sapiens
MGPNINGSTREILLDSKRENTDNSSVAIMGAQRSAAVKVESNLHVTLESNLHVIPSQLQALPEDSGAFLMLSGPAVFEVSAEASESHFQAVSFQTAKTLAQFGDLLFVLKSPVSLSEDLFGLLLRALKLRVYCFGGLAFTTGDLRA

SEQ ID NO: 929241 - protein, 138 aa, Homo sapiens
MQDLFYNRSSKSGYSKSIAQSVEKESANLLVPTVCYEILDFVHNWTQPLTEFLCEREHNRAANKSQNTIVRIQSREDHKFNESTGSRCGNRWIDSGELKFTELSVLLGIGMNKKKVVGLNVTFKAFAIGLMGAPFSKI

SEQ ID NO: 929242 - protein, 141 aa, Homo sapiens
MQNCESIKPLSFINYPVVKSELLGYIRPKQIQGSQHGGDYTAMTGFHWLHYIRHRGLVSGSFSVTAPKLSYKLTLFCILGFRWCHFASYPDPTFLTDCFMCPKLLTHFLPHTHRFGSTHSKHYSDRNHTSTPSELGLKSIR

SEQ ID NO: 929243 - protein, 138 aa, Homo sapiens
MERIKAVLSKAIHETCNILCRIARCLQLEGFLLAKLGILLNMESIEDISYIYIGTELLPLLKGALFTWLSQNDAASMENNMESPQKLKTELSDDPVIPLLGIYLKELKLGSQRDTVLLLCPLKHYSQQLRYSDNLNAH

SEQ ID NO: 929244 - protein, 136 aa, Homo sapiens
MWVGPDKRIKAGCPSQQCFSPEASETTSPPEGTNDCRRAALRAITLTSKIRSFTPEPARPRTHQKEETANTSEHQKERAPDTQPLRTVTLTARQWNEGEAQQGPSVWSLPGLLGPDPFGTGVLRFIIDKQLLMWMN

SEQ ID NO: 929245 - protein, 157 aa, Homo sapiens
MLPLTAVTVAVGFAPETCPQARLEVYGGVLIKQFSWEFTCIKVRIPHFKQLYSELTTDLKEREGRKKSRFKSDGQGNTAESGLFSTALKRHKKLKTTGANLKGLGMIILFNYANGECGNFLRNRTGVLKFENAQGLPGELVGQQTFLGLNPGQSKQL

SEQ ID NO: 929246 - protein, 139 aa, Homo sapiens
MVLCMGRSLLAVLVQEYLVEILLLPAMPVTQHRDTEILHQTLDARVLGWLAPWEYVQMAKKHKKRCLASLAIREMQTKPTTRYHNQIHTRIAIIKKLGKCWQGCGEIGNFIHCCWECKRMQLLRKSLVIHQKIKHRVII

SEQ ID NO: 929247 - protein, 190 aa, Homo sapiens
MLELMPPGEGAQEGEPPTVEARYKSFSIKMLKDRKDGVKQYGPNSPYMRTLLDSIAHGHRLIPYDWEILAKSSFSPSQFVQFKTWWIDRTQEQVRRNRAANPPVNIDADQLLGTGHNWSTVNQQAVMQNEAIEQVRAICLRDWEKFQDPGTAYPSFNTIRQGSKEPYPDLWQGSKMLLKSQLPMKMPKKS

SEQ ID NO: 929248 - protein, 173 aa, Homo sapiens
MKVNGKLQQPNQGRTTNGPDPSEMKVWVTPPAKARLSKKNKSEGIALPDFKLYHKVKVTKTVHGYWYENRHVNQWNRIVNPEIEPNIYSQLIFDKANKNIKVEKDTLFNKWPWDNWQATWRRMKLDPHLSPYTKITSRWIKDLNLRPETIKIIKDSIRKTFLDIGLAKELVHK

SEQ ID NO: 929249 - protein, 163 aa, Homo sapiens
MSSLSGKPCPNQCSNLLEHLSVETMANRASGKWDVRSGRKYGGSHQWDEAAGPGSGIQLGFLCLLRGKETLSCISAESWISGFLAYIPPVTAADGFCQLSVKNSYKAAVKASAGLWSYLNTQLEGSASELEQFCKPMFQLSPNTEPIYFSRSRLKCTAYNGSL

SEQ ID NO: 929250 - protein, 169 aa, Homo sapiens
MPGLQGKAPESSSYSTGITVNMTLDPDTAHSELILYEDWRKVTCGYPQDHHSTSSRRFSAFPCVLGCEGFTSQEDAPSKWMLENEPEGGNLDRKRRTTCEDETHPGECHMKREAEIEWCILKPENTSEDWQPAGTSESHGMYSSPEPLERAPPCRRRDFGLLASELSFF

SEQ ID NO: 929251 - protein, 271 aa, Homo sapiens
MTTAAAVYWETTPDPIHLDLKISPGEAAEQQRWLPAPSALGAPSQRAIELMLTMALLYVGSGNPLGGFTQSGSVRLGPLKETAWLPLGGVGVLCWGDSHLSGLPGLFRDSWQERLGPLNVRPWLLLSPGAPSQGYNSSVHKPLAGFAAIPAARHHPMRRDGSRNSVVLGSVQSVAASGNSRGMHSSVLGFQGPGGMGSRGVLLIHRMHRSVEKTWFPGATPLMLPGAEEEEEEEEEEEEEGKEDAEEEGKEDDEEEKEEEEERGRGEWDSL

SEQ ID NO: 929252 - protein, 151 aa, Homo sapiens
MASEGAGPRRWQLPRDVEPVSEQKPRIEVWEPPARFQKMYGNAWMIRQKFAAGARPSCRTSARVVQKGNVVSVSTRPPPSGAIRGPLSSRPQNGRSTDSLHCLLGKAADTQHQPVKAAGREAVPCKATGDAMMVQHSQINQCDTSYQQNEG

SEQ ID NO: 929253 - protein, 145 aa, Homo sapiens
MLIRWLDKQLAFQLLPIADRPLLLKSAKHFFRLLVFSETFISLTVLSLQERIQACPWNATGYSPFELLYGRSFLLSPSLIPDTRPTWTVPQKSCHPIFCLVVLLFTILNYSYMPCSCLHCWFTLFLQAITADISWCYPQTATLNS

SEQ ID NO: 929254 - protein, 154 aa, Homo sapiens
MIYQTQHTAGPWQRQQEPSTICLKMVTCLWVAVDLLWRRTLGEGQRDLPAAALRSPSPPLSPRKQPPLPPLSWHWRYDNEQDTNGLYPYGARRTPELVASWLEVRVAPEASKLAAGVCREGSLVKNCALNLRFGLNPDRELKTITPNPYGYCEN

SEQ ID NO: 929255 - protein, 142 aa, Homo sapiens
MLNWLSGRVGQRRGNKPLICSVCRLPWYKCPLWSISGCQHEDTGCGIRRRCIQLSLQSQDKPAPTHYWLNLTNPAKHKPKYNSPLESENLQVHKIAKPRCAPEVRLRPASVCVTNLSCFQRHPSQARVVPNWCSHLAANWRL

SEQ ID NO: 929256 - protein, 133 aa, Homo sapiens
MYNSDTSFFKIFVLISLPISKQETQRSVCRNEEMGKHDIQKTAGNTVHCAVLAVTPMVMGLPGSCGSLPLPSSRREYWTARPQPRKRSKVKSGSMVSTECVSLWQHRKVKKLSQTTLIPILNFPRGYNKEKQY

SEQ ID NO: 929257 - protein, 164 aa, Homo sapiens
MLAACKLGNEPSRSVAFVAGSKQWAQGPNSEEAAEERGASAALSCSSSSSSSILEVTRTTQLQLRHGEQSAEKRAAKLFWEKRHDWQFETSPGLSLSQAQSSSVCGKALYFMRAGANDSNPNLKGGFTPQYFTHLGCSTSKQACAIAVKTCLRSQDGTKTTKIE

SEQ ID NO: 929258 - protein, 163 aa, Homo sapiens
MGCNLRTLPAIQISLEQIHLAPGINLIVALEFTTKSNNTCLWQHLRELPVSAQAVPELDLPQNPRPMLRPTNSSLLGKKTLISDHKSPVDLGVVLLIGVEGTTFLIFISQFYEVIISTEYSSDLCAVRSGSRSCILENPNLVWVEFAKGVTKYEMRRIYENKQ

SEQ ID NO: 929259 - protein, 154 aa, Homo sapiens
MHKRVSNSGAQTVASRSGGESFIAWQNKEQKWANCKQKSAADMRALRPNTKCSYVRHARTEANRKETEAGEGAWETHRRSTMVPQLWQLSASLYNSQAYRIRREPGNRRVENQLQGARVHTAARVPYPSFTVFQSDVQLESFLCVKTIEGWIFL

SEQ ID NO: 929260 - protein, 150 aa, Homo sapiens
MRIKEKRGKEEGKQIYKSTSLTSRNSSRKRSWLPGQQGYHLRGDMKSLRPGTMHQPSRTDTGHKAEQSVQAHSGAYKNTSVARMEKVGGAEPRERPRRGGDTGRDPIIMTGFLRFLNVVLLTFWGALSLFAVGGCCPDVGCLGISLASTH

SEQ ID NO: 929261 - protein, 147 aa, Homo sapiens
MYCFSDHVNAYFFTFPLLLNCQNRENLFKNTYLKKKESLIDTGSVKAQQWAPSHHITSPKVDSENSPKAQSQDSPGSPHDLRTHCRSCLREQSRSRMVPPEERAQHPSNVPTSDTSWAAFSDADSSSVSLETQILSSKFKQDQRQTV

SEQ ID NO: 929262 - protein, 312 aa, Homo sapiens
MGNSELIGRGYHRAQSSKHFTHRAQSSKHFTHRAQSSKHFTHRGQSSKRFTHRAQSCKHFTHRAQSSKRFTHRAQSSKRFTHRGQYSKRFTHRAQSSKRFTHRAQSCKRFTHRAQSCKRFTHRAQSSKRFTHRAQSSKRFTHRAQSCKRFTHRAQSCKRFTHRAQSCKRFTHRGQYSKRFTHRGQYSKRFTHRGQYSKRFTHRGQYSKRFTHRAQSSKRFTHRAQSSKRFTHRGHGQVLGPVVSASELQVVVLALSVAGKLSCRYKENPGWTVWPDPSGLHEDHQGRRFPTAPSITNLRMASSLIFHNFKYI

SEQ ID NO: 929263 - protein, 161 aa, Homo sapiens
MSIIKRQKIKDAGEDAEKSALSYAIAKGSSEGLCHEEWYILAQILGFSHGLCNLQNRRFPRVATPPGPWESSDWHLVGAPLGQSFQRKVQAGIFAVLQSPLVIPRQTGCGVDLEQTPADLQLRGLTVRRKTNKQKGITSTSTKRMSTAKPHLKVTNIKDQR

SEQ ID NO: 929264 - protein, 278 aa, Homo sapiens
MGCTHCPTNPRHLVTKLKPMFIDHSENSRALNNYTNFTLPVIYGDEEFTGSWSKGHSCYALANRLTALFPCCRDLWSFELERHDLGCLVEEISKQQSVQDGSAEGKCEVEACTVPTGALPSGAVKRQPPSSRPQNGRSTDCLLRVPGKVTVTQYQPVKAASGAYLPEPMAAQKLPMAVGGYPLHQCGLDVRHGFKGDYFRALRYNDCLVGFWNCMGPVDPLFWPISLFWNGSIYPMPVPLLYLGSNKLVLDFTDSQVEAACLVSGTFNLDFGVNAGMS

SEQ ID NO: 929265 - protein, 253 aa, Homo sapiens
MCSARRQLSGVTFLQTGSPSIYFYYFFLENFQADDAAEKKNPFFEEKFKPAAEICISGKEPNVNPPDHRAKVSRPCQRPSQQPLPSQAQRSGRKKWFHGPGLGSSCCVHPRDLMPCVPAAPVMAERGQHRAWVLLQRMEALSLDSFYVVFGLWGSVEGKCGMGPPHTHRVPTGALPTGAVGRGPPSSRPQDGRSTGRLHYAPGKATDTQGQPVKAARKEAVSCKPQGQSCPRPWEPTFGISVTWMPSKFPLYG

SEQ ID NO: 929266 - protein, 157 aa, Homo sapiens
MMFCVSFSGILALQLEEIKDLKGLDDAQSHSKKPSAEGSCRQTNEVGQTLSAKRQLEHLLCCLDKQRSYPGTLGKMGVAVAAGLHLSAILLSGGFIAIPCQLELNSGQLFPDSRGPAGGGFIHILVIVDNTALTMWVQISTSIFLWIYAQKWDRWII

SEQ ID NO: 929267 - protein, 245 aa, Homo sapiens
MHVLSAPRLLRLYSLFVESPTITIVPGPDFNPASHIIPDTTPDPHDCISLIHLTFTPFPHISFFPVPNPDHTWFIDGSSTRPNRHSPAKEGYAIVSSTSIIEATTLPPSTTSQQAELIALIWALTLAKGLHVNIYIDSKYAFHILHHHAVIWAERGFLAMRGSSIINASLIKTLLKAALLPKEAGVIHCKGHQKVSDPITQGNAYADKIQIPVTPQGHSPFLTPPAYSGLLFFAELLLHLSVTFH

SEQ ID NO: 929268 - protein, 196 aa, Homo sapiens
MPLWASYLMIPGLPLLTQPACFIPLFGPTHILLIGPFYRELIGPFYRALIVPTHPKSPAGFTSHRHSPQDFAAPSLNTPTAQRELVPDNQEEKTVSHKEMETCYPGEEGMVVHTRDSASDQAQQVPAGHAKCGACRAGAHLEPAPAQEHRMASFSDLRWYMSYGQGRCLLVGSLPASAVLLTHAADAGGLAPWDWA

SEQ ID NO: 929269 - protein, 138 aa, Homo sapiens
MKLLKKLLLKHSRGKSRFRASEGSIFRSSEQSPDVPPLLLQVLWGYSFGSGPLCSGSTAYCLSPSSLVVPAASCDRVRKQADPLSSNLNAKQATRALGLSNFQTSEKHSHSERRYSYTCQSFSYSRIGEVKVHVKGTI

SEQ ID NO: 929270 - protein, 677 aa, Homo sapiens
MSLPSRLFLDFHSAILSGLQLFGVIHSVFTNLLLWANGVLNESKHQLNEHKERLITLGFGNITTDDHTPQCNCTPPTLCTAISHGIYYLYPFNIEYQILASTMLYVLWKNIGRKVDSHQHQKMQFKSDGVMVGAVLGLTVLAATIAVVVVYLIHIGRSKTKSESALIMFYLYAITLLMLMGAAGLAGIRIYRIDEKSLDESKNPARKLDSDLLVGTASGSWLISWGSILAILCAEGHPRYTWYNLPYSILAIVEKYIQNLFIFESIHREPEKLSEDIQTLRVVTVCNGNTMPLASSCPKSGGVARDVAPQGKDMPPAANGNVCMRESHDKEEEKQEESSWGGSPSPVRLPRFLQGNAKRKVLRNIAAFLFLCNISRLPATAREWRKLKKATAGSGSEEPDNSRGGTGGENWDTKESEKQGTLWIPPAFGCRPEYDNGLEEIVFGFEPWIIVVNLAMPFSIFYRMHAAASLFEVYCKRCPNSTDPQNVTDVSRFLLLKLSEDPELQPVLAGLFLSMCLVTVLGNLLIILAVSPDSHLHTSMYFFLSNLSLPDIGFPSPTVPKMVVDIQSHSNAQLHNMIALQMTCFKDVEIPNFFCDPSQLPHLACCDTFTNNIIMYFPAAVFGIGGYLSSDVSSSLRKAAVASLMYKMVTPMLNPSIYSLRNRDIKSVLRQPHGSTV

SEQ ID NO: 929271 - protein, 149 aa, Homo sapiens
MSFLVLFACIEGMLLTVMAYDCFVAICRPLHYPVIVNPHLCVFFVLVSFFLSLLDSQLHSSIVLQFTIIKNVEISHFVCDPSHLLKLACSDSVINSIFIYFDSTMFGFLPISGILWSYYKIVPSILRISSSDGKYKAFATCGSHLAVVC

SEQ ID NO: 929272 - protein, 243 aa, Homo sapiens
MPLATSAMKGDRPNIWTTGYQTAHRMAVMHPQIPSEMGKLRLAGGGPEQVRRAVWMQVVPLRTTCVASKEESSVLSHVLSPTPGSILELNMGPPAAFCKQGPVPQQPRPGAWTLVLSRLGWGCRPAPLYAKAHVCIYAVDVQQATCSYHMLREAETKTSAPSVTKTMPVPTAILTAEFSLVQGAAHAPKGSCHTEDPAVLQDPRHRGPEKEDEGGEEGLALIPRIAGSVYNPCDIGSNIILSA

SEQ ID NO: 929273 - protein, 165 aa, Homo sapiens
MGKKQSRKTENSKNQSASPPPKEHSSSRAMEQSWTANDFDELREEGFRRSNYSKLKVEVRTHGKEDLMELKTMPQELRDECTSLSSQFDQLEERVSVMEDQMNEMKREEKFREKRIKRNEQSLQEIWDYVKRPNLRLIGEPENDGENGTKWKTLCRKLSRRTSPI

SEQ ID NO: 929274 - protein, 139 aa, Homo sapiens
MYSQKEGKNLVRDSPEDWILSCQKEETLNTSEHLKEQTLDTPSLRTVILTTRVRSFILEVSETKNPPEGTNSGHSYRSSAAGLLEFAGGPLQTLFAWVSAAEAAEQRILLNSKCCCLIVPLEVSSQKGTWPCEVSVCPY

SEQ ID NO: 929275 - protein, 161 aa, Homo sapiens
MILAVGGSAGQEIKETQKIVKAGSRGVTAFWSCDAANALDMPAFVIKFSEGRGPSAAGLLEFAGGLLQTPFARLSPAETAEQQMLQNNKYCCLILFLEASSQRGTSLYELSVSPFWEVSPSSSTWGKCPEGECTCTPVAHLSEVYPHQNRRLLVYGTSTTQ

SEQ ID NO: 929276 - protein, 176 aa, Homo sapiens
MAAAGATGLVVIDVATNALQAKVIAAAGSGEKCNLVMQRGTQFSVNYSQSSLKDAVRKLVGKGGMNVAINMVGGDVFLEALHSLAWEGRIAVVGFAGGSIVSVPANLLLLKKVSVMGLYYGQYKEMNFPVFSRSLSSVLQYCQQGRIQPYVGMVFKLEEAALLQGCRVFWGVHSGP

SEQ ID NO: 929277 - protein, 186 aa, Homo sapiens
MALNICFQRKKQAAIFAVLQPPLVIPRQTGSGVDLQQTPADLQKRGLTVRTLTNESNNININKKDTHTKTPFKGHWHQRSKVNKSMKLRKNQYKSAENSKNQNASSPNDCNSSPARAQNWMENELDELTEVGFRRRVITNSSELKEHVLTQCKEAKNFDKKLQELLTRITSLGKNINDLMELKNTA

SEQ ID NO: 929278 - protein, 160 aa, Homo sapiens
MGFWCGCPFSLLVFLLTVRTLSCRSVGVCWRSTPDPVCLQPVEAAEHQILQNGRCCCLILPLEASSQRGTSCMRCQSAPTGGVSQLGYSGVRDPLEEAVCPFSDLKLHTGRTTTLFKAVRQGRLSLQKFLLPFVQLCPALRGGVYRGRQAWLSCSGLHPV

SEQ ID NO: 929279 - protein, 175 aa, Homo sapiens
MAGCTLIGCRRLLMDTKVSVSVWAFATAVVAAWLRGAGVGDFCTSGNDSAGMRHWWGHGWQTLCLPTLDSSGSVVGERGSVHSCQQQWHDRVHTHMPAGLLCRSSTLSTLPFFFSDLVPKFQRLCMIMWTESTSRSYHPTSAVHIDTSWQCFALLLVDSSHHSWLLRPFCSSARS

SEQ ID NO: 929280 - protein, 135 aa, Homo sapiens
MPRPASAHTSWAAPTVQQAPTFPCINFHSLGILGGKFGYDDLVMGRNESFLLISITNRKDHVFDNSISSWWDPDPTGLWPFKKREMHTHQGCMCIEKRPGENTGKKAAIRESRREALREPRPASTLILDFQPPEL

SEQ ID NO: 929281 - protein, 142 aa, Homo sapiens
MLLSLAAFSVISVVSYLILALLSVTISFRIYKSVIQAVQKSEEGHPIKAYLDVDITLSSEAFHNYMNAAVVHINRALKLIILLFLVEDLVDSLKQAVFIVPIVYEKYKTQIDHYVGIARHQTKSIVEKIQAKLPGIAKKKAE

SEQ ID NO: 929282 - protein, 139 aa, Homo sapiens
MKVATLIDSSFMKDFSVACDADLPSYKAQGQQPDVAFTHPLDFVSTFAQWSSHFLRAPEKENSSRNNPTFGSICGRASFQRVWLAVLAGPFISKVSKQTGLGPHPCRFSAGKTDLNPLCKFTQRFHKMDSGSVKTLLKK

SEQ ID NO: 929283 - protein, 147 aa, Homo sapiens
MKRFSSYTHDENLVELLKGTENMQFTALATTLKVFSLPSPEHITSVLRLALLMVARWLQQFQMSHRDTKRSQMEDAISSYVPLFKKYPDWVITNDRHLFTSLFWRLRSPRALVSDEGHPMAEEHESKKYKEKKCGQTHPFIRSPLLK

SEQ ID NO: 929284 - protein, 168 aa, Homo sapiens
MVGEASQSWQKAERNKSHLTWIVADHIAIKLELRIKKLTQNRSNTWKLNNLLLNDYWVHNEMKAEIKMFFETNENKDTTYQNLWDTFKAEEMDIFLNTYTLPRLNQEEVESLNRPITGSEIEAIINSLTTKKSPGPDGFTAEFYQREEVLETFAITNNVQARFPLTQV

SEQ ID NO: 929285 - protein, 162 aa, Homo sapiens
MIGYFCTSCFCLISILVSSLIGRVEDHSKKALESCQPLDIGLLSLQNHKPTNIFCYKLPSDRYPVFNNKKCIKRQVYAADSTGSGGSVCYISSICLKLVSQKQKLRKRFGFRCLIGNTLRKSLLYNERSRSVQRKELSYNAVATEIPATHTGTSEAGMIFPE

SEQ ID NO: 929286 - protein, 154 aa, Homo sapiens
MLFWFFLEKGFHFPCVGPSVEATLPVGRDITLFARLSTVCATAWSRVTSHIPKQKALSPESTCFCFLCPKWCSLFGDLNYPFFLESSTPCGLEYWGFHNTFRSRQHDDTVALWVGTRGCQCGLPSCGDMGTMVPRAGSSLVMAVFSHWYLAVAT

SEQ ID NO: 929287 - protein, 142 aa, Homo sapiens
MWESLERPRDFLNGFDQNADSDMDKKSRLRRSRMEMRNLLGTGADVCFKVRALMGASARAVWKGNVGLKPPHRVPTEELPTRTLKRGPPSSRPQNDRSTDSLDSAPGKATDTQHQQLRGGLYPAKPQGRAAQDHGNPPLASV

SEQ ID NO: 929288 - protein, 142 aa, Homo sapiens
MVVRKYNYYVSGQEPEGKDLYDSPSALSLQPQLPQRKNNSRAPDLLSPPVPIKLTTLHLPQTIWEFVETFWPKSETNPQQNTLRAKETTTLSNRLWYLSCHLKDTEISWIIVVSGHRTQKQAKPQMAKAGGDIYSLLCMCFP

SEQ ID NO: 929289 - protein, 150 aa, Homo sapiens
MAGCRSGALPREKAAEAWREIDRSAGGPALLADPVHPPQLPARVLSPSFPGAGRAGLLLRPTPTRNSSWPASAARSRGSRSRLSLHTSLQAEGAGSGSGLGQPIKGLPQCSGGLKGSSSAAKVGAQAEEAPRASEGCEDCQHAVTMMCHG

SEQ ID NO: 929290 - protein, 166 aa, Homo sapiens
MATAPRAAALGRAPACPWLLLALWRGKWKKFFSLLMFSSTWKEFISPSTPSSFCPLHSSLIRLVTLEREEEPRKEAEIIYRLMSPKREMKTSSQERTKNCLNNWAFCGQRGNNHLVLTGWQSGSMRGYWVLVNTVELQVKRRDRKQEVGKGILIVIRSLIPIFPES

SEQ ID NO: 929291 - protein, 165 aa, Homo sapiens
MKQVSTVKVRAFIGKEWDPATWNGDMWEDPDEAADTEFEKNPALPEATVMPSPKAIARQDNVDSPQKSHRTPLFASRPVTRLKSWWVPRGHLKAEERGSQSESQNLKSKEASSAACSLWLKAREPMANHWCKSKGLKAEELGVQCWRAGSIQHRRKMKAKKLSRF

SEQ ID NO: 929292 - protein, 143 aa, Homo sapiens
MVYGGLCSTTCFGLFNSGGTFADLLPKYIVTSDAEVWSTEDAVTQVLSIVPNRFSAPAHLHSPPQSSPLSIVAVFMSLNTQYLSRTYTSELNCVVVAARISDDWMSSSETDCFSDLSPVRQGIQAFALFQHSTTGCKLPPEGR

SEQ ID NO: 929293 - protein, 149 aa, Homo sapiens
MPSPSQIPGASEAIRQCQSSATKPRRSGKESVREPWASIPGALGVAARVAAERAMNWAGFFIFDEKEPKRYLIWDKEKGALTLTMPLAPATFLRANCWAAYDYRCRKPKKFSSTLMELRDFSNVATHKSHMKKLITFQKINEKTIKIRN

SEQ ID NO: 929294 - protein, 170 aa, Homo sapiens
MGYVPQTFPKLHGDDDGDGGSDTDDYGDDDSGNGDNGDYNGGEGSDDDENKNGDDDEVTVFSSVTTEKFKYLTHMIWRDLWDTLKTLKDCSCPPRTWCVYMGVGVRGFKEPIDSIIPPPPNPRSHPLMLVDSFILYDPSSPLEPVHVFPAFPFPLPGALTLRQRNAFLKR

SEQ ID NO: 929295 - protein, 164 aa, Homo sapiens
MVKIRALLQLKCHPVKLLEVKNTDNAPDHTNKQVNPLAWHTGKPGKAKTAVPVKIQLKDPNYFSNQKQYPIKLEARRGLAPIVEKNPNTREKQQYTWIVLPQGFCDSLHFFAQALERDLRDLQLENGSVLHCLEYGHLAASPRIILDHELVLNLGGYLPLFESF

SEQ ID NO: 929296 - protein, 179 aa, Homo sapiens [sequence omitted]

SEQ ID NO: 929297 - protein, 142 aa, Homo sapiens
MIGFQLNRKKKNWMWTVPSLTNDSYQVHNVFSSNSFQLLTVKLKPLEELRAPVTTNSNKTKGLPDCPKKPTKGTFLLNSILWNDCNAPKAIVLQSLAMGTVIDWAPKEHYSQDCSSKNTSCSEYNYLLDYIKDGWQSYRLRQ

SEQ ID NO: 929298 - protein, 187 aa, Homo sapiens
MASEGASPKPWQLPRGVEPASTHKSRIRGWGAHGETLLEQCEREMWGQSPHRVPTGALPSGAVRRGQLSSRPQNGKSTDSLHHLPGKATDTQCQPGKQLGGRLYPAKPQGWSYPRPWEPTSYIISMTWIANRQECLSLLKLCPQPPLPPGALSQGDRSFIYKPLTGGAAFLLEAPCPEKRNLERQSG

SEQ ID NO: 929299 - protein, 143 aa, Homo sapiens
MASILEETNLTRRLKIQSPKCTSFDTKYTSFDTKYTQTLYRLYPFPSYKISNLLSNSVSSTFNICPGPFQGQIQNVRSRSSQRKPDIAVGWTCQIINDPISFVRCTHVAKFLLIFSKHSEGKAAVFPPLLQCQHQCPAPDGML

SEQ ID NO: 929300 - protein, 115 aa, Homo sapiens [sequence omitted]

SEQ ID NO: 929301 - protein, 149 aa, Homo sapiens
MGQVGGLFFKPVGGEHAIAVVVMGQRLGLRQHVQVPVVGGVCICQTSVLVSGVGSGKVCMSSGGNEQYRLIIWSLDNMLALAGVALSKVSLSLGPPMLCMGQAVMGKSWAISSPQRVGLGDCGKWVGFVFKALYSSSMCQKWQRGWDDP

SEQ ID NO: 929302 - protein, 178 aa, Homo sapiens
MPPSYAKKVPHKMPLRLITVRLACFTTRYPKGLGSFDLSCIYFRGHQKHNSAVVFCRFLEVLKIYNQQVAKPVRPVFFPSGQRGPPSPPEEDPHPTTTTNPGHEEYCQMNSNIPLRPKMQTQSSLSSFLSTSQAEGRGLFWSPELCSTADASTPLAASDGVSVCDMSPSPLFLSLIQL

SEQ ID NO: 929303 - protein, 171 aa, Homo sapiens
MIGFERTQLGACKRLGPSAGLTVQSICVSVYFIHLSLNQGSAGTDPLQLVPPRLNVDSYLSPYTKINSEWIKGLNVRLQTINILENNLRDTILNISLHREFLAKSSKAIAAKPKIDKWALIKLNSFCTAKETINRENRQPTEWEKIFTNYASDKGLISRVYRQLKQQAKNK

SEQ ID NO: 929304 - protein, 134 aa, Homo sapiens
MVFYDVVSAVLPQMLTRNQHFQYFNFFLLVPLKLQAPLACILTSEIPIITESLLDKSVIIVRQEDGERLINGYKALTAWLLKGTCSDLRAGMVLNLGAVTALLGVHSWGTTDMPAPYRLGPLWNLSTEELEWGS

SEQ ID NO: 929305 - protein, 144 aa, Homo sapiens
MSLLVKAVQQASRKFKLSYIFLSSEPSKLFQSLPLTQFQSQFHIFGYPYSSTPLYQYQFTVLVCSYPVNKDIPKTGDAIRQKTSCTTNLFGKGKVREIGSLRLTMLFLTSDSENHKQGLESGLYELRAYPGRQASRAESILPTL

SEQ ID NO: 929306 - protein, 155 aa, Homo sapiens
MEICKTLVRTRTSALQLHSIGQRHKERSKKMSKDSYSDGLLPRSLKELREKEDMLAGVEIYTWTLQNLLFIKIGYTSAKTDISVCQPTDQTSAKPLMQHYGIGAIRANKKQKKLIFSALLLCKEECFSSPEDAVSKALDWKQRRGSYQTPDLLTH

SEQ ID NO: 929307 - protein, 140 aa, Homo sapiens
MCTTCRGDDRIFMLLFNGKIHFFLGAIFDESAKKDDEVFRTAVGDLNQNEEILQTEKITFSVTFVDGNNPFQAVQEVRPLFCRAAVVCSGSTSDPIHLGPSHTWRCHQWRLQNSKDGCLLLPPGSPSQRETDLMLAGMLL

SEQ ID NO: 929308 - protein, 244 aa, Homo sapiens
MVLKQQLPPLQQAASKGAAEPQDTEERRKKKKEGRRGGGGGRRRRRSSRSSSREKEQEEEEEEEEEEEEEEEEEEQEEEEEEEEEEEEEEEEEVEEEEEEEEEQEEEEEEEEEEEEEEEEEVEEEEEEEEEQEEEEEEEEEEEEEEEEEEEEEEKRKKRRRRRKTKKKKGKREEEEEEEEEEEEEEEEEEEEEEEEEEEEEEEEEEEEEEEEEEEEEEKRRRRRQIIHVSFYYCDHNSIENCLV

SEQ ID NO: 929309 - protein, 149 aa, Homo sapiens
MKIYREVQRYLIEQGPGQEKMASSDLSGKSFPTTTWIHKWKSGTDGKAEWILETNTNVCRILLKLPNSHTYSPLNTCAQCKLSMDLLFLGLEDGGPLLTDPLGNAPMGTLCGDSNPTFPLCTAAVEVLHEGSEPAADFCLYVQAFLYIL

SEQ ID NO: 929310 - protein, 143 aa, Homo sapiens
MWEDAQVLMPNRSCQGHQALDIEIASGHPSTFEFPRKCHQRSFEIGHQAFFPTTSDWHLYKSDVHRRRPCEDTVRRQLAASPGEFSGETKPAAIMILDFLPPELYVHTIDKFCEYVCHKMPSTTAEVEFASAPLTFMGKENLD

SEQ ID NO: 929311 - protein, 200 aa, Homo sapiens
MSQGLKLKPMKPGIEDNWSKMTKWKPPLTCLHKKAPTYELKIRLTILVSDYKHWLLDSISGPTWGLGTLQPFRKEHKSGWVRYLLIVEPWTLSKHRDSIVPVGVTTGVLVSPLPQLQAAEHREKDFICLGESKNKSLSLVIQIILPDLIPNCQGGTSLSMQELQHNWAWVPPNADMASVNKTLDHMPNSLLTPGKPSQEG

SEQ ID NO: 929312 - protein, 167 aa, Homo sapiens
MGSSAAEQGAELIGEAQARAGPHGGGWGEAQAWRAAGPRALPHGKAAEAQREFEHQHGLVCTAGGPGAPSTAAGPGAKPLTARDGLLSAGPSEPMPTGNSCWPVNTACSPGSRPRLSLHTSPQAEGAGSGLCRPREGLPQCSSGLKGSTAARVGTKAEEELYSRRRL

SEQ ID NO: 929313 - protein, 171 aa, Homo sapiens
MKSFLLVVNALALTLPFLCHENDERPFYQKTAPYVPMYYVPNSYPYYGTNLYQRRPAIAINNPYVPRTYYANPAVVRPHAQIPQRQYLPNSHPPTVVRRPNLHPSFIAIPPKKIQDKIIIPTINTIATVEPTPAPATEPTVDSVVTPEAFSESIITSTPETTTVAVTPPTA

SEQ ID NO: 929314 - protein, 135 aa, Homo sapiens
MSPSFQVPPHSPHPDVGDCSRSCVQEIDFRTINISSPTQDSFSLSNSEDIKFTLAEAIIMASPKGVVRQDNADSTQNPYPPLLFTSRSVTRLTSQQSPRDLTVGTTVTQLENLNAMGIIESQGGRGQVVALNCQK

SEQ ID NO: 929315 - protein, 153 aa, Homo sapiens
MQWHSATQQELIFVLAVSSPKSHLQFPRVVGGTQWEVKICFWTHSRHCWLATEDLFLNVLIWVSLQGYCMSWQWLSPDARDLREEERTKARKMEATTVYNLISEVMSHHFCHILLITNESLNPAHTHQEASLKLKAFSLCRKEFVDKDEFAGQ

SEQ ID NO: 929316 - protein, 176 aa, Homo sapiens [sequence omitted]

SEQ ID NO: 929317 - protein, 143 aa, Homo sapiens
MVTYRWGFGVDVLFVDDDAIPFCLLVFLLTVRSLSCRSVGVCWRSTPDLFAWVSPVEAAEQQILQNSKYCCLILPLEASSQRGTRLYEVSVSPYWKVDFGNQKGQREYEAHVVPLMLCLWSLQLFRNPESYSTFSNKFRFYLN

SEQ ID NO: 929318 - protein, 181 aa, Homo sapiens
MDSACVGFVQLWAFSHIDFKKTGATDFGGIRRVIHGPMALMDVKIHCCGRSGTLTLNDGGCGQKQVSDGGCGQKQVNDGGCGQKQVNDGGCGQKQVSDGGCGQKQVSDGGCGQKQVSDGGCGQKQVSDGGCGQKQVSDGGCGQKQVSDGGRGQKQVELEGHTFGHENGGTKKNEVACKRPL

SEQ ID NO: 929319 - protein, 160 aa, Homo sapiens
MILAVEMPCPERKNLERQSGYSGFAKLRCAPPSLNFPSSVYTVRGKPPTQASVMVDAPLPTKLKRPKSTSDCCAGSENFKPVDLSLLGSMGVEPTELDHLAPWLQPPFQGRERLCLAGTPGTPGVRKKTRCLPKRLPSFVLETQGPGGIGTRGILLVHRL

SEQ ID NO: 929320 - protein, 151 aa, Homo sapiens
MAVKLGTLLLALALGLAQPASARRKLLVFLLDGFRSDYISDEALESLPGFKEIVSRGVKVDYLTPDFPSLSYPNYYTLMTAITFVKAARGSQKEFSKLSREAAKNALLLLVMRDSAMHSEHRESSANYVNRKKMRSLISHGPPQNTKAKRV

SEQ ID NO: 929321 - protein, 132 aa, Homo sapiens
MPASLGSLIEAHYREYSLSGKNVVRCLWEVYDKMLTKVNSEDLAAVASVQALLSYSLISQSASSASWVPFKFNSPPHLQPIIKDRCGEVWSGTGGEEEPVGLSFDAGLGPGQLLCENGTSDAYSPRRWPVAV

SEQ ID NO: 929322 - protein, 143 aa, Homo sapiens
MAHSGASVTQPLWLWGEGKVWHPALARPARSRIPATVTVAPGSRLGGRILHAGGIHSSRWPSWEEMSPCEDMAPGRDAGATARAAGRAAREDSMAEKLFVWGYHRRESNFRSSTFGQQIKASPSIVFIVTANSVPYCISSGPQ

SEQ ID NO: 929323 - protein, 189 aa, Homo sapiens
MSTGLYPRVGPSEEDLVALKGEEGSFPRRVPSDLEQALVAALRTWVRQPCHLPLPPTLVRPLDLTSGSLGSLGCSRLLQKEGSLQRTPGERLPPIRSTGLGKWSLKEHAEESEWRGCRLGLSVPSRLRGPCTGTWFLARSGEGLALLGLLLAFPAVPAQLPRAQSGGGRFGGRSPGKVTKRAPEENARV

SEQ ID NO: 929324 - protein, 163 aa, Homo sapiens
MQVRGSKEPVLGRNSCWESGRGQPQGEWPSGARETCLQPQPYGRPAVQHLYSPQLSKNQGKSDTFSQPRGTYRAVMTMWYSRWAPGAGKRHSEGQEIGQVQDLGSNNEVAMLWSCSGHVDATGPVEPGELQGRALKVWSPLWSRLPVLSATSSLWDSPTALPL

SEQ ID NO: 929325 - protein, 164 aa, Homo sapiens
MATVILPCVASSSTWASSHPIALVKFFWSKQVSILNYHLCHQLSLCIPSKLSKDEQFSPWSVFKRIFPRGHWQLPRMSFPNFWKNSNIGWYLPAPTVCRHCSLHYAIIVLLLTLFWDCVSCDSHSARHFVNTVLTPCFNTMITISQLSKLRLSGKLTCPTSHDW

SEQ ID NO: 929326 - protein, 143 aa, Homo sapiens
MKSMHLLFQGAGTPMGFCLSLRLPEGLFLSFPPQEASRTWKLGVLRVCILLPLGQMEEVPVPESLLRSLRAGRRLGETRRCWEVLEGGWGTLRAVGRGLEGWGRLGGVGRGWEGVGDTLRVHSIHRVSHLFSTSFVLSTVPRI

SEQ ID NO: 929327 - protein, 143 aa, Homo sapiens [sequence omitted]

SEQ ID NO: 929328 - protein, 165 aa, Homo sapiens
MRLIILTKLRTWICWHCLCIYLGAMDPGQTVFSKANVADHKGPYRREAGESESEREMGRWKHREREKKNRKEGRKKGRKEGKKEKEEEKEKEEEKKKKKKKKKKKEKEEEEEEGGGGRGGGGEEEEGGEDEGEGGEGEGEGEEEEEEEEERGRRRRRKREEEEKV

SEQ ID NO: 929329 - protein, 158 aa, Homo sapiens
MYEKGWYTGRSLLKELSPHREPLLGQWKGNVGLEAPHRVCTVYEAVEGGHCPPEPQNGGRSTGSLRPSHGKATGTELQPVRAAREAEPCKATGVELPKVLGAHPLHQCVLNVGVRKDYFGTLKFNNYPDGFQSCVGFSTGLTGARTYPNVEGRDLLCY

SEQ ID NO: 929330 - protein, 143 aa, Homo sapiens
MWKRGVMSADVYFGWKQRDHLGGGFVKGIPEKPEKLVQVVMGKGTCFITPSSLWNSGTTDQPLHEDPRVGTTALYSHLAPAAEHEHADLVGADDMIKLSTEGLQVQYPGLDLPIGCLISLLHQRLVIHYMGLLGGLGHSIPVF

SEQ ID NO: 929331 - protein, 144 aa, Homo sapiens
MRKDLSLFTFSKRYTQLQGLRTTETIDVVISIYLTTYSGYHKDTRDFKIENVRLALTLARKTPQIASCNSFSSESIEKFQCNQQCGCRRHERLGDMVMLIKFKSDHREWVQGARFFCAQYSTYLHFPQMLRWKFNVSFMYLFVN

SEQ ID NO: 929332 - protein, 167 aa, Homo sapiens
MLMIYILNKYRPLSPSRPSQSSGGDETHLPLSLWARLMPGASVDRGHAPGLPKLEKAARLRWVHHSSCCPLDTVTKEHSGPGALGLVIGWLWPASGPEGVGCLLVVLLPRGLAHAAPPPTHQDPQGPLHTQLSPIPSDSPFSFLRWPGAYLGVRTFTVSGNAYWSPR

SEQ ID NO: 929333 - protein, 127 aa, Homo sapiens
MKVCSFTPETSKTTNPPEGKNKLRDQEETPNTSEHQKEQTLHTLPLRTVTPTGRVRGFVLEVSETKNPPRSFAMREPFGSRMCACVWIRSQVTRSDVDHVRGRGERSREGGGRRNRWSRGGARRGGE

SEQ ID NO: 929334 - protein, 127 aa, Homo sapiens
MDKQIIGTDLTGKVTGKVSLEKGDQEGILLELVGGRGDANHARSIPVIVKATLCPIPLMHSTWDIYCRISKSKSYKLQVNVGGDWTRVWIQEEALAPLEAITVTANPQGKYILNGLGHPKLSGMQTM

SEQ ID NO: 929335 - protein, 200 aa, Homo sapiens [sequence omitted]

SEQ ID NO: 929336 - protein, 165 aa, Homo sapiens
MAGCSPEPCLAGRQLRPGEKAAKAGREAPVGCTAGGPSTPSAAAGPGTKPLIARAGRAGRLLRVPGPPSPRPPGTPAGRQAQCAAPVPAGASPSTPPCKLRDAAKVGAQAEEAPRASEGYEDCQHAVTSHQLCLKQQALGDACSSPIKGPGWGTNSIYYGWSEKH

SEQ ID NO: 929337 - protein, 115 aa, Homo sapiens
MCGPFFQPRQCPEWAAAPELSPYPPMALQSVPGEVQPLGVTGRSPCLITASSLLSISTLITPQHTSVHPTYSIVSSPAPSGHTCECHIGEECLTSLNSCYSAAEGLQHGRYLLNI

SEQ ID NO: 929338 - protein, 173 aa, Homo sapiens [sequence omitted]

SEQ ID NO: 929339 - protein, 147 aa, Homo sapiens
MKLFELLIWSSTCILVMDLLSDGYFENTFSLLCHSFAGLLEFAGSPLQTLFAWVSPAEAAEQQRLLPPHSSGSFSAEAVPTATPSPGALSEGDGSSIYKPLTGAAAFLSEMACPERRNLERRSGYSSFAELWWAPLSLNFLVALFML

SEQ ID NO: 929340 - protein, 163 aa, Homo sapiens
MSECLGDNGSCSKHRTTATAYAIVQIPQPVEHPSMGNAQRKSSAQCLITFSSSFYPWLHIRITREGDASEEGTSAGLEVSKVSVFLFQDPVVFMNNFYSGHRLPKEQIYNLHAWSSGRLQVPGVTCSFWKRTMNLCVPSIICRLNELIIIAQICTLKIYGNPL

SEQ ID NO: 929341 - protein, 150 aa, Homo sapiens
MILVNVEVVEVESKLKMKIREEVWNFEDSDISDSDQGKRAKKENEAKKQIQIIRQHGGPLELIVVNLVKLVIMVIHCTLALLSCMRMNVTANKGSIQINKYVLAKNKKSRESNDQCLSRYFLFTYHFKLRYFDGFSAVRLLGTDAEIMKY

SEQ ID NO: 929342 - protein, 135 aa, Homo sapiens
MKLPEEGSGSNICCSTIFAVLQPPLVIPRQTGSGVDLQQTPTDLQLRDLTVKRKTNKQKGIASTSTKKTSTPKPHLASSPPKDCNSLPAAEQSWTDNDFDELTGVGFRKSVITNFSELKGEVQIHSKEAKTLKKD

SEQ ID NO: 929343 - protein, 154 aa, Homo sapiens
MHREWKSQMEREVAKKRMFLSKLPAWKLECKPSRETGDTGDSNSPAGPACHTRAEKALRQSYGGSGKLGQRVLKWEHKVLSKYDLISAHDSPEGRSWQEFPPSLERRQTNGSKSEFRPTFRSGAGSVSSILYLQLLMPSYQWGWTNEGHICDLW

SEQ ID NO: 929344 - protein, 150 aa, Homo sapiens
MWVCSFTSEASETTNPPGGTNNSRRTALRAVTLTAKVCSFTPEPARPQTHQKEETPNTSEHQKEQTPVTCPLRTVTLTARVHGFIVEVRQSAIPLPEVTTYDGLLIALSVSVSLIPVCLLHTKQPGGFFKKCELYQVIPQLKFYRNFPCA

SEQ ID NO: 929345 - protein, 160 aa, Homo sapiens
MTHPAKGYFSVHCPDLPMKEENGPGIEKGPGPAMQAAPPGTSTCKLSLALHEPEVSWRGYVRTCGIALAGATACPFAAPSYKDEELDDQRDVAGESGSCPPGGRGSDAEDFSHGGECPLCIASDVQDDDPIACHRLTSEHPCWRLNLLLAELPVLAGRLH

SEQ ID NO: 929346 - protein, 122 aa, Homo sapiens
MLIQTISCRRIAEIREGCVLRGEVCCVLLRRFSSLVKDERHIKKSPLDIASSILLLESELGHDGWSYNSHPVTMSLQGYKAVIFRKVEPLDKKIKGIWGLSYITEPFQALAFFLLNPVMLDN

SEQ ID NO: 929347 - protein, 168 aa, Homo sapiens
MPGAFLLAAVIIPGLPGLAAVSLRSLSLSSHGCTLSCKECQDGKRYAKEQSGIIILREKGSLDIVALLSCCGLCSVQTFPWLRLHCEGKTAYSNLSNGGWPSPHQARESQVDFRLPSGSENFKPVDLSLLGSVGVTSTELDNLAPWLQPPFQGSKRFCLAGIPGATGV

SEQ ID NO: 929348 - protein, 126 aa, Homo sapiens
MAGYSSETKLPEERSGSNLCCSPISTVPQLPLLTPRQIGSGVDLQQTPTDLQLRVLMLEGKLTNKKDIHTKTPSVRHHHQRPKECSSSPAMEKSWMENEFDELREEAFRRSNYSELKEEVRTHQRS

SEQ ID NO: 929349 - protein, 148 aa, Homo sapiens
MRSSWVGSNPMTWCPYQKRQIWAQRCTKRRQCEDTDGRRHVTTEAETGVMQLQAKESQRLLSFEELWSRAPLERLNCALISSGAGPENGKASQFIDGNREKGMAMGNILKEDPYSKLRLAGLERWNRMSPRWPLLHGWRVVVLEVTGG

SEQ ID NO: 929350 - protein, 136 aa, Homo sapiens
MAPPPTMGITIKHEIWVGTQIQIISVTNSKNVLEPDNYILHFQQNLSTQMLLQKPNTFWGPMADVAYLGIEVDKENGSNSSVRWNRPSGIITISFNVMAYEDVLLGVAAASCDREGDMKRITEKLAQNFDVVELLS

SEQ ID NO: 929351 - protein, 136 aa, Homo sapiens
MAHVYICNETARCAQRKIRECFHDLLQGKMAVKRTKKPIVINSSKTETTFKKRWGHLASKLALGSKATAYTSSVFPLAPSAWRGLLASSRCSGHSSKEARTEWGGGAPCELSRYRLFFYMQWVRALPFLYYSQTSK

SEQ ID NO: 929352 - protein, 140 aa, Homo sapiens
MAAAILDSPPLPSLPEDQTNYNLPLSQSLIQTKALTLLSCLKAKRDVVEIAKELELEVKSEMGLSCCNIMIKPEGMRKCFLWMSKENNFLKWKLLLVKMPNYQNHSNLQQPPSRSVSNHQYAEKPSIRKRVQLAEGSDDH

SEQ ID NO: 929353 - protein, 164 aa, Homo sapiens
MGKSLSMMAEKHEKAVEEKLEASRGWVIRFKERSHFHNIKVQGEAAIADVEAAASYPEDLAKIIVEEGVKISTLTGIWEKWIPTLMEDFKVFKTSVEEVTADVVKMETELELEVETEPGPELLQSHVVLSPLPSPVLWLVAPDTVTLIPLTLDSSESVSKCQTS

SEQ ID NO: 929354 - protein, 146 aa, Homo sapiens
MYEKACMSRQKPAAGAEPSQRTSTRAVGQGDVGLDSPYRVPTWALSSAAVRRGPPSSRSCEGRSTDNFHSVSGKDADTQPQLMRAAVGAKSCKATRAELSRALGAHSSHQCALDDSDLSGEGVVASNWMVENFTGLSQACVFSVMD

SEQ ID NO: 929355 - protein, 137 aa, Homo sapiens
MYEKSKRHCVTGCCQESKHSNEEFQSRNLLEAVRCHEMSSSLGTRDLGFPAMFAPLFTVEALPSRNPIPSSQILPRQLFLKAFKASKDGVSSSRFKTPCSMVDSRHAEKIKPGLGLRSSHSDKGTSQANENIIVQCN

SEQ ID NO: 929356 - protein, 155 aa, Homo sapiens
MCLGDDIFDMTNIRGTHSKNTNGSTYVGSGEDRKMWESLELLRDLSNGFNQNADDMDNEIQVEVASDGDEELVGNWSKGDSCYVLAKRLVAFCPCPRDLWNFELERDDLGYLMEEISKQQSIQEVTWVLLKAFSFKREAEHKSSENLQPDKIIKK

SEQ ID NO: 929357 - protein, 149 aa, Homo sapiens
MVAGSWAGVVSAAASMSTPIPISRVQGPFQVNDIMTAEERDRFPTGQQAIPSMDPHWDLDSDHRDWSCKHLLTCDLEGLRRIREKPMNYSMMSTITQGKEENPSDFFEWLWEALRKYTPLSPESLKGQLIIKDKFITQSATDIRRKFQK

SEQ ID NO: 929358 - protein, 145 aa, Homo sapiens
MDQSAGCGWAKGSCDRLHLEKQDTPNQILHYSHSLSNHQTWRYPPVPGLVGPMPTEPDPCSLLVQQSEIDLKAYCLYRFHFWGQGIVEQKAADSFCRLNHPCLTALKRAVVLSAWHLSSENIQTASSSGSLTPVYPDWETSPSRG

SEQ ID NO: 929359 - protein, 193 aa, Homo sapiens [sequence omitted]

SEQ ID NO: 929360 - protein, 157 aa, Homo sapiens
MAPVVVVLTTHSKFMVFKGTRTMLTLSPSSRKLSGYTRWYCSEFLDGIVDDIGLLLLLEPQPPLVGVVLQERVLGSQQQLHYLVLQELQDHLLGEPGGGHHGVGVVQEGGEEDEEHEEENKVAYSSAILKELITSLDKALTSDFHSHPKKLRGRVLV

SEQ ID NO: 929361 - protein, 136 aa, Homo sapiens
MGTFTQCLYPHCIFEIHHQIPLCPLIVRTEHLDLLEAFLPHPYLMLETTSINSETQLEAGLQRNPDNTIHNSQTIGQRRLSMDLLKKGNRKAIQRLLSIDSRSESGNQLPVRKSFNPPVKYYLKRNQKNMGLDSSL

SEQ ID NO: 929362 - protein, 174 aa, Homo sapiens
MRNLWETEAKADNATEKKNPFSGKKLKPAAEICISNEEPNANHQDNGENVSRHVRDLHSSPSHHMPEGLGGKNGSLGWAQGHSAVWIVRNWCPVSQLFQLWTKGAKVQLRPWFQRVQAPSLGSFHVVLSLQVHRSQELRFGNIHLDFRGWTEMPGCPGNALLKGQSSHREPLIG

SEQ ID NO: 929363 - protein, 140 aa, Homo sapiens
MAEEASEWLGPAGSPRPRTADLTFPRRHDAPLGDMKFTQYPFGVAMERVEVCFEAKEEERREDKEEKRREKERRGEGKRREEERRGEERQGGEDKKRREEKRRGEEKGREEKRRGEERRGREEKRREEKRREEKRRGDSL

SEQ ID NO: 929364 - protein, 139 aa, Homo sapiens
MCGTQCQLAAGEGSLESGGGATPAAAHVSPRAWLSKWGDQVSLLLPPEPSADAPVDDQASPLRLLPPRPEYPGPGASEAAWSAQGQGCLQDVIGIFVLGLELCRQVAGGPALEALPSKRVLVSQVIPAHRTLPTPPCPN

SEQ ID NO: 929365 - protein, 146 aa, Homo sapiens
MFWRLHQQPESALCPVCLAKLPVTFIGLKDAKYCSWVCLRGHCQRRLTFELQVLQLLDSWTNTTGLPGALEPSATAEGCTVSFPTFEVWTQTDPLPASLLLNMQMVYHGTLLRDHQGNTCYIYEVNQNLLCTKAQGSNDNSGEEPY

SEQ ID NO: 929366 - protein, 142 aa, Homo sapiens
MTGVLIKEDILNRGTYKGEDWVKTQEDSCLQAKKKSCPKEPTLLSLLLWTSSLQTTSMKGPMTAEVMLVCAMAVVWCPLALGTASELKSTQLNWKKGLALNHILKWGLLETFLFVQLASFHNYTRRTNVSTTGKSGSTWSNS

SEQ ID NO: 929367 - protein, 164 aa, Homo sapiens
MGSLPSQAHLHLQVATDLGISAFSWARKPLLLPQDRMCLLLLTGVSPLLVPALVSQQSCGQTQALSCAHSNFREKLWPSPDAVMSQPGQGWPEAWGPGCQFSRPEPEIMVLFLGPPIAAHGPISMHFLPSEAHKSPGLSQIQADERLPACGEKLCTVGLLSNES

SEQ ID NO: 929368 - protein, 307 aa, Homo sapiens
MQEVQYNLLPGSWLIAPRNGAISRAQCWTLLMANWALSGGHSQVSLAEGTLILVGLMDRNGEKGIFQVNGCITDLTYREDQSLARQRCKCCPHKSVSQGIGQMHIFWTLQAEMNGKVQATGENGGSRTDINYCKEEQKKRAWGKNIRFDEKKAILGNANKLRYGKFLKMVCPECDPSDVQMCQEFLPSGGFVVLLTSGVKPQTFTVSVTALRVGASGVVRSSQWVRGLNDFRSEAADLCDVQICPEFLPSGGFVVSLTSGVKPQTFTVSVTAPKGGVSRVVHSSQLVHGLTDFRSKAADLHSECYSS

SEQ ID NO: 929369 - protein, 153 aa, Homo sapiens
MFPVLFPKSFMISTFTTSYLDCIKNLEVLVRGTRQEKEIKGTQIGKEKNQSVSVANDMVIYLENPKDSSKRFLDLISKFSKVSRYKINVCKLVAFLYINSNKAENQVNNSILFIIAANNFKIPKNVLNQGGKRFLQGELQNITEINNRCHKQM

SEQ ID NO: 929370 - protein, 154 aa, Homo sapiens
MERPCDVPANSTVSDASCQPASTPDRCYLFAKSSGDGPCLFLEETSLLWALTAHCLLSAVVFCGCTLAFCVSIILRGNSGSFENKDRQHHPDTKAWQRHNKKENFIPISLMNIDGKILNKILANRIQQHIKNLSTMTKLASSLGCKAGSTYANQ

SEQ ID NO: 929371 - protein, 126 aa, Homo sapiens
MGVGLFCAVLMLVNESHEITCAGVSLHKISLGLLPSMVHVHNVQRAPSEDSAGLWLHLHGWCKVCCPLAANPSIASHLHACTSVFHHYAPAAATTTASANAVVKTDGYHAWSIMCYVLCKVFYVLT

SEQ ID NO: 929372 - protein, 151 aa, Homo sapiens
MGFPHMESASAWRLDFLDSRTMRKKCLLHTQFTVLFIVAAQIDQDTHPQILANSELILNWVENVSATSAPLHEGVWKKPCCYGYRVTSNKNEPCLNPSEGPWLLISLASLFQPTLLTWELLEGCMGGWCGPVEAAKDFESHYLKLKSQSMR

SEQ ID NO: 929373 - protein, 134 aa, Homo sapiens
MGDTSTPMATRADISLGHVRSKSTGCGPTAAPGLAPSFLHFLGALHEKPKAKDPRWNNGCFAVSSLGRSRELWYFQALIRALIDRAGVSPSWTSTVILKITLIKYRLNPKGISLMAKGNQSSYKQTLTHKTQES

SEQ ID NO: 929374 - protein, 179 aa, Homo sapiens
MQKLHLKVTNSKDQREKNWIENEFDKLTEVGFRRWVITNSPELKEHILTHCKEAKNLDKRLEKLLSRITSLEKNINDLVELKNTAQELCEAYTSINRQIDEAEERISEIEDQLNEIKREDKIREKRMKRNDQRLQEIWDYVKRPNLCLIGVPESDGENGTKLENTFWDIIQENFPNIAR

SEQ ID NO: 929375 - protein, 153 aa, Homo sapiens
MNELKDGRCRGFSCHRKWLSADIPSMEGKVFLYTRQLAFWRRLEKGQRNLERHHSKTGMSNPQAVNHTVFISNKSEIAIQKNNASFGFWLYNKLEVLTVIFKMIKKLNKLKISIYYIHQRSEVTGQTAALQTRKIDGGVQSSTIFQEQKPWSS

SEQ ID NO: 929376 - protein, 157 aa, Homo sapiens
MPITIPLKPNHPYPAQRQYPIPQHALKGLKPVITHLLQHGLLKPVNSPYNSPILPVQKPDKSYRLVQDLRLIYQIVLPIHPVVPNPPQSHSRRQTNLNCAPKKPIIPTIFCLVILLFTVLNYSHMPCSCLHCRFTLFLQAITADISWCYPQTATLNS

SEQ ID NO: 929377 - protein, 136 aa, Homo sapiens
MKYSVQRSNKPQQSGENANNKAEASTTQLPVWLEYKQAEKCEKRDWPSPLAYIFFPCWMIPVLEQWTPGSSVLGLELALLTPQLADSLLWVHVIVQAISGKPFANIRSCHKTFKNSRWLMNAISVKPLVLLCPCRD

SEQ ID NO: 929378 - protein, 204 aa, Homo sapiens
MLPPTALSLFPGSGRAGLRTCPRLQAPQLRKQAGLSGFVPPCLPTSILQIYPLPWVLSRKLHVQLELLQSLAGGFLLPEVFFLFLWQPSPRTPVRQIRNVFPEDQESFLYSCISLTSLNYLSSRNLTENSTEKSQEIPEALENKEMNGRSSEISQEPQGTQYGSERLSGRTSVVYIPRRFSIKQGPEREGEKRERQTQQAIDEY

SEQ ID NO: 929379 - protein, 139 aa, Homo sapiens
MARRAFPEGSLPNDPTPPPPRPPAPGPTATLVNHISTPALEGAGIRTISPPLRAGGWRLHCSQRAGTGSLTWGLLCGLFWGHPFSLSFHTQTPSSRHLWVLGWGPSARGFTWTMEDNLVLHSVPGAAAGTEHNGFIFIY

SEQ ID NO: 929380 - protein, 145 aa, Homo sapiens
MSVERLLGTWHVASCGVPFHRNQTLGRRSDLSPPVTAPVLELGKHICLSTFEAVSSPNPSAEPVFRLHVTAGQAAITSDTKLAQAGSGQPSLNSDVPPCNRGSAIWHLTHAYGHRSHDWTCGCCQCCQRGTRFSLQREKSTLLMM

SEQ ID NO: 929381 - protein, 196 aa, Homo sapiens
MFLPLTSVSTLCSNCPILSHARKLPTALLPFWNSQPLMGAHCPPVGLTRAVLWTQVMKEQSRGCKKLEALGSPPTGPVNLPRGAELEGSQVLWVWRAAPILRTYSTPCTNPLNTSVGTGTPTLHVKKLRLRHVIGFARCHSLSEWSGRKLNPNPADSNVPGLHFGMTPKCRRPQQRCGMGPCDSLRPMLPTSPPHV

SEQ ID NO: 929382 - protein, 157 aa, Homo sapiens
MPCWPKEPRVEVQELSFSFQTEGGFVTSPVDAAGGSVGCWLSPQKLAAAPGFDSGSAERPGLEGVSQPLHEAVILLLSARTKLICIISPGPQAPLGGAAWDSGEAGGAVTQALVRGQPSFRRPSVRGRKRCRPEVIKETETSREGTFLRSLSERLAS

SEQ ID NO: 929383 - protein, 185 aa, Homo sapiens
MRAGGYACVQWQRPGRRLVAHFGYRPRCGKLGQPVASLVVGDSEASALAAGEQPRRAPRAGRGGGVMRPVDADEAREPREEPGSPLSPAPRAGRENLASLERERARAHWRARRKLLEIQSLLDAIKSEVEAEERGARAPAPRPRAEAEERVARLCAEAERKAAEAARMGRRIVELHQRIAGCECC

SEQ ID NO: 929384 - protein, 205 aa, Homo sapiens
MGMNEWMNQQTNKRELERTQDQRSSPCKGERSRGELPLDVYFWNAAHWRVLHPHACCQLLVPPALRPRSQRMTVPSSWDTTSTLASPALIPALECKLLQALRPLAQPSTAQGLAEVTPCNADAESAACGAPRPTPVNLNPRSANHQAPAHVLLEVSFPGQASSLEPGWSPTRVCKALQAALGFTVCMAPDTQQDTHGPSEVCSYH

SEQ ID NO: 929385 - protein, 160 aa, Homo sapiens
MTSGGCCVPGCGEVWRERREREPGLCVALAGQLEFRVGVGLEGPAFRAAGRPCRPRARRDLAPGPAAVEAAFPRGRARDLQPAMPEPSPDSVGSCAARASLTSATPCSTAPSPIDHPRAEECECMAPDWQAAPPAAPVRDPLGEASWAPESGGDVENLYV

SEQ ID NO: 929386 - protein, 165 aa, Homo sapiens
MVLQAVPTAQPFLHLPLLSTVESVTMDDLPSGWCLEASSVEDQQHGAEVRSVFHCLSSSGCRMGRHPDCSCAVCSPAPMRCPTVRWPLCTVPLCAGPRVLPHCALAPVRCPTVCCLTVRCPTVRWPLRTASLCAGPRVLPPCAAPPCVPHCVLAPVRCATVCWPY

SEQ ID NO: 929387 - protein, 145 aa, Homo sapiens
MGDITGPQDIAWVQGVTALHGAHSAHSVVAGTVASIAPERALYWGEDVDTLFQECAHIEKLASPSGKALAFPTAPCRPRSQALQLPPGRVGRPVLSCQGNHSLWKANPKPLARLLRPNHGSVRAKIQPSTSLPTPHRQSPVPRKA

SEQ ID NO: 929388 - protein, 135 aa, Homo sapiens
MSSLYKCEWSTGLLTGHGFGLVQGWLSWGPVQATALLCPECPCLEKMEITHPSSSVAGGAAESESRLKAGAGDEERPELRGRRLEAGLAVGVRSLLFLGLQGRCLVDPQGGECHLWLHPYLYPLVNARLLGVLPP

SEQ ID NO: 929389 - protein, 136 aa, Homo sapiens
MWECARVLHSCASDGFRVFWQGYAGPRALSVQEGQSSAQSAHSAPLFGLPSEHVSSCQGPSHCDLSSWQLLFRSSAPRPGCPAKAKVAVRLPPYCHNLPKRHCSRQLLDSPRCSQTLCCAHCIVVDVAVSLPFWTS

SEQ ID NO: 929390 - protein, 148 aa, Homo sapiens
MVNSLTSFHCVPGKCKLSMPACESSHGGCTLQNHRAELPRALGVHPLNQRVLDYLRFNKVDNEINKVHPGKVAGHFVEAWKITDQLCLKWDLGSLLQTMGPVRTDLRVRKELSVVNFKTLLHRIGGSDGFISVWCFPCLHSFSFPLPL

SEQ ID NO: 929391 - protein, 167 aa, Homo sapiens
MRTCELKRQGHFRDLHSSPSHHRPGGLGRKKWFHGPGQRPCCSVQPQDMAPYIPATPPPAMAKRGQSTAQGIASEGASPKPWWLPYGVGPTGAQKTGVELCEPLPRFQRMYGNAWMSRQKSAAGAEPSWRTFTRAMQRGNVGLKPPHRVPTGALPRGAVRILQTPDW

SEQ ID NO: 929392 - protein, 164 aa, Homo sapiens
MAQCPMLCSAAAAVWTRARRLNVVTDEQASTGAFPVSNLGTWWDGRMNICFGQIDLRFLCKGTEKNTININKKDIPSKTLFKGHQHERSKVDKSTKMRKNQLKKAENSRNQNASSLKDHNSLPAREQNWTENEFDELTRSRFQKVGNSKLLRAKGACCNPMQGS

SEQ ID NO: 929393 - protein, 137 aa, Homo sapiens
MRKKIDFGSYEKCRDLASVMVYGASEATGQCQSSATKPRRSQRALGQSSRGSGSGCQEESWAAGIPWPGGQISGTCSKLLGEEVLEEHLAAAVQAFGSCCVLEMWLGVEERRLRKNWDRARPGEEQPGEEGRGQIGL

SEQ ID NO: 929394 - protein, 149 aa, Homo sapiens
MLPVGVLSSLLSHSHQLDQLRLQELEDVVVVFMQEDGAQKHLVKLRLAVLRPCGMEKTVSTMEKLCQMMASEQETILSPSGISPSSTSCIRVKGLLLMVLSDDVSQQLTLTLGQLDKGTDTVNVGISLHVHHLSWPAAYACHSRPRTGA

SEQ ID NO: 929395 - protein, 192 aa, Homo sapiens
MDLEKVLYESQAIVTIENPAAIILQDSSSYHRPRDLGWKNGFKGQAQGTATMLSLRTLLPASSCSNSSCGLKGPRYSSRCHFRKCKPPYALVVAMQNPAGGMKPPQRHSTRAVLRGNVELEPPNRVPTGAAPSRAVEMGPLATDPRMAQPPAACNLSMEKPWGQSCPRPWEPVQDTNVPRMWDMDPKIVLKL

SEQ ID NO: 929396 - protein, 157 aa, Homo sapiens
MTEGLSQQAWRRMVGDPVTEKRPGSNTGSFRRPATRSTDSLPEHDTNLDSDECQLGVDHMLNGYSYNGMRGADSESRQSGCRCVPAMDKGEHIHAGVPSRLLDCHGAWILSCHTPQRVSELLALVRSRMLARMDKQAAGNGSSYISASKSLFKAYFA

SEQ ID NO: 929397 - protein, 183 aa, Homo sapiens
MAKPQAPSRLAKDPIEFSMFSSHFQPYCCGGLTSDCPVSPACCQVGKLYRHSVLQRTFPDNKRNSSVLVLRGEPGLREKSRALIRPFLKTEITLDFFIYVIQQLYEGRDLTYSLLCPSVYVFNSAQWAAATHVSLLFLLKIILQFHSNGLCIVGRLMPDARQRRAPWLIAYIPVKTEGKDKFR

SEQ ID NO: 929398 - protein, 130 aa, Homo sapiens
MSIVYVCVKRESDVLRSWTNILSNIHDFFYSRKCCLDSRNYDFEYLLTCTGHFYVPGALPSVLHSLSHLTFMRAIGSRCDLEMLNNTSIPADKYVSFMFLCLHAARSMTSKSQISHRKRKYEDRQCKHQL

SEQ ID NO: 929399 - protein, 143 aa, Homo sapiens
MLSFTSGNPIYVLNKSCFVLNSQQYSEPSKDFAWSIVLIGSALQGLHGISPSHLLAVRLKEYEQLAGNMAMLTHFAPTKSHSLEVVDLQRPSILWPAPETRSLEERMKPCSPEQVMSQGIEVSRWAEIVWFLLPLLSSSGKVK

SEQ ID NO: 929400 - protein, 168 aa, Homo sapiens
MSKSSLRPPRKQKLLCFLYSLQNRTTTINTVLPRRNKFVYSCSIKIHALGSDEPLESIFCILLVVEAFSLQKVVEMLEEVVVEWSTLTPSATFHAVVRASALMIALNWSLSTSDGRPLRSSSSRLSSPLQNFLNHHCTVRLYQKLKQDAVVVNDWVAAIIWVKDLLRY

SEQ ID NO: 929401 - protein, 179 aa, Homo sapiens
MCRLVTYVYMCRAGALHPLTRHLALEVTFLYPRCFLQSMITDAKHELPCLTLRSILTKFYNTKYTIYNKLCNTEESPIFFIEYNERAVYTKQPPNVEVAEKPTNKADESSLSTKGVCRLAKTQKLANSFYCGGCENIRILINAVGNKKFYKVYRGKFFKTVASCYQQGIGFRIPVVTKV

SEQ ID NO: 929402 - protein, 128 aa, Homo sapiens
MRAKQELEIKCDTEMRKLNKKVLQEGVRRLNEQKKHLEGSADGKCGVGAATQSPHLGIAQWSCKKRDTVLQTQNGRPTDSLHCVPGKAADTQCQPMKATRKGVIPCKATGAELPMLWEPTSYISITRM

SEQ ID NO: 929403 - protein, 140 aa, Homo sapiens
MPSLERGTKQFSERGEVTQRREEKGKGGEGEGVMEEMRREKRRQDESTTPKKSGEPVEKITVPSLGPGDCAKPIRVPGLARKKPVLWEAFSEKLGHWIYKLTLSFPWVKLVLGDLMAFHQGHDLHYRHVTCACFPFHHDV

SEQ ID NO: 929404 - protein, 144 aa, Homo sapiens
MVTTTQEPNNKTRYTSSILMLSLRSSHGIVYSPGVYNRIINRQHKESSEAQITRSWSKSGNNSNIYVIVLLRLNEIKPIVSCTSTISESMESGGVFLHETSVFHETSPCCQKDVKIKFLYGLDGSHGQKIYIKYVIKYIFFYIV

SEQ ID NO: 929405 - protein, 127 aa, Homo sapiens
MWFWGWFMRYRTGPCLQLCSTSNGNGGVSQRTATVHIYNSTIQWSSQCSWYPRYLYDHNCTSSPMMLVTTPATWARQPQSPVIAMTCHRWPMSDFHLPILAQVISTSIQTQVYNFRKDKNDHILTSD

SEQ ID NO: 929406 - protein, 168 aa, Homo sapiens
MRGTRWEVIESRGCLPSCYLCDRIPRATSQLCSLHSGAVYLNVPDKAQANTVADQCIAPEGAKDKLWVGATTDSPDYDNVQELWDYSCNRVPKTLELPMCNISVEKLQEYDSNSRTAAWADYSKAIGMGLSKVMGSQPLPQCVQDAGHGVKKNYSGDLSFDIVYPLVF

SEQ ID NO: 929407 - protein, 155 aa, Homo sapiens
MRCQLDWIEGCLDGSVFLLKIVKQLQVGLSGGITGEGIVIIDDSSMHITVCDDLPVGQDVEVEDSDIDDPDPQDKLPPLPLLPCHPTQGEDKDEDLYDDLLPLNEYQQATSELQLSDNKAASLATQFCGVALGAMPGHMLEAFSSLSSVNHLTGF

SEQ ID NO: 929408 - protein, 154 aa, Homo sapiens
MDSRKTEKRLGEKPALRREPDRETKELESKAMNNFSVVMGLVANEVFGGIPVIPFQERACSGAMRRAVDGPSLCGALGSSQPSPTLELNRKLRPLCTPQIARGNRASPSKQRSGICTSALAAAGFYLYKIPTGLEVEWHNTIENLQTQVLNSGE

SEQ ID NO: 929409 - protein, 144 aa, Homo sapiens
MMEQILCGKDPSGEVKRERLCPCGAILCGAKFPISSGTQPTCTQVIKKFYCSHNAYLVVSSHGRAQHWDSKTCPKSSFKVKSGNSPHKYLLALFKVQSETFHKGKEDVAPTWRSGHETSSLIACLQSPIVWVPHSSTPGQPCSL

SEQ ID NO: 929410 - protein, 139 aa, Homo sapiens
MSPYYATLPSDASSKLGKLNFPNLKLVGLGLGLGNGTQKTDILAKGVGGCYQIPTYVDNEINRRNVDFWNTNQTQKISRLSSIPSKFKKKGTEFSFPLIPEAAAIRIQMAMGLCCHFTNETAHKFLFALTGSSDWQRKL

SEQ ID NO: 929411 - protein, 142 aa, Homo sapiens
MSHLPALSRVRSNHLQHSLKPKPDPEKGPNSLQFYDGRERNIFCKATEAIDNDSSDGSGQSKLKIWRGYSILDASKTICDSWETAKISTFTGVWKKLTPTLKDVFEGFKTSVEEVTAEVIEIRELEMQLEDVTELLQPPDKT

SEQ ID NO: 929412 - protein, 142 aa, Homo sapiens
MPFSSVEFLLAFFSSLFIEDWDPQAADSEKGISVQEIYWKLREIFGEGKQLRRASQNPQQLENKPFSHEEGSRQCIKASTKVHSLLHSDSLHLSFGEAPLEFWWASSPVEYSYSRNLRGPPGDDLACSSPLAPKKFLDRDDS

SEQ ID NO: 929413 - protein, 145 aa, Homo sapiens
MLKIPKCFFSSKGSQLFASKGTNWKKNEFDKFIEGGFKRWVITNSSELKDHVLTQCKETKNLDKRLKEFLTSITSLEKNINDLMELENTAQELREAYTSINSRINQAKESISEIEDELNEIKEKRMKGNEQSFQEIWDYVKRPNL

SEQ ID NO: 929414 - protein, 167 aa, Homo sapiens
MIPLSDCLKSLASLSFLALLRSEGNNILSIPSNPFPVQPLGKSALHVTTALMRPGRIDRIIYVPLPDAATRREIFKLQFHSMPVSNEVDLDELILQTDAYSGAEEVTSKCVPPKKQGKNMGSRKQVVQHMRIVKRIPRAIKRNPGKDIFKLFYKSGKEIHSYQVVTI

SEQ ID NO: 929415 - protein, 143 aa, Homo sapiens
MTMAVFSVVIHEEKDTVPIKEKLHLDSERLIMSQSKFTQKNKVNIYSNEDMDEAGNHHSQQTNTGTENKTPHVLTHKWELNNENTRTQGREHHTLGPVTGWRAKGGIALGEIPNVDDGLMGAANHHGTRIPMDIDEIGNHHSQ

SEQ ID NO: 929416 - protein, 140 aa, Homo sapiens
MWNSSTVIPSDTENAYLLSATFPDFPIVCFTAYSNRIPQPHKHSPYAKIKVAFSYFLTKCFTMGLRETSYSAFVIRLECSYFLGVALHPAATDMTPSFVDPRNVVSEGQYQPEANSPLPSQPRLLKLSPYQQKGCSHSYH

SEQ ID NO: 929417 - protein, 141 aa, Homo sapiens
MCFNACFTLFSAIYFIKCPSAAGLLEFAGVPLQTLFAWVSPAEASEQQIWQNSKYCCLILPLEALSQRGSRLYEVSVGPYWEVSPIKRDKLTRYISYNIQLKGQQHPNGQETSLQRELRYVCKVLDTFSEKFSLNANSMTL

SEQ ID NO: 929418 - protein, 148 aa, Homo sapiens
MVSPLTGTPAPLCTMLLLPGTPHEHQGCLIVWVELQTFPTDPSITLVPLLKETSHKWKVLGLKPYHLDSLVPEGDPLMWYTLPSPRSGSPYGIMDCVPADAVMECVGCPPARRWHLQKSGSCRVPMGFMPALFYPEEVLWCLSQCAEP

SEQ ID NO: 929419 - protein, 136 aa, Homo sapiens [sequence omitted]

SEQ ID NO: 929420 - protein, 141 aa, Homo sapiens
MSLQWLLHLGRHHHHKQNLLFSLFCLLHFSGPKETIKKNFYDKFLKYHKVERSWLLARVGKHSGEIYLAEKRMSLTAEQELSGKVCRKPDKSNIRGEEAVNTTKKKGGKQVEEQGGKGLIPVYSFALLFANPILQLTQSQR

SEQ ID NO: 929421 - protein, 167 aa, Homo sapiens
MFKSAEAVCCLLFYYDLTPEVESIEAVGLAELWKGKSPGPLCFRDKAMPHPASARPPWAVPTVQPVPILPVNSPIGSSTLLLTQSLGYDFSPAILLLPSDENWSLKSLVSHLEKLFNALGNGLVCRMSSGLGSNLSSRWLQRWVLLDQADLSSNTQHVGHREVAWTL

SEQ ID NO: 929422 - protein, 175 aa, Homo sapiens
MYENDWMSSQKSAAGSESSWRTSNRAVQRENVGLEPPHRVTSGALASGAVRKEPPSSRPQNGRPTDSSHCVPGEATDTEGALVVHMPAQCRNLEEFMPQTTLAACMCMCVWVGICEVRGALTEVKGIFQSPTAHLVSPTPLLMPFGDFYKLIIVFLVVHSLHSRSPWCSGLFSCS

SEQ ID NO: 929423 - protein, 205 aa, Homo sapiens
MDPHCNLDSHHGDWSRKHLLICDLEGLRRIRKKPINYSMMSTTTQRNEENPSAFLEWLREALRKYTPLSPESLKGQLILKDKFITQSAADIRRKLQKQALGPEQNLEALLNLATSVFYNRDQEEQAQKEKRDQRKATALVMAFRQTNLGGSERTENGAGQSRSRACYQCGLLGHFKKDCTMRNKLPPHPCPLCQGNHWKVHCPRG

SEQ ID NO: 929424 - protein, 147 aa, Homo sapiens
MTVTRGGVYRGRQASLSCGRLHPVRASRLLCLPTLASAMVAAPPPASLPPCSLISDCCASNDWSLAPLPRLECSGSTAVFGAGKQEPLSPLKLRPQSPLPPGALSQVDGSFIYKPLTGVAAFLSGMFCPVRKNLERKSGHSHFAVLW

SEQ ID NO: 929425 - protein, 171 aa, Homo sapiens
MSSPSLSPRLINEADIPLYPVVPNPYTLLSQIQEEAEWFTVLDLKDAFFCIPLHSDSQFLFAFEDPTDHSSQLTGMVLPQGFRDSPHLFGQALAQDLGHFSSAGTLVLQHVDDLLLATSSEASFQEATLDLLNFLANQGYKMSRSKAQLCLQQVKYLDLILARGTRTLSKE

SEQ ID NO: 929426 - protein, 184 aa, Homo sapiens
MSGYSSETKLPEEQSGNNICCSPVSAVLQPPLLIPRQTGSGVDLQQTPTDLQLRVLTVRRKTNKQKGHPHQNPICTSPSSKTKAMEQSWTENDFDELREEGFRQSNYSKLKEEVRTHGKEVKNLEKKLDEWLTRITNAERSLKDLKGLKTKARELCDECTSLSSRLDQLEERVSVMEDQMNEMK

SEQ ID NO: 929427 - protein, 142 aa, Homo sapiens
MGSLALMGGPRDSGIHYHEECQEKIYRRGNTEGSLERTCCEAYSGFGKIEFPELGIRENKSLRADGSHGKGTATFQGKEKAICLRRNPQTNRRSRNLKQESRVTNFPIQSQELREDLFITFAVQLMYMDNLSDQLHIKIDLN

SEQ ID NO: 929428 - protein, 139 aa, Homo sapiens
MLSIPQTPTPQQALLCDVPLPVSQCSHCSIPTYEQDPQLQVFWSSLRSTPDPVCLGISSGGCRTANIAEQQMLLPDHSSGSFLSEGYPAVYALPPEVESTEAGDELISSRASTVFHMPCEVFNKSLSDMLGNRSKRLET

SEQ ID NO: 929429 - protein, 444 aa, Homo sapiens
MTANGTAEAVQIRFGLINCGNKYLRAEAFGFKAGSAAVCLRSHLGRYLAADKDGNVTCEREVPGPDCRFLTVAHDDGRWSLQSEAHRRSFGGTEDRLSCFAQTVSPAEKWSVHIAMHPQAHLSAPPADEIAVDRDVPWGVDSLVTLAFQEQRYSVQTADHRFLRHDRRLVARPEPATGYTLQFRSGNVAFRDCEGRYLAPSGPSGTLKAGKATKVGKDELFALEQSCAQVVLQAANGRNVSTRQGMDLSANPDEETDQETFQLEIDRDNNKCAFCTHRGKYWTLTATGGVQSTASTKNASCYFDIERRDRRITLRASNGKFVTSKKNGQLAASVETAGDSELFLMKFINRAITVLRGEHGFIGCRKLEFNNGTYNIKDSTGKYWTVGSDSAVTSSGDTPVDFFFEFCDYNKEAIKMDGRYLKGDHAGVLRASAETVHPASLWEY

SEQ ID NO: 929430 - protein, 155 aa, Homo sapiens
MWVGPNKRIKAGCPSQQWQVAVTLTAKVCSFTPEASETTNPQEGMNNSRRAALRAVTLTVKVCSFTPEPARPRTHQKEETPNTSEHQKEQTLDTLPLRTVTLTARVRSFILEVRSRTHRVQTQYQSSFSRTAVGMEQEPFNQAGGLTKKGTLEQI

SEQ ID NO: 929431 - protein, 153 aa, Homo sapiens
MCAMMKATAVWCSALCHDSSLTLWNLFSRCLSRGGSPGEVSQRLEIQLTLERHGFEVCRLITGYSMETIVNTMEENPNRENITKVLEGLHHLRCHFVTEKVVKAIKPKTINSCWRKLCPDVVCDFTGFTTEPIKKMMKATVDMAKKNFFLSEG

SEQ ID NO: 929432 - protein, 154 aa, Homo sapiens
MGLTPKFSDGFSAIGGFQMHLKCVNCLQELAFKAYTILQILQSQDSTIPCGWLMNKNEKHDDKLVMFTNQSEDSEREVGKKNKDKRREPTGQEENKGFRVYAENISELIIQYTDPPWQYIPFLWLKFEAVSKPVNIIEATRRDWERAIRDEKGR

SEQ ID NO: 929433 - protein, 138 aa, Homo sapiens
MIDQNTKLIPVPGWPLRLRLKIYLSSRSASLDSGSRFAPVDTNFIPVPTDRGHSHAPEDPVDRLTSVDPTKKHNDSSEKNVVESLSSRLNQSEERIIDLNDRSFGITQSEEQKMKRIRNSEESHGSFESPSRKPMYVL

SEQ ID NO: 929434 - protein, 151 aa, Homo sapiens
MNSRVLSLVASVTMPESLAAAALPTADHSSGRINDMSPEELDITVYSIFCHKLNGYQEGVYSSVLNIPIPNIHMHFFLKEIKGVWGDIGRHLSHNQKTKVLLDSDTEHSGAERVDKQKISSACVPEHMLIMENDEKTGGDSGEDESEYGQE

SEQ ID NO: 929435 - protein, 195 aa, Homo sapiens
MGGSLNSYSKRVGAPEAWRSAWVWSRESPPVPGSLNRKGGVTQAAIPNEQVLQMPGDLLEHEAERDPLHLCLCTGRGSSLGNPAMTHTDWFQVTWNCTSGPGCTSHLGKTAAVAALLPPQAYDRESTIPQPTAEALSTVLSMEAPTTLQSRHSNLWPKTNVCVAILLRHQRMADFVSAWIKSGLLLLVLNLGNCL

SEQ ID NO: 929436 - protein, 128 aa, Homo sapiens
MYLGITERALQLTGNECCQNWILSFKAAGSLLAQSVSGNIVFSNMNPKARTKALCRSVAAKLLLLIFKFEFPAVSSLAAQLKLEQDELLELSPTWPQADSKTSCKESSLRGHHEMSLQERLNGLIMFY

SEQ ID NO: 929437 - protein, 175 aa, Homo sapiens
MWNSVLVPPLVSCGAFILCHLSAWRFHMTLCVYTSFSCAIENGDAFTLNPIIQPTLATSQTLTFKCANRSVLPVPEDLPYACTLPDPMFAIGTQRESCCPGCDDVLLEASIQQTGNHRARTKEVMWWQARYAFRNELLNSTLHEVLLGMLGMNITATVRRFGCVKWRIRDNYCTY

SEQ ID NO: 929438 - protein, 167 aa, Homo sapiens
MYGNAWMSRQKFAAGAEPSWRTSLRAVWKRNVGLGSPHRVRTGALPSGAVRRRPSSSRPQNGSSTDSLHSVPGKATNTQCQPMKAAGRGAAPCKATGEELPKAVGGHLLYQCDLDVRHGVKGNHFGDLRFDCPTGFWICMGPVVLHLRQFLPLGMGVFTQCLYPHCI

SEQ ID NO: 929439 - protein, 228 aa, Homo sapiens
MKKKMKMKKMKMKKRWQKKIKMVPLAASSHGRRNEEEDENEDDEDEEDEDEEEEEMAEEDEDDEEEDENEEDDEDEEDDEEEEQMAEEDEDEEMKKMKMKMKKKKKRWQKKMKMVSLAASSHGRRDEEEDEDEEDEDEEDEEEDNEDEEEMAEEEEDGASCCILTVMATPLASCESFLFAREIKSSGGGSGGSAEISIILLRYRKYVQHTYEALLLAKLGVLGLELIT

SEQ ID NO: 929440 - protein, 156 aa, Homo sapiens
MVKAKFEEGSKEFVADEEEENSDYDVELLLNLDLCLVINQHWRQHSLQCVNASTCIQMLKMKIQMLTMEKNMMWKRKNKDMGTSLHFTPVRKDLSHLTAEGQTCWRLEGTLSQSVSCQYHMVGVRTEDSIGDDEAGMEVDTTPTVAGQFEDADVDH

SEQ ID NO: 929441 - protein, 162 aa, Homo sapiens
MMTMALSPKVTQSCIMTPGEQFPTFLARGTGFVEDNFSMNRGLRNKVQMQVLGCQFQFPDIAPPSPYSQEYQIMHILSALPKLTEHVEIKLYPDNLKILFMIKQIFMEHFPGRMPHEDWSDAATSQGNTKPRRWPGTDPSLRLQREHGPAGTLILDFKIPER

SEQ ID NO: 929442 - protein, 144 aa, Homo sapiens
MVVCLYAAVGAEASCKHVYAMGCKLVPRTCVRTPRAISVLSVTYKEKSYPVVKLNTGAWTHFQLLKYWAISSKALAKEPRLGDCIAEGNNDEPLARMGVAMGASLDQEHSGHPARSGGWKSVVGLQQRQTAVVDVFYIQRTSSH

SEQ ID NO: 929443 - protein, 134 aa, Homo sapiens
MAVALGKKSMGYRPPCSCGVTNMHEAHIDHTAKHCVWDGESQMRRNGLWGTWSLMGAGEVKAVAADEIRGWTPQKMPVFVLRTGPVDKGAAGYERFSLQCHGNMTEIINSPRGMMDGIGWRCPWQNILLNYLLL

SEQ ID NO: 929444 - protein, 173 aa, Homo sapiens
MFSIFEQIGVEQQIPWLPKTAACDLTFKSLTNAFSENRALLSPPDFDKVLRVQRDASDTRLEALLSLIMKEEQHPKMYKHKELLKEKLCNFLFQKSLCLRSLSITCFYMFHEYNNAYIQCCKEIKNTKTLTLRVSQVVTPIIFTSRYRKYHRARRPLSDAGPSILDFPASRNT

SEQ ID NO: 929445 - protein, 138 aa, Homo sapiens
MKSSEPPESGRGEEGLSSGASRASTALLHLTPHFQPPAPGEGKLLFFLDAEFVVFVVPPRETSAAGKALNDEDGIVWPGSRTAADARSPISNIYPQGRVCTSETAALDSGVIEFLLKIHHWRCIRNSGRKNEVSRWKH

SEQ ID NO: 929446 - protein, 141 aa, Homo sapiens
MHVITLKTFQWDNMWRWKAVLLMVPTLCRPRLVVYKGVYNSVPGLHIHSPFTQRLTPATSSPASSIRGKHVCTAAGAFADFECVCACVCQTVGVNCSTEITTQRGLLQVRKLSRGSLSPAEAQGGPKVTKGAMGAGLCCPL

SEQ ID NO: 929447 - protein, 281 aa, Homo sapiens
MLRDTVAHPHYANQSLHAFHHWVTALTETNSSLVHFEVGLYDACGLVHFEVGLYDACGLVHFEVGLYDACGLVHFEVGLYDACGLVHFDIGLYGACGLLHFDVGLYDACGLVHFDVGLYDACGLVHFDVGLYDASGLVHFEVGLYGACGLVHVAVGLYDACGLVHFEVGLYDASGLVHVEVGLHDASGLVHFEDASGMVHFEVGLYDASGLVHFEVGLYDACSLVHVEVGLYEACSLVHFEVGLYDASGLVHVEVGLYDASGLVHFEVGLYDASAWDTNVS

SEQ ID NO: 929448 - protein, 164 aa, Homo sapiens
MDVDLAILCIVEETLEVMEIILAVVETLVEEEAMVVEVVAAEVVMEEVMVDIMDLEVMVATSRSGPGYSSRGGYGGGTRGYGNQGGGYVGGGGGYDGHSEGGNFGGGNYSGGGNYNDFGNYSGQQQSNYGPMKEGSFGGRSLGSPYGGGTGVGSGGYGSRRFWV

SEQ ID NO: 929449 - protein, 143 aa, Homo sapiens
MGFKHLEDEPCDQAVLKANNLDKYDCSFSDWMLVGDHKREVYFENNSSYCHSWAFCLRMKFYQHRGGEISVTEDQLQGTAAGLDPERDQVPCARKNSLTYHDPSHPATVPFQRAESEERAFSMQGEHWWPGQSGHGEFAAGVV

SEQ ID NO: 929450 - protein, 136 aa, Homo sapiens
MESLHITKLPFLALSPILECSGTISAHCSRCPPGSSNSPASASWVAEITGTLHHTWLIFVFLVETRFLHVGQAGLKLLTSGDPAASASQSAGITGEWTVGDNWELRFKEPCRGSREDLPTQLWIQAEIIALSGPKA

SEQ ID NO: 929451 - protein, 188 aa, Homo sapiens
MQLEFLTQKPGPCPVAFLSKQLDLTVLGKPSYLCVAKGLCVNIYTDSKASDPIAQGNNYADKIAKKAANIPTSVPHGQFFSSSVTPIYSPTEVSTYRSLTTQGRWFLDQKRISFQPHKPVLFCRHFITSSIPIMDRTLLVKSAKQFLRLLVFNGNFIPLTVLNLQERHLSLACRWLSSPCVHNFPSVS

SEQ ID NO: 929452 - protein, 235 aa, Homo sapiens
MIRRAAMALWEREHPPGQNVLSVGYKFPTQDPHWDSNNANHWENMQDLREMIIKGIQESVPQTQNLSKAFDIQQEKDEEPTGFLNRLREQTRQHAGLDLENPSDKECENFTLEAQKVYARRDKEKQKQKTKLMLSTFQQIAPNPHIPKQGFQGARDYKGPKPSLRGSKPPSGGSRPSFNKPPKGYRGARAENAKTEKEEGQDRYYRCGRTGHFKRECPELKKERETFTLMTLEEQ

SEQ ID NO: 929453 - protein, 129 aa, Homo sapiens
MASGFHDLYLLLFFSLINAVKMSASVNYWSMLTHVCWDLTATGCEFSHHNNQMKMSEMNLFAKTTDCLGTSEITQDCGDQLNRDMPKAGSDLYPCRRSLALSPGWSAMVQSLLTATSTSRVQISPASAS

SEQ ID NO: 929454 - protein, 136 aa, Homo sapiens
MLSCLIRTCFMNLGAPEFAGGPLQALFAWVSAMEAAEQRILLNRKCCCLIVPLEVSSQRGTWPFQTNATEEETKAEVREAPKDKSGLCGYSFLFSILEKSFPIAAWISDASWQIEAAYIYLLKNLNHFTLKSPVLY

SEQ ID NO: 929455 - protein, 244 aa, Homo sapiens
MSSGFMFPLQLGGSRDRDLGSSNGRGPFTSLLGLHPREMQGRYQSEHSAKGRLWHAGSVSKALSAFAPSQSEGSKGSTIVVAVAEGLSVASGSSTPEKCRSAANGKVQPGRQQGQDCCSGNGIGSGSGRGLSVASGNSIPGNQSHQQWECSVAGVGQLLCSLMKSSGPGAGHLECEEYSDKDDDGAAGENSICMLFRDIDLDEITQDVNVDRQEVQRLNAATCQCLSVWKARRSKQRRLMKSNQ

SEQ ID NO: 929456 - protein, 136 aa, Homo sapiens
MRGPGKGVGEKRMGWEKEGREGKAWVEEKESANETKEEKDRDVGGEPEGEGSWMPREGPRRGQQPCSKLGKQIAQIGAEEQRTPGGMTSEKKGADRIPHGLDGPEVLQDWRIAAPVNERAQRGYWSWAIPPQCQIL

SEQ ID NO: 929457 - protein, 145 aa, Homo sapiens
MLNIGPHSLLACRVSAERSTVSLMGFPLWSGPSAAGLLEFAGGPLQILFAWVSAVEAAEQQILQNGRCRCLILPLEALSQRGTCQYECQSAPTGRCLPVSLLRDANYSGHGPGGWVSSLALGSQCGVGNDSSSGRIILWVPSDVQ

SEQ ID NO: 929458 - protein, 179 aa, Homo sapiens
MFHQKKVHSVGLPGEEDPLTSVKLSVSRLSGTPTEPAARTFKSAEAVPTATPSPRCSFPDALPREEESKEAVWLQWLCQTAMGYPQFELPGDFVYTVRGKPPTEASVMADALPPTNLKHPRLTSDCCAGSENFNPVDLILLGSMGVGSAKLDHLAPWLQPPFQGSEQFCLAGIPGATGV

SEQ ID NO: 929459 - protein, 162 aa, Homo sapiens
MPSESQVLESGTQRACLVLYPTMAMLASEARKAITFLQAPLVDSDLYDEKTMAQDIGMGKDFMTKTPKPIATKAKIDKWDLIKLKSFCTAKETIIRVNRQLQNGRKHLRCIHLTSLISRIYKELQQIYKTKNKKQKKTPHHKVGKGYEQTLLKRRHLCSQQT

SEQ ID NO: 929460 - protein, 190 aa, Homo sapiens
MGAHLLHRHALDMRHGVKGGHFGILRLNDCPVGFWNCMGPGSHLYLRLHLPPLYNGREDLHVLLVRYHTADKDISETGQFTKERALIGLTVPHGWGSITIMVEGKKEQVPSCMDGSSQGENEEEAKVETAQTNRSRETYSLPGEQYGENCPHDSVISHWVPPKTCGNYGSTIQDEIWVGTQSQTISPHKG

SEQ ID NO: 929461 - protein, 149 aa, Homo sapiens
MFADLGERGKSAKTKTQKDLILFEYFKQQQQNANHLNKYFAPQMLSVNRSSKLEEAKDLQRGHICEKQGPLPSGIVLHQGDTSVEHGSAPVGTLTARNNGNVGLCEKGLWLQASMEVGLVTEGHFSSYLVLLTQILAEELCWSPCCPEG

SEQ ID NO: 929462 - protein, 149 aa, Homo sapiens
MGVTGCIWNVPASMGQAVKATVSGSKSTREEVCSGGLTGSLKTAWHTTNGWRAGARDDIWDEAFIKVHGYYPSGFPPLSLAIKSPSFTIFQFVHATSFFWMPDKSSGAASADTKGCHTSPLPLLAGGSCLTQKGRGPIKNDEFMSFVGT

SEQ ID NO: 929463 - protein, 135 aa, Homo sapiens
MLSHSDERILKRLLVTTLWSPGSLTLLLLKARLFLISSSPSILLVTVSNSERADLGNSELEKWVLRAIRNLINKPAPNSSGPLGIIFIQEVKLVKEIKKIEPKKEDTANLFEVQLAKLFYGVIPGSIKNQQGTCL

SEQ ID NO: 929464 - protein, 188 aa, Homo sapiens
MVLCIPTPPTPAIAKRGQGTAWAIASEGSSPNLGSFRVVLGLWVHRRQELNFGKLQLDFRGCVEMHNVQTEVYCREGTLIKNPFEVITKGKCLVGAPIRVPTGALPSVAVRKGPPSSRAQNGRFTDSLNCTSGKAAGTQCQLVKAATGTVPCRTTGTDNSMVSGLLRDENGEHCETLWHYETAFPIQL

SEQ ID NO: 929465 - protein, 191 aa, Homo sapiens
MEQPLYPSRNVLLVLGSEYAVENKTKSPSLLSLHKQLVDKYVYNKLSENLKQHHILGERLSTTSPITTSQTYEVRVYDTSTLLCKHKRPQNGKEWIHDPVVNKPGESTLTLLEEDQLLEITNDGGLKSMFKTTSNLYTLWIKVKVEYPEIATKPLKGLLSFPASYLCEEGFSAVTATKTKLQSRLDITHFW

SEQ ID NO: 929466 - protein, 199 aa, Homo sapiens
MLLRQFLLVLYLCGLNYFVISAKDKPTTNIILNGEELKALPLRTGTRQGCPFSPLVFNIENSTGSPNQSNQERETNKRHPKWKEEVKLSLFTDNMILYLEYSKDSSKRCPDLISDFSKVSGYKINVKKSIAFQLTNNVQTEPCQKLNPIYNNKNKKRLGIHLTKYVKDLYKGNYKTLVKEIIDNTNRKTSHLNGWELLK

SEQ ID NO: 929467 - protein, 360 aa, Homo sapiens
MISGHGAFQRLLSDHCHQQLHCYHHHHHYHYHHHHHHHHHHHYYHHPFPPTLSPPSPTPPPSPLLPPSIPTNTITTITNTTTITTTTTITTTTITSTIITAITTTITTITILTSTITTIITNTTTITTTTTIHSHQYYHHHHQHHHHHHYHHYHHNYHHHLHHHHHHHPHQHYHHHHQHHHHHHHHHHPFPPLLSPSPPPYHHHHHHHCHHHHHHHHHHHHHHHHHHCHHYHHHHPFPPLLSPSPTPYHHHHHHYYHYCYHHHHHPITTTTTTIVTIITTTTTTIITITNTNVTIITTTSTIIIISTITTTTSTAITITTITTTTTTITTTTTTTTITTTIINITTSYQLCPTIVWVIRV

SEQ ID NO: 929468 - protein, 316 aa, Homo sapiens
MALSREEGGAEDLQIISTDESQVFVAVQEWYQMDTYNLYQSDPRGVRYALVLQDVRSSRQAEESVLIDILEPDCHLHLHLRWADNPYVSGTVHTKDTAPGLIMGAALSICWEQEEKARGLASHLLARHGCLPWHRSQCHVTALLEVAGDDGYLFPQGNLGSQLVEYKEEMYITSDCGHTWRQVFEEEHHILYLDHGGVIVAIKDTSIPLKILNVDEGLTWSTHNFTSTSVFVDGLLSEPGDETLVMTHLGIRDICHLPQVPLLLIMGHPKYPSPVGGAQTGTRLEQRASPPRPRCLASAGPLGANQSDSRSAIDKS

SEQ ID NO: 929469 - protein, 299 aa, Homo sapiens
MLTNLFGVILVSSSLSDRDQSLFLSADEGATFQKQPIPFFVETLIFHPKEEDKVLAYTKESKCGMFFSPRQERWLVLPQISISSSGSCVHGVQQGTEALSPGSLTLSVRPRQKKKYNQWLELQNALTSPCPRVKRVHSVSKWALRTRQPRIPGYRWCRSCAGVSSAQRTRGRQAGDSAAKMQAAEPGLGWEDFRGGGGRPGALTQGAPGSIHSSQTWGTDPWAPDPAHSSQRTCPAACTGLSQALSSSPFCCCPQLGPGLASSGLPASTHSLWCGLLETLSDHGPPERLILSGLEAAYS

SEQ ID NO: 929470 - protein, 385 aa, Homo sapiens [sequence omitted]

SEQ ID NO: 929471 - protein, 272 aa, Homo sapiens
MVSPTDDNKTGNIGECLGASPEEDREMWESLELPRDLLNGSAQNGDSDMDNKIQAGVVSCGDEELVENWSKVDPCYILAKRLAAFCPYPRDLWNFELERDDLEYLTENISKQRSIQEVTLVLLKAFSFIREAGHKSLGNLQPEHMIEKKNPFSGEKFKPAAEICPPHRVPTGAPPSGAVRKGPPSSRPQNARSTDSLLRVPGKVADNQHQPIRAARREAVPCKPTGVELPKTMRTHLLDQCDLDGRPGVKGDHLGALKFDCLTGFQTCMGPV

SEQ ID NO: 929472 - protein, 145 aa, Homo sapiens
MVPAPLCTSGRIRLCVCLVLDFFWLSGSSAAGLLEFAGGPLQTLFAWVSPEEAEEQQILQNGRCCCLILPLEALSQRGTQLYEVSVSPYWEVSPTVVGSTQFKLPGSFVYLLKPQQWQTPLPQPCCHLAVGSQAAVLTVSEAPWA

SEQ ID NO: 929473 - protein, 149 aa, Homo sapiens
MGHDDDGGFVEKKRGKCGEKKERSDCYCVCVESLHVACYSSDLGHDNAFGWACLDSKLQVQIRSAPHVLIVTFLSRYELSSLTFQSRSYVKYLLLKVEEQKCKRLNQIMQAHLKSLLIFYWPEQVTWPSPTTIRWENIPTLLRGIAMTR

SEQ ID NO: 929474 - protein, 170 aa, Homo sapiens
MTGARGREVAASRDHGSTVQPWQQRETVERKKERKKGRKEGRKEGRKEGRKEGRKEGKIDSLTDIGQNGKSSSQRQAWVMNSEGGAAESPAVQEMVEGGSQVGSLSSWMDKVITEIGKTCGEVNLESREKNQESYFVQSSLRYLLDFKGIHQEASKRHFSHLCFLMHEEQ

SEQ ID NO: 929475 - protein, 324 aa, Homo sapiens
MPASSFAFNHDCKFPEASLAMLPVQPAELKKTLAKCQNLNLGLAASRIYLSYINEQQHQNDCLIDLKFCEDLCGAEEPHTIVTATPGHEEYCQTITNVPLRPRSLKSACGECCLVWDSPFRAVVSLLAQGRSRNVIQESSPGIEDLKSPLHHHKDCVASDLQPAQHQVSPKACCNHSLATAYVHSMSWSSAIRWLSQSHLCPSLQGGDFPQAPGGSRGAIWDPGTRVKTLDVYLVLYFTVDESALKPQDAVLPTLPSPYPKAQEAHSMQPQVHGAHCQATANVSLKPRGSHSACAVAGFSGPKARTFPDMGTSKCQMPFWMMRA

SEQ ID NO: 929476 - protein, 135 aa, Homo sapiens
MQRKEDGGGRGKTSTGKTDSHGDKSGVMKDLGTFCNSSERLAALRENPCEARQKQVTRGPSELPGLFPLLPLPLNFTQLSKLTQLQLRMISLSHFHSLGTHSIQGVSWVLQEQPTPFMGKNSSVFSYFRDLDSFQ

SEQ ID NO: 929477 - protein, 155 aa, Homo sapiens
MITPKVRATHSAPLSSLHSRSRTLALLPHTPTRTDPWPSPGAYEVGAPLSPWTNVIQRANSRAPALLCHQALSLLGSKRAGPALGPVSMKRDDHLFLQRTGTLCPRHSKVKPGSHSDYEDSIHWVRVMKPRVPGDSSGIAHPGTQRFTGTQQMLH

SEQ ID NO: 929478 - protein, 149 aa, Homo sapiens
MDLGADAWLTPQPQVHQEVPPRSAGAQGILTRKYGCIRKFTRKCRCSRTSYLEVQEVQVHQEVCIWECRCTRKSHVEVQVHQKVSSGSTGAPGSLHLGVAPAAAAAFLVVAVGTVLSEAPGHTPQQESWKSHLGLSSVAPTLAEPSGLF

SEQ ID NO: 929479 - protein, 135 aa, Homo sapiens
MRVLALNWAHPGARGRRRECAGPGPGPTEVEGFLLSPAPSPLLREAARPHQPPVHEGEATRGHPRPNGSSQPASRRSPDKLLHCAPSRFHRCLLAAGADCYGALHPAPASWAACTSQTAVCPSAHCGLHLSRNVQ

SEQ ID NO: 929480 - protein, 150 aa, Homo sapiens [sequence omitted]

SEQ ID NO: 929481 - protein, 144 aa, Homo sapiens
MLQTSCHPGHKSSQGLTGAETPLTKFTHMVVGSLSSSPYGPLHIQPEWPAGPPGVAAAFPQSYDPKEKQEFKIEVFIEKNAYKWTSTTFTRGVPCIVSISHGRGGAFNHGLNTATIPLVLAHEMICCLRNCNPSYFAISYRFML

SEQ ID NO: 929482 - protein, 153 aa, Homo sapiens
MRKKQYKKAENSKNQNTSSPHKDHNSLPTREHNWTEKEFDELTEARPQGCRIQATPEDPSSRPAPEDTVPDPPIWTKAPDLLQAVFPANNPSSAPWNSFFLLWCSVANHKEINSAKTQGNLEVYPSPAKLLWRLQPQTELKLQASKTLKKRTS

SEQ ID NO: 929483 - protein, 142 aa, Homo sapiens
MAILSLEGARLPAKVDPRCTIGSSSGHGPAAFWCGYGGMSEVPQRCGDVGAIGLLWRMHSGSGSYFKTVPCCSSLDPGECGGNTVSFPPWSNAVTRTLDSSLHWLRLSSLFFGPRIKANPKSVCFRPKISHWFWLYPETSQA

SEQ ID NO: 929484 - protein, 183 aa, Homo sapiens
MEHFIKLYKKKTDKDVRKDDRAVQKLQLEIEVTFEIDVNGILRVTAEDKGTGNKNKITITNDQNHLTPEEIKRMVNDAEKFAEEDTKLKECIDTTNELESYGYSLKNQIGDKEKLGGKLSSEDKETMEKAVEEKIEWLESHQAADIEDFEANKKELEEIVQPLISKLYGNTYSHPIFLLKSYS

SEQ ID NO: 929485 - protein, 214 aa, Homo sapiens
MKLPEEGSGSNICRSAIFAVLQPLLVIPRQTGSGVDFQQTPTDLQLRDLTIRRKTNKQKGIAATSTKRTFTPKPHLKAENSKNQSVSSPPKDRSSSPATEQRWMENDFGELTEVGFRRSVITNFSELKEHVLTHHKEAKNLEKRVDEWLTRINSVEKTLNDLIELKTMAQELRDTCTSFNRQFNQVEERISVIEDQINEIKREEKFREKKNKKK

SEQ ID NO: 929486 - protein, 250 aa, Homo sapiens
MGRNQSRKAENSKNQNASSPPKEHNSSPARKQNWMENEFDELTEVGFRRSVITNFSALKEHVLTHRKEAKNLEKRLEEWLTSITSVEKSLNDLMELKATVRELREAYTSFMSQFDQAEERISVIEDQINEIKCTEVEMKEKMLRAAREKGRITHKGKPIRLTVDLLAETLQARREWGPIFNILKQKNFQCRISYPAKLSFISEGEIKSFRDKQMLRDFVTTRPALQQLLKEALNVERNNQYQPLQKHAKL

SEQ ID NO: 929487 - protein, 191 aa, Homo sapiens
MFNIRNIGKTLVTRTQGTKIASDGLKGRVFEVSLADLQNDEVAFRKFKLITEDVQGKNCLTNFHGMDLTRDKMCSMVKKWQTMIEAHVDVKTTDGYLLRLFCVGFTKKRNNQIRKTSYAQHQQVRQIRKKMMEIMTREVQTNDLKEVVNKLIPDSIGKDIEKACQSIYPLHDVFVRKVKMLKKPKFECVSS

SEQ ID NO: 929488 - protein, 242 aa, Homo sapiens
MAVQSIFPSIRLVTNPVTVVAPVAPGVLPVLRRQCCMMGNACLNALAGTMLMPLAGAKFVITHVPAALGPHPLTVQPAAPPRLCVKATVCPAVERVSTLTTESAKKPEEGLQVEQLSGVGIPSGECLAQCRAHFYLESTGLCEVCIVLHSLELCTLRFLVETTEELDLQEHQSFQEFREMPTCHQSCFRCAGKSPHNCTDCGPSHVLLDGQCLSQCPDGYFHQEGSCTASQSRGITGVGHCI

SEQ ID NO: 929489 - protein, 155 aa, Homo sapiens
MLLRTENVIQGNSTSSWQLDPYIEGDYIRIWIYGTLNLRDDLGHLVEEISKQQSSQDLVWLLLTVNICGKPLPSEAQGLIILKWFGGPSPGSSCPVKPGDIAPCIPAIPAPAIHKIRKGTAQAIASDGASPKSWWLPQGFGPSSRLYQSLPVTRF

SEQ ID NO: 929490 - protein, 154 aa, Homo sapiens
MLSYLPHLSLRLPLCPPLLPLSKSNYCINASLIKTLLKAALLPKEGGVIHCKDHQKVSDPIAVGKAYADKVARQAASFPTSVPHGQFFSFISVTPIYSPAETSTYQSLPTQGKCFLDQGKYLLPASQAHSILSSFHNLVHNSGLSSECYRVQPI

SEQ ID NO: 929491 - protein, 136 aa, Homo sapiens
MPSWPHVGNEHLKCATLFVIANRWKQPKYPLMDEWEKIGVHTYNGVLSIEGCLRLVLKVLEEPQTGFNHCCGKMSFTLRVSIALLFYDLQIFIFSPDLSFTFQMFMKSSVLRKMLVQPDCFNIFLHYRRNKAVIVY

SEQ ID NO: 929492 - protein, 156 aa, Homo sapiens
MKLPEERTGSNLCRSAASAGDTQANGTPSEGHQHQRPKMDKFTKMGRNQRKKAENSKNQNVSSPPKDHNSLPAREQNWTENEFDELTEVGFRRWVITNSSELKEHVLTQCKEAKNLEKRLDELLTRITSLQKNINDLTELKNTAQELREAYTSINS

SEQ ID NO: 929493 - protein, 211 aa, Homo sapiens
MCPHSEPEKQPCTLTSSPNPTTNTPLGLPTGPASQAAKSLCPRPEKQPHGLSPVDMPLSQRSSHLSVLLASAPLLQVCWSLLVVHSRLCLSGYHQRRLQNSQDCCLFFPLEASSQRGTCQMPAVALLCALSQGDGSFIYKFLTGATAFLSEMPYPEGRNLERQSGYSSFAKLWRFPEEGIIIIGDDNSIVVGSQGPRTEGPAGATAEEHKL

SEQ ID NO: 929494 - protein, 134 aa, Homo sapiens
MSWVPQLEMQKSLPSVLIFLGAADRSCSYLAILPATPGPYLLMPFKKSHGSDVEGRDGCYMHSGFACSQVTLNLGNPLVLKQAVRKQALCPRERLDIISLGCSANMTLRNSPRKQQSVLCILDKPSKTCKSPRD

SEQ ID NO: 929495 - protein, 558 aa, Homo sapiens
MWDRLSAITMPSVARHTMQTIRSIGYYRNIYNPPESNASIITDYNEEGLLLQTAFLGTSRRVLFKYRRQTRLSEILYDSTRVSFTYDETAGVLKTVNLQSDGFICTIRYRQIGPLIDRQIFRFSEDGMVNARFDYSYDNSFRVTSMQGVINETPLPIDLYQFDDISGKVEQFGKFGVIYYDINQIISTAVMTYTKHFDAHGRIKEIQYEIFRSLMYWITIQYDNMGRVTKREIKIGPFANTTKYAYEYDVDGQLQTVYLNEKIMWRYNYDLNGNLHLLNPSNSARLTPLRYDLRDRITRLGDVQYRLDEDGFLRQRGTEIFEYSSKGLLTRVYSKGSGWTVIYRYDGLGRRVSSKTSLGQHLQFFYADLTYPTRITHVYNHSSSEITSLYYDLQGHLFAMEISSGDEFYIASDNTGTPLAVFSSNGLMLKQIQYTAYGEIYFDSNIDFQLVIGFHGGLYDPLTKLIHFGERDYDILAGRWTTPDIEIWKRIGKDPAPFNLYMFRNNNPASKIHDVKDYITGQSRSHFSHQLLRQWILCLDSLLSSYITVFIASAVLAW

SEQ ID NO: 929496 - protein, 171 aa, Homo sapiens
MKKIRDQHRVFKLKTTTRYSHRFIRPFKHIKERRDLPCGRVKTFSQISTYVNRNENEMKERHQKNDPGTLTKGVKENVFKDDSQEGLVHKQRTRNGGLMRNLNGNNVICNSNSERFYMFWIENASITKGNRAVAYAHIMAPPDTPLPATYLLSKMAGKMQKKEDKRKYYFT

SEQ ID NO: 929497 - protein, 142 aa, Homo sapiens
MDVKERRPYCSLTKSRREKERRYTNSSADNEECRVPTQKSYSSSETLKAFDHDSSRLLYGNRVKDLVHREADEFTRQGSLDPVQTVVDNPAVAFVEALKRRFIGGQRVLFLTPSKPRTAESKGAEERERAPGGQGGLVGEQK

SEQ ID NO: 929498 - protein, 145 aa, Homo sapiens
MGTYSRSHVQYIWCSCSLAWTWHLCHHLDLSALLLCAWSHSVPGLPLAGMGSGLVVPAKCSLPGQDKEEISNIYLTGIQLGWMEVVKHWEIGCTFKVEATGFAEEFDIRCEGKRNEGKFKDFFLINRECDPPTFNSIRQDLEENF

SEQ ID NO: 929499 - protein, 160 aa, Homo sapiens
MLTATLVLLQSYFLHHGISTGAVCFAGIVVPLIHRFTFYSFSYLQSTREEKLVRKPVKLCLHILTVSCRGTPAMSDKSWYSVQVKDDGGNATMCKSPFLNSCLWGQHEIQKPGKSRFRIPSCVQFLLKISANCASCLGDVIAHDWNAGVYEDSDIGVLLK

SEQ ID NO: 929500 - protein, 171 aa, Homo sapiens
MMVKWASSNMNELNTSDYELHEVVQIMCKYEDNVFTLFMAPAQKKSKPCDTLLETSHHADQVLIASSYWGFLTNAFQYLCKCVDYPISNSSKRSQVRTEEAGNRGGIRRDWKLGFRLQLHKILHNSNILGADSSLEPFEENPAKQHHDFSLVKSKIEEPTVSTINFRPAEL

SEQ ID NO: 929501 - protein, 138 aa, Homo sapiens
MVMTEQVIGMSQGGAGPYFPLYLYVLGSFVVILAFDNTAISPSFYGLSSYTGRPLSINLHQYSEALKLSQIFLKDMLYLVLGIFNFPIKDVGISSLVSIISYVMFHNFFLLSICNITISLVLNKPQCLLLFSKSPNDD

SEQ ID NO: 929502 - protein, 370 aa, Homo sapiens
MNVAAKYRMASLYVGDLHADVTEDLLFRKFSTVGPVLSIRICRDQVTRRSLGYAYVNFLQLADAQKALDTMNFDIIKGKSIRLMWSQRDAYLRRSGIGNVFIKNLDKSIDNKTLYEHFSAFGKILSSKVMSDDQGSKGYAFVHFQNQSAADRAIEEMNGKLLKGCKVFVGRFKNRKDREAELRSKASEFTNVYIKNFGGDMDDERLKDVFSKYGKTLSVKVMTDSSGKSKGFGFVSFDSHEAAKKAVEEMNGRDINGQLIFVGRAQKKVERQAELKQMFEQLKRERIRGCQGVKLYIKNLDDTIDDEKLRNEFSSFGSISRVKVMQEEGQSKGFGLICFSSPEDATKAMTEMNGRILGSKPLSIALAQRH

SEQ ID NO: 929503 - protein, 165 aa, Homo sapiens
MSLHRHQNMPGIHYFRWVLGLADFKNEASDTHDVQMCLEFLPSGGFVVLLTSGVKPQTFTVSFTALKGGVSRVVHSSQWVCGLADFRNEPTDLHKVNLQTFAVSVTAHKGFLLAGHPWLHLDPIAPPGPAYAHRLVLWSHPEVIQWAEESFSTPTIAPATNQQQA

SEQ ID NO: 929504 - protein, 221 aa, Homo sapiens
MMYYYDDGTGVQVYRVEEALLKECIKRQIEHYFNAENSERDYFLRGKRGEQDSLPIFLIAGFQRVQALTTNLITEALKDSTEVEIMNEKMRKKNQKNGQFQALLHATPIDSGKRQANSWADKRRSVVRPTLQARNSPRPEKPASSSRWSPPPQVQTSLMPFSQWDAFSGPTHGPISMHFLHLEPIKTPDAAKLRHSLGLHAYKEELPTLCLLSAESCSAPQ

SEQ ID NO: 929505 - protein, 171 aa, Homo sapiens
MKEEQAERYNGGTGSTGKYSHFKWETMAKIERLQAHASPKSSGVVKAQCSEMISFNSMSHIQVMLMQEVGSHGLGQLHLCGFAGTAPLLSAAFQEAWCKLSVDLPCWALENGGPLLTAPLGSAPAGTLCGGSNATFPFLTDLAEVLHEGLVLPLQQTSAWASRPFHTSSEI

SEQ ID NO: 929506 - protein, 323 aa, Homo sapiens
MTLKPDTVIAHLILGSYEGASLYGWLFNVVFRGSQGEVIHKMNGLTTGRPALLQMLKKVLPRKKKGNLMETCVYQMERRAMGILTTDLWSFEHEKDDLEYLVEEIYMQQSVQEVTRVLLKPFSCMHSQRYGLELELMFKREAENKSSENLQPDDAIEKKNLIFWGEIQACCRNLQDVWKLLDVQAEEYYRGRALHGEHLLGQCRVPTGALTSGAVRRRPPTSRPQNGRSTNILHRTPRKVTDAQQHLMKVARRGAVSCKATEAELPKAVVSHLLHQCDWIKDTGGSLPCSGDLWNFELEKDDLRHLAEEISEQQGIQEVNWLF

SEQ ID NO: 929507 - protein, 146 aa, Homo sapiens
MWLLSTYYVYYSLNSYSSILVIIQNSYRLSVTYFSSQPSQPLFDHPVIVPISVKHIQKANTSNFPWLHFDLIYCSLIYSVTATLASSHFQNTKHTSTLNPLHSLCICLLYSDFMITAKCSLVTSNKIAIHISQSSFGKAESPGYMH

SEQ ID NO: 929508 - protein, 160 aa, Homo sapiens
MSRTNSCQLNPTTWKEAMLHGINRLRELKICLAGRKGSMGNSALCRQCRVDPALLFVVSGKAARGKPSELKIQIPEAFSAEEPSPSSPAPPCPPRPPYPASASHLLPSRKPHPKQAPISLLPLQQMPSESGPSKVQVPSSLQDLKQIKGDLGKFSDDPDI

SEQ ID NO: 929509 - protein, 142 aa, Homo sapiens
MSCLQKGATHLGLLRAVLSLNKATLTCSPSSCPPNLILPGCRTRTQDPTNKGSKWNCNIFLTDMQPAVHNAEGDEKERRAVALLGVQTSVLPRAVTCCYTLFGSLQFLVPLSFQEPLCYPLLTVEITCGMPGLATALHGVSD

SEQ ID NO: 929510 - protein, 141 aa, Homo sapiens
MLQGTQEDGHGEEQISQRRHEWLDVERVLMGARRQKSTPTDTGRGEPRPLSGWTPGKTISFLAPSSVEYYFHSVKPCTHFPSPPVIRFFWYTKARTQDAESLLFSQKGHNWCKLTPSTSRNALAHKILRQAVPAAPGNALG

SEQ ID NO: 929511 - protein, 224 aa, Homo sapiens
MEHFHHHRNSHARASKDLVNDFDQNADSDMDHEVQAEVVSDGNKKLLGNWNKGHWSYALAKRLAAFCPCPKDLWNFELERDNVKLQLMFKREAEYKSLGNLKSDEKNLFSGKKFKTAAENCITCRSQKSKIEVWEPLPMFPMMYGNTWMSRMKSAAGAKSSWRTSAMAVQTGNAELEPTHRLPNGALPSGAVRRGPPSSRRQNCRSTNSLHYAPEKPADTEHQP

SEQ ID NO: 929512 - protein, 144 aa, Homo sapiens
MCVCKSGRGPSTGTESASTLILNFLPLGLKFLLCFWDLLQQTALTKTPPLPVEGGPWKNSNWPTPWDGTLGYSSYLLKPEIHAAGGECFRGTLRHPEKRGKQDYLTCLGTWDCQNDVQSSLSYILVNNANISFKIVWDFYDSNV

SEQ ID NO: 929513 - protein, 139 aa, Homo sapiens
MERKKCIRQKEKPDRSRKLGERSTCIKSRKQTFEEESSLRNEQKEQSWRHHATQLQTMLKSYSNQNNTVLVQKLTHRPMEIKENSEMRPHVYNHLIFNKPDKNKQWEKDSSFNKWCWENWLAICRKLKVDPLPYTLYKN

SEQ ID NO: 929514 - protein, 142 aa, Homo sapiens
MLKQGLPVKKLLWWTLGSTPFEHLRLFSKEPQTEGCTVGFLTFEDLGLRLTSLHLSSQTADCGISLCDRVVYSTSITHITYITPATQRPDNQPLCLAHCCHNRNLSKTQGGPIIQPTTTTTGVQGPTHLMFRFPEKFHHSLN

SEQ ID NO: 929515 - protein, 201 aa, Homo sapiens
MDTEKQAILQAAETFGDELCITGSIREGGEYFPTGREAIPVNDPKWDPSDEMEDWKKRHFGVCIMEGLCRTKTKPLNYIKLFMLNQGFGENPTAFLERLRETLATPQSCAYKIPQDHSRQTQAAELPELVSGGTHRRLDVESSTPTGTSTGQATDQQNTVESGWGSRRKAWATKQPDSWGKPSHSIPLLVSPNLLSATSTQ

SEQ ID NO: 929516 - protein, 247 aa, Homo sapiens
MQYIKKMSVPCSKILEASTVIHLWGSAKDLNQHLYLPLTPQAPVDLLGHMAQVAEQLAQQPGPVAEPSLVLDPTQNWQPFESLDKWARDSEGILLALPGEGKLLLVGLMDMNGEKGTCQINGCIPAAKYVYANYSFWYWGNYYRMSLETQRTHCSGKGEPIGRLQLYPANLGATNQLHYIPWFSTYGQRCSWSSHTGPDKTGSILPSALEPSAKDLGARTAKTTFGENIYGELVMQTHCIYVPSPNC

SEQ ID NO: 929517 - protein, 156 aa, Homo sapiens
MLDDELVGAAHQHGACMRMCHLQIPLHCIEDRPSEFAGSIIFDLQNAVTGNGGLHSCLLSIGNCHRASWGRTVKAKIRSPTGRALKTVNVWQAQTQAQEERSLFFEFQVNENVWKMDSICSQEYMKRGRLSLCTDWRIRPKQNPELRKFSEGPGQA

SEQ ID NO: 929518 - protein, 245 aa, Homo sapiens
MVSSSLSDINIKVMLALGMGHQLAQASGAMAAIVFQDSWTLNDGEHDPKGTATLLGCYALVYRGQGTTWAWVPNRQLLCWTGALISRGLGTELVQAGMGKQKFVPSDVRVCSEFLPSGGFVVLLASGVKLQTFTSPLDSGAQQASPNGSRTWAAGRAARQSHALRLHSSALGRSMGQGTAEQGAALTGEALAMKEPTVVEGEAEAWQAAGPEPCTMGRQLTPGENSSAVPAGRHCRRTRCTLRSC

SEQ ID NO: 929519 - protein, 186 aa, Homo sapiens
MFKDRKYPAQEKDGNQKTQPQRDWKHSAPALEICETELKRDDLGYLAEEISKQQSIQDVTWALLKVEKENLFSEEKFKQAAKICISNEEPNVNSQDNGENVSRAYQRSSWQPLQSQAWRPKRKKWLYGPGPGPCSFVQSQDSVPCIPAVAKMGQCTAWAVASEGTSPKPWQLPCGVQPPALVLQED

SEQ ID NO: 929520 - protein, 134 aa, Homo sapiens
MCPELVSFSGILVSLTSRMKLWTLAMSVTAQKGGASRVVHSSWWTVVLLASGVKLQTFMVGFTALKGGVEPKIVLLTVRTLSFRSVGVCHRSAPYPVCLGISSGGYRTVNIGEQQMLLPDRSSGGFVSEEYPAV

SEQ ID NO: 929521 - protein, 153 aa, Homo sapiens
MHQVLHKIIEFNPHSGSDRFPYLYPGTFLFSVFFKVFPVAHPGLFQNEEDTWRNLQVHRPICKRTCEPTLAKFSGLHLSPILDAPCPRTSESKFFSFGLRLTSVICQRLLGLWPQTEGCTTGFPTFEVWGLWDWLPVSSPCRWPIVGLHLVVL

SEQ ID NO: 929522 - protein, 183 aa, Homo sapiens
MSAAPCSKVPGPMDRPMAEDWRIVNAPVSTVSSSKFVNLPISTLSKRTNQLSVKWTNQLSVKWTNQQNVGGARQGNKSRLPGLEEKEETRSTCERQKEQTVDRASLRTVTFTVRTCGFIFEVNETKNPPILDTPGHSLFLFAETGNTNLGKQPDLEHLQQLPYPSASEGRQQGSVNVVATNYF

SEQ ID NO: 929523 - protein, 165 aa, Homo sapiens
MLLNNNSDSYGKSSSYNYENTRKHVPPKLKGKPYFKSNLEGYLARYLTERILNFAVLPGHFTDLLRGHIDVPIFTSVQSCPFLLEQLRNSSDNQGSKNLKVARCKMFQAYPYNVKWPLLAASLPYIPTNGSISNILSHSLVACKVSTEKSADSGIHKVPFFEVSY

SEQ ID NO: 929524 - protein, 154 aa, Homo sapiens
MRFHGASMQNTREWHRKSQNKDVFLCCSWLTGVQTCQDLQRCLIKQRSELSSLNQRNLHAGSKSLHETLSNCACLKPFKACMELATLAVLGVSGEIEGMLSRKYWPLNIPFLFLITKCCQKHKSVRDSAAYRLLDTKGLQMAPKGGGCLQHSDF

SEQ ID NO: 929525 - protein, 162 aa, Homo sapiens
MRKLIAGLIFLKIWTCTIRTSTDLPQTENCFQYIHEVTEVGQKIATVLLFYGYCDTSKVMAKTEERGVPKNVTLKFDGCAAIDSIDGKGLDPSVSILIEGEVQKRSPEPVYQTFYDKLNVPVPEIPRKTKNLFLQLAEHVAQSLQVTSCYVCRGTVTGDQWP

SEQ ID NO: 929526 - protein, 143 aa, Homo sapiens
MWVGPDKAIKAGCPVTLTAKVCSFTLEPARPRTHQKEGTPNTSEHQKEQTPDTQPLRTVTLTTRVHGFILEVKQNRHVVNNSLPKTYNQKEDNIHIVLGPTVESYFTSHTSLKAFYPNEITFWATKRTSTYKFEGTQFSPYHN

SEQ ID NO: 929527 - protein, 143 aa, Homo sapiens
MWRRRRGRKGRRRMKKKEEEEGGRTRKEEEEEEEKEEEEEEEEEEEEEEEEEEEEEPNSFIPYCSPFLDFWAQCKLPVDLPFWGLEDGGPLLTVPLGSAPVGTLCGGSKPRFLFFTAIAEVLHEGSAPAANFCLDIQAFLHIL

SEQ ID NO: 929528 - protein, 159 aa, Homo sapiens
MGTLHKMALRCLPSLDPVKAFNLLLSDKKEKKHHLKLGVEQHKHPYGHHHYECVGSDLKPAKHWVSPKACCYHSLAIAYVFSRPWGSTTSRWQSHPDPNPSLKNGKILQALVGSRSAIQESETKVKNLEIYLVFYCTEAELPLLPTLPSPFQRQRSFAL

SEQ ID NO: 929529 - protein, 142 aa, Homo sapiens
MTLTACPAFQPYAWLSPERKNFPVQYSYGIIDEDLVREMELGILYPGFSVILSKLVWVSMSSFFKMRRIMKVCHETSRNQAAQQEVSGGKASKASPVFTAAPHHSHYCPMPPPVRSAAALDSHSGGNPAVNCTCEGTRLHAP

SEQ ID NO: 929530 - protein, 180 aa, Homo sapiens
MSPVPSYSLRHSNTEIRRVDNLTMASKCSSEKKSHSCPPPCPPATLQTQRPRRKKWFLEPDLGLPCSISLGTWCSVSQMLQPWLKGAKVQLRPWLQRVQAPSSDNIHVVCASGVKPSWRASDKAVQKENEGLEPPRRVTTGALPSRAVRRGPSSSRPQNGRSADSLHCAPEKASDNQHQQ

SEQ ID NO: 929531 - protein, 159 aa, Homo sapiens
MTQYFVLVFAILQCWLFSCSESVPGKRMFPVPKNTLAKGEFHTLRLGKVDQDFDQNADSDMDNEIPVEVVSDGDGKFVGNWNKGDSFHVLAKRLAAFCSCPGDLWNFEFDRDNLEHLAEAISKQQGIQEVIWVLLKAFSFMYPQIYGYIKFVFGIGTYV

SEQ ID NO: 929532 - protein, 135 aa, Homo sapiens
MGFSLLSHYLNFGVGAFYGPQIDMNLHSVPQCGIIKLDLQLSLRFDFQYKWPTGVLECPVIHQAAFKASLFKIITKYWDFDDQLQLKLNSILNYKFFFFKTESIKTFKFLFYFVKMTHYIASIICFFKKVNLFDF

SEQ ID NO: 929533 - protein, 134 aa, Homo sapiens
MVASRGECLRLPKPTWMWPVLTVCSFSFAFHRRLKCSPAQCPLGTQVFVRYPGRIRSHMNVEMEFGCPVADLLSDRQQPNSSQHSDALSLLSAEPLCCSPALLFVSFSSASRAWGLGFMSLISINASIRCKEGQ

SEQ ID NO: 929534 - protein, 250 aa, Homo sapiens
MLGLCYQPESHTCQGCTRHVVERSVWASKRMVWLLCTAGWEATGAGTGTSSVPSCARTRCIARGFHCGHPCLDEENAVAPGSLEMPGTAEPKESVTGLAWGAPRYRHPEGLKLFSPSPHLQCGKQGACFRPVCVTALLVLPFRSSQVLVPHPGRMRAILSTPLTALLCLSVPKFQRKPRQQGAGMSVPPQAHTWPDARTHTPHHHQQSPLYSHGKVRHKSSLYNFVSERGQNQSHCATHKIPNTILYWLI

SEQ ID NO: 929535 - protein, 346 aa, Homo sapiens
MTTITTTTNSTTATTTATTTTPITTNTTTVTTTATTTTTITTTAITTITTTTTTITITTITTTTTTTTTITITTITTTTTTITTITTTTTITVTTATTTPSPPPPPPLPPPPSPSPPSPPPPSLPPPPPPTPSPSPPPPPPSPLPQPSPPPPCRHHTTTITTTTTTIATITATATTTTAATTFTVPPPPPPPSPPSPPPLQPSPPPPSPPLPPPPPPPPSPPSSPPLPPLPLPPTQSLPPPPPLPPSPPSPPLLPPLLPPPPLPPSPPSPTPPSPPPPSPPPPPSPPPPPQAPLQLSPRINIYEVTLEYGVPSIQCDWYPYKKRRGDTEVRMPCEDKETHKGKKAM

SEQ ID NO: 929536 - protein, 188 aa, Homo sapiens
MCRLGLRGLTLSKYSGSWDWIGRFVPLVSTVSYRTLLFQESINTVQVGIVQGSTVYCFKLLNLWHYVNQVLVLESGLQDNVSDFNVINMVGLTTRLPWVEKIGNVKMGSGDTEHNMILSRILNRKRSHYHQPECTTTLACYHKQNLGPTGSLNHSKPNFLEREETPLEICFGLSNSKKAAVYETVLSV

SEQ ID NO: 929537 - protein, 143 aa, Homo sapiens
MFTLPLHSTSQSNSQDHLSLDFIVRITISILGKAIQQVSGGVPDFTTFSCLLLSPPNCSNLCLLPSSKAGSTFSDKNPDLAELRSKKSCIIVTWKGKFLEMKCPLYLMAAEIINAAIWMYMCKLGLRGLTFLSSYINKKNKTK

SEQ ID NO: 929538 - protein, 140 aa, Homo sapiens
MRSAHATALPFAFRSLEWKQPEALTRCRSPILNFLAKPPEWSKKKKGFSPCLQEFQSEDETFCLLAVRRGFMHYKYSGRSREKNRKTKKQDNDAWFKAKFQRSVFRSRSKDFSTAIWWKKIYGPKKESDIQKMEVMYRNS

SEQ ID NO: 929539 - protein, 167 aa, Homo sapiens
MLPGQPICCDHSGICGGRCLCFLSSGCSSLPSPPPDLQLSTKSSTGPPQFPAMRLRVEDRLEMLGSKEEEVIMMVRRHSKSRKREVPKSYKDLTNWLLKLFGSRKVVQESKGRERLKLMKEVNHKIFKTFAAQCVDYNLQGVNIIWDLPGKMDSQVPERPTDVEDGV

SEQ ID NO: 929540 - protein, 138 aa, Homo sapiens
MKLGRAGILGVYCEFYSRTKSSCGQGKKPGPLLLGCDGAAVFLHSTLQSVCAAPSRGEVRRGGKSHRAGSSGEAKPCTVERNGQSICGENTRRRSSALWGFRREGHPRTWKSSDAPILQRARDTAGKGSRTIPPTHQL

SEQ ID NO: 929541 - protein, 136 aa, Homo sapiens
MDAISYGESRKKLAPIHHFVPPKIHSRPSQYGVGELLVSFVEDPAPRVACSARLAGCCIVAGYLSGYFQQPPVLQKEQVPCAALDGLSQGRVLQTSQAGLICTQRTVLELTERQVLFNWGQHLMLQKCLATAFPRT

SEQ ID NO: 929542 - protein, 139 aa, Homo sapiens
MVASFLFSDRGFLASRIPMNGTLGHVEPWVTEENCGTQLLAFSSIRTNPGLLAMQEQWQAFSLIGSSNGWLAGSGAQRTPCQICRGGSQWWVCDGGKQQWWTASESSARAITNIDQKRGTIYHPVLKGVPAGSGRTFVW

SEQ ID NO: 929543 - protein, 145 aa, Homo sapiens
MILAERGGVCIVIKTQRCIFIPNNTAPDGSITKALQGLTALSNELANNSGENDPFTGWLEKWFGRWKRIIASILTSLAAIMGVLILVRCCVTPCICGLVQRLIKTALTKTSLNYPPPYPEKLLLLENQAEQLSQDMLKKFEEKAL

SEQ ID NO: 929544 - protein, 240 aa, Homo sapiens
MASCVSPQSILIAILLVRCFYYPCSADGILLVKDVSSDADRAICAALQTHTEVYWKGGARGESTECGHFPCIVDLVKWPQICVWKGLGNTPPCLVWTFPEGPSLSLSQGSTSEFVNLIALVQKPKSMIHGRCTCFPIAFCHDCKFPRVSTAMLSVNPAELSGISVDLRTSQHEKMEPTNFVTYCNISGKTQLVYERDHVIYLKMKQKPLQCFTETAMGTRSEWIGGPTKFTIEAYTNNHS

SEQ ID NO: 929545 - protein, 157 aa, Homo sapiens
MGFLKTAFTLVLGGALAGSVPANTPTAMVAQQVNWGRGCTPASSCSMVGRVHAHMHADKEGKARCTSMHTWWESNVRDGHVTKVFWRGVKRATGDGCPGHAPLQMLPCQTIWAPNYLEFCPYYFFKQLSLSAQVSVGVMESPAGRIPEIRGEICAYL

SEQ ID NO: 929546 - protein, 158 aa, Homo sapiens
MLNRTAELEHCAGRSTAVFTAGRQECVSLLKMCPQLSLPPGALSQGDGSFIYKPLTGAAVFLSEMPCPERRNLERQSDYSDFVELQRALPSLNLQLCLHCEGKTTYSSLSYGRCPSPHQAQVSQCAFLHCRGRRAKICISHISGCNVCSANQMASHKT

SEQ ID NO: 929547 - protein, 135 aa, Homo sapiens
MASEGASPKSWQLPRSVEPVGEQKAVQKGNVGLEPPRRVHTGAPPSGAMIKGPLSSRPQNGRSTYSLHRVPAKAADNASTLKKLGGSLNLENIPKDKFIKLFNCQQTSLISNNGSSAYARTELLANKLISTRISD

SEQ ID NO: 929548 - protein, 193 aa, Homo sapiens
MLKGSPSTGKPEAHSCVQYNDKNLHKRSQENLIQKRQDDDRSKERERERFEDASFGDGEGPSAKESRQPLEGPGPCCPVQHQDNGLHILANPAPTVDQRGPGTTHAATFLHEEACRQHHGEMWGWRSHRVHNGELSSGAVRKEPPSSRPQNGRPTSSFHPVPERAAGIQLQPDMITSLKCDKRNVHGSCECKL

SEQ ID NO: 929549 - protein, 221 aa, Homo sapiens
MAPFLRVINQLPGGTLIILDLFHHGKGRSLSSPEETLTPDMILPILLTMLLPRLPSMDSRNALPTVMVYHTALHLTKALTHFTAKEVWHQDSQVQESKGGSGSSSIRYTSSDSNFLLPIPATLSSAVLESKKGVTVLSGVIDLNYQDEINLLLHIGGKEEYEWNTGDPLGVLLVLPCPVIKVNGKLQQPNPGRATNDPDPSGMKVWVTPQGKQNKTKNMTC

SEQ ID NO: 929550 - protein, 217 aa, Homo sapiens
MPTARHFVGDEEKRTAGCDTLFGAPQFLVSPSFRVPSYFPVPAVEAICGNAWSSQSHTEPTPVLAPGAACPVAASTHGCVQWPDPMLINTPLATPHQARPWQVWDPAKYSLLGRVSRRGQRARVKLRQRHHQPQRFPTEKVTRHGSKVRGLMGLGEVVVYFSKQLNGVHSLGRRGLRQPYLHLWGFLVEMNVDYLHSKRCQCPLWSRPLRTTVIPAA

SEQ ID NO: 929551 - protein, 153 aa, Homo sapiens
MQEVGSYGLGQLCPCGFSGYSPTPGCLHGLALMSFAGSWCRLSVDLPFWALEDSGPLLTAPLGSVPVGTLCGNSNNTIPFCTALAEVLPVIRDYLQNHELEHEEKQENGACYDWEMELQYARIYCIHATGESGFNKYLPDNVDEAHRHNAFSC

SEQ ID NO: 929552 - protein, 143 aa, Homo sapiens
MSYFGAGTAVSRAPQDKKHNSNKENFPGRKFAVFVCDVAGFHKHQKNRVIALKFNVNFCQNLPQVGPWHCEKGHSFFPGCLPTNSPLPYILRLVPQETDSEMQTGKEDAYEGPPLKSTSAKRKRRSRTPELPNEMIANAISFY

SEQ ID NO: 929553 - protein, 149 aa, Homo sapiens
MKPAGLPSLLRDCKCTNQLPVKTDHWALPISRMWVGPDKRIKAGCLSQQWQPARVPFYTVEALFFTPEATETTSPPGGTNNSRRAALRAVTLTAKVCSFTPEPARPQTHQKEETPNTSEHQKEQNSRRATLRAVTLTERSIRRIWILAS

SEQ ID NO: 929554 - protein, 152 aa, Homo sapiens
MCCNPHPQGDGVGRWKLWESLIPPNEKCLQHQLVWALRMQTHLNVSWSNRAQQNKQATEIDMTITGILDCQQDFQTLLALPGTEAKTHMPTAFANEGRSPSAIPHVIEGKNSIVAMSTDWFWLDWVQILALPLTNRRPLNLGFLVNKGINKQ

SEQ ID NO: 929555 - protein, 178 aa, Homo sapiens
MCPRCWVVIPFLCVSLTSRTRSVWRVGRRCHPLASSNLPQLTPVGEGQIAELSSYFIISTRKHSRALQGAHTLQMCLGQWPQPLGLPARSWLWDWGETGGGNRGGRVGARCPGWKTVEASSVLGEVGWALNGKIGRTVELEALEGGAHSAKRCRMAWSEALDLWECLCLCPKGDTKEV

SEQ ID NO: 929556 - protein, 313 aa, Homo sapiens
MGLGLGQGLDLGQPNALLALHPKLLKAWWRLQIVGEYPRGLSLAALGQLLLGLLLLGLLLLGLLVLELLLLGLLLRGLGLLLLLLGLLLLLLGLLLLLLGLLPLLLGLLLLGLLLLELLLLELLLGLLELLLGLLLLLLELLLGLLELLLGLLLLLLELLLGLLLLELLLELLLLGLLLLLLELLLGLLVELLLLGLLLLWLLLGLLLLGLLLGLLLLELLLGMLLLRMLLLRMLLELLELLLEPPLPRAFGPAILEPHLHLVLPEIEHLRQLLQPKPLLQYTGPKDKRPATPSPGPSSGPGSATNKIIPPPK

SEQ ID NO: 929557 - protein, 213 aa, Homo sapiens
MGTHRRLWELRGGPQCGGFNQRRGLPSRRNCWGKDFTEVGEGLACWRSVQGFGLAEVVEVVLEVKEAEVVVETSGGGEVEVVVVEVERVIDVVVEVVVQLEDIVYSVEELEVVELIDDVDMVELKEAKEMVDMEQVMEWIELMEVKASSCQQPCGENPAGVLELGVKGTITIQGPARCPPQSLLAFFKIGNCSPCFLKDKNYPHGNQGMKRPH

SEQ ID NO: 929558 - protein, 135 aa, Homo sapiens [sequence omitted]

SEQ ID NO: 929559 - protein, 116 aa, Homo sapiens
MTAILIKRGNVDIEMHTEGRQCEEMKTEGEGSLLPAKGSPSRPSEKPTLPNLDLERWTVRDPEPFLLWLHSWHPMAHIEPSHMAQNKRIWEWQKASQTQPHKWLVVVQTERAQIWV

SEQ ID NO: 929560 - protein, 193 aa, Homo sapiens
MVEEASQPWEAEQLRNEECRPKPAHQVQISHWLCTRSSRWPLRDSPESRHCPGDGEWVFVSPPCLLLQAPLLPPWLLPDPVAGSMPASSPRFRAPVATQSGCLPHTSSPTSGLASRAADGQGSGGGRNPESPETPPHLPIPLAQPGSSLGQVRSAGLLSSTHQRMLHPLLHTDPFPVGLVPTTGLIWRAAWDP

SEQ ID NO: 929561 - protein, 128 aa, Homo sapiens
MQPECMQLNWKSRHLPPLLHTLHGSHLPRRQRQNPPSGCRPTSSGLTLSIYFPWLTLPQAHGVLFPEHVPSHPHLRAFARAAPSSGGASSPDACSLTSFRSWFDAPFSGAFTRASSTSYFPVLLHFSS

SEQ ID NO: 929562 - protein, 136 aa, Homo sapiens
MLCWEICCFLQSCPAGMFKSAEAAPTGVVSPRCSVSGTWGFYLTGAADFFSEMPCTERRNLERQSGYSSFAELWRALPIWNLPAALFTLSNEMNQVTQLEMEKSPTFCVDLTGRCRPELVLFSCLASRNLLSTSNY

SEQ ID NO: 929563 - protein, 129 aa, Homo sapiens
MGEEWLPVWGAMASPAGDLLVCASCLEDTRCPEWKLRREISGSQHAHMFCFGPFCQTVSHNGRAIRNSRWRINIPVVSLLCPQLLFSEFLASSTIPVGWSHSFSILPPATLVHISQHNPKTIDHKEKYW

SEQ ID NO: 929564 - protein, 135 aa, Homo sapiens
MAALAIGTLGWMRGFCRTQLPGAGQPRPLSLRTMCTHSKPPEVPPEAGDGSPDLGEDPQPHQPRKWWTRGPWATAMLQPSEELSRDRASLGHPMQLHRCQARHSREDEEKSTVGAVVHLLVAPIVFTSTPGSHPC

SEQ ID NO: 929565 - protein, 171 aa, Homo sapiens
MCRSSQAPHQQGRRARQAAWVSPCLPTRLVTLILCADRASPKPSLAQKAFVLLPFLPVPHGCLFFSQGGRKLPAEHTTSRPGASHLSATGDHISLPPCCVSGSSSPIQTPGPDPHQAPNQSPPPRVAGPDDTGPDHAEHSEFLPNLFFFPTSSSQICCSQDPFSRITGFTT

SEQ ID NO: 929566 - protein, 131 aa, Homo sapiens
MNPGNIMLSESSQTQKPTECMLPFKPTECMLPFVSNVQNGKSIETEARSAGACEDSEGEAVRAATALTVIVDVILVGLCREALPSSGRFHPELGPCCHETAEDEEKSTVGAVVHLLVAPIVFTSTPGSHPC

SEQ ID NO: 929567 - protein, 166 aa, Homo sapiens
MGLGAVEQGVVLVGEARATQEPMEWVGGSGMAGCRSRTLPCGKAAKAHTPSTATGPGAKSLIARGQQGWLAAPSAGPTKPTPTRNSSWPASAARSPGSRSCLSLHTSLQAEGVGSSLGQPRKGLPQGSGGLKGSSNATKVGAQAGEAPRASEGCEDCQHAVTSQED

SEQ ID NO: 929568 - protein, 162 aa, Homo sapiens
MISFKILLLIDNAPGHTRAMMEMYKEINVVFTPVNTISILQSMDQGVIFTFKSYYLRNTFCKTIPAIDSDYSDGPGQSKLNTFWKVFIILDAIKNIYDQWEVKMSTLTGVWKKLIPVFMDDFEGFKASVEEVTADVVEIPRELELEVEPEDVSELLQSRDQT

SEQ ID NO: 929569 - protein, 146 aa, Homo sapiens
MTKNEEIDLAGNKYSPRWEAPPRTVLHLHGRKAVLPLRPPWPLWGSLQLMYCDGAVDLDAAGIDIIIVNSSNSAGGPGNPKPNLIFGPTNQTAAWKRKLLFGWGQFSRGRGSCECLAATTQHLGDGSDGPLKTINKSGPYDVLLLI

SEQ ID NO: 929570 - protein, 169 aa, Homo sapiens
MSALFKQRPGKGQGLCGAEVMELGLGGHTALEWSPSLVLSLRKAERQEQEKGPKKFKGSWSPSNFIVAWDGRKLTRETFSGFANVAEVESDNNCVHSVSHPSFIHPRNILKHCQLKNDEVHTCGKEIFIYHKQRQPAGQPSHRLGSMASGSAESKQFEGRVKGTGTYAE

SEQ ID NO: 929571 - protein, 132 aa, Homo sapiens
MQYSANNTVRYVGYWHVELVDVEGYYVMYIQSYLSITAPKSQSVVTTAIFSPWDPGVEAGVHQGDQRVEKGTSGRGQSPLHPIFMDWKRRRGAMTGMGVCEWGRVLVKARACSTIPLPTVGTCSKPCTFLIK

SEQ ID NO: 929572 - protein, 135 aa, Homo sapiens
MPSSQSFARMGWLPSSFGSLRACHCQPSLNTFLTAAAQTPVLLQPLQAVGLVGFLEELLPGAVLAGRKHRGGGAAADTAKTSISRQAQLLSAGLEFHPLQWPCTVDVSATPGFCRKCLGDKFQLLRVLSSVPSMC

SEQ ID NO: 929573 - protein, 126 aa, Homo sapiens
MDDTEQCVMMQRPGARVYPHTVSHMHAHAPCTCKNMCLNVWAHVCMCMRFAQPPDYGPTWPMGAQTIQPQLRLGRGDPRDYGPRLPPSPITVPLVVLVSPLSLMQGGRDKNKVYNCQKHYGTVKGK

SEQ ID NO: 929574 - protein, 136 aa, Homo sapiens
MMLCSHCVLVGSTQFLFAALLVQEPYYMLNFLVIALEHTTYNFEFITVYIQGEELCRAPRCDPTMSIVPLCPFDGQPVPTTLFPDAACILVPCPITSAWKDVELATLIPTPMGSPEDGSGPIPDCLSHSGPEPRKS

SEQ ID NO: 929575 - protein, 162 aa, Homo sapiens
MAPGRGPLCIQSGGNSIIFSPPPSVPLFSTPLCEVIPSPRGTIGNRGDGRGSSQQACDVAKYHFLSPTRWLLINEARSQIRSLGFQFQAALTAVVATLGSGKPTGMKMLLSATSWLHEVGRLENSEMLGPDKGEVVRRTRSTQKSKTGPQYLLSSCHYVSQK

SEQ ID NO: 929576 - protein, 230 aa, Homo sapiens
MDLKLLWLPTAPFWVFPIPLFTLPSLRTYFVDLPAQAHLGVEGAQQCLDCTAAKASFIPGSDSYQNPHVPRHPQAPDYSKRGSEWLTVVELIEYMEICTRTRLVPASTLIGLTSEYSFIPAVRYLLLLENKPQAFAVYRVPHLILTATPGIKQWGLSTPVLQMRKCSLRRTSEKENIIGGLDLESISDRPTLPIIHSYNKYILSIYCVPEHHEFSIPNCKFSKTGTGSAE

SEQ ID NO: 929577 - protein, 144 aa, Homo sapiens
MGLLLMSCQPEEPSSLPLAPGGPSMDVSYNVLESSPQKPLLLGSVSQGAVLETQVEGIAFLQADGELAKEVVAEGRMCKVLDIESTGFEASSSACSSRNPSSWVSLQPDLSRSSVHLSCIGFPTRRLSCLLPSCCSRGTNSLGI

SEQ ID NO: 929578 - protein, 125 aa, Homo sapiens [sequence omitted]

SEQ ID NO: 929579 - protein, 128 aa, Homo sapiens
MWRLLDQDTCLASGRTGIECRGFSHIIQLLLVGAGTSDFTSSYPLPYTFGCSPVFQVPTLIPHGHWDMLLFLKSALTDKTLFPTSKEAPSHGFWILELKRADRCTGLFKVKVTDVDSEGKERPRVKGS

SEQ ID NO: 929580 - protein, 259 aa, Homo sapiens
MASAKALTWGHAQHTRPRLSPQPAPFTEGVCVSAKETASAHFTAEETEAQHCEGICADVSWYPDAELSVQVTLSCPGSLWSLEMPPEFPGTQFFCTPPGLIPRDLGKPKARASTITMLQTLDSTPPMLPVTAEMDSERPSRCSRIKPAENSPVRGFQVDRSSDSGYSGLEIQAAPQEGIPATQGQEPGLPSALSARGDLAAYGEKTEAQIPQEGLAVFGSVAGIKVKVIYGAPIWCSTLSYASSFLIQQRCRNTVVMKT

SEQ ID NO: 929581 - protein, 173 aa, Homo sapiens
MQDGNVDASQSKAKQQDGAAAMEMQPLKSAEGGDADDRKKASMHKKEKSVLQGKLTKLAVQIGKAGLVMSAITVIILVLYFTVDTFVVNKKPWLPECTPVYVQYFVKFFIIGVTVLVVAVPEGLPLAVTISLAYSVKVRGEESRTSRLMQLQLRAWGNHWGWCWGWEMNEEAP

SEQ ID NO: 929582 - protein, 148 aa, Homo sapiens
MPKRKAEGDAKGDKAKVKDEPQRRSARLSAKPAPPKPEPKPKKASAKKGEKVPKGKKGKADAGKEGNNPAENGDAKTDQSQKAEGAGDAKFDLHFGTDIIMLYRLSPSWLHLFPDSLVPMASGRAGKGNGTSLIHGYTASDKFALSQL

SEQ ID NO: 929583 - protein, 188 aa, Homo sapiens
MTCPGPQNQYLVWSRTCSSLSLGEHAQGSGGLSQIYLMSSSNVCSMGREGQPCSDTISLPTLPPQPPNPRQVSGLDLSSLEPGRQLNYFSGEDKPQRLMVSQPWHCRVTKGGPRGKWETQGAPATGAECKGGQHTVGKQTLRFTPFCVGQEAEPRPPPQAAALLPHCPPLPPTLLIPACTGCSVSAPF

SEQ ID NO: 929584 - protein, 209 aa, Homo sapiens [sequence omitted]

SEQ ID NO: 929585 - protein, 261 aa, Homo sapiens; identical to SEQ ID NO: 791801

SEQ ID NO: 929586 - protein, 362 aa, Homo sapiens
MGSQRRFTAEEQSRGADDAWADVEDVTEEDCALRSGDTHLFDKVRGYDIKLLRYLSVKYICDLMVENKKVKFGMNVTSSEKVDKAQRYADFTLLSIPYPDDDDGGDDVDDGDDDDDDNDAGDYVDAPLSIPDFLTHSLNIDWSQYQDGLIHTSLKPTEILYLTVAYDWFLFGRKSLPARDGGFTLEDICMLRRKDRGSTTSLGSDFSLVMESSPGATGSFTYEAVELVPAGAPTQAAWMGSSPLEVPKPRSVDHPLPGSSLSTDYGSWQMVTGCGSIQERAVLHTDSSLPFSFPDELPNSCLLAALSDRETRLQEVRSAFLAAYSSTVGLRAVAPSPSGAIGGLLEQFARGVGLRSISSNAL

SEQ ID NO: 929587 - protein, 200 aa, Homo sapiens
MQGIYREPKMYLLAAAKISDGSQYYVLLIITDGVISDMTQTKEAIVSASSLPMSIIIVGVGPAMFEAMEELDGDDVRVSSRGRYAERDIVQQAFNATAVVRHMRKLQLGTSQEGQGQTASHGELLTPVAGGEERALQKGMGGPQRCTRAGVEGLPLRPPLFCLPMQGRQLAVAVETAAWSRAQNCPPHCPTSSRALDLGS

SEQ ID NO: 929588 - protein, 463 aa, Homo sapiens
MSLGSKCGKLCRDSQGERSFPLSKAAFVTRCCIVTESNELSDATVQKEEAKTSLSLWLRPLSDGPFCLPGWDRALIQLQVRALLSSTGSQAVAMDLGNRKLEISSGKLARFANGSAVIQSGDTAVMATAVSKTKPSPSQFMPLVVDYGQKAAAVGMTDGECVVNPTRKEMSSSTLNVVVAGAPKSQTVMLEASAENILQQDFCHAIKVGVKYTQQIIQGIQQLVKEIGVTKRTPQKLFTPSQEIVKHAHKLTMERLYAVFTDYEHDKISRDEAVNKIRLDTEEQLKEIFPEVDLYEIIESFNTVAKKVFRSIILNEYKRCDGRDLTLLRNISCEVDMFKTLHGSELFQRGQTQLLCAVTFDSLESSIKLDRVITTINGIKDKNFMLHYEFPPYATNEIVKVTGINRRELGPDALAEKALYPVIPKDFPFAIRVTSEVLESNGSSSMASACGGSLALMDSGLPI

SEQ ID NO: 929589 - protein, 146 aa, Homo sapiens
MNMFTFLIMVMTSWVNTYFKIHQMIHIASVRSSEGPEMGRASPLPLNLGINFKQIASKNKSHGEFGKKQLIPDSQPQGFLFNWYGELPGEVEKLPRCRSCTARLQNSQAVVLKLPWVPKSPGGLVKTVICERPSSVRESVHLGVRG

SEQ ID NO: 929590 - protein, 145 aa, Homo sapiens
MTLGDGGLIYKPLTGAAAFFSEMPCPERRNLERQSGHKCLAELWWAPPSSNFQAALFTLLLCWQREFQAIHLSLLGSVGVGPAEPDHLAPWLQPPFQGSEPFQVPLGYEKKFPQLVQCLPKRPPSFVLETQGPGGVGTRGNLLSR

SEQ ID NO: 929591 - protein, 166 aa, Homo sapiens
MLPHCSDAGRSDVAGKENVSNAGERSKTIARVKFLSGKKVEEEEKEEEKGKQEQRKRKDLSLYSHMTTVDLKSLQNKDEFNLVGIIVVFEDLKVMLGTQIWVRRGSLKKVMRESRGSKLEVQGLLPEESDQSSKAQLTNLGPSQANVNSQGEDPLPSRNSDLIDLG

SEQ ID NO: 929592 - protein, 165 aa, Homo sapiens
MQQVGSHSLGQLYPYGFAGYSTPPGCFHRLALSVCGFSRCTVQAVGGSTILGKCKPTKSPELLIVIHNFHKDTIKVAAAYLAEGQQSHPKGVLWPTSHEQKGILIFCDLFGVNLDCFSDHMLFKPRFCEHLASIPKLQLQTSPQEHLLYILQTVFQNFTYNYLKY

SEQ ID NO: 929593 - protein, 143 aa, Homo sapiens
MWKRSKKRCSAATSAKIESLLRKLPGLGSVPNRLNPCQGTEMVYFDDNSLTRVSLHIQDPDCHGGRQGGASHILHGGQQRQERACAEKLWFSKPSDLVRHIHYHKNSMGKTCLRDSIVSHWAAPATHENYGCRQGVKPYQKVL

SEQ ID NO: 929594 - protein, 148 aa, Homo sapiens
MAMMHRTATLPSQKRIFWPLNVEPKLSGDTAVKNPFRALLTCDNTTLIDQNVLPCGELFVTHQVKESLSFQQRKGLICLTALGFVVLEEGYHIVHAQLVRGPSKWKGESLGFWPAHCTSITINFVQCADRIFNPFQPSICILVPCFNG

SEQ ID NO: 929595 - protein, 146 aa, Homo sapiens
MISGGQAGEPSNGSLRLVSGRQSGPGLSPLRNNGSFSSSPPGLGLCSGGITVLLICDVTPIGPAVKFLSLYSFSVFLRPAKHLQKIERTYIEILGAGSSNNCVHSVLVEAKEAPRGWLLLFDPESYDQCMRSRAVPTQSVLHELTG

SEQ ID NO: 929596 - protein, 144 aa, Homo sapiens
MTTCLQKGATHCRSPESCFVSQLIKLLFSFFTLQTERAVTQTGLKHITLLTMLLARKRREELQPFREPTRRGSLSQGSDTLSGALWFLASPSFQAPLHPPSSRCGDQQWKPHAVHLVQPQLHTELAPVQMPGATCPGAAAKHGT

SEQ ID NO: 929597 - protein, 336 aa, Homo sapiens
MVGRWSLAQDPPPSTQESVCFLLPFMAPRLSSGKRERDSERAVNEVGKGGGGEEEEELEGDTAAVRDTIDGKSRYAAVRDTIGGKSRYCSCKGYNRRQEQIRSCKGYNRRQEQILQLDTIDGKSRYAAVRDTIDGKSRYAAVRDTIDGKSRYAAVRDTIGGKSRYCSCKGYNRRQEQIRSCKGYNRRQEQIRSCKGYNRRQEQIRSCKGYNRRQEQICSCKGYNRRQEQILQLDTIGGKSRYAAVRDTIGGKSRYAAVRDTIGGKSRYAAVRDTIGGKSRYAAVRDTIDGKSRYCSCKGYNRRQEQIRSCKGYNRRQEQIRSCLSKLFLPTPLPNK

SEQ ID NO: 929598 - protein, 270 aa, Homo sapiens
MKFPLITELAIKKIEDNNTLVFTVDVKANKHQIKQAVKKLYDIDVAKVNTLIRPDGEKKAYVQLAPDYDALDALVEPLQLLAPCSCYLRSTWGFGGLCSHVPEGQSEPKFRSPGDLQVPGDLLGGCIVNVQLVWHLWSGAVIQADSCGDCPARTLFTEPPSSIDSRSRPNQLDLSGQAVSLGAACAQGIVWIGCTLDLWERQPCSLLAQESAGTGVTQSKMESLGRWSLAAFCCSRTARQETFWALPRFWLYLCLLSGQFPLQIQKSVEV

SEQ ID NO: 929599 - protein, 180 aa, Homo sapiens
MPHPASAHSQCTAPTVLHPLSHKPQAQAATPENVEASTPTHFSQPVTEESEGTSASPFLPSEGFCIGSLFGDLVIGLGEKFSNLSCVSLTGTTIFPCCGFQIVSILSQASKQGLAAPESNKNAIKNYFSKFPVGTRIISKKDVQIIAQGKMTSDGDFAIDLTGKNSADLNLGKEINRNKR

SEQ ID NO: 929600 - protein, 136 aa, Homo sapiens
MKKISSAEEQLNDSFCVCLTVDSSDQSCEIKSERNRQTHQFYIMEFLHVVNHQIESPFPLSLHINPQADPHVSPYNPKMHMFSSLLCPNGPSLILSQMFLPLGILVQISKVEMVTFSICVLTSGLTIILLQVKSGI

SEQ ID NO: 929601 - protein, 140 aa, Homo sapiens
MTFGGRQLLACYWALVETEHLTMDHQVTMQPELPIMNWMLSDPSGHKVGHAQQHWIIKRKWSICDWAQAGPEGTSKLHKEVVQILTVSTPATLAFLPQHALMASWGVPHDQLTEEEKTRAWFTNGSDNMQAPPKSGQLQH

SEQ ID NO: 929602 - protein, 137 aa, Homo sapiens
MNIIYPEDKAAVRGRGPFNWALSQRNAEPLPMKVISLCRGALQLVVGFRGLLLTISYSGKPPLAPCQSWVGNCPMLLLSDLCRSYCFFDESQHVYLHIQLKGQPLLATLSPLHESGAHQLLLVSQSWHSPVACLDLS

SEQ ID NO: 929603 - protein, 220 aa, Homo sapiens
MRRPIYTQGRNNVATKRLDFAASRDSKGVQKTAKSYEEARKVPLYTPEGPLPCQQLESRKGSSIYTRGTIALSATRGKEGFLYIHQRDHCPVSNSRQGRVPLYTPEGPLPCQQLEARKGSSIYTRGTIALSATRVKEGFLYIHQRDHCPVSNSSQGRVPLYTPEGPLPCQQLESRKGSSIYTRGTIALSATRVKEGFLYIHQRDHCPVSNSNLDFRLPEQ

SEQ ID NO: 929604 - protein, 142 aa, Homo sapiens
MTYMAYNHLHWAVLGSFKHENIGFHHRGLGAHLVATGSHQKFQSKGAIQSAEGLGTPSVASGWIQEANLTPLGPRQQFLTVCSFIPSFKAADRKGRCQGNRLSQEADWSKHRQSHGRSVDRADQLVNISPGTYQRRKANSGN

SEQ ID NO: 929605 - protein, 157 aa, Homo sapiens
MTEGFLYPGFSPWCTRRIRSHPGLENECKVLLSGVPVFLLLLVLVLFLLPLPPPSSSSSSLFFLFFFYLFFLLLLSSSSYSFFFLLLLLLPPPPSSTSSSSSSSSPSSSLSSPPPSSFLLLPLLSPPPSSSSSSFSPSSSSSFFFLFFEIGLSAAGI

SEQ ID NO: 929606 - protein, 142 aa, Homo sapiens
MGAGWGDLMGQKATFWAQKKKCLSSFRSMGTDLRVEPLPGTLPFSTQHFPDSQVSLFDQSAAGGQRDLGLKDCLSDSPILNAWCSLQSSDHADVNSPSPPASIEQDLLPLPYTHYTSHLSVMPLWQSKSLMHYAFQNIREII

SEQ ID NO: 929607 - protein, 166 aa, Homo sapiens
MTLLRKNQLGESRQTEIEVLTLSHRFQATFDLKIGFPPETGFKSCFTSFVSCLASYLNSYTFTFLVCKMRIIVSLSLGFYINSRHPKCKVNFVKGRSERTIRKKATAVVGICPLQNTGVANVIVLRENVKDANNNILYVEDVQNKIWLCKKEKKEKKTLYQTYRKI

SEQ ID NO: 929608 - protein, 154 aa, Homo sapiens
MQQHLGTVDYVYDASKNYSLTEVMGAVCEALRQYGPGYLLSLMGVRLLSREDLGRSQRALGQSSRGSGNGCQEESWAVGIPWPSGQISSTCSKLLGEEVLEEPLAAAVEAFGVLVCWRCGWGLSHSGGKLLQLRNTLLLGCLYSIIVHLEGEVN

SEQ ID NO: 929609 - protein, 225 aa, Homo sapiens
MVGKGAWLSGLPHTEFPCVTGGTQGEEKFKPAAEICISSKESNINPQDCGENVSRPSQRPSQQPLSSQAWSPRRKKWSHGPVPGSLCCVQPRNLVPCVPAAPDVAERGQHRAWAVASECANPKPWQLPHGVEPAVHRSQELREVQKGNVGSEPPHRVPTGAPPSGAVRRRPPSSRPQNGRSTGSLHCAPGKATDTQCLPVKAVGERLYPAKPQGWSCPRPWEPTF

SEQ ID NO: 929610 - protein, 165 aa, Homo sapiens
MACGQILPVFLLQPFRLSIIFHSLRDHTHSFLESFKSVIQIQGQNAIPMKMLISYFSELDKSLVKQTSTNKEGKHCERKALRGGRYGCCCHRWGTHAENHCSRAFYELHFILIGSDPGQGSFEQLRIGKIWAIGCYGKAESGQPAKGIGGGARMKGLLETIASYL

SEQ ID NO: 929611 - protein, 134 aa, Homo sapiens
MTRRICGYKEKMLNRANHSGKWEATRELPTGTCKTCQPPRLTVPPASHTNGVVSEISPLLSPSPPCPFCSHPGLAATHQIAPASFSIQGICPSMSYPGAPEPAKYQTYGKLPETGHQPCVRQQASLPHSAPGFL

SEQ ID NO: 929612 - protein, 143 aa, Homo sapiens
MLKDGAPSCPFLTLPRECELQMFDVRRRIAFLVCSVHSTPQGILAGLRAEAAPLFLLASKECRWRLTSTLQFAFLPPTINVPTPSFHLRTAKNCSLPLSLKVMAAGPRRRKLPGSEPVEFRSGDFLRSLKTFLQMLRMFHYIS

SEQ ID NO: 929613 - protein, 170 aa, Homo sapiens
MICSSMLSYALVSIEVSSVPGCQLCGEKCCNSSLKYGLGITVEFIYTLTIADSCMQSGDTLKDSKMILKLLYFIIGIILNFSGKTVSQTKLIVAIAGTFSSNMYQVPLHQSQQRLEESSAQPGWQDQCCCLHMLQSLCSKLTKINSNVFEQIGFAHPQPINIPYPEQAPS

SEQ ID NO: 929614 - protein, 234 aa, Homo sapiens
MEKKYAFISSMKTYSKLVPVEWDAAEIIPEYMEVTLELVSAKKLVAFCPCHGDLWDFKLERDDLGYLVEEISKQQSIQEVTWMLSNAFSFINEAEHKSSENLQPDNKIVKKIPFSEGKFKLAAEICISNEGLNVHPQDNGVNVFRACQRSSRQGFPSQAWRPRRKKLFCGLSPGSFCCVQSRDLVLSVPATPAMTKRGQGTAWAMASEDTSSKPWHLPYGLAFLAACRCTDVKN

SEQ ID NO: 929615 - protein, 152 aa, Homo sapiens
MEPTPSAILNLKKSKVWKGSQTSESITVTVQIRNGGQIGLATCSGLHREEFQTTAVTLGLINFKCNLAMKLDTLTWKVMQYREGIHGLSSGTIYSVDIREMRKKQHSRLGRRGYEMTKGEVSLEEWKPWVREEATLWSLGVFPACGGMARTV

SEQ ID NO: 929616 - protein, 138 aa, Homo sapiens
MTGELGLTGSQLEEVTLAALDAFSAFSLQKAPHRAQERAIGDVGLFFQKFTGPRGWCFLEKLAWAKGVLEFPTLAQRKEYWNGSSSHSPNMSRSSGYHGRRLDLFCPERKLFKKTPPLSEAGDSNGKSRHGVSHMQKG

SEQ ID NO: 929617 - protein, 161 aa, Homo sapiens
MYGRTFVLGPPPLPDSEPLRNYLSSLIQTQFFIREVGDEAMPIPVDTSLSSQHNFFAGTDMFICPTLTQRLQLKWTGPYTVILSTPTAERVQGLPNWVHHTRVKLTPKATPSSKTLTAGPVPRCKTTCISSERQQEEAAGRQAAERHHPGRKTRTPEDLKI

SEQ ID NO: 929618 - protein, 194 aa, Homo sapiens
MKEPFLEDKEHSGWPSEADNNKLRAIIETDPLTTIREVAKELNVDHSMVVWHLKQIGKVKKLNKWVPHELTQWLDQEEVPKHFPTPKLHQKKVMITVWWSAASVIHHSFLNHGKTITSEKYAQQIDEMHRKVECLQPALVNTKGTILLHNNTQPDFAQLMLQSYEVLSHPPYSPDLLPTNYHFFRHLDNFLWGK

SEQ ID NO: 929619 - protein, 145 aa, Homo sapiens
MVQWISHFRPTHLSWEGPEDIPLTNASQNRFVRAAPASMNSPEIALLCMSDLTMGTMVTQLQNLNTMGIIGFQDGRGQVAALKRQRQGDVYEFKLTRSGLLRVNTDCQLDWIEGCKVLILGVSVRVFPEETGIQINMGKKQQLCT

SEQ ID NO: 929620 - protein, 139 aa, Homo sapiens
MGKKQSRKTGNSENPSASPPPKERSSSPPMEQSWMENDFDELREEGFKRLNYSESKDEVLTHGKEVKNFEKKLDEWITRITNAEKSLKDVMELKTKTRELHDECTSLSSRFDQVEERVSVMEDQMNEKKKYRERHKDTP

SEQ ID NO: 929621 - protein, 145 aa, Homo sapiens
MQEVGSHGLGQMCLCGFAGYSLPPGYHGLALSVCGFSRCMMQAVDESTILVSGGLWPSSHRYTRQCPTTARVAEMQGTKSVDCTQHGDPEPYPQNHFFLLDLWNLEVIAPVNLRNHTAILKRINAIKKQDNCQHEQRLKSSHTVV

SEQ ID NO: 929622 - protein, 137 aa, Homo sapiens
MWHPAAFSPLLNKSQREGNSVTAQRVLGSCPMTTKTENLEACLHPGEINSHVAHTKPVWWSLHTDASEIWCHDSDQGTSLGRSIPCPPVLCSVKKIHLRTTSGPQTHQPKEHLTNFKSETKETRFIRGPKTPALVTD

SEQ ID NO: 929623 - protein, 154 aa, Homo sapiens
MNSHKSSKPKNQIGSQKSLPSTVGELMSSNSWLRHTEEVGWRGAVEIADYGESTGAQQDLTRPCSDSKGQWELSRTAGNTCMSLKRTIRALVQIRKLLRQFLYREGHTKGYHQSMAERPRRDHALNTGWDTLSNRGEMEKVKREYYRCLHAKNF

SEQ ID NO: 929624 - protein, 157 aa, Homo sapiens
MRTAGEKSAPMMQLPPTGSLPQHMGIMGATVQNEIWVWIQPNYIIPLLAHPKSYVLTVQSQSCLPNSPEEFINPRDKSADFSKFYSDNHWLQDKQRKGDRKPAVIQVLLEACLVKQDSNVMTKKAKPWMNKRGNKKRMFLNPKHQKEDFICRPNEKG

SEQ ID NO: 929625 - protein, 262 aa, Homo sapiens
MSAKLSFKLQHQAHPRIIQQSQAGTFNPHTPIQYPQTKPQGFLQSQAGLHSLGFQTCQADSVSETGSTCESSLQTRTCTPNHQADSPYELKLLGNSCRCRLYSMQRYKEFLLAALSPIITSYVIEYVRKKGIAVSIMALQMYQLPNPQNERDFAYVMKIKDLQMRRLSWLIQKDMTGRQPPANRKESCHQEPDCAGTLILNFQPPVLLEINVDGLLYPVYGIFVTAAQTDSDEATRSNRELPFHDTMYPYTTTEHYSKNTTT

SEQ ID NO: 929626 - protein, 134 aa, Homo sapiens
MKMLCSVIFLGHFASRKSPAGDDPAQALPGLEFATRDTPSTQPTRLHLACAPGRFPQLPQLCAQLQAGSHCLQPHGPRHIKSSALCSTPAHGSEAGLAPPLLPVAWGGCLLQAEGRGPQCYSLVCTHIQWIPSS

SEQ ID NO: 929627 - protein, 142 aa, Homo sapiens
MVQGASEVIRQHQSSTAKLRRSGKESVREPWARVTGSLGVAARRVGQSDFQWVPSQLGHSLGGIPGCGHSLAQWPDFQHLKQNPGGGGPGGTPGHCGLDVLKFLCTGNVAGISLTVEASNCNSEICCYLAASILLLYTLKAS

SEQ ID NO: 929628 - protein, 189 aa, Homo sapiens
MYSMYQIKVMKVRSLLNLHCENLVGPLEVMPITNGYPSFKNGFPRGSSLTLAHIQPSAIRQYCHLSAPTIVTAQVETLRLCYIQGTTVAKYRQSFLFVFGKSDATWLYHHNHNVVSCGSMTEPKARICRLGINEDPHTSEEKIKTQKFKGIKMDTMLTSKLGNCLFCCVLEKEEALMEFSMSSAVHCSF

SEQ ID NO: 929629 - protein, 141 aa, Homo sapiens
MIKNQCKKSKNSKNQNVSSPPKDHNSLPAREQNQSENAFDELTEVGFRRSVLTNTSELKEHILYQCKEAKNLDKRLQELLTRITSLEKNINELIELKNTARELCEAYASINSRINQAEERISEIEDQLNEIKYEDKIREKI

SEQ ID NO: 929630 - protein, 139 aa, Homo sapiens
MVQPMAGPEVPQGASMSGSQHSDKGSAVAPQNSETTVTTELQRGVTDSARGVLRCGPPGSVTVLSHSRHLQPSERGRVTTHSVPLPRWASQPEACCCPFHCHYAAGSRFLFCDQKNEVRGHRFMTLRNHTILNVYYSSC

SEQ ID NO: 929631 - protein, 137 aa, Homo sapiens
MEIHGPYEKVWVMAVVRVEGVEVESLEEGLNPLLKTEWSNLTCPFRKPSGSILLLHKTPKPFCLLCLNFSQTLFRAVKAQSPAESKILFKRLWRGSPVKIVGTYFSFLASLNLCQLSDFRIGKDLEIVTEIIIPNIY

SEQ ID NO: 929632 - protein, 172 aa, Homo sapiens
MTISDYLLGMSTGTSHHLPHQPLNYVYAPGPQNSLPKQLQASYRAYAGLWHWFVLWRVPSAAGAVLSVDGALAELGCADWSATCWAPHGAGRRVGFGSLASMDSVVPGPGLSPCIIQLCDISSSCLNPSCHLDQIILISQLLTSLDATSTTALGHTPFSPPTLPRPLLCSPG

SEQ ID NO: 929633 - protein, 196 aa, Homo sapiens
MRRHIQEVDVVSDDDEENKVQKGSATCTRTHIQSAAESGSQRRQAGPSAPVPPFPVIKGSGPFTPLLHMHLWAPLASFMVTLSASLSLDFIPGQIYLCKGGRAYSLGLGWGRDVLCKGLVRFCTSSIVCTLEEEVTMGKAVLEPEFHSPHPLEGDSKAHSMTTWLRSFGVVQVGPHTLLSSLPTPKIVPGIIKLVN

SEQ ID NO: 929634 - protein, 141 aa, Homo sapiens [sequence omitted]

SEQ ID NO: 929635 - protein, 156 aa, Homo sapiens
MLYVHKGLSWSIGCKNCGKSIVSGPGSTVPHSKVPHGFPWLDCLCFLASIRGCSYIIPSLSPWANFNLVQPSIKILCCTYNSGAKCLYPMQEDSNQDEDQHEKLCLVAHLLPDMIFPDNLEEVDYLVGIMDCSSPGEERRDKSKAALGYEVLESKA

SEQ ID NO: 929636 - protein, 197 aa, Homo sapiens
MPRRLGRCLLQRWGPHGEPLLGHCGPETPHRVPTGILPSGALRRGPLSSRPQNGRSTYILHHAPGKATDTQHQPVKAARRGTITWEAMKAELPKAMGTPLLYHCDLNVRNEVKGDHFAALRFDCPAGFQTGFGPVAPLFSPISPIWNGCIYPIPVPPLHLGKPLEEVWLCQHLDFGPMIPISDFSPAELWKNNFILF

SEQ ID NO: 929637 - protein, 170 aa, Homo sapiens
MLPFLCPSVLIVQFPPMKGSRDPQRERKTVWCDSRPDSHMRKGNPLLLAKGGSEWARYPAGEPVLFPGNCGTHGLEDSTRPEVKPQKTAADLQKTDLIIERKTSRKRQQEHQQQTQKRPPQKPQPRSASSPSNDRNISPSRAQNWMADQMDEFSEIGFRRWVIQNYAELK

SEQ ID NO: 929638 - protein, 166 aa, Homo sapiens
MIFFLITAGCLHSSARDPLAPPSVGNGDLRSYIAPLFSSSSLVTFMETSDYIEFTKIIQYYLSISRSKFLIYVIFSISEKHLLTFLERTLCNIVKSYAMMYEIKGTVTEICQVEWCGNDSKILQQMKIKLEILKKNTEITKETSLIEKLRFKKRKISLNECFSSQI

SEQ ID NO: 929639 - protein, 134 aa, Homo sapiens
MSQEKEFHNRRQCHQLRQEQAIFTSSVVECHQLRQEPAIWMCTCRESWPLNQFPDFNQFTDSDTQNEGDASFEWDPEQEKALQQVQATVQAALPLGSYNPTDPMVFEVSVADGNAIWSLWQDPTESTPNTTVCF

SEQ ID NO: 929640 - protein, 129 aa, Homo sapiens
MRFGWGHSQSISDALLLTKDNTLLKCFNFIPNMFLGGTLQNSSNISSYHMKRTYFQHKLIVLMLSLVTRVTQCLPDFHTRNLIPLPPSFILYDLKVFTICSPYTRKKRIMLHLLEGKLTIYIIGITLHQ

SEQ ID NO: 929641 - protein, 218 aa, Homo sapiens
MIKSKVVRQNLINEKWDKNLLKDFDQNADSDMNNEVQAEVLSDGDEQHIGKWSKGDSSYVLAKRLAAMCPCSRNLWNFELERDDLGYLTEEISKQRQQFGSLHLDFRGCMETPGCPGRSLLQWCSPHEELLLGQCGRKLWDWIPHRVPTGELPSGAVRRGLPSSRPWNGRLSGSLHHAPGKATDIQCQSLKAAMNVVSHKATRAEPPKAFGGHPVSNG

SEQ ID NO: 929642 - protein, 130 aa, Homo sapiens
MSVTSSSSMDQCHFYLRLIMSLGSKHNLSGLQQVALYQPAFVSLPSILLGASGLHKMIAKASFSKKILFGKATVHHRSRTKFSDCSTEVKGLQLCFQAKLYQLLSLFCPPLILSLLEAPLVQKWSSTSYA

SEQ ID NO: 929643 - protein, 390 aa, Homo sapiens
MEKYITQFSKTKERIAKRGGNSWTVTSYWLYVTIFQNISNLRDVFYREMSKLNHNLSEVMSKLEKQHSSKVFVVKRLSSSSRRSLVISPPVRTSTVSSPLTSPTSPSTLSSKSKSESVSATEDLAPDAAQGEDNSEIKELLEDEEIGKEGSEASSSEEEEPLLTCNGPSQAQPSPIIESARSQEEVPPSSPALSPGGALSPSGHPLSSAAEVVLRTRTAGDKSEQSKKRASIQRTSAPPSRPPPPRATASPRPSSGNIPSSPPASGGGSPTSPRASLGTGTPSPRTSLEVSPNPEPPEKPVRTPEAKENENIHNQNLEELCTSPTLMTSHIASEPGEAKKMEDKENDNKLVSADSSEGQDQLKVSTVPDKSNLTAPEPQEEVSTSENAQL

SEQ ID NO: 929644 - protein, 134 aa, Homo sapiens
MTSKVTSLNDSPEEIFDIDNEAPVVHSPPDGRITKMVLNQGNCHNSHKFDFVNTTEKVPIDNMVKMCDGLIEGLEQCAFIQEREIMTVYKIKETSETATVVNEAEESRGNIFKSHSAECLLVPRRPTSWSFDFF

SEQ ID NO: 929645 - protein, 412 aa, Homo sapiens
MEHDGQGNRCGDETAMGSVMAPLVQAAFHRYHWSRCSGQELKRYIHSYDCLLDDPFDHDWPKLPELPGINYSMDEQCRFDFGVGYKMCTAWCYKGHCMWKNANQQKQDGNWGSWTKFGSCSRTCGTGVRFRTRQCNNPMPINGGQDCPGVNFEYQLCNTEECQKHFEDFRAQQCQQRNSHFEYQNTKHHWLPYEHPDPKKRCHLYCQSKETGDVAYMKQLVHDGTHCSYKDPYSICVRGECVKVGCDKEIGSNKVEDKCGVCGGDNSHCRTVKGTFTRTPRKLGKTRGAFTLPKGARNISLAETREAKNVLAIKNQATGHYILNGKGEEAKSRTFIDLGVEWDYNIEDDIESLHTDGPLHDPVIVLVSSTLNMDAVGKVIIKWSIAASIYNIFVIYFHSEILGGNGECEPDF

SEQ ID NO: 929646 - protein, 159 aa, Homo sapiens
MWRCDTSGIRVWVTPPAEVSAAGNKSKPGEAVPKLSKEDPRSPLWVDITNPLLAQMKQKGRRRANWLSLLELEHQSFHSLGPQSFWLVLGPANSRTYTIGFPGSQAFELGPKYTTGFPRSPTCRQQTKVPFLQGILTRILILVIRSSCMNMHLGLVGAL

SEQ ID NO: 929647 - protein, 139 aa, Homo sapiens
MPESPTPLLGRDILAKAGAIIHLNIGEGTPICCPLLEEEINPEVWATEGQYGQAKNAHLVQVKLKDSTSFPYQKQYPLRPKAQQGLQKIVKDIKAQGLVKPCSSPCNTPILGVQKPNRQWSILTAKGDLWLSDNCEESN

SEQ ID NO: 929648 - protein, 147 aa, Homo sapiens
MDTHGESGPGCSLVIEIPWKLKDGLMEGREGRRKGISPGKPGLQRNILDKLPKSHGFISFLETLTCFINCFFSKFSLFELLFFYSDRKYVYLIATNQNPYQHSTLSNYYQLIVVDVNCDGPKSKDGPTALALILKTRNCDCDGISCP

SEQ ID NO: 929649 - protein, 170 aa, Homo sapiens
MGSCAPLASPTSTTPCSTVPSPIDHPRAEECEGTAQDWQAAPPAAPVWDPLGEASWAPESAVTLTTKICSFTPEPSETTSPPGGMNNSRRAALRAVTLTAKVCSFTPETSETTRPPGGVNNSRRAALRAVTLTAKVCSFTPEPVRPRTHQKEETLNTSEHQQGQTPDAPP

SEQ ID NO: 929650 - protein, 155 aa, Homo sapiens
MPLSEHRSSIPLESSQLSLDIQQNSPQALELFMVLLKKPNVNSLHKVTLCLASDEMLGGITLNSSSWHHFHRQTFSDPELLEVRVGSLDPGCSQLTLHIAPLCSAVHPVLRDALASGVPVGLCLREAVSDKSLEGGRSQGCASSFSSRGGGGSSC

SEQ ID NO: 929651 - protein, 155 aa, Homo sapiens
MQFLLAHRSANLGNKDDLQYSLEPQPTPMSLVLQAACLQATSYVPPLGLVGSLPFSCPFSSGSMRILGNTLISIQLGECFTNVYDLVGICRQNRLLLLSMGQKRSSQTQLKEGRIYPDVIIGKGKTGVFLETKVSNSLIQQVMFEGLLLSSLFYT

SEQ ID NO: 929652 - protein, 172 aa, Homo sapiens
MVQQARLEGSGGVVRKGFYEDRVKRSRESSANRGEIIPGTEMSKCKGTVSSAGPRDRNREEVMGADRGTKQAKMQVEHFEQKYQSSDSMFSSLCPLRLQTNALCPITGDIKHEHWIKVISSRFPHTQDSASSPRSHESSQWRMAFTDHGKDVPTALEVSLLSDSQRTELGNR

SEQ ID NO: 929653 - protein, 157 aa, Homo sapiens
MEEAGGAGKVLCPRLGVQGRPLRPWLPPVAGSLRSSQRPVEQGFLEGGCSLTMSSVPAGSGAAVHTSHLSQYLRQREKGGEMRDRGERFTWGSCSRGKRKGVPRLSPMASFLVPTLYALPATPRAHERTDVSSSLKGKCRLSASALQPVPEKSTQQF

SEQ ID NO: 929654 - protein, 468 aa, Homo sapiens
MLSQRWAVKERDCYSVSAAKLLALTPVCCSSGITLTLGNQERDYILWSKCMHDTSGPVERPFPEAFSESACIVEYGKALDISYLQYLWEAHTNILRCMRDCRVWSALYDGDSPDPEMFLQSLTEEGSVSSACPVFGLPQQLPRKTGPQLAPRKDKSQTELEWDDSYDTGISSGADVGSPGPYDDLEVSGPPAPIDPPKHIQEMKKNALLLFKGSYIEESDFQDDVMVYRLCAEKDSEDMKDSQEEAARPPAEAQAEVQSVPINNGPLLSTQPETDSEEEWNRDNSDPFHSEPKEPKQEREPEAAPESNSELASPAPEAEHSSNLTAAHPESEELIAQYDQIIKELDSGAEGLMEQNYPTPDPLLLTKEEEGKEESKGEKEKEGKKELEDEEDDFDSFIAEMPAVETVPSPFVGRDEAAFASRHPVRTQSTPFTGDHLKLLCGFCFRKYLYILEQERKVGKGKGYYRFV

SEQ ID NO: 929655 - protein, 142 aa, Homo sapiens
MIGSTVGSKWGGVAKIGHYFFEMVDDNRRLRSGVAAEQEPGGESMAQEGEEGSPVASEAKGPKAATETRSVDSGGQCREQWVRYTWGVVRSGYQSWHVVCCYFACPTQVGCSGSEKEINKSLGLNSMERGFSSICTWEIEPM

SEQ ID NO: 929656 - protein, 179 aa, Homo sapiens
MALLVRVELGFKSRLSDSRIAGLKPVSGSGFWLPEASAGDRGPSVGRAAGCPGKLLSPEISKPGGLGNIWGDAEGIPAGGVGTGVRYKVTLSLEKSERETLTQEEIESNCLEVVSFLRIGESVTWGNMRHSQPVCPGDVGEKPPPPQLGTQHFPAKLGFGTAMDALANFFVSQEQLPGS

SEQ ID NO: 929657 - protein, 159 aa, Homo sapiens
MFFFIFGKFYAIVSSNISSALSLSYLLGFQLRDSTPPPYGRQTVSCVFGESSCPPPAVEDLSQHWCVKIYCPPSGAQGFCSMEVKAFAFPALAAASSSRSAFSGLPPLPQSYLEASGLNQTESEDLRTKMGVGDEGLLVVELWNSASDKEEMNRAKHLQ

SEQ ID NO: 929658 - protein, 213 aa, Homo sapiens
MEESLGWSRLGVESQLSSSPVHATHFECLQKTELSVEGQPKEDRSHRIWPRATCNMKKNAWPQCLFIRHHEFGVRYTDIRSVAISTYEFWGNTNIQTITPGRLCGGRAKQRGRNVLGDNQGQTQCPPAEVLVNTDTLGKRIAWWADKTQKLLNSVDQTLQGSAVNIGAAARKAGAIDSLSPSCPSDFEDKGLMHFSLRVVPQMRVCSSRSSVD

SEQ ID NO: 929659 - protein, 139 aa, Homo sapiens
MQNPKPYLVVLSVLSDSIFVHSRPHGLCSSSVFLPQGFAFVVSSTYNFISFNYLFGALVVIIVVKQDKGLGGRVVNFGISWKLEVRGLDRDGKSCPQDPEKDSKEQPNLTEGEKAKGAVCKNQISWSLASAKLLCVGRV

SEQ ID NO: 929660 - protein, 138 aa, Homo sapiens
MTCSYIQSAENVTITWLGATGNHSLFLQLSPYWRFSSSFLSLGPQLLSVSSMTPATPTRLLSCHVVRCSSSCMEEPMWKKTEHPSQPIFPYQECGKPPWKQTLQHQSSFQMLQPWAMTLLQSYERLSQNHPAKWLPHS

SEQ ID NO: 929661 - protein, 139 aa, Homo sapiens
MVAADSGIPEHLGAQEGLFALTASKVPACTAWLLPTVSTHSYPRVKSGLIPGTINRGRRKTDSWAEGGQGGPDDWSSGCQTHRLKWELVVPFARPAEMSELPAAERSYPSPGPPPGLSTRWDDLSTKRSYPLQVFSELS

SEQ ID NO: 929662 - protein, 162 aa, Homo sapiens
MLLAHHLSSSTRERRAEALQGAKTKEVEYLNMLMVRIKRSLVTIPKVYNPKDYGKSVYDYFMTEQKWEVLSYDLKFLPMAQGKQQNNRTLRKVQFSLTDCKVVNEIQGISAVKSCDTAGHTGMYDCMSWTCQKVNIPQGNPSLNSASKENLFLQLGSFHQPK

SEQ ID NO: 929663 - protein, 157 aa, Homo sapiens
MLLLAQKLLSSHTAISLLLLLPIQVAQRRKSEPKCGGKGVCMVCSWSCVGCRAYAGDPWRGNIMSKHKVESITHSDNKKQFFFCWITERQRGVTEDMPYSTSYIKKCQNENFSKGSVRRKTDADPEICFPNANVKQFEDVPLDVHFLKNLAAAVSCH

SEQ ID NO: 929664 - protein, 144 aa, Homo sapiens
MTPAPDASFQCAGSSCWCGEAAGPLSNWVSIPCKQKLEKLQDLLSRLVQSQTLLQCTHTAADPLPQLTVMKQQPDLQFPQFPLGHIIQLFPNSESVQRGMRKCNYFSMSNHHYISIAQMCKKYFIKFCGHLHNSPLLQISYDYD

SEQ ID NO: 929665 - protein, 179 aa, Homo sapiens
MIKMLIISSGILLTSAAEARKPSGLTGRSHSHKAKQAKNDWLEILTASRAVWSLAWMTEFGGESGNHHYCGFGRQFSPDSAKETGRFGLGRIHQSVAKRLWPDCFSRFFLIGQGISAGNPAVPVRGLQTELSSPWVRAPGGRDSCGFRFNGFNLCCLPFLKRVADPDEGDSPSTEHQLC

SEQ ID NO: 929666 - protein, 138 aa, Homo sapiens
MTTEMSFPRDHEPSRRKKPRTHLKEQIRDTPSLRVVTLTTKVCGLILEVSETKNPPEETNSGHGSLLRRNTKLIPSERQNSYYFEYISVPAPPCSSTYLYCDTVKANGNFSYMSIQTLQSSSGQDTSGTATVAYEKAF

SEQ ID NO: 929667 - protein, 137 aa, Homo sapiens
MIEYRQLQQILLTTSLISHYVTSKPNRHEVYIVLGEGWLSRPNLIMQVDFPVDWCHLVCFLLYTWLTKRREDGAAILKTSSPWFLPAFTRASSQLAGCSLLKNDLELFFIKKKGLTKYSHALAVCLSNSFLTPISSS

SEQ ID NO: 929668 - protein, 142 aa, Homo sapiens [sequence omitted]

SEQ ID NO: 929669 - protein, 136 aa, Homo sapiens
MLVAGKKWSDSGYVFKEELAEVGDDWMRVNLLGLKEKRTGKEALKEETRAHQHGRSAEPKERLSQETTPGWSTNSNSMDAAHAFLTRTIVKSLATLNIHKSFQFPEAFISLDCAKIRKIWLNSRDIWCFVFCFVSE

SEQ ID NO: 929670 - protein, 153 aa, Homo sapiens
MGCIHCLTSPMIIPEKWFPEKVLPVHMLSDSTLLPVTEYFHFQTLLIIKFVLWMATIQKTQETKSVGEDVEKLEPLCTVGGNGIKIHVQEMNMQIDLQGISPPSFRENSKGFLRTRPDQPVANVPTTCDLLGSLNLQTERRELIAILHLSPDA

SEQ ID NO: 929671 - protein, 132 aa, Homo sapiens
MNHILFRLLPLLCMFTCSLFSGTTSGPISTLLVSVLELTMAARSPGSFYCNMLSEGLNVTGILLDDEIDAIFCAQQLLPGLLFQMQGGTWWDAIGSWGWFPPCYSCDSDGVLTRSDGLKSDTSSLFLSLLQP

SEQ ID NO: 929672 - protein, 147 aa, Homo sapiens
MVRAKDDMNFKIPVLRVAKTKRKYCQLVQVGPLTQSHSLPQYPTSYPTWDNWCCSLFPLGQGSPQYHPFVVAQEDVTRKGSLSRPQERVLGSRARKNSGVQAQLTSINIKIEIFRLIKRERHLVNLRHYMGKDTWLTIGILTGETPG

SEQ ID NO: 929673 - protein, 135 aa, Homo sapiens
MITVQKRPTPKIQLPPTGPFQNTWELGLSLSLKTQGHREKYEQTGFELNKKSANQEEMQVPNRLLLFSLHLKNKKTLFLEDLKLTCSLELNHSYSAPNVRLEYQIHFCCKSSGTYNLLDSTCPTVSRTMSTSIHT

SEQ ID NO: 929674 - protein, 149 aa, Homo sapiens
MGGTGKAFQGEKRLFLPNSSVLICAGFCLQFPPVPVSFSTQLFTFLASEVLSGSQQPSTQQLRLALRFGQFSASTARIKQAKEGGKSRLAESSGLHLSLVLDVPVLKHQTPSSSAFGLLDLHQWFARGSWAFSPRLKTTFFFSAFLLFR

SEQ ID NO: 929675 - protein, 139 aa, Homo sapiens
MAGSSSRDRAECERANGSKLLKKPYSPAYGPRHQGLNFAGPSEKHVEYSLELPAGRGICPVAAFPLKMTLQQKSESGWKGDGSGTLILRASRQVPGYLSPAGSHTTLETHDIQVRYDHQRLENRYSATMYNNDNGLNYS

SEQ ID NO: 929676 - protein, 145 aa, Homo sapiens
MQKSPVFCVDLAGSCGPELSGSIFLSFSFPFWLGVFLYNVIFQDVLMGSMQEIMILKNLLNNFLYSTCYMPGTIFKHFTNTKLFVSPQNSYIEILTLNVTVLVVGAFGRIQILLTNIYPKRKGLHTGVESLSLNLSQTAKLGEGF

SEQ ID NO: 929677 - protein, 143 aa, Homo sapiens
MAALWNRKGGKLYVFKAEAQTQGCRQSLGEWITARRDSSLAGSLGQAEETRQRAPHTAPDMESERYFAPIYTPPPGEKKNSRSLLPGVTHLTQAQPILLILKLFSSRCFQILMRSPDGYCKIPVPLYTLSSLAHKQLFFYLQC

SEQ ID NO: 929678 - protein, 155 aa, Homo sapiens
MQQDKLTFLEENDKDLYILWRGPSFNVQMGLNELLGHGSGKLFLQDEKGAFNFDQETVINPETGEQIQSYKSKQEASDGLITITPTTGSDGHPDARVRLDCSKIRSGGKPALEGFLQRLQVLNEVHRGMWPESGPCTSGMRPLECFLTLRDKVLD

SEQ ID NO: 929679 - protein, 175 aa, Homo sapiens
MKTDYYGKLVPGVGHCYKHNMKMWKQLWNWVETRRNLQSSAAVPGHSCSGKATLNHQDNGDNSPGHLRDLHSSSFCHRSGNLGGKNGSVGLAQGPPDLCSLRTCCLVSQLLQFQSSLKGANVQLRLQRAQAPRLGSLHVVLSLQVHRSQELRFGNLHLDFRGGMETPGCLDRSRL

SEQ ID NO: 929680 - protein, 143 aa, Homo sapiens
MWGKEREIRLLLCLCRKKYCIPRYFIFFMAIFLDGFAGFFGFFGFLEMDFNFLLNLNVSSPSIQTLNSIFVISVTSDWLRTTAMELVYSYEEIHQKIKNMEKYSDLKRQTQKKKYGKVYKQYKTKLPGQFYTPKCMNFEAFIS

SEQ ID NO: 929681 - protein, 130 aa, Homo sapiens
MFRIVLLHVTVFILSWSISYQTKCALPTGRLLRFAGNQEKCSGLKREGVLVEVKEESHEWPHPLQPGENLLWYLLYLCFYNTRRVYPALTPMYGTKDLTEDINLESVIPPGMFLGYIWGCLPQATYVSKI

SEQ ID NO: 929682 - protein, 145 aa, Homo sapiens
MWKGEGTDCEPESGPTPCTKSAGAFIMDFPDSRNKFQLLLNYPARPWTNQHSFSHSEPMKAPESASQTRQLRIFRPPLRQRAIHFRSPLVVKSFSVTEYNSSLLCSLSGVRVPHSSWSQGKKLEPAKWQVRKGLSPFLLFAELWK

SEQ ID NO: 929683 - protein, 145 aa, Homo sapiens
MGKKQSRKTGNSKKQSTSPPPKDRRPSAAGLLEFARGPLQTLFAWVLAAVAAEQQIFVNRKCCYLIIPLEVLSQRSTQPYLQLCAGRTIALFKAVRQGHLSLQSLLLSFYLSVPCPQRWSLQRQAGLLKLWWGPPSWSFRAALFT

SEQ ID NO: 929684 - protein, 150 aa, Homo sapiens
MGVEDEDTRMKLKLERYLEGGSHNQRMSEKQMGRELQTVVQDLDHYVPIPSFMREKSSPILFKPHLFELFSNMQLNSHFKLEREASQKVIKIVQTKEDSGLGTVLSMEVLQKTTSPNVKPFLTAAYISDASFRDCEDRAIVAQPGTTLPF

SEQ ID NO: 929685 - protein, 159 aa, Homo sapiens
MEAMASFHDTSVQWSPFAFDIIGLEKFTITYIYHYNIIQSIFTTLKTRYALPICPSLPLPLGTTDLSTVSIVLSFSECHIQAAESISPSPDAVGPTGVLGVLKKGRHVVTSDSRNLELVASSISSVTKCYGSLKSIGVVIKLLASGVEPPGFKALLQTY

SEQ ID NO: 929686 - protein, 155 aa, Homo sapiens
MLNIGPQSLLASSLVSLCPAENASYVFYPQLASGKEVFHKPIIYGSANTEKSFSWQTNLLCYFFCDFVVLSFLLIISVKRFQGGTNQSPQLSHCYPAPLLTHHGDCFKSTWMSSSLVPRSPTISPATLQPGFEPHIWTPLAKTSSGLLELLLKGG

SEQ ID NO: 929687 - protein, 145 aa, Homo sapiens
MPRLGQAMSCKGWSEAQSSQPWGDVPPPPPPFPPGPARAPHRLSLFQALSPQKQSFVLEVLSGCLEYRKLLTVVVDAFYVEDGRLCLRVDHSRFEVICYLATFLLEELGFQLFCNIIKSQPVDKMCKVSHPYLPTRPRGPRVRSV

SEQ ID NO: 929688 - protein, 155 aa, Homo sapiens
MRTSRRRLRLQTPGQCARILGVLGPHLQFCLLTPQGPVLAVQKEPNYSQATSKTLRQDNESCAVEQDGEPGGKGTYGHILLQLQCARQNLLGSMQTDLGNAQRRYLCGNSVQGCVETLDRGSSLEDCPSGPDKHVSQQIPAQAGWILNCNKENLD

SEQ ID NO: 929689 - protein, 136 aa, Homo sapiens
MFTQELSRSHGVKSNTLEIYLVLYPSAAQLAIKVQDKVLPIYPPLSRGRQISSYGYRQHHRPTGRYDLALLQESLTNGNLTFSAFIMRSDLWQEVKGEKEMCKAVQCTLHPTSFNVSTIHSFSTMSKPGNQCWYNS

SEQ ID NO: 929690 - protein, 157 aa, Homo sapiens
MWLLVSLRFRAPTHSPHLKAGVRSGSCLRTSVPATALHKADTCASAWSYLSHHSSQCAWLYAVSGPLLLDQVGGTSPVGTNKIQTEVLLATEVSGWRSNTLRIPIDSIEKTLNDMMELKTVARELRDTCTSFRSRFNQLEEKVSVIEDQMNETKREV

SEQ ID NO: 929691 - protein, 167 aa, Homo sapiens
MVCLEFVPSDVRASPEFLPPSGFVVSLTSGVKLQTFAVSVTVHKGGRPELVIPPGGFVVLLTSGVKLQTFAVSVTAHKGAWTQRVSSSKIYCEELKKKTPTTRNGTPARCRCWRGWPFIPLSGPTHILLIGPFYRELIGPFYKELICPFYRELIGPFYRDDDFDYIR

SEQ ID NO: 929692 - protein, 139 aa, Homo sapiens
MFPHQVLWALLRVESCPYHLSKHLSLPAQVSMEVMVSPAAKISKVHVRNGPSSSVQLTHFPGVSWVQELVSVLVAPCRVPGFLPNQPNICVLPVSTLDSSPSKICLKCASLPNVPVSQWQILLVTASSEPFYLLVLISD

SEQ ID NO: 929693 - protein, 166 aa, Homo sapiens
MLWFFLDPEVISCPEFIPSSGFLVSLTSRINLWTFAISRWEYVLSHFGNSQCFACLAEFVAACGFFQRRCEFFWFSWYVPVVALTAENPGVESPHAVLSVQVGSCTLALHMGNPSLSAILGSEDSAFLLIAPLGSGSVETLCGDSNPTFPLCIVLVEFLHEGAPPL

SEQ ID NO: 929694 - protein, 134 aa, Homo sapiens
MSAAACSTAPSPIHRPRAEECGGTGRDWQAAPPAAPVDDPVAVTLTAKVYSFIPEASETTNLPGGVNNFRCLALRAVTLTAKVCSFTAEPARPRTHQKEENPNTSKHQKEQTADCNTHRKGLPLFQTLHQELMR

SEQ ID NO: 929695 - protein, 547 aa, Homo sapiens
MESPGGNDNYLTITGPSHLFLSGAETFHTPSLGDEEFEIPPISLDSDPSLAVSDVVDHFDDLADPSSSQDGSASAQYGVQTLDMLCGHDPWLDGARWGLLSGGLIMDLNHSIGTQYSANPPVTIDVLMIDMTSDLMGHSQLTTTDQSELSFQLGLSLRGGTILPPAQSPEDRISTTPSPTSSLHEVGVEDFWRQISSQKTVVVEAGKKQKFPKKRKKKDPNEPQKPVSAYALFFPDTRAAIKGQNPNATFGEVSKIVASMWDSLGEEQKQIYKRKTEAAKKEYLKTLAAYEDNQECQATVETAELDPAPPSQTPSPPSMATVDPASPAPASTEPPVLSPSIVVNSTLSSYVANQASSGAGGQPNITKLIITKQTLPSSITMSQGGMVTAILATVVTSWGLQLDPTSTATIQPSQQAQIVTRSVLQAAAAAATIKSVPPLTLKMQTTLVPPTVESSPERPMNNSPEAHTVEATSPETICEMITDVVPEVESSSQMDVELVSGSPVALSPQPRCVMSGCENPPIPVKSYLLGTCLRACFGNTSWASGSA

SEQ ID NO: 929696 - protein, 138 aa, Homo sapiens
MAKKLKTLKKKLDEWLSRITNADKSLKDQMELKTMVQKLRDECPSLSSLLDQLEERISVMEDEMNEMKQEEKFREKGIKRNEQTSKKYGTMRKDQIYLISQQKLYKPEESGGQYSTFLKKIIFNNCQNFISRQTKLHK

SEQ ID NO: 929697 - protein, 162 aa, Homo sapiens [sequence omitted]

SEQ ID NO: 929698 - protein, 180 aa, Homo sapiens
MSQSLDGRCSSSGATPQRALGTAWAAAPQGISYKPQQFPHGVRSADAQNASIKRLGHFSLDFRGYMEKPRCPGRSLPQGQNLHRKTSTRAVQRENVELEPPHGVPTRALPGVASVVEMRPLPSRPQNGGFIGSLYPAPGKAIGTQFHPDIILLGWRTRTWVKVQQTQRFQARKIDALEIL

SEQ ID NO: 929699 - protein, 138 aa, Homo sapiens
MESKRIFERTRMESSNGMEWNNPWTRMQSSSNGIEWNHRMDSNGIIIERNRMESSSDGNEWNHHRMEMKGNRMELSSNGIEWNQHQTEKNGIIEWNRRESSNGPEWNHLMEWNGIIHGLECNHHRMESNGIIEWTRME

SEQ ID NO: 929700 - protein, 2457 aa, Homo sapiens
MKLKWMDSSSDGFEWNHRIKLIEIIIKWNRMVSLNGIEWNHHQMEMNGIVIEWNRMDSLNGIRWNHRMDWNGIIEWTRKGSLLNGIEWNHRMVSIGIIIKWNRMESPNRIEWNNHRMDSNGIILKWNRMELSNAIEWNYRMQSNRIIEWTRMESSNGMEWNKSNGIIIEWNRMVSTPNGKKRNYRMESKRIIEWTRMESSNGMEWNNPWTRMQSSSNGIEWNHRMDSNGIIIERNRMESSSDGNEIIEWSRLESLSNGIEWNHQIESNGTIIEWTQVELSSNGIEWNYRMQSNGIIECNRIESSNGLEWNHRMEWNGTRIIERTRMESSNGMEWNNPWTRMQSSSNGIEWNHRMDSNGIIIERNRMESSSDGNEWNHHRMEMKGNHRLDSNGIIEWNGMEQSMNSNGIIIEWNRMESSSGIEWNYDQMESNGSSSNGIAWNHHQMESNGIIIKWNLMESLKRIEWNQSNGIIIEWNRMVSTPNGKKRNFRMESKRIFERTRMELSNGMEWNNPWTRMQSSSNGIEWNHRMDSNGIIIERNRMESPSDGNEWNHHRMEMKGMEMNGIVIEWNRMDSLNGIRWNHRMDWNGIIEWTRKGSLLNGIEWNHRKNHRMDSNGIIEWNGIEQSINSNGIIIEWNRMESSSGIEWNYDQMESNIIIIKWNQQQPSSIGIEWNCHQMEFKGNIIKWNRMESSLNGNEREFNGIIIEWNRMESTSNGKKRYYQMESKRIFERTRMESSNGMEWNNPWTGRQSSSNGIEWNHRMDSNGIIIERNRMESSSDGNEWNHHRMEMKGGSLLNGIEWNHRMVSIGIIIKWNRMESPNRVEWNNHRMDSNGILLKWNRMELSNAIAWNYRMQSNRIIEWTRMESSNGMEWNKSNGIIIEWNRMVSTPNGKKRNYRMESKRIFERTRMESSNGMEWNNPWTRMQSSSNGNEWNHRMDSNGIIIERNRMESSSDGNEWNHHRMEMKGMEMNGIVIEWNRMDSLNGIRWNHRMDWNGIIEWTRKGSLLNGIEWNHRVESNGIMIKWNRIIEWNYHRMDSNESNGIIIEWNRMVSTPNGKKRNFRMESKRIFERTRMESSNGMEWNNPWTRMQSSSNGIEWNHRMDSNGIIIEWNRMESSSDGNEWNHHRMEMKGNHRMYSNGIIEWNGMEQSMNSNGIIIEWNRMESSSGIEWNYDQMESNESSSDGIAWNYHKMESNGINIKWNQMESLNGIEWNQSNGIIIEWNRMVSTPNGKKRNFRMESKRIFERTRMESSNGMEWNNPWTRMQSSSNGIEWNHRMDSNGIIIERNRMESSSDGNEWNHHRMEMKGMEMNGIVIEWNRMDSLNGIRCNHRMDWNGIIEWTRKGSLLNGIEWNHRMVSIGIIIKWNRMESPNRIEWNNHRMDSNGIILKWNRMELSNAIEWNYRMQSNRIMECTRMELSNGMEWNKSNGIIIEWNRMVSTSNGKKRNYRMESKRIFERTRMESSNGMEWNNPWTGRQSSSNGIEWNHRMDSNGIIIERNRMESSSDGNEWNHQSNGINIEWTRVESTSNRIKRNYRMESKRSIEWTRMESSNGMEWNNPRTRMQSSSYRFEWNHRIKLIEIIIKWNRMVSLNGIEWNHHQMEMNGINHRMDSNGIIEWNGMEQSMNSNGIIIEWNRKESSSGIEWNYDQMESNGSSSNGIAWNHHQMESNGIIIKWNLMESLNRIEWNESNGIIIEWNRMVSTPNGKKRNFRMESKRIFERTRMESCNGMEWNNPWTRMQSSSNGIEWNHRMDSNGKIIERNRMESSSDGNEWNHHRMEMKGEWNHRIESNGIIIEWNRMASTPNGKKRNYRTESNRIFERNRMESSNGMEWNNPWTRMQSSSNGIEWNHRIESNGTIIEWTQMELSSNGMEWNYRMQSNGIIECNRIESSNGLEWNHRMEWNGTEWNHRIESNGIIIEWNRMVSTPNGKKRNFRMESKRIFERTRMESSNGMEWNNPWTGGQSSSNGIEWIHRMDSNAIIIEGNRMESSSDGNEWNHHRMEMKGMEMNGIVIEWNRMDSLNGIRWYHRMDWNGIIEWTRKGSLLNGIEWNHRMVSIGIIIKWNRMESPNRIEWNNHRMDSNGIILKWNRMELSNAIEWNYRMQSNRIIEWTRMESSNGMEWNKSNGINIEWTRVESTSNRIKRNYRMESKRSIEWTRMESSNGMEWNNPRTRMQSSSWNHRMDWNGIIEWTRKGSLLNGIEWNHRMNHRMDSNGIIEWNGMEQSMNSNGIIIEWNRMESSSGIEWNYDQMESNNRMELSSNGIEWYQHQTEKNGIIEWNRRESSNGPEWNHLMEWNGIIHGLECNHHRMESNGIIEWNGMENSMNSNGIITEWNRMESSSGIEWNYDQMESNEWNHRIESNGINIEWTRMESISNGIKRNYRMKSKRIIEWTRMESSNGMEWNNPRTRMQSSSIEWNYHRMESNGINIKRKKTELSNGIEENLRTDPNGII

SEQ ID NO: 929701 - protein, 504 aa, Homo sapiens
MKLKWMDSSSNGFEWNHRIKLIEIIIKWNRMVSLNGIEWNHHQMEMNGIVIEWNRMDSLNGIRWNHRMDWNGIIEWTRKGSLLNGIEWNHRMVSIGIIIKWNRMESPNRIEWNNHRMDSNGIILKWNRMELSNAIEWNYRMQSNRIIEWTRMESSNGMEWNKSNGIIIEWNRMVSTPNGKKRNFRMESKRIFERTRMESSNGMEWNNPWTRMQSSSNGIEWNHRMDSNGIIIERNRMESSSDGNEWNHHRMEMKGRIFERTRMESSNGMEWNNPWTRMQSSSNGIEWNHRMDSNGIIIEWNRMESSSDGNEWNHHRMEMKGNHRMDSNGIIEWNGMEQSMNSNGIIIEWNRMESSSGIEWNYDQMESNGSSSNGIAWNHHQMESNGINIKWNPMESLNAIEWNQSNGIIIEWNRMESTSNGKKRNYRMESKRIIEWTRMESSNGMEWNNPWTRMQSSSNGIEWNHRMDSNGIIIERNRMESSSDGNEWNHHRMESNRIMERNPV

SEQ ID NO: 929702 - protein, 501 aa, Homo sapiens
MKWKHHRIETNGITMKLKWMDSSSNGFEWNHRIKLIEIIIEWNRMVSLNGIEWNHHQMEMNGIVIEWNRMDSLNGIRWNHRMDWNGIIEWTRKGSLLNGIEWNHRMNHRMDSNGIIEWNGMEQSMNSNGIIIEWNRMESSSGIEWNYDQMESNEWNHRIESNGIIIEWNRMVSTPNGKKRNFRMESKRIFERTRKESSNGMEWNNPWTRMQSSSNGIEWNNRMDSNGIIIERNRMESSSDGNEWNHHRMEMKGNHRMDSNGIIEWNGMEQSMNSNGIIIEWNRKESSSGIEWNYDQMESNEWNHRIESNGIIIKWNRMVSTPNRKKRNYRMESKRIFERTRMESSNGMEWNNPWTRMQSSSNGIEWYHRMDSNGIIIERNRMESSSDGNEWNHHRMEMKGESSSNGIAWNHHQMESNGINIKWNQMESLNGIKWNRHRMNECNHRMVSNGIIFKWNGMESSHRIEWNYHRMESNGINIKRKKTELSNGIEENHRTDPNGII

SEQ ID NO: 929703 - protein, 323 aa, Homo sapiens
MKLKWMDSSSNGFEWNHRIKLIEIIIEWNRMVSLNGIEWNHHQMEMNGIIIEWNRMDSLNGIRWNHRMDWNGIIEWTRKGSLLNGIEWNHRMVSIGIIIKWNRMESPNRIEWNNHRMDSNGIILKWNRMELSNAIAWNYRMQSNRIIEWTRMESSNGMEWNKSNGIIIEWNRMESTSNGKKRNYRMESKRIIERTRMESSNGMEWNNPWTRMQSSSNGIEWNHRMDSNGIIIERNRMESSDGNEWNHHRMEMKGRIIEWTRMESSNGMEWNNPWTRMQSSSNGIEWNHRMDSNGIIIERNRMESSSDGNEWNHHRMESDRIME

SEQ ID NO: 929704 - protein, 605 aa, Homo sapiens
MEWNNPWTGRQSSSNGIEWNHRMDSNGIIIERNRMESSSDGNEWNHHRMEMKGEWNHRIESSVINIEWTRMESTSNGIKRNYRMESKRIIEWTRMESSNGMEWNNPCTRMQSSSYKIEWNHRMDSNGIIIERNRMESSSDENEWNHHRMEMKGMEMNGIVIEWNRMDSLNGIRWNHRMDWNGIIEWTRKGSLLNGIEWNHRMVSIGIIIKWNRMESPNRIEWNNHRMDSSGIILKWNRMELLKAIEWNYRMQSNRIIEWTRMESSNGMEWNRMESSHRIEWNYHRMESNGINIKRKKTELSNGIEENLERTRMESSNGMEWNNPWTGRQSSSNGIEWNHRMDSNGIIIERNRMESSSDGNEWNHHRMEMKGEWNHRIESSVINIEWTRMESTSNGIKRNYRMESKRIIEWTRMESSNGMEWNNPCTRMQSSSYTIEWNHRMDSNGIIIERNRMESSSDGNEWNHHRMEMKGRIIERTRMESSNGMEWNNPWTRMQSSSNGIEWNHRMDSNGIIIERNRMESSSDGNEWNHHRKEMKGNRMELSSNGIEWNQHQTEKNGIIEWNRRESSNGPEWNHLMEWNGIIHGLECNHHRMESNGIIEWTRME

SEQ ID NO: 929705 - protein, 146 aa, Homo sapiens
MNCTYEGSRLCAPYENLTPDDLRWKSFILNHQQHPPPHPIHGKIVFHKTGPCCQKEEDRNMWNSLELPRDLLNGFDQNADNDLDNEIHAEGVSDGDEELVGNCSKGDSCYVLAKRLMAFCPCPRDLWNFELGRDGLGYLAEEIFKQ

SEQ ID NO: 929706 - protein, 139 aa, Homo sapiens
MNQLSVKWTNQQDVGVTLIAKVCSFTPAPARPRTHKKEETPNTSEHQKEQTPDTRTLRTVTLTARDDRFVRDRWHTTALQSPDYFPQSNFLIKFFLTIYLPLSLSAPNSYLPDMHSDSSISSPFPLGRLIPYFNACDLF

SEQ ID NO: 929707 - protein, 144 aa, Homo sapiens [sequence omitted]

SEQ ID NO: 929708 - protein, 140 aa, Homo sapiens
MILRPRQPCGTHELLFIMDKVPAELLKECMFQMPKELSRQPSGLILEVVCTESCDVNHLWVSQPWIPVPVPVEVASRGIQWTLYEMVLFKSENSIAVPFNSCVKASLVLVYGKGFRYAEIFIPQAYRTAWSQSELVDQLP

SEQ ID NO: 929709 - protein, 164 aa, Homo sapiens
MVHVQALLLTSSGKLAWCLGQWVDLVSESMGMGLEPDSMGAVLDPEFEGVGLALRTIGMGLMADLQGWSWSTGLYRVLGAWKNCCENEDRRLTVSMKAPSFTTSCTQQDENKADLRILEHPIGKDQEKVLRSVGAQRDEEKGRDGDCDGDVLLRQKSAAIAKLD

SEQ ID NO: 929710 - protein, 173 aa, Homo sapiens
MEQLSAERGHSSSLLYYVLHSEKWVSVSWDVERGIFLRFGIEMVTKRIVMAVNNPDLLCHEYFWHKGHRNSSQDVLLLPQCLLIVPSPIVLVSTPAQCHNLAHMGQLLAGHFLHFSTGQYSPAQGVLFQLRSLTELALLLPLYQSNKKLSLETGQDLLHKSLLSLQNPKGSAP

SEQ ID NO: 929711 - protein, 167 aa, Homo sapiens
MAQVTPGVSCAAALEGTSNKPPQLPHPGSANSAGLQNAREVGMWWSPPRLQRIYQPAWESKQKLAPGVKLPQVVPTMAMSSGVLECSHCWVGPLAACNIHLGSYRHWAPTHLSNHLSCASSTALGADLPKALGAQPQPQVDSEYRLLSGKSLCSRKMGILGEPEKDD

SEQ ID NO: 929712 - protein, 422 aa, Homo sapiens
MGWPLCFKALAATVLLAEDANKLKLGQRLIIRVPHTVITLMEQSGHRWLSNPRMLRYQGLLCENPYITLEIVNTLNPATLLPIEWVEHGKPMLCGPGYDCCVEILDEVFSSRKDIKDQPLKDPDVEYFTDGSSFISEGVRWAGYAVVTLNSVSEAHPLPVGTLAQIAELIALTRALLLAKGKSVNIYTDSRGNRKVDREAKRAAMTEVTKKEKETLTMPLLELPLTEPPNYSANEKAWFEQKNGIYQKGGWWKFSDGRLAIPEAIAPPPQFIKQFHQGTHMEKTALETLVGWHFYVPRLIAITRTICEPLQGPTQPPGIQKTEATPCENLLVDFTKLPRVGGYRYRRFVCTFSGWVESFPTVTEKAREVTRILLKDIIPRFGLPLTLESDNGPAFMAENSTTVNADVKNQMETAYSLSPTEF

SEQ ID NO: 929713 - protein, 135 aa, Homo sapiens [sequence omitted]

SEQ ID NO: 929714 - protein, 149 aa, Homo sapiens
MTWMPAVILGSCLCLLKALGLYNQQVAKPAKPLSFASEQQTPLGPRQVQRKDCQTTIGVPSSPKALQSAFGKCCLAWYSPFRAVVFPLVKSRSRNDIQESSPGIMDPKGSPPHLGIATGYSGPKSSSVSSVRKESLLGLQAVLPGVGED

SEQ ID NO: 929715 - protein, 175 aa, Homo sapiens
MEYTYQDYVHGRTSPRAELSTRNSQKIGEHVRASVKGLGAIPLKIEHQDSAPELSTRNSQKIGEHVRASVMGLGAIPLKLTPISRTILKSRPMDLDFLKVILNTNLFFIVLEPGKSKIKLLALLSSGEGLLASSFADSSLLTVSSHGREHRERKQTLSCLFLQGHTFISVLSFSL

SEQ ID NO: 929716 - protein, 132 aa, Homo sapiens
MWDWSPHTESPPGHCLVELWKWGHHPPDLRMIGPLVACLQHEEATGTQFQPMRVAARAEPCKATVLELPKGMGAYCLHQSALQVEHGVKGEYFGALRFSDCPAGFWTCVGPTAPFFCPTFPLWSSNVYQMYS

SEQ ID NO: 929717 - protein, 176 aa, Homo sapiens
MAALQGLSQEIKAVENLTDNHLQAWFSASLQWFRTFSFSSDKFIITNRRKPSSLNSSKSFSFQLCFFAGPSAAGLLVFAGGPLQTLFAWVSPAEAAELQLLQNGKCCCLILPLEALSQRVIQLYERNVGQPLLGGVSQLGYLGIRDPLEEAICLFSDLKLHAWRTTTLFKVSDRDV

SEQ ID NO: 929718 - protein, 167 aa, Homo sapiens
MVDAPPPASLLPCSLISDCCASRPVGTLVDNSLNQSSSSGKGRKEIDIPMIQSLSFIPCSRYQEPDFCGLHHLYSLALWLANGGTSRSLMDRRRTKSEFYFPQVLVCVQTVAVFLYLKPQLLLQQSLSHHYSNCQVSGTTASLCRLPGSHPRLQTVKTPQITDSKNF

SEQ ID NO: 929719 - protein, 142 aa, Homo sapiens
MCGGNRPLIFQLDICLCRGLAEPPVPHLQSLMVERKLERLERNNRAACTSTSYQMRECVSSQKIHRILQKGSQSASLSGSQIPCLLTGGDPHHRGRKPPYKGVFPLASGQCPPRTEIPKEESGSHLCCSAACRHLQVQEKPR

SEQ ID NO: 929720 - protein, 155 aa, Homo sapiens
MCTITTYICKVQEHVCVHEQIYTYRHKHTHEQKLNEENDLVLFTLVPPNDVVPFWRLCAHQRCEGHPKMRKTASISYLHGQYVSSAVQIGVWACQCICALWYNIRDYRIADHILMFYSEISLKRVKNMKYFEESEDMERVSIQLHLTLVGMEKLL

SEQ ID NO: 929721 - protein, 139 aa, Homo sapiens
MLCLEYCYWLDSYGWLEAQAWRTCLLRRYENEHLHNCLTSFLVGLLLHAGDPFQSLVTLDFPAPGGIISKGCGTAKMATRSGSSIPGSTDLLLALTHLSIFGGLTTCFARVAATFAEKPRKPGYLRLPGPHVWLEKLLC

SEQ ID NO: 929722 - protein, 232 aa, Homo sapiens [sequence omitted]

SEQ ID NO: 929723 - protein, 141 aa, Homo sapiens
MGASLDQKRSRHPARSRGVEVNSGSATMAISSGGRRAIAQLRLEQAGSRRMPDGFLIKRENRENIIDLIVKAMMVSLHTLALEFLHSLFLSSKTFFPEYLVASHLLQYINKKIARGGKTNAKHPFDELVEEFQDQDLMIFD

SEQ ID NO: 929724 - protein, 187 aa, Homo sapiens
MNPPEGTNNSGRATFKSYNTHCKARPRTHQEEQPTLDVPPLRAVTLTVKVCSFTPEVSKTTNPPGGTNNSRHTIFESCNTHREASLQWVRTSSFSSEKFVITYLLKLTSVNVSKSFSIQLCSIAGKELRSSGGEEASGPSAAGLLEFAGGPLQTLFAWVSPVEAAEQQILLPDPSPGSFISEGHPAV

SEQ ID NO: 929725 - protein, 170 aa, Homo sapiens
MHVYATSPPVAVHVHTTFHMHLVPAADHDSAEGNCGVGALTQSPHWGTALWSCEKRPPSYKPRNGRSTDSLHHAPGKAVDIKCQPMKAARSGAIPCKATEAELPKAMRAHLLHQCDLDVRHAVKGDHFGALRFDCPTGFRTYMKPVSPLFWLISPISNGNIYPIPVPHCI

SEQ ID NO: 929726 - protein, 147 aa, Homo sapiens
MIHTTFSYLEKVPSLRYVFISSLNADHYSKLVPGEWSTAEKTHENMKATLELATAKRAQGTAQAVASECASPKSWQLPHGVEPASSQKSRIEGSAEGKCGVGVCTRVPAGALPSGALRRRLPSSRPQNGRSTDSLHCAPGKATENAS

SEQ ID NO: 929727 - protein, 155 aa, Homo sapiens
MASFSHHFNFLFPCSHLLLVTLISSYKDPFDYIESNKIMHYNCLISRFLIATTKFTLSYKAIFHRFWKKKARICFSHLLFNIILEVLANAIRQEKKCLSPTAMILRSLQPCGTSLTPSPRLELSGIISIHHNLPGVQAIPLPWPPEKLQTLNARL

SEQ ID NO: 929728 - protein, 171 aa, Homo sapiens
MPKRKVSSDKGAAKEEPKRRSERLLAKPAPEKVEKKLKRAAGKDISSDKKLSFRLLSTTAVCCRRRPAADFYPSGSSRVSAALLIQSTVDTLPDPEGWKSVAGLPQQQTAVVDGERKLSSSRNKHGPEESAAARFNRTKTELPYNERGLKEACTNLLTLLLQQSSLNLFWF

SEQ ID NO: 929729 - protein, 176 aa, Homo sapiens
MAVTFAPVNVTTEVKSVEMHHEVLSEALPGDNVDFDVKNVSVKEVHHGNVAGDSKNDPPMEAAGFTAHAGCAPVLDCHMAHIACKFAKLKKKTGSTSGKKLEDGPTFLKSGDAAIVDMVPGKPMCVESFSVYPPLSRFAVCDMRQTVAVGVIEAMDKKAAGAGKVTKSTQKAQKAK

SEQ ID NO: 929730 - protein, 164 aa, Homo sapiens
MLGRAALLLSGKVFGVTSASGLSSPPPPTGPLSPTARTPTLKRCIPEALSSAPMLGLSVCAILQWGHAPRVVLPLPLVSRHCLVDTQGELAAGDKLSSRALKADRSRRKGHWTESVHKYLLRSYYASDTVQAQGCAEDESNNIPKLCHVGGCVMLVGERQRRVR

SEQ ID NO: 929731 - protein, 155 aa, Homo sapiens
MRLPPHCFKMVAWAPAIMCQLALLWFSSVEDVDHPGNHLQLTEETLKPTRPVQTGETPVPEDSPYGISGSLMQWGPSAETGISVLGPLLGKQSLGTFQALVPWQGASRVTHLLSVCSARPLPPLSMRNTADNAQLQGPSLRILGKQREAEDCRET

SEQ ID NO: 929732 - protein, 141 aa, Homo sapiens
MSIRSIWSSVEETKSQLNTTGIRTSIVGSWYRATSFVLWTLELKCPWRSCGFLLPESQRSVARAGCSLPVQLTPSPGDTEGQERVPVCDSPVQDPQLPPFALGLCPPSVYPQCLPSKDLLRVCQSSRFLGLLMADVPPGCL

SEQ ID NO: 929733 - protein, 139 aa, Homo sapiens
MQILGLLRLHNFFCLEKPPFGNHVLLCLVLVESICYISMWNFYSFFMSNTVFPMVFTGQFSSSENVETWEYIIRNHFTENKNLSSNMSAQCHCETAENPCEDKTHLQTRKRALTKCQTPSAAETLFLEFAASITVGIEQ

SEQ ID NO: 929734 - protein, 157 aa, Homo sapiens
MLNIGPHSLLACRASAKRFTVSLMGFTLWVGEVLLGNILKSVFQLGSILPVTFRWGVWADVFFDVELPGAFVYTVRGKPPTQASEMADTSPLTKLEHPRFTSDCCAGSKNFKPVDLSLLGSMGVGPTEVDDLAPWLPPPFQGSEQFCLIGIPGATGL

SEQ ID NO: 929735 - protein, 176 aa, Homo sapiens
MGQRKVHSRHKALMKASNILLTLQNLPFSYMDDNSNKTPSQKETQDPSPDSEFTSALNLDYPKSKVLQNCERRCKGNGNEDKLKIVSIWRSKEERENESEISQYPCLAGLCRVLVHNVQDTSALKSVVVLQQLVMKGIKKALRQFPELIDSQTESSMIEKDFRSLDKEPFNATTSV

SEQ ID NO: 929736 - protein, 210 aa, Homo sapiens
MQKLDLKNASSPVKDHNSSLARGQNWMGNEFDEVTEVGFRRWIINSSKLKEDVLTQCKEAKNLEKNLNDQMELKNIAQECHEAYTSINSQIDQVEERISVIEDQLNEIKCEDKIRGKTMKRNEQSLQEIWHYVKRPNLHFTGVTESDKENGTKLDNTIQDIIRENFPNLAREANIQIQEMQRTPPRYSSRGAIPRHTIVRFTKVEMKEKC

SEQ ID NO: 929737 - protein, 139 aa, Homo sapiens
MVTEQYFEILTEDSPHPNPPPPYPASTLIPATNSNNNTPTRHPHILRPWAIWEPQRVGDTTNHSGEEHEVCQKPMIKQIPDPTTGLQPPQPPRSAQHSDLNPQLNLPQGLCWGHRPLLLIIHSDDYQRPATHSCYPTSS

SEQ ID NO: 929738 - protein, 137 aa, Homo sapiens
MRYRRQTDVGSMTTGITFTGRNQLLGNTCDTNWSQPHQNVNAAGRSPQPMMGAELVGDYSSDDPIDYVTHMAFRLQLHGAPSKMSPEFLLPQGLSITLVGSLSSIVNLRVPLSLESRYFSHVFYRIVTLIVVLRRDE

SEQ ID NO: 929739 - protein, 139 aa, Homo sapiens
MSNSPLARVGPNALSMHGHWLSPEGQVLLRLLRPSSMPPGRIRPKREAMITVQYSIPHPSPPVSPQYVFWKKVTEDKRGESAGAVKEDAANEYHLNRDMKKRGRRTERWGHTQKAEQVQRPLRLVMFEEQQKDWPGIGQ

SEQ ID NO: 929740 - protein, 173 aa, Homo sapiens
MLNGFDQNADSDIDNEVLAEVVSDGNNKFIENRSKGHSCYALAKRFQRMYGNAWMSRQKFAAGTDPSWRTSGGAGQKGNMGLEPSHKVPTGALPGGAVRRGPPSSRPQNGRSTDSLHHTFGKTSGTQCQPIKAAVGVVPCKATGVELPKTMRAHPLHQCAMGVTGGVKKILEL

SEQ ID NO: 929741 - protein, 144 aa, Homo sapiens
MSVPFFTGPFLSKQSNNSLPSVFITSPFLHLFQNSHNYNHPTNMLANVSASVAFRSPLQTYVNAECSHRALFVPYGKGHKVSLSWKLIQNQRIQRKNTREEKERLFHEIRKGLISSQKEWYQLLLVPLVEFGCESIWSWTLFGW

SEQ ID NO: 929742 - protein, 142 aa, Homo sapiens
MVPEQSSCQSAAWGLKISLYWNSASLNEEKDTEGFRNEDPKKQGNLCISMLFDKVDSCGEVCEDKYDLMATKEVSANTVVEAHLASLRRNKMPSRAGAQGIEFIEDKVRELTGSHTSYRDLQAIIVKTLVLKMSEMVDIGEF

SEQ ID NO: 929743 - protein, 147 aa, Homo sapiens
MLKGRSTGSCSGHWRYAGSASLVCTLRHMYPLCTPSFLQPQISIIMQMANSKMWLPFNRLIQICLNFTWAQSQTPAKVLCNPTKSEVSYNVQRHRNVKHRVMLREILVSGASMNELRSSGRSGQKCWKGNNQCGFVYRKLMAGFDFS

SEQ ID NO: 929744 - protein, 148 aa, Homo sapiens
MKRSKAERTHVLFFIWIFDVCLEKANRKMVTEREREEQCCSRIAWVKVKIQEVGDLDYETCVSDGRKLRLQSWRHPQLRGAKWEQNGHSYEDGLSPSVGLYVHHRTANNGKDVESTQVPINGGLDKENVDARANDDQLDLSFYSRSLS

SEQ ID NO: 929745 - protein, 193 aa, Homo sapiens
MTAPYLLQQDERNDHEPGKLAKLQAQVRIGGKGTAHRKKKVFHRTATADDKKLQFSLKKLQVNNISGIEKVNMFTNQGTVIHFNNPKFQASLAVNTFTITGHAEAKQVTEMLPSVLSQLGADSLTSLRRLAEVLPKQPVDGKAPLATGGDDDDGVPELWRILMRLPGMRQAELSRLLKKIKLEEVTGSCYFLL

SEQ ID NO: 929746 - protein, 141 aa, Homo sapiens
MSLSDSFEESSGSPTRYSSETKLPEERSGSNICCSPISAVLQPPLLIPRKTGSGVDLQQTPTDLQLRVLTVRRKTNKQKGHPHQNPICIKTGNAKNQSASPPPKERSSSPAMEQSWTENDFDELREEGFRQSSYSELKEEV

SEQ ID NO: 929747 - protein, 152 aa, Homo sapiens
MLSVSLMGFPLWSGHSSIQLMQFAGGQVQTLVALVFPVPGSITGEGCETAKMAACFFFWKLCLKENHFPNHKSRDFPTPWRTRAPDIPLYYGPDQNNTRTLGGWDIFLFGAKSSFLSSYVPLPAEERLCNLWRSAPADALLLLGSVSQTESQ

SEQ ID NO: 929748 - protein, 161 aa, Homo sapiens
MGLGATEQGTALIGEALAACRSPWRKGGSGKAGCRSRALPRREAAETRREFERSTSGLALLGDLVHPPQLLAWVLSPSLPRASNASWPLQVWSPPSPCPPGTRTGLPEGASSGLGQPREGLPQCSSRLKGSSNAASVGTEGEEATRVSEGCQHSVTSHKHK

SEQ ID NO: 929749 - protein, 142 aa, Homo sapiens
MLCCLEISSVRYPKSSLSNSKLHKSLGQSIENSTFLYGELDPIHVTSYVVELLDLFIILKETEMTLSGVECAQINTMLSPCAVMKSNIFKHLIFIFTSTCLFIFHCLHTTCLSDSSDSSELRMEILLLKILQEGPEHHLVWV

SEQ ID NO: 929750 - protein, 382 aa, Homo sapiens
MPIPQHPVDLLRTRALFSSPFVADTVLDTAAAYNLGPNQQPLKLQQTLCQRLLREDIQETLCQRLLREDTQQTLCQRMFRGDTQQTLCQRLFREDTQETLCQRLFRGDTQQTLCQSLFRGDTQQTLCQRLFREDTQETLCQRLFRGDTQQTLCQSLLRGDTQQTLCQRLLREDTQQTLRQRLLRGDTQQTLCQSLFRGDTQQTLCQRLLREDTQQTLCQRLFRGDTQQTLCQRLLREDTQQTLCQRLFREGTQQTLCQRLFREGTQQTLCQRLFREDTQQTLCQRLLREGTQQTLCQRLLREETQQTLYQRLLREGTQQTLCQRLLREGTQQTLCQRLLREDTQQTLRQRLLREDTQQTLRQRLFRGDTQQTLCQRLLREET

SEQ ID NO: 929751 - protein, 183 aa, Homo sapiens
MQSYHQDTSPVYCVTFSCPCSATTKAQPADGFSQCGSRECEASGFARTQASCLRHWAQGAPFSYKIRPRVVEPSPLHPPAASTRAGAGIHGWETHRCFTSQDSADNPLYQPIAWQTCWVARPRREKTITAVRLSRSHIPRKRGRVLHQGNTHGTKDSEQQPSAPDLPSDTAYTNEKEPENQLW

SEQ ID NO: 929752 - protein, 157 aa, Homo sapiens
MNFLPQSGRPRCFPEIASGRTLEAQVWVDGLGNLVLQALEGQLVQKQLCGLLVPPGFVQRQGAKPVPVRLLDPSCSQDPLAGDFGGQGLPGGLPGGGFVVSLPNASHGVGLWPLPCHWAEPGELEAVLVPDSNGGEAVGRIQRVCVLGSMQKMLPYT

SEQ ID NO: 929753 - protein, 264 aa, Homo sapiens
MRSITGSSVSENAAIAMAGIAKVFVGEVVEEALDMCEMWGETPPLQPKHLREAVHRLKPKGLFPNSNYKRVMQTGVSAEMFAIPRGLKGCNEDGIPEALDGNLEEPRAQECELRSEDVMDLTVVDNEASASAPPAAKRQKTDTKGQKERKPSVDAEEAQRMTTLLSAMSEEQLSRYEVCRQLAFPKALVARLMWSITGRSVPENMAIAMAGIAKVFVGEVVEEALDMCEMWGEMPPLQPMDLREAVCRLKPKGLFPNNYKKVMF

SEQ ID NO: 929754 - protein, 135 aa, Homo sapiens
MAGGPGWEDPPHKEQWIGVLLKEAVWLHSGKAAVLCWGHPTSSRPFGLSKAHRPKQPTADVLARDPEARICKAPGSLYMFEQLLCGDSTQLCASDPRRWRHGPIRGPPDPQIAKIHGRSVVSRGHAITHCFPPPG

SEQ ID NO: 929755 - protein, 153 aa, Homo sapiens
MSEGQVVGDVATEVADEGFGIYSELEQIIDKDESKKNTLQAVTIIHGKDDGGSPSSTILMHNSQIKTGLGSRRSRHQQIWCLEEMRQRKSFLPRSLLNQKQVSYFLDTMRVQPLGKYSHSKWEKLAKTKGLQAPCKFEIQQGSQILKLQNDLL

SEQ ID NO: 929756 - protein, 152 aa, Homo sapiens
MIRQLNLLFTKIRCSAATAADTQANRVRQGKLTNRTPTPKTHLYITIIKDQKLIKPQRWGENRAEKLETLKSRVPLLLQRNAEEIQTNSKEVKNFEKQLDECITGIINAEKCLKYLMELKAKFRELREEGRSLRSRCNQLEERVSVMEDEMN

SEQ ID NO: 929757 - protein, 137 aa, Homo sapiens
MIPFNFCQSDGYQVQVEVPYPKCLEPKVFQILFWNICITLWASCGPSRHFQQYLYATRERISRKNYRDGDVAEPATDKNPSDTKLWNERALFSWEHPRTHVSKNRAPRIQELTPAGCPLIQFNSNTTYLKIVSDPMG

SEQ ID NO: 929758 - protein, 189 aa, Homo sapiens
MEWNGMESLNGPEFSHDQLESNGIFEWTQFKSSWNASEWNHHRMESNGIIIKWNTMESSSNGIKWIHHPIMESFNGIEWNHHRMKSHGIIEWTQMESSSNRIKWNHRMDSNGIIIEWTQKELSNGLEWNHHRMDSNGMIERTRMESWIGLKWNYRMGSNGIIEWTQMESSNVIDHNHHRMESNVIIKWN

SEQ ID NO: 929759 - protein, 311 aa, Homo sapiens
MDSNAIIEWTRMESSSNGIECNNRMDSNGIIMEWNRMESLNELEWNHHRMESNGVIEWVRMESSSNGIMWNPSSNGIKWNHLMDPNGIIIEWNKMESSSNGIIIIEYNRVESSLNGMEWNHLMDRNIIIIELKHLLYPNRIIIECNRNQHRMESHGITKWTRMESSLNGIECNHQMDSNGIIIEWNQMESLNGLEWNHHQMESKGIIEWTRMESSSNGIGWNQRRDSKGIIEWTQMESSLNGIEWDHRMDSTGIIIEWNRIGSSSNGIEWDHHQKKSNGITEWTQGNDQMDANGIIKWNRMESPNGIEWSY

SEQ ID NO: 929760 - protein, 199 aa, Homo sapiens
MDSNAIIEWTRMESSSNLLEGNHHQIESSGIIKCTRMHRMESHGITKWTRMESSLNGIECNHQMDSNGIIIEWNQMESLNGLEWNHHQMESKGIIEWTRMESSSNGIGWNQRRDSKGIIEWTQMESSLNGIEWDHRMDSTGIIIEWNRIGSSSNGIEWDHHQKKSNGITEWTQGNDQMDANGIIKWNRMESPNGIEWSY

SEQ ID NO: 929761 - protein, 251 aa, Homo sapiens
MESSSNGIECNHRMDSNGIIIKWNRMDSLNGIEWNHHRMESHEIIKWHQTESSLIRIKWYHLMDKNGITIECNRMDPHRMESNGIIEWTQIESLTKLNGIIEWTRMESSSNGIEWNHCMDLNGIIIKWNRKESWNGIERNHHQMEWHGIIKRHQMESSSKRIKQNHPMDTNGIIIKRNRMETSNGIECNHHGMESNGIIIKWNRKEPSNGIELNHRWNHHRMESNGIIIEWNRMESSLNGVEWNHHQMESN

SEQ ID NO: 929762 - protein, 274 aa, Homo sapiens
MGLNGVIEWNRGESSNGFEWNHHQMESSGIIEGIRMESSSNGIEWNHRIDTNGIITPIESTNEIECNHRMDWNGIIIKWNRMELMKGLERNHQKDTNGIIIEWNQMESLNGLEWNHHQMESNEIIVKWNRMGTSSKVIQWNHRMDTKVTIKRTRMESSNGIEWNHLMDSNGIIKWTQMEDSNGIIIEWNRMESSSSMIKSNHQMDSNRIIKWTRMESSSNGIIEWTRMKSPLNEIKWNHRMDSNGIIIEWNQMESSNLLEWKHQVELKGIIKWT

SEQ ID NO: 929763 - protein, 149 aa, Homo sapiens
MCSVQAQVPKELWSSVKMLLPQTLVGHKPPGEGACHTTQGGQAPGEGVCYTAQGHMGKHQEAGGAGGKCGSSLWFLQEEMVKVGLSTSSGKYRPLINGMLLRMQLSAGSFSEVGTEWGQRLPKGVIQVLGALNKELDKTHKQTNKRMKH

SEQ ID NO: 929764 - protein, 116 aa, Homo sapiens
MDSYICMTEEASQSWRKAKEEERHILHGDSQENVCRGTALYKSIRSSETYSLSYKQHGKTCLLDSITSQREEEVEVEVEMEEEALAAAEEGEGEGEEEEEKKEEKKEEAADTAWQD

SEQ ID NO: 929765 - protein, 145 aa, Homo sapiens
MVLSKCLPWTKVKMMMLENAEQTVLRSILTPVSTTSQNHDLRQMQWQLNRPCEASEQCLKHSEDRNSGTNTPVSTELAPASASWKHCKSACSYSREMTTVRSQRRGKQQPWASRKAEADAWNHPEVFYHRMCNFDFHTQNGLNSG

SEQ ID NO: 929766 - protein, 214 aa, Homo sapiens
MERPHEGSQIRTPAEVPAYNQYQPPDIKTVWKRLNILGEKLKGKKQRLQPAQLKKKVESAEQVACEDASLAAGTKRHKLGGSKHSEMVLSQTHGHGSSKSELKVLAGLCSLWRPYGRALPRLQLLVASMANTILVFAAPRTQMYTVFQQRLHKYSGPEELGIFEEHQGGQCGIHGKDRGRVGDELTLRLHLPLKLNLFAVLLWCFLASGIISKG

SEQ ID NO: 929767 - protein, 1092 aa, Homo sapiens
MGQTEKPFQIEEDSVSVFDASESCVIDCEEEAGTEFKKGMESTHCKNAVEPVLAWSMQNVDYNQLQEVIYPESSKLGEGGPELFGPSEFRPRWPPTPSPAVQMPLMSQSQMPIQAQYPQYQPVENKTQPSVVYQHKPSAVFQYPPSPEVQYGSQAVRPVPNSKALYQQPKAMAFDLTVPPSGQGSALHETIATARKQGDLEAWQYPGMLQTMPAGKGSQARASIRQGSKEPYPDFVARLQDAAQKSIAEPPGLCPRCGKGKHWAKECRSKFDKNGQPLSGNGEEGSAPGPATKWGIPDSAICSSGFSGTTTPTVNTTISGNQPITIRQLSPATAGSAAVDLCSTQMISLLPGEPPQKIPTGVYGPLPEGMVGLILGRSSLNLKGVQIHTGVIDSDYKGEIQLVISSTVPWSANPGDRIAQLLLLPYIKIGDSKTETGVFGSTNTAGKAVYWASQLSENRPVCTVTIQGKQFEGLVDTGADVSIIALNQWQKNQPKQKPVTGFVGVGTASEVYQSRWRMLTDLRAVNAVIQPMGSLQPGLPCPAIIPKDWPLITVDLKYCFFTIPLAKQDFEKFAFTIPAINIKEPATRFLWKVLPQGMLNSPTICQTFVAQVLQPVRDKFSDCYIIHYVDDILCASETRDKLIDCYTFLQTEVANAGLTIASDKIQTSTPFHYLGMQVEERKIKPQKVEIRKDTLRTLNDFQKLLGDINWIRPTLGIRTYPMSTLFSILRGDPDLNSKRTLTPGATKEIELVEEKIQSAKFLKLTTWILPKITRQKPLENALTVFTDGSSNGKVAYTGPKEQVIETQYHSAQRAELVAVISVLQDFNQSINIVSDSAYVVQVTKDVETALIKYSVDDQLNQLFKLLQQTVRKRNFPFYMAHIRAHTNLPGPLTKANEQADLLVSSAFMEAQELQALTHVNATGLKNKFDITWKQAKNVVQHYAQCQVLHLPAQEAGVNPRGLSPDALWQMNVTHVPSFGKLSLVHVTVDTYSHFICATCQTGESTSHVKRHLLSCFAVSGFPEKIKTDNGPGYCSKAFQKFLNQWKITHTTGIPNFQGQAIMETTNRTLEAQLVKQKKEKVRNITLPRCNLI

SEQ ID NO: 929768 - protein, 177 aa, Homo sapiens
MESSNGLKWNYHRMESNGIIDWTQMESPLNGIEWNLRMESNEIIEWNRIESSLNRIKLDHHQMESNEIIIEWNLVESSSNGMEWNQQGMESNGEIEWNPLESSSNGTECSHHRTESNEINKGTRIVSSLNGIRWNHRMDSNGIIEWTRMETSSYGIEWNPRMDSNGIIIEWNRMELN

SEQ ID NO: 929769 - protein, 172 aa, Homo sapiens
MGLTALFLPHIFMFDHLLSRAGKWESHDLKDDVGTEQKPSLFPESEHGTLFSRCLYLLSPAAPRKEGILIFKLKIWPKAHCCPQCPPDTFLLPFSFYGNALFEEPMKQCQAGVRISSNFFEEESPFHRSQAMSEWIKKNRVPFYEILSAHAYGYDVVSHCGFDFCFPDDEFH

SEQ ID NO: 929770 - protein, 166 aa, Homo sapiens
MGLGAVEQGAVLVGEAPATQEPMEGGGSGMLGCRSQALSTGRQLRPSEKSSTAAAGPGAKPLTARGRQGQLAAPSAGPPSPRPPGTPAGRQEARSPGSGSCLSLHTSLQAEGASSDLGKPRKGLPPCSRGLKGSSSAAKVGAQAEEAPRVSEGCDGCQHAVTSQKE

SEQ ID NO: 929771 - protein, 239 aa, Homo sapiens
MNNATGCTETVILEVISLISQQDPELQPILAGLSLSMYLVTVLRNLLIILAVSSDSHLHTPMCFFLSNLCWADIGFTSATVPKMIVDMQSHSRVISYEGCLTRMSFLVLFACTEDMLLTVMAYDCFVAICRPLHYPVIVNPHLCVFFILVSFFLSLLDSQLHITFFLWLDGFYSFPYFLCEYCFLRYAFHWNGKHCELSEKITHGIGKRFANHISEKRLICIINKEQLQMNNQKPKAPH

SEQ ID NO: 929772 - protein, 173 aa, Homo sapiens
MPLATSDMKGDRRNIWTTGYQTAHRMAVMHPQIPSEVGKLRLAGGGPEAVKPGQGLRKYLSLGMGPPTLPSLTFMCRLEPRYTVKMATACHQWVHRRRWDMELGRGDAMTRQGTTWVQDTQDGLCPELTILGQNGQETVVQYEAPAPATDRDTEPPSALPGAGMTSATPHPQG

SEQ ID NO: 929773 - protein, 181 aa, Homo sapiens
MGVTTAYIIDATTPFLGGGDTAEVEKALYFPSEDEILRMELGIQQAKEKGHQNEEDTEVRIHDDWVIQRATDGYKAVIGHHSQDHAFYTCKKDQEKHLCQAALMRDDSAMRLHVHNHLGNHGRGETDVSPAQVGEEEVHGGVEGGVRADSQDTEEVPQHRDQIHGQGQGQQSEDRLQFWIL

SEQ ID NO: 929774 - protein, 127 aa, Homo sapiens
MEQPHLKVSRWTSPRCKSVEISTALTDRLRQRVCVFGCLGTEDGKDIRKKCHWGCEQPCDIESSIILSPLAYGEQHHRKNITGVLYNYFGLGSNIILYFPGYWAQKHKRVYNPCDIGSNSMLSFTGC

SEQ ID NO: 929775 - protein, 135 aa, Homo sapiens
MGICKEKRKKEKGRKEGEREGRKERKKEKERKKEKERKKKERKRRKEERKGERKMVEAGKKADNKFCSEEVDAQRENGEQTEKEAKNNLQGKHNIQGTRKRIEASKVEKEGQIREEKSHEIPLRSHGIKHLQCPS

SEQ ID NO: 929776 - protein, 128 aa, Homo sapiens
MSLRVGARAKRNPWVSGDPGGPDQCSLVVGADAWAHRGRARPEVQVRAVDPGGGWDDRRVVLAVKRVLEAQERNAQDLQRLGDSRRREHAVFLWDRKASVHQVRTTTFIGDIDYVLEHISHRPGSNHL

SEQ ID NO: 929777 - protein, 125 aa, Homo sapiens
MEPSMSLDRATSLQPRRKTPNHLSLSSHLLMGHGKAGIQPLHLEEWKCPILDTTLPLVVICPKDPFGCDSFSDFAFAGLESFKEYSSGFSIVSNSLPPPTPHTVFWREITKSSPYLLVESYAPPF

SEQ ID NO: 929778 - protein, 142 aa, Homo sapiens
MLGLTGSLLEGEWVHPFLLLPAGYSKSVLPGTPAAIFDDELKKEIRTQIHRGEGCVRRGIKKSRKAKDCQQTAKAVGKWHGADSPLSSQEQPTLLASCCQILFPVSTVQTALSEVVQCGGPGPKVPTSLPQCPIFNTLEPFQ

SEQ ID NO: 929779 - protein, 143 aa, Homo sapiens
MGEFYVAHSYGDHGRHSEREKEEVTGEHNDMSDCPAWLGKGNVKLWNSVDDGCESAEALRDDVEDFHIPGEELPLGSEFLGGEREKLGDPPRAGGELLGDGSKNMWYIIDERGDSEESSEEDTGEPNGFIDCPSRLKKYPSNN

SEQ ID NO: 929780 - protein, 188 aa, Homo sapiens
MHNQTIIASTHPEPGWHWQRRSAQKTHSNFLALFSKCCEPLRGTEIEHSGSADFEAVACRCSQVNKALPSITRCLRGFVCSSSCYILIWTIRLPAATEKGVSFSPPVKSAYPIRALPQVLARGASCPFQIITEFTKRSASTCGVLPPAPQATLTMDPCGANQEWAAGDPASSQGLPAASSAPVFHWAL

SEQ ID NO: 929781 - protein, 135 aa, Homo sapiens
MTNVSSNNPTISPLTTKSSFSLISPTLGSHTAPNPARSSPEKHLPLSLHTIPKNFCRPNTLPLFHFIFLINIRRQEFQASEPKLSHHIPCDLQQRDDFEFWLSFDHKEFLCGKTVREAAMYGSSSCSTPSSIWCY

SEQ ID NO: 929782 - protein, 155 aa, Homo sapiens
MTRDIQMAKRTHGEKGSCGNSFSRLKRPCLPALKRTADLPAQHLSSAKGQTASSYGSLTPVPPDGETPSRRGRQTPPTGELRLASGKCPSGMKFPEEGTGSNLCSSAASAGDTQAKRVWSVPLANSSRSAAEGPIRRKTNKQNAIASTSTKRTST

SEQ ID NO: 929783 - protein, 150 aa, Homo sapiens
MGCNGNRDYALFKPWHLVHCISAASAPVVAKKGQGTSQASKGARSKPWQLSHGVEPADAQKSRIEVCEPLPIFQRTYGNAWMSRVVPKGNVGKEPPCRVLTGALPSGAVRRGPPFSRPQMVDPLIACTMCLEKPQTLNTSLSKHLEGKEC

SEQ ID NO: 929784 - protein, 136 aa, Homo sapiens
MSQGGAMLLPVPGWNFKSYPVRHRGSGACKLSLLIPLNSNSFLGVCTGSKLPLCWSCSYFCQTARVSKAPGSLRVPEWLFCQDSTQIEGLSGVGSCRRAPDPRVAKISGTSVGSQGCTFTHHFLGQGRSPWFRIAA

SEQ ID NO: 929785 - protein, 159 aa, Homo sapiens
MVDAPPPTKLQCPRSTLDCCAVSANFKPVDLSLFGFMGVGSTEQDHLAPWLQPPFQGSELFCLAGIPGNNRKKKKILQLAQCLPKWPPSPSDIRACDGAVAGFFIQCPDAHTSRGSIQMGRLWGSDPIAAARDECLQLQYPAKALKDVILCVIMLSPPK

SEQ ID NO: 929786 - protein, 147 aa, Homo sapiens
MQEEDSNGLGQFSPCGLAGYSLHPGCFHGLAMSVYGFSSCMAQDVCACIILGSGGWWPSSCCSNKQCPEWHKPGESQPPAKGGIFTGDTSRCVRDRGCCCQLLWDWVKGDEWRNEDKDKKICFKRRCQGLLAPSEQRLWASTTLHIY

SEQ ID NO: 929787 - protein, 147 aa, Homo sapiens
MSSRPGLREPLLYSSLLSLLAIKGDTCAERAGLLHRKLKLDTFLTPYTKINPRKIKDLNVKPKTIKVIEENLGNTIQDVDMGKDFIMKTQETIATKAKVDKWDPIKLMSFCTAKETTIRVNRQPTEWEKNFAIYPADKGLLSTIKFI

SEQ ID NO: 929788 - protein, 216 aa, Homo sapiens
MGAGLSYAVLVIPDNAIEMKTPFSGEKFKLAAEIYTSNEEPNVNHQDNGKNVSRPCQGPSQKPLPLQIMYGNAWMSRQKFAAGVEPSRRTSTRAAWKGNVGLEPSHRVPNGTPPSGAVRRGPSSSRPQNGRYTDSLHCAPGKSEDSQCQSVKAARRRGVPCKATEAELLKTMGTHLLYQRDHDVRHGVKGDYFEALKFDYPTGFWTCMGPVAPLFW

SEQ ID NO: 929789 - protein, 198 aa, Homo sapiens
MKTPFSGEKFKLAAEIYTSNEEPNVNHQDNGKNVSRPCQGPSQKPLPLQIMYGNAWMSRQKFAAGVEPSRRTSTRAAWKGNVGLEPSHRVPNGTPPSGAVRRGPSSSRPQNGRYTDSLHCAPGKSEDSQCQSVKAARRRGVPCKATEAELLKTMGTHLLYQRDHDVRHGVKGDYFEALKFDYPTGFWTCMGPVAPLFW

SEQ ID NO: 929790 - protein, 610 aa, Homo sapiens
MRLGLHMSAPGYIPTLHFSSKGPWGLVCLLLFSLLPSEAPSRDFSTPRPTGENDLGLGEGNMGELLNECSISVFQDEKFWRLVLQQCACTHQYSTVHSIRNTSNHHSPPTRVRVSHSPPTTPRVSHSPPTPPRVSHSPPTPVRVSHSPPTPVRVSHSPPTPPRVSHSPPTPVRVSHSPPTPPRVSHSPPTPVRVSHSPPTPVRASHSPPTPVRVSHSPPIPPRVSHSPPTPVRVSHSPPTPPRVSHSPPTPVRVSHSPPTPPRVSHSPPTPVRVSHSPPTPPRVSHSPPTPVRVSHSPPTPPRVSHSPPTPVRVSHSPPTPVRASHSPPTPVRVSHSPPIPPRVSHSPPTPVRVSHSPPTPPRVSHSPPTPVRVSHSPPTPSRVSHSPPIPPRVSHSPPTPVRVSHSPATPVRVSHSPPTPSRVSHSPPIPPRVSHSPPTPVRVSHSPATPPRVSHSPPTPVRVSHSSPTPPRVSHSPPTPPRVSHSPPTPVRASHSPPTPVRASHSPPTPVRVSHSPPTPPRVSHSPPTPVRASHSPATPVRVSHSPPTPVRVSHSPPTPPRVSHSPPTPVRVSHSPATPVRVSHSPPTPPRVSHSPPTPPRVSRADAG

SEQ ID NO: 929791 - protein, 437 aa, Homo sapiens
MTVGSLLVPSMLWGCHRLPGMVFKLHRSSYSILQCRCLHGSPPIAESLTDPSKLDSGKEPHISLIPNKQDRTLTIVDTGIGMTKADLINNLGTITKSETKVFMEVLQAGADISMIGQFSVGFYSAYSVAEKVTVITKHNNDEQYAWESSLRGSFTKKHDKEVSNDEAEEKEDKEEEKEKEEKESEDKPEIEDDYCTRMKENQKHIYYITGETKDQVANSTIVQRLWKHGLEVIYTIEPIDEYCVQQLKEFEGKTLVSVTKEDLELPEDEEEKKKQEEGKQKTKQKKNQSLRTSAKSTYGWTANMERIMKAQALRDNSTTGYMAAKKHLEINPDHSFIDTLRQKAETDKNDKSVKDLVILLYETALLSSDFGLEGPQTHANRIYRMNKLGLGTDEDDPTADDTSAAVTEEMPPLEGDDDTSRMEKNARVHGIFPDNYI

SEQ ID NO: 929792 - protein, 164 aa, Homo sapiens
MCHVSKVTLYRHCNQWSVSWTLLCVTDTEEIPCGNPDSGNGQHLGWRESNMTSYLMKKVKCKQLTVKCHILQEVCKRSVAITGDGSSMRVVAPEDPPVGQDVEVEDSDWMVEENCSFAHVIYQGKTIFIKKAKFKYDRDFPFSSANGPCENNLKSPINYKNVSL

SEQ ID NO: 929793 - protein, 137 aa, Homo sapiens
MHRLSMPHSCCQEMGRRGTSESRLSPLMSSIPFSAIPFWAAVKEYLKLSIFVHISAGYTRSMVLASAAGEGFRELPIMVKEEGELAFYVVRERARESCQALSNNQLSYELTEHSLLWGGSKAIHEGFTLYDQNSIEL

SEQ ID NO: 929794 - protein, 199 aa, Homo sapiens
MWNCESIKPLSLYKLPSLRCVCLQVCVLAAVCACRCVCLLLCACSCVCLQVCVLAGVCLQLCVLAGVRACSCVCLQVRVLAAVCACRCVCLQVRVLAAVCACSCVCLQLCVLAGACACSCVCLQVCVLAAVCACRCVCLQLCVLAAVRACSCVCLQVCVLAGACACSCACLQLCVLAAVCACSCVCLLVINITEYDKIC

SEQ ID NO: 929795 - protein, 147 aa, Homo sapiens
MVKGEEEPKTFFTWQQERDVQAGKIPDTYKTIRFCENSLSREQHGENCSHDLITSLPGHVGVTGPSLDTWGLQFEIRFGWGHRAKPDYLCYHQHVNHFSSWNILDTGPKRAFNLPSGTLGLQASPTGCCYRACMEFTPTGTKAAGQL

SEQ ID NO: 929796 - protein, 140 aa, Homo sapiens
MGSHLLHQCDLVVRLGVKGDHFGALRFYCPVGFWTSTGPLAPLFWPIFPIWNGCIYPMPVPPWYPGNMSLSAAGKQTNTGIKIEEFSASLEQTKVSKREAKSVSARGGLPDHTLNRMWNSEYLCSKLRNHPQFTQMKSTV

SEQ ID NO: 929797 - protein, 223 aa, Homo sapiens [sequence omitted]

SEQ ID NO: 929798 - protein, 138 aa, Homo sapiens
MVPIYIEDVYFFYFLDCFTNFFVLIFNLILDLIEFSCNPCIELNSPSVISMPPFWLQIFVGSQSKPLVMSQHLFFITAEFFSDSFSSREGCVGQGFFCFVSIVLCISVNRFSIELCGSPYGPKDGVYRYFGEKTTCTK

SEQ ID NO: 929799 - protein, 140 aa, Homo sapiens
MLAGTDFFALSVGHRQGWLLRVGTSPLFSMQSFILAAVLVQGQGTGESRSSLPYACQGSSCNGSHTGGAGQTILPQQQWRGRVHVHTFVHWWGKESKICLAQTCRQSNVGVKAWSTSAIAIMQASRESKAALQADVRFGC

SEQ ID NO: 929800 - protein, 148 aa, Homo sapiens
MAPAFARMCLPNKGVGLSGIIRKACEKSKAPHSQLSGWEKYLVTGCPRTPRIVTDLEDSCLGQESKTEKATPVSQRQLTSWPSMVKHTRGSVRVMAWAGACPGHPQSCCWIIWKTYEWTTYEKVLNVTNHQENANQNHNETSPHTCLG

SEQ ID NO: 929801 - protein, 216 aa, Homo sapiens
MGKKQSRKTGNSENQSTSPPPKEHSSSPAMEQSWMENDFDELREEGFRRSNYSELKEEVQTHGKEVKNLEKKLDKWLTRITNAEKSLKDLMDLKTTERELCDECTSLSSRLNQLEERVSVMEDQKNEMKREEKFREKRIQRNEHSLQEIWDYVKRTNLHLIGVPESDGESGTKLENTLQDIIQENFPNLARQANIQIQEIQRTPQNTPREEQLQDT

SEQ ID NO: 929802 - protein, 135 aa, Homo sapiens
MVFNWREFCHQGTFGNVWRHFWLPQLGGCYGNQRPEMLLNILQYTGQPHNKNDPSQNVDSQTECAGPRSRPRPTPRPNHWSGAGGKGCRQQARLQATERTLARRNSVIGSRKKLQSPKAKLVPKKVMVTGICCRL

SEQ ID NO: 929803 - protein, 148 aa, Homo sapiens
MRKNEHKNSDNSGRQKTFFPPNNCTNDHTIGHKTILSKCKRTEITPATLLDHSAIKIEMKTKKIAQNHTITWKLNKLLLNDFWVNNEIKAQIKKFFETSENNDTTYQDIWGTAKAILRGKFIALNTHMKKLESSQFKNLTSQQKELEK

SEQ ID NO: 929804 - protein, 260 aa, Homo sapiens
MDNATHHREYIQYATFSLTCGCPWTILPTTESIFNMLPSPSLEDACGQYYPPQRVHSICCLLPHLWMPMDNILPTTGNIFNVLPSPSLVDARGQYYPPQRVYSICYLLPHLRMPVDNTTHHREYIQYAAFSLTCGCPWTIYYPPQGTYSMCYLLPHLWMPMPVDNILPITESIFNMLPSTSLADACGQYTTHHREYIQFLKAQFEEEVHREISQPASKWIVSKLKKGRRFRKQTQQNRAKGFQPSLGKELLIYLWETVNT

SEQ ID NO: 929805 - protein, 159 aa, Homo sapiens
MLEPTVPTETLAVSWHSLWWWEASFPRLTYGDTDSSLKASALFLSQHLPFSGITHIHLVNFGQSYLAKENESNQHVSEGTSLSYPFVKKDVLASPSAMIVTNIHEAHIDHTGKHCVWDGESQMRRNGLWGTWSLMGAGEVKAVAADEIRGLTPQNPETA

SEQ ID NO: 929806 - protein, 189 aa, Homo sapiens
MVYQRAEAQEPASLEDLGGGQAIVVLFLALEQAEVGGELLLQPQLDVHEQLVLLILPLTVSSHIAQLSFNTADQRLDLRQLPALPSALRSASPGRSWPGSAQPAPRAGHYVSLHTHEQSLLPLILSSEVICSQTGIVDLQDNPGILNDVTKNLVAQVLDGPVVVAVVMGGPGAHDFKMGKQQETDIQLP

SEQ ID NO: 929807 - protein, 165 aa, Homo sapiens
MAINGRLNGEMKMLPYPLDRRHDYLAEISQLQCLCHIQSLTEGIPGKMWFRCEHCDRSQGECLVILLDICLISALASSQDCHSNHSPNLAQPLKPTVTIHVTHIPIPKSSSVIYNKWMRRDTEEKHKEEGHVKIETEIDDAATNQGSQRLQESPTARKRLKSCLP

SEQ ID NO: 929808 - protein, 254 aa, Homo sapiens
MLLYVRGEVGVGGWRWIPDGKPRSLKARQGQGVAEETSGASQVQADQVYTPESTRHPDGGTRRRCLEKSTEHVRAPETRAEHARVLETNPHRARESPAHPRRARESPGNRLTEHVRAPETRAEHARVPETNPHRACESPAHPRRARESPGNRPTPSKREPRKRTNAEQVRAPEIDQRRARGSPRKPTCAEHARVPETRAEHAVVLETDPRRARESPGNRPTRSTREPRKPTRTKHAGATASFHAPPTCWASSEF

SEQ ID NO: 929809 - protein, 140 aa, Homo sapiens
MVSLILIALGSLVACHPSPALLTPGASPSSLSSKWLGAQDPAKDFALKPASAKVIDHLNFLSELQATPSPHVPGTSHRSPGTAAPATGQVRTGLIPPTLGVRPPGWEHEAVLDPELQLLVGPGGEREPQAAKPPLCTPNI

SEQ ID NO: 929810 - protein, 146 aa, Homo sapiens
MYLLAVDIASHLGHQNVSRICSFQWVLGLADFKNEATDLSVRGLADFKNEAAELGKKINEYVNQFDERTLETGMFHETNQQRGYHSFWQPQSIPGTWMRIGEILCPATVKKLHSNVCVCMYVCIITPTLSNSSFPNICFNFHTQLI

SEQ ID NO: 929811 - protein, 138 aa, Homo sapiens
MGIPSQSLYPHCIFGVSWVSCTNLEGLDQVPQLCLLVTRGQAPAALEGLKCSQSAGVVMGAVDKSAMAWQVVGHKTVCHSEGVTGKCAWYMPARCHLKKSSNGKARASGEKSAVVLAGKYFSRTTKALLQADVARQGQ

SEQ ID NO: 929812 - protein, 158 aa, Homo sapiens
MKTWESLELPRDLSNGFDQKADSGMDNNVQVEVVSSGDEELVGNWNKGHSCYAKRLAAFFPCPRDLWNFELDRDDLGYLGEEISKQQSIQKEAEHESLEDLQADNTIEKKNPFSGEKLKPAAEICISTKKPNVNHQDNGENVSRDVRDLQGSSSHHRP

SEQ ID NO: 929813 - protein, 147 aa, Homo sapiens
MPMYLKGIGHCDLSHNCIRRHLMSSNAVVLADSEAEEPHPMATTTTGPLRVMPGERESMSESRITNGSKIQLQECSYLITHATHVTGFDLSSLKSNTHPKGPDFFVSKSTTNQDLTFVLNSYSQIRIFSCHPPSSVVLWGVSLALFR

SEQ ID NO: 929814 - protein, 145 aa, Homo sapiens
MHSWGEVYKQPSSQSRPVKTQVRSCHSSAENTNRFLSLSIEKTVFIMTCGDFCDLPFYFLSSHAQHHWPLCCSLNFLTQGLCTCFHYCLGCFSLRYLHDLHYHFPSLLKSYLPRSSPLVTLSVFLTPFQHLIPSSCFEFILGTYH

SEQ ID NO: 929815 - protein, 159 aa, Homo sapiens
MAVCNPEEAPHQEPTMVAPVSQTSGLQNLFHRSQFFAQCLVPGKGGSWGPGLMFLRQWREGEGTVICEWIFVLPGFCQNNGPLPSCHCSSCWLPLLKFTDEAGNLVVYPLPPHSWIRGAHCLWREQTLQQDLRLHRGKCPGGATSGERNTRKPQKIISH

SEQ ID NO: 929816 - protein, 172 aa, Homo sapiens
MGRQEVTQIGLALSHRQACPALSRSDSHPKAKATYKILASLGERVSLAVFHCSHSHAKPSGLYTGWSPAPATTLNGFACQLKWGLCCLLQLGFRRSITTVGHSLTIPLTPSPGVSGGQEWILVFSSQGSCRVPRFLSFQFSICVLPPSTLNAFPLKISVFLMSRSLIERCSS

SEQ ID NO: 929817 - protein, 136 aa, Homo sapiens
MRTSKGYSGLAVEKEAAAIPSAWQRLEGRQRSGKLHSGGGEAPGEHVGLSLVLSWKQQEKVGKPVVIDDVLTVLGRLLWTLWFGFLDWLLQIVGHTSAVIYGLAAVCIFCLSMQQLGRSRKRSLPSINEEMGPFAV

SEQ ID NO: 929818 - protein, 153 aa, Homo sapiens
MWLSQLSSEQGPPPLAQSLTATGLFSVTSFGLAPLTDTRPWKLASVIASFVKGLLCAGYHVGSPGGCVNDGDTMPTFHQEKHRKNLAKKPAGWRDARRTLKALLRIKAIIFYIPPTGDSGSRRSEPLQCIVTFLQRAQHRNGEGKEQHCHGKT

SEQ ID NO: 929819 - protein, 194 aa, Homo sapiens
MTKMSTSRICEHLAHSKCPINVRRRMIMMIMMVVIVVVVVMVMIMVVVVIVMTNDGGGNDGDNSNDGNDGGNDGDNDDEGGDGESDDNGNDDGDGNYGDGDDGNDDGDDGNDDDEGDDGDGSYGDGDDGDDGDDGGDGGDGGDGGDDGDDGDDGDEGDDNGNYGNGNAMMAMMVMMVLVMMVVMMVMEITTVVI

SEQ ID NO: 929820 - protein, 234 aa, Homo sapiens
MNINKTDNHTKTPSEGHQNPRPKVDKSMKIRKRQCKKAENSKKQKATSPPKDHNSSPGREQNWTENEFEKLTEVDFRRWVITNSPELKEHLLTQCKEAKNLEKSIKSQINQAEERISEIEDQLNERKHEDMIREKRMKRNEQSLQEIGDYVNRPNLRLIGVSESDEQNGTKLENTFQDIIQENLSNLARQANIQIQEIQRTSQRYSSRRTTPRHTIIRFTKAEMKETMLRAARQ

SEQ ID NO: 929821 - protein, 312 aa, Homo sapiens
MYATRLIQMRSYLENRAQQHWGSGAVVKKLRELQPGEKRCVVGTLFKSMPLQPSILQEISEEHNLLPQPARSKYIHPDDVLVLEDELQRIKLKGTIDVSKLVTGIILAVFGSVRDDGKFLLLVSGLGLGGGGGESLLGTQLLVGVVTGQLRDEGEQFSAAHVSRVVLEGNLLSHSTQSRDSINKAKYLTKKTQAASVEAVKMLDEILLQLSSSVPVDLVIKPYQATIDGVRFLGTSGQNMSDIFRYSSMEDHLEILEWTLRHPQLWLLVTIPDLSAMQTACLVNLPSLACQPISFSGFGAEDDDLGGLGLGL

SEQ ID NO: 929822 - protein, 142 aa, Homo sapiens
MINGLNDAYSHYGFGPIVTAAALMSGGTPGFLVLALGTKNFIASGSSGKACVQIAGKGTWLAINAFHIVFIASHLHLAFIDLVHAKSIEKPVGQQHACPIHCSIICQANFTPYFGSLCAYDAQTIISPMSKHRNQFYPLIIF

SEQ ID NO: 929823 - protein, 136 aa, Homo sapiens
MAEMTGIELRIWMSTKIIEIQEKVKTQSKEPKEFSKKYQEMKDKIAILRKNKTDLIELKNSLQEFHNTIISINSRIDQVEERISELEEQFFESTEFFKVKTKEKLLKAAREKGQVTYKGNPIRLTLDLSAESLQSR

SEQ ID NO: 929824 - protein, 383 aa, Homo sapiens
MSWRLLQCHPCCGLNLLLSLVTTGWAPLSSFLASSKVERIESGPQGVAHLPSEVEGGFPGWKLQPTMVSRCLHRDFPSLIESLIPSLCRTCCMLGVVNEDEVKAAVGPWDLHSPRGPSGTEAESGGSLVEKQQQADVTWGLRAGWPRPEAGHSHVAVGRVELLVVNEVDHPGEGLPADATLEGSFGAARGHWALGSIPGWDGLPGALAPGGFLPRWLQQVDLAMLSEDGVVQEDLATLGARKGPFLAMGLLVLDEVGDPGEDHPTVGTLEGPPTSGPTRHYRDACNSLLGTTFGVLEGWLVAAALAALSLPTSPEEVGDFTDFTSHLRPMTSDAPNRVPPKAGITTSWEETELWLKSKNSKQRGLAWCPGSSPACCVALDEEL

SEQ ID NO: 929825 - protein, 147 aa, Homo sapiens
MICWAQEDQIQDSELVRMMFNLLRRQYDSIGELLQALRKTYTISHTSVSDTINLLAALGQIRSLLSVRMGKEEELLMINGLGLRSRHSRSKNWQLEVVFPATLKRRGMGSQKVTTQQGSTQQITRLFLYFDLHAALLCEFILDDLKM

SEQ ID NO: 929826 - protein, 138 aa, Homo sapiens
MIVDTYKEKDILSIASYLKIGGWWLAREILGRITGVWWLAREISESGQTRIKKLTRSYCRSKANLWVYEMDIKNLYSSPNYVNRLFADKSDQGRTNLFILVTFTVKIKSFLSHFMRPSTWIVKVKESTGSSSTRIAKF

SEQ ID NO: 929827 - protein, 147 aa, Homo sapiens
MSSLYMCGFVFGISIRILPDRRQLHAIERVQEASMLRNKQDELVKSSQWRKKGGCPQKSSLSELNWNENYNSHHLKKAREKSLIKSKALFLFNSLKAERDEEAVEETFGVSSDWFMKFKKRSHLHNIKVQGEAKFLCLDYQPCPGSD

SEQ ID NO: 929828 - protein, 128 aa, Homo sapiens
MKASQCLLNYIPENSHILRMATLNGHIGHGHVEKELEESDTSRLNHSGTVVLRALTQVAEEEQFEFLKDQETLKLNLWDMALNPQFGPGRRWCPDTDPGILDVCQGCGCGSPTAGFILSLGKTRHPWG

SEQ ID NO: 929829 - protein, 150 aa, Homo sapiens
MRKNHCKKPENSQNQNASSPLKDHNSSPAREQNWIENEFDELAEVAFRRWVITNSSKLKEHVLAQFKEAKNLEKRLEELLTRITLLDKNKNNLMELKNTAQELHEAYESINNGIDQAEERISEIENQLNEIKKYREHNKDSPREGQPQDT

SEQ ID NO: 929830 - protein, 284 aa, Homo sapiens
MEESPQRPGRARQVQATAGDFDWLSTSWTNLSVKCRESGKTEGFLKPFQKQVYMNGDNVATITPFPSPGEDKDQPFTGEESAGLGVLTNRLREKKGGWKLTWPNLELFYVKGAEIHQASSESKFYIVFCIELDLQGEFAALPKQARHGLLLPDHKVECPGKGKTVARSDNPQNVCGVLHGFLGGCSQKSMPLWAQALPMAAPPPSFPGIQQPGLEGLSLTHGAVFVQQRLEAQVSSVLPPFRQGRLECLEATSSSPAGPQGPTPSTSHQLCSSSFWRKPLISRG

SEQ ID NO: 929831 - protein, 212 aa, Homo sapiens [sequence omitted]

SEQ ID NO: 929832 - protein, 140 aa, Homo sapiens
MAEAMAKLGSERKKEQGLIQELKQNQSLELWYENRKGKIKTGESGDGEPDLLRILMWEYISNLLSHAATDYLCELGQFANLHMPLISICKMRIKQYYFPHNVPVAIPGRSIVKHYIYVSCDDGDDDEDGLRSMESYEMMF

SEQ ID NO: 929833 - protein, 200 aa, Homo sapiens
MLFDKPNALLEEKYIDQEELNKTKPIWTRNPDDITNEEYREFYKSLTNDWEDHLSVKHFSVEGQKKKNNIKLYVCRVFITDNCEELIPEYLNFIRVLVDSEDLPLNISHKMLQQSKILKVIRKNLVKKCLELFTELAEDKENYKKFYEQFSENIKLGIHEDSQNQKKLSELLRYYTSASGDEMVSLKDYCTRIRKTRNES

SEQ ID NO: 929834 - protein, 165 aa, Homo sapiens [sequence omitted]

SEQ ID NO: 929835 - protein, 181 aa, Homo sapiens
MLSFFSYVFWPHKCLLLRSVCLNPLPNCDGVVCFFLANLFKFFVNSGYKTCDRWVDCKHFLLFCIEKAYLKIRRDISKKLTANVILKREKLKAFPLRTGTRQGCPLSSVLCNIVLEILARAIGKIKRRKYSHIGNEEVKLFLFADNMNLYLQNLEDFSKRLLNLVNEFSNVSEYKIHVQNQ

SEQ ID NO: 929836 - protein, 306 aa, Homo sapiens
MITIIVLLVHANTCVAGAIGCIIYPRCVVGAIGYIIYPRCVAGAIGCIIYPRCVVGAIGYIIYPRCVVGAIGYIIYPRCVVGAIGYIIYPRCVAGAIGYIIYPRCVAGAIGYIIYPRCVAGAIGYIIYPRCVAGAIGCIIYLRCVAGAIGCIIYPRCVVGAIGYTIYSRCVVGAIGYIIYPRCVVGAIGYIIYPRCVVGAIGYIIYPRCVVGAIGYIVYPRCVAGAIGYIIYLRCVAGAIGSIIYPRCVVGAIGYIIYPRCVVGAIGYIIYPRYVVGAIGCIIYPRCVVGAIGYIIYPKCVVGYTM

SEQ ID NO: 929837 - protein, 194 aa, Homo sapiens
MERSYPLRVSSKLFYCSIKLLFILLTVNLSVYLILPGHRTRTWEPLKVNKKERRMKERRAAALQGPQPRRSLSQGCDTLFRGLQFLVSPRFWAKLHSPHSLVSAVEAAYGMPGPATVSQGASACASMELPTPPQLACLVVHSGCTPCSLTHPLLPHAWLALGRHGIQDSSMSQMQPARPGAANVIILRGEGFKT

SEQ ID NO: 929838 - protein, 141 aa, Homo sapiens
MFYPPSGPARYTIVIKDDFPPWMFTGHHRHSPDEMAMYPLADFPVPPLSRSGANGEKGPNETHKLPVSVTEKQTWRCGMEFGNGTCAFQTGIACRTGKIKNSKTEIMHVEARSAFFLLIHFFGWRGEWGRGASCFAIINRQ

SEQ ID NO: 929839 - protein, 145 aa, Homo sapiens
MGVESRHRSPVNSLRKDGNEIPGDQDSQSFWDRVLKRRELYRERTPVIYQGSLLNILQSTDQQMHVRKLSSEEKIQAKTVGIRWLVGIRSGSRNQMLRVKCSRWTIHQYDRKKEPISGHKWDGTKKHCTGEYWKEKQVEGGTYAN

SEQ ID NO: 929840 - protein, 135 aa, Homo sapiens
MALAHEHPVIWRAGVARMAPGSQLCIWQQCLWARPGQQPRLSLSTVALLIPEKRKPWGHLDQASAGRMLPFLCSAGSDSHGINSSEAGSPLGGLGTLPHGHMAQDTLFFVTATWQGGPRTSVDKDASGAPEPPGN

SEQ ID NO: 929841 - protein, 184 aa, Homo sapiens
MTGQWESDSKDVSEKRTRRPQCGRHQRRPVGQMIYVCSSFDLTSLPLAVSSRGQRRSYHPLMYPIATDSDKGGVVVSSGMWNMMTEDLWNFELERDDLGYLVEKISKQQNIQDVTQLFLKAYSHTHSQRDNPKLQLMFKTEAEHESLENLQPNHVVEKKNSFSGEKFKPAAEICISNKEPNVSS

SEQ ID NO: 929842 - protein, 185 aa, Homo sapiens
MDEAGNHRSQQINTGTEKSNTTCGNARLPTTRFQMCSPVPRQDTDENWTLIPLKFPAASVTSASQCTEDTDEALNKKAANNIASDANILCSYQQEVSGQSISSLCFNLDLMDGQCTHTITHYFQTSVNLFLSFAAISAFASKPLCCRSTGVAGGPLQTLFAWVSPMEAAEQQRLLPALSSGSFVP

SEQ ID NO: 929843 - protein, 164 aa, Homo sapiens
MSKMFWVKVQVKWEGLLPAVLGAAWERRVGEIKLKEDFVASEAIGQSQSSAAKPRRSGKKSENLGPEFQGLWEWLPDGTRLRRNPGLWAFLGPVARFPAHVASSWGRRFWRNPLQLRFRHLEVLVCWRHGWGMSHSGDKELQLRNMLLLGCLYSIIVHLEGEVN

SEQ ID NO: 929844 - protein, 165 aa, Homo sapiens
MNHQRKTKGVECTLTAVSGKWTFLATKPGPAAKTKSPQAGGFNDRNAFSRRLPGEGKSEIQVWAGLDPEAAAWLVDIIFSLGPHRICLLYVCLNFLFLEGHQSYWIRPQPDYLILSHCCLENALSWLSEPPALFPRSGLEHRLTTANCSGKPVILPGAGAGARGG

SEQ ID NO: 929845 - protein, 117 aa, Homo sapiens
MEKLIPDARIAYIENPKGSAIFEELDLLESGPVKGQNRGEDDARCLRGSVSIGRFQNVKGILEVSGNTSRQSTYRGSCSCELTAGYQAQKIHLQKQNGLPWALHGWTGGISLTSPYT

SEQ ID NO: 929846 - protein, 136 aa, Homo sapiens
MATLPNHVQPRLPSQHLVLVSAPSTSGSTVPKGLAIHLNMCALILPSSVKVTTTHSPPMLESSSLPYTQPTPTQSRPLILDQDPRLGTAFSTTSLLHLPGFDTSDSILSLTTFTFPRFDEDLSLKVLQINYSVVRF

SEQ ID NO: 929847 - protein, 134 aa, Homo sapiens
MTESQTCPFPSLSTPAPCSADFTVCSSHEPFSSPLQATWGTWSFQPSSAIWSLRKLSTFWFGPRLRTISSLYKPPGGCYVQAPVPQSLECENKLICQPGQTSAPKCMRRKRETSESFYFPASHNISVCGRGQRQ

SEQ ID NO: 929848 - protein, 120 aa, Homo sapiens
MQLMPPENIPVYLCSTSHGGSLAARRSGVPGFLSHPLDLKRSQALPKCLRTSQDDSITQPKGAGGFESREDECLLCIFGKSSGMTLFLMFIYELSFTGGGAVESCAVPRVVTLIRGHENR

SEQ ID NO: 929849 - protein, 154 aa, Homo sapiens
MVVLFDRAHSFRRDAHGAVREEGDTRLASQISRTNPGNQWGDRCRSQIALTSRSPFEKGGVELAAAVGASGVNGWLLHPAAPSPLQDGALLVTWFPYGFERFSCVVGVCITFLSWGSAGSNCHFLTLRKSWTQDLILAAAARRGPVAQLSMWKL

SEQ ID NO: 929850 - protein, 177 aa, Homo sapiens
MVLSQIPSFGTNPIPHGNPRNPIQDSFHWELSELCLHPRQLETADEMHSVKDKDSAERIAPRVAQVIMGNNASNHSLEKISKIFDNHEGTGSSNVQTPAPIGWTPAVYTNTGVLEHHPEGPSVRRHPGRTRGFLSDSKIYFISVSRIGLSLNRKPLNKHYMPARHINAIKEPCVLLN

SEQ ID NO: 929851 - protein, 131 aa, Homo sapiens
MSRGRAISEAKRGLATASGASMGQSAGDMGSGWSAMACGLLKTRLEAGGTRELNLGSVGQDENSCQPDRRSPGLSRAQERLGTGAPTVPFTLTHCRGSQSVVGKSLGLEKLQGPDELNIGCEEVILEACEK

SEQ ID NO: 929852 - protein, 162 aa, Homo sapiens
MCLSVYEYVNVAKCVCESCSAILTSLLTHVLQSLKSCSASRSSLLILKSGFVSSTLLEFFNLIETHNESNSAWAARDICHPTSPNYCLHPGHLCSSLCTLHICFPVPRKTFPPPWTWKALLAFLDPALISLLPRHPHFPGWIRLITPVPTTPLSLLSAPFLE

SEQ ID NO: 929853 - protein, 158 aa, Homo sapiens
MVVLLVGSPAFVPSVPEEGMWMLGGPASGETQATSRWTLKWEDKDGWETKFPIGVLYVTKFQPMGCQRSVQRRLLRAFCRKVGMHICAFLNLLLHPSASSMDRMAEASLHTDCSQAPLQPLSCPQLALLALVQVHNSSRPSYTQRPPHPHKVHVKARS

SEQ ID NO: 929854 - protein, 134 aa, Homo sapiens
MNTNFYCEENRSHWKFFSRGVVELSPYFNRISAAAVVGDLAVMGQGWEQGLLEGGNSRTLNCQKIALPFHQTHEEHAEDHMSDVDRSICPFPDSFKSFGERCFVSVQTQASSRSGGLEAGSVACTPRLYMVHFD

SEQ ID NO: 929855 - protein, 134 aa, Homo sapiens
MLSLPQSPNPQEALKCDVPCPVSKCSHCSIPTYDSEKFVITDLLKPSSVNLSKSFSIQLCSVAGSSAAGLLEFAGGPLQTLFAWVSPVEAAEQQILLPDPSSGSFIPEGHLPSSNTVLGEPLLSSELSDRNVQV

SEQ ID NO: 929856 - protein, 167 aa, Homo sapiens
MESITRREISDQLLSASEFKAAVNQLRLHLRPRPSAQQKPAILWTRFMETAMQDGAQGTKPPLCATGNCWLVGMEEVAACGNPGWAGCWLERRCVRVMTGEQISPVLLLHDKSRRCNLLLREKCPTIILTPCRGMSLGSSASNHSSQAPREQNQDRPLSFFTLHERS

SEQ ID NO: 929857 - protein, 176 aa, Homo sapiens
MRNPEGVLALAWWGVAVSGLLGRHWGRSKGTCSALAGLLTDSKEATENLGEKQPRAEGREISIWLQWNSELESELVFAQGGPQLVVTGPSGRASSSPLSPTKPLKVFLGQSVFIRGHKSFLEHFPAPALLMEATGFHEHASLSWSSTLMSHLEEELSHMERMSTVHAPLFPRSCFQ

SEQ ID NO: 929858 - protein, 151 aa, Homo sapiens
MVDAPPPTKLPHPRSMSECCASREHGSLGALVHGDPSGRSHGWQTGHALSRLVLQREGNTGLHLPQNSGRSRTSFLEAVIEPCLVRVCGAILLLPGTVTVASMGAMALAPGFSRSQGPSVHIKVFHLNLSQGMKNIINCGICNIMDDIHYL

SEQ ID NO: 929859 - protein, 281 aa, Homo sapiens
MRGRFTPGKLANAKIQPLLTLLISEYDLVSAYEVDHRGDYVSHEIMHHQRRRRAVAVSEVESLHLRLKGPRHDFHMDLRTSSSLVAPGFIVQTLGKTGTKSVQTLPPEDFCFYQGSLRSHRNSSVALSTCQGLEAHWGQTGSPPLGKTGSEGTDRKSTGADKKSTGDRQEVREPTESPQGLDRKPTGMDRRSTGNRQKVRRQIGSPLGLNRKPNGTDKKSTRNRQEVRRRQSAGARQERAGSSTFLRLSALCGLLVDVNREQVAKQKWDLYSSRFTSGNRV

SEQ ID NO: 929860 - protein, 139 aa, Homo sapiens
MPSKSQSLELVPKLQGLGNAPPGLQFTLYKCLDSSRTAQPHAGLHYVDINSGMIRTEEADYFLRPLPSHLSWKLGRAAQGSSPSHVLYKRSTEPHAPGASEVLVTSRTWELAHQPLHSSDLRLGLPQKQHFCGRRKKCM

SEQ ID NO: 929861 - protein, 409 aa, Homo sapiens
MTSYGPDFVCDLCFHLPSMCPSIDMPQPPKEDLFILPDEYKSCLRHKRSLLRSHRNEELNVETLVVVDKKMMQNHGHENITTYVLTILNMVSALFKDGTIGGNINIAIVGLILLEDEQPGLVISHHADHTLSSFCQWQSGLMGKDGTRHDHAILLTGLDICSWKNEPCDTLGFAPISGMCSKYRSCTINEDTGLGLAFTIAHESGHKGDYVEYSANVYEWSRGMSDAGREQATVPRNCCLQLSLLSFMEGELCFSRCLHEACVRALGSSVLPVVAIIMPKVKKKRLADDGGSSPGKCDSHSFGMIHDGEGNMCKKSEGNIMSPTLAGRNGVFSWSPCSRQYLHKFLSTAQAICLADQPKPVKEYKYPEKLPGELYDANTQCKWQFGEKAKLCMLDFKKASDYWHMLNAT

SEQ ID NO: 929862 - protein, 139 aa, Homo sapiens
MTTGKLMWYDYVSRKLKRIGVKMDLITDYWKWGKERTRNRESKMNDQRFLGNLKKIKPECKKPREVFEGNHFLIVTSECQRFQKSLWGLPGVQAKDWSSQVMLNLLAWGPTMQRASQLLFHKISETVILPLKWAVHAHT

SEQ ID NO: 929863 - protein, 146 aa, Homo sapiens
MRSCFWDLRLHMVKKAVARLDAVVVYASLQVQRPVMVDGQGWHPWAGADTKIQLPPRQFDNQGQVDTRKATASVRGCQENPEIQERLSIAGTIKNQHQNQGAHMTRLFLFYLNIQSRLLEYCLPYTKLTQYILLLNHLIDFGHNFG

SEQ ID NO: 929864 - protein, 209 aa, Homo sapiens
MGKTDTGYFNDEINHRLYGFSLEEVTPTQDCATTSRLTSQHPGGGPACVYPCVRPCVSVPVCAPVCVCACVHVCAPVRVCACVCTCVCLCLCVHLCVSVPVCAPVCVCACVSTCACLCPCVRLCMSVPVCAPVGVCACVHVCAPVCVCACVSACACLCLCVRLCVSVPVFMCVRLCVSVPVCAPVRVCARVCACACLCLCSCVCSWAYL

SEQ ID NO: 929865 - protein, 117 aa, Homo sapiens
MAVPRPFPAVSTGHCWQLTHLTGMNCEEEPVKAGKPFDRHERLLPDGETELLEYNEAALKIIAILFNFSLQLHIRGEICHSRGRVCTREQWNIRNTFMENTHQSICLLPDLEKGERI

SEQ ID NO: 929866 - protein, 190 aa, Homo sapiens
MRCSTSSHHITHITKLQRPSRSPFFRLKEQGLSLPFTGAGLRCCEQDQGSSGADLRPRGSEKGVTLETPYPMHLRGPVYKTVLCCSDDAEVGTQAACNGMEKDLLRTLAFAALRPLPLAPKDTESQAGGRHIDRTSPRATSERSQEPYDANTPKLNTPSTRLKSQTVALSRGKFYTQRWPLKCSTGLSGF

SEQ ID NO: 929867 - protein, 153 aa, Homo sapiens
MANAGLQPLWLFLYLTSVFCLYIFHHVAALDSESTQARRLPDQVDITTKQFQSWICALVQKGSQATMPTESLPWRLGWQDTEGTESPSRPKPGFRQDHGCSPGEETHEEDIRVLPSDLNPATEDPEGGFSLGPVWKAVLRAGPKLGSTFAYAR

SEQ ID NO: 929868 - protein, 166 aa, Homo sapiens
MRSSRRALHLQPVTTSSTFSSNEVLSESPAPCSLSPLPPPSPPVPPPNLWSNSCGQVEDKWTTRWRHLTGTNRRGDPRPTALSRDTWPTAPCQELAWSSCLFGLWARAGSGSAHFALIPGSTRFPQTLIFVFLIPGNSSPKQIPFPPFPVNVRWLMQATSALVHVT

SEQ ID NO: 929869 - protein, 136 aa, Homo sapiens
MRQGSSSFSSFKLTQRLRLRPQDSEIPGKLVRRKGEQSISAVSKLPSLRHFVMAAEQTKMEASQVQLRKGSLHQRVRVMGQVTRALQTGEAGQLWDDRLWATTSRGDKEVSAEPRSCALQPTEGPRRGFLLVRSLM

SEQ ID NO: 929870 - protein, 138 aa, Homo sapiens
MGRVFDRGAGAGEFLMRKRHKQSKGKNQPFARQASGQMQAGALCSWSWREHLLSSLPGARAPWNPKLSGFRTAPGKCVASFIRRQRLAVLRPSPWLLPDERSGAFTLLAPLKHTCPAHLDLLSIAVGRAVCNLGLRKR

SEQ ID NO: 929871 - protein, 133 aa, Homo sapiens
MVPVTDWNTIHLIKGHFGAADVEHPFPPPCMSDIPTREGSLSVLQPREHAWYWPYELSLENGHIGKKKQVMFSPDLCYSLYDVEVKSSVDYSITYTKGLCTLIGVREPPSSFTGMDYIIGKILEMQIYSIEFK

SEQ ID NO: 929872 - protein, 149 aa, Homo sapiens
MQRGGWVGAQAPVPRSTAWRLASGLPGKHAERDGPTASTAPGQGAMRKDMAGYIAITHKGGECTPKSAILWLLLVVVAAACILWIKMKHTFQTVKGILELTASFQGKDIFQPSENLSADNSLAEDPHFEASSCMQPRAKQTAFCRLPAF

SEQ ID NO: 929873 - protein, 135 aa, Homo sapiens
MKKQAEWAPLHRGWCIQMSTHQSCCGSTKTTEASARGSLERITRNTSRNRQAVPRLHSWDDGQRQRQGLAMVAVIVPALEEAALHRDLEMKGVYAFPVNPPYGRETSKRHSYIKLCSMLAGFIDQKFLGQFCMMV

SEQ ID NO: 929874 - protein, 150 aa, Homo sapiens
MYISRMCVPPWVLPRGQDRRAPGLCGKGASGPALPPITPSHRRNAHTCNLLLHFLTVVYKRRWSLKLMRGDRRASAHGCCLCPGSPQPFQGPGTESGGTRDGGLEACSRLSLLVEDPILQGPVPYALPSPESPRQPRKHTAWEQDPPRPG

SEQ ID NO: 929875 - protein, 148 aa, Homo sapiens
MKPLLRKMPWLIKGTGTFSSSVAPDIPTPIPRSWLDTLGNPRDAAKVMDSCRAEGAAGRPGASCRGSLSTRKAWSARVGLCLSQAWGLDRSWPVSVLSVDTGPGAESVPSVDAGPGAESVLSVDAGLGAVSLHLMWSQGSLTTCALTY

SEQ ID NO: 929876 - protein, 179 aa, Homo sapiens
MTRTQAGRGGMVCLQVSPRISGTCKRTGTAVSGSARPARGQAWLSAAQPTVALWAAHQGNPAWGRHDFIEEKLKWVACMEMESPGTFTESAWCRKPNRRVGTCPLLRSALKPCRCQKKTHTGVFHSLILEASRTDLNHAQHGESKLKRAAPRYPQSTRDWLRCRVWPDTPAEPASCCLF

SEQ ID NO: 929877 - protein, 125 aa, Homo sapiens
MKGHADIYIKRMFWNEYQAVQGKRACAGELPFIKLSDLLTITRTAWENTLPRFNFFHLVSPMTCGDYYNSSHLQPQILDNTQKVPQPFQLISLHCSRAEAAGNASPGCKHRHVVCGSQCLFQWGN

SEQ ID NO: 929878 - protein, 339 aa, Homo sapiens
MLRAANTVANRVQGAWPPGPTFLDKVGAIHWPPMHRYLLKPAGTVAVAVAGTVAGAVTMAVAGFVAGTVAVAGAVAGIVAVAGTVAMAGTVTVAVAGSVALTGSVAVAVAGTVAVAMTAGTVAVAGTVTVAVAGSVALTGSVAVAGTVAVTVAVAGAVALTGPVAVAVAGSVALTGSVAVAVAGTVAVTVTVAVAAAVDVAGTVAVAGAVTVAVAAAVDVAGSVAMAGTVTVAVAGTVALTGPVAVAWHCGCGYDWYCVLAGAMAVAGTVAVAVALTGPVAVAAAVDVAGTVAVAGAVTVAVAGAVALTGPVAVAMTGTVAVAVAGAGVIAVRGRQGLE

SEQ ID NO: 929879 - protein, 165 aa, Homo sapiens
MQMKVFLYESHSVKFTRPSAAGLLEFAGGPLQTLFAWVSAAEAAEQQILVNSKCCCLIVPLEVLSQRSTWPCEVSPAACWENHCSLQSCQTGTFKSAEVSAAFCLAVPCPQRWSLQRQAGHLELWWASSSSSFLAALFTYSSLGNGGCPSPSLAAALQFDLRLLC

SEQ ID NO: 929880 - protein, 140 aa, Homo sapiens
MGIRHLVKLAFQTSGKDRTGTAGKHWGKNEVGFKPQPLHQDECQNGKDPEFDPRCGGDSMVGKALFPAGGVLTDLTSREGSVRCGWTCTYSLPQQFSSTTRLLRRESADAPGRIKTSSFFNPVSEEFCLRLETSYIGLGP

SEQ ID NO: 929881 - protein, 135 aa, Homo sapiens
MPHFPLCAAISSFHASECFSCFPSGFQHFFPTRYIQCVITYVLFWFFLVEESLQTGFVWETFSPVISSRDFSKGLCDGLRSALLQESFGRPAWCLSQQIHRDDPVLVWALSLSLQGLDRHNDGSGIWIHWNGPGT

SEQ ID NO: 929882 - protein, 139 aa, Homo sapiens
MKMTCQGFSCSCLKWGRGGGGETEEEGERQRRRERDRGGGRETEEEGDFLHQGWELAIKIIRQLMEKFNLDLPTVTQAFLKNNGELEATSSFLAAGQRADRYPIWSQQGDIDLQKDDEDTRDALVKKLSAQNVAWRIEF

SEQ ID NO: 929883 - protein, 284 aa, Homo sapiens
MQQVTTNLVANTSLFSTVLEATSLKSVVRGKVKVSAGLVPSGGSRGEAAPGLCQLLRAASIPWLVATTSSLCLPGHWILHRGRRWSCRPVPRCVPTLLSSWAVDGTAPHGARGGARQGGSGRAGAHGSGGGVCSGTAGCRSRALPRGEAAEARREFEHSTSRPALLGDPVHPPQLLARVLSPSLPGAGGAGRLQVWGPPSPRPPRTSAGPQAPHAAPVPARASPSTPPRKLREPSGLGRPREGLPQCSGGLKGSSSTARVGTETEEAPRASEGCEGCQHAVTSQ

SEQ ID NO: 929884 - protein, 162 aa, Homo sapiens
MLYNLLLTLFFSLSFQSLYTFRTYNVDHFRNPPQLGTESLLEALTRRLGCRLPPSREEHSSSFPGESLSQKVLLRSRGRTGLHSHPFCQISLRKQVVTAQVPQNSFFQSRTFCRRGKCVHLGDKQPYRKQEDGCNCWNIPQMRTSGRESGLKAPSSGFCLEV

SEQ ID NO: 929885 - protein, 151 aa, Homo sapiens
MNSNKRDYCNNGGSGSRRDSSNSYICSSSSSSDTDNNNSSSNNSGSHYSEDSSGSRSNGSRNSGDSSSRCSSSSNSSSNSSSSNRNSGKDSSNSDNSNSSSSNTSSICSSSSSGTSPFIAWKNSQKLDIYIKLNFYHVNFMFHFKFYPNHL

SEQ ID NO: 929886 - protein, 143 aa, Homo sapiens
MGAGLSHPVLVISQVCCYQQYEYRLIQQVFTDCGLEFCFHICVLKGDRRGDQERRRRLHEDEGRDWNKAAMSQGTPGATRSWRRQGRILPRPFSRPGPADALIFDFQAPELYLPFWRSRLPLVCGQQSLEGVSVAIYLNTHIR

SEQ ID NO: 929887 - protein, 145 aa, Homo sapiens
MGRNQRRKAENSKSQSASFPPKDHSYWPAKEQNWIENEIDELTEVGFRRLVITNFSKLKDHVPTYSKEVKNLEKRLNKWLTRINNVEKTLNDLLELKTTAQELRKPIRLTADLSEETLQARREWGPIFNILKERIFNPEFHIQPN

SEQ ID NO: 929888 - protein, 141 aa, Homo sapiens
MVQQFQILENMEVSLELGMGRETFAASPFHHNPKVLGGQNGFMSQAQAPTDLCSLGTLLPASQLLLLQSWLKEAQVQLRLLLQRVKAISLGGLWLPYDASQGKVEEGSMRFAFFVVLGSIIPRVESFFPVDLLIDQGRNKV

SEQ ID NO: 929889 - protein, 141 aa, Homo sapiens
MVQQFQILENMEVSLELGMGRETFAASPFHHNPKVLGGQNGFMSQAQAPTDLCSLGTLLPASQLLLLQSWLKEAQVQLRLLLQRVKAISLGGLWLPYDASQGKVEEGSMRLAFFVVLGSIIPRVESFFPVDLLIDQGRNKV

SEQ ID NO: 929890 - protein, 138 aa, Homo sapiens
MFLDECTLLTLWNPHLVTHAIFMKWYVYTHTSQYKESSWPLNVHGNQGETTTYLNLFSSCPPPHGAQSSTEEREPEGSAKAVETDSVTPRAGIRHTRSSEFKDLKSLCNSLLGYFIRLYNTSPPRKRVWALLDTSCKG

SEQ ID NO: 929891 - protein, 170 aa, Homo sapiens
MNSIELAFETQACTEEVFVPPDDGGGLCPCLGPQIFPPPASKIQGASISTIGSILRSPHMQRTLIHTVRTSLSSVAPLVLPSALRAALYSCAGCALHNGAHCRQLPLTSQTLRICEADLLGKYYLLVVIEEILSWLLEEEFADPQSGAAQFQVVHGLCQSKNSLLLSVVR

SEQ ID NO: 929892 - protein, 140 aa, Homo sapiens
MFVCTSGNQRELARQKNMKKTQEISKGKRKEDSLTASQRKQRESRARQLIFRIGGLARKLDLTEMKRKMHEDMISIQNFLIYVALLRDVATFATTNNSAMWIIVLIPIYWCFHFYKNGFLKIEFLGNSYVKAKYNIETNL

SEQ ID NO: 929893 - protein, 211 aa, Homo sapiens
METGRQTGVSAEMLAMPRGLKGSKKDGIPEDLDGNLEAPRDQEGELRSEDVMDLTEGDSEASASAPPAAKRRKTHTKGKKESKPTVDAEEAQRMTTLLSAMSEEQLSRYEVCRRSAFPRARVAGLMRAITGSSVSENAAIAMAGIAKLFVGEVVEEALDVCEMWGETPPLQPKHLREAVRRLKPRASSPTATAKESCSRPTARGQGLFVQE

SEQ ID NO: 929894 - protein, 210 aa, Homo sapiens
METGRQAGVSAEMFAMPRGLKGSNKDGIPEDLDGNLEEPRDQEGELRSQDVMDLTEGDKETSASAPPAAKRLKTDTKGKKERKPTVDAEEAQRMTTLLSAMSEEQLARYEVCRQSAFPKARIAALMQSITGSSVSENVAIAMAGIAKVLVGEVVEEALDVCEMWGEMPPLQPKHLREAVRRLKPKGLFPNSQLQKIHVLGPRPEGKNSML

SEQ ID NO: 929895 - protein, 138 aa, Homo sapiens
MGNNPKNPNKSVSYSLWGRQLALQGSLQTSHPTPLQSTPVMSETLPRPNHFPTLQSPRPPNSPPSYPPRWGDDGENFYPLIICLVPLATKPAPILRQSRGPAKSHFTHIIPDLLTHRCIRSRDSRRQRHPLGKTCENS

SEQ ID NO: 929896 - protein, 139 aa, Homo sapiens
MIISLNIKPYELVRTISQKKKKKKQMRELQLLKSAEKKCSGNVVEGDGRGICRTGWEGFSEEKCAHCWSESERSSISHRIHKSIIKQAFTEDRYDVPGTVPGTVNPKSSPRYIPQVNRRPSSQARCGGEDSDIDDPDPV

SEQ ID NO: 929897 - protein, 155 aa, Homo sapiens
MLEKANVYFAIFGPYCLMRPREETTKQALFMISPVMQSSEGSPDQRMCFQGGSFTRAGLSTGQLECPPNMGLALPKVRDPRETADRSHSFDTEGTGHLFCHTLFVRSESLNQAARSREENQTPPFEASFQKVFKYFLTYLKIITPSYMFLPNSAS

SEQ ID NO: 929898 - protein, 134 aa, Homo sapiens
MGEAFLGPFFLGVELYAEQDYPVCPKQLWLRTKPGEEADKRDCLGNELLTSLCGTMDFSRSPFQGSYKYNLPEARTKEKPESVMRQQTGNVKRPNQAVHQQGVHGLQRAGTPLLRGSWKTLGKAVDACEPPFPY

SEQ ID NO: 929899 - protein, 142 aa, Homo sapiens [sequence omitted]

SEQ ID NO: 929900 - protein, 180 aa, Homo sapiens [sequence omitted]

SEQ ID NO: 929901 - protein, 154 aa, Homo sapiens
MGVPSGTAFAYSTPWGGRGSCVGQCGIAAWDVDILAVVGHVLQGELGSVAGAQSHGAGTPSQGGAPISSFCRDRGRSDLPKDLEKLHRFDIQSVGMVAVRCTPEPQVSHSSIHTLTPLTTGGRQDHGLQHLCVKLVVGPGAGVIAILGAGERVG

SEQ ID NO: 929902 - protein, 190 aa, Homo sapiens
MASWQRIQTSYSNLGDPSDGGRSFDWTLGLGSWWWSSPGRGNAKNKEWLLVTIVGCLVKDMKSKSLEVIYLFSLLIKKSEVIDSFPVASVKDEVLKIMSCKSRSSLASRPGSKHLLPLETIMATLTFVFSDPWRFLNMSYHSLLAFKVSTEKSAVRCTGALLAALGSNAKSQILSPCHVTVAGRDGPGVA

SEQ ID NO: 929903 - protein, 150 aa, Homo sapiens
MSAAPAVAERGQCRAWAMASEGASPKPWQLPRGVEPESAQKSRNGDLESPPRFQKIYGNAWIPRQKAPHRVPTGASGALPGAAVRRGPPSSRPQNGRSSHSLHGAPGKSADTQCQPEKAARMGAIPCKATGMELSKAVGAHLLHQCDLDV

SEQ ID NO: 929904 - protein, 126 aa, Homo sapiens
MWVLIGIELNLLITLGSMDILTILFLAVPEHGMSFDLFVFSLISFISMFYIFQCTSLSPFWLSLFLGISHGEREREKKKKKRKKKKRKKKKKKKAEEEEKGEEEEEEGEEGEEGGGARHFKRTDIV

SEQ ID NO: 929905 - protein, 160 aa, Homo sapiens
MGNMVRPVNSMSMSPLLHCFSHKVSALVRGNAVWNTVTVDNAFRESMDGSLGRNFACRIGKPISKLSAEDSRALLQNPRGLCCDSPVLACQRLQTASLSAIDTLVTIGFIGSYGPSGRAACTAAWAHCTAFSSFGPYPKLAAFQQKEYDLLKAQMIISSL

SEQ ID NO: 929906 - protein, 416 aa, Homo sapiens
MCPTEELIQDTTQRLFFLQVKEGILSDDIYCRPETAVLLASHAVQSKYGNFSKEVHKSGYLAGDELLPQRVLEQHKLSKDQWEERIQVWHEEHRGMLREDAVLEYLKIAQDLEMYGVNYFSIKKKKGSELWLGVDALGLNIYEQHDRLTPKIGFPWSEIRSISFNDKNFVIKPIDKRAPDFVFYAPWLQINKRILALCMGNRELYMRRRKPDTIEVQQMKARAREEKHQKQMERAMLENEKKKREMAEKEKEKIEREKELMGRLKQIEEQTKKAQQELEEQTRRALELGKERKHAQSEAEKLAKELQEAEEAKELELARQKKESEAMEWQQKAQMVQEDLEKTRAELKTAMSTSHVAEPAENEQDEQDENGAEASADLRADAMAKDRSEEECNTEAEKNERVQKHLKAPTSELANN

SEQ ID NO: 929907 - protein, 144 aa, Homo sapiens
MQDVGSHGLGQLCPCGFTGYSLFPGCFHGLVLSIYSFSKCTGQAVGGSTILGSEGQWSSSYCSTRQCPSEDCVWGLQPYILFCTALAEVLLEGTATVADFCLDMQAFPYIFSNLGGGSQTSILTSLQPQAQHNVEATKAWACTF

SEQ ID NO: 929908 - protein, 141 aa, Homo sapiens
MWRVAHQLTPAHQQATNQQNNVKFGQGSWRRAWAAEMLPSPKPPWPVPPLILYSEKLQAPPAEWQSSEGEKTQLHVGEEQLDFRGMLPILLRATFICNKFSAYIIFNSFPSVDGKAERAHCNTCTLGLWGSWLSPYCHGAA

SEQ ID NO: 929909 - protein, 147 aa, Homo sapiens
MSAQKGLPQLRCRLKPTIPKALDLELEALISHCNSKPVEDLKFLFKRQPQDNPSIYTIYKEPSTGNADLPQTIYIHSLQNNANYTCSKELNFTITTFTFESTLCTSGTFTRNSFISQMQLTETPHFPKCFQLFHENATIVPEIQTFR

SEQ ID NO: 929910 - protein, 163 aa, Homo sapiens
MEGQTLGPPGGNLSCNTVTEDLWMMWTNPVTFPAAAFSPSFCYIFATDCWALEANKRTSAKLLAQKKTGTIWRTQKKSVTLPRDLLNVFDQNTDSDISSEALAEVGSDGDEELVGNWNKGDSCYVLAKRLVAFCPCPRDLRNFELERDDLGYLAEEISKQQSI

SEQ ID NO: 929911 - protein, 161 aa, Homo sapiens
MGFAVLFILLCFHVLIIVLFIFLLQTCSRVYNAGPNLSLAALELGGLAFNIPQHRFPGANDVNGGGDDNVGVDGDDNIGSGGGEDDDDDGGGDDDYGSEDSDSDDSGDDDVDGNDDGDDDDDEENHGDSNTDSDGNDDDGDSDDDDDDDGNGNGDGYNYYL

SEQ ID NO: 929912 - protein, 142 aa, Homo sapiens [sequence omitted]

SEQ ID NO: 929913 - protein, 146 aa, Homo sapiens
MPVLRERRRSSAFVEQLLGPVHGRNTCSILGKGPNIKHDTSTHEARRSLPGSFRCLENMEEQEWRRIRKRKELTQRVVTEGLDSVPHINRSLTVGHTQDDVTQDPMTVNQTHSEALGIVLGEALQVGKANPIPVGVKLSQHELLPF

SEQ ID NO: 929914 - protein, 160 aa, Homo sapiens
MTTSYICIVLICCSLRVMCLLSNVLGWLNGDHQNADRNMDGEVQADKVLYRNEEVIGNWSSAEEKCEVGALCRVPTRALSNGAVGREPPLSRLQNGRFTIISHPLPGKVANTELKTMKRATRLHPTKPQGQSCTRPWGTTPWTSMSWMQDMESKELALQL

SEQ ID NO: 929915 - protein, 148 aa, Homo sapiens
MLARTQGDTYLEGAEIGTKFGHGAVKNIQSCYVLQESMMTFSSCKLPDKVEIIFHLVPMSSSSQAAHHKERPSWLSAQLPEQYPNHQNHLHPPFVFPPSHEKPNLRLSIALFSQGFTGNQTNRIYYKELAHMIMEVDKSKVCRIDVSV

SEQ ID NO: 929916 - protein, 162 aa, Homo sapiens
MWAVLPETGVLDNRNLLTHGSGGQKPHIKVPAGWVSSEDSIPSLPPASGSAGSGLWQHKVGLHTTLSLCVRLSPGFSCSKTNSLRLNPVEDMADDESKNKIIRLHYQKTPCSFDPEASRTSEEKIGAEELCAGDQKKKTEAQHEAKEENKSKSKTLSRHGVA

SEQ ID NO: 929917 - protein, 151 aa, Homo sapiens
MQWWRMSSTKEHIRLTDLAGIALSSAFPALSSKCYHLQLTSCVFVPPHITFCSQGSTPGQEAMNLQFHHFFQLLLVFVSPIFHGHVTRTQLLDELRRRYYNIFGAHNVRLEKGEQQLPTTIPSLPGLGHMAQEAPGCWAPPSNWVFFCLSV

SEQ ID NO: 929918 - protein, 145 aa, Homo sapiens
MSAYRSIISNSGSWKRLVSALETQVARGIDKLYNTLHSSEMKQASLHHSLSSSISGTAAAFLCKCKRLSQDRPARRTSMQMRTDEVLKPQECSERKKNRIWLEKILGGNSDLLLPEGILRRLHGIVEEAFTGQTSQEDIHADEDG

SEQ ID NO: 929919 - protein, 423 aa, Homo sapiens
MKEKGTCYLQHFSTLLPSSAAGLRRFVIIPQSFCQMWAIPCCGSTCLPRVALGPHPPGQFLPFMKTAIYALLPPPASQGTWMPSLEVDPNCFCPTHSQSLQAVLVHFHTADKDIPETGQFTKERGLIGLTVPYGWGNLTIMVEGKEEQVPFYMDGSRQRENEEDAKAETHDQTIRPREIHSLPGEQYGGNRPHDSISSHQVLPTTHWNHGSTVQDEIWVGTQPNPITGSVGSVSSMFLGFVPFSHLHENSLSHPTFCRPTQTAWSLWGLHTLSPQYSPGNLTCNCKQGTSPTGRQWDICVSIATARRILKTEPGTEDAWEGPVEMVSCEGYGEEEEEEEEEEEEEEEEEEEEEEEEEAAGEGEGEGEGEGEGEGEEGEGKGEGGGEEEEGEKDGGGGEEKVRREKEEGEEGEGRGGGKEEEGR

SEQ ID NO: 929920 - protein, 188 aa, Homo sapiens
MAELGQEGCGHLQENRGWGIGGGPSGSIDIECLLNAYGRNHCKKDVRKICPVHPGRQGLFAESNNAGWGRRRSWSQGRSQGLMVIDFRCVGSDWGGRRQRALLMAAGDTVAAMGVWGWGITGLQRRRCENPDPCSPPGTFTYHSQPCWSLTWSKADPLPHASAGPGLPCLGPFTQYSSILSRGLGPHP

SEQ ID NO: 929921 - protein, 144 aa, Homo sapiens
MEEQRQRIPELRERKNRIGASNVEEQATSKENAPKKGDLTLTTNSALNPAAFLTGNPNPKDPEHDCLDLIDYHTKVRPDLRETPFETGRHLFIDGSSRVVEGKRHNGYFAIDGVLAEIESGRLPNNWSAQTCKLFVLNQALKYL

SEQ ID NO: 929922 - protein, 148 aa, Homo sapiens
MRRESLTVKELQQGGQGFIGKREKALSSAKRIPNPDGRGLLKRSSKKKTCIRHTVDLLKETSVKDREERKQEEAVESLQTSKQVGVWLLIKGYRHVFEMPRWQNQDDETSEGSGNFRILACSETCSQMVSLLLPAPGPKFRFSLDLTG

SEQ ID NO: 929923 - protein, 320 aa, Homo sapiens
MNESSFAEQEIRKAGYAICTLNDTIESMPFSSGRSAQLAELIALTRVLKLSQGKAVNIYTDSNYSFLVLHAHVIIYKEKDSLPWEVAVIHCKGHQKEMNEIAAGSLDWEGPYTVLLCTPVKITGIDYWIHYTRVKAWETDRITSVDPEEHPKHQCEEIGDRKLKITKYAGAQCGSHFQHAGSSCRLNTKPRRYGIQASSPSQAQPAGLSGQSKPSKPELSPRQRAQRPRRLQAGKAASKEYWNMVTLPPVHRPMGEKTEVRTKQVEEGGYAVCLLSLLARSVFLCQMLASSPPALGHQTPGSLAFELWNLYQRPRDMVDR

SEQ ID NO: 929924 - protein, 149 aa, Homo sapiens
MVCSIGQRLVKGWYQLFFVYLVEFGCESIRSWAFLVGGIPEEGIVIKDDDSPMSVIFPDDLPVIQEVGDSLACSWASEVTSESYKLVSPELFASQALIIVVEFSILTVGSTHSDIIYFTKEKDSNSNALKIPFSPLIPCLWERFGFPPV

SEQ ID NO: 929925 - protein, 123 aa, Homo sapiens
MNGPKEKTIAWDKGPLSSGEGGDKLWEGTLRVVLRLVPNIGGRSTFMDQTAMYSVSPTADTPEGGPKAVFRERTLCPLLVKPWQTCWAGMTYPMCKYLENPTVLPHTQPEAAFSDLLVLVLLH

SEQ ID NO: 929926 - protein, 160 aa, Homo sapiens
MSEPVKGVSLHLQLVGTSVLREQLTSSFITKPNTHLAQEMELLKEDTGQVEQLQPSNEQQYRISKSQPKQVSHQPQGFSFSIITQLSLKARHGTQPGALSRELLAVVPTGVVLPEPMASLGEPNLGAREWILMVYKKEVAWDMADLLTLEMFAPQMRLQD

SEQ ID NO: 929927 - protein, 146 aa, Homo sapiens
MGVGLSHANLMIRQDLTTFSGLVWNSWPCYQRQIPQRQTHTEGRPCEEIQGGDGDVTGVTHLKATGCQGLPANMGSWERPERILPDSPLSGHRSSWRVVSFWIVTYPVNEACVTTIMENMQMRKKVSQCPTTLNSGSTPICFLIFV

SEQ ID NO: 929928 - protein, 147 aa, Homo sapiens
MLWMTRREELWPFGKPGPRASLSQSCDTLFGALWFLASPGFQVPLSSPFPGLQPRTEPAPVLVPEAVHPITATSMPGCAQWSDPVLAHSLPHPLLLLNWLTLGRCGIWVGSRNQAQPARLSWGNEPSGHKQNPSRGTTSHRGFWLAK

SEQ ID NO: 929929 - protein, 178 aa, Homo sapiens
MTLHLIASLAVGGSLEWSMALWQRQFPANSPQSVFPAAGEVSSSVLRGDLGAPPIHYPILKNIRNPDLQKEKSFLLKGLAGLFQHVQCARRQGNSSATPVGKSESRTPNHHFLLVAIIQEIHPTMEGKECSRPKNGNKRSRWKSQHCPAWGPKIMTSGKRCRSVEEFELELQGKGGLL

SEQ ID NO: 929930 - protein, 141 aa, Homo sapiens
MLASPLLSAVIISFLRLSPECEQILVPCLYSLQNSCEIQTSYLLPKYNGGTGIGYTCTFQKGATGKKKGVTGPKYLLQQQSYFLVPIFYFSPFSAAISEDHRLVGDMTVKSMTKKLFPQCILVRLSVHGHICPPQCPLQPD

SEQ ID NO: 929931 - protein, 160 aa, Homo sapiens
MAGKVGILHHKAPDAEQSVREVRMGLANCQSSEEGASLAARALPGGGVLELSMKEDWVKGQLGWENGWAYAWLAMNAGEDASCPVSRQKGGHSHKARTDGPLNSPQPLEGTSGENLFSECLHLQDPKAFSAIAPVPREMEGEKQTPPPLHSLWLCNSLDH

SEQ ID NO: 929932 - protein, 150 aa, Homo sapiens
MNISEPLISSKFYGQIIHPHYLQTSGNRIRQRHKQLDVKRNTSVEHTDKYRQMPTRWQAIDQRNDVEFGQGSRRGAQPLGGLTPGKKPPSHFISLLAPPSAESYFSQSCYSGNLLSSIRNRSYNMALTFMSKEHEADGKVYFSEIVSHRE

SEQ ID NO: 929933 - protein, 153 aa, Homo sapiens
MSRLTFLQTSSIPTSDPLEDPPLDFMGEHSPSFFIQSSAQCLPLQPFQRFWGPPLSLTKKFFAYTSCAAKKSHERLHWEEWYTPAQILCFFHGLHNQQTRRFPLVPGSAGPMPMEPSKLKFISLKFLLLVQQSEINLGCWSLVGGGISAIAEA

SEQ ID NO: 929934 - protein, 152 aa, Homo sapiens
MKVFRWKLGNIVGVTKNPANILCLCSRVLSLSFFSFPQFGGSKLPFNCGSDRQFYCMFRYSWYKLTWEDLKRDSWTLLHVDFILQQFYRKINLKTIYRTNYRTRIGDISKNLFPLIWMRADETMNRERWCGEVETKDGFEYSFRGKGNKLPD

SEQ ID NO: 929935 - protein, 189 aa, Homo sapiens
MVSSFIHAQGYFSQKLVNPARTRSISSRQQISFWPSVGLGMLSRSKDLESRAPGICLVNLSWSCNAWSWVRVDMGTPFSCHNWYRTGSCTSQVHWLQDQCSMSVCPKTPVIVAYHSNLFWTSGHLNQLVVKLARNQFPPTGVENPLLARSGLNVPSTNTSRNLSCVVLCCYRETLSSSAKTHTHFTLPS

SEQ ID NO: 929936 - protein, 322 aa, Homo sapiens
MAGTSERSLISSISQPKAIECFEVKKKAFLTHGRYHGSGATPPKTKDPKPETFCGQTGLPTMEVRINVSRQQVEKVFGLEEYWCQCVAWSSSGTTKSQKAYIRIAYLRKNFEQEPLAKEVSLEQGIVLPCRPPEGIPPAEVEWLRNEDLVDPSLDPNVYITREHSLVVRQARLADTANYTCVAKNIVARRRSASAAVIVYGGPRDSLVTGRGTAVPLGSDMWLVGERWVVDVDRVVRLQRQLWARLAETEPELHQPGASQRGRFLWSPWSKWSACGLDCTHWRSRECSDPAPRNGGEECQGTDLDTRNCTSDLCVHSESSLP

SEQ ID NO: 929937 - protein, 147 aa, Homo sapiens
MSNCFSNFLCPNLAFQNLTLSKFQNYAFCFLFTQCNEEPCKIASDEPPLKSCLSKWASHAAFIPSLSASFFIGNLQLRQEIKEKQDTFFSRWQEGDLLSEGERTTYKTSDLVRTHSLSREQHGGNHPNDSITCTWSLPSHMDMMRIM

SEQ ID NO: 929938 - protein, 238 aa, Homo sapiens
MHSYIGDYWLEEMKDRRFREMLFPKVEGSGKVFPPEVEPAIGPHQRQMLALCFSYSLQNGGARCYLKGWTGRWNVRCRELPAQPWSRGQSWAELDSQSQPQLHILDRQERFPIILLSRVSCVSVQTDTAVYLQAAMKLRATENTCTMVSGRSLFPQPKTDSFAGHLFSTARTLPLSVERGRGSAYGARRSDSAVAPGDQSSPLCSYGSQGKKSGSEDHKQTETLKLHDEAVVTVNTLG

SEQ ID NO: 929939 - protein, 140 aa, Homo sapiens
MRESLELPRDLLNGFDQNADNDMDNEIQAEVISDGDEELVGNWSKGDSCYVLAKRDWQNFAPALEQQSIQNVTWVLLKAFSFKRETEHKSLENLQRDNAIEKKIPFSEEKFKPATEICISNEEQNVNHQDNGENVSRACQ

SEQ ID NO: 929940 - protein, 156 aa, Homo sapiens [sequence omitted]

SEQ ID NO: 929941 - protein, 144 aa, Homo sapiens
MAFVKQEKRGPGVSAKRKKVEVGVREPESEARKLHRGKRACGPHQSLRERGTALEPALKPQLHSTQLDEDGKFPEVRNAFAICLAQVVYLRWSHHKQLCACLLMSIAVTGGEADYHPTGALLLEGISGPYPICRWAKARIYRVI

SEQ ID NO: 929942 - protein, 141 aa, Homo sapiens
MKIYSSALQEGELSSPWSTCMHQVTRRGPQGTCLSNCTQVRCQLPEVLPEQMSRCKIVMVRDVMTVLCQPCFSHKVSYSFVNIAKHFYYAFQRFSNLFKAFGFYIFAQMGKNGVNVYVEYTWGGEGVVIEAEETLQNRKQE

SEQ ID NO: 929943 - protein, 134 aa, Homo sapiens
MSFLPYAGFKRLTMPNVNKAVERPTHLYNAGGSDESRKGEDMNKCGQYVISNEKLSPTLGTGEHWASECIQKTSNTYTCLASCFLTALEVQYGPRSLFQYSTIRISLNEQTASVNLKAEHLQAPAELYSQQDRG

SEQ ID NO: 929944 - protein, 185 aa, Homo sapiens
MWLCSKSHLQKDGFGKAASPERRNVSGASDLRPADSISPNHTWLRHKPNTAAHIVAREVSSQTEFLWLTPRSPPFTVRTRRGSAPGGGRAVLRPPLRCAPGLRTPGRLGAAGLARPRGRAVPRAWERERRQPGLALPRAARKKPLAASIHLLACLKLFINSPRGAPAAAAPPAPRWSGSSARRTC

SEQ ID NO: 929945 - protein, 168 aa, Homo sapiens
MSGPLLLLPLTFGRPVFQKNSGWELWESPILVRQEEVGGILKETEVDELEMPEKSLGCSPGSQERSHGGGKLSNTSHDSWPQKSVSKLPSLRGLTLLPNRKPMEQNNLYSSPRMVDHYKETQRAYNERKPTKTPKKKQKNPMGCPLLLSQSDPVKIHLHQRSYRASQY

SEQ ID NO: 929946 - protein, 187 aa, Homo sapiens
MGLRSKTQAWAQILALSLTSCAVIVLGPGKVRRLCGGFYRGPCPDMDALGLGRGLPECGAGAQTMRSFNSVRLHGKGSAESEVVGSTAAPLGRSGMGAGGDQMPGHSRAGDEHMEQPLLMQIEKRLSHSRSPAPLGLPSSVHFNASRVSSAPVLQQTWHGVQKGHMPSVFSGFAKLVKETGLTTGTI

SEQ ID NO: 929947 - protein, 250 aa, Homo sapiens
MKQSSGICRLAFISHNISRESPEKYLENPLSSKIALSLGCYICCTDAEYSRPTPGSLATVSHVVTAEFNSQRRTVLQGSPSKEVKDLLNSSTSHPACQFVNGSTRNYATQTSRNRDKNDSRLLCRNYATQTSRNRDKNDSRLLCRNYATQTSRNRDKNDSRLLCRNYATQTSRNRDKNDSRLLCRNYATQTSRNRDKNDSRLLCRNYATQTSRNRDKNDSRLLCRNYAIQMTDDIFKETKDECGHPGILC

SEQ ID NO: 929948 - protein, 407 aa, Homo sapiens
MENIDSPWHELFRELCKINAFDTCDSLIIRGKEFSDSIHNTFYHMRRTREHNEVGWLLLSSLDKVKKGNDELRDSNSLPQKQKLSLKSSKIALRDLRPFTTVTVHWGKGNDQTFQGLLDTGSELMFIPGDPKHHCGPPVKVGAFRGQVHEKQFAFSWQGEEYTFIILPQEYINSPSLCHNLIQRDLDRLSLPQDTTLVHYIDHIMLIGSSDFEWGPEQEKALQQVQAAVQAALPLGPFDPADPMMPEVSVADKDAVWSLWQAPIGESQQRPLGFWSKALPSSANNYSPFETKLLACYWALMETEYLTTGHQVTMHPELPIMNCVVSDPSCHEEGLQMAQTLQELVHSSRKKNHGLLKCLLKAENTEWVVEEASPLAEPNQKLKFTEAFWVRAECKGGIMNLYRPNRK

SEQ ID NO: 929949 - protein, 162 aa, Homo sapiens
MVELPPSWADLGCKVNVVSRYSPVYLLPGVKHELLREFSLTLRRNVWPQFHVGNQPTLLAVLSNELLNTHYLRPNTGLSQWEALLTQVAEQPGGNKPVLEIWRTSWEKRQQPPDPSLFLSHQIYSEEEESSVHPNLNYCIQRKITTASHSTRIAQEQESHLT

SEQ ID NO: 929950 - protein, 191 aa, Homo sapiens
MEDLREIPLENPDWTLFIDGKEVAVMHCKGHQKGSDEIAEGNKLANQAAKSAARKPQSANTLEAPLIWEGSIREINFSILLQKQNGPFLADSLSSHQDGCSQRMASSICQPPTKENLLKTVKQVVNACEICLKNTSLNRWLLLHRAQRMGSYPGEDWQIDFTHMPKSRGTQYLLVSVDTFTNWVEAFRCQT

SEQ ID NO: 929951 - protein, 167 aa, Homo sapiens
MAPAFARISLPNKGVGLSGIIRKACEKSKAPPSQLSDWEKYLVTDCPRTPQTVTDLEDSCPGQESKTEKAAPVSRRQLTSWPSMVKHTWGSVRVTAWAGACPGHPQSCCWIICPIGSGNGRLAGSGAQQTPCWILWMDGSQRRVCDGGKQQWWTASKSSARDLIFNL

SEQ ID NO: 929952 - protein, 162 aa, Homo sapiens
MIKVKKNEGASRLHPTESSSLPNLSTGASDGPHPCLHCVYVGYEGLFSLPELQPSFWRAEACLPPYHVLYKPLYLAHSGSSQTIARTKNQTPHVLFLSCHVTSTSWLPFTICHEWKQPSPEVEIGAMLLVQPAELSPKQISFLYELPSLRYSFMATQTDQDS

SEQ ID NO: 929953 - protein, 150 aa, Homo sapiens
MRISFGKLTTFGNTWPPFSELSDSSAFSALVDQWCQIATFIEEAVYGSSRGTGPCGAEILHRQCAQSSSSEAVLQSYLYPLLITCKLRGVQSTKEKFRPLSQKTSFSTLRSKEYAGEMWHSQYWGFCYNRVRERARKGGEKQKTAQKVSQ

SEQ ID NO: 929954 - protein, 501 aa, Homo sapiens
MLPALKHRTPGPSVLGLRLALLAPQLADSLLWDLVIVGEVESVTHEEVCYTGKELFEFSNLYKQKSGEQAWEWILRVWDKSGRNIELDEAEFIDLGPLSRDFAFNVAARGVKKVLILYLLGDCWPFTRVTVHWRKGNDQTFWRLLDTGSELMLIGGDQKCHCGPPVKVGAYRVSECMIAIAILSSWQSPHTGSLTGRMRVIMVGKAKWKPLELPLRRKIVNQKQYRIPGGIVEISATIKDLKDAGVVIPTTFLFNSLIWPTRSNFPSAGKASNLPLLSYFRGIWTLQLCVIILFGENLTSFRFHFAITLVHYIDDIMLIGSSEQEVANTLGLLVRPLHARGWEINPTKIQGTSTSVKFLGAQWCGTCQDIPSKMKDQLLHLAPPTTKKEAQRLVGLFGFWRQHIPHLGVLLWPTCQVTRKPASFECDPEQEKAPQQVQAAVQAALPLGPHGPADPMVLEVSMADKNAIYSLWQALIGESQWRPLGFWSKALPSSADNYCFF

SEQ ID NO: 929955 - protein, 173 aa, Homo sapiens
MRLICLEILLLLLLLLLLLLLLLLLLEKSCLDALPTTIWLRSILVGFVVTSGDLAFFCSAYLEPRANFLHEFPPGRRAIPAALLDWSVERRTLGASGKVFGSGVMASALNSSPLTQWGGAMQGNEDEAKRMGGWDLEKTCGLFVGPKCGSTIWAACGDFTYVIALLKGFNQQC

SEQ ID NO: 929956 - protein, 143 aa, Homo sapiens
MCMSHLGILLDIGSWGSFLKIVIQKICGGAHEFASLRMLMLPVPEHTASWYTASVIIRFLKLLLKPLKQCALEAGFFEDLRNMAIEKNTQPYFPLSLPERYMTAWVPHTRLFTPAYLSLREFLIWEEEGIENAIKDPGLVWNR

SEQ ID NO: 929957 - protein, 141 aa, Homo sapiens
MFKFLNSPLDEGKMNPFSAGPFHLLFLTVKVPPQGNSPLSPSFSGLCCLASPSSHWECYGLCGSHPETLTVCLVGGGANGRGRGGHQGYLGQLHQTSKEKQDQTTLGCCINQPKEITDNFLQNLALFPLVKFDSEAAHTRV

SEQ ID NO: 929958 - protein, 185 aa, Homo sapiens
MAEQEQRKIPLVPENLLKKRKAYQALNATQSKQALLAKKEQKKGKGLRFKRLESFLHDSWRQKRDNLKMLCIVEPYVTWGFPNLKSVRELILKRGQAKVKNKTIPLTDNTVIEEHLGKFGIICLEDLIHEIAFPGKHLQEISWFLRPFHLSVACHATKNRVGFLKEMGTPGYWGERINQLIRQLN

SEQ ID NO: 929959 - protein, 129 aa, Homo sapiens
MLELARTLSPNSYHQHPSFSRGEKLKLREFLFSPASGSLPAFPTTAGPPIMSFHSMSFPHNVDEEKEGATVEFVWSPQAKSRFYHLFNVFLDCCSDNPIIPLYSQTFSDYILPCSIAHHSLSYGSLAFP

SEQ ID NO: 929960 - protein, 136 aa, Homo sapiens
MDIKKEIKGTGDSKRGGFPQLSVSLAVCSYLALEHKNLMGIPGNATLYGSVAGLFNWEKSQHEYLGHGQGKVCKTRSDLGTSKKDTGEKRERKNKGEGEREKKREKDERRGNAVTVPECGALRFSLACQQLAVAVG

SEQ ID NO: 929961 - protein, 144 aa, Homo sapiens
MVVGIGRLTGALCSSPCAAFHRLPECPDTWQLASPKKPSNDIGGPSGLEHDRMKQDEQVKARGSGWRLWTAGPGWYPRSAARMGIESKGHSTKNENSLLQEWHQAIHEGSTPMTHIPPSRPQSQQWGSHFKMRLSGAKQTISKP

SEQ ID NO: 929962 - protein, 148 aa, Homo sapiens
MAVSHLPTMVQETLKSDELVTERQLPVCQQSCKCAQAPRGCQSLFQRTMCRGSPWSRRMNLLLQESVTFKDVAILFTQEEWGQLSPAQRALYRDVMLENYSNLVSLGLLGPKPDTFSQLEKREVWMPEDTPGGFCLVFERAWCLIQAL

SEQ ID NO: 929963 - protein, 136 aa, Homo sapiens
MRIAVPPSQSCCGDETVMQVQWNGACANNETVFHCWSYRTVLTSEKEGNAKELDPGCCLGPERGQVPSTPSSSFFKYVYLPVFHIIVSIAAGLNLFLQTQCKKLMSIYFPHFQLDPSLCGNIHLNPSGGEFNLHYS

SEQ ID NO: 929964 - protein, 157 aa, Homo sapiens
MLQKTWKIEDPGTYGSGDTGGFQTQEGTPARYHFESPADCILPWDPTDLATPDSLSPIDLPLTQTLLLLAAASISNVGATGSYPPSPSAGYRTFRSTLRTGYPTSNYHLGPKCVLPVALLRLLPMKATPATWLGCSCWSSHPSIPLRAWKSPRPCLP

SEQ ID NO: 929965 - protein, 297 aa, Homo sapiens
MWNVGVGTDSGCQESRQSLSRTLACSQVKEAGPAGREAQMEGWEAPVSLFSGTYPSGSSGGDEPVTGGPSAARPGAPTVSAGSCPSVLLTLLPTQDLRSSRLLLAHSPQWVGGQSLLPKTSRQRPSPDHSQKEVKGLQTPVDLQKGTLEQKHITLQGTWSPHQRLTTGGTKAGKERAPIHAGRQPVSSAGPPGQWSVPLTQASKTRFFPMGAYPPLAPSQDWEQDLHQPPLELVEGFAQAWPKADPPWDGAFQGLPPSSSHYQSHNLQQAQGREILRAGHWNRKPVQRVWDFLMPKQ

SEQ ID NO: 929966 - protein, 182 aa, Homo sapiens
MLWVSLKMPALGPTSLCAGRPCLAGFTHPLLPYGPPWASDPFCERSSRQCPETMARAERWDMRAHRHSGSLHPALRSHSAPGPELQRKQGVATESGCLSWWVVAVLLASSQNGGLWQQSRCQTVGWWGGLGRQSGEGRTLLLALGAACRGHRGCLSRWGWKPPPAAFAKVTLLMMPYFSIAY

SEQ ID NO: 929967 - protein, 139 aa, Homo sapiens
MMAKPFPPALDELLPGDPRPSSLPGPADLIPAGERVHVSESSQLESLISGPRARAADRGENQGLRLLRPAATKHRTLDGLYTAETSLSHRTLGGLYTTETSLSQFWRLRRCALFLSIPPQLSLGGQMHRQPLRETSMPS

SEQ ID NO: 929968 - protein, 414 aa, Homo sapiens
MVAVGIESKGWSQKQGRLHRLEVMPPISDAMSTKGSVVLAYSGSLDTSCTLLWLKEQGYDVIAYLANIGQKEDFEEARKNALKFGAKKVFIEDVGREFVEEFIWPAIQSSALYEDRYLLGTSRQALHRLQTNGNHPVEGGQVYVPQHHGKWEQSEPSTSRSLHEDQDPAKAPNTPDILEIEFKKGVPVKVTNVKDGTTHQTSLELFMYLNEVVGKQGVGCIDIMENRFIGMKSRGIYQAPASTILYLAHLDTKAFTMGQEVRKIKQGLGLKFVELVDTGFWYSPECEFVCHCIAKSQEQVEGKVQVSVLEGQVYILGQESPLSLYKEEPVSMNVQGDYQPIDATGFININSLRLKEYHRLQSKEYWFLNKGLNFHFALDSMNDVVSPSQKMFCWENQQDFVIHRKKQCSSQDDI

SEQ ID NO: 929969 - protein, 150 aa, Homo sapiens
MLTRVPWSSKTLSCFSSTPSPASLHQDLETLLRQYGPYCLVTAMRSKKKMSSKHKKVQNEVTNADVEAAASYLDDLFKIMDEVGYIKQQNFHAVAAIDKNSSDGTGKTILKTFWKGLTIIDVNGIKNICYGGQNTNINRSLEEVDSNTHG

SEQ ID NO: 929970 - protein, 143 aa, Homo sapiens
MGNMIRPMNSKTMSTLAYVMCYKTNFLVRSNAVLNTMKKLILSLVGLTAKVLPGLEKVETRESWDFYYFLLASFVCHKMPKCRAPDLQGMELEHKAIEAVTISFLASNTGGPFFMRRLGNGTPYSLLPPTLSSDFSPKPLIGV

SEQ ID NO: 929971 - protein, 139 aa, Homo sapiens
MRPEQPDFGVTGAPTWVLLRGPHGACSCQWPNQPAGSRTHLLTPGLAAGPTWSLLLLAAKWPAGSSTHLLTCFLLQGVEHHGLSKWGTPVANPTKRSRKILHQTEASQQAGSLGTQMELERSRFRTVSVNGEEVSKRFF

SEQ ID NO: 929972 - protein, 170 aa, Homo sapiens
MGKGMCHFQVSCFTIPKSYGATIKLVHLGSNFQPCQSAGLAVALIRYDCRSRSLQKRPMLKESVCAKSLEIFPFNKPRRKDAMQIHPKCVPLGCGPSLLLAPSVQVWACDCVYSKKSRRQNPSDTKLKKEGVYSAGTSARLLSQEPSSLSEQFLSLLKAHNSEGVCLRGS

SEQ ID NO: 929973 - protein, 172 aa, Homo sapiens
MQKSPIFDHAGDCRLELFLFSHLGMLLWRNLWRDSLRPCKYPSSHQNVPLDLISIDEFCLIQPYKNAFLSHPVNLPGSGLVLSVVCTESCDVNCLWVSDLWIPAPVPGEMVECAVDSMRVLSFGESISYSSYGKGPVVGRALELPRLYSLCLPLPGWIGKHHQNPTVDMLVN

SEQ ID NO: 929974 - protein, 164 aa, Homo sapiens
MDGMCLGTEGRWAALSMWSILVRISQKVVINENWEPEGETKVSGRSKNRVINSTQFAGNGNILRMITNHIPQEKHLYTNVEHIINANPGTILLWQVSLFLTVIDSCAFSGLFVEKICDLERHNFHVNKHHLGIVLKCRFSRCELKYCTFDKFTDAVDSALGTTF

SEQ ID NO: 929975 - protein, 143 aa, Homo sapiens
MRRRNRKTRRYGVLDTNIENMELTPLEQDDEDDDNTLFDANHPRSVEFLGFFVAQAIVQNQKNFKSQSPTSNVLLDFRDKASVEPVQKKSFQCPGLLLVQLKDWQLVFVFSLQGLVVSSFVYKNVPFDERTLSFYNEEWNFYV

SEQ ID NO: 929976 - protein, 139 aa, Homo sapiens
MGTLMLSLWTFALELFSGGAHKVDPLHVQFTVGFVHLRQSNVSADLTRSGAQVVTLGCWPLPSCCATGLLMLTVEGVQVLGVLKKELDKMRKQSKDGMKGFIENKSTLHSVVVGLRIGAQSYRVFVSLNTLYLGYALCK

SEQ ID NO: 929977 - protein, 136 aa, Homo sapiens
MAVKVIRGSVLLTLSLQENGAENHRAEDPFVLSVRTTCPGASVAPPITDLVTQHKVSRTEEPAHHGWHRTIKLVSLEPPVLISVLFLPSRGSRASACHLSVLPLPTDLTSPSSINPSPTLFQTRASFLYTPHPTLA

SEQ ID NO: 929978 - protein, 145 aa, Homo sapiens
MVWACACVYVHACNMCLCMYACVHVPVFVAAMTKSQTEWLKQQKVTVSQFWRLEVRNQGGADPSRKRAFPQVDQKSSQNQNLFLKDEYLLAPQIRILIPNRKVLLVAVREKRGLGQQTSKPETGFAPVGKAICFEKQRSTGYLQI

SEQ ID NO: 929979 - protein, 126 aa, Homo sapiens
MFTQECDLCNFTSASGWLLSATNQTACRLPLHLHEALTTTLYPVSMSSTFLDSTHKNIHEHDSSCRYVDISETWVEILSCCCTFDLSFPDDMSGLMFPLARSSKASSQNQLVNVSTCQRILYKGFA

SEQ ID NO: 929980 - protein, 154 aa, Homo sapiens
MTSTKRMSTQKLHSKLTNIKDPREQNWMENEFDELIEVGFRRWVITNSSELKEHVLTQCKEAKNVEKRLDELLTGITSLKKNINDLMELKNTAWELCEAYASINSQIDQTKERISEIEDQLTEIKHEDKIREKRRKGNKASKKYETMRKEQTYI

SEQ ID NO: 929981 - protein, 133 aa, Homo sapiens
MLFCNICCSAVSAGNTQANTVWSSGPPANSNRPAAEGPVRRKTNKQKEIASTSTKRTSTPKPHLAEKLKIPKTSAPLLLQKIAAPCQQQNKAGWIMTDELTEVGFRRSVITNISELNEHVLTCHKEESHIQPN

SEQ ID NO: 929982 - protein, 146 aa, Homo sapiens
MAMRVLFWFHMNFKVVFSNSSGPSAAGLLEFAGGPLQTLLAWISAAVAAEQRILVNRKCCCLIVPLEVLPQRSTWPCEVSRLYWGVPPSYTSWGFPEWSYLSCAFTAFNIMTSNCSSVEFGDYLQILLIPMNQPVISGCNSEKQEG

SEQ ID NO: 929983 - protein, 157 aa, Homo sapiens; identical to SEQ ID NO: 766148

SEQ ID NO: 929984 - protein, 396 aa, Homo sapiens
MGNAGCKERSNSLNSAIDKMTKKTRDLRRQLHKAVMDHVSDSFLETNVPLLKDVDGLDCTASAIQGWAAWAIHIVTSEMDNYEPGVYTEKVLEATKLLSNTVMPCFTEQAEAAVEALSSDPAQPMDENEFINASCLVYGGIRDIRKAVLMIRTPEDLDDSYFEMEDFNVRSRMSIQTKDNQLIAGQSEQKAKTAEQVASFQEEKSKLDAEVSKWDNSANDIIVLAKQMCMIMMEDGQAWLHHHRPLPRLGLQASPACSTQPALTWPAGLPALHRPLLPPAQQLQQGQGRDAESRQGVHCPWNGQRYVPDLGNQGLMNAVVQTMKASYVASTKYQRSQGMASLNLPAVSWKIEAPEKKPLLKREKQDESQSEIKWASQKKHLNPVQALSEFKAMDSI

SEQ ID NO: 929985 - protein, 138 aa, Homo sapiens
MEAACCMPSPAAASQGACACTSAWSCPPHCRPHVWLCAVAGPHPRSHTPRCSVPGQAGRMNPVGPSKTRTEEPLATEVSSWQSDSPRIPGDVGNINRNIKCTCLFRSEISRLGIYSTDIHVCVERYKIVTEALFKIKV

SEQ ID NO: 929986 - protein, 203 aa, Homo sapiens
MQMYSLFLPVFSDGDEEIVGNRSKGDPCYALAKRLATFCPCPRDLWNFELEKDDVGYLAEEISKWQSIQEEAEHKSLENLPPDDAIEKFQRLYGNAWMSRQRCAAGVEHSWRTSARAVKKGNVGSGHPHSIPTGALPSGAVRRGLLSSRVQNGRSTYSLHHAPGKAAGPQCQPVKAAAMGAGGLKRLRYLASIPEKQHFSLET

SEQ ID NO: 929987 - protein, 314 aa, Homo sapiens
MGVPEKIKTDNGPGYCSKAFQKFLSQWKISHTTGIPYNSQGQAIVERTNRTLKTQLVKQKEGGDSKECTTPQMQLNLALYTLNFLNIYRNQTTTSAEQHLTGKKNSPHEGKLIWWKDNKNKTWEIGKVITWGRGFACVSPGENQLPVWLPTRHLKFYNEPIGDAKKRASTEMVTPVTWMDNPIEVYVNDSIWVPGPIDDRCPAKPEEEGMMINISIGYRYPPICLGRAPGCLMPAVQNWLVEVPTVSPISRFTYHMVSGMSLRPRVNYLQDFSYQRSLKFRPKGKPCPKEIPKESKNTEVLVWEECVANSAVIL

SEQ ID NO: 929988 - protein, 1517 aa, Homo sapiens
MGQTKSKIKKQGTSDLKDWKRIGKELKQAGRKGNIIPLTVWNDWAIIKAALEPFQTEEDSISVSDAPGSCLIDCNENTRKKSQKETESLHCEYVAEPVMAQSTQNVDYNQLQEVIYPETLKLEGKGPELMGPSESKPRGTSPLPAGQVLVRLQPQKQVKENKTQPQVAYQYWPLAELQYRPPPESQYGYPGMPPAPQGRAPYHQPPTRRLNPMAPPSRQGSELHEIIDKSRKEGDTEAWQFPVTLEPMPPGEGAQEGEPPTVEARYKSFSIKMLKDMKEGVKQYGPNSPYMRTLLDSIAYGHRLIPYDWEILAKSSLSPSQFLQFKTWWIDGVQEQVRRNRAANPPVNIDADQLLGIGQNWSTISQQALMQNEAIEQVRAICLRAWEKIQDPGSTCPSFNTVRQGSKEPYPDFVARLQDVAQKSIADEKAGKVIVELMAYENANPECQSAIKPLKGKVPAGSDVISEYVKACDGIGGAMHKAMLMAQAITGVVLGGQVRTFGGKCYNCGQIGHLKKNCPVLNKQNITIQATTTGREPPDLCPRCKKGKHWASQCRSKFDKNGQPLSGNEQRGQPQAPQQTGAFPIQPFVPQGFQGQQPPLSQVFQGISQLPQYNNWEPPQKIPTGVYGPLPEGTVGLILGRSSLNLKGVQIHTSVVDSDYKGEIQLVISSSIPWSASPRDRIAQLLLLPYIKGGNSEIKRIGGLVSTDPTGKAAYWASQVSENRPVCKAIIQGKQFEGLVDTGADVSIIALNQWPKNWPKQKAVTGLVGIGTASEVYQSMEILHCLGPDNQESTVQPMITSIPLNLWGRDLLQQWGAVTVEPPKPIPLTWKTEKPVWVNQWPLPKQKLEALHLLANEQLEKGHIEPSFSPWNSPVFVIQKKSGKWHTLTDLRAVNAVIQPMGPLQPGLPSPAMIPKDWPLIIIDLKDCFFTIPLAEQDCEKFAFTIPAINNKEPATRFQWKVLPQGMLNSPTICQTFVGRALQPVREKFSDCYIIHYIDDILCAAETKDKLIDCYTFLQAEVANAGLAIASDKIQTSTPFHYLGMQIENRKIKPQKIEIRKDTLKTLNDFQKLLGDINWIRPTLGIPTYAMSNLFSILRGDSDLNSQRILTPEATKEIKLVEEKIQSAQINRIDPLAPLQLLIFATAHSPTGIIIQNTDLVEWSFLPHSTVKTFTLYLDQIATLIGQTRLRITKLCGNDPDKIVVPLTKEQVRQAFINSGAWQIGLANFVGLIDNHYPKTKIFQFLKLTTWILPKITRREPLENALTVFTDGSSNGKAAYTGPKERVIKTPYQSAQRAELVAVITVLQDFDQPINIISDSAYVVQATRDVETALIKYSMDDQLNQLFNLLQQTVRKRNFPFYITYIRAHTNLPGPLTKANEQADLLVSSALIKAQELHALTHVNAAGLKNKFDVTWKQAKDIVQHCTQCQVLHLPTQEAGVNPRGLCPNALWQMDVTHVPSFGRLSYVHVTVDTYSHFIWATCQTGESTSHVKKHLLSCFAVMGVPEKIKLTWTRIL

SEQ ID NO: 929989 - protein, 142 aa, Homo sapiens
MIVSLRGLFSICLVLRDIECPQDNAVPPTGDERYWELVTYKCQLTLSCRSVGVCWRSTPDPLCLGISSSGCRTADIGELQMLLPDRSSGSFVSEEYLAVLDDNFQKSKEYSSEKKIDFIKLKNAFCVYYTYLTTELGLKQMW

SEQ ID NO: 929990 - protein, 170 aa, Homo sapiens
MTARVMKTTIQNMFSDCTLQALSKVSRHCLAGVARFLGSQLGLGWLQLSNSELTAGTHTLLLSFRDGLMGKEKENGIWMTGLGRASPECYKPVCPPLLAPGKAYWVQCGTILRTRPWVLDYYCNREINIFHGCAHQQKEAAQAEALPLAFQITCGVPSLQATDWFQSAAC

SEQ ID NO: 929991 - protein, 181 aa, Homo sapiens
MCLEKLQTPHTSESSWEGGWLLQFAGGLLQTLVSSDPPSPGGITSEGYKTANMVACSFLWITPKALQTITVLRLVLNAHHGHYSPLVATDVYSRPKTTLVNGWKILPELVEGVCPGAAWSWGEDNADTLLVATPGFKLGCTPNPLPLRPVQHQGLPEDCSPCDLTATEIRSRPQATLVSQW

SEQ ID NO: 929992 - protein, 263 aa, Homo sapiens
MKDKMKPVIERFRRRAYHTEEMAGAKGNRKMEQLVARGPVGVKGGFLKGGDTGTCLMEMILCKVETAVFSHTVEERLNTKLWCLAACQNNSKLHTCRLLASRDEVATDTPTISNNHPDQPTVINIESLSLFLALLLLLQIIVLEKSRERLTGQRAVIPAKAPPVTPVSLCLDEGGMEVSGLEEGEGRGEGGGGGEKGGEGLKRVRTCDPTGPFEHFLRVLLELLKEGSVSLRTASSSALSCHGLSLTPGRKSLSKNKFDAEKN

SEQ ID NO: 929993 - protein, 174 aa, Homo sapiens
MAMSHLYIPQKIDGDTSSWASLNPLHQMCDIACYLVAELLAGDNGDLLTHALVRVEVVAQARVVLFYDAPGRLLHGFGANEAHVGRSLVKGAKHMNKTHLRLQSSQPSERVHPFLLYEQQSWWLAAQDTELKKEEVYRPVASAGLLSQEPSSPGEQFLSLLRAHNSKGVRMRRS

SEQ ID NO: 929994 - protein, 142 aa, Homo sapiens
MEERFQWEHNMGRITHTHYCPSLHIKVQFFSRFNCLKCAKIGNLYGIRKTPMLFLQSKFEFSLYVGKIFLSILVRDLGKSQTACCLKHLTELGSTPVTEGLVASVLPWPTSLVLMLQGEQVDPYHAPPFMLRSSHKVKYSFL

SEQ ID NO: 929995 - protein, 151 aa, Homo sapiens
MIHSFWLCCLAAAELWASPLTIWYLLINGNHKQAAHPLLGPIFNLHHGQYLRDSKSNTGRGCMSQLHTCSQAGSELEPKEKELLSQDSHWLSLAPRERPHPAGIWQGLSRDSGSGSTQRKSPCLLNISSSFCGTSSAPSDVLRVLSQHFPP

SEQ ID NO: 929996 - protein, 309 aa, Homo sapiens
MWNSVATARRGQRTAQAVASEGASTIPRQLTHGFRPMGTYKSINKVWEPLRRFQGMYGNACMSKQKFAAGVGSSWRNSARTVWTGNVRLEFPHKVPTGAMPSGAVRRGLLSSRLQNGRSTESLHHAPGKATDTQRQPVKAARRGALPCKVTEVGLPKAMGAHLLHQHDLDVRHGVKGDHFENLRFNDGSIGFQTCMWPTAPLFWSISPVWNGYIYPMPVPPLYLGKTISLQPKELPLTLLTSVDLVPMNFLRVSLTPALYLLRWSDDFQAVYMLNQKPEVWRLLKMFLFITSCQQFDYDEQTCCNCTYV

SEQ ID NO: 929997 - protein, 258 aa, Homo sapiens
MSTAIAHILASRCHSPLKNPKFLLKVDYFDDVMSPRLSGFTDTHQRIKGALSMGFNLRDRAQPSQDPDLKERVNLTGAAASKTQRKAPWSWTQTSEEEALASCRWYLCGEHTKLVWETEGRILRTGIQQPLPEGKTIAGVIPTETGSKQEGASKHLLSLPTFHVPQHPCWQSWQSQNVVYIVRVLTSQSRALKGGFGIERQWLTHQLSGIPRPKLLGSGNFGPSVGMTEDEPIKVRDGYDEPSLIYQRDGILLAERSH

SEQ ID NO: 929998 - protein, 310 aa, Homo sapiens
MVTVGEFLPLRRSQPAGSEPVFHSLTVTRLLGLIHRPIAIFLKADPTNAWGPQLPSEASHEGAGEQADTGLPVLNKATVPQWGLCSAGCCLSLDYTGINALASWASGQILVGLKGLNTEKAKAAGAQRVRGGAGVGEQRPTPGYVTEEVSQQQSIQDVIWLFLKAYSHMHSQGDNQKLELMFKREAEHKSLGNLQPNHVVEQKNPFSGENCKLLAAEICVTKMKLNVNSQNNGEKVSRAFQRSSQQSLLSKTWRPRREKWFCGPCSGSCCSVQPGDMVPCVPATPAPAMAKKGQDTAWAMTVEGASPNPW

SEQ ID NO: 929999 - protein, 360 aa, Homo sapiens [sequence omitted]

SEQ ID NO: 930000 - protein, 138 aa, Homo sapiens
MRDASLNPANGPGPLASKEPGMEPAGATALQTCVIADFLVLTALAALSVSLSSTSNPPEGPEAGGVWLAPVANTAGCPLSNHPPHQVCSGEQPQVVNTSLVCKSAESERICDWKYLGSQLKEYKMLFDPDPKKCTRKY

SEQ ID NO: 930001 - protein, 184 aa, Homo sapiens
MDSTTDVSEIWDCSSRISSSYSCLRKLISSALPGKTPALPLVLEVLHQPLRVAKLRLQLQLLLAQSLQLPPKAVDVALEYVVHVAPSRLLLLQEAPLGLQHLVLLLQEPYLATPEAAAAHSGEAQGADADTRPTRVGAAAEGPGARGGHLVGLLHPDGHGGGRSGGRRAEPGGDSRRSGEAASW

SEQ ID NO: 930002 - protein, 268 aa, Homo sapiens
MGWLMGYGVTAFFIWAFSRVLSSCPASKKNELMLTAMDICALSLRCATEDPGVAMGRRPACCYRYCKNKPYPKSRFCRGVPDAKIRIFDLGRKKAKVDEFPLCGHMVSDEYEQLSSEALEAARICANKYMVKSCGKDGFHIRVRLHSFHVIRINKMLSCAGADRLQTGMRGAFGKPQGTLARVHTGQVIMSIRTKLQNKEHVIEALGRAKFKFPGRQKIHISKKWGFTKFNADEFEDMVAEKRLIPDGCGVKYIPNRGPLDKWRALHS

SEQ ID NO: 930003 - protein, 176 aa, Homo sapiens
MFIPLNSPFLGSGPPLLVLEPCVWYKDTCFADFALSCCPTCPSFFLFNKSAVLSKPLSSTLFVHSTPASDLSNAREAVSALVPLPMLPDPVHQKKQDKAGEKLSFSECGLSGNLVLAWFPCDSLEHKWCHRDGPNLSQGVLIYQERVLHLYCRILAKAMNKCALEKKFSLGHSQHS

SEQ ID NO: 930004 - protein, 477 aa, Homo sapiens
MLKDGFRTDRGSHSDLWSSSSSLESSSFPLPKQYLDVSSQTDISGSFGINSNNQLAEKVRLRLRYEEAKRRLKLNSKRNQLVRELEEATRQVATLHSQLKSSMQSLSSGSSPGSLTSSRGSLVASSLDSSTSASFTDLYYDPFEQLDSELQSKVEFLLLEGATGFRPSGCITTIHEDEVAKTQKAEGGGRLQALRSLSGTPKSMTSLSPRSSLSSPSPPCSPLMADPLLAGDAFLNSLEFEDPELSATLCELSLGNSAQERYRLEEPGTEGKQLGQAVNTAQGCGLKVACVSAAVSDESVAGDSGVYEASVQRLGASEAAAFDSDESEAVGATRIQIALKYDEKNKQFAILIIQLSNLSALLQQQDQKVNIRVAVLPCSESTTCLFRTRPLDASDTLVFNEVFWVSMSYPALHQKTLRVDVCTTDRSHLEECLVRAVSGWLAGWLAGWLAGWLTGLLCLWGLVYPELQEEAPPSKEP

SEQ ID NO: 930005 - protein, 139 aa, Homo sapiens
MLESFGLGLGVQAQVSDRTWSQCPCENLWRCGSSQPSAGTHEMLGQGLPDGEAGDGSAVIETSVAKFYSKRQTCQQAVHPQLPISFWPSVFQRSWEVGERGSAGQCCSEHSAHCLECRKWLLNEAMNYISALIKCSAYN

SEQ ID NO: 930006 - protein, 144 aa, Homo sapiens
MKDSEEAVKPRLSRLANFDMQRQAIRNWVHPNMAIPALFSLPLLQHVPDNMAAHTFPHVEHFICILKGGEVGVDKNVGKVRNVHRASSKHHSTLYLHEINFLSSQLTKQKSHKEIRDLKNIFNQLDVAYIYGVLHQTVAAEHII

SEQ ID NO: 930007 - protein, 156 aa, Homo sapiens
MSKTVDKSDNGPTCLTQPKEQTLSIGLNPSPGPWLAPGAIALLGGLLGLLGESGSRFPVQLPCPPSPVKQALLLSKVLACCYESKLGSRVPSQGTNALKLTITAEGEGEAKHVLRGSRRERTRKCHTLKPSALVRTPSLSLEQKGKNRPHRPITSH

SEQ ID NO: 930008 - protein, 312 aa, Homo sapiens
MEDYGVPRFYPERPHQKSVGFFLQSNAESDSTSRTCHAQAMLKIINYGDDGKSFKDQFCGHQGNDMYDEEKVKYTVFKVLKNSSLAEFVQNLSQIMEFPQDQIQLWPMQARSNGTKRPAMLDNEADGNKAMIEVSDNENSWTIFLETVDLELAASGVTLPKFDKAHDVMFFLKMYDPKMRSLNYCGHIYTPISCEIRDLLPVMYVSLEKALDELMDGDIIVFQKDDPENDNNKKIRLPQVGQEGEMKRDNELPTLTHLLRPLEGCLNVTIVIGYHSRALLGMGSAQGIMLPPGLHEGSYSSIFLPADDIFNA

SEQ ID NO: 930009 - protein, 134 aa, Homo sapiens
MYQILLGKYLGGEFLSCVTDCCADSGSSLGAGQQTVIIVTPCFHPLRRVLAGQRVGAEMSSRSKGLESGTPGICLVFYPIVFHKLVTKRVPKLQDKVPSTLPSYFLKEKDFDATGSQLASSLLPDSSLTKKTLQ

SEQ ID NO: 930010 - protein, 134 aa, Homo sapiens
MTSVETFTLNDVKTPFMYHLRHTSPTLTRVLSSHWGITCKFYGHHPTLLSLYAYSISPFLPPEASLTQRKGIRQTPKVLTNEQPQSVRKLILQGAHPQPMEDNSWEINLLPFLYNFSTSTMWRWYGNEIRVQLL

SEQ ID NO: 930011 - protein, 349 aa, Homo sapiens
MKNDQKLEMGSLPLGTINEREIQSHFQCLICSDTGMTLTKKRKKEGKKWKLHDEEAIELEPVTWPMNKLSGHVVELDENYGIKSLETRLFFLVQQPGVLKPPCCCHYKRVLLSLLGLGWMDLTLKVRGITSICLLKEGIYESFLITLHPHSYFASGANSLVGDIEEQTGNSKHHKGMSEILAAGPPVTGSEALEEKWFCGLGPGSPQHLSSLRTWHPVSQLLQLQSWLSQGTAWAIGLEGASPKPYQLPHGVGCRGAQKSRTEVWKLLPGFQRIYGNAWMARQKSAGEPLLGQCRRSNVGLEPTPCHRVPTGALPSGAVRRGPPSSRLQNGRSTNSLHHEPGKAADTQC

SEQ ID NO: 930012 - protein, 176 aa, Homo sapiens
MLRFGMYVLFPLAVILLPHLLLTSARPGLSSGVAARGFCWVIAVTLVDAMSGCCLSAEAVNTCPETSGTLLTHFDERISLESTKVDLLLVLFPPGVETLQSELRAITFFLHYCFCSSYTATCPNSINTWCWLKLVFSNMSADGRAPDEVRIHLEGSQGTRWLQSKLAAKTCLLKQS

SEQ ID NO: 930013 - protein, 134 aa, Homo sapiens
MQSFQIGDPKSSWGALSGRSKPESIDIKNEIACCIIPAVLDSPSPTRCPTIQFNADYPGLLPDSMGLKPQSHKIALTLDASRKSWVPRLPELLLDLAINSGILTTPPCLGTPFFHFQFHNLLEQLRELRKVLYM

SEQ ID NO: 930014 - protein, 141 aa, Homo sapiens
MFLGVRQVTHGELLKNALGENASEVVKGLEDPEPRNTAFSSLQSLGQRKPFQLKPKELSSSADSPMAGLNYNLDLSLGECRDILLPVITKELKELLEQKDDMQHQVLERKYCVELLNSILEVLSYQDAVSPPDDVDILDSD

SEQ ID NO: 930015 - protein, 214 aa, Homo sapiens
MPPDPTVQTNDQKRVLTAPPGYWGCLLSAPPTPDQFSQNTWDRGLGITAFDARFFFSVALQAGDPQPVTPCPGLTQPIQLTNYVIACTHIQRFRISCAAPKKNEDTWGIEGSENGFQWGGGGMVGGGGGALVPLPQDWKVVPSPSLPTPCVTGSGAFYRLRMGTADLFVSTQKKVKGKTPLKGGHDSVENQLGKAGEVRCEAHQKHQNFYQIQW

SEQ ID NO: 930016 - protein, 141 aa, Homo sapiens
MSTANEKILMMINQYQSDETLPINPLSMLLNGIVDPAVMGGFAKYEKAFFTEEYVRDHPEDQDKLTHLKDLIAWQAQSSPLLRHSPTLGSQQTTHQNTGVGSGGQELAGGPQPSGVVMPFIIQIMMFSLSIPSLGSRKARL

SEQ ID NO: 930017 - protein, 147 aa, Homo sapiens
MIKWSVTEASRVVTLKSCSHCKSYSTKQRLFSEPSFFQTGGGAPYPLRGYPSQESVTRLASEMPKEEFLTLWPLGRISVCSISKRAIDNENVLTIPPLTPPRLVAHDSTDPVAPYRGDLVHEDHFPHPYDFIQNQSAAPISYPPNCP

SEQ ID NO: 930018 - protein, 132 aa, Homo sapiens
MRPCEHLFCARHCAPGKADAELKETGACTPKKCPYLFGDDLHVPPYVQRLVELSACWSSELLFTELGPNPSNSLSPGEPIRRRGPGPPREVAAVGPDCELHVGRTVCVSDALSPSAPNSTRHIVGNQHILAE

SEQ ID NO: 930019 - protein, 134 aa, Homo sapiens
MGQRSKKTQYLRDSPLGKGRKRVVGRKREGQREREKEEKGGEEKEEKEEEEEEEKEEEEEEEKEEEEEEGGGGGRGGGGGEEEEGEEEEGEEEEGEEEEEVEEELREEEEEEEEDEEEEEDSFRRRGRNDTFRI

SEQ ID NO: 930020 - protein, 321 aa, Homo sapiens
MNDNGVTQYYIMNDNGVTQYYIMNDNGVTQYYIMNDNGVTQYYIMNDNGVTQYYIMNDNGVTQYYIMNDNGVTQYYIMNDNGVTQYYIMNDNGVTQYYIMNDNGVTQYYIMNDNGVTQYYIMNDNGITQYYIMNDNGITQYYIMNDNGITQYYIMNDNGITQYYIMNDNGITQYYIMNDNNAITQYYIMNDNGYYIMNDNGVTQYYIMNDNGVTQYYIMNDNGVTQYYIMNDNGVTQYYIMNDNGVTQYYIMNDNGVTQYYIMNDNGVTQYYIMNDNGVTQYYIMNDNGVTQYYIMNDNGVTQYYIMNDNMKRRHSVLYNE

SEQ ID NO: 930021 - protein, 208 aa, Homo sapiens
MGRWVNQSYTDGFFLLGIFSHSQTDLVLFSAVMVVFTVALCGNVLLIFLIYLDAGLHTPMYFFLSQLSLMDLMLVCNIVPKMAANFLSGRKSISFVGCGIQIGFFVSLVGSEGLLLGLMAYDRYVAVSHPLHYPILMNQRAWKKALATCSSHLTAVTLFYGAAMFMYLRPRRYRAPSHDKVASIFYTVLTPMLNPLIYSLRNGEPSAH

SEQ ID NO: 930022 - protein, 315 aa, Homo sapiens
METWVNQSYTDGFFLLGIFSHSTADLVLFSVVMAVFTVALCGNVLLIFLIYMDPHLHTPMYFFLSQLSLMDLMLVCTNVPKMAANFLSGRKSISFVGCGIQIGLFVCLVGSEGLLLGLMAYDRYVAISHPLHYPILMNQRVCLQITGSSWAFGIIDGLIQMVVVMNFPYCGLRKVNHFFCEMLSLLKLACVDTSLFEKVIFACCVFMLLFPFSIIVASYAHILGTVLQMHSAQAWKKALATCSSHLTAVTLFYGAAMFIYLRPRHYRAPSHDKVASIFYTVLTPMLNPLIYSLRNREVMGALRKGLDRCRIGSQH

SEQ ID NO: 930023 - protein, 144 aa, Homo sapiens
MTEEVSVSHPRFAREMSGVPAGPGPLSSCSPGPGLRCVWRCKTCAPRSRGEGPWAARSAQRRACIAPPPGPEPRRGGVLSAPERSRVRRRPKNLKESRKTALIIEHLKVPRGSCERLTKNTAMGSPGGPEDAKWTQEASVATQQ

SEQ ID NO: 930024 - protein, 151 aa, Homo sapiens
MSGAWDCEDLSDTGVSLKPESAVEPLESGSSENNTESWSIGASLELGAVGSRLVLLQGCPGTGKDPNPGATGTSFTPGFTEWAWCWGLLEFSEGPLQTLFAWVSPAKAACSFFLEALSQKSTYQMSVGALLYEVHFQLGFCHLQLKLSKST

SEQ ID NO: 930025 - protein, 146 aa, Homo sapiens
MGLSVLGLQGPFPNPNAANSCLSPEVSLAALPPRRLAHPQLWTRSSPTPMATCTAPRMTGSDASSEISEAEGRVVGVWGHSRQRGLASGRKEKIIYEGWRWGDGQCVWGQEHEKRCVRDDAGGASRGQATQSFLGQVRSLRFYPKQ

SEQ ID NO: 930026 - protein, 261 aa, Homo sapiens
MLTRAVALNPSDIMHAFKAQVSPAARKAGDHRVNFLLMEDPEKKLNQKSDGKPRKVRFKISSSYSGRVLKQVFEDGQELESPKEEYPHSFLQESLETMDGVYGSGEVPRPQMCSPKLTAQRISVFREGNAYTLAGGQPRFNDYKANDHKHKLWVVGVLGRDGETQISQRICYVRKKFELMPLPIIDFGKIIIYTNNLKIIRTPMDKRDFVRKILQKEEEAEEESLMNKEESYGGRDQHDRPLVEAESTLPQNRYTQVRWGA

SEQ ID NO: 930027 - protein, 188 aa, Homo sapiens
MDDLTLLDLLECPVCFEKLDVTAKVLPCQHTFCKPCLQRVFKAHKELRCPECRTPVFSNIEALPANLLLVRLLDGVRSGQSSGRGGSFRRPGTMTLQDGRKSRTNPRRLQASPFRLVPNVRIHMDGSSRIICTVTPGVSVKKWTRKAVAWAIGILRKSKLHSLKSYLEQALESKCWQQCPTSPCSEEE

SEQ ID NO: 930028 - protein, 158 aa, Homo sapiens
MVSSFIHPNLTARHLLEKNKGRQSSRTKNLSLVSSSSRGNTSTLRRGPGSRRKVPGQFSITTALNTLNRMVHSPSGRHMVEISTPVLISSSNPSVITQPMEKADVPSSCVGQEMTSQMNCNYGLKTMALENNSGLDLKILRVTTQLYGSQGCHEKWFT

SEQ ID NO: 930029 - protein, 136 aa, Homo sapiens [sequence omitted]

SEQ ID NO: 930030 - protein, 131 aa, Homo sapiens
MDIPHMDTEALKKLNKNKKLVKKLAKKYDAFLASESLIKQIPRILGPDLNKAGKFPSLLTHNENMVAKVDEVKFTIKFQMKKVLYLAVAVATMQTQLIYVAFMWTLFLTTLTLGARGTKANMRMLMLLTEL

SEQ ID NO: 930031 - protein, 134 aa, Homo sapiens
MHKQLNFRGRLSVFFSFIVTYKDFVTVIQAPQHPRDCRVPSKLSCPSQCQPVNFPPYPRSAIPQTTSQFSFEKKTKMTIIRNEKDITAKPTDIKNNHKKPEDDFEARPNKNLVFASPLDIVDALESSSLDHGFS

SEQ ID NO: 930032 - protein, 155 aa, Homo sapiens
MSIYTANSKVCVPVLFLKPEYSKESLRDSLQSGFTLFSCLIFTITLSQKVKTLIISLLQTRKLRLTERSRSLNLEIVHATQINCQLFLAYPCALITLSPDATCCIQLIDMEHNNVDVIRLSRFHVCRTVGHTFVPSSIWPPSRDLDEAVDTCGWK

SEQ ID NO: 930033 - protein, 166 aa, Homo sapiens
MERNQAKRLKIAKTRKPLLQRIATLPAREQNWMENEFDELTEVGFRRWVITNSSQLKEHVLTQCKKATNIEKSDGENGTKLENTLQDTIQENFPKLARQANIQIQEIQITPQRYSSRRATPRHIITRFTKVEMKEKMLRVAHQINSRSLSRKPTSQKRLGANIQHS

SEQ ID NO: 930034 - protein, 176 aa, Homo sapiens
MTKRGQGTAWAVASEGGSPQPWQLPHDIEPLSAQKSRIEVWEPLPRFQRVYGNSWMSRQKFAAGMGPGWRTSARAVQKGNVGSEPPHRVPTGALPSGAVRREPLSSRPQNGRSTDSLHRAPGKAADTQHQPVKAARRGPIPCKATGAELPKAVGAHLLHQHDLDMRPGVKEDHLEL

SEQ ID NO: 930035 - protein, 280 aa, Homo sapiens
MGSGEWKMERGDWEQNFFQASLNQINHRGMTQRQKNIKKGEKNTIVTSYNRNFTGRNDTNPKTMPSIISPEIVTALAIARTLSSTQRPTALWARMARSSSWRLQTQYELPQAQFDPGQDTYQHPPKDSSRQHVDVSSTSQHLQLVEPFDKWDGKDLEDLQILIKVKGKCPTDHISAAGPWLKFHGHLEYISNNLLIGAMNIENSKANSVHNALTQEFGPIPDTARYYKKHGIRWVVIRDENYREDSHGEHTALEHHLLRGRAIITKSFARIHETRACRAC

SEQ ID NO: 930036 - protein, 272 aa, Homo sapiens
MVRQGATSAHVPGGTDTLLGQGPSSPVPQRKERKEGRKKGRKPATKPRPSPTTKANTKRAPERPQSQRPHRAHTRPPGPTGPHVQTNRARAAPPQHTTQTTTRQATASATNHKPHPSHTATTTGGDTTTTHKPQPHASPPSHPASQTKPRPPPTPRPPATPSHKTTPATNNDHTRPGHGTTPATPTPPTTPHEGHPPTATKPPPQHPTTTKEGRKSERHDTAREKPQRQDIPTPGDTRQDRRERREDRQQGGSEREPAHGGAAADPLFLVSQ

SEQ ID NO: 930037 - protein, 137 aa, Homo sapiens
MGLEYGLSFLCSWSSSSRGMGWGADATVLVFCASGGEPLCSMTPPVCPSPSWSGSLNSTACLFALLVKACGGGEGIQLLKCARITRSIPKICDSVCAEPSKVLASATEKGLVVQNAFNFTHCIRRGRRHIMMIMAMG

SEQ ID NO: 930038 - protein, 161 aa, Homo sapiens
MLDWVTKRHGSFRYENRLKRLELFILKGTQTAAYESRSNVKAGVSTLCPTDPLVRLLKVPFDARQSSFQNTERDFSLSNWAKRYQFLVAIGSSWEHLYRAAGVPIGGCGTHSKFADSVDVEKRLGVKVAEHGLLNMSEIPPGVPEQLVVEGDMVKALWFYG

SEQ ID NO: 930039 - protein, 355 aa, Homo sapiens
MSFTTHSTTSSTNYCSLGSVQLPSYVAQLVSSVASVYAGAGGSGFQISVSHSTSFWGGLGDLVGIGDIQNEKETMQGLNDCLASYLDRGHYFKTIEDLRVQIFASTMDSACIILQTDKAHIAADDFRVKCETELAMCQSVESDIHGLRKTTDDTNVTQLQLETEIEALKEELLFMKKTHEEEVKGLQAQIASSGLTMQVDALKSQDLAKIMADIRAQYDKLAQKNREELNKYWLENSLREVETRYAMQMEQLNRVLLHLKLELAQTWAEGQHQVQEFEALLNIKIKLEAEITTYHHLLEDEEGFNPGDALDSSNSIQSIQKTTTHRIKFPEDIASALVHKENEIQVLSNGIVQLK

SEQ ID NO: 930040 - protein, 173 aa, Homo sapiens
MLPNVYFAVISADRCQRASYHESQGGRDLQRSTLSKGAKRSNKIELSEIFLRSVAVNRLGVKEENSKIEERMETESCCVAHAKAQYLFTGTISCIVHLELLDSSNPAASTSPVADTIGMCHYTRLPHRFLLFLGPAAYYSHGKRQKRKRASPNAHFKPVLTRPLAFTDRKILE

SEQ ID NO: 930041 - protein, 158 aa, Homo sapiens
MLLRAIFRNATLKHISSNLIFSILQKVLVVWMEDQTGHSSSSSQNLIQSKALSLFNSVKAKRDKEAAQLKLEANRGWFMKFKERRHLHPVKIPWSETSANVETSASYPEDLAEIPEGDYMSGVGSFQWICGLADFKNEAAELHSVTALKDGTDSKSGQ

SEQ ID NO: 930042 - protein, 146 aa, Homo sapiens
MLLRKKDTDRCKADSFEGGGRRSHTKKCGQLLEAEKRGPKRSAADLTLETIKARRQWDDTFKVLKQQQQQQQQQQKQKQICDPKFLYPVKQVFKNEGKIKTFPDKQEMREFAARRPVLPEILKETHQTEASKPKWKFECIQENKQD

SEQ ID NO: 930043 - protein, 147 aa, Homo sapiens
MEIKATRFPKRVRSEKKRQEEDMKKHPSPSCLGGVRDDQVGTEDFHPPGGEHMGSLDFHSHSAVKICSSSSPLDWESAKGKGPWDEGQKKSSYKFFSPVESHEDAHNSPSSNVGQHMQSIGHQGSSPQLWSPGFFIGCQSCTHSVLL

SEQ ID NO: 930044 - protein, 196 aa, Homo sapiens
MAHVYICNKPARCAHVPPLDSWSGVGDGSSGIGATTGTQVFCVGVAGGCDGHYDRHAQLAFHSLRIPSGCQNLLSLGPLKGQRVNILWEQPPGSDLSCWMALSHMCHSSSQLYPSGNYCPSTSASASVTTELSEENREMSASSPETKQCQPLSRAQALSNQTGLGKVGTPKVTYSQKRKIRSQGPQNMPFPGLSGK

SEQ ID NO: 930045 - protein, 136 aa, Homo sapiens
MLAIIIILPKAISMKGISTGNNNITIKKEKKKEVEKKEEEEEKCGRKQRQHQLLLYLQQAIEGKVMSSSRTKYELAIKVYPHICLFFGCVVNLLCVQDPLSPLCFIPVELVGKENQCIHEMHIACCYVKSPLLPTL

SEQ ID NO: 930046 - protein, 211 aa, Homo sapiens
MILQRALYIGDSKHQEHDVANGRYSTKNYQVNEKKKVDVNMTAELPLSCSSGHTAYGVTLVHKEQYLAAAVHCCFKEDRKRWKSLELPRDLQGSEYRKMFESLELPRDLLNAFDQNADSDMDNEGQAEARGPRRKKWFCGPGPGTFILATLATAVAKRGQGTPRAISPESVSPKPWQLSHGIGPKMMILTPDLKCSSRIPKCYNSSIGFLR

SEQ ID NO: 930047 - protein, 124 aa, Homo sapiens
MIHTDYNSNNCLPDEDEGLVGNWSKDHSCYAKRLAAFRSCPRDLWNFELERDDLGYLAEEISKWLSIQEEADHKSLENLQPGDAIEKKNSFSGQKFKLAAEICISNKEPKANCQDYGENVSRAC

SEQ ID NO: 930048 - protein, 138 aa, Homo sapiens
MSTANVADVAESLQNVVKSLLPHHFWHSLSLSLTGWHWVTCLPLNPSLGPGGWDTETVVENYSQRGCSLAGRGGVHKVLGEELLRLIVQEKEFHKIMSSVKAGTDHFHFFCDSSVALGHLDVYVRVWAQRPDIPVFLY

SEQ ID NO: 930049 - protein, 153 aa, Homo sapiens
MQETMMAWTWPTGISLDCMTRPRPMGKGYKGRTCVGNKGSCTPLFRCVLMATGQGGTPLRKSGLSLPCGVSLQGTPASLRGTIQRALLGRQLPWWNALPEQHITGPCGGLTQRLNTRKELGLGLKEQQHKRLAKARKDQQREKKAIYTNSKLI

SEQ ID NO: 930050 - protein, 170 aa, Homo sapiens
MVVALIGMLPLGCPIRWNRKKSNTEKCGRALVSLKEQPVAMRDHHYRSTIYENKAICACFGACRLPTNGAVFTIPALSAFTFAIFTGPVLNAAGVAHALVTRCACPALFTAAGSPDADACGPWTNSISITWELVRNVDSCALVGPSELEDLGMGLRDFVGTSPPGGFDTR

SEQ ID NO: 930051 - protein, 136 aa, Homo sapiens
MHVNGDLCGAARFQMVGTTLQSVTFGLVKSPTHLYSCILQVSGCLSLNFTFLMTQHHQDWRDRAFESSDAGPDVTPRVFSFYRPKKPRRCCISERLSVLTKVTQLQTSGTCEKALFPGDRCSVILTQPEVGTTSLQ

SEQ ID NO: 930052 - protein, 188 aa, Homo sapiens
MLSATLAIPGALAYQKLEKTVLQEEPETVNVNHVAPTINGMGAFSMHWHGQRFGAGTMKSPYWVLPSAHHTIQTNRCLLSTGLTDDSCHLIFQVDGYNIRHCGDGYPKSPDFTTTKSMHVTKLQMSPINLYNKNLKNKKCQGNKKHFSCFTYSKSDNADSNCHLPSTCKLRHCVKPLCADCPPCSQRP

SEQ ID NO: 930053 - protein, 137 aa, Homo sapiens [sequence omitted]

SEQ ID NO: 930054 - protein, 295 aa, Homo sapiens
MCENHPGHVQGAEWGWQGEDNMGKRTRFTTRFTFSTNYQSLGSVQPPSYGVQLVSSAASVYAGAGGSGSRISMSRSTNFQGCLGSGGLAAGLAGGLERMGGIHKEKETMQSLNDCLASYLDRVRSQETENQKLENKIWEHLEKKGPQVRDWGHYFKTIEELRTQIFANTVDNARIVLQINNARLAADDFRVKYETGLAMRQSVESEIHGLCKVTDDTNVTRLQLETEIEALKEELLFMKKNHKEEVKGLQAQIASSGLTMEVDAPKSQNLTKIMADIRAQYKELARKNQEELDKY

SEQ ID NO: 930055 - protein, 173 aa, Homo sapiens
MIGTTAASMSAARFYRLFFCSTMVDVRLVFIQPLLCSSHGGRNHGSIISLSPHHLPETEVNVRILQMRKVGLKRTEETRLRSEPACWQESQDSNPGLLTPTSDSFHILPGPALHARPLSAKEKTFAMFCVLEGKPKEFPTTRCWHFKYWFMGFLTSSLKQYVCTCVHADTNTL

SEQ ID NO: 930056 - protein, 157 aa, Homo sapiens
MGGTVGASALIEFKDAQNNESQKRRTPVATGLPCLGFTEPFPYSIALYGIHLQQQPGSVVPATTSSVPNVRSMGNNWNWPGVGHLLIVCQRAGSREDGDEQPSHRKHWLAGGTLILGQSSSIGKIQVACLPGKPLGLEESTGVWESELDINPCSTTS

SEQ ID NO: 930057 - protein, 136 aa, Homo sapiens [sequence omitted]

SEQ ID NO: 930058 - protein, 161 aa, Homo sapiens
MRPLAVLHTKRSAWVLLKCRVQGPSPDKWHGHLQRQSPGISTFPNSLGIDGVHPGLRIHYCPHHKTAQLFEICEKAVRVAIGAESAAVIHGVSALWCPATFPGFVGNNFMEPVAEWMEGIWCKGIIHFIFHWVCYLPQVTNKNSVILLEKGNGLSLWTIES

SEQ ID NO: 930059 - protein, 187 aa, Homo sapiens
MIKIWQNGKQDAICKQGNQTVPHQNKREGNPAAKQATQFPDRGKLLFWPKPWLRETVSSETTRQTEVDRWNNYLESTTNGKQNKKTEKGNPVPNPAVERKEFIGLNYSYCLLASIVFSSSFIFHKYGENLIQCQLNNECRFAVEVTGPNWIFNAETAVWVEELGRGHMLWPSLGAILPEFRGLCCIT

SEQ ID NO: 930060 - protein, 154 aa, Homo sapiens
MCQTREETDHPSVPVNTSPPQRPGCTPVSYGSCTETLRMPNFHGDFMATMGRMALSLFESYSRASWAQCITELPILPTQPAASLLLNPDMKPRTWAGDKSKESYLCPSWDLPGQPSMPNSFLSSYSLQETPHRSCTSCLVGPYAQFSRPAQRHV

SEQ ID NO: 930061 - protein, 185 aa, Homo sapiens
MEGVLREMIAWALIYKLIISLLYDDFFSCDYHIFAQMNSRQEIKGDKMFFINLQPDVLLVRIWLHGKDIINMDELRALLDGGNNYSVGNEQCLSHAYSTNDETGSKGAVITGEDVCLEAHFTHIPESSAGQLHTSCWAPPGYLGMNDTPHSLTDGPITIATNWTRASGCCLGDTRTQLHCSQCSH

SEQ ID NO: 930062 - protein, 137 aa, Homo sapiens
MDQTFAGGPLQTLFTWVSPVEATEQQRLLPAPSSGSFIPEGHKPDASWSSPVSVVDPCWEVSPVRRHGGGIPEESVIVGDDSSIWATGPEDLLVGQDAEEEDKTLHTLFNCHLELIIALNKTDSRYAKDSFNIQLIF

SEQ ID NO: 930063 - protein, 257 aa, Homo sapiens
MSVRETGGVARGRRKPGRGGEALKKEGAVTSNAAGRPRMPEQTCGPSFGGEAVIGSLLERGKERCGGRGGERERKPAGAQGEAASDADHPVRARDWEHRGQLPLRGCQWEMQETCPVGLGALSFIYMSLGKSYARCLGLMIDMTDGKPALMEPCAWDGRGVKTRCTERQGPEQTDSLIHVGADDSLFAVEETEGSEELNHLPKGKLARDEAQPSPRAPYGSPEQQDLQPGAFLASLAPHSCHSSAAQESRGDPLNAL

SEQ ID NO: 930064 - protein, 127 aa, Homo sapiens
MVQAAVAAEGWLGGWTCGSPKSPSVFPPSHSKQEALFSPLSSVQSQTPSWVGSWVLEQTVVMLHRVRQERVPEMDSPCQGAERGDSVHSCLWTTLLPKEQKLSLLSEGLTVILLLWDPVSTPINGKC

SEQ ID NO: 930065 - protein, 266 aa, Homo sapiens
MDGRRSRHTDDTDVLLRIHHVIGELPTYGYRRVWALLRRQAELDGMPAINAKRVYRIMRQNALLLERKPAVPPSKRAHTGRVAVKESNQRWCSDGFEFCCDNGERLRVTFALDCCDREALHWAVTTGGFNSETVQDVMLGAVERRFGNDLPSSPVEWLTDNGSCYRANETRQFARMLGLEPKNTAVRSPESNGIAESFVKTIKRDYISIMPKPDGLTAAKNLAEAFEHYNEWHPHSALGYRSPREYLRQRAYDSDKDDDDSTEAVS

SEQ ID NO: 930066 - protein, 168 aa, Homo sapiens
MVYTSPCCYKKPSRKTSLGNQRWVYTKLRQKPTFGTLQPRLFVFYSIPGDVKYDDFITAEIVLRKWHLECGRREGGKGGWVRNEKKKGGGEKYQKMGETEISSIQYCEHKSQKEFCMKKSPHLLSKGSNEPFESSQMCSESTLSKAWCQCRGERLSCVSGTKKDESLG

SEQ ID NO: 930067 - protein, 163 aa, Homo sapiens
MVILETSLYTIPILQMKGPRLIDTLSQDHTVSSKWQNWDANPGLSDFKTSFSAYQYLLSFANNWQLKSELKDHSYKQLHVLVLFKPTNYTHNCRPLRTAIVSELLTIVSTAPCKVTDPEEVNPSTWPLTDNTNSGFCTLRGHDEQNNMRLNQDQEKIKQLRDM

SEQ ID NO: 930068 - protein, 173 aa, Homo sapiens
MEQVGRGLITQDDDHDDGGGGGDGNGDDGGGDGGDGDDDDGSGGSGGGGGDDGDGGGDGGGGDGDGGGGGDDDSGGDGVVKEDYPYFNTTGGDLWDSVGFKSLFCDSRPLAAVEVAGSEKDDWVKWCKDSLRIGTGNLWRSPMLLSCSQKEGSLKSRGVRPLGANKNQLSQKL

SEQ ID NO: 930069 - protein, 165 aa, Homo sapiens
MCSGYVMLLLPNAPLPSCQMPLYPSPSSVQRKSMGTISEPIWRTNDAQQYHVLGTTEMTVMSIFSFHQDPSLPHRPYPLSSKEVNASSMTDFTYYQLSYMEAENFSMPKSWSRSVPVVFTYVYQCMGMKTFWENMQETAEGGCLKQGGHFASFNSAFLIWASALF

SEQ ID NO: 930070 - protein, 155 aa, Homo sapiens
MLMPDDQRRNSFILKPSPTPHTLSVEKLSSTEPKPVSGAKRCFGGGEPEQQKKETVDAAFIMRFCKEQVRVGLGHCRDGCERGRVDIDWWEGREPGAVSFDPDSAQSSGTISVSGSICPLLPAPFPIARAKAQETAMNDMLQGEDDKAVISFNVM

SEQ ID NO: 930071 - protein, 148 aa, Homo sapiens
MRRNQHKNSGNSKSQSGFLPPNDHTSSPASVLTKAEMAKMTDIEFKIWTGMNVTEIQEKVKTQSKDSKDYSKMIQELKDKMAIIRKNENDLIELKNTLQEFHNAIAIINSRIHQAVERISELEDWDAKLDKEAKPTGMLSSRDPSHIQ

SEQ ID NO: 930072 - protein, 150 aa, Homo sapiens
MLKPLPGMLFFPGSLWLANLNLQSFIHLDFTIELVIAGPGFAHWGEGLTKCTDKSRLGQNADGFLPNMLKLSKSKFNQNLALPFNWKDGHSLVLRKLPINDHLAWFIFLDSEAKIEFYQFYAIVKTAKEYSSLKSDHADFKSWPCHLLAV

SEQ ID NO: 930073 - protein, 129 aa, Homo sapiens
MQSAKVGATEMTLMELRCTVQSLEIDLDSIRNLKASLENSLREVKARYTLQMEKVNGILLHLELELAQTQAEGQCQGQEYQALLNVKVKLEAEITTYRRLLENGEDFNLGDALDSSKSMETIQIPLPAG

SEQ ID NO: 930074 - protein, 152 aa, Homo sapiens
MKFFCWFWGFWSWLLNIIRPENAKDSNSNSMENIDDLWHELFKELYKINAFDTPDSPLMRDKEFSDSIYDTVDHMWRTKEYNEAGWLLLSSVDKVMKENDELRDSVSWLQKQILNLKSAKIAMSHHLISCRERAKIVEIQTQALIMRVVDLQ

SEQ ID NO: 930075 - protein, 244 aa, Homo sapiens
MGTVSAFQLLQNTSLPGMAQCRHFISCRTGLFRRWPSVDISARAEQAIRDASPRSCSSSFLPISPVSIEHLPQILKHSHPGAGDETYPKSRLGCASVTGPRVCLMHLPLCCVTAQGEPPGARPAPWIRLHILSFSVNSHHARHRTRDFRVDPSDLESLDACIQRTLSALYPPFEATAATVLWQLFSVAERCHGGDGLHCLTSFLLPAKRALQHLQQEACYVKNALSAELNQLEHSKTRYVCTYR

SEQ ID NO: 930076 - protein, 226 aa, Homo sapiens [sequence omitted]

SEQ ID NO: 930077 - protein, 189 aa, Homo sapiens
MWSLHARVCRYLLLLKARMNAVGVGAMWTVVGEAGGPHSEGLWVLVLLPCGGELRSKQRLGGNTQSLQNRRSSPGACSRPAGSQRHILPQARLLPGICTALVLNQTATAELSTYLRLFDEEARVQNGAGCARCFVNGAFRAGSAVNTDRPAFLELTLAKSGRKPRGHLSKCRTASGNIQQPVMKRFSAG

SEQ ID NO: 930078 - protein, 143 aa, Homo sapiens
MPGDLGAGPALEPPSTPFSCPSSGHTHLLLKGSRSGLLLELPGHPQATLAGPSLRTMTSAAVSLRSEDVTSSLTSDHRAQWERGDVLEPLEYHTETLALVLECWFGVPLCQHVDTKSLSVNHPESAWGLTSEVWDINQGAEDP

SEQ ID NO: 930079 - protein, 170 aa, Homo sapiens
MGKKQSRTTGNSKKWSASPPKKEHRSSPAKEQSWMENDFDELREEGFRQSNYSELQEEIQTKGKEVENFEKHETNRRPNLRLIGVPESDGQNGTELENTLQDIIQENFPNLARQDNIQIQEIQRMPQRCSSRRATPRNVIVRFTKVEKKEKMLRQPERKIRLPTKGSPSD

SEQ ID NO: 930080 - protein, 459 aa, Homo sapiens
MKQANHLRQSLEGELPQRTKVPWVRSPQPDDPTTGLMVPGQAPAHVINLTEPRVCLIIEGQEIDFLLDTGAAFSVLISCPGRLSSRSITIRGILGQPVTRPEAHKGLQNIVKHLKAQGLLRECSSPCNTPILGVQKLNGQWRLVQDLRRTNEAVIPLYPVVPNPYTLLSQIPEEAEWFMVLDLKDAFFCIPLHSDSQFLFAFEDPTEHTSQLMWTVLPQGFRDSPHLFGQAQAQDLGHFSSPRTLILQYVDNLLLATSLEASCQQAILNLLNFLANQGYKVSRSKAQLCLQQETQRANTHLVKCEPEAETAFKTLKQALVQAPALSLPTGQNFSVYITERAGIALGVLTQTQGTTPQPVAYISKETDVVAKGWHHCLRVVAAVAILVSESIKIIQGKDLTVWTTHDVNDIVGAKGILWLSDNHLLRYQALLLEDGASNMNVHGPQPCHFSPRGWGTHRA

SEQ ID NO: 930081 - protein, 215 aa, Homo sapiens
MWSPVIRCLHKSTLAKIKSIHICEHVTHWEPLFSHGGPSVECTPEEYSPKITCYPSRKRSEKKVSLLPSSFWYDPELGGRQCGCPPAVSPPWFLGPGTLLNVPPMVAEGTSEQKERERKTALSIERRLPSRKNQLAVDTPVFISRLEEAVSDLHSVHRLVRSELTNMITSWSSKIGHLQVEEQGSQWWISSSPETSTVGKLTVQPLVCGQRPKKW

SEQ ID NO: 930082 - protein, 193 aa, Homo sapiens [sequence omitted]

SEQ ID NO: 930083 - protein, 148 aa, Homo sapiens [sequence omitted]

SEQ ID NO: 930084 - protein, 136 aa, Homo sapiens
MPEPPTPSVGSCATRSLPDERPHPLHGAQSHHHPRAEECGCTARDWQAAPPAAPVRDPLGEASWAPESSGNLENLYLRDCKHTNQCPVKTDHSALPISRMWVGPDKRVKAGCPIQQWQAARVPFHTVEALFFCSLQ

SEQ ID NO: 930085 - protein, 128 aa, Homo sapiens
MRADFLYLHPPQAKCCQTNKLYFIEGRDIKLGHNLSGLTTRVDQQLQRIFNFCSGRTPQGEHTLPTLQTLLLRLQLVTQDSSSLWEGEGRERPRICPEEVEGDGTASEQRFQIPENLQEYKNIHYLTR

SEQ ID NO: 930086 - protein, 157 aa, Homo sapiens
MLCDADLVGEAQLWFTECHCTAMLADLTRICPLELVRNLFMTVLEKDVRYEVLLQKAINNKTLVGQVTREAADWPLGVAESHTQQESGVLESSVLWKSSRSSGTFSPTQTFFSRPSVEQSAPERENRFRLKHVPDNVSAALHEAALLQPTIVGLIAS

SEQ ID NO: 930087 - protein, 171 aa, Homo sapiens
MGKMSPGHVRDLPGTHFHHRPGGLGGKNGFMGWAQGTPALCSLRTWCPVSQLLQLQPWIKGAKNGRSTNSLHHVPGQATGTQRQTVKTARSTAVPCKATGVKLPKAVRTHLLNQCDLDVRHGVKGDHFGSLSFNDCPIGFWTYLGPVAPLFRTISPFVMGVFAQCLHSHYD

SEQ ID NO: 930088 - protein, 152 aa, Homo sapiens
MDDFEWFKTSVEEVTADVVVVARGRHEAEFQVTAEDKAGFQQLFQGLFGEFFIIIFSCKRVLTKKRSLLVPPMSVQILREADIKTVLYVQEIYWVGPKSNDERHSRQTKEEEATRQPWCLTNYDPSQVNLPYPQPLLKNPTCADDEVLAPLI

SEQ ID NO: 930089 - protein, 497 aa, Homo sapiens
MRKRRKGCKKWEILNTTVSCQENIKVLEKEVKGDTLEPVFHQTGTLGKSKENGDEGMSASVNEKQNSSFLPKDKKQHPCDSKIHRKKGNDDPPLAVSHQLEKVLPMITFNDYGESLSENITLQNLLGTVEDFKPAKGKFITEVKRGDFNVQIEIKKNFVCKPGIQSCFPKHKNILVEELKPEVLSKHEGEIARTDRPLLKDSKDVEKERKINFDIPGNITSDSHVQQSTEGINYLPSTITDIFPLKMAKTSPLVLHLLSLENVEKDKCQIIPVVNNAYHRDFEDLSNENRDKVCFQMHFSANTAESNCAVCASDNLFLIEKTLTNDVDLHGNQDKENLGLTSFKQEPAQCQRIASTGPNTEEDENKNDSKENYCYQIHTLMPPQKQALKVGKKGPSEKEPFKKRTNSRVLHLGPSLNETVVVCLLTDSAAKKAGLQIGDAVLAVNGTEVTSVELAEAVNLAMKGRWASYRIQSSSEGAESCHTEFQCGRGHLQVFES

SEQ ID NO: 930090 - protein, 163 aa, Homo sapiens
MHRDHPLNYSKCMPLGTDILTLVVGSDISRCPSTPWPTCHGYLYKRTHSGIVKGWRKRWFVLKYDGCLYYYKHNKAGNSDLMGELSLNPLDGRAADFPGQEKVNVAKARVQGGRQRRKKIRLKRNSDHRSIFTLLCWVRSPGDGMAHNSDRRLHFEQRIKFGA

SEQ ID NO: 930091 - protein, 328 aa, Homo sapiens
MDPLGAAKPQWPWRRCLAALLFQLLVAVCFFSYLRVSRDDATGSPRAPSGDGARHSDCHITADRKVYPQADMVIVHHWDIMSNPKSRLPPSPRPQGQRWIWFNLEPPPNCQHLEALDRYFNLTMSYRSDSDIFTPYGWLEPWSGQPAHPPLNLSAKTELVAWAVSNWKPDSARVRYYQSLQAHLKVDVYGRSHKPLPKGTMMETLSRYKFYLAFENSLHPDYITEKLWRNALEAWAVPVVLGPSRSNYERFLPPDAFIHVDDFQSPKDLARYLQELDKDHARYLSYFRWRETLRPRSFSWALDFCKACWKLQQESRYQTVRSIAAWFT

SEQ ID NO: 930092 - protein, 359 aa, Homo sapiens; identical to SEQ ID NO: 904586

SEQ ID NO: 930093 - protein, 155 aa, Homo sapiens
MSSSARGWGNLGPGNRALLQGAPDAMELRELTPWAGRPPGPRRRAGPRRRRARARLGARPCGLRELEVRVSELGLGYASDETVLFRYCAGACEAAARVYDLGLRRLRQRRRLRRERVRAQPCCRPTAYEDEVSFLDAHSRYHTVHELSARECACV

SEQ ID NO: 930094 - protein, 146 aa, Homo sapiens
MTWRATPTASLATSLGSQRLRAQRRGRKQICTQNCYNIFPKITNFQQKILRHLKKRESVTHIQEGEKSCKNCLERGADVRFIKDFEIAITNTSRELNETMFKEPISRINSLGNTNLPQTENMSSSGLYKAQFYYTENRRRGAVKQR

SEQ ID NO: 930095 - protein, 135 aa, Homo sapiens
MAGYSSETKLPEERSGSNICCSPISAVLQPPLLIPRQTGSALDLRQTPTDLQLRVLTVRRKTNKQKGHAHQNNICMSPSSKTKATEQSWMENDFDELREEGFRLSNYSELKEENNQCREVLKGPDGAENHGTRTT

SEQ ID NO: 930096 - protein, 184 aa, Homo sapiens
MELPPHCHMVAKMKQVTIGSPDINMSFNHCLPFFDHGTHFITGKIHAMEVAQAVFALNIFSNQLEFSKCNFIILQISKTHFKHTTLETIRCNFGSLGPGDERLSNISYTEHSRCFHIIPIFLRKLINHFLLGSLFAAFRKALVLANCHGAGQRAKKVIYFYLLMRRYSKGSKKAWDFRNLHLIH

SEQ ID NO: 930097 - protein, 169 aa, Homo sapiens
MSQDFLLPGRPLVGILLIILQGKGPYTRLPSQGTIVKIHLSYKASVIRLQIDMLSPLFSLWLNWSTSLFSCDQGMGSNMPHEECPPSGSGVHVQVCYIGKLGSQGFVVQIISSARRISDSRNLTSKVGVTWADTEGEAQPKYERTAGWVEAAMQWSEERKCGWKLMSLT

SEQ ID NO: 930098 - protein, 170 aa, Homo sapiens
MPGDLPRYGAKRALLTHVLCTGRLGSLRLLIQVSKLALDASLIAYEKLQLQQLSYHPRPATGGSTIPLPTAGMLSILTTQFWFPGSGKMPATFPSVFPSQRLQASPPVSSKFSSLVWVAWIPSGRRKNRKALFGFHSWSYLNKMRTNLASDIPLTQYILQNNKADMRKKI

SEQ ID NO: 930099 - protein, 136 aa, Homo sapiens
MTLRVIQHFEPQFLHVSNPIDLSCGNFLAQLPGLPLSLNVHCLLNSDSPAASMAFSCPTRVGGGFGSNFNISLSWGTVTQSHSTRPKSIQTSPTLTNRTPTCNDLQRLQAAAHCMGLGGSRWRQKLMKILVHITVQ

SEQ ID NO: 930100 - protein, 139 aa, Homo sapiens
MGMATPPTTLHYHSGQWQALTLFNHHPWSLGPVVVGVRAWRGLSTDQWPGLGEVKKSFQEEVAIECGGLEDKQAGRERIWINKFDLEERGAQWGSRPENHRRACSACPMTLRGLFFRLDVKFKGEDIFEVIWQGSARTK

SEQ ID NO: 930101 - protein, 131 aa, Homo sapiens [sequence omitted]

SEQ ID NO: 930102 - protein, 134 aa, Homo sapiens
MNPPVGWCTENTPYGMPGKPPTGLPLEALAGKEPFVFSVPFQCHLPMKLNVFCICGHLNLQDFKRQLRILPHNNTDGDPDLATEPGGTGSASEPVTGSTDFPKPQTSDLQEVCIGIIDCLEQDAADGYLIWHTF

SEQ ID NO: 930103 - protein, 142 aa, Homo sapiens
MKAEAWTLSFTEKQEWKIPLKTRQISKGSQREGESDWVSWNLNPEILSALTLRASCRQGYGLFENYFIFLVIIIHFRHSHFHLPKNVDVQTGVGPWVSTVFSGVSGVPKTFFFLSKTWPFVDVRKFDFEVLSIFCKIKEGKS

SEQ ID NO: 930104 - protein, 251 aa, Homo sapiens
MVPAPPQRGSGPSQAGFTLLPLAGWNSKSMGLVADTRADTTSVPAEALLFQGASSRWWVHRLAGFRCEAADLRGEKLQTFAVSVTAHKSSVDPKHEQQQDLLQRVKELNFHTVERDSGLPLLATQEPTEAGGGSGMAGRRSRALPCGEAAEARQEFECSAGGPALLGDPAHPPQLLARVLSPSLPRASGAGWLLPVQGPLSLQPPGTLAGLQALRSLVPARASPSTPPHRLRELAPASAIPGRGSHSTVAG

SEQ ID NO: 930105 - protein, 167 aa, Homo sapiens
MNHQFNPGPADGRKGRFDTEKQIQVQVGHLLTAIKAGPFTDVSTLEAPRRRGNTANITEDLAVKTENTTYPTEDFAQPPLSHLLPKRQKEQWGLAGALPCPPATGPADSGLLCPHNVSLLRHSPSQPASPHPPAKVTVATSPSLLKMHEGEGLQLYNIYFIFLSCVL

SEQ ID NO: 930106 - protein, 132 aa, Homo sapiens
MVSQPPPLSFHAPSSATLRLPPRRIQNADFTMSLPAQSPLKAYRKAPAYRITSRLSKWPCVMWPQPTDQTHTHLCAPSAPVPIYTIFLVFAYSVPDTKNTNHTALPPGTYVLKEEIMEKQNSCPPQHEQCHR

SEQ ID NO: 930107 - protein, 148 aa, Homo sapiens
MDRPLGEERPGREPLLAELDRGVLESFSHIFVLSELQTLEASGTDESWPCHFLTVSWSKAPEILVDRGDRRIFGSDIWSLIPVPDTELLIPWNFLGNRSIFCSIEATLGGLLDSLRMRAGFQGTNAVSRGWELSASPLTSKEERGTES

SEQ ID NO: 930108 - protein, 225 aa, Homo sapiens
MVVPAARGAGERYHGNLLNGDRCQDGGKSGTFRRTCTWLKRQALGCGFFPDTVGQGWWHHSKEKKVRSPTLALGALLRTGHSNFWGGPIMLVFPGSQMAAVDSPTGQHLVLTEPWKVSFLGLQVTREDEQPITQEVKDRGAVRGTLGQAATLRGWDPKVGPGQPGNGRIRASDGFLRKVALSTALKDGEKLGGRAVGREETQQAASKPETSAGGWIRQYLCGCNS

SEQ ID NO: 930109 - protein, 161 aa, Homo sapiens
MSSLPNGETRETCDSTPAGLDRKGCSEGVEGARAQLLRGDGIGAERCGSCPRGGGRWRVGPRQWQVSQQVEWGYWRGDLNPADSCEPGEVAPSVGDKAGASVKQDLQKVRCQDVNIFRGHSSACHSWSFMPAVTKRELREDEEHLCREPEDRDREAQSSHV

SEQ ID NO: 930110 - protein, 148 aa, Homo sapiens
MNGVCNLKDDVSGALRRALFRHTFYCYLHFHAIALRPREVGFLLQIIQLINELSAKKAVPIFTLATGPFPQQDIIVFGLGMGMTLKQLLPCDNSRILLVFGSCESVCHTSGSVMGLFLIPKCCRYCEGSLANTQQPGNMSFAPGGLKL

SEQ ID NO: 930111 - protein, 150 aa, Homo sapiens
MFAVLQSLLVVKSMKMRKDKCKKAENFKNQNGTSPPKDYNSSPAREQNWTENEFDELTEVGFRGWIITNSCKIKEHVLTQCKEAKNLEKRSACPLWKCTGSNCGGMWNTSCQSPWVVWLLGSPHAGQLAQQATDRLADIVVQIPSVFWVR

SEQ ID NO: 930112 - protein, 139 aa, Homo sapiens
MQKGARERVSARPGRPLWALHQQKQTLGVNCAGAQVGVLATLKPHRACYSALLAPLSVDACVLTTQLGSCLLTWGNCPPPVRAQCQCDSLSEYLHLVGPELLSEYKKNEVVFSLKSGCLVPKDKPSLFPRIRQSLFSAD

SEQ ID NO: 930113 - protein, 205 aa, Homo sapiens
MPAGAIGLLLALDKIQTTTPYSYLGTLANNTTIVPQKVTICRDQLKTLNDFQKLLGDINWIRPALGIPTYAMSNPFAILRGDPSLSCPQQLTKEAETVLQLIEKQVHKTQIDKIDPENTLDLLIFSTQHSPTGVIVQEQDLVEWLFLPHTNSWTLTPYLDQITTVIGNGRTRIVKLHGYDPGKIIVPLMKAQIQQAFIVLLGKPI

SEQ ID NO: 930114 - protein, 140 aa, Homo sapiens
MEATVTLLGGGEVVQGKLLLQRREREEAGSHPSSRGSLKCGLNQEGKGGFWGSEEDWALVILAVFTQKQRPAGKRRAICTWIVPDFLKQREGALTEPLSEIERHPFLTLTASLFQKSFSRPPAREEGQESCQQENSALEN

SEQ ID NO: 930115 - protein, 151 aa, Homo sapiens
MSCHSLLICKVSTEKSVARHQVRLPSRTFWSFIALVGPEVSSKSEILESKTLDVYLVFYCTVTWLPLKPQDTVIPSLSSPFQRTALSSMPYSFSGLPPAAPRDTLSTTELLLGVGEGWHQRFRTVFLLQCLFQQYKVNTRSHSQRKAELGD

SEQ ID NO: 930116 - protein, 161 aa, Homo sapiens
MIAGAALTSVSPVAVATGVHHYDCVWDIYAVPAISLTHGGDALLKRTMDDGLGLVFLLSSSLWSQDLGGSRSPGYPENGSGYKSPDVLTGAVVIEKLQEDKSHWMDMMEEEGDRRQVGEGAVLAAVETADVTRGQGHWLADYCSCPGRQTDDHSCVGSGRP

SEQ ID NO: 930117 - protein, 483 aa, Homo sapiens
MIGSLGWFLPCCSPDNNKMCELDILHDSLYQFCPELHLKRLNSLTLACHALLDCKTLTLTELGRNLPTKARTKHNIKRIDRLLGNRHLHKERLAVYRWHASFICSGNTMPIVLVDWSDIREQKRLMVLRASVALHGRSVTLYEKAFPLSEQCSKKAHDQFLADLASILPSNTTPLIVSDAGFKVPWYKSVEKLGWYWLSRVRGKVQYADLGAENWKPISNLHDMSSSHSKTLGYKRLTKSNPISCQILLYKSRSKGRKNQRSTRTHCHHPSPKIYSASAKEPWVLATNLPVEIRTPKQLVNIYSKRMQIEETFRDLKSPAYGLGLRHSRTSSSERFDIMLLIALMLQLTCWLAGVHAQKQGWDKHFQANTVRNRNVLSTVRLGMEVLRHSGYTITREDLLVAATLLAQNLFTHGPSGWTWTISGRLGECSRQDMFSCEWEKKPNEKWCQQSRHHYVKFNAQNQTRGYLSWTSYSDYSTSNTTQ

SEQ ID NO: 930118 - protein, 137 aa, Homo sapiens
MLNRSGLLRYGWGPLQSLGTLDFPEPEGVFSEGCKTAQIAACPSWELCPGKDIWQKKFLSSKAFKRAVQKGDVGLEPPHRVPTGAPPSGAVTRPPSSRTESDRSTYGLQCVPGKATDNASPQKQPHGYVFFSSMKMD

SEQ ID NO: 930119 - protein, 173 aa, Homo sapiens
MLEAASVQELALKTVTVTRALVHTTSTPLPWLPTPLKIEGPGEDGTALEMGLGWGIAPREVRLEDPRTHGRWQRVKKRQKAQDDTSGCVLCWVDAGSYPLPTADSDAFLCVARVVPSICNRLPVRPHETGCGASHLSLRHPPAGDPFKRFLQGHPGCHAEDRMQGKVVPGGSR

SEQ ID NO: 930120 - protein, 164 aa, Homo sapiens
MEASTWVKDEAMGETPAHTTQASCLLGWKSRNFPSIPGSIKAPTEYSGTSHKTLDPDTSCLKEPTASRAPLSGPQSPLELFELANPNPAQLASPLPSHSPCPSSFHPLTDSGASPYGPVVLSNRQKADVIKRTEGVRSKEHGVTLKHSPEQEFLTWATGNLHNP

SEQ ID NO: 930121 - protein, 133 aa, Homo sapiens
MEKAKALHIESQEAAGTVWKHLDPGSFTPAQKGELSGRGASGLGRALPVDTFYLIFIFHVNEVFPMSLGHIIFFHFALSVLDKAFGSWGLRAVLADTPETLPYDTEPVSPQTLIPVEVCIFEVLVRDHEKEGS

SEQ ID NO: 930122 - protein, 166 aa, Homo sapiens
MTSISNKYRIFLTSQKIPYAPFLSPPRASGSNLRGSLTLWDLCSFALHNKSPCCSLFVSVSSLRAVTLTRKMESRSGIQAGVRCRDLGSLQPPPLALKQFSSLSLPSSWDYRRLPPRCGFLFEVSETTNPPAGTNSRHTLTVKLDGLAKIRTAREAPSECVCPPGK

SEQ ID NO: 930123 - protein, 215 aa, Homo sapiens
MTFSTWTSTLHESSFQGKQNNILGMGGKSFEFEQPGQRLLIPKRGQEMAELLAVMGSCGPGHQADWMWSPITPRSLLPPPCAVLLVDAASLKTMPCVSIFFMGLNSVKGIRGDQQTWVDSLVVDIGICFPVEGAWPLCPGSAGHCLAESRGWLELCSLQRYAPSPPPFLLPAQAWEEQLVTFKLSVCPPYGFGLSGSVKGDRVLELSVPQSRFTV

SEQ ID NO: 930124 - protein, 151 aa, Homo sapiens
MVFSTGWLSEKFDHLKPSSLNLSKSFSVQLCSVAGPSAAGLLEFAVGPPQTLFAWVSAAEAAEQRILLNSKCCCLIVPLEVSSQRGTQPSSLPPCSWISDCCASNEWDPPSQEREFPDPLGFPGEVMPHPASAHARWAVPTVLHPLSDKPQ

SEQ ID NO: 930125 - protein, 177 aa, Homo sapiens
MTRDWSCSSAQSSSSKVKQSDWFFMQMLNPISIHWVESPNRGLQSFPLVPESPANPHWGKPVEALKLPETELPVGGMGCHLCCLAALTLAVSRLWRVCEDQGLVWTPSREQPPHRKLSTLFSMQVLVLTSPHWAGPPTWDSSTTTLPLPDHCSQRQPSISPRRKFQSQPTTSSPLQL

SEQ ID NO: 930126 - protein, 158 aa, Homo sapiens
MRIKTFMNIYFHLIIIISYLEAEQLLNSNITGTTLISPICSCHHCWPLPLGPKHKPLAVTPIPPAPGWSYICIFPEDRLPCSQLLLTAATSGGVEATDSNPTAPSPPQQDSHRALALSVGSLTPRLPLLPSLEHSAKALGVTQSLLTTAQCLYAPPGA

SEQ ID NO: 930127 - protein, 151 aa, Homo sapiens
MELGWLRASQRPHLHLSQCGPPENSKCAASLPLEKASSSTTASTAPKRGQRMKKRPGTRIGKSTNPPSILDCSAAILKKMRSAGGLEAEPLPGFPDACPATSSPLWPRLSYLGLLKASVQTLDLTLCDWNRTAPLCLERGHVRARLVLSAV

SEQ ID NO: 930128 - protein, 151 aa, Homo sapiens
MLSQSTVASHPRPGSATADSRVITEVELYDIRQTQDLAKPGNSTRCFPPTPKDANWSTKKGTAKARRALSERCHHLVPGSASCSMPGTNSSAVEADNMNTSPRQGRRWVIVLPCLGNHTFSTDQCKRGSGDPPCEPTTPGPWVSGTELCRF

SEQ ID NO: 930129 - protein, 309 aa, Homo sapiens
MKGKKEKKEKKKEKEKEKKKKKRRRRRRKRRRRRRRRRRRREKKREEEEKKEEEEKRKREEEEEWRKRGRRKEKRRRRRRRRRGGGGGQGGEEGGRRRGKKKKKRRRRRRRGRGRRRSGGRGGGEEEKKKKEEEEKEEKKEKKKENEKKKKKKERRRRRKRRRREKKREEEENKEEEEKRRMRRRGRGRGRRRRRRKEGGGGEGEEEGRRRKEGGGGEKKKEEEKRKREEEEWRKGGGGEEKKKKEEEEKQNILLAASFQNYYQNIYKVKFLSLIILNHVQFCDIKYFPISVLSPSPRPTSRTSFILST

SEQ ID NO: 930130 - protein, 153 aa, Homo sapiens
MHELPVAAGTNHALGGQKQQKCIPSHFCRLEVQSQGVHWVGPPSKGSRKGAFLPLPASGGPRDPGLAASSIPASLFTLPSLLPYTQESDLQVCDVAQESALSRFPQLILSQDSQWQLEQQGEVTFIIWLGAEASRLETSDAGYASRSRRRAMA

SEQ ID NO: 930131 - protein, 146 aa, Homo sapiens
MKIKFSPWMKIKFSPWMKIKFSPWIKIKFSPWIKIKFSPWMKIKFSPWIKIKFSPWMKIKFLPWMKIKFLPWIKIKFSPWMKIKFSPWIKIKFSPWIEIKFSPWMKIKFSPWLETQLPDTFSNLLPAAPAQRFQKWCLLSTSSIRD

SEQ ID NO: 930132 - protein, 134 aa, Homo sapiens
MNGYETIDEVCITGPVPGSVAWLPLVSSSVSTYPLSLQHAVPSVLLTECIPPTPTPIGISWARVRGGPGQMVRGSGRVHPEVTLHKAEPHLAPGCHPIGPLFLLFWRLQIKQKIIFMENVSSEMLASLAGWFLS

SEQ ID NO: 930133 - protein, 185 aa, Homo sapiens
MSTDSLGRWCNCCRDSKIHSAFALWRDRACCFENVRSPHGPRLQGLGVAFVALSTGSLRLILLKLPRRAGIEADRDGPGLEMSPRHRVNFGSLPLHPLWDRHLFDLSKDMLTGKKSCEQEKRDKENELTSPGTPGSWYQQGTQRPATVLRTINPADTLATDFWLPELTHSCWIQASSTPLWSHRH

SEQ ID NO: 930134 - protein, 253 aa, Homo sapiens
MQLLTSAVIAHPLFHGLFAFPLLLIPMDDTASRCPSATGKIQSSLSDLFHYRVTVPSQRGLPQSASKFALPRESISPCGPSLICPRWKRQGYPVRTLCLKAIVLRLSRGEPSVSRTPGVLLLLTIPGPADSAHRLALTFSVESTEGTEEPTPSMIDPGIHGEETEPCAASPQQIFISLHLGSTALGEVKPPKSCQGEVDWWLKGPALHIKRLWDVAVQVAAPEAMEGPPMPGRPVGNSPALLTSAPKLLKARG

SEQ ID NO: 930135 - protein, 254 aa, Homo sapiens
MGVCYTHYFITQESASQQQDAAWRMMRASGSSPEERAFESRQHSFAQRAHFERLQRRPVFLAATKHLLEAETKCQAGESSKEQGDNHTVLNNSNGNPSLQPFVRGCLIGKGPGSARLGDVSSSALTFSVESRPNHDGLKRRVRSNSDILNHTFRARKHKEFHCPGTIQLTYFLWLFFASAHAWRHLDSPYTLNDGPLFGCTRVYISTHLLKDIVIASSFGNHKQNSMYRFCLSRHHLLKRLFACLYCLGSPVKD

SEQ ID NO: 930136 - protein, 167 aa, Homo sapiens
MNNAAVIIDGHVSVWTEDQKQQIKAAPDHHYGKKQGGCLILMKGQKENKVAYEFGEKKYQRASRVMDIGPSTYLFVKFLCHQFSNHTSSKSLTIQPNHWLQPMNQCIIVHLAISPSMQRAQPVALLEVLPTGKIWLHHYPSVMSWKGTVVLQLSTFRWCLHILQNHL

SEQ ID NO: 930137 - protein, 151 aa, Homo sapiens
MCEHDSEPCLRNGTTHPKHPSLQDSGVPESQFATLVDGRRQADEDELHNSAKLCLIFNVEQFGECSVTSVLVSDVCEGHLPADEWKRSVCMGKKVSPESHAAELGLQEASISTITRSSPKELVHPLLHEDTVTRCHLRGMTPCQTLNLMMP

SEQ ID NO: 930138 - protein, 162 aa, Homo sapiens
MNPQQTAAALQERDLTVERKTNRKQQQQHQQKVPTKTSSKGQHPQRSKLDKVMEMRKNQRKNAENSKGQSASFPLNDHNTSPARAQNWIEDEMEKLTEVGLRKWVITNLAELKEHALTQCKEAKKHDKRLQELLTKMSHLKGNINDLMVLKNTAQEILMQTQ

SEQ ID NO: 930139 - protein, 165 aa, Homo sapiens
MSPADPSKTQAKEFLATGFQPEKRHSKDSITLWLALINYIKSLFNSIKAQRGEETAEGKFEASGGWFMRFKERSRLYSIKAQIEAASVDGEAVASYPEYIAKIIDEGGYTKQRIFNEDEIAFSWKKMTSRTFIAREEVNAGPLKFQNFKGQADYLVRGLCSWWLS

SEQ ID NO: 930140 - protein, 188 aa, Homo sapiens
MNILAVQIKRVLQNVLGFQGEIGLNKGLQALCKSKIQQDSQILSPKMISLDFMSHIKVTLMQDLGSHGLGKLHPCGFVGYSTPPGYLRGLALSLQVRSNPSPATWTFSFPSEDVRFEAADDLPFTPSHFGHSQFFGCLLEPAAAIHFLQSVHGFSQLSWDVPAVGHGPKVHDVPPPQAALSIQVGASN

SEQ ID NO: 930141 - protein, 178 aa, Homo sapiens
MCFVKQMLEGSMLVKSHHHSLTSSTQGHKHCGRPQDKIDRSLAALTQKIRKKIQISSIIIEMGDITTDTTEIQKIIEGYYEHLYVPKLENLEKTDKFLEIKDPPRLNQEETETLSRSVISSEIEMVIKTCQQKSPGPDGFTAEFYQTFKEELVPILVTLFSKIKRKYSLNHSMKPISS

SEQ ID NO: 930142 - protein, 154 aa, Homo sapiens
MPHSSWMQDKNSGKDATGNRGFWPENLHPKDPITLIFYCHKILLFKNIPNVFIHSTLDRCLVYLCCYAKMPKTGVLPGIESVRQLRMARVVVLCFIPCKHPLMFHKLASEILSKRDLLGAKNSKPVNPGRLSQGEQRILYDFCIPDFIKCPGKN

SEQ ID NO: 930143 - protein, 140 aa, Homo sapiens
MGRNQSRKAENSKNQSTSSPPKERSSSPATEQSWMENDFDELREEGFRQSVITNFSELKEDVRIHCKEAKNLEKRLDEWLTRINRVEKTLDDMNETKREEKFREKRVRRNKQSLQEIQDYVKRPNLRLIGVPESDGENGT

SEQ ID NO: 930144 - protein, 139 aa, Homo sapiens
MQGMQKRHGGGGLCDFLGDSSQLIGHLVVGLAPLQTDSACSFLVGENSGGCLVCFKTWSLDLLSKHTANNACRHSGQRKGSNLDEIGDYTLSEVIQKWKTKHHMFSVIRGSSAMRTQRHKNDTMDFGDLVGKGAFMVYV

SEQ ID NO: 930145 - protein, 136 aa, Homo sapiens
MVESRYQNHHTRDMNLPHLASQEAWISFTVNAPPLNHTSTLPPGPGDTAEENSWNTSAGNCYPLFGKVSPKIHLKSAFAQLPFLLCCYANDPVTPTPDILLQAQHPLQLVLIFTEKKMRVPTCLNFVYLVMELSVE

SEQ ID NO: 930146 - protein, 143 aa, Homo sapiens
MVPCGKLGEKLMYMDAEDFEIQVMRVEPHDWHQCFYPRGLPHSSLWPSAPRGTGEGTRGLPNSSLCPSASEDTGEGTRSCKTVSLKRAKGLRVKNDQVLNLPAVPNDPAISLLGIDPREMKTYVHTETSTQMLIAELFVITWI

SEQ ID NO: 930147 - protein, 156 aa, Homo sapiens
MSLGTRNFSDLILWILTVSQNFIFDRLDSLEDYWSEVLKNVSQLTFVCCFSHDKTMVVDFGDEYDRAVGYKSFGYVSVSTANAHCDNARVSVRTQILTLEKLRFRVVSATVQCRVFSRTGENVDFLQRLAPRLISHKLYLPSVAFTTWLRFQSGIG

SEQ ID NO: 930148 - protein, 172 aa, Homo sapiens
MSNEVCCQNTDVMKTTPKTKVGNKKTHINIVVIGHVDLGKYTATGHLTYKCGGINERTIENIENEATEMRKNSFKYAWCEYSKLSSVNVVSSLVSLCGNLKSAVNVTTEVKSVGRYHEALSEALPKNNVGFSFNNVPVKHVRCGNVAGDSKYDPPMEASGFTAQMIIRKLPG

SEQ ID NO: 930149 - protein, 139 aa, Homo sapiens
MVGSVEENDKLHSFAEKVSHIQTPTYFCGQTLTFRVETVGQKIQYGVFAEKQNGYDSLQQDQAICMSTNGEVFVNGKEMTNELTSVTSVCTVTFDTEAVTLGTTNNNEGRNFKLRNILLYSLRKCNPNTNNGYHVVLIS

SEQ ID NO: 930150 - protein, 149 aa, Homo sapiens
MLNRSGERVTLAALLKDPCETSQKCLPWGPREPTGLFLLLLRPLYFAWLSKLSQLQEISCYLNSTIWNRYQPNRENCILYRTLVYSVCYSLKSLGVEEPSSNNLITEGSEKGGVMEEDCEGLYIGDYWESTGNPVSFRSSCPMVKCTDF

SEQ ID NO: 930151 - protein, 135 aa, Homo sapiens
MAGLQGKIIFSLDPLSSSASILLRTTSITQPKCCLLTCHAPYPLPIKTPNPMFHKQMSRRASEPHGREGEKRRSIQTWRGVRLGMVGEEIGCGMAKLQGKIIFPLHILSNFSSIPLRATLYHSIKSPHSPLIKSV

SEQ ID NO: 930152 - protein, 139 aa, Homo sapiens
MDRLSVWDGSHGGTALQVRLHPGKLAKGNTGGYGTCKGEVLVEVELAGSLSAKAPCAMVGLPHWCSPLIRQSASAEATVQAPRAPKTTLQACMARLGPQERPAVQGVLRSDQSRLTGKTTLQSSDPTVPLGSKSPMGAN

SEQ ID NO: 930153 - protein, 142 aa, Homo sapiens
MGENVLSCKSMRGVLEKVEEGGRRRVRKRGEKGETGERETGRIGKFIVEEVFSPLRLEVLQGTSISCAEKAVIKEDLQGEWTAPAGEFTASQLKVADESEGLYYVPYPYQGEQKLANEDNSFRSFISLAMIPEKFILPSFTN

SEQ ID NO: 930154 - protein, 205 aa, Homo sapiens
MSVVRFDQEESEAGPREMKTLKSRGKQGKKWKEQTGIKPTKANCRIVIGSICIGHANARGSPSLKINHLTDFLPKTKETQQEENSQSKEAGSGLSCVIPPLTTRVIAAHRSLNGACQKSALRGATSASSKRLAFPLCVNAAQTLKAKLDLPQCPGCSLFFCPIFYPWNLGNSIVTFFRGGCSPHQTTEPAGTLILNLAASRTVRK

SEQ ID NO: 930155 - protein, 158 aa, Homo sapiens
MVWLCPHPNLILNSHVLWEGPAGSQTIQAVRGSLSSCLKVFSFSKRVSYITCSPFAAVVELLLSSALERIYFCLMKMKSDVRDPGYLWEPHDIIMHLGALQLTSKPPWEYRPYRHSSEWLLQLQLLHLHSRKQEKGKGGEMCGQIHKQCLEHMVASQC

SEQ ID NO: 930156 - protein, 360 aa, Homo sapiens
MKLPEEGSGSNICHSAIFAVLQPLLVIPRQRGSGVDLQQTPTDLQLKDLLEGKLTNRKDFHTKTPSVCHYHQRPKVDKTTKMGRNQSRKAENSKIQSAFSLPKECSSSPAMERSWLENDFDELREEGFRRLVITNFSKLKEDVQTHRKEAKNLEKGLDKWLTRINSIEKTLNDLMELKTMARELCDACTSFSSQFDQLEERVSVIEDQMNEMKREEKFREKRLKRTKPPRNMGLCEKTKSMSIGLPESDGENGTKFENTLQGIIQENFPNLARQANIQIQEIQRMTQRYSSRRATPRYIIVRFTKVEMKEIMLRAAREKGRVTHKGKPIRLTNKRVSGSLGRNSTSQKRVGANIQHSQRK

SEQ ID NO: 930157 - protein, 144 aa, Homo sapiens
MCLQDKECQGLQAANRCSSFTQPTALNPSQEQEHTGEQHPGRIRSHEPIEDSKCGDFIANESGSQQDGELERRWSGKGKSSVLIQECVASEEWKTQAGPDKHSSNSEALEIYSKSNESGQVCMGCRPTEYLGVQINFQVEWIFY

SEQ ID NO: 930158 - protein, 157 aa, Homo sapiens
MVGGGRKCLFSLIGHGISKAYSVILSSPMGWSRGSKIAFLLAGMAEGLALLAHLMAELHVPVRQDSLRAPSQISWLVAQGCGRLYQGIGKPITETVPRKKAFLGAAAKENERSGSRSSPQPSKIRLSYSRKKNVTMCGKQEFGKGLSWLFRLFFGSI

SEQ ID NO: 930159 - protein, 141 aa, Homo sapiens
MENWTLKYTSQKIQKCPFSETSFEAVVASLLSVIVILHVFISSSRSVVVKGDNASVLSEEIFKYLLLSRIQTQDKVQRLCVQVCNMGKLCVAEVWCTNDSVTQILSIVPDSNSHSDWCGYLTLISDHEHMSMFVGYSYVFF

SEQ ID NO: 930160 - protein, 138 aa, Homo sapiens
MVENVDSVRRSNQSGLVVVVRDPGLQRHDHFVTLASQKMDHCSRGREHGQPTPTPEVAHFIPTQDSLSRIGTYVLLTARGLGHVEKHTHIAVSFLACVAKPKMSSGLGWISDGLGYPKEEPRKHLELVITVRTDESKK

SEQ ID NO: 930161 - protein, 192 aa, Homo sapiens
MEKEFLTSGGTSVKYHKEIMKLLHAVQKPKELAVLHCQSHQKGEEEKAEGNHRADAEAKIAARQNLPSEIPTEGPLDRKIDGSSQAIKGKRHNGYSDGGHQATDGLTNGTPNELNSKLLLRTPGSLTGLESSPLEDTTTAGPLLRPYPAEVARVVIAQFPTVVGVSCLEGGLRGEASWTSGSGGGLEELFCS

SEQ ID NO: 930162 - protein, 135 aa, Homo sapiens
MVVRVLQRNRTNRTNALEALSPWEGSYTRAFGAEEPLRHGFFGVSVLFVFSWIHPKHDHHWTTIEFEEPSICERSFATNENGGQRARFSCQSGIWWQQPCQVPWEPRSAQHKFLSHPCCFAFCQAGKRKGMVTVP

SEQ ID NO: 930163 - protein, 168 aa, Homo sapiens
MQAPATGLDNRSKTLSQTNKQTNKQKTAKAEGARSRGPRNKIPGAPSGAAVWAAHLAAALLAKAVASKLLRAVILRPPCSGKGTECQSIAQNFGFQDFSSGHFLWENIKAKTEVGEMAKQYIEKSLLLPDHVITRLMMSELENSRGQHWLLDGFPRTLRQAEALDKNL

SEQ ID NO: 930164 - protein, 147 aa, Homo sapiens [sequence omitted]

SEQ ID NO: 930165 - protein, 137 aa, Homo sapiens
MSQLFGQSAVLWTITATCAASQITPHGNCGQQDVASYEPNCNDCNFSSESGHPAELPGSKLALAGEICFLQRVCEFSWLSWYVPVVVPGAEVQDVSLHTLLCFFRFSSMRFKRRETFDKVTMCQHLYFKVIADLCLW

SEQ ID NO: 930166 - protein, 150 aa, Homo sapiens
MCGMFRFVTRELPEARVSDAVSCSHHVDKTALLQRWSTYLKPEEPSGKWHYDRKQSGYGGQTKPIFWKKAKTTKKIVLRLDNVIFTDSLQRYLHEEQPGEIELVSPSGAISRFVSCPVIRVCVRACVCVHARACLGFSKYQLLLEAYLLP

SEQ ID NO: 930167 - protein, 137 aa, Homo sapiens
MAMSTWLLPGGSGGINLFQSHSNSENLQADDVIYKKNSFSEEKFKPAAEICISNEEVNISHQDNGKNVSRACQRSFQQSLSSKDWRPRRKKWFCELGPPPPLLHATWDLVPCNPAALNVAKRDQDPGGTAEEHQELS

SEQ ID NO: 930168 - protein, 146 aa, Homo sapiens
MKNIQTRGDIRSKDYKEVKRSGKSISGEEQVEEVTRANATGRGEPRCFVNSKGPSVAAAGEQGKTKNNATICLLSAYDLEAPSPLQVVLPFLKESMFILNMLIDVSRLPKMYKAKLCSDRLGHMSSQSLSPWAVSQACIFNLGKIN

SEQ ID NO: 930169 - protein, 142 aa, Homo sapiens
MWKLLEDNLLNSCFCQNPSCGLFAYCLVGSNCSLLLQLLSQSPEVIDHEGSALMKELMLFLQKWVYRKGMSFDPFFSLSHAVFFLHLPPRDDATRRPLPDASTLILNFPACRTMRKKYLFFVNYLVCGILLYQYKIDHFLSQ

SEQ ID NO: 930170 - protein, 148 aa, Homo sapiens
MDAQQDRPKSQDCLGLLAPLASAAEVSSTAPMSGKKHRPPGPLFSSSDPLPATSSHSGDSAQDTSLIPAPFTPASRDAGIRRMFRAREQQDALVLYQQDAFWVDPTATLLSGRSYCHPSYGHMSESHVIKETKGNHHKYKLRKVLQGF

SEQ ID NO: 930171 - protein, 171 aa, Homo sapiens
MLGKRYQKLPVNPSDLSFPRVEPDALRSFRWIKTVDLSSDLASGAGVHPTFADSVAERLKYLSQDCIPTRLDSIMTLTHQHFHILGLIEAAGVSYRNVSPGTTTPNTHPHPCLPAQGQQTHTPTQQHAPANCCSSPHHGFSVGFIIQKRPQGQGKLEQACTGSQFKSMTSA

SEQ ID NO: 930172 - protein, 141 aa, Homo sapiens
MAGQVAGGSCRAASHPWTLHLSLKQSWKELLTGNFAVNGREKVRYLAVKMDSSKSLSWLELVPMWFTAVVQKEHPGHRTVIFFSVLSSILGQIRAGGEGRVCENFQDIRDFPALESRGHRKAIWEQRLGWRLLKGNGVRGQ

SEQ ID NO: 930173 - protein, 494 aa, Homo sapiens
MIYLKCDYPVTILVLLSGGEEDRKMWEGLELRRDLLNSFDQNAGSDMDNEVQAQMVSHGNKELVGNWNKGHVRDLHRPGGLGGNHGFYGPAPGLSAFCIFGTWCPACQLWLKGTNVQLRPLLQRIQAPSIGDLQVVLDLWLHRSQAVQKGNIGSEPPHRVPTGALPSGAVRRWPRSSSPQNDRFTNSLHCAPGKAENTKRQPVKVTSNYPSNGSCGGPLIKDVNNREGRRRAESGNVHKNKKNFPNVLRNLLLMSPCIGLSLVSILEPIPLPQNGKQHSAISGIMDVKDRRHRSLTRGRCGKECRYTSSSLDSEDCRVPTQKSYSSSETLKAYDHDSRMHYGNRVTDLIHRESDEFPRQVFLFKTQDTDHKTNTLLTYNQVLQTQLDDSTDAQGGKELPASKSDGGPESDLVQLPQLAHSSIKCKNLPSPSRRNEPGVPMRSLRKLGQIVPIFACFQHRILLCLLLLWLLLLSMQITCLASIMLDPPGVKEENC

SEQ ID NO: 930174 - protein, 143 aa, Homo sapiens [sequence omitted]

SEQ ID NO: 930175 - protein, 123 aa, Homo sapiens
MEKFAFMSMANRSDLWNTVDPNLRRHYQDGGRDSKYIMDLIMEICGISSCMSQTPEATPCPDEHMCEDKDICPQHWGQEAAAAAQLKERKEEKNPAGRWMYSQTPGLGMQKTGMECQERSTCG

SEQ ID NO: 930176 - protein, 180 aa, Homo sapiens
MSNLSITLILTNWYFSSKLVLLISLFDSFSECSCYNSNSGAVDSARAWAAFSLTEQTLAMGDEHLCCAGGTAERQVELLVAWSQECGPDFKHIMESYQKQGGAAGTINPGSAKSVHCETCAEGKPDVDARERGQEGKCGMGTLRTGPCVRLDVLLCVGGGPNSRGSEPRKAGRVCSWCRG

SEQ ID NO: 930177 - protein, 154 aa, Homo sapiens
MVCIRFSALPCLGCLEVTRCSFLKGTGQIQERQVSYGESSHGVHSQITVSLVNYYKDFRFFLKVIGGLKTKVCYELPYIFKGYTGCYTDDRCWSQGRIRDLTKQLTISPVERSIWCKADEKWSEPGHTLKIETPGFVVEHERNRGIKDGFKDLK

SEQ ID NO: 930178 - protein, 131 aa, Homo sapiens
MIHTRALLQLHTVTTLLNNVEQSQPDTNEFTLCDSIYMKLKNRQTESLEFKSGNGSALGGGDWKLTLEVRAPVMFPDLGAGYMGTTIFNKTRTQSHLLPLAFAGPSRGGWLEKCRAEKEPGQGSEAALEMA

SEQ ID NO: 930179 - protein, 160 aa, Homo sapiens
MKTFMMIHCHFMNNSICGSDEVHGPHQPYDNPESLDLTSQIEYRSSFQSKSGKLLWIELCPPVYRLKSLPPVLQNGTLFGHRVFTKQLQKRLLSSRIALAFRAWQASFDVEMQSIRNWVHPNMEIPTVFFLSLPQHVPGNMAAPTYPHLCRTSWCPAFAY

SEQ ID NO: 930180 - protein, 165 aa, Homo sapiens
MSKQKLAARVKPTLRTSTRAVRRENVVLEALYRVPTRTLPSGAAGRGPTSSRPKNVKSTSSFHPTPENATVTQLQPMRAALEAAPCKSSEADLLKDLGAYLLYQCALDNTNLAIEKASRLRFLASQYVPVVVLGAKDSQKCESSRAALSDQMGAADFSPVFYPSS

SEQ ID NO: 930181 - protein, 355 aa, Homo sapiens
MVSPKYHWCGGRKPTELKYDVGGGERFDSLTDLEEHYKKNSMVETLGTVLQLKHPLNTTHINAAEIKSRVRELSKLAETTDKLKQGFWEKFETLQQQECKLLYSRKEGQRQENKNKNRYKNILPFDHTRVVLHDGDPDEPVSDYISANTIMPEFETRCNNSKPKTCYIATQGCQQNTVNDFWQMKFQENSRVIVMTTKEVDRGKSKCVKYWPDEYALKEYGVMRVRNVKESAAHDYTLRELELSKIGPGNMERPVGQYHFRTWPDHGVPSDPGVVLDFLEEVYHKQGSITDAGPVVVHCSAGIGLTGTFIVIDILTDIVREKGVDCNIDVPKTIQMMRSQRRNDLGKLSNDILEK

SEQ ID NO: 930182 - protein, 166 aa, Homo sapiens
MERYQSIAQGLGTAVLIQVGINQCPLNSMLLFPLNKGRSDYIFTTKFSESCLARAKEKEFMFNAISNKNGLLARWPNKNSSGLQLPARPTQKTGYFCISNRGIGEPPHPTPRTSAKGSREGLCYRAQILCFSQFFCNLQTRRFPRVPSPPGPWVSSTKLGGCSGRH

SEQ ID NO: 930183 - protein, 156 aa, Homo sapiens
MKYQQELWNKTTDAMKRVEEIKQKRQAKFIMNRLKKNKELQKVQEIKKSQAKHPSYPSPSCRQRKAAVRENGTAITTGCGHGRRFLKTSHFYKLLPRRSISDCCTSSEEGSVEVGPTKPGMGEYFLVYWLLRPWEKCSIWAGSVPFFQKAKSGNIR

SEQ ID NO: 930184 - protein, 161 aa, Homo sapiens
MRRLWKMFLSIPSPVARVCRHEQTGWSNPLASRRHAWELMEVGGVRSTPSSQIMHTGTGKKVFSGADSGQAGSVSRSPDGAPLCISSDRQGRLISRPHIRSGEKAWALGHQWYMLVQSVVRGTTLVGTGRDSTGQRGPVLRLTDDAGKHQLWLARGSVAVP

SEQ ID NO: 930185 - protein, 356 aa, Homo sapiens
MNLAVAHSLGPHCLYALFTPEASETTNPPEETNNSRGIALTAVTLTAKVSSFTPEPARPRTYQKEETLNTSEHQKEQTLDTPPLRTANTHREGGRHSDPNSWTACSNSGELILGHEFVLWLLNVKNSLHWAWFTGTDAMDWAQTELETALQASVARLGPQKRPADQGVLRTKQMNIISKSSIKPGQKIYNMSLEHLVVPELEDMLKTKSKHTDKLKGEKPTSLTSVDWHHPIEGLNRTKGIRRENLPLLSHCLSQDIGILLPAHWELHHQPPGSQAFRLGLNYASGSLQTADTQCQPAPERSQEWAISCKATGLELPKAMGTHFLYQRGLNVRPGVKADHFGALRFDCPTGFWTCL

SEQ ID NO: 930186 - protein, 159 aa, Homo sapiens
MAGGSTCTPLFIVSVLFLILLLLQVNPYGSSFIIDFTNIFTSLLSSLKKFKPDSIFQLIPGKRINVAVSVGIDHATYIVATQASISEWVVTEHTDDLTSAIGLCKSDYSDYCFECAAHYGNHIHIDFSFHCEVWLTEKSDHRALQRCQGSLHKFICQSW

SEQ ID NO: 930187 - protein, 139 aa, Homo sapiens
MPGRERGKLKISDSEGGESREWDVPEAEEKCSKEEEFKRAEKITEVIIKPLLMSHPMTFHQAINDAAKPILGTAKPVPNMNRAGKYTPQNLEKGPYNSGSQQKMVSKEEQIIGKFNKGTVVSCYKEPPNGQTQWNSVNL

SEQ ID NO: 930188 - protein, 164 aa, Homo sapiens
MTMEAKDLHAAGVVCQERSYDEGLQEAPCLGIQICPASMRGQVGAPGKASRQGATQIGQALSPGQDGHALSRSNTTQKLKPAKGAWQALEDEPPWPYSTTTLPEPNSLGSIQAGILPLPPSQPTLPASLSVHGIVGCAPEFQRSVGSMYQEKPHSEGEWELRFS

SEQ ID NO: 930189 - protein, 137 aa, Homo sapiens
MQLEDWLSLTQLEHWHDWASLHVLFSSQPELLRIVAAAFQEGADNVSGPLVALTHKWHNTNSAIQVTRPAHIKELHSLHGTRRLEAKGMFPPRILPEPISSFGPCSRHQDLRYFYPNGLSQPPEPTWASSLHLFSWS

SEQ ID NO: 930190 - protein, 148 aa, Homo sapiens
MASSGRWTWTHQTHSYLECKLNMRRSRKNTGASPVNGRGSTSSTLYFQRGDVARVQSAGLLEFAGGPLQTLFAWVSPAEAAEQQILLPAPSCGSFIPEGHLPDASKSSPQSLNAVLGDLLLSSELAGRNVEGKTVSDSKSERTGDFSA

SEQ ID NO: 930191 - protein, 198 aa, Homo sapiens
MEEEMAALIDNGSSMCKAGFAGGAVFPSIIWCPRHQHVKGGMSQKDSYVNDKAQSKHGILTLRYPIEHGIVTNWDDMEKIWHHTFYKELCMALEEHIWLRPDPLPHEEHGYSFTTKHGYSFTTTAKGEIMRDIKEKLCYRNLDLKQDMATTAYSSSLEKSYKLPDGQETTFNSIMKCDMDICEDLYANTVLSSSTTMP

SEQ ID NO: 930192 - protein, 140 aa, Homo sapiens
MPEDVDKISDFTQYPSPEFGYTLGSHYCSFRNEKTEPARGYKPARCFDKTLVKWRMEPGYSLCGILTPSELSPDHLAGEYFVPSETYVKKRIIVITSEPCSHFVKYRIVLIYECDITAAASLLPTHEVSDREYQGKKQKH

SEQ ID NO: 930193 - protein, 1034 aa, Homo sapiens
MRTWYMQYDVDNSDTVRWKQQHKRTLRPNSPILHPLLLAANGQRLKGEKEAKRALLDARHNYLFAIVASCLDLNKTEVEDAILEGNQIERIDQLFAVGGLRHLMFYYQDVEEAETGGVNLVSGKIKKPKVFVTEGNDVALTGVCVFFIRTDPSKAITPDNIHQEVSFNMLDAADGGLLNSVRRLLSDIFIPALRATSHGWGELEGLQDAANIRQEFLSSLEGFVNVLSGAQESLKEKVNLRKCDILELKTLKEPTDYLTLANNPETLGKIEDCMKVWIKQTEQVLAENNQLLKEADDVGPRAELEHWKKRLSKFNYLLEQLKSPDVKAVLAVLAAAKSKLLKTWREMDIRITDATNEAKDNVKYLYTLEKCCDPLYSSDPVTNQIISACKAYITNNGTASIWNQPQDVVEEKILSAIKLKQEYQLCFHKTKQKLKQNPNAKQFDFSEMYIFGKFETFHRRLAKIIDIFTTLKTYSVLQDSTIEGLEDMATKYQGIVATIKKKEYNFLDQRKMDFDQDYEEFCKQTNDLHVGCIIKFLLTVVCLFFPFCIMPLIITQSEGRGIFIMENELRKFMDVTFAKIQNTNQALRMLKKFERLNIPNLGIDDKYQLILENYGADIDMISKLYTKQKYDPPLARNQPPIAGKILWARQLFHRIQQPMQLFQQHPAVLSTAEAKPIIRSYNRMAKVLLEFEVLFHRAWLRQIEEIHVGLEASLLVKAPGTGELFVNFDPQILILFRETECMAQMGLEVSPLATSLFQKRDRYKRNFSNMKVPGLPKLKHHGNEEMVEPHADYSRRTPLRIERKALLVGFSFWVSSWSSLVEEAVNELVNMLLDVEVLSEEESEKISNENSVNYKNESSAKREEGNFDTLTSSINARANALLLTTVTRKKKETEMLGEEARELLSHFNHQNMDALLKVTRNTLEAIRKRIHSSHTINFRDSNSASNMKQNSLPIFRASVTLAIPNIVMAPALEDVQQTLNKAVECIISVPKGVRQWSSELLSKKKIQERKMAALQSNEDSDSDVEMGENELQVF

SEQ ID NO: 930194 - protein, 170 aa, Homo sapiens
MRRENSYGLVLGSVCKEPCDVIHLQVSQLWIPAPAPVEETSRLVKIVTKFNWKFPSPCGLSPIPLAALSKDPCETKSGMASLETKSAHRTLPAASSTSAFHLTLSVHLSSRFRSEDECSGADFPPLTLWALGVSQLSHGAGSSKPLPSKGVWILSAFLGCSCSSSWSKSS

SEQ ID NO: 930195 - protein, 141 aa, Homo sapiens
MARTTTKDSAKSTTLHKSHCNLKILLQGHLSINCLSDFRLTGWGALTIMAEGERNVSHGGGKKENESQAKRVFPNVRFIHYHKSSVGETIPMIQLSPTGSLPQHVGIMEVQFKMRFAWGHRAKPYLAPTNNRCQPIALCQD

SEQ ID NO: 930196 - protein, 144 aa, Homo sapiens
MCAMASRLLLPCCLPQTSGTKRHSSGYLSSLADCHPNRLPNTSQKGKVNFKTPHLCQAALMKSNRNSFKLSEGKRMRYREDVGRITSKGGRNSMASQKHPASSTCQWPQYDPLLISASLCITLPADLGFDMHTAEACYPMTSKF

SEQ ID NO: 930197 - protein, 151 aa, Homo sapiens
MNVAKSVVVRKTRGESDPNQSRRKGFGAEGRAAAGVAAHSVSFSLKVTSMVRREQGRSGGGELRQVGRFDLICRVQVKPGDSEEPGVQSAIREKKRMGQRRTKSPTQHPNCPLYARYQRARHTITIQGQALCQCSFQGHLREPPVTDLEAS

SEQ ID NO: 930198 - protein, 131 aa, Homo sapiens
MFYMLKPFLALDNSDIAAKSKGIGLNLRLNVRVVRVWPWFPSYRCEVMRLQGHFMPSQMLPLKSAVCSVNAWILLEHWNGLKSRTFPFNNLKKQLHTISIFKLVPHTIKQGSKKSRLLTLEGGPFSDPGEN

SEQ ID NO: 930199 - protein, 143 aa, Homo sapiens
MDNSGCSALRAATIATKICSLTPETRGTTNPPEERNSECVKHQKEQIPDTPSLKTVTVTAKVRGFILEVSETKNPPILDTVDVLASVMICVHISAETVAAGVFVQHDFQLASHHTLKLPIHTYLSSELGSRDSRSEFLPSKSS

SEQ ID NO: 930200 - protein, 337 aa, Homo sapiens
MQIQHTTASLIAKVATAQDDITGDSTTSNVLIIEKLLKQEDLYISEGLHLRIITEGFEAAKEKALRFLEEVKIRKEMDRETLINVARTSLHTKVHAELADALTEAVVDSILAIKRQDEPIDLFMVVIMEMKHKSETDTSLIRGLVLDHGAWHPDMKKRVEDVYILKYALAKEHIVTLHRAKRRNIEGLTLASGEVALNSFENLNPDCLGHAGLVYKYILGEEKFTFIEKCNNTRSVTLLNKGPNKYTLTQLQRCSAGAVEVAMAEALIKYKPSVKGRAQLGVQAFADVLLIIPKVLDQNSGFDLQETLVKIQAECSESGQLVGVDLDTDDAVLTVIN

SEQ ID NO: 930201 - protein, 472 aa, Homo sapiens
MGKEKTHINIVVIGHVDSGKSTTTGHLIYKCSSIDKRTIEKFEKETAEMGKGSFKYGWVLDKLKAERERGITIDISLWKFETSKYYVTITDAPGHRDFIKNMITGTSQADCAVPIVAAGVGEFEAGISKNGQTREHALLAYTLGVKQLIVGVNKMDSTEPPYSQKRYEEIVKEVSTYIKKIGYNPDTVAFVPISGWNGNNMLEPSANMPWFKGWKVTRKDGNASGTMLLEALDCILPPTRPTDKPLRLPLQDVYKIGGIGSVPVGRVETGILKPGMVVTFAPVNVTTEVKSVEMHHEALGEALPGDSVGFHVKNVSVKDVRRGNVAGDSKNDPPMEAAGFTAQVIILNHPGQISAGYAPVLDCHTAHIACKFAELKEKIDRRSGKKLEDGPKFLKSGDAAIVDMVPGKPMCAESFSDYPPLGRFAVRDMRHTVAVGVIKAVDKKAAGAGKDIQLSLSIHGGLIPGPLMNTKI

SEQ ID NO: 930202 - protein, 194 aa, Homo sapiens
MIVRPPQPCGTHLVAAGIPWIVAKGKELEAARSRPVWQFRNCGLNEAAGTPSAQGCGPVLVCGLLAGELPAFKEMGSAENGSKPMTLRHLEAEIHSVSGTAKVASFSMAGVSRVVILSVCVPCHPYLLVASLTLACSSRRGHWKESSGAEKGGEWTIKGSQVLEAMTAMAFCAAGPSGAPVSLAAIWGGMPPGR

SEQ ID NO: 930203 - protein, 134 aa, Homo sapiens
MYNAFKGRIENTELPAADSGRNDHWQQGTMWKKSRDYEFVDPYNEDIVDNDGYWSNDKSNENHLGASIVYQAKVVGLKETESVIVGSGKSDVPRAGRREEPSGVCQARADAAEFAWEQRGRHAGRPQQPLNLWW

SEQ ID NO: 930204 - protein, 139 aa, Homo sapiens
MLQGTLPHLGPRSHCGERAAAITGWDLGGGGLAFLFYTYKGLFTLSRCQRTKTQVALVAEVEAEKACSWGLSADGAPSNEGKSLLRGRSGECVPASGRAADENIYPGKKEEVSGAITPIELSSHDNTVPSGIIPAEGPA

SEQ ID NO: 930205 - protein, 212 aa, Homo sapiens
MKELKDAGVVIPTTSPFNSPIQPVLKTDASWKMTVNYCKLNQVVTPFAAAIPDVVSLLEQINTSPSTWYAAIDLANAFFSIPVQQEKALQQVQAAVQAALPLGPYDPADPMVLEVSVADRDAAWSLCQSPIGESQQRPLGFWSKALPSSADNYSPFEKQLLACYWALVETERLIMGHQVTMRSELPIKNWVLSDPSGHKVSHVQQLSNIKWK

SEQ ID NO: 930206 - protein, 147 aa, Homo sapiens
MAVIAWERLWASERQKSGTGEAVMKRDCVGWCASAGVALLELSDSQARSADKGAMMRVPGSTLVEHLRLHCRQQLSLPAQVSMGVMGFSAAWSLEVHGGSGLLLTCSTHPFPRSRWGLGMSPSDQQTCAGHPAFFPFSPHVSSLCPL

SEQ ID NO: 930207 - protein, 147 aa, Homo sapiens
MSRQKSGARMEPLWGKDGTSTRAVQRGNVGLKPPHRVSTGGLPSGSVRRGPSSSRPQKGRSMNSLHHAPGKAAGTQCQPMKAAMGAVPLRATGAELPKVLGAHFLHQHSLDMRHRGFPEPSVICTSDLHRSQYQMCCGEVSALSFNI

SEQ ID NO: 930208 - protein, 707 aa, Homo sapiens
MSGGKLLIVRQSSYPTGGPEVLQNRDDAGPVISGGPEVLQNRDDAGPVISGGPEVLQNRDDAGPVISGGPEVLQNRDDAGPVISGGPEVLQNRDDAGPVISGGPEVLQNRDDAGPVISGGPEVLQNRDDAGPVISGGPEVLQNRDDAGPVISGGPEVLQNRDDAGPVISGGPEVLQNRDDAGPVISGGREVLQNRDDAGPVISGGPEVLQNRDDAGPVISGGPEVLQNRDDDGPVISGGPEVLQNRDDAGPVISGGPEVLQNRDDAGPVISGGPEVLQNRDDAGPVISGGPEVLQNRDDDGPVISGGPEVLQNRDDDGPVISGGPEVLQNRDDAGPVISGGPEVLQNRDDAGPVISGGPEVLQNRDDAGPVISGGPEVLQNRDDAGPVISGGPEVLQNRDDAGPVISGGPEVLQNRDDAGPVISGGPEVLQNRDDAGPVISGGPEVLQNRDDDGPVISGGPEVLQNRDDAGPVISGGPEVLQNRDDAGPVISGGPEVLQNRDDAGPVISGGPEVLQNRDDAGPVISGGPEVLQNRDDAGPVISGGPEVLQNRDDAGPVISGGPEVLQNRDDDGPVISGGPEVLQNRDDDGPVISGGPEVLQNRDDAGPVISGGPEVLQNRDDDGPVISGGPEVLQSRDDAGPVISGGPEVLQNRDDAGPVISGGPEVLQNRDDAGPVISGGPEVLQNRDDAGPVISGGPEVLQNRLV

SEQ ID NO: 930209 - protein, 127 aa, Homo sapiens
MKSYINIKAHITLSNICEYGPASCAASTPSPPHGGFRRRAHRFALRQTSPACLGSPLSPQVTSASQFWLGGILGTTMRLERVLPERWDSPYSLVSPRILLSALHTVPVCVVPLFVSMCSHHLATTCK

SEQ ID NO: 930210 - protein, 194 aa, Homo sapiens
MEGAGAMEGAGVIVILVLWKVLVLWKVLVSWESWCYGRCWCCGRCWCHGNPGAMEGAGAVEGAGVMGILVLWKVLVLWKVLVSWESWCYGRCWCCGRCWCHGDPGAVEGASTMEGAGVLVILVTGALKVVGAMEDAGAEEGTEALEGAYAPSYAARPGCFQPDDRARLSNNNSNNRRTSVSGLLLNKQQQVKQK

SEQ ID NO: 930211 - protein, 187 aa, Homo sapiens
MASHGFSNSILRICYVVGTALSTVNPTGEKMHPYPKALTFWWKHREQRNTSMYKALGGHVYKKNRAGNCSIPVPGDPHSLRTARSFKIAKPGTAQMSTESRMCEKTGLPSSGAVMKVKLSVDDINPSLSTVFHRIVGLKQKSVPWDFPWDFPALKEGTATELYEQPPLPSNRGPVLDMLVHLTFLLG

SEQ ID NO: 930212 - protein, 252 aa, Homo sapiens
MQDDGRPGLGHMKKRLGNSLSITQDRAQTYTLAYKRRSTHVIPVSQMHRLTLGEAPPKSHPAELRDLGQVPFFSGPQVFSWASLPGFCANPGGMQASGTVGHPMEEPPFEDNEMAKQNCSGTKWLITHAGVILAIFIHLAPQVAARPLSDLDSLRTHQAFATGSMEWPEPRAGWILGEDSGLAQEGRPPICAVTCFQGGGWKSKIKVLVGLASGTVSKSVPTANRIPRTEWLQEQEFISHSSGSPRSGCWQI

SEQ ID NO: 930213 - protein, 145 aa, Homo sapiens
MAISCCPSFLLSSAPGGRGLASHQRVLFYNCKPQDVPSVDLMRKSRVPYYNTPFMGASSNNVPCVFITPGPSVYGEICVENGNQTKSCICQDAVRRAQRHIRDVPAKGPESALDHEESSGKPNLRDILQKIWPIVLKNSPGIVLD

SEQ ID NO: 930214 - protein, 217 aa, Homo sapiens
MMAPGQTLFLPLVETNINPEVWAIQGKIGQAITTTPVGIQLKDPTSFSNQRQYPLKPEVRKGLEAIIDNLKMQGLLTPCNSLCNTLILGEQNTKGKWKLVQNLCLINEAVVPIHLVVPNRYTLPAQILEGTKLFTVLDLKDASFCIPLYHDSQYLFAFEEPSNQTTQLTWTVKVLQNIDDILFCSSPEEISQEDSKALLNFLASRGYNVSKSKAQLC

SEQ ID NO: 930215 - protein, 184 aa, Homo sapiens
MCLEKPLTLNASPSKQPGEGTVPCKATGAELPKTMGIKHDLDVRHGVKGDHFGALRFDCPAGFQTCMGSILPLRGNKLNRFSSAKRNFTGRILEAQRTEENESSQPGLGNRTSKVLPWKSQSPCHCIPHRKAKAQEYILIDSSSCGPQMSSKPGQALEATSSVSGSGTDCGRGATTQGPAKPKT

SEQ ID NO: 930216 - protein, 145 aa, Homo sapiens
MITSPSSSPQPALGSEHSTYCLHEFDYPRYLICSMSAFVKYQSTQLMFDMHRLNLGMPPERGHYYLSHSPAAASLPHTVLLQLRGGLCTCRSLKKLCLGVQWKSEAIEMNPSIGQIDYVILTIDSPLRLLVLTQVYNSHCVNNCV

SEQ ID NO: 930217 - protein, 144 aa, Homo sapiens
MMVSDCLFSHYTNGLQKLKISCCWEPVKDYASSSDSHSQRGILKVNFDQCQSHYNVFAASKKTTFEGENTHLNSSPGLLAVTDTSVPLLAKEKDIPLNAAVPWGISELGLPTSKNAYLLNSSPPPTLREPKPKPTAGTLPRFPQ

SEQ ID NO: 930218 - protein, 170 aa, Homo sapiens
MRAREPEDYFFRVPTGALPSGPVRRGPWSSSPQNGRSIKSMHHVPGKATDTQCQPMEAAERGAIPCKATGAELPKVVGAHLLHQHDLDVRHGVKEDHFGALRFDCPTGFQTFMGPVAPLFWLISSIWNDFIYLMPVPPLYLGMPFAFHHDCEASPDTSNRRNSEIQCVKW

SEQ ID NO: 930219 - protein, 144 aa, Homo sapiens
MKVCSFAPEPGRPRTHQKEETRNTPEHQNKQTPDMPPLRTVTLTVRVRGFILVVSETKNPPIPDTLNKCDAISTIEPMGSGTCKGIKISRGPESVHMTPLLQAQKTIEKTSALNKTTTKDLHRIHCIPLLPPPEQVLDSMAERP

SEQ ID NO: 930220 - protein, 135 aa, Homo sapiens
MFLTIAAADLSDPILYSNVTLPRNEVYFFSLEPRWTLIGRLKRSTQTQQDDITGMHERECAGKSLVLSLEDLHCQSLGDPELDKMSPRTGEESVEQKSEKGLEEKDSRSPDPDSILFLQRNHRAQALDVRGDELD

SEQ ID NO: 930221 - protein, 264 aa, Homo sapiens
MEDSYKDRTSLMKGAKDIAREVKKQTVKKVNQAVDRAQDEYTQRSYSRFQDEEDDDDYYPAGETYNGEANDDEGSSEATEGHDEDDEIYEGEYQGIPSMNQAKDSIVSVGQPKGDEYKDRRELESERRADEEELAQQYELIIQECGHGRFQWALFFVLGMALMADGVEVFVVGFVLPSAETDLCIPNSGSGWLGDEGLVVSDGGEKVFMGKFLNLNNHELWVQGGGPCHMVLGPPDQALCLNTRVLRLKNTVIITFPELLILSS

SEQ ID NO: 930222 - protein, 176 aa, Homo sapiens
MKSLCAFQLYQRWGLLTVPTKASSAMVVAGGSGIQHRYMLAGQVKQNPPMQTHTSKVMWGLTVGLWEARVWGGNVRAAAWPQEPPHWSSPLVRHGPLTQKPQCGPPGHPRLPCEQAWCARAAALPRLHITVCQTEGPVEWIHEAQVGITVLLIRDVTPGGPAVKFLSLYSLYFSAG

SEQ ID NO: 930223 - protein, 158 aa, Homo sapiens
MLFGQAYVVCHGFPWLGKGNPQIPCASWVRQCPALLWLTLHGLHPLSNQSQCDEPGTSGGNAEITSLLHQSRWELQIGAVPIWPSSVSSLLNWRKLMKSVSCPIKVVVMAGGTGFQLVIICECLTENLSPMTVTAGPLLRRKVTAAMPLGLVISIEDG

SEQ ID NO: 930224 - protein, 200 aa, Homo sapiens
MPKSKGILGGLRIQKDVGNLGIPEDLLNGFDQNAVSDMDNKVQAEVVSDGDEELDGNWSKRDSCYALAKIPAGFCPCPRDLWNFELERDDLENLTQEISKWMCPDVIMGGSGRVPHEHGEGTEAPGCTANKEGAHLCQQSWMDVFDCATGSAVYTQSLWDAGQETGQGAQLGRDTRQPEATCGIDNPLVLHQCTESAGAG

SEQ ID NO: 930225 - protein, 148 aa, Homo sapiens
MAKRSQGVVQAVASEEASSKLWSLPHGIGALPSGAARRGPPSSRPQNGRSIDSLHREPGKASKTQCQPMKAAMGGVPHKAPGAELLMALGAHSLDQRVLDVWIQLQLPSHGCGLGHSCALGLPEVAPAPAGLEMPIPSAQPVPTPGAH

SEQ ID NO: 930226 - protein, 122 aa, Homo sapiens
MGSQTGSTKLEGTGIHTRMLTACTWPVLITTPFNPSRRGMGELSKGYVGKGGFKGIPYVSCANTRLPENVPVVEAGSVFASYSFQTFFFHLNKERPSPISLEVPNSDIQNTDVCKASMSPST

SEQ ID NO: 930227 - protein, 135 aa, Homo sapiens
MDQSAGCGPLPHCGSFVLSLFAINLGTAHSLGPHCLYELLTLTKNVCSFTPEARETMNPPGGTNNSRCAALRAVTLTAKVCSFNPEPARPRTPKKEETPNTSEHQKEQTLNTLPLRTVTLTARVRGFILEVTRLN

SEQ ID NO: 930228 - protein, 149 aa, Homo sapiens
MNVFFYYYNSLYVPLYSLPVLRGKYTMDKITKLLYVHWLPLRVRCSLCLYSYTERNSNVRLLEEIRIPESKTMCFEDKNLLPELHPSLRVSLYICEFRIHVEASFSVFQLGCTLELPGELSKIQLHKRMPGMSSALPSIGGTLSWPPQV

SEQ ID NO: 930229 - protein, 158 aa, Homo sapiens
MGRNQSRKAENSKNQSASSPPKERSSSPAMEQRWTENDFDELREEGFRRSVRTNFSELKEDAQTHRKEPKNLERRLDEWLTRINSIEKTLNNLMELKTMARELSKLSFLSKGEIKSFTDKQMLRDFVTIRPALQELLKEALNMQRNNRYQPLQKHAKL

SEQ ID NO: 930230 - protein, 146 aa, Homo sapiens
MMGAAPVLFSAAFAHVCSLTKVHSLSRLTVGQKLWFLFKWVMAVDHVALKFPGLPQSGWHVGGPDERAIAFFFDGTGWLQWARMESFPSPRIIRDFFSSTYCRNMVKLLEMILNNFCKQIPLQQFICKRGNGHANDEYKFLCLVRE

SEQ ID NO: 930231 - protein, 189 aa, Homo sapiens
MAEGEANMFFFIWQQERDMPSKMGKASYKTIRSHDSLTVKKRAWDSLDKVIKENNELRDSNSQLQKQILSLNSAKIALSESLISCRERAEIVEKQTLAPIMGAADLQQKVHAQPHQLSFVKVKPLIEKVWDSATSKVDVWEDPDEAGYTELVNYDESILPEETASPSPVVATSPPDPCCYQLFHLCLRV

SEQ ID NO: 930232 - protein, 140 aa, Homo sapiens
MIPEEPLLKHEGASALRPSLHKGGGWGLVHSAVSDKISEVRADQVLCRLNWSGLPVALKGKPSTGGCPGLHSQPQLPGRLTFALALDPATTEGLQCASPYYTEARGSIKDLTTYPMEQLEEDLRREFKTEGAARAKALRR

SEQ ID NO: 930233 - protein, 151 aa, Homo sapiens
MTRSFQRTHQKLSRCWHHAACTACRAAHGKIEQKVQRFRIYSRPHIHIDFSTVNIPHQSEWCICYSLLTTLTHQYHPKSIVYIRIRPWYWTFCGFGQMSSDRIIFHSLDVLQFIHLPAEGHHACFQVLAIVSLDAINIHMQVFVWKYFQFL

SEQ ID NO: 930234 - protein, 199 aa, Homo sapiens
MGCPQDAVPWVSQVEEVSPHWGPGSWSGWHSGAAECCWVKSHLSQSAWLLSQNPTNSGLKQQTVISYSSGGWKSKVKALVTWFLREVTVYEKVALTRHGICWHLDLRLPSLQNYENFVSHLLCLPNAAKSSLQPQRACLLHFSPSAHPPQNPPKKWRGEKWNKLSQQDRGKKGSACTQVEGTSQAWPDADVCSRQKTSS

SEQ ID NO: 930235 - protein, 229 aa, Homo sapiens
MGRKAGETTHNINNAFGPGAATERTLQWWFKKFCKGDRALKMRSLVAGHRKLTTTMRPVIKLISYNYTEELHESMRCTENCNACSWHWSTERAQFFSTTMLVEHTFHIPRHIPQPTPQKLNKLGYQVLPYPPYSPDLSPTSYHFFKHLDNFLQGKHFHNQQDAENAFQEFIKFRSRDFYTTGINKLIYHWQKCVDSNGIFPPKNWGINPPFLFAMRFGKENEGEMLTVI

SEQ ID NO: 930236 - protein, 150 aa, Homo sapiens
MERNQSRKAENSKHQSTSSPPKEHSSSPAMEQRWTENEFDELREEGFRQSVKTTFSKLKEDVQTHQKEAKNLEKRLDKKLTRINSIKKTLNDLMELKTMARELCDAYTSFSSRFDQVEERVSVIEDQMNEMKKFRERHKDSPQEEKLQDT

SEQ ID NO: 930237 - protein, 135 aa, Homo sapiens
MPDDWKAKAKHSSDNNKTPQAIHLSLFFNKHSPFLSQCLEFELTTQPNNFAALSLYLELFFCHILVQGVRNRALTDFFFNLAEELSLFQLHNIPFEHSPTEHVFRGTSASSVIYISAVTTFPEKPEFSVSMEHTK

SEQ ID NO: 930238 - protein, 146 aa, Homo sapiens
MGQRAKAGAGECRLVLANVYKESCDVIHLQVFQPWIPAPALVELAGERSGLCESPWMKFDPSLDVQIWGAIFQNSWYFPPLRKDTILRTFVKCKRQSPRPCKHGLHVASAVMAAVEVLGLGITPLFLLTSKFWSTARVEIKDELLY

SEQ ID NO: 930239 - protein, 200 aa, Homo sapiens [sequence omitted]

SEQ ID NO: 930240 - protein, 156 aa, Homo sapiens
MGCGYARHTWYHEAVSIEAGLTWLLSQAGSGGSCCSRTVVLSLIRHKSPFLYETFLLEPKKSKRKVPDDSVPGEDPVSGLQTTAFLLYPHMEKRVFSCLFLKWHQSHHDRPTLLTSCKPNHLPKVLPPNTITLGLGLQPRIFGGVTKEPLGMPKSS

SEQ ID NO: 930241 - protein, 272 aa, Homo sapiens
MAHVCICLLEFAGGPLQTLFAWVSPAEAAEQQRLLLVPSSGSFIPEGHPPDASQSSPSGGTEVGDPLEEAVCPLAELEHCARRSAAFFGASRQERLSLLKLHPQPPLPLGALSLEDGSFICKPLTGAAAFLSEIPCPERRNLERQSGYSSFAELRWAPPSLNFLVALFTLVIRQGHLSLLKLHPQPPLPPGALSQYMGVLSISPLLGLLPFFQRCFAQSVENWQSAHSSLAEVQWALPSSNFLAALFTLTPSLRVKNGPWTDRGQKTEAKEG

SEQ ID NO: 930242 - protein, 144 aa, Homo sapiens
MHCLKSVPRYSTLGEVLKTLLQRWLLQPCPWLVARLLGKSSLYCLLEIRMEQLKFLLYSKSADSLGCFGGGKGRRFYHVVLQEREESPESNQRSCSKSASQADSLISWTLLGEAEEQRRMAGEERDRCTASSSFKHVSWKFRGI

SEQ ID NO: 930243 - protein, 167 aa, Homo sapiens
MRGLRPRELIVPCFWNVPSSSLIIHFLLSTFDYPHPKGSLFQEPFYDSWRLPSSQEEEFQLQGEQELGTCPWAAAAVALHRLLLPRDAINRWATDLTASCDVIRKPTGATAEPLVAASFMGLSSIILDGKATGIVTFFPSGDSGSLTECLELRVLSICCNKPGNKSD

SEQ ID NO: 930244 - protein, 152 aa, Homo sapiens
MHNVLIAEPYKFQQCQGCKLLLKPIIPCLISSDLKASNGGNLTSPRFKALLQLLDRDADKWNADRRKQKATKNVELLCNSGHLNVPTLCQALEKGRGCDVTAPPMTQHQGTARNRHVEALATGTLLYSETTHFSQLRHQAAGELENQNRLNV

SEQ ID NO: 930245 - protein, 167 aa, Homo sapiens
MRGLRPRELIVPCFWNVPSSSLIIHFLLSTFDYPHPKGSLFQEPFYDSWRLPSSQEEEFQLQGEQELGTCPWAAAAVALHRLLLPRDTINRWATDLTASCDVIRKPTGATAEPLVAASFMGLSSIILDGKATGIVTFFPSGDSGSLTECLELRVLSICCNKPGNKSD

SEQ ID NO: 930246 - protein, 484 aa, Homo sapiens
MLQRIWLAAMKLLGIKAPRGKPGISLVHQTYTWPCQTLPRSSCPLPHPWPWLFSSIPSLYLPDAISTTTPKLGQPKVSSDIAKWFREFSTMTIALLGFAIFLLHCATCEKPLEGILSSSAWHFTHSHYNATIYENSSPKTYVESFEKMGIYLAEPQWAVRYRIISGDVANVFKTEEYVVGNFCFLRIRTKSSNTALLNREVRDSYTLIIQATEKTLELEALTRVVVHILDQNDLKPLFSPPSYRVTISEDMPLKSPICKVTATDADLGQNAEFYYAFNTRSEMFAIHPTSGVVTVAGKLNVTWRGKHELQVLAVDRMRKISEGNGFGSLAALVVHVEPALRKPPAIASVVVTPPDSNDGTTYATVLVDANSSGAEVESVEVVGGDPGKHFKAIKSYARSNEFSLVSVKDINWMEYLHGFNLSLQARSGSGPYFYSQIRGFHLPPSKLSSLKFEKAVYRVQLSEFSPPGSRVVMVRVTPAFPNLQ

SEQ ID NO: 930247 - protein, 176 aa, Homo sapiens
MGTDSSKKGLTDADPALQTQNWRCGGLELEELEVWRPRAGGIGGVEASSWRNWSIACTTLKCPNAFLGHMAGGHTPCGASAMCCGCKHRASLRDHPDNSGSQLFKRARPRAHSHLPTRSHSNPSREESMLMRKLKFREAGRLLKVTQQQALRMDLNSCLPDSQVRPLDPMLCCKWG

SEQ ID NO: 930248 - protein, 208 aa, Homo sapiens
MCRFVTQKNKKMPFKILLLTDNKPDHPRALMQMYKEINTIFMPANTTSVLQPMNQGVISTFKSYYFRNTFYKAIDAIDKDSSVGYGQNKLKIFWKQVTIPDAIKNIHVHGRKSEFCSELQLSRSQVLIISSWQKFMVVETRKRMNLIERLKMFLGDSGFKGGIGSQEERTNAGGSNSNSQATKKAMGDDLGDRSYVLHFGCCVLVHLI

SEQ ID NO: 930249 - protein, 135 aa, Homo sapiens [sequence omitted]

SEQ ID NO: 930250 - protein, 402 aa, Homo sapiens
MRKQEEQMGKQEEQMREQEEQVRKQEEQVRKQEEQVRKQEEQVRKQEEQVRKQEEQVRKQEEQVRKQEEQVRKQEEQVRKQEEQVRKQEEQVRKQEEQVRKQEEQVRKQEEQVRKQEEQVRKQEEQVRKQEEQTGEQEEQMRKQEKQMLKQKKQMGKQEEQMGEQEEQMRKQEEQMRKQEEQMRKQEEQMRKQEEQMAEQEEQMQKQEEQVRKQEEQVRKQEEQMRKQEEQMRKQEEHMRKQEEQMRKQEKQMGEQEEQMRKQKEQMRKREEQVRKREEQEERLWVEYEKMQEEEEKVRGQVEKMREKKERMGEQEEKMQEERCSEPCLPPSKYPCDMSHAGSLKPAREAGKGYSHDNRTAQQITQLPPGMKNTQEHPGLGSTSCILFFYRGDKKKIKIINI

SEQ ID NO: 930251 - protein, 150 aa, Homo sapiens
MVNFLFFLLEMSVCFQNRGISQERYCLDKVCCGSGFLSGCLPYGLWLRLSDHLLGSWTSPCEHVHPPSSQENKREMERQRQQGQLQPGGARGTALCSSVARKMAAIHFEGGEFTPGSREERILLPRLALSLPQSSSENYHVTLSNENVVT

SEQ ID NO: 930252 - protein, 141 aa, Homo sapiens
MTADHHIVLLEEEINRSMTDKFQKLEFLKLKKRERQNISVVIFNSGHFFNKYGKVDLGVLSSPFKGSDRQQEEQEREGFLEAVTEQHIPRQKRVVEMISYSTYLIIKKISSFCSGISSVIKRSRIPGGMLKLTGQFLATIA

SEQ ID NO: 930253 - protein, 144 aa, Homo sapiens
MDCNIQGRRGGVRVGSLPCKRQSTTDFSRTYLEREELKPAMNRRKPGFLETSPKPSNFSEFSEAPGGCLHFNGKSSESSGNFSQFYFLIERQKPWLDAATIQGTPRIASNYHKLENKHETDSSSELLERINLKTALFQIPGLLN

SEQ ID NO: 930254 - protein, 152 aa, Homo sapiens
MSNGAFWPRYYTFPTVFATHRPGDSFGRHLPAGVDRHLIQESSNWHLASAPLERSCQRKEQAAIFAILQPLLVISRQTGSGVDLQQIPTDLQQRVLTVRRKTDKQELHQHQQKGYPHRNPIRRSPTSKTKERLFSSKGQQFLTSKGTKLDGE

SEQ ID NO: 930255 - protein, 157 aa, Homo sapiens
MLSLMVLGEKSALTAVLGHSYIAITKYRRLHVLVCFHAADKDIPKTGQFTKERGLIGLTVPCGRGSLTIVTEGKEEQVPSYIDGSRQRENEDDAKAETPDEAVRSRCTGSIAPASASGEVLGFYSWLNAKREQASHMVRKGTREGSGGGTPLCNNQT

SEQ ID NO: 930256 - protein, 150 aa, Homo sapiens
MKAPITESCSVQVIYCYAMKGTQCHFQCTLFIEAVTKIHSVSRGGAMDFTSWWEKCERICGRVLKPPQEHIRKKEEEEEEEVKEEEEDEEVKEEEGEEEEEEKKLLVFQLDSFSPLCPPMTTRLLRTISLAWKSSVKLSCSHFWSHCPKS

SEQ ID NO: 930257 - protein, 151 aa, Homo sapiens
MAVRASLHSTLGLSWNNSMKEAEATLLQGSSFEMQDKRFVFVKWGDGGVFLSSPHGLPLAPYRGWHIAFAQRDTSLLVSETVHPILWVLIFGRRTSTIYHEEDRGGGERRGGEGKGNGVFLKKWLHYGNEYAKMSIKHTEFESSYVLTRPQ

SEQ ID NO: 930258 - protein, 159 aa, Homo sapiens [sequence omitted]

SEQ ID NO: 930259 - protein, 200 aa, Homo sapiens
MGLDLIPNSVTQMGPNPIMSGILIRKGKRHRRASSQVHFRARSDTREVYHGKMSLQRQQGPTDTLMLGFSLQKSKRVHSNCSIVPSVWHFLRTVPETRTVFRQAAQSGQHNTPGTIKRNKPENADIQIFLPVLGLLISTWALLKADEMLCPVCIHPILAPCCRSHREVFSIRFFQASMFEMHTQFHSILTGSPPRWIGHW

SEQ ID NO: 930260 - protein, 158 aa, Homo sapiens
MRKDDDDDDDDGDEDDDSDDDGDDDDGDDNDDEDDGDDDDHDDEDDGDDDDEFSRVPDNPMVPGWRVWNTRSLPEFRGNEGGPPATELFCDVKTNHLKDFFLRCLIGQCSMDEIQFYDNMLSQLLEKYVISPCTNSLCSLVDTPLSDLTSGTDVFLVV

SEQ ID NO: 930261 - protein, 170 aa, Homo sapiens
MVEKSGVGTSKQSDSHIFCSKPSLSKIHRQHSQEGSQWTLAMIAGLAPGPSCILGVPQKSQLLPEFVVENQCVSLHRLPPVSNVHIQHIEITLPCQHIWIEPTVQEQHSSLQQLYLGSPPNSGQDEVSGGAKAPVEDRGVLLIGLNRSELEGSSVNHGGFLEYPFGHSLK

SEQ ID NO: 930262 - protein, 259 aa, Homo sapiens
MEWNGTERNGMEWNGMERKGMEWNGMEWNGMELTRIEWNGMEWNGTERNGMEWNGMEWNGMEWNQPDCRGMEWNGMQWNQPEYRGMEWNGMQWNRIIRNGMERNGMEWNGMEWNGMEWNGINPIAIEWNGMECNGMEWNGMELNRIEWNGMEWKGKERNGTERSGMEWNGIVWNGMEWYGIEWNGKNWNGMEWNGMEWNGMESNRVQGNVMERNAMEWNHPEWNGMEWNGMEWNGINPCAWNGVEWNGMEWNNHEWNGM

SEQ ID NO: 930263 - protein, 389 aa, Homo sapiens
MEWNGTEWSGMEWNRPECRGMERNGMEWNGMEWNGIDLIGMEWNGMEWNGINPNRMEWNGMERNGTDWNGMEWNGMEWNGMESTRLQGNGMEWNAMEWIQLEWNGKNGINTSGMAWIGMEWNGINPSTGENRAERNGTERNGMEWNGMEWNGTERNGMEWNGMEWNGINASAGEWNGMECNGMESSGMEWNGVEWNKPECNGMEWNGMEWNGTTRMEWNNRSECNGMEWNGMELNGMEWNAMEWNQPECNGMERNGMEWNGNYPNGMECNGVMNPNVMEWNGTEWNGMEWNGMEWHAMEWNQPSAIEWNRMEWNAMEWIQLEWNGKNGIDTSGMAWNGMEWNGSPEYRGWMDGCMEWITVWMEGWMDGWMDGWMDGWITRCIDGWMDTR

SEQ ID NO: 930264 - protein, 1452 aa, Homo sapiens
MEWNGMEWNEMEWHGMQWNQPEFNGIEWNGMEWNGINSIAMEWNGMEWNGMEWNGMELTLLEWNGMEWNGIEWNGREWNGMEWNGMNPNRMEWNGMEWNGMEWNGINSISMEWNGMEWNAMEGNGMEWHEINPNRMEWNGMEWNGMEWNRMESTRVQGNGMEWNAMEWNHTEWNGMEWNAMEWNGIHPIAMEWSGMEWNGMETTRMEWNNQYECNGMEWNGMECNGMEWNAMEWDHPSEMEWNRKEWNGMEWFQPEWNGKEWNQPEWNGMEWNGMEWVQLEWNGKEWNQPEWNGMEWNGMEWNGMEWKGMEWNGINLNRMEGNGMQRNGMEWNGMEWNAMEWDQPEYRGMECNGMQWNGIIRNGMEWNGMQWNGINQPECNRMQWNGMEWYGNYPNGIECNGVAGEWNGMECNGMESSGMEQKGMEWNQPVCKGMERNGMEWNGMEWNGMDSTRMEWKGRESTQVEWHGMEWNGMEWNGMEWYRIEWNATKWNRMEWNGIESTRVQWNGVEWNGMTWKQPEWNGMKWSCNGMEWNGMEWNGMEWIQPKWNGKQWNQPEWNGMEWNGMEWNGMEWYGIEWNGTKWNGMEWNGTEWNGINSIAMECNGMEWNAINANRMEWNGMERNGMEWNGMESNGINLSAGEWNGMECNGIGMAWNGVEWNGMEWNGMVRNRMEWKEMEWNGMEWNGMEWNEPVCNGMESNGMECIGMDSTRMEWKGMESTRVEWHGMEWNGMEWNGMEWYGIEWKGTKWKGMEWNGMEWNEHNAIMEWNGMEWNGMKWNGMEWNEMEWQGMEWNQPECKGMECGMEWNGMEWNGFNPNGMERNGINLSGIAWNGMEWNGMEWYGIEWNGTKWNGMEWNGMEWNQPECNGMEWNGMEWNGNNPNGMECNGVEWNGMEWNGMEWNGMEWNAMEWDQPECRGMEWNGMQWNGINQPECNRMQWNGMEWNGKYPNGKECNGVGMAWNGVEWNGMEYYGREWNGTKWNGMEWNGMDGMEWNGIEWNGMESNGIEWNGMDGMEWIQLEWNGKEWNQPEMEWKGMERNGMEGMEWNQSECRGMEWNGMECNGVEWNGMQWNHLDCNAMEWNGMKWKGMEWNGINLNRMEWNGMEWNGMEWNGMEWNGMQWNGINQRECNRMQWNGMERNGNFPNGMECNGGNGMEWNGMEWNGMEWVQFEWNGKEWNQPECNGMEWNGMEWNGMEWIQPKWNGKEWNKPEWNGMEWKWNGMEWNGMEGNGMEWNGMEWNAMQWDHPECRGMEWNGMQWNGINEPECNRMQLNGMEWNGKYPNGMEWNGNGMEWNGIERNGMEWNGMEWNGMEWIQPEWNGKEWNKPEWNGTEWNGMEWNGMQWNGMEWNGMEWNGMVRFEWNGKEWNQPECNGMEWHGMEWNGMEWIQPEWNGKEWNKPEWNGMEWSGMEWNGMAWNGTELTLIEWNGMEWNGMEGNGMEWNGMEWN

SEQ ID NO: 930265 - protein, 168 aa, Homo sapiens
MEWNGMEWNGMAWNGINPNTMEWNGMDRNGVEWNGINPSAGECGMEWNAMEWNHPEWRMEWNGMQRNGINSIAMEWNGMERNRMESTRVELNGKDWNGVEWNGMEWNAINSIGMEWNGMEWNGMEWNHSIAIEWNGMELTRIEWNGMESNGTEWNGMEWNEMNERTNE

SEQ ID NO: 930266 - protein, 508 aa, Homo sapiens
MEWNAMEWNHPEWNGMEWNAKQWNQLDCNGMEWNGKEYIGINPSGMEWKGLEWNGVERNGMEWNGMEWNQLDWKWNGMEWNGMEWNGINPNRKEWNMEWNGTERNGMEWNGMEWNGMEWNQPDCRRMEWNGMQWNGFNLNGMERMESTRVEWHGLEWNGMESTRVQGNGMEWNAMEWNHPMEWNGTERNRNGMEWNGMEWNGKEGNGIEWNRMEWNGINASAGEWNGMECNGMESSGMEWNGMEWNGMEWNQPECNGMEWNGMEWNGTTRMEWNVMEKSSECNGMEWNGMELNGMEWNAMEWNQPECNGMERNGMEYNGNYPNGMELNRINPNVMEWNGTEWNGMEWNGMEWNAWNGITRVQSNGIEWNGMQWNGFNLNGMERMESTRMEWHGMECNGMESELEIEGNGMEWNAMEWNRSNGMEWNGTERNGMEWNGMEWNGTERNGMEWNGMEWNGINASAGEWNVMECNGMESSGMEWDGMEWKQPECDGMEWNGMEWNGHTEWID

SEQ ID NO: 930267 - protein, 140 aa, Homo sapiens
MSCGISELPAQTYRESGRTKLDRGALGSHAYISPVTSISTRSKLETGGSCRAPRDVLGYEVEKLLLLNVLCWKGGLASIPNLEEWVNECTKCLEIFLGMEQTGHCCTKISAQKGRGDSSCSSTQAVAPNVWKYVAQRTAE

SEQ ID NO: 930268 - protein, 125 aa, Homo sapiens
MLVDDVGDVTITNDGAAILRLPEVGAMAIRRALKRDLKCIAETSGGTVLSTLANLKGEETFETAVSGQVEEVVQERICDDELILIKTSKACASASIILHGANDFSSAVQTELSAMMELLYIFTVQ

SEQ ID NO: 930269 - protein, 160 aa, Homo sapiens
MAILVYNCTNSGFTFSFSFQLPARLAYRDNRPQPNTAITSFHRIVSQLLQIFSALYQFPEATDSLSATVAAAVPVPARLMAAREGTATKLWQRACGLSPGSPAQRNAEPHLAEVIHLLITVINSWIANAQTSRLVNFLGSLTACNAYQLHKASINDSSLP

SEQ ID NO: 930270 - protein, 203 aa, Homo sapiens
MLEAASVQELALKVCGAWLPSPALLAAPSSQRQKYRSHTGHLGGSRLGCTENGSQFCGTQTRALPLSCAHLTAMATLWCYCCCAHFIAEKTKARRGTKPSGGPRAQGQLSQQLRPRTKNFNKKQKTWRKRRSCQVYKLCQLPATSEPSTTLLGNTLSKCLPARPAVCQPPASAPSLESPLLPHHLISSRGTRNPELCVKLPDF

SEQ ID NO: 930271 - protein, 208 aa, Homo sapiens
MNNIVFVDGVCGHKVMLSEWFLEAPLTWLGGNSLHYPIARHGVRETGRRETPQHSKLPPKKMSKNSSSVSQNYAIFLACPADWGLTSLAAYPQTQAAVGEKDIRTNAWRLEERPIDIINSETHTQPSLIVITLAQGPRPCTRYKKASGSWEELEEPEPVLAVRGFKELNRRGVSRLFHCMLYDVTPFKRLQCNSVISTGVKTCKKGKP

SEQ ID NO: 930272 - protein, 140 aa, Homo sapiens
MGDFFSAPHIRAKERELKVEGAEELGLWSSPTSDACATGAPARPTEEPAHALPFSSVQTSATGTVGHPVCTTAAAAKQMPVLSFIPAPRPQHSRRYRKDEGRAGSRGAGEKQCTHNSPRVGPLAPGHTWTDRKSEKVDII

SEQ ID NO: 930273 - protein, 364 aa, Homo sapiens
MNRKGPGNAFGTWAHLAFFLRSSAKLLFTPGKAVFTRQTKAEDFHHTGNLSTSCCWIDVFVGEDGALQWAGRYFVRSASWSDSASRPILTFPFSLHKRYSPVQTLKTAVMEQTGHLARGTDTGTGLGHLLLFISRKAPAAPPQHNAAHTSHETRRLLPPVPVPTYGLCHHQEVDKSGAMVAHLDSRVLLYCRAQSCTSKVTTSDPGFFPNNSVLDPDFESGTDAVDWWNQNHMSAISQLENDLKNLHAQMCPEFLPSAGFVVLLTSRMKLQTFTVLQLLKVAHPEVFIPPGGFVVLLASEVKLQTFTVSVTVPKRRPKEGAAAKFIAKTKRTKLPQYGRVPERFAAAGSRGQLLFPYLVPPMSC

SEQ ID NO: 930274 - protein, 147 aa, Homo sapiens
MKQDPHLSPYTKINSRWIKNLNLRPETIKILDNNIRKTLLNIGLGKDFMTKNPKANATKTKINRWDLIKLKSFCMAKETISRINRQPREYTDGQQTYEKVLNITNDQGYANQNHSALTPYSHKNGHNKKIIDAGVDAVKREHFYTAA

SEQ ID NO: 930275 - protein, 169 aa, Homo sapiens
MGKTKMTRVWSRPPANCSSPVEESKVDKPTKIRKNQCKNNENSKHQCAPFPPNDHNTSPVRTQNWVEAEMTEMTELGFRMWIKTNFAKLKEHIVTQCKEAKNHDKTMQELTAKISSLKRNTTDLIELKNTLQELHNAITSNNSRIDQVEERISEFEDYLSEIRQADKDR

SEQ ID NO: 930276 - protein, 142 aa, Homo sapiens
MKKQPKGYGLHCHRAIITICSIICIKDMYAKVSGSVNMPNLTWGLFHGLSRQKTHQQLAVKKGLHAVEIQEECGPLPILVTSSRGALSKDPETNDEVPDIKLDWKDVKTAQGEKRSLCMLLLTVLVWDGALPRYCLGKVVIS

SEQ ID NO: 930277 - protein, 174 aa, Homo sapiens
MNVEAISRVIAVCYHDNQPLQSPARSPARLHQLSCTRGEDGGGLWQPSEWAAAVCHASFSQGRAAAVNSSADSCHPERAIHLVEVSSPVTSRCPSFSCSPFNDRPMCRICHEGSSQEDLLSPCECTGTLGTIHRSCLEHWLSSSNTSYCELCHFRFAVERKPRPLVEVSKWGTS

SEQ ID NO: 930278 - protein, 368 aa, Homo sapiens
MWVGPNKGIKAGHPSQQQQPTHKEVSKEISKGPQKHLGYRLCPLQAVGGEEFGPIWVHIPFSLSDLKQIKADLGKFSDDPDRYIDVLKGLGQTFNLTWRDVMLLLDQTMAFNEKNVALAAAQEFGDTWHLSQVNDRMTAKERDKFPTSQQAIPSMDPHWDLDSDHGDCSSHVITLPESWVCLTIEGQEIDFLLDNGMAFSVLISCPGLLSSRSVTIQGILGQPVTRLINEAVIPLNPVVPNPYTLLCQIPEKVEWFMVLDLKDAFFCIPLHSDSQFLFAFEDPTDRMPQLTWMVLPQGFRDSPHLFGQALAQDLGHFSSPGTLVLQYVDDLLLATSSEASCQQATLDFLNFLANQGYKVSRLKAQLGL

SEQ ID NO: 930279 - protein, 163 aa, Homo sapiens
MAAQSGCTQTHIQNGSEGMVFLSLDPQAVYVGTHDSRSRWADSWSPTWLAQVPVVAVVDQMSEQLLRALAVHVVETMGIVVAGQSLGSQVALLNVNSGQNGLEECTNARGSRLSRVIPSFTSSVLRPGEGREFYNFRFYVYIFNPFRDWLYNFAPKLNLKKNY

SEQ ID NO: 930280 - protein, 152 aa, Homo sapiens
MTQLLQLWLKGVNVQLGLWLQRVEALSLDSFHVVLSLWNVRSNNSLHCAPGKATDTQCQPMKAAGREAVSCKTTGAELPKTMGTHLLHQCELDMRPEVKGDDFGAFKFDCPTGFQTCMGPALIVSGRDGIWYTSGGICLSKEHVEFTYGDKT

SEQ ID NO: 930281 - protein, 186 aa, Homo sapiens
MQKLWEKCSIQGSQAPLLQVCWSLLEVHSRPCLPGYHQWRLQNSKDCCLFLPLEALSQRGTCQMPARALLYEVFVNPCWEVSPSQDSRGDALPREEESREAVWLQRLCQAVMGSAQFKLPGGFIYNVWGKPPTQAPEMADTSPPTKLEHLRSTLDCCAGSENFKPVDLILLVSVGRLKLPVKGSKL

SEQ ID NO: 930282 - protein, 158 aa, Homo sapiens
MSAGGCASRRLFFQGRLLASCLAGSGIAGPRKTTNTRLNRINNRQSSLISDFKRKALNNTINYDVSCGYTLSGSVNFGSYSWWVHYSDPHSGMKHILQLLGVLPAESPLPSTPHVDGLAGERATPPLLLGQPPPLMDYDSQATLIHHIVLTACNRIVN

SEQ ID NO: 930283 - protein, 193 aa, Homo sapiens
MKNEFDKLTEVRFRRWVITNNSELKEHVLTQFKEAKNLDKRLDELLTIITIVEKNINDLMELKNTAPELREAYTSFNSQIDQAEERISEIEEQPNEIKCDIKIKEKRVKRNEQSLQEIWDYVKRPNLHLIDIPESDKENGTKLENTLQDIIQENFPNLARQANSQIQKIQRTPQRYSSKRATPRHINCQIHQG

SEQ ID NO: 930284 - protein, 149 aa, Homo sapiens
MCADNRNGECPMHGPLHSLRRLVGTSSAAAAAPPPELPEWLRDLPREVCLCTSTVPGLAYGICAAQRIQQGTWIGPFQGVLLPPEKVQAGAVRNTQHLWEAMEIQYEKQTWYPEPSCDCWGWGPEAWVCKASFDGGGAECMSLQPSSPK

SEQ ID NO: 930285 - protein, 166 aa, Homo sapiens
MHLAGRLTLKKANKAYVKHTKLFLSNLSLSACCPFWREEYSKFSVDVVVFLNKKVVTALRDSGIGENPCGDGTGGSSTHCIAHCYMCHQKVMTSCGNTNDVSNEPLIAEIKKGFMEEMLIVSLPGTKARGNSFSTYPSFEDPHPAATPSEPSSCVVIWQGALLCIT

SEQ ID NO: 930286 - protein, 146 aa, Homo sapiens
MSVRISSSLKKLLKVNNGVNFKEELKLSDEDSEEDRKMWEGLELPRDLLNGFDQNTDSDMDSKVQAEVVSDRDEELVENWSKNHSCCAKRLAAFCPCPRDLWNFELERDDLGYLGEEISKWQSIQEETQHKSLKNLQLDNAVENKK

SEQ ID NO: 930287 - protein, 139 aa, Homo sapiens
MFWYSCKIQPLLQRSLHASVLTAQIVKHVTNMHTEHRLPDVCYKLDGCLHLPVPTLISTKCKSLMKMHFLLPCPQCVDWEPYYILPLCVSPPLPTEKLGARRNTRGNRKSTYCNHSYLKVGSGSDNQRGTYCSCLQDFP

SEQ ID NO: 930288 - protein, 166 aa, Homo sapiens
MQHVGSHGLGQLHPCSFAGYSPPPGCFHWLALSVCSFSRHTVQAVSGSTILGSEGWWPSSHSSSRQCPSGDFVEIRNEWRSGKQSDSLKDCFQSSCSGHLSILSLTLFTQTNWLSSVYPEAGHGQLFSTENEPSVSEKLGLLVRVLEPQRENLFILAKEGLSPYPH

SEQ ID NO: 930289 - protein, 157 aa, Homo sapiens
MAVFQTLLVFDDVGSFEEYPSGKRFSPNARSAGTLILGFAVSKTMRNNCQLFKDIGMGKDFMTKTPKTMATKAKIDKRDLIKLKSSCTAKETIIRVNRQPTEWEKSFAIYPSDKGLISRICKKLKQIYKKNKQPHQKVGEGYEQTLLKRRHSYSQQT

SEQ ID NO: 930290 - protein, 130 aa, Homo sapiens
MLLVPLKMTLESSFCPPCEAALRSQQSETQESSLIRTQLRWHSAVGLPASRTAWTREQRAIQLWMCAILFFKIKEGGLKGDLETITAATFSKNPEGMARWAMVASILISKDRNDAQRSCVGGPSSEALGE

SEQ ID NO: 930291 - protein, 138 aa, Homo sapiens
MPQAQVALKPKTQSFPLFLHPLAKAEQSYPVATITRGPWGILPDYCQCSLKAQGLLNQSVVSNVWPRIHPSGKWTLLWPGPRVKSWNQVPQDMTWYSIPLWPSWYLRSASLRSPSKALAVLPGYRCCLFRVQDSSDSR

SEQ ID NO: 930292 - protein, 152 aa, Homo sapiens
MVSTFLFLHVSVSRICPLDVLTLSTSQVARKRSQNGERLGQVTPHKRNEKGEKKETRKPRAGERGRERVQEVKWDTGREVSPGELQGHQYTKGDMAALINIEFHCESVSEYVRYGLAVSPPESHLEFPRVVGGTQGQIPLHLFPSPPEGYMN

SEQ ID NO: 930293 - protein, 144 aa, Homo sapiens
MKDRRQQRETPLKFSDFYWLLSIPSHYRLAIQTVLTSLPFKEHPSASADLVRLTIMRTAQERPAPMIQLPPPGSLPQHVGIPGDTIQVEILVETQSNRITLLQLSFSDINRNVSIVSPLRKTLASVIGHTCFIMEKNIHQLLFA

SEQ ID NO: 930294 - protein, 150 aa, Homo sapiens
MSFYWRDSKLPLSLGRSSDDVCDKGLELETLGIYLVLSSTEAVLAPILQDKVLLTLPSPFHNQRNLSPWPSPPQSCGEYSLAIADGSLMAQGFFCQLAVNAARPVSLPSRGLCSPLSQGRSRNLVQESQLRIGSPKRLLVVLPHCGQAGT

SEQ ID NO: 930295 - protein, 189 aa, Homo sapiens
MGVCADWFGSEDRKMWESLKLPRDLLNVLDQNSDTDMDNEVQAKVLSDGNEELVGNWSKCHSCYALAKRLVAFYPCPRDLWNFELEGDDLGYLVKEISKWQSIQEEAEHKGLENLQPDDVVEKKNPFSGEEFKLAAEICVSSWELNVNHQDNGENVSKACQKPLQQPLSSHAQRRKWFYRPDPGTPCSV

SEQ ID NO: 930296 - protein, 188 aa, Homo sapiens
MGKKQNRKTGNSKKQSASPPPKELSSSPATEQSWMENDFDELREEGFRRSNYSELREDIQTKGKEVENFEKNLEECITRITNTEKCLKELMELKTKARELREECRSLRSRCDQLEERVSAMEDEMNEMKQQGKFREKGIKRNEQSLQEIWDYVKRPNLRLIGVPESDGENGTKLENTLQDIIQGTSPI

SEQ ID NO: 930297 - protein, 165 aa, Homo sapiens
MSKSLYRRAAYHVWLWRGEVRNRVEGQGTTLDRVLQGVQLKGFPARPPQLLLSDTPASVLLLQTGQVASISSHHSSQHWLNAKWTQKTDSLGSVSGFLCVKFQNENVALKRCSPGCKFTLPTTDVRPLQDLRHVRTAVRTASRESGNGLSPDTKPAGISILDSPT

SEQ ID NO: 930298 - protein, 144 aa, Homo sapiens
MRTETKKDKGENKTRKYFPERGGRISRSTDEKEDREEQKTIKRSTKDVQLGICKDLSILELSAPPSAETAAVTASLEKQNPPSRLNKAPVPNAGVMEMCDISDREFKMAVLRKHNKPQDSTEKKFRILSVLFEKTQPEGEKEIV

SEQ ID NO: 930299 - protein, 138 aa, Homo sapiens
MHVCHTGALTQIFQLEGREYECGYHGTTTKSSRDLDQVSTKQGPVKCAEPASPLPSYCILSGGGLGGLSHMLGRELRKGAAATDAKLFAPSLGPQVSHIVGVQPRCRAAQKEPDTRRGWPSVEVDGAAKSDSRVRDRG

SEQ ID NO: 930300 - protein, 140 aa, Homo sapiens
MILNEHLPVMDLLPVNFKFNLCALLLEYGSGAFKYFPFASRHDVKLCLGTALERRCRRKGVLRLGSGVLASHVPLAWAFSPAVDNWGMGGFFSTKLLKHSQMLRYMVPTMSSCTHLRKFWTGVLPGKKNWIWLFSRRIQR

SEQ ID NO: 930301 - protein, 152 aa, Homo sapiens
MISENIWSFREEKKFNFREEKRISTCNKHSDRERHRNACSTKRQKFFLSFISVPRTLPDKQWRLHASAEICMQSPIRSLSSRPPLPMWQVGSLLPQDGSRNAVQEKECLCGHYSWESTVTPEGSTVQGLTQVSAHGTASWILLMFIQGPMAP

SEQ ID NO: 930302 - protein, 201 aa, Homo sapiens
MMLSMSGSGCCPWTAPQTQPFHTRLQLYLVHVSFIHILLDEDKFILRLCTLIDLILVLVLEVLHQPLHVAKLRFQLQLLLAQSLQLPPKVVDGLDLLLLLGAHGLDVGVHLQVKGTQQALVERDGGDASHAAGPTIASTQTTQEAAAAAHSGEAQGADAGTGPTCVGTAAEVLGARGGHLVGLLGHPDGQGGSRSGGRRVG

SEQ ID NO: 930303 - protein, 145 aa, Homo sapiens
MLLLLLVLDCTVRPIGLYPSIPHYILTPLKIPLSLLADLEKLKQMGARVKQDEEVQRCSGLIAGAVVEVQRNSSSVSISGIWQMENCFSILHSTKRLQMTSIFWSICWLSHFELLFPLCFEKTLSLAFIFLPALPNDNVLITLKE

SEQ ID NO: 930304 - protein, 308 aa, Homo sapiens
MESSSNEIEWNHRITSNGIIVEWSLMESSNGLERNLESSSNASEWNHHRISSNGVIIIWNRVEALNGLKRNHRRMELNGIIKWTRMESSSSGIKWNHRMDTNQIIVEWNRMESSNGLEGNHYRMELNEIIIEWSRMESSSNGEIIEWDQLESSNGIEWNHRMDLNRINIEWNRMESSNGLEWNHLMHSNGIIIECNRMDSSNGIKWNHQMESNGIIIKRNRMENHQMDSNTIIEWTRMESSSNGIKWNHQMDSNEIIIKRNRMESLNGMEWNHHGMETSGITEWTRMGSSSNGIEWNHLMNLKGIIIK

SEQ ID NO: 930305 - protein, 226 aa, Homo sapiens
MNGIEWNHRTESNVIIIELNPMESLNGLEWNHRMDSNGIIIEWNRMESSNGIEWNHHRMKSNGMIIWTGMESSSNGIEWNHRMESNGIILEWNLRKSPNGHEWNHPMDLSGIIIEWNRMNGIQRNHQMDLNEIIEWTQKESSSNGIEWNPNGIERNHHGIDSNGIIEWNGMESSKKGIEGNHQMESNGIIEWNGMESSSNGLKWNNLRKESNGIEWNNQMDSNGII

SEQ ID NO: 930306 - protein, 441 aa, Homo sapiens
MESSSNEIEWNHRITSNGIIVEWSLMESSNGLERNLESSSNASEWNHHRISSNGVIIIWNRGEALNGLKRNHRRMELNGIIKWTRMESSSSGIKWNHRMDTNQIIVEWNRMESSNGLEGNHYQMELNEIIIEWSRMESSPNGGIKGNHRMGSTGVIEWNRVESSNGFEQNQHRMESNGIIEWTRMESSNALEWNNHRIEIIIRWNQMESSLNGIKWNHRRERDGIIIEWNQIEALNEIEWNHNRTQLNRIIIEWTRMETSSNGIERNHHRMESNEIINEWNRMESSEKGINDHQRESQEIIEWDQMESSIGIEWNHRMDLNRINIEWNRMESSNGLECNHLMHSNGIIIECNRMDSSNGIKWNNEMESNGIIIKWNRMESLNGIKGNHGNHHRMELNGIFEWIRLESSSNGLELNYRMDLNGIIIEWNPMESSSGIEWNHH

SEQ ID NO: 930307 - protein, 487 aa, Homo sapiens
MKGIEWNHRTESNVIIIELNPMESLNGLEWNHRMDSNGIIIEWNRMESSNGIEWNHHRMKSNGMIIWTGMESSSNGIEWNHRMESNGIILEWNLMKSPNGHEWNHPMDLSGIIIEWNRMIRMESLNGMEWNHQRKESKGIIEWNQTESSNGMEWNHHRMDSNGIIFERNRIESNGTIKWTPMESSNGIEWNHRMDSNGNLLTDSSGIIIESKRMESSSNFIEWSHHHMESSGSIEWAQKKSSEYGIEWNHQMDSNGIIIKWNRMESSSSGIKWNHRMDTNQNIVEWNRMESSNGLEGNHYRMELNEIIIEWSRMESSSNGEIIEWDQMESTNGIEWNHRMDLNRINIEWNRMESSNGLEWNHLMHSNGIIIECNGMDSSNGIKWNHQMESNGIILKRNRMESLNGIKGNHANGIERNHHGIDSNGIIEWNGMESSKKGIEGNHRMESNGIIEWNGMESSSKGLKWNNLRKESNGIEWNNQMDSNGII

SEQ ID NO: 930308 - protein, 248 aa, Homo sapiens
MESSSNEIEWNHRITSNGIIVEWSLMESSNGLERNLESSSNASEWNHHRISSNGVIIIWNRVEALNGLKRNHRRMELNGIIKWTRMESSSSGIKWNHRMDTNQIIVEWNRMESSNGLEGNHYRMELNEIIIEWSRMESSSNGGIKGNHRMGSTGVIEWNRVESSNGFEQNQHRMESNGIIEWTRMESSNALEWNNHRMESKAIMVKWNQMETSLNRIEWNHHMESNGIIVNAIKWNHRMESKGIIEWN

SEQ ID NO: 930309 - protein, 444 aa, Homo sapiens
MKGIEWNHRTESNVIIIELNPMESLNGLEWNHRMDSNGIIIEWNRMESSNGIEWNHHRMKSNGMIIWTGMESSSNGIECNHRMESNGIILEWNLMKSPNGHEWNHPMDLSGIIIEWNRMIRMESLNGMEWNHQRKESKGIIEWNQTESSNGMEWNHHRMDSNGIIFERNRMESNGTIKWTPMETSNGIEGNHRMDSNGNLLMDSSGIIIECKRMESSSNFIEWSHHHMESSGSIEWAQKKSSENGIEWNHQMDSNGIIIKWNQMESSNGHESNHLESSNGFEWNDHRMELNGIIEWTRMESSSNGTKWNHRMDTNAIIIEWNQMEPLNGIKWNHHRIIKWNHRRMDSNGIIEWTRMESSWNIRMESLNGMEWNHHRKESQGIIEWNQTESSNGMEWNHHRMDSNGIIFERNRMESNGTIKWTPMESSNGIEWNHRMDSNGVIMK

SEQ ID NO: 930310 - protein, 554 aa, Homo sapiens
MNGIEWNHRTESNVIIIELNPMESLNGLEWNHRMDSNGIIIEWNRMESSNGIEWNHHRMKSNGMIIWTGMESSSNGIEWNHRMESNGIILEWNLMKSPNGHEWNHPMDLSGIIIEWNRMIRMESLNGMEWNHQRKESKGFIEWNQTESSNGMEWNHHRMDSNGIIFERNRMESNGTIKWTPMEIIEWTRMESSSNGIKWSHQMDSNEIIIKRNRMESLNGMEWNHHGMETSGITEWTRNGIIIKWNRMESSNELERNHHQMNEWNHHRISSNGVIIIWNRVEALNGLKRNHRRMELNGIIKWTRMESSSSGIKWNHRMDTNQIIVEWNRMESSNGLEGNHYRMELNEIIIEWSGMESSSNGEIIEWDQLESSNGIEWNHRMDLNRINIEWNRMESSNGLEWNHLMHSNGIIIECNRMDSSNGIKWNNEMESNGIIIKRNRMESLNGIKGNHGIIIECNHMESSQNGIVRNHHQMELNGIINWTRMETSSGIDWKCRMDSNEIIIEWNRMESSKGLESNPKMDSNGIIECTPMESTSNGPYRNDQMDSNGIIEWK

SEQ ID NO: 930311 - protein, 164 aa, Homo sapiens
MEMNGIIDWTQMELSNGLKWNHRMDSDVIIIEWNRMESSNGIDRNHYRTESNGIESNHHRMESNGIMIECNRMESSNGIEWNHHRMESNGIIKWNPMESSSNGFKWNHFRIESNGIIEWNHHQMESRGITELNGIIIEWNRIESSHGIKWNYHQMESNDIIECT

SEQ ID NO: 930312 - protein, 190 aa, Homo sapiens
MESSSNGIEWNHRMESNGIIHRMKSNGMIIWTGMESSSNGIEWNHRMESNGIILEWNLMKSPNGHEWNHPMDLSGIIIEWNRMNGIERNHQMDLNEIIEWTQKESSSNGIEWNPNGIERNHHGIDSNGIIEWNGMESSKKGIEGNHRMESNGIIEWNGMESSSNGLKRNNLRKESNRIEWNNQMDSNGII

SEQ ID NO: 930313 - protein, 532 aa, Homo sapiens
MNGIEWNHRTESNVIIIELNPMESLNGLEWNHRMDSNGIIIEWNRMESSNGIEWNHHRMKSNGMIIWTGMESSSNGIEWNHRMESNGIILEWNLMKSPNGHEWNHPMDLSGIIIEWNRMIRMESLNGMEWNHQRKESKGIIEWNQTESSNGMEWNHHRMDSNGIIFERNRMESNGTIKWTPMESSNGIDDRMESTAIIIHWNQTESLNGIEWNQCQVESSGIIERNRMESLSNGMEWNQRIELNRITNELNRMESSSNGIEGKWNHHHMELSGIIVWTRIIIEWTRMESSSNGIQWNHQMDSNEIIIKRNRMESLNGMEWNHHGMETKSNGMIEWARMESSLNGIKGNHHRISSNGVIIIWNRVEALNGLKRNHRRMELNGIIKWTRMESSSSGIKWNHRMDTNQIIVEWNRMESSNGLEGNHYRMELNEIIIEWSRMESSSNGGIKGNHRMGSTGVIEWNRVESSNGFEQNQHRMESNGIIEWTRMESSNALEWNNHRIIEWNHHMESNGIIVNEIKWNHRMESKGIIEWN

SEQ ID NO: 930314 - protein, 136 aa, Homo sapiens
MESSNGIEWNHRMDLNRINIEWNRMESSNGLECNHLMHSNGIIIECIRTDSSNGIKWNNEMESNGIIIKWNRMESLNGIKGNHGNHHRMELNGIFEWIRLESSSNGLELNYRMDLNGIIIEWNPMESSSGIEWNHH

SEQ ID NO: 930315 - protein, 937 aa, Homo sapiens
MESLNGHEWNHHLVATNGIIEWTRMEYHRMELKAIIEWTPVELLNGLKWNLYRKDSKRMIEWPRMESSVGLKWNYRISANGIIEWTRKESLSNGIKWNHQMESNGSSNAIDQNHHRMESNGIIKWNRMQSSSNRIEWNHHRIQSNGIIKWNHHRMESNGIIIKWNRKESSSNGIEWKHHRMESKGIIIEWNRIHHRMDSDGIIIEWNRMESSSNGKYWNHPMELNGIIKWSRMESSSNGIEWNHRIESNVIMIEWTRMESTSNGIEWNYQMESNRIIEWTRMESSNGIEWNIEWNHHRMVSNGIMEWNQMESSWNGIERNHRMESNGIFLERNRMESSNGHEWNHHRMESNGTIKFNRMEPLNGLEMNPLIECNKRESPNALKWDDRIASNCIIMKWNRMESSHGLECNHQMDSKGIIIKWNRVKSSNGLECHHRIIILEWNLMKSPIGNEWNHPMDLSGIIIEWNRMESSNGLEWNHLRMESNEITIEWNGMESSSNGKHQIKSNGIIIEWNPMESSNSIKWNHRRMDSNGIIEWTRMESSWNGIIEWNQTESSNGMEWNHHRMDSNGIIFERNRMESNGTIKWTPMESSKGIEWNHRMDSNGWNHQMDSTVMIKWTRMESSNGIEWNHRMDSDGTVEWTRMEIIEWTRMESSSNGIKWNHQMDSNEIIIKRNRMESLNGMEWNHHGMETNRMESSNNIEWNHCRMECNGIIKWTRTESGSIEWAQKKSSENGIEWNHQMDSNGILIKWNRMESSIGLEGNLYRMELNEIIIECSRMESSSNGGIKGNHRMGSNGVIEWNRVESSNGFEQNQHRMESNGIIEWTRMESSNGLEWNHLMHSNGIIIECNRMDSSNGIKWNHQMESNGIIIKRNRMESLNGIKGNHGNHRMELNGIFEWIRLESSSNGRELNYRMDLNGIIIEWNPMESSNGIEWNHH

SEQ ID NO: 930316 - protein, 574 aa, Homo sapiens
MELSSNGLVWNHHRIDSYGIINGIQCNHHRIEPNGIMKWTRMESSNGLEWNHHRMEQNGVIEWNRMESSSNEIKWSHRMDSNGIIIDWNRIESSNELKWNHHRMESNSTNGIIEWTRMEYHRMELKAIIEWTPVELLNGLKWNLYRKDSKRMIEWPRMESSVGLKWNYRISANGIIEWTRKESLSNGIKWNHQMESNGSSNAIDQNHHRMESNGIIKWNRMQSSSNRIESHHRMDSDGIIIEWNRMESSSNGKYWNHPMELNGIIKWSRMESSSNGIEWNHRIESNVIMIEWTRMESTSNGIEWNYQMESNRIIEWTRMESSNGIEWNIEWNHHRMVSNGIMEWNQMESSWNGIERNHRMESNGIFLERNRMESSNGHEWNHHRMESNGTIKFNRMEPLNGLEMNLESSNGFEWNDHRMELNGIIEWTRMESSSNGTKWNHRMDTNAIIIEWNQMESLNGIEWNHHRIIKWNHRRMDSNGIIEWTRMESSWNIRMESLNGMEWNHHRKESQGIIEWNQTESSNGMEWNHNRMESNGIIEWNGMESSSNGLKWNNLRKESNGIQWNNQMDSNGII

SEQ ID NO: 930317 - protein, 138 aa, Homo sapiens
MYPHCIYSRHRILVLLIQVTCPGIWAFGCMLFLTYAHVLALLVGQGVFPELSLGMDSHRLPDDQPIFDQLPDLLTRVGIGDFIDLIGVQPDLLLAPVEDTRGEPLLKPKHTHGLYLIHIRSLNYHLYDKNPEMDIFIS

SEQ ID NO: 930318 - protein, 153 aa, Homo sapiens
MPPLYLGKEDKMWESSEFPRDVLNGFDQNEDSDMDDEVHAEVVSDRDKELIGNYVISERRNQNSVHRIRARVVGGHNWKDQPNKEEWIRVPLKEAVWPCCGKAAVLCWGFFPHMGGPFLIWRDHLGKFLSLSGPLWLHWDNGENCSSYLWVAV

SEQ ID NO: 930319 - protein, 151 aa, Homo sapiens
MDATCLDQLGQGDPNPLVLEELKTHTQKYRGVKWEIRGLTPFRAESPEQRFTHIFINSKPVISIVSIDIRLIKSFELILRSVCTVSSDVTHLQIPQPWISAPAPVEVVGETQKIKIPKKYYFTSVRMAIIKKTEDNKRCEGCGEKRNLVHC

SEQ ID NO: 930320 - protein, 157 aa, Homo sapiens
MIKENEFDELTEVGFSRWVITNSSELKEHVLTQCKEAKNLQKRLQELLTRITSLEKNINDVVELKNTARELREAYTKINSQIDQEEERISETEDQLTEIRHEDEIREQRLKRNKKCLQEIWDYLKRPDLLLGSLKETRMERSWKTHFKILSRRTSPT

SEQ ID NO: 930321 - protein, 251 aa, Homo sapiens
MGKQFLGRWRGKEGGEQQEWREGFAVVMDMFTHVDIFYAGFKRKAALYIIVDGSKVKYVLHMCEQTRMHLGHLKAEAREGFLDVCTVEVDLRHMSRVEPLGWGETTEQRWIRDGCQWGQAGASYPPGASMPNCDLMSSGGLMSMQELESLWDLLSTRGLVSNVHLESSVHLGPDVFLGPLCPLGPYAHLEGVDIWPQGAIGSRVRTGLDVYIRHEVYTQAPGALNVTDGLQAQGGYQGFRRTPRPHVDIRS

SEQ ID NO: 930322 - protein, 147 aa, Homo sapiens
MDLSPTCCPARQHRILQAPQSASTQLLPVLQHLLPNCYHPTHARPARTPVLPALHSHPCHAPPAPCFYLRSAPSSSVPCQHPILHMPSPAITLLLLEPGSYSQPTATHAPPLQRQPLPEPCSYPHPALPVPHTTHAPPHQHPNITHT

SEQ ID NO: 930323 - protein, 156 aa, Homo sapiens
MASVGCECPLQLGTTAHGQTLGPGAALLTDTPADRHMLPTGLKFLELAKQVGEFITWKQVECPFEQDASITHYLYTAPIFSEDGKVALQPSCLLGHGTLGAYVGSAKHSTDCVGVYVCAGVTDTGTSQPYVFRDCCVPGNNLAVNTDKTVALLEPR

SEQ ID NO: 930324 - protein, 206 aa, Homo sapiens
MHQLLQALHQKLAALRQGPEGLVGADKPISYRTKPPASIHRELLGVCSDPYTLAQQLTHVELERLRHIGPEEFVQAFVNKDPLASTKLGGAPRQPSPESPESLDVRDVGVTHPAREEEWARNQAVGRAARVGQDPGQGGGWRAPWRAPGPRAPSRCVSVGAGALQRPRGEARVAARCPGWDTAHAPGFRSRPSGSPTSRVPVPPTG

SEQ ID NO: 930325 - protein, 261 aa, Homo sapiens
MAVQVDEDYTCHPLATGPVQLLFPVTFPLRSGEGYVAHDGFTTGPHHHPGAEATQSVVSCCGSQMDGEDADEVLNPGLAMEFNPQQRVSALGRLRAVCDGPVYGCCWQGVRSSHSQWEALRTWLRKSAGFQGSLVSRVLQDSSLGRGLWLAAQELLWPAKGRVCMLSQEDARVLWGYSSPGQEPWGKEPRLGTPLHLHTPIKKCSSITVSKAAASGHQLSVSVQDCPGSNTEIPTSQGTPQSWTNRNTCHSGCRLFPCILV

SEQ ID NO: 930326 - protein, 283 aa, Homo sapiens
MNPICSAICFCKQSFIGTQPHSFAYGLSTATAKLSCNKDDMAHKTSVFTIRYFLEKVANPAVAIRNYCPPTLTSLQPSSFSKPQIHIQVPMYLSTAEWGVHWHLSNQAQPCSSPPQPAAAFVLKASLGAPGALQGWIHGACHASFPPSPPQQLWDPVYESASCLRLMQEENARGSKPQGVKARPWPAQLWSQDCPHPAAASCGHRHFYTSLPCLHISGHSGLRALGLLLFQQHVVPTQSQCLLRARQEMDIHGSTVTEGLQAVKTLATLRPPQDGRANGMGKL

SEQ ID NO: 930327 - protein, 250 aa, Homo sapiens
MPAHGFIPEAREMKGTEWLGLDHMPSQLSQTNATPSPSGTRAMSSYHGQERKDKWALFSEGRTDAGQAEAAEAMALDSCSRAEPWQGSRKEARGSALPVVCCGPAGQIAQALTEELLLGLLGLRKVKNGADEQPVSLGKLLGTAQAREMSRVWPWSGSFNKHRNAGSWPEGPEPKAGLLAGLRGLHMAGLGFSHHLLLVWSVFQDGGWVPGVEPWAAGAGRWGLSPPELPGSLCVETLSSLKQSPCAWQP

SEQ ID NO: 930328 - protein, 270 aa, Homo sapiens
MALANVDGNEQGSKQTTLARAESIKAGGHGWIWGGCSDNVEFGERISKLFVDSLEKGKDARALMNLHNNRAGRLAVRATMKRTCKCHGISGSCSIQTCWLQLAEFREMGDYLKAKYDQALKIEMDKRQLRAGNSAEGHWVPAEAFLPSAEAELIFLEESPDYCTCNSSLGIYGTEGRECLQNSHNTSRWERRSCGRLCTECGLQVEERKTEVISSCNCKFQWCCTVKCDQCRHVVSKYYCARSPGSASPWELETTVRCDCAIALQPGQQN

SEQ ID NO: 930329 - protein, 152 aa, Homo sapiens
MYDWQFLLPIQTLAQFSAPPLSPDSLVFSRNGPQRVLPGFQHYSFQVKESMEKDTWCSQSFPNSTLPPKLYSSGSLCPARPSQTQTATALQVHGRDSPVVVKVQDPLSYIVENVEAMTWRMEMGWWSMVASSEQAAIESGPKDVKPPQQSLG

SEQ ID NO: 930330 - protein, 255 aa, Homo sapiens
MTSSPIIAAKHITQHECYSAIKGTKDIISQVTRKREERRREELQPFGGPRPESSPNQGCDSPFEASWFLESPSSRAPPHSPVPAVEAACSVPVKIINTVLNQCLSLHTSVMGSLMVLLFGLKASVANDTFAQILLGSTGPTRPGRLCLAHTTVLDPMLLKRLERSGEGCENEQVWGPGTVHSQVHCKVLLLLAPGDLVVSGSLETLGTTGPQSRSHSPGSGSSQLFSPSCSLQGGEKTQCQAELYPAAMRITRKN

SEQ ID NO: 930331 - protein, 135 aa, Homo sapiens
MRNSRASGRAGGEHATGSECPGHQHPGAKAGNCKLSDKEDMFHFVDDNKPTSCNPGINGWGEENEALFKQPSATSPEESPSQDRAPLKGFSCTSLRQFKTGIWFLILTQLPPTHGNQRLQAQTWIQVCILDFLFV

SEQ ID NO: 930332 - protein, 151 aa, Homo sapiens
MVRFALALGSNIAAPISVSCAYETLPPVRWPILPVTTWTFLMAETTPQTPKHSCIMFGKDGPIYPNLEATEGQFRFPHKRFLVMYHWHFTSNQTSLLNEGKTPCAGQYAKSIVIAPDLSDLAIQSLRNRHTAFHMERTQMVELIYTPTNCV

SEQ ID NO: 930333 - protein, 152 aa, Homo sapiens
MAGYPSEMKLPEERSGSYICCSAKFAVLQPPPLIPSKHGLDTQQTRSGVDLWQTPTHLQLRIMTARRKTNKQKGHPHQNPIWEKQSRKAENSKNQSTSPPPKEHSSSPAMEQSWMENDFDEMREEGYRRSDLSELKEEVRTQCKEAKTLKKD

SEQ ID NO: 930334 - protein, 129 aa, Homo sapiens
MLSFQRSGARPPFQSSVDGRVMGIYCGRKADRNLHHSATCLRKAFRKGHPARPHENWIEVQELEGHSGYSSVTGLSRCPLSSRHLPIPTNGLAAKVIQLLSRCFPLGVLWLLLLLPTAQLSVDLTFKLL

SEQ ID NO: 930335 - protein, 178 aa, Homo sapiens
MGWCFAGRGSTSGPVTLKPDDAVEKKNPFFEKKFKLLQKFAKVARSLMLIPKTTGKMSPGHVRDLHKSPYHYRHRGTGGKSGFVGQAQGPCAVCSLGIWCPVSQPLQPWQKGANKQLRLWLQRVKMYGNAWMPRQKFAAGVEPSWRPSARGVWKENVRLEPPHRVPTGALPKWSYTYH

SEQ ID NO: 930336 - protein, 180 aa, Homo sapiens
MTNVSSQSLGLNLKPHPNLSPLISLSASGSFHKLWRHFMPTFRTLIPQIPQQSAVSWIAGRQNGEMVINTTSVNKHFLLHARPYVRSWELNVSIALNDMPMRSKGRPSCNEHLREVLQFRHKQLQKLCRHFRFKQVWLKLPRSLQQLARLPICELPSYRPQLLDFKNTYTLKSLTDTRRA

SEQ ID NO: 930337 - protein, 147 aa, Homo sapiens
MGEKIVQASHKEHIEGRWCPRDWVGINKWLKNGEERLGDTDVVKRPISKFPGAGLWQHLPLRSGEKVADSAFLSPDTIGRVGTFRRNFKEVKTELFFTSGCPGLVSETSGLIEIPQRGEITVSDVLKPNAHGSIRGEWYKEQEEQAP

SEQ ID NO: 930338 - protein, 148 aa, Homo sapiens
MAHVSICLLEVHSRPCLPGYHQRRVQNSKDCCLFLLEASSQRDTCQMPAGALLYEGDPLEETVSPLAEIERCAGRSTALSRAGRQKCLSLLKLHPQLPLPSGALSQGDGSFIYKPLTEAATFLSEMPCSDRRNLERQPGCSGFVVLPV

SEQ ID NO: 930339 - protein, 152 aa, Homo sapiens
MPDACVLKALFGLVNLKKDTPLLPHSLTSLPASHLAFILHSPHCCQGIVQKHKSCSATVLSKTLPYPLTTLDDVYALNQSPRGHPLYSPCCSPAPYFSHPDHTSCTSSDELFPFFSPGLHICCSCAWNIPFSYGHSPPLLSHILDRTLSKAV

SEQ ID NO: 930340 - protein, 169 aa, Homo sapiens
MTCPSLDQLGASWGQTGSPGCKSLPVLSLLPSVTISADSASTVCPAAAKPTELCFWAVLSHFVARTSAVTLLFPEEHLQLIHVLHGAAGGAARYACDMRVLTHVSQHHKNSESFQNLQLSSNTSSTIIIVIKNKKEKGKATDLTVGKNNSLDGNSLDGKRVVVVTIEIT

SEQ ID NO: 930341 - protein, 136 aa, Homo sapiens
MNELHGDGQITQCLYFGFPSKLAECDRAVQKGNVGSESPHRVPTGALPSGVVRRGPPSSRPQNGRSTDSLHSACGKAADIQPQLMKAAERGLYPANPQRQSSPRPWVHSLLVYIIRDFSISITLALLVQAFSLKNQ

SEQ ID NO: 930342 - protein, 200 aa, Homo sapiens
MGFPLWFCSLAGKELRSFRGEEAFQYLEFSVFPHLRGLIYLWSLMLVTFGCSFCVNALFVDVDAIPFCLLVFLLAVMPLCCRSAGVCYRSTPHPAVEGAEEPKLLPVPSSGNFAPEGHPPDASQSSPVSGVCQTLLGGVSQSGGMEFRDPLVETVFTLAELQRCAGRSTALFRASRQERLSLLKLLPQPPLLPGALSRGR

SEQ ID NO: 930343 - protein, 147 aa, Homo sapiens
MLRFSPLIFTFLGHSEGKKGQKKSGPLPALTVKAPAAFLLCILNTGCALWLSCYGVSDLLFIRGTFLECAYRFIPFRDGPSLNMLYLYSKCTANWHCDSFSLSPSFLIYKMGMVIPNYGLCKYPFILARICISELGPSKEKPANQKN

SEQ ID NO: 930344 - protein, 134 aa, Homo sapiens
MQALPKEFGKPSRQINDCSFQKSATANPGEGRGSNIQCYHITTIKDLVFSSNKRIQKPTRELERCTEGNWMFQCGAQQLLSDQEYTFVNPLNNQSGEARSRSQLLPNYTLTIDFCFSSPKNTSGYQCFSKVSTN

SEQ ID NO: 930345 - protein, 242 aa, Homo sapiens
MGASRAQCPRVQVGVGSHAAAKRWLGKLRRKRRWRRAREAGSRDPLPSAPLPDPPAPAESPKELDLGAQRERWETFRKLWGLSCEGAAKVLLDTFEYPGLVHHTGGCHCGAVRFAVWAPADLRVVDCSCRLCRKKQHRHFLVPASRFTLLQGAESIVTYRSNTHPALHSFCSRCGVQSFHAAVSDPRVYGVAPHCLDEGTVRSVVIEEVGGGDPGEEAAEEHKAIHKTSSQSAPACPREQEQ

SEQ ID NO: 930346 - protein, 150 aa, Homo sapiens
MVPEVSGHRPVCSTTGLLAPRASLGLQRPAEEAESGALFSFLLRGRGTASGRDPGLKPLALDLGRLGWLCCLLQQAQIGRSWKAALDQRGGSIYRAHTFLLPWDENNLIFIKADSIPRVHSGPPAFFYPLTVGELHPTPGFLYTESSQVS

SEQ ID NO: 930347 - protein, 137 aa, Homo sapiens
MRPSRHKWAHRKNRKGSLMAVYWNICRVLIRRTLSKRPSSLLRTTGNSLKFNNCVKLNLQRLHLSSIIHSLYDTLLDWEIQPSNCLWSEVRVQSRTTFPVSLTSLKNTWNLNLPCRGAKAANTPGQQTDLQNFPQRD

SEQ ID NO: 930348 - protein, 174 aa, Homo sapiens
MARGLWLSHHTSNLEIQVLVLSVLWRKSNSSSTVEEHLQHKERANRKPLVFVLTEKRLNVYMYNQIIPKMPFPWSNSIQITVFVCEKPSENIFKPNDLMPGFCKTICAQDQNLCHHRICAFPKSSPGMFFNNMASLPHLSHFLGLDPGQPADPWPPTSHIRKQEVRETGKVVLD

SEQ ID NO: 930349 - protein, 144 aa, Homo sapiens
MVRQAVFGGTGKHGVCGLNVPQSYSNGGGTCLESKRVPWAPLIPWPDRQQHQEPAIFIYLTMENSINHNLAEYTSKMSGPESNGNVNRKNSDPANIMILLGRRKETSQERTNTISEALKELHPFPRKSQAVAAERNADIENSSN

SEQ ID NO: 930350 - protein, 144 aa, Homo sapiens
MDKQRMPLAELIALTQALELGEGKRVNIYTDSKYAYLVLHAHAAIWREREFLTSEGTPIKHQEAIRRLLLAVQKPKELAVLHYRGHQKGKEREIEGNCQADIEAKRAARQDPPLEMLIEGPLVWGNPLQETKPQYSAGEIEWRT

SEQ ID NO: 930351 - protein, 161 aa, Homo sapiens
MVFFPLLDAHCILGKLQWTTLEASLLGSTPWKYHTRRVGPLVFLTDMNELKKNLIKGTRALLERFGGAWIIRQFCLEEKLVKATGSPCVWLCAECHIPVPSVDKDVALCLWMPVCAEAGLSEGRKQSLPLWLLPRDPCILHTLVSHHWLSGDNVSTVLETV

SEQ ID NO: 930352 - protein, 127 aa, Homo sapiens
MIKILIGFLATLRNQSGQAQWLTPVISVLWEVKAGGSPKLRSSRPPWQDGETPSLQKIQKLARREEEEGERSNFPEISDAWLNSQAQKQTIISINSVLSYIYKTYTCDDGGRFQISEKMKEICAISR

SEQ ID NO: 930353 - protein, 134 aa, Homo sapiens
MAQRHQATSRTRTKHTSLTTHNVAQTAYRYEQVRDVMTERSATKRNDVQVGPLRQKRRDSHEPYKSKGQECPCLGKHPSLCHHEWHVVKPELSPVVYPKKQGYLGEVIVPNIYIATLKKIEVLLIRMKVRMDYT

SEQ ID NO: 930354 - protein, 141 aa, Homo sapiens
MIVSFLRPFQAILTCDTFAMKITVIAVATQWSMPYSMKRGSYINYVYTRFLETDKVEVGGGGETQVKLSPCSVVVVRGKKLKWQCTSGCKCKQSFTQSVNKEQGFLAGAPGRWAHSSWMKGSGLLALLIAAAAAAAAAASI

SEQ ID NO: 930355 - protein, 131 aa, Homo sapiens
MRCASQGPRKGCADVEAIQAKKGEEFVDEKLEASRDWVMRFKERSYLYNIKVQGEAANVDVEASASYPKGLEIAAATTAFSNHQPYQSAAINNEARFSTSKKDDSLLKTQMIVSIFSSKVFFKLSLNLFIC

SEQ ID NO: 930356 - protein, 151 aa, Homo sapiens
MTFIFTVFDLTSVLFKYSYSCFLLVSVCLKYLFQFFTQSMSVLISEVFSFFVMGSNIILSLGEVCYYSSFEAYFCQLIKVILRLAAGLFEFAGGPLQTLFSWVTSAGAAEQQMLLPDPSSGSFISEGHLAVYLIQSSQPDLVLSVVGLSRD

SEQ ID NO: 930357 - protein, 133 aa, Homo sapiens
MADTPLSTKLKCPRSTSDCCAGSENFKPMDLSLLDSVVVGSAELDYLAPWFQPSFQGMNSSVLLAFQVPLWHEKKKKLLQLAWCLPKQPPSFVLETQGPGGSLKTKLCFHKALQTEARQLKPQKKITATYLHT

SEQ ID NO: 930358 - protein, 139 aa, Homo sapiens
MRSPGQWNWALHRKEVEWWGLTAVNNQHKKWPKTLHSTRNSIHLAEHNLQGLFHDTLLNRNPAAYMDVLVHGCRQNWAGAAVISRLDQLLTRSFSSLPHVPFHRPASHMAATSPRDSIEREREHTDVSTFLCPVSVTHH

SEQ ID NO: 930359 - protein, 140 aa, Homo sapiens
MSPDSLELCGSRVGRSSVLAILAIRIWIFRRRVPTSPVRPLEGFRNTHRDGEEWLRRIYLSFPVLLTIADSGYLHLTMTHCVSGFWRPREVYLIRKDDLEGIKKLSNSLIHESKRGPIHMNVLNYFPSFKTALCMKLFTE

SEQ ID NO: 930360 - protein, 134 aa, Homo sapiens
MTRASRRRALGVSTAGNQYYLIVGKLLYLSAVSFLTYKPVKQYITTRHIKLRTAGLHCCQRMLGTQTWMPAGTRAELCKTGTCVAQGRRIREGVPLVKGLMLVIELQLVLAVQESYPAVAGYFYFSGETGKLEF

SEQ ID NO: 930361 - protein, 161 aa, Homo sapiens
MGPRSSLQDWQPSPQPSGPSWPEGGPYWGPNLAHPGLCLLLPFKALQLGPNPAPRLSGHQGRREARQWKQITRACWDRGGGLLGPLRVQTAEMPERVATAVPRELQFHKLRRGRVPACLWLLPTPQSGRPRSAAMGQRVSAASRRADTACSCPPERGQGGS

SEQ ID NO: 930362 - protein, 166 aa, Homo sapiens
MLPGWVEKDHQETHTTKPFSLFCDEELEAQRDYVIAYGHTNNVVKAPREIVMSRLPQLISGGAGSLAAEAVLLTTLSCCLNFINPSLGTFTVCTLEQFTSYSSTLSDLTPLTNSYLLDSLCHPCLPSLTRVIKIGAWLMVIDGPEADHSLPLLAHGKYLLFVTEEQ

SEQ ID NO: 930363 - protein, 144 aa, Homo sapiens
MCRFVTWGNCHRGLVYRLFHHPGYTHQQFCHDSTPNKGDRVIYNLMRPPYCCVQFPLAGTGPHILCLSRLASNLELFKTGKGRGEQKKEQVCRFKEVLQLLLLSIPKVLPSQDDFKAYEFLDHLGCLHSNLHFNWSRPVTMISH

SEQ ID NO: 930364 - protein, 156 aa, Homo sapiens
MWEGLDLLCVVLGNRARTRESVELTVMQISAHHKQEPANTQSSLSIEKVAFGGWKSLSYPLKSHLLATAYSTAGMSLTLLLNFQEERRHTVYYFSSQGLKVKLIDARDEIAKEVQCVLWWLDMDEAGSRYPQQTHTGTENQTPHVLTSISKHSAKL

SEQ ID NO: 930365 - protein, 159 aa, Homo sapiens
MGCLGSILLPTSFVTLISSSNEDGGAILIWGSEFPGTEDEHGKAKQSLPSGKQPEALTRSQGDASTSFLYSVQNPDSYRLSLQRQTSPPSSCSKKGLRASNDGHLCLSASLNLEDGLPGAKVSLAWKAHETPRKHPKEVRAMLEGALIQKHKYVGSGAI

SEQ ID NO: 930366 - protein, 138 aa, Homo sapiens
MAKPRPDPIPNLGFFALVEDGKINDIQATKMLNNNKMDALPEKMASEKVEKPDTREKKPESKKADASGNVTKGIGRYSRPAMCSRKARTKGSIQRLNPRLKRRSFLQLLQNQLVVTRMVVPQWLNFTRCLAIIYRRCV

SEQ ID NO: 930367 - protein, 136 aa, Homo sapiens
MIRIPLNVPHQQVSTYPPDASSGSPFRFPFSFVPAYSLPGAGEQGAALAQVDRAVNGSCQQPPTSSGQTKHSEACQGFKAVEPGEKQDSKRRRHSSKRELGKAGVPRPIQTTCSSASSSVKLGFPNMPCLETDTTY

SEQ ID NO: 930368 - protein, 139 aa, Homo sapiens
MFVASLLKSARPRTHQEERATPVAPPLRAVTLTAKVCCFTPEVSKTKEETLDTSEHLKEQTPDTPSLRTVTLTARVHGFILEVSETKNPPEGTNSGHNSRHLTLNICDEQGWVRRQFCSGHNLHIQGWPVPQFHHISTF

SEQ ID NO: 930369 - protein, 136 aa, Homo sapiens
MILFLEIYLNEEKLSAVSGNGLIHGVYCSLSSLISRGEMIKETHIEKHQSNSDVSADTQIGTVDAFKVQTTAVMQDEETESRRADRKGSKGSNIKASYETALDSIFGVFDVYTFEVIDSLLCSPPFLVLFLVGIEQ

SEQ ID NO: 930370 - protein, 149 aa, Homo sapiens
MWLSGGLLHHTALPSSPCQLPVQKEVEEHLGYWKLFMQNNPGSCFGNNPKPFEPNEHRRQLAIHCCGCRQRSPYGDKKRHPQDETPFSLERDHQEGKELPSQRVLISKLEVEESDYKRDTLGVRGKERLCLAGTQWTGEEVGAEVGIEQ

SEQ ID NO: 930371 - protein, 159 aa, Homo sapiens
MLLLFSPSLPCQSAALPLFCSSVLELEPSGEQEPPWVPYWIRSAVDTLPDLEGWKSAMGASLNQKHSRHPAGSGGVEVSGGTWGAYFSDENVLQAYLGDIEGSVPEHNKGKMNAKILKQYFEILKSGIGRSQHQLQEGSLKENGSRSKRHKETFPWRRR

SEQ ID NO: 930372 - protein, 219 aa, Homo sapiens
MSKRSSVGKLSTRKNQDDEADSDEEEDECEKLTSDSECEGQLLEEIKEKKGKLKKKLIPYDWDTLTKSVLTTSQYLQFKTWWSDETQSQTKENTQAQPPVPVSFEQLMGVGHNWGRLENQAVMEDVAIVQLHFVCLQAWERINVTGEKYPSFSSVQQGPKEPYIDFIAVLQEAVYKVITDKTAQDVVIQLLAYDNANAECQTALRPLRGKAYLAEYIKA

SEQ ID NO: 930373 - protein, 140 aa, Homo sapiens [sequence omitted]

SEQ ID NO: 930374 - protein, 158 aa, Homo sapiens
MIKLAQFGKRTAHFNCSSHYPDLIHEAFLQDNKQPGRGRRETAISESSTNLTFNVSLSTDLTVGERSRCQHPSHLKKRLSLVGCCGRHEDAHSAFLLQGAMLTGRVSAGPLDPALHSGHSHAFLGMLQPVPEHGRNSAGRNQRWPQPLAVPAILLVWF

SEQ ID NO: 930375 - protein, 144 aa, Homo sapiens
MRSCHVSYNPGGLQSRTACLCWGVPAKCDPHWVSSELKSSEMAPAHTDREGCYDIGWSPEKHKQVGNTVLPEAPQWSFDWDSKIKHPPNSEQFRKHNQTAPRQKVKNDQCSEYQEDSPPAEVEEERCWQGVDTQGLRNGRGLLN

SEQ ID NO: 930376 - protein, 143 aa, Homo sapiens
MRNLRDTSVKSTVNPTMADQLTACTMHLEKAADTQCQPVKAAGRETIPCKATEVELPKTMGTHLLHQHDLDLRHGVKGDHFGALRFDCPTGFGTCMGPVAPLFQPISPIWNSCTYAMPTPPLCLGTKSHLEFPCVGGTWWEES

SEQ ID NO: 930377 - protein, 147 aa, Homo sapiens
MFGNITEGWGLADQLQGIHPSVGWRVGKKPSLMKARSSHSSICCLVSVLALLLQIGIGDIIHQEQQQQGVVCNKSTLTGCHGPSEGHLDGRACPESLGVSQTRLVLMVTSSPIPPLLFCDTSWYTAYHDVRIVPAQDGVLSRMSGMQ

SEQ ID NO: 930378 - protein, 206 aa, Homo sapiens
MQHPLLFPCRGPSPCCFSTRGPHTPQIPCCSEYINTHPSCPLPLHLRVIPVLAFGCKCLTMSLPDFNPQQVSDYLTVKSSENEGHRIPHCVSPICCARHLLSPDPGSCSSQPNQTHSWGLRSWFRLPRGSICSKSPFVKGTGVELHTGPGIKGKQEKEEREKQGKWDNRKQEEPGEQVEGITRSILTYNGAVSQGPPPSIHRPHKS

SEQ ID NO: 930379 - protein, 138 aa, Homo sapiens
MLIFSSQIFWAMGIFLHFEWTDMLGNISKGPRADGVIPAVLRPVTEVNAGSGGLGAVPNQIVISSCSPSALQVQITLEIHVEKAAKSKAELFCWRELHLQKTGWASLVRERKQTFLCPLKTETLKEGKTKDGSKSGSK

SEQ ID NO: 930380 - protein, 139 aa, Homo sapiens
MVTTSVGITKNPQITQSPFLQAECLLKMLLDKLNALNVCDMVEVDFAEQVYFQTGDLQNGQLLKLYWFNHQVRGDLLQQPSETSTPGTEAGRVGACGPPCTILLPSSPTLLLLPMHPHLHEFALKKPHVYLLPFFSLLM

SEQ ID NO: 930381 - protein, 140 aa, Homo sapiens
MRGSPQTPEEVKRDPAGALEGAWLTNSLILDFRPPELRENESEFVPWGIHSQCVALEGSTIHLGHSHRPHWPFRTLSTAPQRGPHPAGMRLEGCCAPKNQAFVHSCEGLLLPVQPSLLRGVLSTRQNQGALHPGTGTSLC

SEQ ID NO: 930382 - protein, 171 aa, Homo sapiens
MGMCNGLRVRLSGEDLRKGQSGQKGRVKIGGVLLEPWEEGVGQSLALPLVVPVLEVPVSTRRPRFSTCVLGDQQHRVEAKPVGISYVDIEVLKKLDRNKKLLNKYDAFLASGSLIKQIPQILGPGLNKEGRFPSLLMYSEDMVAKVDEGKSTIKFQVKKGLCLAWLLVVSR

SEQ ID NO: 930383 - protein, 149 aa, Homo sapiens
MIAVEANIGQQGQVGMQSGSQEEVSIKKIRQLVGTQPITVSQRQNTGQWDRVWQDRSVPAVLKEGENTGPVILLQEVGSHGLGQLCTCGFSGYCLPPGCFHGLVLNVCGFSRCTVQAVNGSTILGSGGWLSSSHSSTRQCPSRDSIWGL

SEQ ID NO: 930384 - protein, 154 aa, Homo sapiens
MTLLGLASVVASTKCLWVPSRLPGFCLYTHEQSPWLDFLSLTLLGRAFLLGELRPNGVICLMVLCFMAGGTSPSLGAWRKDERTSVQSPAWIPCLSIRAVIFLELEASADIDSSISFLHFKNDSKEDCLETTSALVLVGGWIFSTPILQEWKKE

SEQ ID NO: 930385 - protein, 185 aa, Homo sapiens
MSLLVLVLNIYSDSFYLMASTTDAEKMLHKPKDCRPRYLSKATSFLEHLLRCSLLGAVSEHRKSCKKYPCCSPGTHSMDGTCIERRRQWYRDASGEVIYSGSGTVYYGRIRSWEDIWQHPWPLLNGYCFHNIYSQYELLLYGMYKRVHYLNTVEKKDLLGTKADEYLSWVALDTTMLGLWSVAQR

SEQ ID NO: 930386 - protein, 156 aa, Homo sapiens
MEWYQLLLVPLIEFGCESIWSWNFLVVFLLTVRTLRCRSVGVYWRSTPDPVWLGVSSGGCTTVDIGEPQMLLPDRSSGSFVSEEYPAISQAVCWENHYSPQSCDTGTFKSAEVIAVFCLSVPCPQRLSLQSDPSKGPDLQACLHGCKWAPSSRYLE

SEQ ID NO: 930387 - protein, 141 aa, Homo sapiens
MILKVSYGFRKKIMCYPAGEMPSSICYMLRTSDQCVVSPKPGFTGPEIKGEETGPPHYYPLAKKVFPECQIEATLSSQEATHCSPLHSFFHRQFTRWQLPNLKTAGEQKTARLKSKDLYLDLATESFCFEKFPCQVRKVIE

SEQ ID NO: 930388 - protein, 136 aa, Homo sapiens
MGLPESQTAAIVIYLLDLASQQRLAVAAVGDAGVIPRLMELCSQEDYGCLCCVTQVTREVGKSWQQQASFSSYTACSPKGQSHSQHAPPTAPAWVIIPGQLLVIKKMVISNCSLAAGKSFKNDCPYLVANVLAFQR

SEQ ID NO: 930389 - protein, 146 aa, Homo sapiens
MKAASQESVPYKATGVELPKAMGAHLLHQCDLVAKGTCLVSDETLDMDFSVNAGMSKDFGGLLEGHDYVLKCEEMGCEKGQGQIDMTSTFILPRIMNVWYFLTPAAFPESQSKSSFLTSHCLLRFYFDKKSKKVVQNFKKHYDFER

SEQ ID NO: 930390 - protein, 184 aa, Homo sapiens
MSIFNHSKIRQVIHFWVSRNGVANGLQSNMPKFYCDYCNTYLTHDSPPVRKTHCSGRKHKENVKDYYQKWMKEQAQSLIDKTTAAFQQGKIPPAPFSAPPPVGAMIPPPPSLPGPPHPGMMPAPHMRGPAMMPMMGPPPPGMMPGGPAPGMRPLMGGHRPMMPGSPVIRPPACPMMVPTRPRKT

SEQ ID NO: 930391 - protein, 170 aa, Homo sapiens
MLRPSHGAGHLCTEKGPVQAAFVGSRITAGFGVCGNILLPTVPTCLCPDLMYRTVNRKGSQSDPKRGFLDLTQELGPPISSCDLECLNLLGMQPNRSQPHLPSPYSRWSCSGLNASDKARRWTTKLNVACVFSTESNDITKLLPYENEEAIKEYALKKYRKIIYRNVSGS

SEQ ID NO: 930392 - protein, 151 aa, Homo sapiens
MWPHSDLTGRHLAFSTKWGIFCRHGEYHLPPLANESQEPRLLLWRWAALIPYQLCPSYQGTGTEKQLEIQPCTGSCAKASSLAFTLPLHPFLFFTFSSSVPPQQAWMGLSSQVPQESLALLLYTARIKRLSTRGGKEKKQKGNKGNEWALP

SEQ ID NO: 930393 - protein, 211 aa, Homo sapiens
MMLVKISFLLGMVAAATAAGHRCWTRDAAARGLWSDRGSQAPLLQVCCSLMAVGSRAYLPGYYQQRLQNSKDSCLLLPLEGSSPTGTSLMPAGVLLYEVSVNPLPTVGKTAYSSLSNGGRPCPPPSSSVPGGLQTAVLAAYEGIPWSVDCKNHEKSVVSGLDSTIPHGFPWMGKGGPPPPLLALPTPQLKGNGHSPKGPRLEYDCGYRSKD

SEQ ID NO: 930394 - protein, 257 aa, Homo sapiens
MEKENGSRMGTSEELESREFRRLGRAYALAFAERGALVVESTGSIIEVLSKIDSEGGVSANHTSRATSTATSGFAGAIGQKLPPFSYAYTELEAIMYALGVGASIKDPKDLKFIYEGSSDFSCLPTFGVIIGQKSMMGGGLAEIPGLSINFAKVLHGEQYLELYKPLPRAGKLKCEAVVADVLDKGSGVVIIMDVYSYSEKELICHNQFSLFLVGSGGFGGKRTSDKVKVAVAIPNRPPDAVLTDTTSLNQMTKTFC

SEQ ID NO: 930395 - protein, 139 aa, Homo sapiens
MQFYFNHQYDHIQKDEEDDEVCEERTLKDPSGPQRKRWPLRAAASALLGDKWPCLLSPGSLHPLSPDFTLPPPALAPPEPRSPDAGLAQGRLTASLRPIPSPGPSPGLGPAVLRYKYQSMVELKSNRVGRTFAILVIKS

SEQ ID NO: 930396 - protein, 182 aa, Homo sapiens
MVWPSLARGILLGPRENLGWPAPPSFCLSSKQMWRKGESENHEQTKGVILGAEAVIEISEWSAFGYAPPTAMVPGEVTKVPGYGVDLTEHQPTWSKLEFFCVWTSVPYGTRVIGSQHQVVGVTKSGRVKGMRKDSLREQVGPGGQSENGGCEGPELWKPRLFIGDQTKKQVMRIFPSKSESL

SEQ ID NO: 930397 - protein, 174 aa, Homo sapiens [sequence omitted]

SEQ ID NO: 930398 - protein, 144 aa, Homo sapiens
MGRLLGTWHSIDDGSSGGGTISCCDELGRPVSRPFSWFLQVHNGESMHQLLWVEMGQFSGPRQSVQSHSPGDSRSCLWCLESSVQAVALCLIVALVLAQSCVVFWRFVPERMAFKTASGAFPEVQTLMSVFLFQHATTVSFVCH

SEQ ID NO: 930399 - protein, 145 aa, Homo sapiens
MIEDMRVEIFSEIDGINEKQSQLQEIKDTLRETQNVLESLSNRIEQAEERTSELKDKVFDLTQSNKDKEKRTLKSEQSPAEVRDYVKQPNLRIIGILEEEEKSKSSSKHHTVTVTDTLGCLPNLLPILPSAIRLSFRSRIGGQGL

SEQ ID NO: 930400 - protein, 139 aa, Homo sapiens
MQKPHLKDHNSSPAREQNWTENEFDELTEVGFRRWVITNSSKLKEHVLIQCKEAKNLDKRLQELLTRITSIKKDINDLMELKNTARELHEAYTSINSRINQVEERISEIEDQLNEQGRPTFNFRKYREHHKDTPREEQP

SEQ ID NO: 930401 - protein, 151 aa, Homo sapiens
MDVNPQPLVTTGFNLYLYPSHWEEVRSARPQVGPEVSSGSQGLEYKILEVYLVFYCIAAQLALKLHGAVLPTVSSPFQKREEYHPIAPANPGHKENSQTTTDVPLRPKEMFTNESSAPGTVHSSIMNSCLSESQVQFKTIMEKVENYINYT

SEQ ID NO: 930402 - protein, 137 aa, Homo sapiens
MSVDLPFWGLEDSGPLLTAPLGSAPVGTWCRSSNPTFPLHTAIVEVLHGLLPGHPDLSIYPLKSRQKLPSLKLLSLVFCSPAGTTPHGICQDLGLAPTGTRQGCVSTLTTPVQIALEVLARALRQEKEIKGIQTGKE

SEQ ID NO: 930403 - protein, 155 aa, Homo sapiens
MKARLVMQLSSQAIQRSPNCGQPRELVPFIPAAPALAERGQRRAQGMASDGARHETWQLPCGVETVGAQKSRIEFWEPPPRFQKMCGNAWIPRQKFAAGAGLSWRTCARAVRKGKVGSEPPCRVPMGHRLVVLWEKGHCPPEPRMEREFSFTDSL

SEQ ID NO: 930404 - protein, 144 aa, Homo sapiens
MSVLLKGLNIDAFSRKPFLIALEFGRMCSGWISGEQVWMKGVVRCSKGHLRRRTGECPCPVVAKDITGDLGDNSSSTAMGLKSKASDMKRPQHEHLANLDLQLDLRLSDLLISHCDAVVADASNTPGAMVHSERVLHAKDQLVL

SEQ ID NO: 930405 - protein, 161 aa, Homo sapiens
MLDTGNTQIIRAASQPDSLRIKEIGAIEFYYKTVVAQIKTPVGGVERCDSIGQTLRIDRICSLIGYRDARKGVRIMPCLFLAGSVGWIVIVHLGGKNDFRFGHELSFRGMKNPCGDRKRVVTEVGREISLYLEREDFEEEKPAIEIRLEEKQVDRIVRFCK

SEQ ID NO: 930406 - protein, 149 aa, Homo sapiens
MKIIPNFQDCSSSSTLLLSIDVAGLHKQDYSILKDSQLLVLELNPPSTLEMPSFSEITVPAGAACQMNKRALAPSSGNNQVEESLVSTDIWWSLRGQHPSILNLKVCTWEPGTNPDDSSRIDSSSPSSPGPPTFSMQLDSASWRERSRI

SEQ ID NO: 930407 - protein, 138 aa, Homo sapiens
MVQGGHGQVHAGKVAQGEAASGAAQVSWCMFMGPTLLEHSAGQVVHQHRSYDAGPQGTRGCLASRHIQAGSQKRPADQGVLRSKWPQRREDPLKDNANIMGIIGIKGRNKKIIKCYPIPFFILPKIQKRSNDNPLSKH

SEQ ID NO: 930408 - protein, 163 aa, Homo sapiens
MQKSPAFCIGLAGSCRLELSEVRSPQAWTSTVPGAKKVGDCCFRSLGMSTICNCDKLKIQMQSSEKRKSCKGKTVNLQRSSLLKFLKMTKKESEQAFISVPRLYSMVCHNIYSFAYTFNFLASSSFIVLTWQNASSSDSQISAGSVPALTQGNMAADYTFLVH

SEQ ID NO: 930409 - protein, 185 aa, Homo sapiens
MHAHAYTHLCQLPAYKTWSSVLSIILTTTTITITTTTIITTTITIASIITITTTTTTTVTIITTTITITTTITLSVSPSPPSPQPPPSPSLPPPPPLPPLPPLPLLPPPPSLSSPPSPPPPPPSLPALTTTITSPPPPTPPQQQQLSGYFYCPVAPDWVTASVNPTGKYQVLVWSLRVERIRTYT

SEQ ID NO: 930410 - protein, 234 aa, Homo sapiens
MVPHYGIPEGKDSTSCPSHAPECLVKCWIHGYAQGIVVELNLSELKRGIKGNPAGGKAAENLEKMKRRVGLGKGEQKQRMKYTFFYSGIVSDVHVTERPARVGILLDYNNQRLIFINAESEQLLFIIRHRFNEGVHPAFALEKPGKCTLHLGIEPPDSPRVKGTKCQQHLPSGWKQLWNKGENHHNGKNQVLDRWCLNCVSEYWNSMEVPEGQCGIQQEGQVGIHSNPYLISSH

SEQ ID NO: 930411 - protein, 137 aa, Homo sapiens
MHQLPAFIHWKILGPSSSGSRLGNQRERALLGSSCRSSHRVCLLLTTFSQIVTIEGDSSCLSPLSQLPGVLDTEAHQPGPVGSKQHRHRPALFYHLLWTQADRAGSVQNITISCKVMAVGKGWGVGSGELSEPLIGS

SEQ ID NO: 930412 - protein, 168 aa, Homo sapiens
MRLSRRVVAQIPTAGIQPVYSRCQILEIVAAAKLKWSLTKKLYGREREVGRAGATHGLESPGGKFPDVLDFILGISVVQWKKCELWSQPDWVQILALPLTSFMTLSKLLCHFAPQFPHLIYGDDDNGTYLTKLLWMKSVNSCRVLRTVPGTCKHSRSLRCNFCTKTKI

SEQ ID NO: 930413 - protein, 140 aa, Homo sapiens
MENSFGAASMSRAPDWALEMQQGVGLRSPLPSWDLESELGEHRACLLNTTTVILKQNPPGLGKHQDTGMRQSSHGGSQWQCLEVHILGETDWHKHQPTRVDSAFTLWLMGGEEIGEVVPKHRRILLFKQLVPLTMQINTS

SEQ ID NO: 930414 - protein, 152 aa, Homo sapiens
MICLGAVFIGSIIRGGSLNYLDMKVYSLHYICEEFACDIFQYFFFPSFSLLFLWDSNYRYVAHCTTGHRSFVYFYFLYFYLDSSHCPTFKFTHLFFSRVQSAVIPIQGIFLFSYFIFQNYNVHLALFYSLFYFFFCRDFPSAYFTFIIAVLT

SEQ ID NO: 930415 - protein, 141 aa, Homo sapiens
MGKAEPEVEDSNDQNCEELLMDRRVKISSFRAVSSKVEDWLNRKEVEIDMKVTNELREWQDCSRRTLTPALNPSNFLLRTGHREAESGLFHKASNGRTRKVQGPLDFLKDRSCLGKESVLSANVHMFLCNLMTTLVEAFEH

SEQ ID NO: 930416 - protein, 260 aa, Homo sapiens
MLEVHSRPYLPGYHQQRLQNSKDRCLLLPLEVSSQRSTGLMPARALLCEVLNGKVSGYAFSNSPLFLGLSTSIIPGLVILFNCHKLMQMVSHSLYLGYLTPPTSPPSDDEEEFDLSLFSPQKEEPGDDPLPLPPILEPVYINSSTKLLPPLPEEDVWHSPEWLLSCSSRPFGLLPSSKPTVSFDAPGPLLSEVWNPASPQSTSQCPHSPSLPLPLHNGCGLGSGKLSLESRKVYLKWALVRGVCVRMLLLFDQTLMSEKT

SEQ ID NO: 930417 - protein, 325 aa, Homo sapiens
MNALKLSKGPETLYAGQKLNDNEWHTVRVVRRGKSLKLTVDDDVAEGTMVGDHTRLEFHNIETGIMTEKRYISVVPSSFIGHLQSLMFNGLLYIDLCKNGDIDYCELKARFGLRNIIADPVTFKTKSSYLSLATLQAYTSMHLFFQFKTTSPDGFILFNSGDGNDFIAVELVKGYIHYVFDLGNGPNVIKGNSDRPLNDNQWHNVVITRDNSNTHSLKVDTKVVTQVINGAKNLDLKGDLYMAGLAQGMYSNLPKLVASRDGFQGCLASVDLNGRLPDLINDALHRSGQIERGCEGKAFSFLFPNIGVWTITHKLAFSATTCEYR

SEQ ID NO: 930418 - protein, 227 aa, Homo sapiens
MLLGLSSSLQKRPHGEALRRHANNQYQCSSHGSGPTWKSIQASVRPLNEGSQLEVGMESPGTPALWAVQAWALNSLLPEGLDLWKSKEESSGSGQAQDLELGGQWEVCDRCQGSSSRVLSRPQYEWVIIGVSMDTDDLITTSPRELSSVGPDIRQETSAHPKSKRLAALLDLMKDTVVQAPTIKVNLLVNYLRSGQAVYQMAGGHIAFSGAMKLPELSEGCLEPFPT

SEQ ID NO: 930419 - protein, 153 aa, Homo sapiens
MGRDLVLASKSVGLVGPLTPSIPGPFSGHLVTGRDKEEHHTKDVPTVAMVVSKPSPYPPLIPPNRPVFRALRLRLLRTSHGKRLLCNFFRRHSGNKSHLTGTEGMREVGWPDQERSQQKQTLEPGLHFMGRTDLTKAGLHGDPVPMLGTNCIS

SEQ ID NO: 930420 - protein, 170 aa, Homo sapiens
MTLAHFASLCQTVCIYTYKTVMIFLWIMDCWNEVSAGKKLVRSTAGRHEASQNEERITGCPCVSVETLPTKGKIEHKALDRTLCGTLPMFLRYRLNCPGWAVGSARFTDGQTGVGSIRVASSGLQLVEQLLKQSEYPVLCWIIQLGFQTSPGFRVNSLTFSGFEDPDMVC

SEQ ID NO: 930421 - protein, 197 aa, Homo sapiens
MSNPWMRTPHICTWLHVHGSSAGKASLWVIEKPNHDPRRGLPLPCVLVCQYLEDKVYKAMCKGCICPWAGTWLDKYLCLQKVETAAVLGQGIKYLPTANFHVRENLSVLDNFSSHSHNELLASCGKKFCSRGSRCVLSRKTGEPECQCLEACRPSYVPVCGSDGRFYENHCKLHRAACLLGKRITVIHSKDCFLKGA

SEQ ID NO: 930422 - protein, 151 aa, Homo sapiens
MTGTLIPDLQREGIQNRWREGTDAELKGETPHDHQGHLNLKGMMLKELAEAKKFFETNLNTDATCQNFWDTTKAVLRKKFIPLTTHNKKLERIQIDNITSQVKQCEKQEQTNSKPSRRQEITKIKAKLKEIEVRKTFKRSANLGVVFLKKI

SEQ ID NO: 930423 - protein, 150 aa, Homo sapiens
MWQRVYLLLRGNSINDVVRNLLKKWVNTLMAEAMSRFLPLTTKEGHRKVPLKLLVESAIFCMKYIHKKYENSLFFCITFENFPDQILQLDNSDASACVCEALLTRIPSGLHSISKERHWIKEKAAEVERTQISNILFHIGYRVLFVRGKG

SEQ ID NO: 930424 - protein, 141 aa, Homo sapiens
MSTRLCGHRTHPCTESSFEDQTIACAVLEARSTLRFCSFIGLSGFSQHKLGFYNSELGLMVCTITIRILFQTVSHFTLYQDRLGRELRDPENICYTKSKLMVNRMQFLIAEVHPDAENYKGAIGGSCQLGTDSTGFQKVRL

SEQ ID NO: 930425 - protein, 165 aa, Homo sapiens
MFTGNGPVSQSVRGKDGSGCSKAVAYGSEQGWTARSLKHPLLSELDVCSGPALSQFMLDAGLQGAPVSLTHQPRSGCSHLSFLQQTHQNETRRLLAASHTARSLPAGCAGMDGPRNQQRPGCGCGGVTGREEGNLCGYRQEVDNTTQSYFLEESKPAEFPETLNK

SEQ ID NO: 930426 - protein, 417 aa, Homo sapiens
MCMVIKVAVVRGHMPTILAAGWQVYVLRLACTQAVLCTGHLRPLALPIFSCSDPTILQHSARMTPPPQTPTDSVAPPPVLWLLPWFWAPPPVLWLLLWFCGSSSGSVAPLPGSVAPAPVLWPPHQVLWPLVQFCGSSSGSVTPPLVLWLLLSFCGSSPGSVAPPSVQCLFIRFCDSSSGSVAPPPVLWLLLWFCDSSSGSVAPPLVLWLLLQFCGSSSSSVAPPSVQWLFIRFCVSSSGSVAPPPVLCLLLWFCGSSPGSVAPPLVLWLLPWFCGSSSGSVAPPLVLWLLLRFSGSLSGSVSPPPVLWLLLQFCDSSSGSVAPPPVLWLLFWFCGSSSGSVTPPLVLWLLLSFCGSSPGSVAPPSVQWLFVRFCGPSSGSVAPPLVLWPLLRFCGPSSGSVSPPPVLWPLLRFCGSS

SEQ ID NO: 930427 - protein, 154 aa, Homo sapiens
MAWGLFAARRKALMPSSSYRPCEEKTSDGRNCRERGDCDFIPVGKDNADVLSQWQGVSGTLLTLPPCGHEEVSIPFPSMQFLCLHQTWSTHKPCTAKCLAEKQAITFGKSLCAILEDLNEFLERVPHAERLTSELIYLLVILQFFLEYGCLPPG

SEQ ID NO: 930428 - protein, 143 aa, Homo sapiens
MAKIRQRCSAAQGYDWIRDRKLAWDNRFPGSWNAKLFQAQLANIFPRNKNTLKCKGSNSDPLVLCEVRQAKPPRMEQLETNRTGNNQRLNGILRSTGKMQVTSSDRSVVKLDHSSPLTLPHSICHSPHPGSLRNLPVLKASAL

SEQ ID NO: 930429 - protein, 139 aa, Homo sapiens
MEAGEGSGMAGCSPEACPAGRQLRPGEKSTGGPSTPSAAAGLGAKSFIARGRQGRPAAPSVGPAKPTPTRNSSWPASTPRSPGSRSRLSLHTSLQAEGAGSGLGQPRKGLPQCSGGLKGSSSAAKVGAQAEEVPRVSEG

SEQ ID NO: 930430 - protein, 139 aa, Homo sapiens
MFNNMNGTRGSYLDVDSWQMISVFVAEGRGGFGNFLPSDSEVAAPLTIPFTRGCPPNMSSYKEKILGPVLVGLETETLDKVIKIINNNPYGNATDILTTNRATTWKHSHSCGGSQRSLWTNFQKILKAIHHLFSGDSKQ

SEQ ID NO: 930431 - protein, 164 aa, Homo sapiens [sequence omitted]

SEQ ID NO: 930432 - protein, 151 aa, Homo sapiens
MTSSQNYYSEGIYRMSPSSVTSFAPNLQPYHDDPVESVNTIKACWSFFQSLDPWSRVHFNKQRSYMLKMSPEGGKGVTLTDNCGKSIPGSGSSEYEGPKGGLGLEGDLEFTVDMYEVTIKINEESSRQLDINICSSSELESSSSCWWRISS

SEQ ID NO: 930433 - protein, 150 aa, Homo sapiens
MLMCSISVIRGSFESKCQNVSGKLWDGGRSWGCRCLSPDEHQWRGLLHPWAQSRKRSVSSVSPPSSSPTHTQGALGTVPVLRSTHPKPPLKSKMAARLRRCFQLFRTPNLTETSRVKQPDSMSEHPSQLFRTPNLIGSAGLNKLILCQKI

SEQ ID NO: 930434 - protein, 134 aa, Homo sapiens
MAQPCVPGYRGRFPGTQCGRASSQISLDTGSGISVLGSMPLGTLCFGVTSLKFSKPLGCLGPAGAIIDSEAGCPKPRPGLIWALAILALGLLLSVKAQVPVNPVHSCSDYGAPEGGGGGGRSPLSCVLPAAAAR

SEQ ID NO: 930435 - protein, 139 aa, Homo sapiens
MWGDILSLFKSLNLNLVRMAGDTPHLNSRASGRKPVDDEKCMYLAEDEMEKALSSSCSKGTLTSCLPKLLMYGVLDFESFHFRTRQSSWAFKWETYVISPESRGGKLEDRGHFPRKQKGPLLPPIPRSSSLVPSTFNCN

SEQ ID NO: 930436 - protein, 138 aa, Homo sapiens
MRCVCPWSQHKAPELHLHQLPNVNEGTEEKDGPGGPPPPHLSLSPTNHSPPPNSIATPSEAFSGFSNLRNHSLVQIIQHFRSIPNCLTKELAVFYPVCGVPFEDCWGLWTIQRSFHGKDQASWVAMIYCQVAAEVIDL

SEQ ID NO: 930437 - protein, 333 aa, Homo sapiens
MNAKQLFLISFKLKACSGQSLAFDSLRSYQVLVYKQLLCDSGYNSYLNLPADFYSPRLGKTEDPDFESPKEAEQLQKLSIKELGFETTDECMRSHFEQWGTLTDCAVVRDPNTKHSRGFGFDTYATAEEEWMQPCMQGTQEIPSCGNGYNFEVRKALSKQEMASALSSQRGQSGSGNFGGGRGGGFGRNDNFGHGGNFSGHGGFGGSPGGGGYGGSGDGYNGYGNDASNFGGGGSYNDFGNYNNQSSNFGRIKRGNFGGRRSGPCGGRCQYFAKVQNQGGYASSSSSSSYGSVRGFSLLPGNSLAGEESQRSDRKATGYNRFVNSAKHSGGRA

SEQ ID NO: 930438 - protein, 156 aa, Homo sapiens
MGPDVTHPHPHFPSMVPHPSSILNLFQNQALLFSAPLPLPIFSSLPPLRISSSSISDFPFTALVGTSPCKSPYWQTCREVWRERRERELGLRMALEGQLEFRVGVGLVGPTLGAAGGPYQPRAMRGLAPGPAAAEGVLGPTAVPAHQHCPRFLTGP

SEQ ID NO: 930439 - protein, 167 aa, Homo sapiens
MLLEILDALESLSNRIEQVEERNSELEDKVFELTQFNKDKEKRIRKYKQSLQEVLDYVKRPNLRITGIPEEEENSKSLENIFGGIIEENFHSLARDLNIQIQEEQITPGKFIAKRSLPGHVVCRLSKVKTKERILRPVRQKHQVTYKGKSIRLTADFSAETLEARRD

SEQ ID NO: 930440 - protein, 218 aa, Homo sapiens
MPAINAKRVYRIMRQNALLLERKPAVPPSKRAHTGRVAVKESNQRWCSDGFEFCCDNGERLRVTFALDCCDREALHWAVTTGGFNSETVQDVMLGAVERRFGNDLPSSPVEWLTDNGSCYRANETRQFARMLGLEPKNTAVRSPESNGIAESFVKTIKRDYISIMPKPDGLTAAKNLAEAFEHYNEWHPHSALGYRSPREYLRQRACNGLSDNRCLEI

SEQ ID NO: 930441 - protein, 135 aa, Homo sapiens
MAHVYIGIKDNRLGIIKIKMTYPENTEFSSPQKSVNFWYVLVMNDEHTERRYLLFFLLSWGLPAFVVILLIVILKGIYHQSMSQIYGLIHGDLSPVGCMDSISTPELIIVARRADNIDYPGHMPMARAKAGKMRY

SEQ ID NO: 930442 - protein, 131 aa, Homo sapiens
MLNSWTLNCNKKIEHILFCAYKRSTIEDEHSFIYLTNMYKRMEIISGMFTIFALGTLHRIDVQKYNQPINQTNKDEQEQFGFFANRVIRTGKCDWINTGKINNENPVESLPSDAGSDMEPNTRAFGSLLRG

SEQ ID NO: 930443 - protein, 150 aa, Homo sapiens
MTCNPLGRHWSILTWRCKGCCAPRQDVVWWELCSQNGAMMQLLGSQSVCDIQYELLVWKNIIIWTPDVIWMENEVGSRGNCVRNNVVTMWHTCGSAEGPTEARGPEPCHEEALSQANEVGFYFEGLVMSKRRVGCTEPRSLEKVSCRESA

SEQ ID NO: 930444 - protein, 161 aa, Homo sapiens
MIVRPHQPPEALEFRVGVGLAGPALGAAGQPCWPQAMGDLAPGPVAAEGVLSPPSSARPPALCSIPRRALAAFLRGRARDLQPAMPEPPTHSMGSCVARASPTSTTPYSTAPSPIDHPRAEECECTAQDWQAAPPAAQVRDPLGEASWAPESGGDVESLYV

SEQ ID NO: 930445 - protein, 140 aa, Homo sapiens
MCFHLNFRPCVSIPVPEQWNNFSPEMNTTSILVGPLVSNLEITHISNLTCVKFSNTIDKTNSQGIRPVGTAINKPSVMRVRNRKEGNMGKWSECQVDQRDTVMGARCGIRNNVGGQTEVWARNNDNCGRPNEDLVAVQPR

SEQ ID NO: 930446 - protein, 136 aa, Homo sapiens
MVEGKKEQVTSYADISRQKKSLCKESPILKPSDLGRLIQYYKNSAGKTHPHYSITSNGVPPKTCGNCGSYNSRRTVGYIENWKIFVANGEVLAQLASIQDFTSISIYFTGTSKHFTGTFKDFTGTKNHLLILESYL

SEQ ID NO: 930447 - protein, 171 aa, Homo sapiens
MSALNKSKQLQLFQTTHSWATSAGKSPSCSYIAYLCLSIPFIQQKSRRMAEWCGREKECLNIERNLAGDSQSENQLLDGHIPGQELQIQKAVALALCPCEKVEGPLSCLTLKPSVDGKAKRTHCNTRPLALWESQTPTLDATVWPEPRGTCPSSCTCPSVDSPSHKAFEHA

SEQ ID NO: 930448 - protein, 336 aa, Homo sapiens
MRKQMVLKFMSYQRINGARSTVPKRPFIKVREDTDLSEIIHPHGPSESTWRTFVQRGADGRGGLGSGPHPWGDAGPQRLWLHGAGIAVRAKAFGFSVIFYDPYLQDVVERSLGVQRVYTLQDLLYQSDCVPLHCNVNEHNNHLINDFTIKQMRQGAFLVNAARGGLVDEKALAQALKEGTIRGAALDMHESEPFSFAQGPLKNAPNLICTPHTAWYSEQASLEMREAAATEIRRAITGCIPESLRNCVNKEFFVTSAPWSVIDQQAIHPELNGATYRYPPGVVGVAPGGLSAAMEGIIPGGIPVTHNLPTVAHPSQAPSPNQPTKHVDNREHPNEQ

SEQ ID NO: 930449 - protein, 217 aa, Homo sapiens
MTLSIMGHLEWARGCQTATGIYWDLLFVQAGGEDPAGVSIAEAFPLSWEGGGGPSIGPGHSYWELQGCKRILNSNGGIDKETKGLLKKPLLFEEKNPVATRTWEGMDPCEKRAALGTICVHGAFCVRVPSIHCGTELLEVTAESCVTTGFQNWRRQLRTARTTGKGGKTFQKGRNHRRGSTKIIVNSTQVIGGPLNSHEWVRLQGFQQKATGKVWKN

SEQ ID NO: 930450 - protein, 135 aa, Homo sapiens
MNHDHWLCGGPPGSWFHGHMAWPYELTFRGKDVYLFNKGKVLWTIRLVHMTSASFCQCWGGEIVLQQLQSCVSACWVTGRVAQDSLTPQPLGVWVLWRAFSQSQRTVLPMWWALLLAVAVAQRGDAHSSPWKPCW

SEQ ID NO: 930451 - protein, 143 aa, Homo sapiens
MEEVEGRGNYYSGRSVAFGSRRADGVSSSPGLETYSLKSQEEPVFHLEPHGRKIMMPQLKAAGGQQQVDGGRLREDITPSLGVNSFIQSRTAMEESTILMPITEVLSTVLSVESLLYSKAGTPISGPRLKCLHDHGARSPKNG

SEQ ID NO: 930452 - protein, 168 aa, Homo sapiens [sequence omitted]

SEQ ID NO: 930453 - protein, 153 aa, Homo sapiens
MGIDYEVEATACHLQAAEPGKQGCLKLDAISTTETQFSRDQTRRKPGPVRGREKNVSSTEKGRGGGKGGEEGKKEEEKDKEPRTCVNALRFWAYETGWMGILIPETEDIGKGLNPYFGEDEIKMLMGRTWFQRKIDGRKTRTIYSPCEVPEKN

SEQ ID NO: 930454 - protein, 134 aa, Homo sapiens
MGPSMRIKRQNGGKCCLNPTAYLCYIKANKGRVLFLDLDSEKNNRRRPEGCRCGSKWPSSIDRAPALLAVDAGGQLHILALLNSGGGMSLARANEMWGRSSKSQFLLCDTQFSQSADSVGSTATSHGGHIILCS

SEQ ID NO: 930455 - protein, 193 aa, Homo sapiens
MISGKTGIISDTRIYDTGTTFPEQNSTSYGLMKALSAYGRDGKWRCENEVTSKWSSPSSAALLEFAGGPLQTLFVWVSPVEAAEQQRLLPAPSSASFIPEGHPLDASRTTPEAVSPLAELEHCAGRSAALFRAVRQKRLSPLKLHPQLPLSPDALSQGDGSFIYKPLTGTAAFLSEMPCPDRRNLERQSGYSG

SEQ ID NO: 930456 - protein, 162 aa, Homo sapiens
MPLVALGRLGYGLRSFGNVHSYNQRTASGAADRGHQRGNLTLEEEAERQLGFRGEKPTLPTRIWDPPSVDTQKGYHTGLFPLLAGGSHPPRRGKGATELIAHCCPWLVELREHCNMPSGALGSQAPLPGHCHGACTEFVSAGTKVASRFLQSLTCMFPPARG

SEQ ID NO: 930457 - protein, 148 aa, Homo sapiens
MSNLIVIWLNWIQDCYEPFSTVCGISAGLNLSELFNHITFSILGQKQQNDQASIPQNSCYLYNLPKSLSNTSKHVNSSITLAFQSGLIDADVLEKQALKNCAQAIEEHGTMNRGSKPKVLKMISRETSGNLNHQLPLVHTEETETQKK

SEQ ID NO: 930458 - protein, 161 aa, Homo sapiens
MEGREVAYSQIPSSARYLLESHSDCKYLSGMTGSYGSFKRRGSVRIGVGHRHEVLYKEGGRKHFDTEEGNVTTDARGHMAGFEVGKRGHEPRCARNTGVKGRDVKEIDSPIGFQREYSLADSLIFPQTSVLQNWYNINEEILIVLQKNVKFGDYNVLMKKS

SEQ ID NO: 930459 - protein, 134 aa, Homo sapiens
MGHPESQTAIIVISVLDLATQRSYWAPGRYWGISAKSPVMLSVFRSFSHGYKHLLWWSSGIEANERGEFQEDSAVLKTERLRGLAEQALKCKVDCASVSAFLWELSRAKVRKAAGMLWAICNHSHNYQVFFDQK

SEQ ID NO: 930460 - protein, 147 aa, Homo sapiens
MLLGNLCLHKNLHRNIYSSFIHNYQNLEATKTSFSCGYMDAKWVQGISCLRSNRKFLEHEARGLKRGLKYGAVGVKLLLSPGAVTRCADTFAAAVDDMNLGLSRAPANPFDPSVPWTAWRLLMCWTNRPIAGACSLLCLAQLLLDRN

SEQ ID NO: 930461 - protein, 146 aa, Homo sapiens
MVLLASSWTRRKRDRSPDTDSAVASFLDFPVSRIGLSSILQRIPSKIEVCVESHSLNKESKAAELLGRMSEVHLLTFARQGDCLEIKNVQMHLGQNQVGCPSKIPQDPSLFGRLSWEQKGLGQTPINFIRGSTRCKRLKKRVGPSE

SEQ ID NO: 930462 - protein, 495 aa, Homo sapiens
MHGLALWAVTPATAARRTCLLASGEAKETLAQMYNTVWNMEDLDLEYAKTDINCGTDLMFYIEMDPPALPPKPPKPTTVANNGMNNNMSLQDAEWYWGDISREEVNEKLRDTADGTFLVRDASTKMHGDYTLTLRKGGNNKLIKIFHRDGKYGFSDPLTFSSVVELINHYRNESLAQYNPKLDVKLLYPVSKYQQDQVVKEDNIEAVGKKLHEYNTQFQEKSREYDRLYEEYTRTSQEIQMKRTAIEAFNETIKIFEEQCQTQERYSKEYIEKFKREGNEKEIQRIMHNYDKLKSRISEIIDSRRRLEEDLKKQAAEYREIDKRMNSIKPDLIQLRKTRDQYLMWLTQKGVRQKKLNEWLGNENTEDQYSLVEDDEDLPHHDEKTWNVGSSNRNKAENLLRGKRDGTFLVRESSKQGCYACSVVVDGEVKHCVINKTATGYGFAEPYNLYSSLKELVLHYQHTSLVQHNDSLNEGSAKFVFGFLEQRSPLFRTLV

SEQ ID NO: 930463 - protein, 271 aa, Homo sapiens
MFKQQTIQEVTWVLLKAFSFKRETHHKSSEILQPDVIERKNPFSEETFKLAAEICISNKALNVNHQDNGENVSRACQRPFPQLLQPWLNGAKVQLGLWLQRVQALSHGNFHMVGPVGAEKSRIEVWKPLPGFQRMYGKAWMSRQKFAAGAVQKGNVGLESSHRVPTGAPPSGAVRRGPLSSRPQNGRSTDSLHRAPGKATDTECQPMKSAESETVPCKATRVELPKTMGAHLLYRHDLYVRHGVKGDHFGALRFDCPGGFQTCVGPLAPLL

SEQ ID NO: 930464 - protein, 141 aa, Homo sapiens
MSHHTCSAFLFFKAGEGQSLLFSSIIYCKSQQTFSVKNQIVNILGFVGHTVFIAITQFCHGSRKAATDNFKSHLKDRWEILTYHFNGTQYGLANGGGDGGGNDGVCKHSRTDSCNSTLIICASAQGLGVEYNQPWAKFPIS

SEQ ID NO: 930465 - protein, 149 aa, Homo sapiens
MVQKCTSSLAGFGTLMDILAQLRVPRAFLKGLLPHIIKEAPGKRVGTTRSRPQVSDFTSAKLSDGDEELVENWSKGDSCFALAKRLAAFCLCPRDLWSFELERDNFGYLAEGISKQQGIQEKAQHKSLENLQPDDLIQKKNPSSGEKSF

SEQ ID NO: 930466 - protein, 152 aa, Homo sapiens
MAVGSMLICPCQQQCEHGGVHAFQLGWGAGECVDAGLHPVILSCSSFGAKMGLRRGGGVRPLKFVCAFTLAALLAQEWGACLHGSGCLHEHIHASGNDGTGPLAFTCAFVLATMAMAGWKNGAVGLWACTDIGNGYAEGRLEGSVGYSCQQQ

SEQ ID NO: 930467 - protein, 142 aa, Homo sapiens
MVLGPQLCSLAPGGCAGRGEVFPDPGQSTLMTDAGESALLDRQQWDLCSFTCASSSSKVAGCLHIDWVQGTHRSGAAVFLHALMLAAEVGQSVTGTFTDPVTWPLEILVYVLILIKCLALPSIPLSLSSVNLIGTEGSQVPR

SEQ ID NO: 930468 - protein, 252 aa, Homo sapiens
MIVRPPSHVELLKDTTPILLNEFGSPSMERTEALSDNLCSMSCEWICCERERRLRQAFAFQSKMFREGTKTYAEEIGGRESQRGAGQEGQCLAFTLKSKPVVFVKGLLFSDTKPASFPGLVEPPVNAGLNRLVKSVSTYTAVGKAWFLCRKCHFSDHSAFDSCGSAFIRSSQYFNSPKAKTDCVSPICTSNYSGLAFMVLGMAGFLPEISLTIPRPIKLQAAIFRRDSEWEQGVCVSVEANIPLSNLYFTFL

SEQ ID NO: 930469 - protein, 155 aa, Homo sapiens [sequence omitted]

SEQ ID NO: 930470 - protein, 194 aa, Homo sapiens
MGRNQRRKAENSKNKSASSPPKDHSSSTAMEQSWMENDIKELTEVGFRRSVITNFSKLKEDVQTHCKEAKHLEKRLDKWLTSINSVEKTLNDVMELKIMARELHDTCTSFNSQCDQVEERISVIEDQINEIKREDKFREKRVKTNEQSLQEIWGYVKRPNLRLIGVPESDRENGTKLENTLQDIIQENFPNLAR

SEQ ID NO: 930471 - protein, 171 aa, Homo sapiens
MVHLATVVFPDAGITARPRSPLYSPRFPMDVASCEPNCSDCCLFSGSSHPVSLPGSGLVLGVVCTESCEVNHLSVVQLWIQSLSGGDDRRVKWTLEVEESRQSQASPGSHGNQKAGLTLIVPPLTALSLFPDGYYTLASAKPIPRNQVHQEQRPIEQDSKITNNDQRVEST

SEQ ID NO: 930472 - protein, 152 aa, Homo sapiens
MALQGASPFTQYSSLLLLPCEEVPTSMTISKNMEASLELGNRQRLEEFRGLRRDRKMWESLEFPRDLLNGFDQNADSDMDHEVQDEVVSDGDEKLVGNWKKGDFCYALAKRLTDRPIENNCKLWKKYKDQLHEGTGDETKTDFGGKLAYEQS

SEQ ID NO: 930473 - protein, 198 aa, Homo sapiens
MLGQPVTSKEMQQSLQHPNSRSPKLSGQWRLVQDLRLINEAVIPLYLVVPNPYTLLSQIPEEAEWFTVLGLKDAFFYIPLHSDSQFLFAFEDPTDHMSQLTWMVLPQGFRDSRHLFGQALAQDLGHFSSPGTLVLQYVDDLLLATSLEASCQQATLDLLNFIANQEYKVSKLKAQLCLQQVKYLGLILARGTRALSKE

SEQ ID NO: 930474 - protein, 164 aa, Homo sapiens
MVNSVVFFEITRDGKPLGRISIKLFADKIPKTAENFRALSTGEKGFRYKGSCFHRIIPGFMCQGGDFTRPNGTGDKSIYGEKFDDENLIRKHTGSGILSMANAGPNTNGSQFFICAAKTEWLDGKHVAFGKVKERVNIVEATEHFGYRNSKTSKKITIADCGQF

SEQ ID NO: 930475 - protein, 136 aa, Homo sapiens
MSPTAGSSCGLARLLSLLRNEDHTVRDGSFDHFSKAISLSVDSFPEDSVKAQHKRHSFRLYYEQTSKSLAKKYFQLGWQLNSTGHEISNIETIAAHLLPDADYIHFCLTFPHLKCVPSVSAGGYTSQPAGWPVCRS

SEQ ID NO: 930476 - protein, 251 aa, Homo sapiens
MTHTAASIKLFSSASGLPSNSFLDKAKNPRRLSPLWGSPALHQYNQKIAIGVFLKADKILDLRNQNKMLKTFLQNQSMILMNKNKGQGFLRARLQQLLLSSGSSHLVGATGLQAGAGEGLQRGNSQFFDCLTVFAMASHFFQRLFEFFWFSWYVPVVVLGAKVHNPVPFYVQNPISPFGSCISHQNGFVRGTEILGYCRNPGGTNRLKAFCILYLGYCSLQRCNLKLRLGAALLLPGCEVQQFSASNILRQ

SEQ ID NO: 930477 - protein, 163 aa, Homo sapiens
MEQKPCQCPLKGRAGDRMRTRLESIQSLGFDDKSHRCSVFTSIPQTLHYQSPNAEAQETELSLYFLHFACATALQVVENIAHAEPLTKAPSTQTGLQQRPLNSSDIHLSAGGSAPPSFPQACLVPWAGTYASHSIWFLIFSLVKPSLQLLYKALWDRTHMPCP

SEQ ID NO: 930478 - protein, 172 aa, Homo sapiens
MLNKFTNYLHCHLPCSEQQPVAQAFAPLSISGMERECRECEALTLTKFKNMAFRKYLLLDKCKSPKVPIPRGNENSQHPHVPPESVISFRPTGTQLPASHLRTKLRALKCTQRKMTLSPDGTGTSRLQQLHGAGQMRWDTEMCSRAACREQQMALDSCPRPVGLYENISGLS

SEQ ID NO: 930479 - protein, 208 aa, Homo sapiens
MQPLLERVCAQPSRAGCWWQVPAPGPSQGQPWCVAEENHLSCPVHGAAYSDKDSAANGRALHAQAWLSGQPPEKRTPQPQPLRPLLATHQFAVYEIRTKQKTAKASGSQFPSTSRHHASVGRVRDRSVTQVAPFSTTPKALAVVASCVRELFCQVARPVIMAPLMCQCGHPNHAPPRGPSPSSAGPPPMSSVVLIITPVSFLCVHSPG

SEQ ID NO: 930480 - protein, 197 aa, Homo sapiens
MGKRAWEKDSSCSHHDATMQNPRGSVASVGSEPWTPVPGSSKEGGTECVTEAKSGTGPPWLARAETPDFSTEFGGHRTGRDRLQGFSSSLLRAPQGKSLEPGPPGDSRAEPSLYLQDLNSAVGPSALTPSKRVMVEDMKQKSARISSSNFEDQVSAHPLPFRLVFGGSWAASGAGGSVAEDLPCTAATGSPPLLLLA

SEQ ID NO: 930481 - protein, 157 aa, Homo sapiens
MGRNQCKTAENSKKQNASSPPKDHNSLPGREQNWMENEFDKLTEVGFRRWIITNSSELKEHALTQCKEAKNLERRLDELLTRITSLEKNINDLMELKSTARELYEAYTSIKSQIDQAEERISEIQYQLNEQDGPTFKLRKYRERHEDSPPEQQPQDT

SEQ ID NO: 930482 - protein, 144 aa, Homo sapiens
MPNLDQLQAWSFLRREWNLLLEACAQHRGQALRLRQAHVTLELQTQVPRWETVCQRPPDLQPRGQAGLGVQSHCSNHQSCKEFLGFFIFPSKKLSSALKKCCFLLWLLLPDENADLGIQVKGGPQSTLSLCKRTPLLLSVPESA

SEQ ID NO: 930483 - protein, 135 aa, Homo sapiens
MELGWGFSCPSYQGTVRNRAFPIAWRGLSVGFTDLAASAHCEDLKLEQPPYLALLLSCSLAEIHIRAVASLCLAWSPGRPWLCPLPVLRAAPAWPLLLDYCILEHRAVNSLCHHAKEHIDSCPWKRPWAAAWPEH

SEQ ID NO: 930484 - protein, 144 aa, Homo sapiens
MSFHSFGIRDTSFIEGLRPKNGRSTNSLHHAPGKATDTQRQPMKAAGGRLYPAKPQGQSCPRSWEPTSYISVTWIISNVSFHYLMASIIFDEKSAVNVIYEFMYMMSCFFLAVFKMLSWSLSFDSLFAMYLGLSFFVLILLGVR

SEQ ID NO: 930485 - protein, 143 aa, Homo sapiens
MWTVCVAFLRPAVLLMSWSTEVDSPGNTPNKGWSKPWPAAAFTDTSGAELRALTVSCSVAEDTHIRPAEPLPSIRCETQLLSKNASSMRIRNEISNCERHFICHPPGKPNTQKQLYKVVLFDQTQNITKADETGNRIESYLDL

SEQ ID NO: 930486 - protein, 163 aa, Homo sapiens [sequence omitted]

SEQ ID NO: 930487 - protein, 152 aa, Homo sapiens
MGCVAHPNLSVPSRLQPLAWEGPGGRWLTMGGLQEEQHLGSGSGSGTESCHSPLRTMEARKIAVGPMKKATRVAAGTANADWLDGARERSPARAWRPPSSDSPCGSRKPLTLRRMEDGLECFPGTGTLPRPLTSPFLPENPLFMCYFCRRFR

SEQ ID NO: 930488 - protein, 159 aa, Homo sapiens
MTAWISFICWDSSCVAVFCSAGTPPAPSPNHTHTHTHAHACAHTCAHTCTCTHTRTHTHFIGSSCSGQLLGFVITAADGCEDPDLVRMMVLCVFKSATSLGLSPLYTGCEDPDLVRMMVLCVFKSATSLGLSPLYTGCEDPDLVRMMVLCVFKSERINR

SEQ ID NO: 930489 - protein, 128 aa, Homo sapiens [sequence omitted]

SEQ ID NO: 930490 - protein, 129 aa, Homo sapiens
MAILAGGQGFLRARLQQLLLSSGSSHLVGATGLQAGAGEGLQRGNSQFFDCLTVFAMASHFFQRLFEFFWFSWYVPVVVLGAKVHNGTVPYRDAILSSDWVQLFFYRDVKYSNSVLQIYCGSNVSEHFE

SEQ ID NO: 930491 - protein, 155 aa, Homo sapiens
MAREKPSGIPSVPLCVGLAGLMNHTGIFNHQSSPVNGSCYLLHEKRKKKKKEKKKRKRKKERKKIEEGEGKGGEGDTGLETFTCPPGHTDHAPVVQEPKRKTPWSLTAICERSRIYSAEYIPGAEENSKLGKARGSAGDSPAHMVIPISSPDLRR

SEQ ID NO: 930492 - protein, 145 aa, Homo sapiens
MNAITVQEKQAVLKELLDKKQSEDGAILGPGETIKLNKIYAPLDSRQCRTMALKSRENELSHTFTLAISLEVLSGSLREMSTNTAQRSCCTEEVTGALLNAWDTGAGTGDEEREGPGDTGHPLAGETAGRMWDIQMRSQEQGLHP

SEQ ID NO: 930493 - protein, 159 aa, Homo sapiens
MPRPVRVFLWLFSNSQLQEPHIIQVNNNHILEFPAPVHTINALVATASCKLFGITDSSQCSSYLLLRKQSLPSLNSLVSPEETLDLHGKITPIKGSRPRPGPQSSPSPPSSKNNSARPLFLPAAGSGQGLSKKKEKEKALLPVSLVLDTDGQGLPTQMP

SEQ ID NO: 930494 - protein, 205 aa, Homo sapiens
MVTGLRGPILSAPPKVELALPGLPGLRLLTSALNLAATERAGTGCRVSVRVCWYLAGYFLKILCSPPPKSSRAPQGKSLEPGPPGDSRAEPSLYLQDLNSAVGPSALTPSKRVMVEDMKQKSARISSSNFEDQSAQRGAGTEERSAGVSGGPGWEPCGGFCPGAIKRFLDTQGLHGCGRGEVETVDEEHSGRQLFLSELANESKA

SEQ ID NO: 930495 - protein, 156 aa, Homo sapiens
MKAGSLSTICSGMAAVQADVCPRLGVPAVLGTHFLNRGNQRVLSLWFLRLVPGQQTTGGAPKGAPRNLGSPIRVHRVGSPLLCTLLSNVQRKGVRAENLATFHPSFPGTVMLGVCLDQGRHSFSYLMCGNSGVELLLFVCVIIDTCQHVCVLEGGL

SEQ ID NO: 930496 - protein, 158 aa, Homo sapiens
MAHGACAAVAFQPAPLALRCRGLLLFLSSVFSPPYRQLLAFVSTFHPSKWLPENYLMNSYQSTAKVHVIGMRATCVSESVWDFRAACNCSLTQPQPTDTSSVVKTEQVLFHSVQFNLNRDPHVHWDPDLGSWTEDAHVLCAPVLQVVAHGHLQYSSPL

SEQ ID NO: 930497 - protein, 144 aa, Homo sapiens
MPTALMPMNHESLEAVGEKSCGNETPVEWYNCGSDDRLRSCPSSQDEQTPLMCISYFLHVSVQTSPPQIFNGHMWPVAMVFNCEDEDIPLVRKHSLGSDAGAAPAYGCDFRHRPILLEPRLPQVKNEDFHRGNSGPHSGRDHQL

SEQ ID NO: 930498 - protein, 152 aa, Homo sapiens
MLVLTPLALLIVPQNISAHGDLSQATTAANPDLTHLWIRAMDLPFCSLAESISPLSAANPDPIHLQIRAMDLPFCSLAESSSPLSAANPDPIHLQIRAMDLPFCSLAESSSPLSAANPDPIHLQIRAMDLPFCSLAESSSLLFAGKYHLLHS

SEQ ID NO: 930499 - protein, 156 aa, Homo sapiens
MGVRDHGQDNRNSLLGLIPFGQPQAVTTRMTATLWKELAASGPSAWASVRSMGRKKGTNVLSKQCSVYLLPGPVLNPPGPHRGSMQILAIHTGCSWSQDAVLQTLAMVLLAGSSPKHRAAPLEGKSLRWCCSCLPVKSFQSPHKHGLSTYCLPSQG

SEQ ID NO: 930500 - protein, 430 aa, Homo sapiens
MDWNGMEWNQPEYRGMEWNGMQWNGIIRNGMERNGMEWNGMECNGINSIAIQWNGMELTRIQWNGMEWNGTERNGMDWNGMEWNGMERKGMEWNGMEWNGMEWNGMQWNGIIRNGMERNGMEWNGMEWNGMEWNQLDCNRMEWNGINPNRMECNGMERNGMEWNGMEWNGTEWNGMEWNGMEWNQRECRGMEWNGMQWNGIIRNGMEWNGMQSNGINSIAMEWNGMERNTLESNRVEWNGKDWNGVEWNGMEWNGINSIGMEWNGMEWNGINPNRMEWNGMERNGMEWKGMEWNGMECNGMESTRLQGNGMEWNAMEWIQLEWNGKNGINTSGMAWIGMEWNGINPSTAEWNGMECNGMESSVMEWKGMEWNGMEWNGMEWNGINSIAIEWNGMELTRIEWNGMEWNGTERNGMDWNGMEWNGMERKGME

SEQ ID NO: 930501 - protein, 145 aa, Homo sapiens
MATLIGQTRLQIVKLCESNTDKIIVPLNKEQFYNKPVRNANKDASTKTKNLNQASSTHQVCWSLLGVHSRPCFSGYHQQRLQNSKDCCLLLPLEAFSQRSPYQLPAGTLLCEVSVDPCWEVSPCQEAWGLNEMVKDLEEVNTVEE

SEQ ID NO: 930502 - protein, 140 aa, Homo sapiens
MTDTPKELTAAEQLSSAPFSQGFRASPRHLRRRVAAAAAARLEEVKPVVEVHHQSEQETSVRKRRIKKSSRVQPEFYHSVQGASIRRPVWPLYCYKAAPLSFSNLVPCWPQCHLSSETQGSTRSWSSSPSHILSTLFCVL

SEQ ID NO: 930503 - protein, 145 aa, Homo sapiens
MRRISGGPIELEFRKMMRNRDGEESNKQRWIIDCEYLSFRRTERGEGGGIDGNGNGNGNEEQRPLRCKAERSCHEHTAPWDPLQSYLLETVEGDANDSMWNLLQSWCSCRQPRMINKNTKMMKHKNDKSQLLHIFYPSTRRTTPF

SEQ ID NO: 930504 - protein, 142 aa, Homo sapiens
MEPILCRPLLSDSGCGEKQGWVPFGPYQVHCGFLEFSPQRLIRHELLEALRVKPHLSDTQVPEDDSATAEGLLCFNNLASLIIFHCSDITLFLSIHPLIDIWVVTAFGFMSNIPMNIHIEVLMWIYVFDFLGYLLKNEFVRL

SEQ ID NO: 930505 - protein, 150 aa, Homo sapiens
MTSLLASQTYHKLCPTSNTGDYNSTCDWGEYAEANPISQVAPLLAAFGGEKCYGSKGQKEKEKQILPPDPLNAHGHFSTTQHEEKYDAEKVLVERNRSFTWFQLNEQKHITIWCPKNNKRKSVKRSSEQLVHVSSWDKSEASFATESSGN

SEQ ID NO: 930506 - protein, 140 aa, Homo sapiens [sequence omitted]

SEQ ID NO: 930507 - protein, 206 aa, Homo sapiens
MWSCLEVAEACVGDVVCNAQLASYLKACSANGNPCDLKQCQAAIRFFYQNIPFNIAQMLAFCDCAQSDIPCQQSKEALHSKTCAVNMVPPPTCLSVIRSCQNDELCRRHYRTFQSKCWQRVTRKCHEDENCISTLSKQDLTCSGSDDCKAAYIDILGTVLQVQCTCRTITQRLDHATFDVPKLPQAPTPRSLAVTTISAGTVSRRK

SEQ ID NO: 930508 - protein, 141 aa, Homo sapiens
MFAFLLSNVSPSELRRTNLRVLAPCGFSASPSFGGLVPPCLATSHQVVKRRMFAKGFTAIFPPEGNSLSGNRTGREECREQCLRDANGCKHAWRVMEDACNDSGIKNKAAINIHIQDSDKHKLYFTYEIVGSHGIQKPCTR

SEQ ID NO: 930509 - protein, 167 aa, Homo sapiens
MERKARCLGDSSRAPRDSSPCFTVMPAPAHSGREKLLVNFCVAHRSKGCRGPDSPRNKKGRCSATNTAFKSLTKPTKPTRRPPTGNTTSPGATPPASTPPVAITACCLVPETMARVPRLEPTRVSVGWVTHISSKSSILVPCMLAELDISGVPQTQNSGPPPDLSLE

SEQ ID NO: 930510 - protein, 155 aa, Homo sapiens
MHHLASWASLDHNFSFFPDLTRSNPIIPAGNGPQTPVGNFCGGSPGRRLTAFVQHKSTAAVPAVAGDKHCKSHEVYGVPWFSRAFSIAGALRDLQDLSQSAHNGQYKSGKSFQESKYPIIHHKTHSQLIHQCGTGVLNVWQAETESCFFAETGVH

SEQ ID NO: 930511 - protein, 141 aa, Homo sapiens
MIYDLFRKRKVISFGGCIAQIFFIHVIGGVEMVLLIAMAFDSYVYSRPCLPGYHQQRLENSQDCCLFLPLEVLSQRGTHQMPARALLYEVPVGTYWEVSPSQDTRGSGTHLRRQSDPYQSSNTVLGDLLLSSEPSGFSKML

SEQ ID NO: 930512 - protein, 166 aa, Homo sapiens
MARSGHQLLPGASKAHVCIPAASPQELRAAGTICAELGLSRPGSPPFQQGSPTKERACQPQVQVWTSLVAAGPWVQAWISLAAAGPRVQAWTSLAAAGPRVQAWTSLVAAGLQDCRTSGASVDQLGGCRTSASCCKDTEAQDLLPAPEHHPAFAHGHGSLQLPGPL

SEQ ID NO: 930513 - protein, 165 aa, Homo sapiens
MQRGRRSSCRSQQGVGRGDHGQVVKSKWHPPWHQPEQVPSFPKGRAGAGPGDAGVSKGWGCAPSWVCVKSSRHRSLSTSARPCASRTSQQTARNCWVLPPTCRLKTSAFPHLTSGHLSKEPALAAPSERCPGFLQKSSCERGTFPKGSVVDPSFCSELPARVSPG

SEQ ID NO: 930514 - protein, 352 aa, Homo sapiens
MFFCKRHRRSLRAHGHCHFSPLKGTAVLRVLKGTAVLHVLTGTTVLHVLKGTAVLHVLKGTAILQVLTGTAVLHVLKGTVLTGTAVLHVLKGTAVLHVLKGTAVLQVLTGTAVLHVLKGTAVRCMLKGTAVLHILKGTAVLHVLKGTAVLHVLKGTAVLHVLTGTAVLHVLKGTAVLHVLKGTAILHVLKGTAVLHVLKGTAVRCMLKGTAVLHILKGTAVLQVLTGTAVLHVLKGTAVLHVLKGTAVLQVLTGTAVLQVLKGTAVLHVLKGTAVLHVLKGTAVLQVLTGTAVLHVLKGTAVLHVLKGTAVRCMLKGTAALHSFKVTAALHGLTAPPVSTCSQGTTTLHPLK

SEQ ID NO: 930515 - protein, 431 aa, Homo sapiens
MQTRIQIQMRIHRCRCRSRFRGRCRYRCRCRYRYRCRCRYRCRWRCRYRHRYRYRYTDTDADADTDVDTDTDTNADADADTDTDAGTGADTDADKETDADEQTLSYICMCIFLEQTLSCICICIWLCIYICICVCICICICVCICICIYACICTCICICICICVCVCIYICICLCIYICICVCICFCICVCICICICICIYACICTCICICICVYVCIYICICVCICICICVCICICICICIYACICTCICICICVCVCICILSVSVSASASVSVSISVSAPASVSASVSVSAPASASVSVSPSASVSVSAYVSVSMSVSAPASVSASASVSASVSASVSPSVSAPVSVSASVSVSISVSAPASVSTSVCVCICICVCVCNCICISICICICVCVCICICICICICICICICACVCVYVCTCICICICICI

SEQ ID NO: 930516 - protein, 287 aa, Homo sapiens [sequence omitted]

SEQ ID NO: 930517 - protein, 139 aa, Homo sapiens
MREDTLQISPQPEISVFGFGKRVMKDMVMKDTVMKDMVMKDMVMKDLGDEGHGDEGHGDEGHGDEGPRTLVMKDMVMKDTVMKDTVMKDTVMKDTVMKDLGDEGHGDEGPWTLVMKDMVMKDMVMKDLGDEGHGDEGPR

SEQ ID NO: 930518 - protein, 475 aa, Homo sapiens
MEVPEGRRLGTLLGGRSGALAWSWKRVQDTHRVQPGHRRSLRAHGHCHFSPLKGTAVLRVLKGTAVLHVLTGTTVLHVLKGTAVLHVLKGTAILQVLTGTAVLHVLKGTAVLHVLKGTAVLQVLTGTAVLHVLKGTAVLHVLTGTTVLHVLKGTAVLHVLKGTAILQVLTGTAVLHVLKGTAVLHVLKGTAVLQVLTGTAVLHVLKGTAVLHVLKGTAVLQVLTGTAVLHVLKGTAVRCMLKGTAVLHILKGTAVLHVLKGTAVLHVLKGTAVLHVLTGTAVLHVLKGTAVLQVLTGTAILHVLKGTAVLHVLKGTAVRCMLKGTAVLHILKGTAVLQVLTGTAVLHVLKGTAVLHVLKGTAVLQVLTGTAVLQVLKGTAVLHVLKGTAVLHVLKGTAVLQVLRASARGGRGTWLEPRRLDHGKDLRFLSVLSHRNPGLGKGCDLSGSASLCAMARAGDPVLLARRPPGSRGVRF

SEQ ID NO: 930519 - protein, 312 aa, Homo sapiens
MDQKNGSSFTGFILLGFSDRPQLELVLFVVLLIFYIFTLLGNKTIIVLSHLDPHLHTPMYFFFSNLSFLDLCYTTGIVPQLLVNLRGADKSISYGGCVVQLYISLGLGSTECVLLGVMVFDRYAAVCRPLHYTVVMHPCLYVLMASTSWVIGFANSLLQTVLILLLTLCGRNKLEHFLCEVPPLLKLACVDTTMNESELFFVSVIILLVPVALIIFSYSQIVRAVMRIKLATGQRKVFGTCGSHLTVVSLFYGTAIYAYLQPGNNYSQDQGKFISLFYTIITPMINPLIYTLRNKDVKGALKKVLWKNYDSR

SEQ ID NO: 930520 - protein, 160 aa, Homo sapiens [sequence omitted]

SEQ ID NO: 930521 - protein, 145 aa, Homo sapiens
MLNSSWLGSLPFLAAGPQCNCHTPSESPTPGGLHSALGQITSSLTGERCKQVTHSIDLTDRGLSSLVTGQKHGCFAPLDDCSSSLYSPKSPLVPKPWGLEDKSIGPVQVRFLHDSCMLSRGPYRDLSIRGLPVHHCWHLFTFPRV

SEQ ID NO: 930522 - protein, 222 aa, Homo sapiens
MAPSLTLSISSKGDVQKRADPPYMRQLNNLTKQNTGPSAAGLLEFAGGPLQTLFALVSPAEAAEQQILQNGKCCCLIVPLDPLEDAVCPFSDLNFHAGRTTTLFKTVRQGPLSLQKFPLPFFQICPAPRGGVYRGRQASLSCSGLHPVRASRPLCLPTQASAMGGALPPALLLPSSSISDCCASNEQGSVGMGPSKPGMGYNLLVCCLLRLLEKCSFRVGVS

SEQ ID NO: 930523 - protein, 138 aa, Homo sapiens [sequence omitted]

SEQ ID NO: 930524 - protein, 137 aa, Homo sapiens
MGSEQSLWVELILSSYQVDPARCPVLRYLHTLAGDYMIYFQPCESQELFGLPVEACHCDVHPSSCPPTSHGDDGTKRWHKGAEELQQLRRQSQHTEERRPGWPLRPVAECAQARNQLLLCWAIETWSCDKSHALVED

SEQ ID NO: 930525 - protein, 162 aa, Homo sapiens
MSTHCMVSPGPPLKTHCLSRHPLATQGSTRGLAGQGELEFVLLAVSWLIKSFAPDPGDCLMSPASIHGTVTDVCFTGYEPGTDLPFHIQISFPAYTMGCGNRQKVGDFPSSEETLGNVKIFELSGTKSPNSDANTCHLNESYLTEAWISVIPCITIIYTHNF

SEQ ID NO: 930526 - protein, 143 aa, Homo sapiens
MPLLPRSLPSVQVSLLNSGLICATSCCTASCDHLSGVSYSTGSIIPTCLAHAGIHASVHPINTSQTPITCYHPSKLGSAASFPVWLCKGHCKEVEGALCTSEVTVDYDNFLVHSDKMNGATEQCLRRSKSEETDVTPGEASNG

SEQ ID NO: 930527 - protein, 153 aa, Homo sapiens
MSLRRRQLCQHLDFGLLALEPGDDTSLLLEPCRLWCFLTAALEGGSRAPASISGERGPLQASGVPPDLRPVLLWQRMVFQLPELRHPSSRMMTRKNRWDAYTCSAIQEIISLFFPLNSERDTFKPECNLIKGVKAERTVGQHGGVETEHEPSA

SEQ ID NO: 930528 - protein, 143 aa, Homo sapiens
MASPKPMFFEGCALVLVVFKDWRSGWDLVVATVEQEEGERGVQGSSLSSGTAAHPSAGAPEHHTLGGEDELVWETGTQQSWRSSSGTWTKSGQNEPIFGVSSPSWEGDCKGERKLKAKVGAGAAAQPHPGSSVTHFPGGEASI

SEQ ID NO: 930529 - protein, 142 aa, Homo sapiens
MLQRVKSVTTNKGLIKITCFSGNTTKGKSRTTDKGPTKITRQRAKAELLEWECYLQGIHVFSNTSNTKLFSRVVAFLQLVMNMFLLKLSPGTHPSTYCFYESYCYLLLVPYITGVISVDLTIFLSFLGNLISLVTILVFSSL

SEQ ID NO: 930530 - protein, 217 aa, Homo sapiens
MCSHEEDLIVPLMSSHKLSGEQLWKQNPKDIHTLAQFISAYSLADPEKGTALSKHLPSSDSMSLKVDVEALENSPGATYIWKGGKVTRDSQPKEQGKGDLKKKKKGKLPKNYDPKLTPDPERWLPMQECSFYQGRKKGKKKDQMGKGTQGATAGASSELDARKTVSSPPTSPRPGSAATLSASTSNIIPPRHQRPAGAPATKKKQQQKKKKGGKGGW

SEQ ID NO: 930531 - protein, 164 aa, Homo sapiens
MGRQHNSISLSDVSATVMAVGYLSSESCPPYARQTTGDHDGTHYAADNNSPYPLWFTAVSRLLSLPALESPKVPCEEGSPQCNTASLPDRGQTASLSRTLIHSSSLGCTSQSGLLPLQPVFYRNISNFPLGQSPRGVGQAAMLAVLASLSVQPLEPGEPIPRRD

SEQ ID NO: 930532 - protein, 140 aa, Homo sapiens
MLWFLQTCRSTTLMILDKVWGKFSRLPGHWVLLWLRKGPEMPLKSQVLESGTPRACSVLYHPAAMLVPKGLDVYLDIAAGYSGPKGFSVSSSALELAYESCSPYGLDCHLSLLRDGEYFGFQWCGLWALKFRPLELAIPL

SEQ ID NO: 930533 - protein, 139 aa, Homo sapiens
MDQSSVTYYIEGFEESFNVWILSTKEFTFALILCFIYNFPNAICILTHSKLKTLNWIILRRPLAYKNNLYHHKLVCAILGKKYHIEKQEQFAAKLHFWNQPDYNVSGKTNFWIPELPGTSSHLHKQTESGGRLKMNYGF

SEQ ID NO: 930534 - protein, 287 aa, Homo sapiens
MIFRKLFGGQISRDLECPKDRKMWKHLELPRDPFNGVNQNADSDMDNEVQVEVVSDRDEELLGNKKAFREAPPITGPEAKWKKNGFMILAQGSPALCSFLTPDILPCVPAASAPAVDIRGQLRSWLQRAQAPSHGSFYVVLSLLEENKSFRQMSKQDKRAVREPPPSEEGWVTVRPEDVLGPQSAIPGVLGCVGQLLEPRCPISLAPAGEQGAAWSYRDGCRPSPAQAVMSPSVGCCPFPQGRNSNSLESRQRSCGPGRPPSPELDRLKQILAKRLLKICMAPGLRP

SEQ ID NO: 930535 - protein, 139 aa, Homo sapiens
MIVRPFRPCGTYCKYWPTCRYGDECTYHHLVSPWKAFPNCTFPEKCLFVHQNCKYIANCTKPDCPFTHMGRITVLPPNPVAIMPAPPSSSQLYHYFLASKETECHLYHPKHCRFNIQCTKPGCAFYHPIVTVLPLHTLE

SEQ ID NO: 930536 - protein, 157 aa, Homo sapiens
MFSWMVLMLVDVLWCLDIEESGPQCSTWVSLLVFRNQGLFSEQMNAASTGSFPSKYQVPFWPRVWIEILSWSQGLKWGSHYSDQVLCPLWLSWYPRCKTKSSHSSLSSPQVKGYLLDPGGVQLGVRGGVMPALPGLLQLLFQYVTCPAMYPLSLSLV

SEQ ID NO: 930537 - protein, 176 aa, Homo sapiens
MVFSDTFINMMAVQKGNLGLETPNRVPTGALPSGAMRRGPLSSRPQNGKSTDSLHCAPGKATDTPCQLMKSGRSGAEPCKATGAELPKAMRANLLHQHDLDVGHGVKGDHFGTLRFNDGTIGFWTCMGASVTTIAEGIQPEEQDVSSGTHIFKSKGCSFKAPFGSREQSFPDNQTC

SEQ ID NO: 930538 - protein, 221 aa, Homo sapiens
MPIAKFSWSGSSSNVSGEEDVKGFLSSRADKFQRISPRDKSLEDEELSDQPWEVDNDQLRAIIKADPLTTTREVAEELNINHSKVVQHLKQNGKVKKLLTSIGQWEGPSSSSRQGPTAPRTTNASKVEQIGLRSFVSPAIFSPTDYYFFKHLKDFLQGKHFLNQQNAETKAEKAFQEFIKSISVHKLETQNGHCKFQLKSEFEVLIWKSLAKLPGSHGWFL

SEQ ID NO: 930539 - protein, 134 aa, Homo sapiens
MPWNGCGHKVLRVVSTPLMHARALYYKNGKETSSNLKIFQIGIHRVCSRAGRSSNKNSLMMESQSRARQDLGCMLYSANICIYGTSKMGGDVMKLWAQDSKKEMCIPNMSESDDHLDSCPATNSLIHKPSSFTN

SEQ ID NO: 930540 - protein, 159 aa, Homo sapiens
MPNLHLVAKKAFCVCVYARVRALAHMHIKLQRPCEAAVISSMRSQQQALPEQSGNKTFTFLPDASPSIKSIPGGGKTLFVKPNSRKQSSACHHMREKGSKISGDSYKDTNPIHGNFILMTSSNSSCHRKTPAPNIITLESGVSTMHFGETQIFNHAFFY

SEQ ID NO: 930541 - protein, 151 aa, Homo sapiens
MAQFKSKSLKTKKANSAAFRLWPKAQKPWGSHRCKSWSQQNTMLQEEEANILLADQRGVMETSYLQKMVEPYYKILEAASVIHLWGPVKGSQQHCYLSLTPQTLLDLLGHMAQVAEQLAQQPGPVAEPSPILGPTQNYQPSQKMGQSNTPK

SEQ ID NO: 930542 - protein, 154 aa, Homo sapiens
MSGPSWFLLNQSIYKVAMVVCNIERLCNETLKSQNLFKILTVNPITVFRPKNEGGGWLINYSKIETELKVMFWLLGFLQAIIYKSNIFKFLLLPKENLKDRMLCLTLLYIPQSILRTRKGLLGQKMIVVLKDQKNSVIILKNKQTLRTSSAMLF

SEQ ID NO: 930543 - protein, 140 aa, Homo sapiens
MESYVAFQRSQWTFLKDNLKKEVEYSVIDCADEIEKKQSLSIQSFGIKHMQVVIATITIIYLQNFFIFSNRRNSILIKRYLPILSFPVTLGNYHSIFCRCEFGYPDTPPIVTLFSIVATPFNIPTSNVQEFQFLHILANT

SEQ ID NO: 930544 - protein, 173 aa, Homo sapiens
MRTNQCKKAENSKNQNASSLRKDHSSSPAREQNWMENEFDKLMEVDFRSWVITNSSELKEHVLTQCKEAKNLEKKLQELLTRISTYTSINSRIDQEEERISEIEDRLNEIKCEDKIKEERMKMNEQSLQEIWDSVKRPNLHLISVPESDGENIIKLENTLQDIIQENFPDLAR

SEQ ID NO: 930545 - protein, 168 aa, Homo sapiens
MRCEGDKGTSRELFLFHYLHSFFLRRSLALFTSGDRDTSKSWCLLPFCPSNDKLRNPGESDLGTAAILEFQPESDKNDSTTTAITNLEEKPNKSTEDSSLPSHAKPGAYPLNGMENRGTGIPVAIHSNKKYLIEYHAGEVDKFRKMQVVWPDAGSNCWHYSLTSYAEK

SEQ ID NO: 930546 - protein, 195 aa, Homo sapiens
MANLLLPFGRRLLFHLHHKHTWYFLLHGAQALLGEPNKQERKKERKKERKKERKKERKKERKKERKEGRKEGRKEGRKEGRKKERKAKKTKKKKRKKEKEGKKERKGGGGRKEGKPLYTVGGYLNWYGHYRKQCRSSSKKLKIVLPCDPAIRLPSVPEGNKISTLRRLISVSLCLQREGHSFTPGIEQARLERES

SEQ ID NO: 930547 - protein, 160 aa, Homo sapiens
MVTQAALQPPPLGLHWVRPKASTEMGLAQGTLQPLPGYWLCSLKTLGIYNQQIAKPARLVFFPSGCLTPWPPPPQACGEYYCRCLLKAQGLFSQLVVNAARTGIHHSGQWAPLWPRADPEIPSKSQNLELGTPRARLPLLLVSQWVAFPLSPLDLGPAQH

SEQ ID NO: 930548 - protein, 139 aa, Homo sapiens
MSRCPVVTSHSVEHLLCLVVGLLFSWRVIPLSIRLQRHGEVSKVLTSHLLAVRGQQITSCILTVLCRCEWGIGVAGGSFDGKTSKALSLAHRCPGMQRLTCVDYINYIKNTLALGLLVGLSQWGHLQETGRRTECKSQV

SEQ ID NO: 930549 - protein, 370 aa, Homo sapiens
MTDNELSALVVDNGSGMCKAGFGGDDAPRAVFPSMIGRPRHQGVMVGMGQKDCYVGDEAQSKRGVLTLKYPIEHGVVTNWDDMEKIWYHTFYNELRVAPDEHPILLTEAPLNPKINREKMTQIMFEAFNTPAMYVAIQAVLSLYASGRTTGIVMDSGDGVTHIVPIYEGYALPHAILRLDLAGRDLTDYLMKILTERGYNFTTTAEREIVRDVKEKLCYVALDFEQEMVRAAASSSPERSYELPDGQVITIGNERFRCPEAIFQPSFLGIESSGIHETTFNSIMKCDVDIRKDLYANTVLSGGSTMYPGIADRMQKEIITLAPSTMKIKIIAPPERKYSVWIGGSILASLSTFQQMWISKQEYDEAGPPI

SEQ ID NO: 930550 - protein, 148 aa, Homo sapiens
MDPKITLRIKILMALLGKTRKLPKIYGEVLCILHPVSSNGNILRDYRTLSKPRHWHWYNWQSLFSFQGSVSSLICPRQEDLTLPDLFSAFLGTNEGSNWGEETNQRFGDVSQVILRTADPVGTQVLVYNADGFEHTMKMPSQKSFKSH

SEQ ID NO: 930551 - protein, 169 aa, Homo sapiens
MQGVVRVAKDVRMSIIWSLPSEAFCLKQYPRNPECIQLDYVWKVNMAELWSLQLTAKWKQSCSSYVIDNFLVSAFPELSRGCKLGVKEQYWSSTIIRKEQQMKQQTARVVPVPCKASQGPQQSELQPFSSPRLLEDATVWHRGNNAERKQLHDILLTETSSKISGSREG

SEQ ID NO: 930552 - protein, 170 aa, Homo sapiens
MSSSRFINAPISTLYLAYLLRDCKHTNQHPVKTDQSALCKTDQSPSVKWTNQQDVAVTLTTKVCSFTPEAGETMNLPGGMNNSRCATLRIVTLTVKVCSFTPEASETRNPPEGRNSKQVQTLEGTNSGHITFKNCNTHCEAILRGHMENRLQARFGPQAVNLNIFWFTIG

SEQ ID NO: 930553 - protein, 163 aa, Homo sapiens
MISYSADLRGLSSKGRNVSTRRQNNDSTELDVKIATGHFGFLMLLTQRAKNIPVCILTDVIDPDYQGKIGLLLHNGEKEEPHFVVQAGMQWHDHNTLQPQSPGFKQSSHLGLLSSWGYRSTKERPCEDTGRRQAPTSQEGSPHQKLSWPAQWSWTCSSRTVRK

SEQ ID NO: 930554 - protein, 152 aa, Homo sapiens
MQSPTIIAFLTPRPWILCAMWPLLEDHVGVILAIHVCHFTLFSASSNDMKLKPSSVITYLILGSYEGAFFCVKMGVTTGTWVYSLKVVSRFQKVEEEIKKHGSNNMGLSENLTDCAAAGNGDDGLIPQRAENLKISNFLGRRMKSIIDLTCE

SEQ ID NO: 930555 - protein, 151 aa, Homo sapiens
MVDTPPPSSSIPGQSQTAALAARFSSQWILACWALWAWDPLSQALEEISWSAGCEGHGESAVSGQECTVPPSTVSHSFPWLGEGNPLTPCAFQSGPSAAGLLEFAGGPFPTLFAWVSPAEAAEQQRLLPVLSSGSFVPEGHLLDASQGSPV

SEQ ID NO: 930556 - protein, 280 aa, Homo sapiens
MAQRLLSLSSVTCLLPLHFPQALDTVVQSNMKHQPFIVVNKHNVQVEYKGETKSFYPEEVFFMVLIKMKEIAETYLGKTVTNAVVTVPAYFNDSQHQATKDAGTIVSLNVLRIISKPTAAATAYRQKVKENKVIITNDKGHLSKEDIECMVQEAEKYRAEDEKQKDKMSSKNSVESYAFDMKAAVEDEKLQGKINVEDKQKILDKGIKIINWLDKNQIQKKEEFQHQNLEKVCNHIITNLYQSTGGTPEGMPGGFPDGGAPSAGASPGPPLKRLTKSAQV

SEQ ID NO: 930557 - protein, 126 aa, Homo sapiens
MDSTEFNVKPHKCCALPVPSTENLHWHCLCQEMGVGWQLCFKTVFPALSNDSFNDMKLKPEIKSTDTPPHTRISNTGCSLKHFCMAGSFFLGMNSSEHNLVGGVGSALQTQVQELDTEHCGQMGHA

SEQ ID NO: 930558 - protein, 153 aa, Homo sapiens
MGPQWASSRAPRETCECWQWHVEQANPQAARWCIWVLAVAGKAGYSPGSWRGFMNASAGGSKALRSACFRALCFVATLPGLLDPCSLGYRTLSGLEYWGSSHTAASSWHHNTEALQVNVGECQQGSRTKKNGTQISLSRHNFRSFIPFQQAKW

SEQ ID NO: 930559 - protein, 196 aa, Homo sapiens
MRFGWGHKSKPYELGSSSRKLPMLEESWDEDFSFPNCSHEDTFSSRGFMLAEESGLAAIKYEGFKLEWDSVEGIQKAIMDLVDEFKDEFPTILRLSQSNQAVCVNAVLKKVKNIFQEEESIRQNREESENCRKAFSEPVLSEPMFAEGEIKAKPYRSLPEKPDISDYPKLLANKQSNNIQVLHSVFDQSAEMNEQI

SEQ ID NO: 930560 - protein, 140 aa, Homo sapiens
MFSRRNTGKTLVTRTQGTKIAPGSLKGRVFEINPKLTELSEKQEFSYWYAGVYQIHKLAGSLSIHSLADSPLQTFNLVPFSGFVHDLEEVNFLFLDLMWIPNFEVAAKQLHDMWVPMQNENVRPSSPKIIKNCKMAIPEH

SEQ ID NO: 930561 - protein, 152 aa, Homo sapiens
MLGKIGKKPEEGGIMLIRSLGLHLHEWIDADIKALGISSWPYIPGQYPQTEPLDLSQCQTVPHSSSRHQPCMANPISSLYHVQAIINSPQLQAAPTVGRPHWPLASFVSQSNAGCIFLGLLVQPSAVPSTGYPKFLAVPCWLQLPQASDAPK

SEQ ID NO: 930562 - protein, 189 aa, Homo sapiens
MEHISAPAERDPPPRSGSTAHFRSCHRLSDCQRPLTAPLWQVRQNYHPDCDAAVNSHVNLELHASCVYLSMAFYLDRDDVTLERFSRCFLSQTCAVAASAFLTSGNQSVNTGESGLQAMECAFHLEESVNYSLLELHYLAMEKGDPQLCDFLESHFLNQQVKAIKELSGYLSNLRKMWATGNRPGRVPV

SEQ ID NO: 930563 - protein, 158 aa, Homo sapiens
MKSNGETGERHHKEFKFNLSQIPEGEVVTAAEFRIYKDCVMGSFKNQTFLISIYQVLQEHQHRKGSKPVHQELRHLLPLSEGKGEKGLLYFGNGALCQPSGVSLIVLIVRLQKCATEQRKFMGPQSDSVAESGWKLGSPHPRICTDPAAIFFITDPDL

SEQ ID NO: 930564 - protein, 214 aa, Homo sapiens
MAGKWKKAVLALGKKDLTNVPTFLQSSLDAVAKPASDSLSVLKLFAAPITEEPHRQLRKHSDGKVTVFAELLVARGLHARPIDDEELLLEEQMLVQLLLSEAQSSGSIAIHRVTAIACMEIPKLHGRHQGPGVTVLSLTSYGRTIECSLQELPSPQMQALGPLRVSRNGNSADGVFAAKANILKARGPKQLSGVTSFSSKRLKRLHISAPQTPH

SEQ ID NO: 930565 - protein, 147 aa, Homo sapiens
MPEQRYRWHVDSPEEIAHRSQFIPSLCWVSGESGAGWGQDAEHTTGAPKTNLLTVVQDKSSTEGDAAASAKAAVTADKGSLFTVTHLHVPPPSIFAPVGQGITSGGSVSKHMLNQRVQWGGLSKSLLDHITLEGHYQHVIANNTIIM

SEQ ID NO: 930566 - protein, 264 aa, Homo sapiens
MHLVVHFAWKEKWPDVGLYTDSWAVANRLAGWSGTWKKHDWKIGDKEIWGRSMWRDFSEWSKTVKIFVSYVSSHQQVTSVEEEFNNQVDRMTRSVDTTQPLSPASPVIMNKVATVTGMEAKKGLTVLAGVIDPDYQDEISLLLHKRGKEEYAWNTGDRCLLVLPSPVIKVNGKLQQPKPGRTTNGPDPSGMKIWVTSPGEKPQSAEVLAEGKRNTEWVVEGSHQYQLRPHDQLQKRGLEGEKRDLKEPKEGETGQKGGSCQCRF

SEQ ID NO: 930567 - protein, 159 aa, Homo sapiens [sequence omitted]

SEQ ID NO: 930568 - protein, 215 aa, Homo sapiens
MKDFHLLLMGQPVVCSLPDPRSKPWVIGNPPMKSNGETVEYDKEFSPRQRHHKEFKFNLSQIPEGEVVTAAEFRIYKDCVMGSFKNQTFLISIYQVLQEHQHRDSDLFLLDTRVVWASEEGWLEFDITATSNLWVVTPQHNMGLQLSVVTRDGLVGRDGPYDKQPFMVAFFKVSEVHVRTTRSASSRRRQQSRNRSTQSQDVARVSSASEQDSQM

SEQ ID NO: 930569 - protein, 215 aa, Homo sapiens
MPFGFYFTSDQKLATALVASVSLLSLTVWAAVYDICAYAVETLFIGLIDMGSHVEQGENRTQEGHEQETGKRRGAKVDKNWQENLKRQATGDQSNCNCNMRRLLTNQHCLLEPNSHDVKSPTHMQDHIGFQLVMVGVFTLWRSANITNQILFYGLFIVRTRGLQKLSVKGQIVYILGFVGHTVSVATLNPVVVVQRQSWISHERGYVPGFIGKAR

SEQ ID NO: 930570 - protein, 186 aa, Homo sapiens
MPLFQSSLQLSTFRILLIGAILAWKEQDGEVNTELQGIFFNSGLQHHPSPRAPDFIHSLTSKVVEHLTVWSSLRQEQANGGILGDVAGGSRHCTIRDAFLPNQIQQPVQMSLLLPQQNPLKWQPMTQTSHLLHKKPPTLCPAVFIEADGVQAESCPSHWGPGNCGLAFLTPEVTKMENKPKISWQS

SEQ ID NO: 930571 - protein, 171 aa, Homo sapiens
MESTMSDISYCHNFAKVVSIVVSRGHLAQPHRLIKEDVAAQRSDATCPWPHSLSGREPGQSLGHSQYCVHKTTEYMPEKAGAQIPEITTDMWPPKKEVLWIEFTLSLHGCKGRACPTAQALGAGPDRCSNGLMSHHTLGASRGSVEPRVRYTGDLQETGNCMDLGGLIGAQ

SEQ ID NO: 930572 - protein, 135 aa, Homo sapiens
MVAVFAPWELTNTTNQSFFSPGDLVVKHLPAHNCFWSIVGLDHFLRPTLLYVTLFREEKLGKRRENQEKCGMKLQTDYFKSRHSAGLGSGCVSDALFLGRTQLSWQQQHMKIPNLAFHITWRKLAGQECLSNAGN

SEQ ID NO: 930573 - protein, 140 aa, Homo sapiens
MGTFSAVWLPLQGKQKVGTAGLRLGFGKRETVSWAKIWKLKEGVRRKNQLRGKGPACHGAQVVLSKQAQDGVLGEAIGAKHQGAGRFYKMPPDTAMAVDRVFLQLLVLKVCVWPLRPVHGHHAQLGRLCTAQYLPGKGFG

SEQ ID NO: 930574 - protein, 144 aa, Homo sapiens
MLRGGKVILEIAHQIWQCEGLYDLMRLMLAWLTELVYVEGWGRGKMCKCLALPRDLLNGFDQNADSDMDNEVQAEVVSYRDEELIGKWSKGHSYYALAKRLVAFCSCPRDLWNFELERDDVGYLAEKISKQQSIREVTWFFLKM

SEQ ID NO: 930575 - protein, 184 aa, Homo sapiens
MLKKTALHIDDNVVLQNVDPNRGHFAISHVSFGQSQPTCFQNTVEVLWQDRSKAINRPMNPSGLRSWASLNGTPAGKCKHESKSTEPRLVGAQDEGIQVLRFVLCETAFRCSKVRQSARYGRPLSSTLSKRTSSGTSTINLCRSQHPDYYQHLGSVCFECLSLSSLPNSYQLKPPRHAHKMSCH

SEQ ID NO: 930576 - protein, 135 aa, Homo sapiens
MSRDIVGCYNWVEWSVLRRCSSNPQCDCVWRQALCGEEEETPGLSLSPHNKEKRPNEDTVRRQSSAGQEEISHQKPTQLKPNEGERRSSTSRCYFKAANEDPTVGSSRRSTDRPGSKIATKSVKLSPEAHVVAYQ

SEQ ID NO: 930577 - protein, 134 aa, Homo sapiens
MASSKKHSCIRMMFIHTNSTGGHQPHADSSPGVTPVLLSSHWQMKLSTPEPSWGPGHLWKPEQELELKLELQLKPRPGPCQDEHLNQQTSGKGDLLPGCEWATSNQWKTWTEQKDSCLLSKREFCQKTVFGLHL

SEQ ID NO: 930578 - protein, 162 aa, Homo sapiens
MKLCPAHRNMSSWGARWNMHAKPSLALGASALAPILAVLEEPFGPPLHCGSPFLGWPRPEPAPSTCGEVWRERRGREPGLRGACGPARVLGGRELGGPLTQSGRLAPPARGSEGLSTWASSCLPSPIDRPKAEKCGHTARDWQATPPAARVRDAPGYDMDEP

SEQ ID NO: 930579 - protein, 225 aa, Homo sapiens
MLHEAATNRKQTNKTNISTQNNNLALLQNPNDHLAYMPEEIWGLKWRRVGSSAGATAPALLSRPMGLRLPVPARFRSPASFTQWIPHWGRKWSCLSVPRRAPALLSPWMVDGTGRCGAGGGAKPLTARGRRGQLAAPSAGPAEPTPTRNSRWPASAAPSPSSRPCFSFHTSRQAEGAGFGLGQLRKGLPQCSGGLKGCSSAAKVGAHGKEVPRASEGCQHAVTSH

SEQ ID NO: 930580 - protein, 174 aa, Homo sapiens
MPCQSLSVPPARTFEASHALVSSHPASLAVGTPALLPALPCPGISSAYPGLPFLTPFLPYCLHFLESSTQCLLPEERSHNIYFARYFRLNGQNIEDEDSPTNLSFWLGHWTSAFGRQGKVRWACSLVDLFEFHSTLASILQTYKLFLTLSHSSHPQCGVWKEEEPEKNVCEVLA

SEQ ID NO: 930581 - protein, 139 aa, Homo sapiens
MSPNYANWTSCKFRLSLTTCDCSDLDLAHLMQLCCQCKLHIRFHIKNNVKCQGSRPGHGWIHPFPKKKADTTVGISKRKRFHIGNLVTKFLLKLEKQGKCGVSRNPELQKAATSFTGSSAQCVILVCAIYGNPFTNSPS

SEQ ID NO: 930582 - protein, 180 aa, Homo sapiens
MAPSETVANHDTADSPKDPPPPPFFASRPITRLKSQQASKGKVQSVTHEYTTLQKNYLHFLIYISRNPGNMHGNGEWFVRGVPASLKSSMIILLNRSDLLVGTTDIQLENLNPVGIIGFWDGRSQDAAVIPESCQRQGGHSYHKKQQRQSKNQNSLTYVNLRHLQINHGVPRSETVRKPI

SEQ ID NO: 930583 - protein, 171 aa, Homo sapiens
MYASVCMHCLRRECATWQVDPLAPVKELQLMVHGAERNCPAEPCQNHKITYGQPLSFSVKGRATLNIRLGHLAPWFFYLTSASQWLCLWTLTHVLWTRVVNHSRSSLDAVAKPASDSLSVLKLFAAPITEEPHRQLRKHSDGKVTVFAELLVARGLHARPEFLVGFAVISS

SEQ ID NO: 930584 - protein, 136 aa, Homo sapiens
MYAECKSEEGLVASTQISEDAWESLGFQAADGCRGGAPQTASLLGQCRWGIVGLEPQHRVSTRALPSGAVGMGSLCFRHQSGVGTGSLHFETGKAKDIGLQPFSNPHETIPIREGPSMVKKETKCLKKKGFGILGA

SEQ ID NO: 930585 - protein, 134 aa, Homo sapiens
MMSPKTQRGACHGGSGVRSIVLNPPAYQRAPGSHPCQRGRTDDLGETSPQLLLGSGHSLSLEWTHTALMRPPKRQDTSQATAAALRGKRTSSPPGGSLFLSERRGAPPSTCQSFIRGRMEEAAVDRFAHTPGWL

SEQ ID NO: 930586 - protein, 239 aa, Homo sapiens
MGGADPETPPAFSDLGLGCPMLALIGSIGHLPAKGPFEGNSTVSALGLLHTEALEERGRKSLSQGLCSQVLGFLICQKEKRQRKHTHRALELSATPWFPALTGPQQHKAAQGTAGKPARLGAPQGPLSSHLQGSCAMEFSGGALETTGPVAPQPFPFRVLKCPGLVEGWAQERGKWQQQCANSLDIECEREEWRLVLRLQKHKPAWSIASLSKTGVEDEKRATGWEGNLCGGGALNMLP

SEQ ID NO: 930587 - protein, 146 aa, Homo sapiens
MAAFSELLADKSQDAPPVKMEVNPEFEEGHKRNGDGKSHLTKINLDKSSPTTTDPPAPKIYPFELMSKPFQTGPSLGMLTHCNPSSPSYLSVTLLNAGNKNTLTEVILMSDAGSEPLFYVALILKSLNATEQPLSKASLVQDFIVA

SEQ ID NO: 930588 - protein, 263 aa, Homo sapiens
MHIAGATGASRRISRAVESHGNTADKNDSALCCQRSLPVCEEQGSQFLAPLDQGSPTSRLQTGSNLWPVRYWVAQQETGRRRRGRGRGRRRRRRRRRREGEEEEEEEEEEEEEEEEEEEEEEEEEEEEEEMNQQGNIIATFEPFPFKFGIHHEGPIPGLVPNWGIFGSGHSLTPVQGLSPTTASSATVDLCCTKAEDPEDPLIAAMSRLMLRRTPTVMSNTSQTQPPMCGQIKKLSQMVEENLRKAGQPVTASEWETFLSIYP

SEQ ID NO: 930589 - protein, 175 aa, Homo sapiens
MDYYKKLVPEKWDIPMKIPENVEAALKLGKEQRLEQFGGLRRRQENEDTSEATGPEGASCKKPWQLPCVLTLHVHREQELRLGSLCLDFIRFNETPGWPGRCLLQEWSPHVELLLGQWGREKLEPPHRVSTGALPSGAMRRGPLYPRPPNDTSTNSSQNASGKAAGAQHQPVKAA

SEQ ID NO: 930590 - protein, 144 aa, Homo sapiens [sequence omitted]

SEQ ID NO: 930591 - protein, 165 aa, Homo sapiens
MSPKHEIDSSSSFPFLNLALTRTTEVNGTSVGDYKISLPFPWTHSTNPGQAGNTKGLQTSCLHTLSSWVGNGKRLCRIVYQIAVAPAAWGQKATDRHGRRQTAGLKERKAKQTMHGGKMAAPVPANMSPWFKCGFEGKLRSPNRPSKMRLSYVLIPEPITDHRRN

SEQ ID NO: 930592 - protein, 222 aa, Homo sapiens
MSSRCCVLLCQWQWKKRSPRSSLTMAPACEKQLCWDNALRAIFPSIIGHPRHQGVMVGMGQKDSYVGDQAQSKCGILTLKYPIKHGIVTNWDDMEKIWHHVFYNELCVALEEQVVLLTEAPLNPRANREKMTQIMFKTFNTQAMYVAIQAVLTLHSSGCTTGIVMDSGDGEMATAASSSSLEKSYELPDSQAIIISNERVQVLCVDRWLHPGLTVHLPADVD

SEQ ID NO: 930593 - protein, 164 aa, Homo sapiens
MIILSELHVAKRDHIVSKAWNSKDSNPVAQLYVWRKQVLDWDCQARKKTQSMDKRFRGSEDRFICVEGLSQGKALALSFACVSRWRPLNFQWIQSLTKDNVLFSSPPKEEEPVRNILEKFNTISGSKRSDNENGYNTNATMTPSLKKKAKRLCNFDDGWKDTYY

SEQ ID NO: 930594 - protein, 310 aa, Homo sapiens
MTTAILERLSTLSVSGQQLRRLPKILEDGLPKMPCTVPETDVPQLFREPYIRTGYRPTGHEWRYYFFSLFQKHNEVVNVWTHLLAALAVLLRFWAFAEAEALPWASTHSLPLLLFILSSITYLTCSLLAHLLQSKSELSHYTFYFVDYVGVSVYQYGSALAHFFYSSDQAWYDRFWLFFLPAAAFCGWLSCAGCCYAKYRYRRPYPVMRKICQVVPAGLAFILDISPVAHRVALCHLAGCQEQAAWYHTLQILFFLDNCLHLAVFSDVLFTHIPTLHEVGNIFPCSKAVTLKLPLLPVTPATSPTLLTTL

SEQ ID NO: 930595 - protein, 154 aa, Homo sapiens
MQNDEKIDKIKELFLSPAKWPTGKSNHDTNFTYRMLKNCAWDPPALRTSRKNPGSYSECESQVYRVFLPKRSRACLKNSKLDELRKFNRSFPETLRIKPWTQFWPMRHKENLLVMALEKHLLVKETVYGPFCFILPPELNANVKVGFEAVILRP

SEQ ID NO: 930596 - protein, 228 aa, Homo sapiens
MLVCIRMAVLLRAVLNSELMDENTLGPVKAARREAVPCKATGVELPKTMGTHLLHQCDLDVRPGVKGDHFGALKFDCSTGFWTCMGPVGAKVIVTATMQLLLHQPNTWVWSGESSCGMSGNLAGDQESSCLTGVTSWAATYWHRTDDDTGTHIKGHSSNHKTTHPTGWPNLDFCPEEGLWQDEQPQPVGSSPHSLIPLDFLRKWRVWACGTFEHGYQGHSNLPENMFS

SEQ ID NO: 930597 - protein, 934 aa, Homo sapiens
MNKILKMIVSFTIGFQNMVKNTTCDWSLTRTSPERLGTRALTGEDCKCSLRAQFCSMLFFSWQFDCTDLWETCVRCFGDLQPPPANSPVLVHQINLLPLAQETGLFYVDEIIIADTNLFLEGCSLSKTGHPSDKVLLGAHPNPDVNTLFLTCHSSVPTEGTEEGSGLVLVTTQRRQRTSPPLGGHFRIQLPNTVISDVPVQISAHHLHQLLQNNADDFTSRYLNASDFTVKEDLYTCYEHVWTLSWSTQIGDLPNFIRVSDENLTGVNPAAATRVVYDGGVFLGPIFGDMLATANQHTQLFPKHLPIFCRVDLHIQYLTEVFSIEPCCGSLLGGTILSISGIGFSRDPALVWVLVGNRSCDIVNLTEASIWCETLPAPQIPDAGAPTVPAAVEVWAGNRFFARGPSPSLVGKGFTFMYEAAATPVVTAMQGEITNSSLSLHVGGSNLSNSVILLGNLNCDVETQSFQGNVSLSGCSIPLHSLEAGIYPLQVRQKQMGFANMSVVLQQFAVMPRIMAIFPSQGSACGGTILTVRGLLLNSRRRSVRVDLSGPFTCVILSLGDHTILCQVSLEGDPLPGASFSLNVTVLVNGLTSECQGNCTLFIREEASPVMDALSTNTSGSLTTVLIRGQRLATTADEPMVFVDDQLPCNVTFFNASHVVCQTRDLAPGPHYLSVFYTRNGYACSGNVSRHFYIMPQVFHYFPKNFSLHGGSLLTIEGTGLRGQNTTSVYIDQQTCLTVNIGAELIRCIVPTGNGSVALEIEVDGLWYHIGVIGYNKAFTPELISISQSDDILTFAVAQISGAANIDIFIGMSPCVGVSGNHTVLQCVVPSLPAGEYHVRGYDCIRGWASSALVFTSRVIITAVTENFGNVSAAVCGAPCRVLANATVSAFSCLVLPLDGNFTFSLPELPHKCLANGPMEPSESVGWVDVAWQP

SEQ ID NO: 930598 - protein, 151 aa, Homo sapiens
MEPTVKKILVIIEATGGDRIQEECADEEEEDVCLGLTVFVLLQLHSSGLGSGAGLESGNRKYYNILNFVRQCGVRTTAVCAKPGGSSKKDEKLKDLREAEYKKGVRRLPFLKSLDLFPLLPGLLLLVVGVLFNYLYVLTLVFTSNVAQVSK

SEQ ID NO: 930599 - protein, 138 aa, Homo sapiens
MAPGPIELRAHAILVSDGGELRIGSEDKPFQGRAQITLYGSSYSTPFFPYGVKFLAVRNGTLSLHEPERRRHGAVLQLTYCSHLASFSVKLCPHGGRNGSPVTPDERECLFPNGCLTSEQISTFPHHRLTLLLRFSSP

SEQ ID NO: 930600 - protein, 285 aa, Homo sapiens
MKGQMYLWNTYMLDTVKGIDIVTVNEHRATAHALDTVLALEDAVDWNPGDEVVIISGTGVKGAKPMEEIVTVETVQDTDLYLKSPLRYSHNFTENWVAGEHHILKATVALLSRSITIQGNLTNEREKLLVSCQEANAPEEEPSQVQLKGVQFQVLGQAFHKHLSSLTLVGAMRGAFSGNEEQLHVQILARHEDIRREQETSNSESFIQGCTVRNSFSRGLSMCGTLGLKVDSNVFYNILGHALLVGSLHKLSGSVHATYSSLATFSLPDKSFCLSSLSANQYFLI

SEQ ID NO: 930601 - protein, 148 aa, Homo sapiens
MPCLLSAFYARCGGYHDEQDGMNFDFMGSYDLLGMSVKLLTSTSAPESALKWSLPETWQGVEEGWGGYNNTIPGPGDDVLILPSLLGIARSRFFVCLIVVVVVFALSHLSKVTTIDLGLNGNAMSSTLISLKSDEENSSIAPSLDLKQ

SEQ ID NO: 930602 - protein, 191 aa, Homo sapiens
MAVQPRWSQQGSMPVPRPRLFLPVITTHLLLSYLKLITKHSRNLHKKVVSFSATFLADCLRPYIPDTICASFIIGEGHTGEMEVLIGPCSKVSIRFLTVMMKHDNIGEFEIIDDNRAAKIVVNLTGRLHKCGVISTRFDVQLKNLEKWQNNLLPSHQFGFIVLTTAAGVMDHEEASQKHRRENPGILFLEM

SEQ ID NO: 930603 - protein, 199 aa, Homo sapiens
MPSRSQRDLRDLMIRSPLENETTDQKNVQLPWPEKENIKFPKEAMRENSKSESIVDTGNSIRIALCLYVGLEVNKQDPLMGCHGHFKSAAQEEVIIFQNTSEQFKPVWKFWATNSDLHKYFFKKPHKHPKPRFTNPKISECWIKGSHHQATESLGAPGISPVVWNPGSREDEVVLPLGRTEGSVPAILGPLVKEVRIII

SEQ ID NO: 930604 - protein, 148 aa, Homo sapiens
MPWSHLIKEEKAVNVLEHSCCGNESHHRAWLLWHHTETVAKLKGRSGVKESLADGQEKGAGKKWRKPHSVELRPGSANSMPQLCKGISSLPVTDSHSRVVGVCQSLQLVLHMERVKVKGNVRKLSLTLEGIFFYRFPGKALFPFNRLR

SEQ ID NO: 930605 - protein, 135 aa, Homo sapiens
MGHVCTKTMKKAAWVIIEKYYMHLGNDFHTNKHMCKEIAIIPSKKLHNKTAGYVTHLMKQIQRGPVRGISIKLQEEVRERRDNYVPEISALDQEIIEVDPDTKEMLKLLDFGGLSNLQVTQPTVGMNFKMPRGPV

SEQ ID NO: 930606 - protein, 138 aa, Homo sapiens
MTARVALRAAWASHALLSPLAIMLILKILKSIFMQRTLSTAGVTPIWALDASRLSQLQKAAALRREEEKRRAGWAGTNRFSNKWAKNYLTLLACDQHAGSRSRVRRLDAGWRGARAVRWPAVPVPGACVITQSPNWCR

SEQ ID NO: 930607 - protein, 184 aa, Homo sapiens
MEMANPFDHEGLRDPVLVLLWSCTWALVLLPPSGSMDAGAILFSTTYPAPCSDEDMDEAGNHHSQQTITKTKNQTPHVLTHRWELNNENTWTQEGEHHTPGTVVGTRHGGTSGLGLHLLMLASVFCDARPGSLPTTFLITLCKLDSNLVLQWGTDGKWKEGRKGGKDVPAYFQFLLSSFQQKRQ

SEQ ID NO: 930608 - protein, 140 aa, Homo sapiens
MAHVYICNKPARCAYSSVLAVVDQPCLIMDPTMAYCSTSVSATKWDNSWASRLLAWMPVFAVVSHWNWFGACESPYMSEFVEAPSAESFLNLLGGLRIINHVKKCLISAKLFVLDAVQVKEDLQVPCEEEVESLDLGKEG

SEQ ID NO: 930609 - protein, 157 aa, Homo sapiens
MTYLQVHFCYSVENEWAAAKSGSREGMPQFIAEGRAYPVRLPFIQFEYNKKLEEFTHPGFQWYENPGLTGLDYREEKLLGCRIERTEVEEKRDRTDLMQHSNLWCDFHHRAAKPGMFDPFGALEGECFENRSLCFANHEPEIFQASLDASKLQSYIK

SEQ ID NO: 930610 - protein, 144 aa, Homo sapiens
MSYRPFSCCLKGRRSSKCPGGNLNFLFNRTIVVSPGGSSPLSGTETSRPAEHNVMERVEHKVLVPDESPPLSAPSREFWGSGPSAAGLLEFTGGPLQTLFSWVSAADTAEQWILVNSKCCCLIVPLEVLSQRSTRPFSVKGHPN

SEQ ID NO: 930611 - protein, 143 aa, Homo sapiens
MGSEPQYRVPTGALPHVVVRRGSPSSRCQNVRSTDSLHHAPGKAADTQCKTVKAAKKWAVPYKATGVQLPKTIGTHLLHQHNLDVRHGVKGDHFETLRFNDCPIGFWTCMETVALLPIVKIVTKVPYYDQMVTFKNIATKVFL

SEQ ID NO: 930612 - protein, 151 aa, Homo sapiens [sequence omitted]

SEQ ID NO: 930613 - protein, 155 aa, Homo sapiens
MGQAKSKFANYLSLVRPLLRCGGVIVSTQYLTSLFHLVEKYSPWFPEYGTMNVKDWDKVGSDLKPAQQEGHDIPFSFWSVWSAIKTALEPFHTEEEEEEFQDDIDKFNNQESDDQQSEPSQSSFKKGEKWEGSHSPGTRNRGFGCLAVSSNYFFG

SEQ ID NO: 930614 - protein, 163 aa, Homo sapiens
MFLSGVFSPFIFQLLNYFTEWLGFLGWDLTLFLALDERPCLPDSMFHDFHFSHFRLVENHYWGASGLIWRLPTSEQYSHLSNHASTGDVNLLTSLEVYEFLNSSLPKDPVYDEQFALLEDTIPNHFLIIIYSEQVKLYSLLEKYIIKSSEKNFKSLYTLSLFL

SEQ ID NO: 930615 - protein, 139 aa, Homo sapiens
MDLVLVTIPSNLSPVAGVTTKVAAGEFLQGVLQTLLSGHWLQFQRQKQMENLEVGQCAFFLIEILLSLQDLTLDTTIDVSVFSICHISLRNSPVLLLRSKWICSNEPTIKDNSWVFKCEFNVNVGLRWDVAAKFISAEF

SEQ ID NO: 930616 - protein, 140 aa, Homo sapiens
MLMVVVVMVMVLVVELEPTCELSMEGSRLCNLYENLMLMPEVEQSHPKTIPSPTSTPIRGKIVFHKTSPWCQKAMLAPKPQDALLPTLLSLFSKQRSLSPYSYHHRPLHGISPAQQLLVAESRKSSATLSYQSSSCSPAE

SEQ ID NO: 930617 - protein, 206 aa, Homo sapiens
MFICPQEMMCSLLKTALQAEITQVLVIQEIMHHHHEIILTVITVIPVHVMTIHQEAIAIEMDMIMIMTIQIIQVEVPTEIHMRVMITHIVLHLHKGPHHFMLEAVAIMITAAHVTDMVEVETVTQAAEVISIQVVLIGLADEKEGLPLLQKGGTLLHVIPTAVQAAEHQEVVAVEEADLIEGEAEADTRSKQNFGPKPQFKETNEK

SEQ ID NO: 930618 - protein, 136 aa, Homo sapiens
MKAGRGTWKNYTGYVFWPPSFSRAGCFLPWNIIHSKFFSFWTLGPTPFVCQGLSGLRPQNEGCAAGFPICKALGLRLASLLLSLQPAYCDTSPCDHASTKAVLLQWKPGAKTATNKFDKQRACQSGGGEMQKNLHF

SEQ ID NO: 930619 - protein, 257 aa, Homo sapiens
MCARPHKVDRCVVEPKRAVSREDSVNPGLHLGVKKLFVGGIKEDTEEYNLRDYFEKYGKIETIEIMEDRQSGKKRGFAFVTFDDHDRVDKIDVQKYHTINGHNCEVKNRGGDFLNKRCSLLDHREVMEVDLVILWVMEETLEVVKVILAVMEALVEEEVMVVEVVVAEVVMEEMMVDRMDLEVMVAAMAVVLVLVVDGAMVVVDQDMQTKVVDIVAVVEDKMVTMKEKFLAVITMVVLGTIMILEIIVDNSNQTMEP

SEQ ID NO: 930620 - protein, 671 aa, Homo sapiens
MPISPAAREWGKFAGEFVFGQPHEHMNDKNEKQTYCYGESLKGLDRRSNQPQHSLKPKPNPEQGSTLFNSVKSERCEESAKEKFEASRGWFTRFKERIISIHKNAREMETHGVGCDLLEEKKTLMSAGFMCCHCSDTLVIGPVGPEPRPSHLIWSPFIFPGVCDGVCTDYSQCTQPCPPDTQGNMGFSCRQKTWHKITDTCQTLNALNIFEEDSRLVQPFEDNIKISVYTGKSETITDMLLQKCPTDLSCVIRNIQQSPWIPGNIAVIVQLLHNISTAIWTGVDEAKMQSYSTIANHILNSKSISNWTFIPDRNSSYILLHSVNSFARRLFIDKHPVDISDVFIHTMGTTISGDNIGKNFTFSMRINDTSNEVTGRVLISRDELRKVPSPSQVISIAFPTIGAILEASLLENVTVNGLVLSAILPKELKRISLIFEKISKSEERRTQCVGWHSVENRWDQQACKMIQENSQQAVCKLGYGCPLAIAAITVAATEPGKGYLRPEICWLNWDMTKALLAFVIPALAIVVVNLITVTLVIVKTQRAAIGNSMFQEVRAIVRISKNIAILTPLLGLTWGFGVATVIDDRSLAFHIIFSLLNAFQVLHLSSGLLPNSGRFGIVLSDEYQVVTSLWCQLYTTHAPQQASGVWNHPGSKGTECKFFLLLFLYYQYLAM

SEQ ID NO: 930621 - protein, 180 aa, Homo sapiens
MLNNSCECGHLFLVPDLTGKAIFSSHQFFPIQYDTSCESVIHGFYGVEFNWFCKRYKGNLFDYLPHCQIYFHRIMLGLTETMALSDLTHDQKPESSKGQSCAHCVRYNFCHLPGRTRGTRRRATCLGRVSPGAQMTWAFSKSDRRNATVGLCIEVAGDFPVPVRPNFFERRDILRCSVSL

SEQ ID NO: 930622 - protein, 153 aa, Homo sapiens
MVGEKATFWARNRNVCSHLEPGKSLSQSCELCCLELGELWHKHSLGWPADISLGCVHPKSTGSKPSTASGLVQELQSLWPRLPFQFIYNPRVCQFMVVELARTQVLTTDRDNSPLARAGLIAPSMGASLTLSCVAFHCLVLKDGLPQPFLPGM

SEQ ID NO: 930623 - protein, 147 aa, Homo sapiens
MGLLSQLSSLNPHNNFMRLVLTGIIKNRELHSAFKVLLKNRPQTLIQSWFSIVDWKNIIHVELCNVLELAHTGATCNCVHLFPTSCSGISCGLLEICYGGSIYTMDIGKLLKTCQLSTKCLDKCAGKVYYQKMKQNVTVGQGTWRSH

SEQ ID NO: 930624 - protein, 162 aa, Homo sapiens
MGQVWGLVRFTLELFHTDDEEEREYNEVTEEVTDQVYVPAKAKAAKEGEVQPYLSAPPPYYFEEKTLQIFLFQRTLGKKIHPPDQQGNIIATFEPFPFKFGKAHLVDYIKACDGIGGNLHKATLLAQAMAGLRVDKGNTLFPGPCFNCGKHGHTKKECRKNQ

SEQ ID NO: 930625 - protein, 146 aa, Homo sapiens
MMPELNVNYLVGWCINTNEGTEPEQGEVTCSRSYSVVLKPATSASPRNLLEIQILRPYPDRPQNQKFREEDPALCVLTSPLEGRKALLLLPQIRCQQQHSSCSYVPRCYCTDIRSPTEPCPKGLNLSPWSPAAAFNHLSSITNKGV

SEQ ID NO: 930626 - protein, 165 aa, Homo sapiens
MLRKLMRCTENCNACSRHWSTDRAQFFSISMPNRMLVDSNEYAGKVGLKAKAIYGHTILDAPDLIYRQRQYWPVTAIPHACAMRGMSVGDGCDNSRHGLSQRGLCESVWSQYTRAGRGVGVTLTIASRDYQWSREIQKSAFFKSSLSGRDVAISELVPRSVFRNH

SEQ ID NO: 930627 - protein, 170 aa, Homo sapiens
MLRKLMRCTENCNACSRHWSTDRAQFFSISMPNRMLVDSNEYAGKVGLKAKAIYGHTILDAPDLIYRQRQYWPVTAIPHACAMRGMSVGDGCDNSRHGLSQRGLCESVWSQYTRAGRGVGRFYHLVDRSLQNKQAPHHASKPEPCADPQMLGNRDDPWTPYQVPSNTTCS

SEQ ID NO: 930628 - protein, 144 aa, Homo sapiens
MHHCQRSHIPHSTGTLVTAIAAQDTLLSECPYQGQLHGCVTCHESALFPNQFCASSFRVLVLHGFPENSRVKELQKQSKLGSFNNDKPGEVVSIQVLPTPWHEVQPRQTVKAAYSVCTSHSRKEESGENTSHCSLTCSVFAEYI

SEQ ID NO: 930629 - protein, 177 aa, Homo sapiens
MSPKLQNQQVFIRDFKRGGGIQTRSRSQRSHASKGNKNHKAKAKLELLMRVYVPLCTYYLDKHLNRKQGLRAENQSDQNLSGWNFPILVSLRVLQETRAYFSPYLNCIRQTLPEQPFIDLPPGMHSFPQGIPCWEKNSAISLLFACPFIRSLQELKYGSILPDPTGSQTLWLPSFFP

SEQ ID NO: 930630 - protein, 137 aa, Homo sapiens
MESCGIHESTFNSIMKCDMDIPKDLYANTVLSGVTTMYPGIPNRMQKEITALASSTMKIKISCPQSASTLCGSVAPSWPHCPPSSRCGLASRSTTRYRKERGKKGREGKAQWVMTDNLSPEAEKGMGGFHVLRIPLT

SEQ ID NO: 930631 - protein, 170 aa, Homo sapiens
MSLLLQFFPNRQFKDYWEQNETYFNITVLQNQAITSAVLVYFHAADEDIPKTGQFTKERGLMDLQLHMPRKASQSWQKAKGTSYMTAARERMRVKLKGFPLIKPSDLVRLIHYHENSMRETTPMIQLSPIRSLPQHMGIMGATIQDEIWVGTQRNSIECSHMQKNCIDLP

SEQ ID NO: 930632 - protein, 188 aa, Homo sapiens
MTAMEMLLTPADPGRGGPSVSSERDSALIAFSLHLSCKLRSRSGSDISLRAEGSVTSVLGKPRERESKCPASQQGLAAVGDEMTVPYLQADKSKVSEDCQAPAAAQRSYGCKRRAETRVSWSSSRRPHVLGWHHVLKEPLDPNRLLSVCEGCGQDSRMGSAQLGDGQHGHPTDEDDTPQPTLTATETP

SEQ ID NO: 930633 - protein, 171 aa, Homo sapiens
MVISAHVLSPYVNSPEHILWAKHCFGPACKLDPLHVQFTMGCAFLRESNATTDLTGGGAQAVMLACPLLTCYAAQFLAGHGPLAQFQVHSKIGQQKVQGVPVCSLHQCGPPAAGAFKERPTKPTAFRKFYERGDFPIALEHDSKGNKIAWKKAGKYSPAVYLKGKGKWSEQ

SEQ ID NO: 930634 - protein, 143 aa, Homo sapiens
MHSCGSARAARPLRLPGVLPAGGAGGCVREKAKGAAGWERRESRREGGGEAGGRGAPRSSSQGRGSPARHGYSNPSTSRKRYFLRLGGFCILSSHRWGWRRPTRRPVAARELSFQYRDSELIQSAAEGAHPSYRAAECLWLEQ

SEQ ID NO: 930635 - protein, 148 aa, Homo sapiens
MVLQMEPQMSSTNKLYRGPLDRPTGTFTGLESYPLEDTTTAGPLHRPIQQEVARAVISQIPNSSWGLHVVLMGQLEFWIGVGLVGPSLGVNPFQSTLPFTKKRELSPGLQLASPGSVTLPHCGSFVLSLFAINLAAAHSLGPHCLYEL

SEQ ID NO: 930636 - protein, 159 aa, Homo sapiens
MHMCPPCPLQLTAPSVSLQWDTDVATLAMVYRTVIGGHTSLYCCVPDAPSFSCQPLTEEHKSQSEVESADGKAAASYPKDLVKITDEGVYTKQQIFNLGLSKKLIPTFMDNFEGVKISVEEVTAEIAIATSAFSNQQLDQSTAINIKQGLSTSKKSTTC

SEQ ID NO: 930637 - protein, 216 aa, Homo sapiens
MGGAFRPVLYVELKKNGRNYNIYRITKEKSRKEFEETGVDGRIAGVLSMGGENGRFRSKWRSKEHSEGITGSAHKCTDAEARSENQGEGKDFRGDEKVQSPGKASVRGDNMLAALGCSRRLLGLGLRSGLARGALQPTSALWGLLSGADQGRSRLPLLAGRYGGRGPGRSRGCARRSGATAGFQWVWARWALHRAPGTCWAWSGVGAPSGLPECPG

SEQ ID NO: 930638 - protein, 136 aa, Homo sapiens
MSVGPTEQAWEGIFRSACCEYRGKSAVFEQECTFPLGTVTHGFPWIGKGNPLTPCTSSVRDAPPCFGLPSMGCTHCPTNPNEMNQYAGNSTLMGVLATHFIKVVAAGSMPVHLCQQKQGYSKMHTSVGAGCLKDIS

SEQ ID NO: 930639 - protein, 140 aa, Homo sapiens
MGCYVLPLVCQDNTASNCSCFKNYIKCLICAKYYGLNVSPQNSYIKVLTPSTSECDRIWKQGHCRCKQLRGCLGTGARTQGEHHVEIGAILPPVKECQSFPKKPPKARGGTWNRYFPGAFEVKNTEYRTHQLPQSFKVKH

SEQ ID NO: 930640 - protein, 332 aa, Homo sapiens
MAEGKEEASISSHGGARERAKGEVPHTFKQLELEAPSGIHTRALPWPPEPLILFIREAECKTLKNLHPDHVVEKKNPFSGEKFKPAEEICISSEEPNVKHQDNGENVSRAFQRASWQCLPSPALRPRREKWFHGLGLGHSLHTLDMVPCFTAASAPEVAERGQGTAWAIVSESASPKTWQCPFGVGPVGVQTRVEVWEPPPRFQRIWKHLEYRQQSAAGVEPSWRISTRVMQRGNTGLEPPNRVPTGALPSQAVRRGPPSSRLQNSRSTNSLHCVPRKAASTQSHPVKAAVWGIPCIATGVELLKDLGAHFLYWLALERSMAWWNAGIVTIS

SEQ ID NO: 930641 - protein, 146 aa, Homo sapiens
MRLLGLLTLNMNIAMPSWFDIIGLSPDSQEDESGIKQAAQNIKALIDQEVKNGIPSNRIILGGFSQGGALSLYTALTTHQKLAGVTALNCWLPLWASFPQGPIGGANRDISILQCHGDCDPLVPLMFGSLTVEKLKNIGESSQCDL

SEQ ID NO: 930642 - protein, 196 aa, Homo sapiens
MKTFRMKTFLTTQEQYFASFNPVKLTLDINHHKSTLVNLNPYTSEIICNLQIKTIIRNGAILRAQCWSLLLANWALSSGHSQVSLGEWKSMLLSPCVTSIPATMATVFMGPLGDDRGGWGKRLSVVHTTSDPIHLIIKILFCGGHLLVNTHMGYKYLQFLTTQRVPSTYLFPRFLCHQFSSHASSKSLTIQPNHWP

SEQ ID NO: 930643 - protein, 136 aa, Homo sapiens
MLVHAINLLLSRHAEPHLLVVYIGYWKIMNVIGVVREHYFWLTTLYAKVLPDESIGLKENQTNKESGKQSSQTVFLNIKPLLTPVLVKTHAFRPPIKLNPESPVFISGGNSNRVSGKSYLKPSWVETISVDVWEEI

SEQ ID NO: 930644 - protein, 161 aa, Homo sapiens
MVFHIHCCSHLQTGVSTCFSLGPQSTPYSSSHVSNVDVEKDDQNLESQIPKSSPVADEATVTPCEFAKEGPRHSFPPATRSVGHRWLVIASFSRNGLGQRKLPCPSTQTSMVNVGESDGKGLSVMPNFHSLTPESQDILDHDHSYQYPPTLPGNQQGLEIG

SEQ ID NO: 930645 - protein, 136 aa, Homo sapiens
MLTVRVCSFIFVSQTKNLIVAVGELCVLCSYWCECKFSVEGQQCLLTLRECGVAEPRPAHPELELVCKGCCRPDSCLRLSIRACKLREDHLWKTAVAVCPCLQELAKGDTDATLIIFQAPYSAGEVIRTANTLSVP

SEQ ID NO: 930646 - protein, 137 aa, Homo sapiens
MVYVIHKSRSRQESLKKEETGQQGVQSGLGTASKTGFSSPRLSLGSFVLSFHFIQVLQPSTFWLVPNDSKVIQQPGTIPLSSQCGLEPSQAIPKCQSRHGLLQNQASPDLLNLCLREDSGICALAGSKGWSARRGED

SEQ ID NO: 930647 - protein, 157 aa, Homo sapiens
MFFLPVLLCKVDVLTASWNSWPPVKELQADLGNIIVSGIGSCRWVLGLADFKNEAADPRGVKLQTFTVSVTILKKGASEVVRSSWLVCGLTSFRSEAAKLCVQEFPRCDQVLMSAAEKATDSWGAIFSFSHMMIEIILDGKCGGEKEENVRCSVQNW

SEQ ID NO: 930648 - protein, 152 aa, Homo sapiens
MIVKFPEASPVMPPVQSVELHFIFPKLPDSSSQQDRQALLRLQFAVPRYKSNKTYEEYEENYKILIKDIKEELNKWRDIPCSCIGRLNIVKMSILSNLIYRLKAIAILAKNPANYLVYISPQTDSKITMDRPETQNKQHNIEEEQNWKADIT

SEQ ID NO: 930649 - protein, 128 aa, Homo sapiens
MAILTGIRWYLTVVLIPISLMITDVEHFFRYLLATSVHGPKPKPQPHYHTEPPKRETDFNTVYFANMCLLLTVSATTECPQIAGLQNSSEFGKRRKALTSVPKWVQKLKQREAGRRWRKGEETLDLIS

SEQ ID NO: 930650 - protein, 131 aa, Homo sapiens
MHSTYSLADCAVQNLRRILWTLMPVFQVLTDCVATGKFLNFFVSQFLNLRNGDSNVSISWVTKAPNGPLLDASFMRRKRLLPTKGVYPLPQHTASCPARVRFFTFPRDSQGTGPSLLQLSPVGVVGICSRG

SEQ ID NO: 930651 - protein, 143 aa, Homo sapiens
MRIQAAGFESENGSTYPGAFMWWERRSAGTLFILQTESPYLLNNNSPLPSSPAPGNHRLLSVCVNLTTLGPLHKWIVQYLSLVAYFTQHNVSRFTHVVVSELPSLLRLNNIPLYEWNTFCVSIHLLINTWIVSTSWLLQIMLL

SEQ ID NO: 930652 - protein, 183 aa, Homo sapiens [sequence omitted]

SEQ ID NO: 930653 - protein, 181 aa, Homo sapiens
MKVRMPWLLSSHCLPKGTLTRVSIVEGSQSQVAVDHEKCNPKRKINKISKMIIYPRIPLQGCGWPEPIQWPKREPAVDGTPSHLSTGSHTPTLTETGTTQKRQLACTALGCGRKPENLQKTHADMGRMCELYTDSGLDRESIFLLINVIKKRRGFTTANYPIYNHTGLQKTVSGRKEREVG

SEQ ID NO: 930654 - protein, 150 aa, Homo sapiens
MVDAPAPAKLLPGRLISDCCASSEQGSVGVGPTKPGAGYNLLRKKKKQEEEKEEKEGEGGEEGRRGRGKEGTRGRRRRRKRRRRRGRRRRKEAEGGGGGEGEEEGEEEEEEEEKEEEGGGGIKKEERRRKKMKMKKEQKEEVIPGLEQRP

SEQ ID NO: 930655 - protein, 146 aa, Homo sapiens
MRKNQCKKAENSKNQNTSSPPKDQNSLPAREQNWTENWFDEFSEVGFRRWVITNSSELKEHVLSQCKEAKNLEKRLEELLTGIISVEKNINVLMELKSTAQELRYYPGEIPQPSKTGQNSNSGNTMNTMKILLEKSNPKTHNCQIH

SEQ ID NO: 930656 - protein, 147 aa, Homo sapiens
MEPENYRMRSSSCPGEESGEKPSGLGNGTHRMEPVSLEPCEQEPEQSEWQWERAANVHIPRQNPILRPKSSVVDCICVLQDISPELVQCFCDTIKKWLFVYFCFTVGFLPSCLVLHGSKMAAATMPCSMSYFKGFIPKSLVKFCSFF

SEQ ID NO: 930657 - protein, 185 aa, Homo sapiens
MVEGLGDLPWEIDPLSSCSLFHEKDPPTTSGPQTNQPKEHLTNFKSEHQDLATSARNLATRPRNACSLGFLLSHVPSVRDPTGNRTQLKTDTAVSPQKPTGPSQVLWVTLAVEGKSIPFLVNTEATHSTLPAFQGPVSLASITVVGTDSQASKPLKTAQLWYQLRQYSFKHSFLVIPTYPFALLG

SEQ ID NO: 930658 - protein, 138 aa, Homo sapiens
MGPAGLFPSFLVPGWRVTGKQEMISMKLIIFCCLNHSQKFKFLDSGNIDTTFSLHHLMRGIHSEKYVIRQFHHYANITECTYTNLNGIAYYTTRLYERKGVMQKILGQEGSWAELSQKCRSLKTIWLFEKLNGSVFEL

SEQ ID NO: 930659 - protein, 124 aa, Homo sapiens
MRRRRRRRRRQKEGEEEKEEEEVEEEEEEEEEKEEEEKEEEEEEEEKEEEEEEEEEEEQEEEEEEEEEEEEKKEEEEKEEEEEEEKDGGRMRKKKRKRRRRRRGRRRRKDNMVWLSPPKSYRQL

SEQ ID NO: 930660 - protein, 153 aa, Homo sapiens
MSQWKENRQRSWHKIFQILNLQPPDWKNQFLLCVRYQVCGILLQQPKRTKIDPCTCSFKNGLLKEYGVQGDAISTPFLNDSSPQEDMHMILWEPLAVQNGPQLTSCKETGASAYNLQQQETEFCQQPEGAGNRFSLGVPKREFSPPNTLILAQ

SEQ ID NO: 930661 - protein, 172 aa, Homo sapiens
MIVRPPQPCGTEDNDFMSHSQGSAALHNLGTWLPAFQTFQLQLRFQGAQVQLRSLLQKMQAISLGGSRVVSTDSLYLMPGKASTTQHQLLKAPLGGEPCKTTGQFPKALGAHLLHQCALDKRHGVKRDYFGTLKFNDCPAGFHTCKRFVLINFSFLEWEYLPNAYIPISSWK

SEQ ID NO: 930662 - protein, 134 aa, Homo sapiens
MGPYVVSEVSELASAYLGHKRLRQDLEGGSDVATSSLFIPASSGKNMRHCCLTHSVAHLPAGLDGMEEQLGQPPQHLQSLLGHPSASWTPGGDIDKSFSPSFWVTGHQRLASSISHPFALPKCLPCRLQGTASV

SEQ ID NO: 930663 - protein, 149 aa, Homo sapiens
MGKKQSRKTRNSKNQSASPPAKERSSSAAMEQSWMENDFEELREEGFRRPNYSELKEEVQTNDKEVKNLEKKLDEWLTRITDAEKKYRERHKDNPREEQLQKHIIVRFTKVEMKEKMLRASREKEESEGQYSTFLKKRIFNPEFHIQPN

SEQ ID NO: 930664 - protein, 184 aa, Homo sapiens
MGHCCHHQEFKTSLGNTNFTGACWAHPSRSAWQAALRLHYQPGSCTCRSFELVWCATTGFRLACQCPDKGDVALPKNSEMSATVEPQVVLQVLLRESQGLSPQGALEFRPPGSGNNSSWNLRKKVTTADEEVEERGITSGLLKGDIKLKTVEEEKGEKEKEKDDEEKPKIEDMASDEEDDSGGN

SEQ ID NO: 930665 - protein, 138 aa, Homo sapiens
MDAPAPTKLKCLRSTSDCCAGCENFKPVDLSLLGSVGMGFAEPDHLAPWLQPPFQGISWSVGCEDCVKSIASRPECTVPHSTIPHGTVPHGFPWLGEGVSQPPVLPSLPSVGCTHCLTSPNEMSQVPQLDAEITCLLR

SEQ ID NO: 930666 - protein, 166 aa, Homo sapiens
MLNSIKIPKNVEATLKLGNRQRLEQCGGSGEDQKLWQSLELPRDLLNDFDQNADSDMDNEVQSEVVLDGDEELLGNWSKADSCYALAKRLAAFCPCHRDLWNFGLGRDDFGYVVEEISKWQSIQEEAEHKSLENLQADNAIEKKNPFSEEKFLLAAEICISQRCLN

SEQ ID NO: 930667 - protein, 155 aa, Homo sapiens
MFCINIVYVLKNTVAHEMRLPGAWKQQVPINQLNSFKSRARHCAWSWGLRHRSCLQVYHSKRGEKREKRMRMKPGKAESMGLGVFSVLLVNKCVGCEDSFLPGQRLWEGRAPERRNELTGHKMMQMVCRPEMLCLLLELKLKGGNSYSAKMLQRS

SEQ ID NO: 930668 - protein, 227 aa, Homo sapiens
MRKNQHNKAENSKTQNTSSPPKDHNSSPAMEQNWMENEFDKLTEVGFRRWVITNSCKLKEPVLNQCKEAKKLDKRLEKLLTRITSLEKNINDLMELKNTAREHREAYTNINSRINQAEERISEIEDQLNEIKHEEKIREKRMKRNEKSLQEIWDYVERPNLCLIGVPESDRENGTKLEITLQDIIQENPPQPSKTGQHSNSGNTETTTKILLEKSNPKTHNHQIHQG

SEQ ID NO: 930669 - protein, 135 aa, Homo sapiens
MWWVITEGNTALSLTQVLWVDSPRRTLQGQDLSASREEKENYDCEIERHSGEIKCFNIPPPLRCHPHHSAAVGIRQKREDYKPLATSFHYSFIYNVGGSAKVIGAYMKIKKICSPLSTGGSQSGENRRSVNNSTY

SEQ ID NO: 930670 - protein, 142 aa, Homo sapiens
MSVFLGLFLLDCSYFPEENLLVFYLEDRSITENILRSDWEQGDGSQDSSGPSAAGLLEFAGGPLQTLFAWVSAAKAAEQRILVNSKCCYLVVPLEVLSQRSTRPWHELSRGEDARVEEAAGHAQHRLLRGGALGMLLLMPQR

SEQ ID NO: 930671 - protein, 141 aa, Homo sapiens
MLPFLCPRVLIVQLPLISLLEFAEGPLQTLFAWLFASPVEAAEQQRLLPVPSSGSFVPEGHLPDASGSSSLRKLWSLRSCRPRKSGNVIRSESEGLRTRGANGVTSSPREEDEMRCPNSSNESENRGKFLLSLPLFYSGPE

SEQ ID NO: 930672 - protein, 126 aa, Homo sapiens
MPCNNRGGDWSHATAGQGTPRLAGKLPEARKRQGRILTYRFQREHGTTNTVIWDFCYIQDLFNCHSKSMMRAAQKKEILFLLTTDGQEESVNSTEKFHRNELCSAFAIRGQISFSHLEETSLKSIY

SEQ ID NO: 930673 - protein, 155 aa, Homo sapiens
MQKSPAFCVDFTGSCIPELSSCLISFWCFPLLFLSLLMPCEEAICFSFAFCHDCEFPEVSPAMQNSRECMVVYVEETSPTPPSGYPESRGDKGVRKRQNKHLKGGSRGPEHRRLARGPELSGSPQFIGLQAVCSSGRWELGGRDEEKDESVEENS

SEQ ID NO: 930674 - protein, 144 aa, Homo sapiens
MAVESQWLLVVLSKKAHTVPPHHSSPITQQQAEAANVESKLPPITREITKVTWKANVASSSSIRLPVMTGFTLSYTPPKKIASYLILEDTTCILDNGSPDSHEFRPGGTKHLEESIQLLQDLVPPTWDSPLFLWITAVGLSHLL

SEQ ID NO: 930675 - protein, 161 aa, Homo sapiens
MPFAFHHDCEASPATWHFLHTEWGSGRAGSTALGGGFTSSQRLKTGQSEEAKEEQGGLTFSAPLGTVRAVGLVELLHTLSRFYIGLCSLTNEPADGTYRKTPPYTSLNPVRLIHHHKNSTGKTCPMIQLPSIGSLPQHMGIQDEIWVEAQPNHITLHIAVF

SEQ ID NO: 930676 - protein, 184 aa, Homo sapiens
MFKSAEAAPTVTPSPTDTLPREEESRKAFWLQQLCGAAVDPSQYELPRGFVYTMRGKLPTQASVMAVVPPSTRLEHPRSTSDCCAGSENFKPVDLRLQGSLGVGSTELDHLVPWLQPPFQGSERFCLAGIPGASEEMHFQLTIGGDFEYWVEENDEAKVQANEKEYSVCCGCRKRRDSMTTGPA

SEQ ID NO: 930677 - protein, 145 aa, Homo sapiens
MRIGQRHRSKPYHSAPGPSIKAHTSLSISLSAFWSKPFNKSLGSSKLSHIFLSSSEPSKLFQALPNTQFQSPFHIFSTCINLADLAAADSPVISLEKDNIFKGSNIIPQPIIPTVLPMEQSILNASYECSGNWTPTEYQSFPFLH

SEQ ID NO: 930678 - protein, 146 aa, Homo sapiens
MLQGLCEDDGMGWWLPQAPSVLLLDHPSFQDDGEPLPRWWWAASKMVASLVFSDLGFLASQIPRNGILVHVPCGNNGKPLAQLGVAMGALLDQEHSGHPARSGRMEVSGGSAMVAKQQWCPASKSSARAVTNTDQKLAVARFNRVK

SEQ ID NO: 930679 - protein, 137 aa, Homo sapiens
MQEVGSHGLGQLHTCGFAGYSPSPGCLHRLDLSVCSFSRHSVQAESGSTILTSGGWWPSFHSSTRQCLSGDSSLTSYHQTYNRMTNKKITYKVNLLNNSNIPCFLSHFIHSLNRLLQSANKLCKVGPERSPKPLKAN

SEQ ID NO: 930680 - protein, 165 aa, Homo sapiens
MDGFHLSYNSVEAYLSVDNILQSASFDSRLLLGLGGGPSITVSMPTIPFLGVLVHSAPLGRGHSWQICLMLTWSALICCPRPSQGSIGFCLPAEFRQKWDHWAGSTSNVTHLATGGGMSEVSCPAIWCFQYKRWLCTLTNSGRRKTAQLEALASINFLATRGRGR

SEQ ID NO: 930681 - protein, 150 aa, Homo sapiens
MTTNLNKVSTDFSLNVRHLIVSKNHETWLSLSHHHPENLYYIAYWLRALLQSQTTSVQILVLEEPAVLIRKVLDKKHCSVVSKKMMFQFSTSCCTDSSKFTYSDLACDPGTFSPHKSTQCKALSVNGTIGILEEEGICFPVLVYSFGSLP

SEQ ID NO: 930682 - protein, 134 aa, Homo sapiens
MVRTFSLPVALLLIVSTLILTQGLAIWGLLSGHPSCQSYNNVLAHDAGDGGCWSEVATHSTSSQRTAQCKGPYKRERGEFDISQYKPFSQLAGLSTVPYKGLSRTQSHSSTSGTKCLFDLSATFKKHLHLCKKA

SEQ ID NO: 930683 - protein, 138 aa, Homo sapiens
MVNYSDPTVSFIVQVLQLSLQSILIFVYDERYESSFILLACGYPIFPELFTEKTILSPKLTYLMLTSVMSFFGCRKLYPLLPRVYENAPSEVHTDTLTYTLPDIKRITAFIEKTFLSTLSVLGTFVKNHLIINVQMYF

SEQ ID NO: 930684 - protein, 144 aa, Homo sapiens
MEQSWTQNDFDEHLFMKKITLIIGALQFSVVNCKYLTLRDSYCESILTYKKETAMSVNKTSHPHPPFEEEETKVNCPINSKKLRPSVILQILKFGVKRDFHVFTQLNLTFNTFPICASVASLKLFKIGINKRIFFSNNLSVKID

SEQ ID NO: 930685 - protein, 126 aa, Homo sapiens
MAYSLLLRSTRFYSIGKSLEGLEFSLFSYGIIAINNNVGLGLADARVQTKECASGNGLYTVFLISFPAINPTPQQIEKTGSDPMFTESDHVLKYYSYYKDCVSRGTIQHFNMGGKEKKGRKKKNGD

SEQ ID NO: 930686 - protein, 143 aa, Homo sapiens
MLQEPMFFPLFHTTFIDIPTFCVKSVKELRKHTIKILMLIMRNLESRPGTQRDMDPKSNNNVVLQTHKGTSLVVLDKLQNSLNYKAETLVFFLLSPKGSLYLYAELPGTGSVVMQAPLWPPPLELCWIRPEPSIELCLAQGSL

SEQ ID NO: 930687 - protein, 144 aa, Homo sapiens
MDQGGSGSEMLLLYTVYVPLCVNTDFKISTDVPWVREVFSRSRKCVVLVSHKKNIYEIMIKRKKLIKWKNLQRDIRFRNKLFQHVRFLLGCQRKSMEKGAPCRLNNGKSTLQQRDPNVYPLHIWVILIAVSCIHWLELDLTVLS

SEQ ID NO: 930688 - protein, 134 aa, Homo sapiens
MSACSGCRCFNTFRGLSYKKSDLSSECYKMLASKRFEEIARLKETTVKVPIQLEGKTMKCRGKNIANISKEEHFLPSLVAKANFAPEISETCDLWPVKDLYYLHFCRLFEKVSVQCQSCYVTIGKVVRDDTSFL

SEQ ID NO: 930689 - protein, 154 aa, Homo sapiens
MSQVLVKYYEVFVCNFCFCGLYRKHGRGGLKKLAIMAEGEGKPAHLMWLEQEEERWGEEWLYMVRKSNCQGSLVVTTACLPLCSSLFFHTGHHLVFPIKFVMETFNQYILDTSPYHSDCWVSSSSLDLVAIAASLLATWEKHPAVSNAMTCWVA

SEQ ID NO: 930690 - protein, 153 aa, Homo sapiens [sequence omitted]

SEQ ID NO: 930691 - protein, 264 aa, Homo sapiens
MGKVKVGVNGFGCIGRLVIRAACNSGKVDIIAINDPFIDLSYMVYMFQYDPTHGKFHGTVKAENGKLVINGNPITIFQEPDPSKIKWGDAGTEYVMESTGIFTTMENAGAHLQWGAKRVIISAPSADPPMFTMEHHPCHYWAAKAVRKVIPELNGKLTGMALRVPTANVSVVDLTYHLEKPAKYDDIKKVVKQASEGPLKGILGYTGHQVVSSDFNSDTHSSTFNAGAGTALNDHFVKLISWYDNEFGYNNRVVDLMAHMASKE

SEQ ID NO: 930692 - protein, 149 aa, Homo sapiens
MGKKQSRKTGNSKRLENYVKNAEASGADEIKWKKGPNLRLIGVPESDGMNGTKLENTLQDIMQENFPNLARQANIQIQEIQRTPQRYSSRRATPRHIIVRFTKVEMKEKMLREAREKVQKLYKPEESWGQYSACFKKRIFNPELHIQPN

SEQ ID NO: 930693 - protein, 315 aa, Homo sapiens
MSFNTCSTFSTCSTFSTNYQSLGRLDSQRVASIYAGAGGSGSQISLSHSTSLQGGMGSRGLSTGMAGGLAGMGGIQNEKETMQSLNDLLASYLDRIDNARLAADDLRVKYETELAMCQSVESDIRLKEELLFMKKNHEEEVKGVQAQIASSGLTVEVDAPKSQDLTKIMAENWAQYGKLARKNREELDKYWSQQIQKSTTVVTTQLAEAILENSLREMEAHYTLQMEQLNRIRPHLESELAQTQAEGQGQAQEYEALQNIKVKLEAEITTYHRLLEDGEDFNLGDALDSSNSMQTIQKTTTCQIVDGKVVSENEQ

SEQ ID NO: 930694 - protein, 192 aa, Homo sapiens
MLTVHQTVSDVRGNFYQEKTVFLRCTVNSNPPARFIWKRGSDTLSHSQDNGVDIYEPLYTQTGETKAWYLPVCTRATSDPENPMMRHCQGYGECSIHPRLRTPGAKWLWCWVNEYAGSLETQAGTSPQWSTAAQGETKVLKLKNLRPQDYASYTCQVSVRNVCGIPDKGRTFRLTNTTGTGIFLPILLPYLS

SEQ ID NO: 930695 - protein, 152 aa, Homo sapiens
MRTDFTLDFYFSLQGKGTGNPASCPGVPLGLLRLAKQSALEKPGVERPGWRDPGVVCGTFSSSVAYASVSQEQSCKVASRARWCRPVFVMQVAELTVFQRSVPGQRMNEEMDGQENTLCPIGEYVSILAQLCCQKDTFSAAKKLLSGAKHNQ

SEQ ID NO: 930696 - protein, 217 aa, Homo sapiens
MAMLLLMDIIRRSKPIPVTEDKPFLNHPSVFLLDLERWVTFDSVKGLAEDISDKGEIGTKAQREGQSGMWGAGSDASPVEEERPRVQAERTASIEALWGFLRPGRLEWGEAGGGAGEETGQTVSDSAVSGLAGNDNHCRFHSEANGQLLEHFEAGEGYLETDSELAMHRQKPCSPTSRRTREKQGWEEGERGVSQHRPPTDPAKAVGLGGPFRVSSS

SEQ ID NO: 930697 - protein, 146 aa, Homo sapiens
MIFMWKGWSLGCICRALHSLGLQWSPEIFLLSQVILPKNDSRKGEVWAGNQLGTFKVYILNATITTMFQNRNCILECTSWEVGWGYIDEQGTIVAFQQLPGLWERPTGTQGNTGRETGVILNTKEAIREGKKYYVVGITQLVAFSD

SEQ ID NO: 930698 - protein, 162 aa, Homo sapiens
MPLRAQTATAAPGHILGTLQSRCSLLLQLLGPAAVLQEGTVVVPAEGSCPKRENCERRRGSHKGESEEQQNRQKNQGFQGWKFKVRVISGAKHFHPQANILATRSHGRLSGDTNHCQPQHVHQRSRTTVSDVHLGSSLMAIGLYAIMEADEDILEGCSLCVR

SEQ ID NO: 930699 - protein, 243 aa, Homo sapiens
MASLKENIESTGKAQLLGTRTRPKCSDSSPPPRHLRGDGCSGRGGAHREIPVLLGFRAFPWTLLHLPGYRLGPSRRELLSDNHATCRHADTHYRMACLVHVPAPIPSQHLNLEVVASALPLALNQPFSSSAGASERTWPCTVLGASKMTALCFSVLSPASAGLSPADTTRVPTRLPRITCSPLTKSSPLSLGWVWIFGRRFDSSNSFLVLVHLWTLGPVCQVLIRPSRDLVSCSEPSPVSTCR

SEQ ID NO: 930700 - protein, 142 aa, Homo sapiens
MGAVSPMLSDKTLFPSGLEEESGYEFYSCEEINPGELESEFSPRSSERSAWHIVNNNKCLSNISKFRASLSWYHLTLIGTNASIHSCAWDASECKMDLSVPGNGSFTSEKVCLYALVPLLSLSQEFYTLTCYSMLVSLVVVG

SEQ ID NO: 930701 - protein, 145 aa, Homo sapiens
MIKGTVVAADEARRDSRHQAMQGSSVVVWVSPDVQWSPQSVNKQCGDVNPCGEGPIGMLVEGGPGQQDRHESQSGGYTITGWRWLISVEVEWVPVWKECGSQRQDDQLIRSAQECSGFKPKSLCPGKPFSLSQIGTVGDSRLGTN

SEQ ID NO: 930702 - protein, 143 aa, Homo sapiens
MMCGYFKRSKTKQNKIAAFYSDSVPVRDGRAVYEGEVRGEVCTCDVVQDSLGPSSCSHEADGRWRTGTMRPSASAKAHYWAVLCMVTVDLLHRGYFYGKSPLAHISLFKFTTLPVSAISFFLNSSELAASSFPSASGPGRSIH

SEQ ID NO: 930703 - protein, 136 aa, Homo sapiens
MVTRPPRLLSLEEHAFDQLHERLLTVTQILGYRGISQINAYENSEHLVKGGDTALPAVSHGEMVEGGVEGGGCCQLLSTCGWWRPGTASAGKRGYSEQVTFPVVRELHSLRHKDGYKGTEMSSLADCSPAKVAVWQ

SEQ ID NO: 930704 - protein, 197 aa, Homo sapiens
MPSWGGGGSKSLGSGIGSPVTILALEVWCWHLLLVRPQETYNHGGSKCNIYSKGQTNISRGVTAQVYQRRVPDSRDFSPQNSSSVGLGWEPGICIFSRYSDASDRVSMCSEPPSEPLAWKTPFLGSEWAHLSPCWIKLAREGTLSPIFHPPERWQKKLEASLTCNSFLENLQNGIGKYQVTATFVRGLDAEFGLKEK

SEQ ID NO: 930705 - protein, 166 aa, Homo sapiens
MIYTVLLAICQLQFKFSYLVPAGFLLGGFCSEWLLLTPGMLFGKDYGESDSSSVIKHLFMREFGSPPHLLLGRRGSAQTSISRFHSARALTQALPQCHTLCLPVSEQAYVGRCKDKLTKDGSPGQRPSVKPSSCRSLHRVRSNLTGPHIQKRGREGGKGSHVGRRL

SEQ ID NO: 930706 - protein, 139 aa, Homo sapiens
MPSKAMGVEPSPRPQNCKATSVQCQPERDAGMRLRSVTAAEWAEQNHKEHICGISTQNWQEHWFRCRNYTQEELFLCAFMHQSRASSSSFTLKRQRSISTGGEFSPINRKTGLTHPGEQLFLFPSLVSHYSLQERRPKM

SEQ ID NO: 930707 - protein, 138 aa, Homo sapiens
MNCWHESETLLGLQFWVGGFHKFFTSFTRWTGGRQDKLSLLMARERAKLLALEAGESWPCSFRYGNGRSQDNSRDKEAQGKSTTHCVGQGRPLEPNVSWELESVHQISGASNSTGRIIIPWAMPLKTNPSEKTNKDMY

SEQ ID NO: 930708 - protein, 134 aa, Homo sapiens
MSQTKVIKSERKVIQTEYVKLIDEDDFPVKWKSLIKIQKWNTRNKVTLRAARTEQRALEGFCTSGTAAASAEGEGVPRACALATCRERICQVPEGERRREESEEEQGGPAFCLLWPVRARTGATAASGTEMVKQ

SEQ ID NO: 930709 - protein, 144 aa, Homo sapiens
MLSSTVIKLDFFPSISFIPPYHLELMDERGSERPIQYAKLLQINIKDLPDQMAIWEHLATNEDYDIISRIEPNFVNPQMQIEPRKPSGTNEVQNSHSKIVLPSAHKEAKIRCMSLGTEGDGWNATGKVKVKDRKYVFERRKEQL

SEQ ID NO: 930710 - protein, 139 aa, Homo sapiens
METGEIKESRSIKHKMGEKDNPGKPTCATNWILKKRKQKTWRQYCQRNNRKKCPRIGKGFKSSDSKGSLSAEQDECKKDPFLDTFTCSFRATESLAFQETQPKADQDGRSSSFQVIPLYTTCEGKLTMGRKEGMFKGHR

SEQ ID NO: 930711 - protein, 137 aa, Homo sapiens
MTFYQTLLLLIGFCEWEATRLAFGYIASGLIRKAEEDLAQTQRREGDVKMGQKEISRNTDLEYWSEAATSQGMPDPVRTWKMQGMDALVQNLKPLSTPTGVSLSGSYKIKQLLLTVFNKCLGGKRELSTYKKEEIQH

SEQ ID NO: 930712 - protein, 145 aa, Homo sapiens
MRIATCSWSASVCTAMRPQVASMCPTLSSWIWSPAPGTLVCSGSFVQILRLDNFIFHQSGAGNNWANGHYAEGAELVDSVLDIVRREAESCDCLQDFQLTHSLGAGTGPKRGTPLISKIPEKYPDRILNKFSVPLRKVSDMGVEP

SEQ ID NO: 930713 - protein, 171 aa, Homo sapiens
MCRCGETLDGLTRKPGETLARSHCIFSDDSWRASPAQLLPLSQPIQLAGDSTALSSIKCSTGAVFPVASHKRQSPTTRGPPVLRSCGMDSRALSLRASPKRTAGACPVHIKGKCEDFLRIEECKTNNDNEVIIERIKKVQESFKEKSVQQTFDKIDQNNKKTVRNTLLRND

SEQ ID NO: 930714 - protein, 174 aa, Homo sapiens
MCRIHVRYWGYEEKSNRIPSPERRQTKKLMVETANVESCSGCHRSTYRTEARAVKTILGGSNYSHNSQEAKQGKQRKKGPYRACSWWSRHYERVSRYHHGHLSRCLNPETLSRRHKLTVKSNIGDPKTQIRGASESKRELAVIPSRYEREMATMVSLGIALEYGHTTMNVADLV

SEQ ID NO: 930715 - protein, 124 aa, Homo sapiens
MLLTFHKSPIGVWYPHQLTLWLKPIGQFVEVFEHLLQRIPDLSKFGCETSQPTKNELLGPTYLGINHPRRKRSGGNLRPECQASEPKLSHHIPCDLHIHIQMAHGKQRENNSMWKLSKRSGPND

SEQ ID NO: 930716 - protein, 158 aa, Homo sapiens
MESSGLKIEENNIGLCLISTTFQKTNAAFVAHWILSPQNAGVNHEKEAQVAPGKDVITPYLQSLVHSAKDGVLCPTAMKIKAHRQFEWIDNPEGGAPWELEELGTWLQLSSKDVWMNYGNMHEPHQGLATHTNFPRVKPLLLYLYPPNLMQNFSLVGL

SEQ ID NO: 930717 - protein, 139 aa, Homo sapiens
MSCFQGRNLYSSASANANENRLMFISLNQLKLGVYIVRKAGKQELRRGKEEIMMDEESGVSLPVYSYLITFSSLPERGIQVNPDILQTLKLSYIQNSRLLLSPFITKCPKLKAFSCFLIATTTTITISITVRNVISTYY

SEQ ID NO: 930718 - protein, 155 aa, Homo sapiens
MSNKRLAIRKQAYYESIYLIYWFDGLGFRPVGEVSLGRNQFWLKQAHQGCLTVGLELKTFPTVPSIATVPVLKETSHKQTGQAADPLGVEEWEQFSGHWVDVPEGTVAASVPLCFMQEVNPTQAAVSPTQIPHTCLRCTKCWDTGVVHLTPTLRL

SEQ ID NO: 930719 - protein, 153 aa, Homo sapiens
MIQLAFVISVTTVIVSVSLKILVLRMVVLSTRGYSRVLLQFKLVLSYGYFGLLMSRGRQSSEGVTISVGGQLRSAGGGRAAAVQWGWGGKCLSSGDLLKHLLVLCCPVLMLNGKKMSKYMAPVLKTHHLTHERKTPSLKHTYLGVVTTIGNQA

SEQ ID NO: 930720 - protein, 140 aa, Homo sapiens
MQVALPLGPYDSADSMVLEVSVADRDTVWSLWQAPIGESQQRPLGVLSKALPSSAGNYSPFERQLLACYQALVETEHLTMGHQVTMEPELPIITNLAIKWVMHSSILSSNGSGVYMIRLEQVLKAQGVKQAVPDVPYPIS

SEQ ID NO: 930721 - protein, 184 aa, Homo sapiens
MRILIFFLSFPKMPLFYAVLTTVEKPVSVLGNIVIQPLSYIVSHYTRVSVPLLETCISPAANQGPAPPHSLTADDQHAPPGPIQPFSCGIYYLKGPFHLLIYSIKTSIFWKKKKEKEKEEEEEEEEEEEEEEEEEEEEEEEEEEEEEEEEEEEEEEEKEEEEEEEEEEEEEEEEDHLHLAVFSY

SEQ ID NO: 930722 - protein, 143 aa, Homo sapiens
MLAHSAQQVALSSQYWPGSHACQEMEEVHADWSMDGRGQALKKHHPAGQKTSRKFSLLVADSTWNSHPGPQALDHPWLEGEVSLGTHPFPTSNLSASYCHQHAICTTQTVHSEGHLQAHAEPHRQPPAKFVPELVGPQSFRVG

SEQ ID NO: 930723 - protein, 135 aa, Homo sapiens
MLSKSHVLESKTLELYLVFYCTVAEVVLKPQNAVLPTFPFSFQRQRSFTLWPEPLLAHGEYCQTTTAVPLSPKGSSYLSIAAGYSGPKGSSLASGKFFQDWVLPLKTAGSLLAQVHCLLATFSTRTCLKVAVLVA

SEQ ID NO: 930724 - protein, 144 aa, Homo sapiens
MASEVRKCTQIGPWVAMGGPRKAPQVPTPVGGTGSLVPSLQALPGLKVGSHQGPAPFRPGICLPPAASSLSTPIAIILVQAISTSLLDHCKNILTDVPVSLWPSDFFQCTSDYSPLSLYPYNGHWSLNKDQNCENFLQVRLCTI

SEQ ID NO: 930725 - protein, 192 aa, Homo sapiens
MNKILTLTSSSLQSDRQPADLSLYSGTIGDPGGLQGGGTKRKATFSCCSCLHSKLITQILCVIINSLGSATYFPRAAFGLLPIFAQLGWRYMVVEVEVEIKGVVLEVVVVGEVMVEVTVEMVEVVVEAMVEVVMEMVEMVIGVVEVMVEVTVEMVEVVVEEMVEVVVEEMVEVVVEVVVEMVVGGDGGGDRW

SEQ ID NO: 930726 - protein, 225 aa, Homo sapiens
MIFGEELYSGSLPLDLWAVHCHFDPRDGQMKGSGENVCSVLGKRDTGGRNRNTETQEIVDLCIYVAVIPQNWNTGKMKGLRPESEASADSQCMLIGFGENLELFSEQTRLERTNIPAPRKGWRYMVVEVEVEIKGVVLEVVVVGEVMVEVTVEMVEVVVEAMVEVVMEMVEMVIGVVEVMVEVTVEMVEVVVEEMVEVVVEEMVEVVVEVVVEMVVGGDGGGDRW

SEQ ID NO: 930727 - protein, 134 aa, Homo sapiens
MSEIPTKKHPAQSSHRIKFYYVPSIEDSRVTQTRIPVLMEPTFTMVCGEKLAIKGNAHTSLTFDGEADILSLGKRNPWFIALANNKNVEKSSGKAVAIGIFNINYVKRSRVLLSVDDHTNSSQVSTSSHQCRTR

SEQ ID NO: 930728 - protein, 242 aa, Homo sapiens
MVVDAVMTCDDLLQLKMIGIKKIKVHTVEDYQAIVDAEWNILYDKLERIYHFGAKVVLSELPTGDVAAQYFADRNMFCAGQVPEENLKRTMMACGGSIQTSTNAFLADVLGRRQVFEETLIKGERYNFFTGCLKAKTGTFILHGGSEQFIEETERSLCDAIMIIRRAIGNESVVAGGRAIEREFSKYLQDSSKTIPGKQQLLIGAYAKALEIVSFQLYNNAGFGATEILNKLQAWHSQGHVI

SEQ ID NO: 930729 - protein, 251 aa, Homo sapiens
MVQDSAVARADCQELGGKFEAKIQENAQRVGQLDMRATLTRHVDEMKELCSELDETFHQISKMEPEMEICLALKEQVLGWDSLATRVAALEQATSGPWLGAPMAGRALGAGDHLGPEEAVLNLGKLETVPSRKRKQKQKGPEVPRKRDRKEAEPLPDTHIKGPVPDALNTELWQAGSPVAFYASFSERTAALQTWKFNTSYIDTDSSNFPEHGYYQAGVWALAKDGLQIILLVYLFPGQLLRESVVYVVSV

SEQ ID NO: 930730 - protein, 117 aa, Homo sapiens
MSWGGENLGMVGNEGREGEPEKGRGRKQGGPENKEKPPPGKWEEDDTGTALHSTNSQSPALCLVRNAGPTPSSLTVFGVTHSSGGWNIHENSWKKDRDSQNSGASNFYTKYGHSQNC

SEQ ID NO: 930731 - protein, 247 aa, Homo sapiens
MQITATRRCHLTPSRMAVIIITVDKRPFLHYDCVSHKAKAFASLGKKVNVTKAWEEQTETLRDMVDFLKEQLPDSPMRPLIHSDKMKETITNQEKLAKLQAQVCIGGKGPACRKKKVVHRTATAEDKNFQFSLKKLGVNNISGIEEVNMFTNQGTVIHFNNPEVQTSLAGNTFTITGHAKTKQLTEMLPSILIQLGVDSLASLRRLAEALPKQSVDGTAPFATGEDDDDEVPDLVENFYEAFKDEAN

SEQ ID NO: 930732 - protein, 152 aa, Homo sapiens
MTSPSSLSSDLNHVKSFSSLRKKINVTRAWKAQNPVLKKVVDMLTEQLLDIQLENDTPRDKFKMVQDRREQTVVGWRQLLISCSNINPRGPEARTGYGSESKSRRLEVGQGGGTGFVKTRADLFPRGQNPSPCRPGCLVSGKVMDIVVDLGI

SEQ ID NO: 930733 - protein, 199 aa, Homo sapiens
MNSRTIITGSKYLQNVNITLCILFRPVSSQLPRIFAITGEDYDERVLTSIMTEILKSVVARFDAGELITQRELVSRQVSDDLTEQAAIFGLILDNVSWTHLAFKKLFTEAVEAKQVAQQEAERARIVEKAEQQKKVAIISTEGDSKEAELIANELATSGDSLMELSKLEAAEDIAHQLSGSRNITYLPAGRSVLLQLPQ

SEQ ID NO: 930734 - protein, 201 aa, Homo sapiens
MTFFRFALFRPHLVLTGAPRLVPGKHWEVAVPMQCLFCLYWHSCQPARFVKFFGPGSDTSSLCPQELQLPEGLLDLQINDTGNIRPFMDTQPPFPGTEAIVAPLYSATTPTVLRGPHSAFQRVRPELLPVGEWFTIGPWSLQNHSNFCRSENDCSQPEGACFPFCHDCKFPEASPVMRNCESVKPISFTNYPVSGSIFTAV

SEQ ID NO: 930735 - protein, 134 aa, Homo sapiens
MHKVKHAQDAMCTGWGMNSMPHAQDATYTGCRMHRMPHAQDTARTGYRTHRMPHAQDAARTGCRTHRMPHAQVACSAAGKEQPRTHILCSHSSGHSSTTGLRSSHADSGHSPPKDIAGQMENTSFPSVSMPAVS

SEQ ID NO: 930736 - protein, 172 aa, Homo sapiens [sequence omitted]

SEQ ID NO: 930737 - protein, 160 aa, Homo sapiens
MSFPPGFQSTHWVGAWALEPDNLALLLNGDLGQVFQHLHRRSTSTSRQGKVITIVPTSWNQCKDYEVNTFRDLRTALGKQYEDCDFEKIPKWSCVLSRLPARLLRIENLLWHASMGQYLDLGIKYHQFLAFNQTHTISSSKSQVLAWHPAKCHLARTQLN

SEQ ID NO: 930738 - protein, 165 aa, Homo sapiens
MSPQFMSCSLEKGTFVSLSVTNYAGFSRTVLVLAQKVSLPRKPFSPGKPGWWVALEHMDLKQPHLCTSAAVSHRRLFRCELNSISYAHQTPATYGKPSKWPVKPLLKACVEKRLERGPNGGDREDHSGISGCMQQCRVKSEAFLESGHVARLVIPVVDLSQNAKR

SEQ ID NO: 930739 - protein, 159 aa, Homo sapiens
MGYFSTGILHLHVLRCALCTETLHPCVGSYLGVTLVLTFIGTKPDQQRNFIQEALDPKQLTKMFGRHRNNSFLLPFPFLLLSPSLLHMCEQVSASMFSGHISFMVIVGNKAWIVTIGTVKAPAPGPLLTLTPHGLCDLGQFIHATENGDNNGTYSYDCF

SEQ ID NO: 930740 - protein, 157 aa, Homo sapiens
MCSLLVSVSHFGESLIQSKAGTLFNYMKAERGEEAVEENFEASRGGFMRFKETSRLHNIKLQGEVTSADTEAASYPEDLAQITDEDEKLLLMDKQRKWFLEMAPTPAEDAVNTIETTTKDIEYYINLVDTAAADFDKINSNFKRNYSVGKRLSNSIT

SEQ ID NO: 930741 - protein, 139 aa, Homo sapiens
MAPPTCLSNTYRPSSAICGDSIREHPALHGSAFSSFEVTPPLPPISPTQMSSTLCCLLGWPGKALLLYLSREAHTRQKPDSGVSMKATTQDFAMKVLISSEIAPSPPAWGPALLLLADIAGHCSLSWGLVSLGVFDLGQ

SEQ ID NO: 930742 - protein, 137 aa, Homo sapiens
MNASKETGTSVLQPKKLHSANHLNELGSDSFPELQIVNSLSMRLLAENPAGPHRTSDLWQSKFSGKGIVITGDDSSMHVIAPEDPPVGQDVEVEDSDIDDPDPGHVTGLSIHSSLTQSLTHPEQLPVLQAPFMVSAL

SEQ ID NO: 930743 - protein, 135 aa, Homo sapiens
MIVSTVISLPMSAGAAAANYAYWAYVPFLPLIRAVTWVDNSIEVYVNNSAWVPGPTDDRCPAQPKEEGMMMIISTGYCYPPICLGRAPGCLMPTTQNWLVEVPTVSATSGFTYHRVSGMSLRPQVNYLQDPSYQR

SEQ ID NO: 930744 - protein, 146 aa, Homo sapiens
MRAVFSTSCKAVLTSITPPAAMPSLAMARVKNFCLDLRDLLLPLPSQPIVSFTNIDFYNIDFSYCIDFSYCTDFSYCFDIPSKDSHEIAFKLSARGCHLKDHLTLDFTSKFTVVVVHRENKEVIIKREAVSKVKVKSCQSQRRLCN

SEQ ID NO: 930745 - protein, 141 aa, Homo sapiens
MLWHAPGPHYPWGLSSRLAQYSFHMAQGSKKAARPLIAQSQKLHYVPVTSTTFCWLKQVTGPAQIQEEWKQREKWQRPICKRASPVKYKPWLHTCHGYIPQQKPWVAQRPIFTFFRALSWGDIPRHRLSSSAERPRQQPIH

SEQ ID NO: 930746 - protein, 175 aa, Homo sapiens
MIRAALLEPQPPKLKQSSHLSPQGAGTTGAGPHTPLTFLYFFRLELLQAALPPQPPKVLVRQPGGKDSLAESPFDLSTGRNAPCGGALGNLRHLQWGGAWPLLFLGGTWDSVYQAGSTLALGRVSVSLFFFLPNKFHSHPSRHLTSKGEGVYEQGVGHKDHMLQRAKRRTKIICF

SEQ ID NO: 930747 - protein, 126 aa, Homo sapiens
MPFLCWLYFFLIPTDVGVPSPLFTSYLLLTAFTIAVVWTDLKSCQQSDCLSSSSKFSPRQFHLMLLKASPVHHALKPFIPPSPTSALPSYSPVYVKSTTSSLPGLKLWKDFIVNDVEGTERFCIAG

SEQ ID NO: 930748 - protein, 149 aa, Homo sapiens
MRILIPASESTQTEYKGWSHLMARDDSVIWFGSVSPPKSHGSEEDKKMKESLELPRDLLNYDHNAYSEMNSEVQAEEISDGEEELIENWSKSHSCYALAKRLAALCPCSMDLWNFELERDDLGYLVEEISKQQSIQDVARQAACSGTCL

SEQ ID NO: 930749 - protein, 142 aa, Homo sapiens
MVSGYKPRKSHLQEHRTQGTIRPSAQGLRALKNLPSSPEQALQYVGKWVKILMLEILWTTSCHLYIKNEEGKNRIQGQWLEHLCSQGFSLICGPKSISVIKAERRFTSGVVQCGLPCASLGFRVPRYEPVEELVGVRWVFTQ

SEQ ID NO: 930750 - protein, 233 aa, Homo sapiens
MTIGEALRVWSCVCASECPIPTGAERSRGRGVRCKERNGCDEDKEQWVAKSSVCEACSCWSLNRNQTRADSPGSGPPVSTHPTPIQETLNLVMWTGTIAHSSAGCTGSIVPASASGKAIGSKPIMAEGKGGAGASHGESSSWRENGGGGGGCQASFTLEFCMPAGLTPREATKSYGLHPLELEQQPELYLNPLEPRMGLEHPECGNSVQRLHRAARPWASPTQPFFPPTPMGL

SEQ ID NO: 930751 - protein, 311 aa, Homo sapiens
MDDAITALVVVDNCSSMRKAPQAVFPSIVGHPRHQGVMVGMGQKDSYVGKEAQSKRGILTLKYPIKHGNVTNWDNMEKIWHHTYNEVRVTAEEHPVLLTEAPLNPKLNHEKTTQFIMFETFNTPAMDVAIQAVLSLYASGEDPHPAQLQLHHHAEQEIMCDIKEKLCYVALEFEQEMASAASSSSLEKSYELPDDQVITIDNERFRCPEALFQPSFLGMESCGIHDTTFNSIMKCDVDNHKDLYANTVLSGGTNMYPGITDRMQKEITTLAPSTMKIKIIAPPQCKHSVWIGYSILASTSTFQQMWISKQE

SEQ ID NO: 930752 - protein, 161 aa, Homo sapiens
MMPHGHEKGLRGKVGFPKAFAFSHLITNPTNFMRSNSKCSTYPHLSIVRHSPQDCLGDGGPVLALLILRTSLKPPTPYPQRFSTPFQEPPFHWKYTSLKPLQSFPGPAAPSLSSATTRHYSGTSEAVTQETSRWHMGTRLHTPVAQDKEMGEEGFRARPAG

SEQ ID NO: 930753 - protein, 141 aa, Homo sapiens
MVNIECQLDWIEGYKVLILGVSVRVLPKEINIGVSGLGKAHPPLIWWAPSNQLPANIKQAEKREKNGLFVHVDESFFRIQMAVHCTVPRFVQCSDPTDIFTDMHAVVAKKGGGENIGFEAGQTPLDSQITYWLCDCLFCHL

SEQ ID NO: 930754 - protein, 144 aa, Homo sapiens
MHAVFQSSVYPAMCSSAGAQKLLPDPYSRFQGNGGKAAAAALVDTFPGPRGDLLNPGSLENGQHHVSPLAASASALVSLIDRNDSQGRVSALQEGRSPWPACPGSQETPRPPSGAGVPASEERQTALCVVTTGWDWQLSAPHRL

SEQ ID NO: 930755 - protein, 145 aa, Homo sapiens
MPEPPTHSMGSCAARASPTSTTPCSTAPSPIDHPRAEECELTAQDWQAAPPAAPVRDPLGEASWAPESGGDLKVCECTNRHSVSSCSGGALENLCVHTLYLANLMGTWRTFVSSSGIVNAPISALSKQATWLYQSAGCGWGQIRE

SEQ ID NO: 930756 - protein, 144 aa, Homo sapiens
MAAQVGAGFLQGLAPTWLSPSWVGSGGCHRSRANPVGAKAASGALTITEASESFVSWQGASNHESIWTCWSISTWSFHGKHPLTRGLVRLIHYHENSTGKTGLHDSITAPPDPSHNTWEFWQIHFKLRFGWGHSQTISLENFDL

SEQ ID NO: 930757 - protein, 467 aa, Homo sapiens
MVWKLKECSCIVVVIPITSSSSSSPPPHHHPHRYLHPHLLLLIIILIISIFITILFLLPIILNIILITILLLILIIIFITILFLLPIILNIILITILLLLILINPSSFFFSPSLSSSIIFITILFLLPIILITIFIPISSSSPSSSSSSSPLSSSSLSSSPLSFSSSSPSSLPLIIFITILLLLTIILTVIFTTILLHPPIILVIIFITMILLLLIIFSITIILLPIMLIIIFITMVLLLLTIIFTIISFSIPLLFTIILTIISITIILLLLPIIFIISITVFLLLPIILTIIFIPVFIFLLPIILLISITIPLLLIIILTSSSSLSSSSSSSSSSLSPSPSSSPSFSPSSSSLLSSSSPSSSSMIFITILLLPTILIIIFITIILLLPIILIISNTIILLLPIIFIIFITITLFLLTIILIVFITFLLMIFITIIILILPLLTIILIINHLHHHHYPPHHKHLLST

SEQ ID NO: 930758 - protein, 134 aa, Homo sapiens
MPDIATPPRSCQARSQEAASLLLSRTPPACGSHLARLRRGSVLVLAPSKNPLLENSGEQGEVVSSESLKAKKWLKKMHSSRLGAWQGAEGGSSSCHPEPPASAREPWHPASPGSEKYTWSESQVYLNSWEMSKC

SEQ ID NO: 930759 - protein, 178 aa, Homo sapiens
MPQQELFEVFCFYIKIRRDERSTPKVYPEPDTPRTGCSVAGTAHLSHVDPSRHLTTLLLQPFPSVVYTNMETSSPLKHSTQAFQWPHSEKQPEASGLCWRRGGLCPIHPCGITSLRMPVPLQCPTSPHPWGLLGMAFLLSSAGCSPPDGPWFSSAPPVSTHSHLAGPPPCPHLTFQPS

SEQ ID NO: 930760 - protein, 145 aa, Homo sapiens
MRGARSLSSVIWYNRINPCMVGPSEQPAGCTEPPRNTQNGNTESYRDVIQVGAGKGLPAEVYTQARGENALRGTKPRTQANAGNETAFPGQNAGALQQNQGLGSSVTSGRKAMEREQGLSVSRDGTGTGSFHVGNAEPALPTASG

SEQ ID NO: 930761 - protein, 135 aa, Homo sapiens
MESMCCCEGQMENECINSTVKPRPIRTWNHSHHWNLQSQRKPHHGGSEVKREEARLKGKLGGGEPLTFHTEKYGRWAVPLTLYTEKYGRWAVLRRVQASPSTVKLRSSTATPGCLPGLLDSEHSTTSLEFLRVLP

SEQ ID NO: 930762 - protein, 143 aa, Homo sapiens
MTQRSVPCREPGSGLLLLLAVQDQGVSRALSEDHEGICPRPLLESQGNDSVNVRIIEVKSVPSAMMGPTVPARLCSNVLKYTSSLALFLNSFYDGSSCPATSWSGLVWYVGHDSIASIPFFPEQSPLSQVQLVSSMNLTFTVF

SEQ ID NO: 930763 - protein, 205 aa, Homo sapiens
MFTAEDPIVFTAVDPNLTTKGPHIFAFTDPRCLSHHSPSPTAGAALASVTVGAALASVTVGAALASVTVGAALASVTVGAALASVTVGAALASVTVGAALASVTVGAALASVTVGAVASNPGQPLSMPTNVPPTSSPCTTITCMLTLIQLPPPALGLAFLEAITTRQLDLDVMLKPPQPPWISPTAFGTEGHAMASVIDPSCLSR

SEQ ID NO: 930764 - protein, 360 aa, Homo sapiens
MPSSCSRSGSRPASGCAWAWSPQVALGAGSRCRRFSVPPVLGAAGSRCRRFSVPTVLGAGSQCRFSVLPVLGAGSRCCRFSVLPILGADGSRCCRFSVPVLGAAGSRCCRFLVPVLGAAGSRCRFSVLPVLGAADSRCRRFSVPPVLGAGSRCRFSVLPVLGAGSRCCRFSVLPVLGAAGSRCCRFSVLTVLGAGSRCRFSVLPVLGAGSRCCRFSVPPVLGAAGSRCCRFSVLTVLGAASSRCCPRPPGRTHHPLCSARSDPVPAGPAPQRPGTSPIQVPKYEGNGGQGQERVGFRYLSEMNGGSVDDSGFENSRCPHLLALTPQPPAGSCAEPGDSLGWVENVSCHPEPPTNATFYVC

SEQ ID NO: 930765 - protein, 125 aa, Homo sapiens
MRSTGHGLDELGGDECGGCDSGDDQARGGKVFLDPPRGIRRVGTPQPRAAEGLEPRSFHSTVTTTGTSLNEINVFVCVAHCTLRTQNSGWHIINTQQTLINWKPGSDYSNGSCTGPTGFGGWKNL

SEQ ID NO: 930766 - protein, 133 aa, Homo sapiens
MEHWHCQPGTVALDDRDYTRIMRAAILGPREKAQHLIGESVSCLRAALCFSLQHCGPSIPKFIAFCEPRVREYFHHWPWCMKATLPTCHYHQSGFLSDGVRETPGPDWKKLISAGEMSAGDSTGPLSKKRLHS

SEQ ID NO: 930767 - protein, 140 aa, Homo sapiens
MLTTDATSTTLTTDLASTTLTTDATSTTLTTDLASTTLTTDATSTTLTTDLASTTLTTDATSTTLTTDLASTTLTTDATSTTLTTDLASTTLTTDAASTMLITNTASMTEADAPHQEKRSRHQKVVWGLWDSSTAFSVFL

SEQ ID NO: 930768 - protein, 136 aa, Homo sapiens
MLEALWPLGRTRGKTGTSFFWSSYCDWTLLAGASTCSWNELISKIIAAPTLFSTNIKVFSNLSPILVIHSVSPLSEITLTICLGELSVSPRGCTLYTYKVLFISLVPGSSCLKQYYACSRSSAAIQVNERYEGVTE

SEQ ID NO: 930769 - protein, 121 aa, Homo sapiens
MVLCLFSKIRSSLLSQIREKYTEKKCFAVLCPLRVCIQNYKKSLCSFSCVLTELDSCPEKKAGTGHLHHPLFLHFPTFLLNVFVSMVTPNFTLRCSSDEKDCRLPTGVSLPHMACWSLALG

SEQ ID NO: 930770 - protein, 153 aa, Homo sapiens
MGQKLSGRPCSGHCECGVWLCCDHTTRLRAAWSLHPRLTLARLITICTQSWVDRPSGPPCVPWTDLQPGVWTAACSLQQAALPSSAGLWLLRPQLWAMSRAGSFGRPPLVHPPRDPRCQEGGRTEVKSQLWRFRCYVPDFLTMLLPDVLNSCL

SEQ ID NO: 930771 - protein, 356 aa, Homo sapiens
MRCGEEAFLPSLGSAGVGRGGTGLVGRGGTGLVGRGGMDLVGRGGMGLVGRGGMGLVGRGGTGLVGRGGTGLVGRGGMDLVGRGGTGLVGRGGTGLVRRGGTDLVGRGGTGLVRRGGMGLVGRGGMGLVGRGGTGLVGRGGTDLVGRGGTGLVGRGGTDLVGRGGTGLVGRGGTDLVGRGGTDLVGRGGMDLVGRGGTGLVGRGGTDLVGRGGTGLVGRGGTDLVGRGGMGLVGRGGTDFVGRGGTGLVGRGGTGLVGRGGMGLPSGPGKPHLKCSRLSRADMASPPLCTLALGPADAARGAADTLGQRAFPRRMETAWTETAQGQQSQQGSCSPCSVTLNGTQAFLLRSGVANSC

SEQ ID NO: 930772 - protein, 152 aa, Homo sapiens
MILTGRFSFRWQEEKEIGPNTLKSKGNSLSPVAQTAASFQVLRFAYAEDVTTREGGWGQGPRSRAPSLSRFSCPNTRARVVTTDIYVLVFLGVGRRRPLAGVTDQQIRQPSAGSGGGRLEAHGSHMYPNRRTGEKNEDYSMKSKKNRKSGDN

SEQ ID NO: 930773 - protein, 146 aa, Homo sapiens
MEFSDAQKSQLQAFPPSMEFSDARKSQLQAFPPSMEFSDARKSQLQAFPRSAEFSDARKSQLQAFPPSVEFSDARKSQLQAFPPSVEFSDARKSQLQAFPPSVEFSDARKSQLQAFPLSVEFSDAQKSQLQAFPPSMEFGDITLRA

SEQ ID NO: 930774 - protein, 145 aa, Homo sapiens
MPEPPTHSMGSCAARASPTSTTPCSTAPSPIDHPRAEECERTAQDWQAAPPAAPVWDPLGEASWAPESGGDLKVCECTNRHSVSSCSGGALENLCVHTLYLANLMGTWRTFVSSSGIVNAPISALSKQATWLYQSAGCGWGQIRE

SEQ ID NO: 930775 - protein, 200 aa, Homo sapiens
MLRRPLLPLPPLSANSSILWLHSGEPVPGTLARLEARAPGNSQSLSAGREHPITRASGPVGPSPLGHSMGSTHSLEVLFRFHAADKNMPETGRKKKFNWTYSSSWLGSLRIMAGGERHFLHGGSKRKMRKKQKQKPLINPLGLVRLIHYHENSTGKTGLHDSITAPPDPSHNTWEFWQIHFKLRFGWGHSQTISLENFDL

SEQ ID NO: 930776 - protein, 486 aa, Homo sapiens
MPALRLQTAAQLDGTWKSMVWKLKECSCIVVVIPITSSFSSSPPPHHHPHRYLHPHLLLLIIILIIIIFITILFLLPIILNIILITILLLILIIIFITILFLLPIILNIILITILLLLILINPSSFFFSPSLSSSIIFITILFLLPIILITIFIPISSSSPSSSSSSSPLSSSSLSSSPLSFSSSSPSSLPLIIFITILLLLTIILTVIFTTILLHPPIILVIIFITMILLLLIIFSITIILLPIMLIIIFITMVLLLLTIIFTIISFSIPLLFTIILTIISITIILLLLPIIFIISITVFLLLPIILTIIFIPVFIFLLPIILLLISITIPLLLIIILTSSSSLSSSSSSSSSSLSPSPSSSPSFSPSSSSLLSSSSPSSSSMIFITILLLPTILIIIFITIILLLPIILIISNTIILLLPIIFIIFITITLFLLTIILIVFITFLLMIFITIIILILPLLTIILIINHLHHHHYPPHHKHLLST

SEQ ID NO: 930777 - protein, 151 aa, Homo sapiens
MHLCSPAQPLTHLYARHCHTAQVASSYGNTKAVSVSCTNQQPWKAAAMEDAGISSHIQSKEKTKPTAEASLTCALGQSRPQALQLQGDRPARSGIWKELRKRSPAGSRKQERHQGPGDGIGICSILQGRKPQAVHVRLLAKGLRGGHEVTH

SEQ ID NO: 930778 - protein, 148 aa, Homo sapiens
MGVLLPFSNTFIKFNPDSGQEKHMWAELRNQGKERNGIFASLSDEMQTDVNSAVAGISEACRPVPGSASSHPGSADVLVFRCRGLRLVQGPWHTPQNHMVPMARECDWAVLSLGKGPTVTVTVRHLQGPFNTPRGNRVQCLLTQRPAF

SEQ ID NO: 930779 - protein, 143 aa, Homo sapiens
MGLRLFGTQAVCTWALWDSGCVDLGYMGLGLCGTRAVWTWAVWTRAVWDLGCEVLRFCGTQAVWTQAPWIRAAWTQAVWTRAVWDLDCVRLRLCLLPVTQLCSFRSLSLPQLACGHSQARCKNTPLHLSRRNPVERGKSQSLL

SEQ ID NO: 930780 - protein, 134 aa, Homo sapiens
MGVTQFSRCCLSQLRLARKGNSLTPCTSQVVWRTVQRLTFHSSDITIIHMFDWAKSSSSPNELFHSFSHLCLASDWDGTCVRCFLLPGRLRHFKFNILAHKLAPNKQINMYSNICNTNIMHIFFKSNFLKYFPN

SEQ ID NO: 930781 - protein, 146 aa, Homo sapiens
MATKAKIHKSDLIKLKSFLTKIFSFYFLESFKLKHCEDQKLKRHVDCRTYISLLKYAMCLFQNHMYKLTTISEWDKKLHGNSLYREEGPSLNHKWLQSVEGECRKQNEQTENCQKWRLEETARHLRGLAGKNIEELLIFIAFIHVY

SEQ ID NO: 930782 - protein, 140 aa, Homo sapiens
MKAWTAAVSVTAQFEKHADLKRVLGQDLLKPKIQAQLTSINIKKDTFRLTKGIFVIMRHQHDRQQALIEIQVFYPKIYFFDIVLNGPAKLSLLGKNLHSVENLCTFLSQTRNICNLFSLMPATWRLHLHNKNLGLYTLLS

SEQ ID NO: 930783 - protein, 146 aa, Homo sapiens
MGSPAAPLLTYKCTSVYGLNFRLFSGGSQLFIFSLYLPSEHQTYLFIQLPNLGFYCISILREMQIKLFKTESYVSPTSWFSAPFHCRQQSSQATLGSPSADHNLECQNPKGAKSLIFKIPNVKYPKNHNPKQTVTILYFKILEVEF

SEQ ID NO: 930784 - protein, 147 aa, Homo sapiens
MYYTTLITTVLKSVFPFCGLNPPTLFSSSRLAYLYILESTCQFLPKMGDFDLDWIKSVDKFGEISLITTLRFQMTNTIYTPIYLDFLSFCLFPTQRYYPFIILSSSLPPLETDNILTIVAEKHDSLTSPGHQWELNCLNMNDGTEGA

SEQ ID NO: 930785 - protein, 158 aa, Homo sapiens
MKAGIGSICLEVSLGHPGDSSEHATTKHTELLLGYFKRPASSLGLGELEQGCITRLTDKYKVKPQMLFCGDLALQNQKTIKKSPNFAIPQWDPLSKPNFHCQLSLYQTTMVCRGILSGIMDIGVSEVGRMERGVRDEKLPIKYNVHYLGDGYSKSFCF

SEQ ID NO: 930786 - protein, 143 aa, Homo sapiens
MKAAKRGAVPNKATGEELPKSMGAHLLHQCDLDVRHGVKRDHFGTLRFNDCSIGFQTCMVPVTPWFWPFSPIWNGCTYLMPIPPLYLERDCGLDRKSEGNILQSQQVEDEVLPKGVLPQAQGTIFSSGNLPGFEIRSVCRIKN

SEQ ID NO: 930787 - protein, 183 aa, Homo sapiens
MNVVSLYVQEKLKNLSLFAKTYQKLGSQRSSIALRSLLGGALLKRQLKMGKHLWNWVTGRGWNSLEGSVEDRKMWENLELLRDLLNGSDKNADNDMNNEMQVEVVSNGDEELVENWSKGDSCYVLAKRLVAFCPCPRDLWNFKLERDDLGYLVEEMSKQQSIQDVTWVLLKTFSFTRGAEYKS

SEQ ID NO: 930788 - protein, 174 aa, Homo sapiens
MITLEYLKNFLFQSGADISSAFPIYCMNMYPLGPLQKHGTRSRNCQNQLCPNSGKSQRFTETKHNLNQEKVNLKIVKKHCDILTFSFSKLSQLCGTPEDNSLHSKCETMILDPKGSRAYLIHKELSGSFLTHQEILEKLMKGVHLCFTELGALPVWKGSRLCSKHIVKWGETHS

SEQ ID NO: 930789 - protein, 134 aa, Homo sapiens
MLHTGLPSILLNIQALSLLSSPMHFHWPSSTSPPEELHPTLQEPDIFSGLCCLQGWEWATGGKGGGRDNSEAATAVTQMRGEGGVDKSSGTDDHLLPQRIFTCPAVLVSLEVSYNFQAGQISIHTPAPLHWKSS

SEQ ID NO: 930790 - protein, 136 aa, Homo sapiens
MVSCPNNVSFTEEDASRGPNHIKEWRIATNTNSHDLDPCCIQTIGSSRLWKKEHRSLTQREKRFGDFSQQQTLKVGKVNIYKVMTKAFKQGDSYHLLSRKLSLEVNEMEATSCKRDLPELWIPFPEKRFLIAQKVW

SEQ ID NO: 930791 - protein, 134 aa, Homo sapiens
MPREHAVGDWPTEVALLQSTDRWGLWLYHHLGLPLPLDFLLVAGQSPGTVEPPLASGKLEQKAGKQGTLPIPSSPISHSISVVWGGRKEVLKERTRCRKEEERSRWAVQRDGSEAPVAPRPFKVNVINHVPCTR

SEQ ID NO: 930792 - protein, 147 aa, Homo sapiens
MVSSQQVCLYFQPAQQQTTNNLRAQIQEAAREEDPALKLKPHWAGSSDAWYMTGTTTQIQKTVWLQMHLQIWIKNKVPGWTHQAYILEGFLSLSLWKCSGLLKIEVYYGNADRPLNRALYLQHCNYASIEKLQRKHDFLVQINHAWL

SEQ ID NO: 930793 - protein, 134 aa, Homo sapiens
MAVSTLEEGFQGGRKHIGSLVAPTAQPCPEQRGCWLGWLISMELMGLLWPSTPPSSGPNLLLPLCIWAVATAKEARVRLLSPSFHQIPQAQNHMGHMEEPPLTTLRTSDVDFTGKGAKTIPRGKDHSSLFKPVF

SEQ ID NO: 930794 - protein, 163 aa, Homo sapiens
MPLAGLCVLPAFSCLTDGHVALQKVFIDTQEVCSILQLERDREYADQATHFIGKVGLGAVTSEVSIAAQQITPRLSGLKRHHSFVISHSFCVPGILEQLSWSAPLYSLQLDMPVARVILKAVFGSREGKLEWLGPLGTGTGDSRLIVFFMASIKILRESDKGV

SEQ ID NO: 930795 - protein, 125 aa, Homo sapiens
MDNLASWNPSLANYLVISLFIPLCSFYHCLVQVPITPPGIPAFIANQPHCQRIGFISLSCLRTLMATYIGLEVKHLAIILTLLASVGALGPCVCSSQFEFVLSDLPDYNLLVCGFPLSNMVSDTK

SEQ ID NO: 930796 - protein, 133 aa, Homo sapiens
MSVDHCPEQERECHQCPRNAPVSLLDTSPTVLKGPPDSYEDDEDDDGGRGGEGEERKGEGREGEERGVGEEEGGGEGGGGDKEDDVGDDKDVGGDDNVDDDDERGRGEGKKEQEKRGKMMSVAVMMLLTMMIK

SEQ ID NO: 930797 - protein, 671 aa, Homo sapiens
MSPGCRAPPYLGRVGVADEGRTDTAYRVVADHIRTLSVCISDGIFPGMSGPPLVLRRILRRAVRFSMEILKAPPGFLGSLVPVVVETLGDAYPELQRNSAQIANLVSEDEAAFLASLERAEVAWSLSLCGDLGLPLDMVELMLEEKGVQLDSAGLERLAQEEAQHRARQAEPVQKQGLWLDVHALGELQRQGVPPTDDSPKYNYSLRPSGSYEFGTCEAQVLQLYTEDGTAVASVGKGQRCGLLLDRTNFYAEQGGQASDRGYLVRAGQEDVLFPVARAQVCGGFILHEAVAPECLRLGDQVQLHVDEAWRLGCMAKHTATHLLNWALRQTLGPGTEQQGSHLNPEQLRLDVTTQTPLTPEQLRAVENTVQEAVGQDEAVYMEEVPLALTAQVPGLRSLDEVYPDPVRVVSVGVPVAHALDPASQAALQTSVELCCGTHLLRTGAVGDLVIIGDRQLSKGTTRLLAVTGEQAQQARELGQSLAQEVKAATERLSLGSRDVAEALRLSKDIGRLIEAVETAVMPQWQRRELLATVKMLQRRANTAIRKLQMGQAAKKTQELLERHSKGPLIVDTVSAESLSVLVKVVRQLCEQAPSTSVLLLSPQPMGKVLCACQVAQGAMPTFTAEAWALAVCSHMGGKAWGSRVVAQGTGSTTDLEAALSIAQTYALSQL

SEQ ID NO: 930798 - protein, 394 aa, Homo sapiens
MRRIIAEDPEWSLAIVPLLTELCIQHIIRNFQKNPILKQMLPEHQQKVLNHLSPDLPLAVTANLIDSENYWLRCCMHRWPVCHVAHHGGSWKRMFFERHLENLLKHFIPGTTDPAVILDLLPLCRNYVRRVHVDQFLPPVQLPAQLRPGDQSDSGSEGEMEEPTVDHYQLGDLVAGLSHLEELDLVYDVKDCGMNFEWNLFLFTYRDCLSLAAAIKACHTLKIFKLTRSKVDDDKARIIIRSLLDHPVLEELDLSQNLIGDRGARGAAKLLSHSRLRVLNLANNQVRAPGAQSLAHALAHNTNLISLNLRLNCIEDEGGQALAHALQTNKCLTTLHLGGNELSEPTATLLSQVLAINTTLTSINLSCNHIGLVSHLFWACEGGCGIQLPGVLVG

SEQ ID NO: 930799 - protein, 136 aa, Homo sapiens
MCVPNAPVTHNPTIAHGHHTFSGSNWKERKTLPTGKWGPAQLPAPLNIPGTDSLALPCPRHCSRCCFDCCCPACCCLLPAWPANTSCPCCADWPAAWAPRTCERLCWAVCCSFSASDTRQTLGRPQEWTAWRGGRG

SEQ ID NO: 930800 - protein, 316 aa, Homo sapiens [sequence omitted]

SEQ ID NO: 930801 - protein, 262 aa, Homo sapiens [sequence omitted]

SEQ ID NO: 930802 - protein, 170 aa, Homo sapiens
MGHKAVETTLNVSNAFGAETAEEYTVHWWFKKLCKGYESLEDEEIVASHGKPNLHQKEFMVTVSWSAAGLIHCSFPNPGKIISSEKYTQQIDEMHRKLQCLQPALVNRKSTILLCNTQLHITQPTLQELNELGHQLLPHPLYSPNFLPTDYHFFKHLDDFLQFAGKTLPQ

SEQ ID NO: 930803 - protein, 275 aa, Homo sapiens
MLLGFLDSATFLEECTDGSLTLLGFPAPESVKLQDLYAKKPETAASGAVGLKLPVSKAQVWPIGQENLQGLGHCCPALPAASYLLAASLPPPAMAQRDTGTAWVITLEGASHEHLWHPCGVKSADAQNARIMEAWKLLPRFQRMYWKAWVCRPATGVEPLQRVFTRAVHIGAIATGALLLRPKNYRATSPKPCWRAGLPEALGANSLHQCAQGVEHGVKDYLGALTLNVCPAGFQTCMRKPLNSQQASLVMWFQSPGPLELVWYWGIREDWAVCG

SEQ ID NO: 930804 - protein, 225 aa, Homo sapiens
MVWEHIPSVIWFVISWGGEDDITRNITGGTYTPPSNIVCNSEDVHQPIILFVISRNREDDITPSITGGVQLNVILFVISRKRKNGLTANIARGVHPLVILFVILSVGEDDIIFNITGAVQPPVILLIIFSEGKDDITLNITGAVHLPVILFVISKGEKDDITPNIAKGVHQPMVLFIIFRRRKDNITPNIAGSVHIPPVILFVIPRKGEDDIHPNTLNTLFVHPL

SEQ ID NO: 930805 - protein, 145 aa, Homo sapiens
MIRQQHLLFTNIHCSAASAADTQANRMENDFDELREEGFRRSNFSELKEEVQTHCKEAKNLEKRLDEWLIRITSVEKSLNDLMELKNMAQELRDEYTSFRTFAIGKCNNGICNGVAVICDEFPPPEKLVTKENDLMLWSCASVHM

SEQ ID NO: 930806 - protein, 485 aa, Homo sapiens
MNSNNTLSPSGYYERYHKGLYAPRNMDSNITISRPAYYVQYQKRVYFHCDMGSNFTLCFPEVVYTMGDMGTNITLSLQDITNHITGSPPGYNETYHKGLYNPRDTGSNRSNITLCPQDIRRHITPSMIWGVISPSFFLDITNHITGEIPAIWGVISPYAPQNLRTISHGSVRPPRYVMSPSPLLDITNHITRMYTPRDMGCNITHFSLPGYYEPYHREVYTLQDIESNITLLSHPGKNITGGVYSPDDIGSHVIFSLMDIWNNTTGVVYTPCDIVININLSFLDIKNNITGVVYISCDIGSNIILSFFGYFEQYHGEGPFDIWSNIILFFPGYYEQYHSGMHTPCDIANNIVFSHPGYYKQYHGGCTAPVILGGVITSSFPVNITNNITEGCTPSAILRETSSTPLDIIKNITVGLYTPCVIGCNTILSPPLNIRNNITGGCTPPAILGVISSSPPINIRNNITAGVCTPYDIGSNIILSLPGYY

SEQ ID NO: 930807 - protein, 150 aa, Homo sapiens
MLTSLRPLLKLHLLNEAFSGSACRGHRNIRLLRQCQVRAAELPLFELLRVDISALHVEGGDWGTPLAAAATAGEPLLVQYWQLHAKPGRVWPGCSGFPAVPDGLSAHVAISSSLPGPPWSLSFSRVDACQFPKLYIPSCSLSIQVGCSYG

SEQ ID NO: 930808 - protein, 233 aa, Homo sapiens
MGIGDPSPHPSPRLRPDPSPTLHQTCGQTPAPPCTPPAAKPQPPPCTPPAARHQPHPAPHLRSNPSPHHAPHLRPNPTPHPAPHLWPDTSPTLLPTCGQTPAPTLHPTCGQTPAPTLHPTCGQTPAPPCSPPAAKPQPPPCTPPAAKPQPPPCTPPAARHQPHPAPHLRPNPSPHPAPHLRPNPSPHPAPHLRPDTSPHPAPHLRPDPSPTLLPTCGRTPAPTLHPNFSHASQ

SEQ ID NO: 930809 - protein, 241 aa, Homo sapiens
MTSSPDQAKPLKYTLYSTVYLTSQLGCLINPQGHEQNQPVETRELIPIPGPRSCRDRAKAIPTHSDFLGDIMIKAKGTLKALDLYWGRKMSPIDSSCLGIHLPDRSINAVKSSTISIPNQLFCKAPVFPTHQEEDKISKCILVDVYSLNVNKNFTLKDSRFPLSSDRQQTAGSGAVLTSEPKVRELSDPHSISPTGSIAFLATERLIIHCTRERRSLVIDKDVPASHLAGSGAEKPCTELV

SEQ ID NO: 930810 - protein, 216 aa, Homo sapiens
MPFSHIGAAQALSQGLCHFALSSPNSWTYSGKPNLTSYDLALPLNCQPWGIAPPNSPLNCQPWGIAPPSLPLNCQPWGIAPPSLPLNCQPWGIAPPNSPLNCQPWGIAPPSLPLNCQPWGIAPPNSPLNCQPWGIAPPSLPLNCQPWGIAPPSLPLNCQPWGIAPPSLPLNCQPWGIAPPNSPLNCQPWGIAPPSLPLNCQPWGIVPWNPPLNCQS

SEQ ID NO: 930811 - protein, 134 aa, Homo sapiens
MSSWAYCDVLVGPYYVFFQGLNNGPKANRKTSRERETKGTSYIKSQEPDEQLALHLPTICLLKEHLCWGDLTPPLISTGHRHPCTRTVNACHVGKTEGLPCTSEKQRAYHAHPNPNSLPSSPLANGWLPLSPSM

SEQ ID NO: 930812 - protein, 151 aa, Homo sapiens
MSLTVLLPDRPHAQGQMGGLVLLEHSQGLAFLRFEAGICKCTKQAHIDSWYRFPNMKAVLGIFEASKQIWEPGEGSSSGSVSRHRSHRQQASTCSAGAFFKRVQLTSASLGFPLLNCSQLLLLVVCGQSHGIYRKVVLTLFSVLTPLLGLR

SEQ ID NO: 930813 - protein, 139 aa, Homo sapiens
MWIMPLTLTHSSFLIALPLMSGAVLTAATGPIWPGPDLEGMFLPRFSHEERCSWEVFHTHSARLKTCPSIPSLDDAAGPKLTYDGVIGLHPEHLPAPHAAPQTSPPNHRMTEPHVSSHGHQRRGAANLKNVFTSRWDTA

SEQ ID NO: 930814 - protein, 155 aa, Homo sapiens
MRRWEVSLKRQLSHTVVVLFPIASRVEWKVESLTYGSCSCPWHRHSYGIPWEDITAQWEGVCYRLDLSQNPASPALGEKGACEGPGEPRIVREASVSGGRGSPEALKVQCIAKLSQGTKNTKVPNIQRASWSLIFPYFYYIFKDVIVKYTYGKVH

SEQ ID NO: 930815 - protein, 179 aa, Homo sapiens
MNLSHSRLFWMAEKTTMKEKLSSRCRPPGTAPHEVITHAHSGFRYLTPELNARRAVACRAQRRLPSEGGLWADPMSELPGRATADFVTYRSSERSSKGHPVVDDVECDAHGATGPEGLQAAVGAQALSAKRFLSTAGVAALTLPDEGNLQFLQSQCSELKHIYYDTQRPVWWLDRSTNG

SEQ ID NO: 930816 - protein, 235 aa, Homo sapiens
MKDYLLNGMAMMAMVRMMTVVMKDYLLNGMAMMVMDDDGDDEGLFIKWHGNDGDGKDDDGGDEGLFTKWHGNDGDGKDDDGDDEGLFTKWHGNDGDGKDDDGGDEGLFTKWHGNDGDGKDDDGDDEGLFTKWHGNDGDGKDDDGDDEGLFTKWHGNDGDGKDDDGGDEGLFTKWHGNDGDGKDDDGGDEGLFTKWHGNDGDGKDDDGDDEGLFTKWHGNDGDGKDDDGDDEVITY

SEQ ID NO: 930817 - protein, 477 aa, Homo sapiens
MVAIDKEEMKRKCSNIHESREDNGTDAIGHGHPSLCREDNGTDAIGHGHPSLCREDNGTDAIGHGHPSLCREDNGTDAIGHGHPSLCREDNGTDAIGHGHPSLCREDNGTDAIGHGHPSLCREDNGTDAIGHGHPSLCREDNGTDAIGHGHPSLCREDNGTDAIGHGHPSLCREDNGTDAIGHGHPSLCREDNGMDAIGHGHPSLCREDNGMDAIGHGHPLLCREHNGTDAIGHGHPLLCREHNSTDAIGHGHPLLCREHNSMDAIGHGHPSLYKEDNGMDAIGHGHPLLCREHNSMDAISHSPPSLCREDNDMDAIGHGPPSICGEDNSHPSLFREDNGMDAISHSPPSLCREHNGTDAIGNGPPSLCREHENPEPPLPGMNGLQNPEPPLPGMNGLQNPEHPPGTNRLQNPEAPLGTNGLQNPEPSPGTNGIQNPEPLPGTNGLQGPAKGRRLCTTPTYYSILSRKPMHASVQMS

SEQ ID NO: 930818 - protein, 219 aa, Homo sapiens
MLSSQLEVHHRTAVEAGGLGNTCTAANSYTHISTAANVFNCQTYCACPRMPPIQHHKPFRQTDTARASARKPNPQVLLDDGFVPSPSVFPAALGALINEAHHLCPQHCLSLAKPLPVLGAGQCYACCLAASAPHPRPREATALPCILLAWPGQDSRETRTQKKQTLQAPCSRASRILGQQMFTTDGSVIIVDRLQKRAREHLTEGTDLTQRSENEQRPT

SEQ ID NO: 930819 - protein, 818 aa, Homo sapiens
MQGQSEEVRGAAGLVLALTDSRRETAEWPREILHDFSRAVKFVKIIVLVKKLGSWCSSDLYAESVYLLETVLFLLYAESVYLVQTVLFLLYAESVYLVETVLFLLYAESVYLVDTVLFLLYAKSVNLVETVLFLLCAESVYLLETVLFLLYAESVYTVETVLFLLCAESVYLVETVLFLLYAEPVYTVETVLFLLYAESVYTVETVLFLLYAEPVYLVETVLFLLYAEPVYTVETVLFLLYAESVYTVETVLFLLYAESVYTVETVLFLLYAESVYLVETVLFLLYAESVYMVETTLFLLCAESVYLVETVLFLLYAEPVYTVETVLFLLYAESVYTVETVLFLLCTESVYLVETVLFLLYAEPVYTVETVLFLLYAESVYTVETVLFLLYAEPVYLVETVLFLLYAEPVYTVETVLFLLYAEPVYLVETVLFLLYAESVYLVETVLFLLYAESVYTVETVLFLLYAEPVYMVETVLFLLYAEPVYTVETVLFLLYAESVYLVETVLFLLCAEPVYMVETVLFLLYAEPVYTVETVLFLLCAESVYMVETVVFLLYAEPVYTVETVLFLLYAEPVCMVETVLFLLYAESVYLVETVLFLLYAEPVYMVETVLFLLCAESVYLVDTVLFLLYAQSVNLVETVLFLLYAESVYTVETVLFLLYAEPVYTVETVLFLLCAESVYTVETVLFLLYAEPVYMVEIVLFLLCAESVYTVETVLFLLYAEPVYLVETVLFLLYAEPVYMVETVLFLLCAESVYTVETILFLLYAESVYMMETVLFLLYAESVYTVETVLFLLYAEPVCMVETVLFLLYAESVYMV

SEQ ID NO: 930820 - protein, 232 aa, Homo sapiens
MPVRARRLRDPGPTPDPGPRPPATESPRAGVAAQRPALEEAARGPILVDTGGPWAREALLGALAGQGVAPGDVTLVVGTHGHSDHIGNLGLFPGAALLVSHDFCLPGGRYLPHGLGEGQPLRLGPGLEVWATPGHGGQRDVSVVVAGTALGTVVVAGDVFERDGDEDSWQALSEDPAAQERSRKRVLVVADVVVPGHGPPFRVLREASQPETEGGGNSQQEPVVGDEEPALH

SEQ ID NO: 930821 - protein, 137 aa, Homo sapiens
MQIKSWQPPGWVLRYPQIDVDTQASVEDQKSRAGIGFMHFPNSYKMLRLGLMLVTSSAVTQSADNNKLSPTDTQKRGRRVSGKEDVAKRADWGWRLPSIAHQLWASVYITSWLKLWITTNRNTSKKGKEEENESKLL

SEQ ID NO: 930822 - protein, 169 aa, Homo sapiens
MSKWSGALPREHSQPGGPWPGKGAQARCPGRGLSISKREKREGAGMLGAPGVCVIGEEGGLGQWRRTELEERAGSSLKGFLGSPGLGLCTEESGLHGVSVEENEKGLTPATGNGEKEGSSDAWLRTVMQHLQRIGGRWKTKAHSTLVASGVGKGWEAQGGFHRSPCDNE

SEQ ID NO: 930823 - protein, 153 aa, Homo sapiens
MFRRKPSPITTQSCCCTTLTLGLCGELGDCSPKVSASPLGLLSTRVDQWWHRGRDGSGGAVTETATILKVLNGQVPTWAARRSLWRCKADIGRGRNGVLLTRWLESASARTEALRAQVIEQVLSANYNAEKLISFNRHKKGAQQQAQTRIFIL

SEQ ID NO: 930824 - protein, 196 aa, Homo sapiens
MYRFSPFAWTDCRYLCEGDKDGAGDEDRHVDKGGGGDGDGIKMRMEIGMKIKMEIEMSMGIERDGDEGGDGNGDGDEGGDGDEDGDGDGDGHEDGDGNGNGVGMGMEMETEMQMGMEMKMKKGMETRDVDGDGNEDKNGDEVGDGVGDGNGDGDRGADGNGDRDGDDKNGDEIGDGDGAGEGDGDGDRCRWGWRQG

SEQ ID NO: 930825 - protein, 149 aa, Homo sapiens
MLSSASEPLCRPLCLPDIAAPPVELPWAQLLDFQMPNPTLKFPNSYFSPMLPLLADLSPLLLVSGMEEMFLQQRKDVPYQTRLGSPPPLSSSLAAPNTRAAREQHQKKGELYYVSRKWDQGLQVLFVFMSCPSMDYEREMFCLLCEGTI

SEQ ID NO: 930826 - protein, 152 aa, Homo sapiens
MMNNTPKSNSQVSERGLRPQVIDDGGNGDDGGDGDDGVDGVVDDGDVMVVMVMVVMVMMVMVLMVMVMMVVVMVMMVMVIMVVVMVVLVMVMMVMVMMVMVMMVMVMMVVKKVVVMVNGSDGGIGDGDDGDGDGGDCDSVNGGDDGDSYVFI

SEQ ID NO: 930827 - protein, 140 aa, Homo sapiens
MFLSMTHGNLCPDTEISRKPKPSSSEAGLEHQQIPPELLPLCEPDHLAVGIVQGPQPTTPTVFAGPEPENLSQFPNVYRVSLLGYNILLYVARLQLSLLPPWDRQNLKLRLQGLRWSFSRREQDHCPGHHSRCSTGDCKV

SEQ ID NO: 930828 - protein, 135 aa, Homo sapiens
MRGVGEAGGAAGFPTSSASHIGPSSLCPTIVIIWSLPGLACSGSAGLSASGTLAQEACLSTLGPFYSHSHRIPGPLSPAGLRACPVAKAYWLNISREEFLLKPSVRKHFLGRNTLGKVLSNTNRRSGILHFISKF

SEQ ID NO: 930829 - protein, 160 aa, Homo sapiens
MGHYPIKSLSHYFPFGGYLAEEISKQQRIQEVTWVLLKAFSFIREAEHKSLENVQPDNVIEKKIPFSKKKFKPAEEICINNKELNFNPQDNGENVSRACYSSSFHHRPRGLGGNNGFMGWAQGPSPVCSLATWYPAFQPPQPWLKEAKTARYNRPTLRFC

SEQ ID NO: 930830 - protein, 172 aa, Homo sapiens
MLRCAACEHQAQVPYRHLASQKTSELGKDMSDSYILDVKSGEWLPYCFPDPQINMLTRELVLCRALTILAQLSGEQPLNLDFMQIHEARLMRSEFSKKTKVVDSRSKSPVSFTLGKQCSCHPSPHPFSLSQDLLHKQLRNRTQCNIYSLEVDTREFRPKNPEASFVSCWTCS

SEQ ID NO: 930831 - protein, 230 aa, Homo sapiens
MPWPLASSALGSPPFSSPLLMEKMRRLWDSDWLPCSSACGWPIVRPYDRPRQMSAVKMRALIGKEWDPATWNGDLWKDHDEAGDTEFVNSDESFLPEGTASPSPVVATSPLRPMLPSAFPPLSGKINPALPEATVMSFPETVARQNNVDSPEEPPPTPLFASRPNTRLKSWQAPRYLTVRTAVTQLQNLNTMEILDPEVAGSKWQHSTVKGKVGITTVMDSRGKSAIRIV

SEQ ID NO: 930832 - protein, 317 aa, Homo sapiens
MPDTQSCKTAIKVLLLLFSVPLSPFFGFGRMRKYSRLDPEDPVGQGLLKVNFVTKSRPDITKQLQKIEGWNEKSIEELLREAQKLFVRREEERQKQKAKIVVSINLKVEISLPSNRKIPQPGGNSSIAGLCCHIVSLKPQTYLVRSSKGRNSGIRGTKASSCNSSGPGPPTSRETVPFVGDSGSGCCPWGAYSNLGIFVSKLLDPVSRRWPECVQVIAATALHAEESQKLTFDGALISATFWWSTIKKKVNWINYIYYNQKRFISYTQDALKGVASQLNATSQMSWENKIALNIILAKDGANQSGEAYWSKLDSKIV

SEQ ID NO: 930833 - protein, 144 aa, Homo sapiens
MTGSFLRPHQKQMPIPCFLYSLQTCGKCDRHTKQGPHTLGIVSSTSIPRFGTSDAEAVQHRVLLLPTRICSCFLTTFADEQISLCLHHSGAECSRMNAAKSFPINNLNQHMAGMGEPRSKNLCPQVGHLRGTCSTLVSRVLQWD

SEQ ID NO: 930834 - protein, 151 aa, Homo sapiens
MLNIVMTIGLWVSIPGKDKALGPLICLTAIPGLLHKLCFPHCNVYNNDTFFSLNISDSFLHLLSQLLTLPVMQLQCLEISMNTQSPFRVLIQLIRESYLSNLCNVPLLHPLLCRSLLLHCSDPHNLLHIKWSFSFSNSTLPPYSWKLLRQC

SEQ ID NO: 930835 - protein, 206 aa, Homo sapiens
MSPAYPALPSQGIGSQNRLPGLSLARLLLEMNQNTGRGLIDRSMDAEDTALPQKTSSPRYQKHHWACPRGTLGLKKQVNTHRHRLQDSQGPGRSPQPTLQVGPCSPTIQQTQVPGLLQQTRVKSCLELESPPRTQVPGPPLCSQVPGWPLKTQDPGQPSLQCQHQWTRSPDSRPALMAPGTGLMPVVLGTRPALMGPDSMPALAGG

SEQ ID NO: 930836 - protein, 142 aa, Homo sapiens
MVYYGERPSTEIHLFHSSHYRWMGKFPGRQRYLEGVVIIGDDSSMPVIAPEDLLLGQDVEVEDSDIDDPHLVANGEEISVGGKLIERNGMVTSSCSTKEFAANSSVPKEILKVFLQEKGYHGNAGIINNQGKVTHGVNLNEY

SEQ ID NO: 930837 - protein, 249 aa, Homo sapiens
MPLTDLKINHKTTKRRCLLFGALWLKMCSVSDGIAQFSANYSQPCNQTLQHSLQAACECGVFPVCLWKETLFSALLLLILLGGSSVAPIVGRNMDGNGHSSMVSGGNEEQVIGNWSKGDPCYKVASTLAKLCPGILWKVDFDSDEIGHLAEEISKKNIEEAYSVFLTLGVRYERRETIHIAKKEKTCSKENTTGVDEQLLDKIHVSVNRKWNQPLQRKPEVEMGLYLQRHCQFEMRVWTLDFRVDAGMS

SEQ ID NO: 930838 - protein, 155 aa, Homo sapiens
MNRISLTCLLSRQYPQRNKLNNHNLKFWGNFCENMQTPNCYPVLPKKVRGAESAEEAAGTFWCGGKCKEKSAASGTGNCGAQLEAAAPERVAPSWRQPHAQGGVSEGDRKDGGGSSPQGAKGSPSQEAPSSKKHARTCSDSSLLSLSLVPLRNVT

SEQ ID NO: 930839 - protein, 178 aa, Homo sapiens
MSVKLEIRWLSQQIQVDSLCDLNNYTTKYDGCDREPRRTWLSAEVKKTQGMKRIWDERDLLIFVSLKGTKQVESKDSVGERMWILTAKCNCEKDGRFNSGYFKAQQSRQKLMIENYKNSKGINNFNNTINHIDLIVIYRTLYTTTAKYTLFSSAHDMFTEINYTLVHKVCLRYTHYSY

SEQ ID NO: 930840 - protein, 163 aa, Homo sapiens
MPIVISSFLWSQFLEICIPLVVSYFLEFCVCCCAVLVSALLKESSPLTVFTYWVQWKNTFIYWWIQGHQLSWKGRGSRKNGRETGAKLSGTCDSLHPPVFVFNISVGVSLCDLTYPHLTDLRRVEKVFDHFNHKNFMRVCVKRPPNRLCVSNKAVYFTWGQVG

SEQ ID NO: 930841 - protein, 141 aa, Homo sapiens
MLFCVHAVIDSVEGSLPPVHIEPIPTVAVRRNYTIKTDMAVKLGTFYECLLIYLHQCIHIPLINGFGLAIVIDRKPVISWSSLSLEYSYWGADLCNWLRKQNSSFNKATISLWKLCELESIREMLKKVMIMEIMTTHERGS

SEQ ID NO: 930842 - protein, 214 aa, Homo sapiens
MISLRSYDFNEISLYINEAFLRPYLQLQPRLWESLELPRDSLSGFDQNADSDMDNEVQVEVVSDEDEELIGKWSQDGASPKPWQLPGGAGPVGAQKSIIHIWEPLSRFQRMHGNAWIFRQKFAAEVEPSWRASARAVQKGNVGLEPPHRVPTEALPSGAVRRGPLSSRPQNDRFTDSLYQNIDPYASESEDFFFINVSDHIFKSLSHEAVYNFS

SEQ ID NO: 930843 - protein, 216 aa, Homo sapiens
MKMADFLFGQELFPGVTRIAKVEREDGKLIPLENIDGSQMVYQALFHRVEISGEKVFRKGEHQVKGKGVNGCFFKLCHDELRAGIAVECGSYSGIMASVESWLNPSGVDEGNNTLDTPLKSLIPLQSLNVPVPETDSPDSPEARTFTYYQILTIGTCKGILWRPLEGFPDKKYMPLDVYLAVIDAWNSKNKQQDQSIKLRSSQQKRAKSLSSQYHN

SEQ ID NO: 930844 - protein, 155 aa, Homo sapiens
MPACESSCRNCTLKYRRDRAAQGLGSPPIVSVLKEGCCVQGFLCTHFPFGFSHNSRWFLEHLLVELLAMGRSLSSQQWAKGSTRKKQNDLTLSYDALKIELSHVVTTDECREKNSERISIKTNKLHAITASILPSAALVRKPLVRITCGMINNVS

SEQ ID NO: 930845 - protein, 150 aa, Homo sapiens
MMSCVFLRQDADRSLSRSCSFQVHVRSRAPHSKATGISSTMFGAHRRLQHTCIQHFLWDMSKHHKEVAEKPGVRHQQDRMDDITVTITLTLQELIAPKYVKGNKNTGLEVHLPYALIVYKHQAPNKFNILKLSQPKGTNPDFAEQKDSPP

SEQ ID NO: 930846 - protein, 142 aa, Homo sapiens
MKRFAFASTVCLRCQEYVITLNDFIEFLYKFEPYDPMMSGLGLQFLKKTSYFFSSHLTVMPVALSAEVSFVSEQGCVHECVFPTPLLLADQHYIVNNRWRRAGFPPSPEAPGLGLRLDGSSISWLSPSSTWHLLPMREEFQN

SEQ ID NO: 930847 - protein, 134 aa, Homo sapiens
MEGEEKGNILMNLFFCPGKLDYGSTFEQDGGEPCLEVYGHPARHNAQTQQRVGLMRTYCQYWQAAFTTHIFRCSWMLHVAPSTLPSKTNNIDSSSTPFRESWNGWSPEKADSSHSCTCLLLPSMKSTSCLRLTC

SEQ ID NO: 930848 - protein, 136 aa, Homo sapiens
MAPSLSCQRELSRYAEIPMGVYGLSLFPGHIEQISITTSLMSGVAQRPTSSSRICGQAVSPASDRSLDLRFYSPGFICSVAGTVQAENSASTKLLHLTRWTISQFQNYFYCFINGNNKMNTTVWEGGGSGKKRDRD

SEQ ID NO: 930849 - protein, 221 aa, Homo sapiens
MRVQHWWRLRLAPSLASANSAVMNSLVHVAFFTCGDVSFLTAVDVSTRIVISSSHTGQFFERSKLAPTSATQESHRKLEIQRHILELILSLKKAFSHHKCPGLPSSCPEPALVLQASDWTNLSPEALPKTVDGGLQPGSSSIRGSNVVFQLTVYGRVVKVQTGGSSDWTESQMQAVPRQGWQESQKFSSLAPGLPALALFGEQAPEACMAGCPLFRSSLLS

SEQ ID NO: 930850 - protein, 145 aa, Homo sapiens
MRLLRISPAPFLPANCTCGVSNSRGKVHPCVSIPTVCPVVSWRWSFLTEGGDVGWRMRRGFRLPPKAALLSGLGEEGCVLGGKTVPQSTPKGIYGSAPDNRPQPSAPSPAAGGMPPDPSYRWTVCLSFSTIVNFPRVFMDIFTGG

SEQ ID NO: 930851 - protein, 158 aa, Homo sapiens
MSTSAMGVERSKTAPGKIHVGVFTTWEKYVISAFSDKAGIGPNRSEGQDRQRETCARCWVPGLSDSGKLLRLISSDPWDFRLQEMWFDGSETTAQWAFPQGGGSKDPWINPRLCLPQKLPRPVPTFLVDTCSLRAGLEPKMHPHRPLKSHPKLTWVRI

SEQ ID NO: 930852 - protein, 362 aa, Homo sapiens
MKTVHQVRRINYRGLDETGPVHLILKAVDMENHSWGTLFTFSSAECDVKDLAEGRTDTETPGQDVQQVLEEPKETKVVTWGAGEPACGGEEPAGGGGEPAGGGGEPAGGGEEPAGGGGEPAGGEEEPAGGGEEPAGGGEEPAGGGEEPAGGGEEPAGGGEEPAGGGGEPAGGEEGPAGGGGEPAGGGGEPAGGGGEPAGGGGEPAGGGGGPAGGGGGPAGGGGEPAGGGGEPACGGGGPACGGGGPPGGGGDPACGGGGPAGGGGGLQVEEGGCRWRRVACRWRRGSCRWRRGAADGGGGLQMEEGGLQVEEGGLQVEKGGLQVEKGGLQVEERDLQVEEGSLQVEERSLQVEERVQSAGLG

SEQ ID NO: 930853 - protein, 135 aa, Homo sapiens
MLNSLLLKLGTRQGYLLSLPLFDIFKGGGLEHRYMEKEGHEKMKMEAEVGVTDLQRPPRVAGQCQNLKERHGNKLSSELPEGTNLTKTLIPDLWPSSLWALGEMVTLHFLPFGAPLFPLNPGLPHETQCSLLLAC

SEQ ID NO: 930854 - protein, 160 aa, Homo sapiens
MAQQVTSQKCHLATRTPHYESVIMVQERCHEENLCTELLLLGFANFHGVNAPTWPTASHQCEVTGCRAGNKYVPMTLGSRSMHSTGHKQRLQRPREEPFYSKGQGGTVLRTRWGGGGQKNSRSLQKLSLTPGLCSQNRCLGLSHLHLFPWASILLSLSAM

SEQ ID NO: 930855 - protein, 125 aa, Homo sapiens
MGENAPMIQLSPTGTLPQPVGIMGATIQDEIWVGTQPNQISCPDSFATLGGHLMKLSPVNLGLPGRLMAAASAGKEAFFPQHIKCGTGGWLAGPGAGSGSVAHNDSVWQAFLKSLGSAICTSYVH

SEQ ID NO: 930856 - protein, 147 aa, Homo sapiens
MLVSGCTAPSKDSLIGALAQGLGADTQDKRQMIPQNPGESTVSACGFCQGGSLTPVIHFDPTFTHQGHGFSKLPENSPARWRKWPLCSPRINIHRCKAGTGLLDSGFNGGNVRESDLNSHLLSFLICKMGAFKTYARLLSESSKMLI

SEQ ID NO: 930857 - protein, 148 aa, Homo sapiens
MGPILLPSDQENKNPNAINETVAKRSHGISTGHASGQGLRQRWRWFPTSCADISHLRLELGRCGEITRFKSLPFAEATSPQTRHRQGHAPSKACARGRFLPLPPSTGGWQSLACSCFTEISALVITWCPCVYKCCTRAELSSSVNKSH

SEQ ID NO: 930858 - protein, 222 aa, Homo sapiens
MGVSRIGEGGTGSMMTLEGVMTPSSVMTLAGIMTPAGMVTLAGVMTPAGEMTLAGVRSPAGVMTLADVMTPAITLAGVMTPDAGMMILAGMMTLAGVMTLEGVMTPAGVMTLAGVIIPAVVMTLAGVTTLAGVMTLTGVMTLAGVMTLAGVMTLASVIYDSGKCDDSGLFDDSGWCNYPNWCENPGWCDDPGWSDDPGRCDDSGRFDDSGWCDEPGRCDDPG

SEQ ID NO: 930859 - protein, 320 aa, Homo sapiens
MASPAAWNSTEAQPSSSSWAGPHVRGIPGLIGGSAAPDDETSAYTCRDIKQAKDKCGRGWGETGSLAALLVEMSAIMENSVENAESLSALSNHALIPDQTCVCNPHYQENVSVKLRNVRKPAPAKSMVVACCFNLNVLANQQQTRSSLVHLVGGLRVCMSNKLSSNAMTHGYWSTTLVVAGTCDDSSTCDDPGGCDDPSWYDDSGRHDDSSRCDDPGGCDDPSWCDDSGWCNYPSCCDDSGRCDDPGWCDDSNSVIYDSGKCDDSGLFDDSGWCNYPNWCENPGWCDDPGWSDDPGRCDDSGRFDDSGWCDEPGRCDDPG

SEQ ID NO: 930860 - protein, 140 aa, Homo sapiens
MNPDAKWRIDWRTEVQGRTNLEKEKQGTQEQEPSPFWVHSHQGWTYSDNQNVPTASCRATCHFMSTCVANAYSVQGPADTKIRETEGVFQKEIIGSGVHRSGVLTLRLQRVRHKDTGHHYGMFFKYDRGFFKSGNGQEIL

SEQ ID NO: 930861 - protein, 163 aa, Homo sapiens
MSVGCSEDRVSVPNSISVVTQPEYTYLLSLQLGIVMLPSSGRLNTRRCNVPLPGLPHKMSPQVILDHPPSSAGWTRGLWKACVEDGRREGGGPAGEELPVHSACLMSVSPGKPTASESERVLEKKTDPPWSESWLYHISLEVFRKLLTNYIGNRWLDISQQQP

SEQ ID NO: 930862 - protein, 136 aa, Homo sapiens
MTDMACRGEGLDRVAKVVSPVEKAESNQIISKSQQVESLVLVSPQRVSRLHCLFSISGAEKSLPEARLDKWDRVPPQTHPNPGQGCAQISTWWIRQQPPALHTEFQEQLGRLQLLFQEQCVQPPRGSADSSTLIIF

SEQ ID NO: 930863 - protein, 137 aa, Homo sapiens
MGQCTDISSLYLLHQELELVLQWAEQIVTEHPSDSSRKMLTWKLATRIQCGSLQVKDLGYQQEWAGPFSLWEHPYWRGNTDFLGLQMNKYSRARGHKVQIFCMVSERDPSWCWLCPWPFSMGQPCFAPCGAILSDIR

SEQ ID NO: 930864 - protein, 164 aa, Homo sapiens
MSWDIQVPRPRGSTELHLTGAAQEECGCGLELRAEQVVECQAVQRLQGFGLDITGAPPTPQASTLSLSSRLFSQMPRKRAQKQPPEAWSPAKRTGPPGQRDRGGLCPGGPEAAQDSLAPAAPSTQQTEKLPVGKGLGTLQRRRSEYLDFLNVNTLEAPKAAKRL

SEQ ID NO: 930865 - protein, 158 aa, Homo sapiens
MTFLWLKAQVSGVHLKIKSASSHEFSRATSTASSREFSRATSTASHEFSRATSTASHEFSRATSTASREFSRATSAASREFSRATSAASREFSRATSAAAREFSRATSAASREFSRATSAASREFSRATSAASCWLIRAACLTVSQQSREWASHELCS

SEQ ID NO: 930866 - protein, 142 aa, Homo sapiens
MTPLPARAGLRVTLQDDPLPARAGLRVTLQDVPSARQSWPAELACGSPCKMTLCPPELACGSPCKMTPLPARAGLRVTLQDDPLPARAGLRVTLQDDPSARPSWPAGHLQPTGPETRMQLWARPQQVKFLENPMNHLVLWRA

SEQ ID NO: 930867 - protein, 143 aa, Homo sapiens
MGRLCASGDGGMLQVQKPVQAQVGKHKALDSGLERWRGGASSRATTGDLWWCELGGAEQDVQRRQGSRNGSKATGKNTLRSEEEQIIAIEEALGSYIKNNGKQQFLSANTWPQIAQSSSPSTRKAFAPIATMTCHWGKFCVNM

SEQ ID NO: 930868 - protein, 150 aa, Homo sapiens
MQTVGASRSRSRATERSQITSRLRTEELLPTFKHLKLIREKLPLPKPIWQLCTEKQVKKRVFRKKLPLSRSWCGWLHHLCAGPFWSASFSLDEEGLQADSDRCSSSARQECPGSLLLQGRGWGALFGPVGICFNGRNVGKYSLQAQNENR

SEQ ID NO: 930869 - protein, 170 aa, Homo sapiens
MVQLLFPAMDNVMIRKMCLSPYDHLEECHQLFTRVAVLEDHSREFAMDIPCVNFCCQETTETSLVAKSSWPGIRHNLHSTRRPLGPMESNNLLQTRNKEAHVIAYSRLSENLIVVRCEIEFWIRFGLLLEIGNSVASWESNCHAAHHPEKPSDNLDPEKYSASRNSVFAL

SEQ ID NO: 930870 - protein, 149 aa, Homo sapiens [sequence omitted]

SEQ ID NO: 930871 - protein, 140 aa, Homo sapiens [sequence omitted]

SEQ ID NO: 930872 - protein, 163 aa, Homo sapiens
MLGIYKRQPACRAMHLTHCLWACRSESHLATCRKASFTVAKMCKQPNCPLMNEMWYMHIVEYYPGFKKKEILPFVTTRTDLEDIMLGEIVREEEILSDSSYMEHLKIVRCTEVDNRTLVTSGWRGGICRVAVQWIIKLQLHKISSRDLLYNTVPRVNDKVLCT

SEQ ID NO: 930873 - protein, 162 aa, Homo sapiens
MAQVVVSGDIFLVNMEGTMLRRSPNPKERDYGTDWRPSGKWGAYSQGFDWNSLHSFKESNLTCRANKSCLENWPHTLPIIQSLYKVSDLWHSKSQDEIGGQHKIQVIKTLLIKQVAVKKLAKTYQNQDGDESDLWSSSLLHSHQCHDSLQMPWQHQELPYMV

SEQ ID NO: 930874 - protein, 154 aa, Homo sapiens
MDLGCSSLVALLLVIPRETGSGVDLQQTPADVQQRGLTIRRKTNKQKEIAHPLRDPNQKSPTSKTKAREQNWTENEFDALTEVGFRKWVITNSSELKEHVLTQCKEAKNLEKRLDDLLTRITSLERNINDLMELKNQHENFVKHTQVSIAGLIK

SEQ ID NO: 930875 - protein, 293 aa, Homo sapiens
MAGPGVLQVASTAGTRQFNGTQNLRDTRDCRAPKRVLQHVTLQTWGAPRSRPQRAEALLSLLPQNDEWGGRKCVFRPVSVTLFQSCCLTLAHGSWAGLALTTLIPVTWGGCQAPAEDQHVVCWAPVVHVKGNSLQPPGLSLMLISTQSPEGSEGMTCQNCPQHAHWLGCHSAWAWSQCCSAWSGHWEQREDREWQQALLSLRKQGASRPPPPPLRAPGCLVWVQNQAEAAAPRSAGFHPNNGAPSGITCSWLPVALQRVQAPAMSLPLQLATLQWPLQAGCCCHQQQFSHQKQ

SEQ ID NO: 930876 - protein, 221 aa, Homo sapiens
MWAGPNKGIKAGHRASSSNLLGSPSKLWKLCSLAVSNESCCCSLFGSAASLLKSAGPRTHQKKEIPDTSEHLKEQTLDTPSLRTVTLTARVRNFVLEVRETKNPREGTNSGHILATQRGHNTLDGSRGLSILANSSKWATYWENIPTAQGCKGDKFCLVPGRSGDTIEESEPRVGNLRNLPSAVAELVPKPQDKFLLTLSSTNRGVSPHGHHYLRPVAGYC

SEQ ID NO: 930877 - protein, 151 aa, Homo sapiens
MCLSSDSPWVRHSVAAVMDGHFSLAKNHYWGSTMGIWSVMQNQVNTCMHWEAVEFYGRDEYTCLTNWLYLATTGNQKPIYGLVKERLCHLQNNFEGDLIAIIHLYNAGYSKHENATVHAFFIFIFMRYMKYITLLDICYHTQKFCIFYILY

SEQ ID NO: 930878 - protein, 137 aa, Homo sapiens
MCYKFPSKHCISCVPEILVYCVFVLLSFKELIYLSFNFIIYPVVIQEKVVQFPWSCKVLRGTGVRGPLEEAVCLLADPERYSGRSTALFRADRQERLSLLKLCPQLSFPPGALSQRDGSFVYKLLTGAAALLSEMPC

SEQ ID NO: 930879 - protein, 150 aa, Homo sapiens
MTWIMNQCLPGPNLGPILFYGSVVTPPQRDKRGEKERRWHPCLIPLNLCLWQTRESKVPPSINSWSSEMNCCLPGLWPVFFLTAGQETGNGLEIIYHPDWRAEIECKSLGTPINVPVCWLPSRHNKSLSVQTANGECMFQAGKEFVWHTK

SEQ ID NO: 930880 - protein, 174 aa, Homo sapiens
MWTHAECAKSYWSSRPGKAVLRVQTHAQVADSVMMVLVSDSEMAQSPVDSATAPFGLGHATRTICQGPRPQAPEADQEMTRGAEEWQNGAAEKERRGMSELREFSWGNWRGDQTLDGQIPGEDRLPTPSHFQLSIHSVESHLHHLIKTLLSSLKSMCNPILPGCKTRIWVPRGH

SEQ ID NO: 930881 - protein, 142 aa, Homo sapiens
MPASSCYFQLDIMPCLAIMHSLGYGGRDYITDCVLKPGDVSNLGFLNSFTGFKLKAVSGSALTTCSWPKPRNPKYSAVTEKRSLHGCICLFTYFLVLYVDGKEKHQTFLYNIPEVFLCKQLSYIKEVVIENLYLSWKPLRAS

SEQ ID NO: 930882 - protein, 139 aa, Homo sapiens
MKLCSQPDYGCLCCIILSLGKCGKAGSDKPHPAPMQPAKPVSLPPCLPSSTKFTSRQLVSRAEIMPQATSLPAEKASRALRPYPFLPACTSYLHAAPLPITSNRPARKPPCQFCPGKFVLGRNYYKAQMEAFFYLWSFH

SEQ ID NO: 930883 - protein, 172 aa, Homo sapiens
MGSNITLSPLKYYESYTRGLRPSLYGEQYHPLPPGILQTISQGMYTPCDMRTFWILQTVSQGVYTPLDVGGNITHFSLPSYYEPYPREVYTPQDIENNITLFSPLGELRTISQGFLFLLDIKSNITFLSHPGYYKSYHKGLYNSRDIESNITLLLPPGYYNPYHRRCTPPMI

SEQ ID NO: 930884 - protein, 162 aa, Homo sapiens
MCSHRSTPTYNKWSLSLSLCQAAWNWGCGDAGTPATTTTKTVLDLFRSQHSTGSCSKSAVTATCPSPMFTHGPRVLQLAGGKTSQVCLLPFRAASSPRPWAEEPLLVGTTTTSPQGVSARQWSPLWPGAGPEMLSKSLGLNVGTSRAYFLLYSTVAELVPKV

SEQ ID NO: 930885 - protein, 141 aa, Homo sapiens
MKIMSFFELHYEAIIIHTVSELKDKVLPTLLFFLHKQGSLSSWPPPPQAHGEYFEDTVDVHSRPKGSSARLWCTLPFPGLMLHGNGFPSDPGLIQKCCSRAKAWNRPLGALLHCGQADIYGARQSTILFPLLFSSRRSLFP

SEQ ID NO: 930886 - protein, 138 aa, Homo sapiens
MTHRDYYNLRPTACYVGIAVGYSGPKALQSAGEQFCQDWVLLFNAAGSILVQDVSRNAIWEIGPAMWALTLPGALFSATQSPHLKSTETLRAKSALNIRYTSLLPNLNLLILHCLIDFPCLQYMKTKFPPWVGCDLAI

SEQ ID NO: 930887 - protein, 173 aa, Homo sapiens
MKPLCPELVPSGGFMVSLTSRMELQTFMVSVTALKDGMDLKMWKGTQPGCRCWLGWPAFIPLFVPAHVLLIGPFYRALIGPFYSVLIRPFYQPLASHRALIGAFLQSADWCILQSSCKTEKFSKSPPDPEVQLASPLNPPSKQTGHPNCCWELGNDHSSYILLDRGEEGALQW

SEQ ID NO: 930888 - protein, 124 aa, Homo sapiens
MAEGEGEARKIVNQKQYHIPGGIGAITATIKDLKDAGVVILTTSPFNSPICSVQKTDRSRRITVDYCQLNRVVTPIAVAVPDVVLLLEQINTSPSTWYAAIDLANAFFSVPVHKAHQKQFAFSW

SEQ ID NO: 930889 - protein, 157 aa, Homo sapiens
MHSLLKYSKREGGVGMVEAKPLPIPTSVLGRAFNLTQGHLSTWRIIQSSTVPQICYGFAAQQQECKRTYQEKGEEETEVSEAKLSDRTHSVGADVWLRFGKVRQSPGEMVSTCTPMAAADAERAGSATGGVDRQRPGGGRVYSVEMVDNGIIHVSVR

SEQ ID NO: 930890 - protein, 154 aa, Homo sapiens
MKSSLGWGLLVFLSEKLHVFCRTPLARYVIALNVHLNLTSAVLSCLLTPAGGTRRKLSAAHPQQVPQHLPWRITTRRQPMTHPTFQLLGVPVGKFLASSAAPSSVAFYFPSNSQDPQLQVCWSFLEVHSRPCFPGYHQWRLQNSKYCRTADVAA

SEQ ID NO: 930891 - protein, 137 aa, Homo sapiens
MDKDKCRHMAVGGKQNTRCEHWIIGCAYNVKRENFSGGSNCRCGEKARELELELEPEDVTELLQSHDRTLMNVKLLLMNEQRCWSLEMESTPGEVDDVSTTALSVTHSLTHFSASSIVATYSFFLKVLPFVSNIVLF

SEQ ID NO: 930892 - protein, 160 aa, Homo sapiens
MICVFGKKGVTSHMDIRWPERSGEGELAKALRRGGSSRICAQLHMPAPWQSTGETGDASSRQGNIQPAITRYWRFSKNCDFLSDYAIQFTCNGTRSIFSRFHGLLVAPLNVAVRVDLFGNICDLQLWDSLHAGGGRSVGTEDVQEAALLQYEISFVSMVW

SEQ ID NO: 930893 - protein, 318 aa, Homo sapiens
MSSPSLSPGPEAHKGLQNIVKHLKAQGLVRKCSSPCNTPILGVQKPNGHWRVVQDLRLINEAVIPLYPVVPNPYILLSQIPEEAEWFIVLDLKDAFFYIPLHSESQFLFAFEDPTDHMSQLTWMVLPQGFRDSPHLFGQALAQDLGHFSIPGTLVLQYVDDLLLATSSEASCQQATLDLLNFLANQGYKVSRSKAQLCLQHVKYLGLILARGTRALSKERIQPILAYPHPKTLKQLRGFLGITGFCGLWIPRYSEIARPLYTLIKETQRANTHLVEWEPEAETAFKTLRQALVQAPGLSLPTGHNFSLYVTERAGIAL

SEQ ID NO: 930894 - protein, 133 aa, Homo sapiens
MDTTASTAHSICPLWTYFYSNSQHVVVQHFIWFFNRSFVLKKSDAEIQYREHVQVKLFLSNMGAEALFTVVLLLLNEVLSENMPVPVKNFTGCIEVIEINNWRSFIPSKAVKNYHINNCRVHVHNVQVTTTVE

SEQ ID NO: 930895 - protein, 145 aa, Homo sapiens
MRFGWGLTDKPYQPVLSAVTLLEIWFSRKKKIMAYQINLFCFSVTLLAQTRKSCSRPYVNSALLTNLSSCSSLLIVKPTLLALMPSFGLLDLPPVVCQGLSGLQPQTEGCTVGFPTFEVLGLGLASLLLTLQTAYCRTSPCDSMK

SEQ ID NO: 930896 - protein, 139 aa, Homo sapiens
MLKRLKQDTDSKDFHTLKSMQYAPYLGFGHLHWIPSSIRRKNIKEQMLTQQDGRIGIAQVCSSQRDERRRQVISAFPTEVPSSSPWYCVNKAARKFRLVEGGATTVPQSCRRQTASLDTSSLGRASLKERQQPHSGAYR

SEQ ID NO: 930897 - protein, 211 aa, Homo sapiens
MLPGGPCSQRSQDGGDPLPRWWQALCSLTWGSWPHGFRGMESWAMRKIFCITKCECTSGWTGQNCSEEINECDSDPCMNGGLCHESTIPGQFVCLCPPLYTGQFCHQRYNLCDLLHNPCRNNSTCLALVDANQHCICREEFEGKNCEIDVKDCLFLSCQDYGDCEDMVNNFRCICRPGFSGSLCEIEINECSSEPCKNNGTCVDLTNSRDL

SEQ ID NO: 930898 - protein, 137 aa, Homo sapiens
MAVQQYVPEIFQPYVCIPGCTKNPCWFLKNVYLIHQHLCYCGVTFHGICQDKGPAQFEYVWQLGFAGSEGEKCQGVIDAYFFLAANCTEDATYVNDPEDNNSSCWFPHEGTKEICQINNLVHVKISPGWSLQFHIVL

SEQ ID NO: 930899 - protein, 144 aa, Homo sapiens
MILCYVQHIIPQFGLPTSIQSSNRPAFINQITQAVSQALGIQWNFHAPYCPQSSGNVEWTNGLLKTRLIKLSLQLKKENSDKDRAQKLTLNPLGHSLSPPSRGTELWAGTGESSDVIHLQVFQLWIPVTCSGGDSRGNQYGWTN

SEQ ID NO: 930900 - protein, 136 aa, Homo sapiens
MAAVLAGTTEAIFTPPEIVQTLIQDHKHHDRFTNTYQAFKALKCHGIGEYYRGLVPILFQNGLKWLKSKTLTTPNASEDVEQQELSYIVGGNAECIGSETVLHDTNVEHICHYTFVKTQRMYNTKKDPSGKLWTFG

SEQ ID NO: 930901 - protein, 317 aa, Homo sapiens
MKCKAAVAWEAGKPLSIEEIEVAPPKAHEVRIKIIATAVCHTDAYTLRGADPEGCFPVILGHEGAGIEESVGEGVTKLKAGDTVIPLYIPQCGECKFCLYPKTNLCQKIRVTQGKGLMPDGTSRFTCKGKTILRYMGTSTFSEYTVVADISVAKIDPLAPLDKLCLLGCGISAGDGAAVNTAKVEPGSVCAVFGLGGVGLAVIKGCKVAGASRIIGVDINKDKFARAKEFGATECINPQGFSKPIQEGLIETTDGGVDYSFECIGNVKVMRAALEAYHKGWGVSVVVGVAASGEEIATRPFQLVTVLCSSIQLRELS

SEQ ID NO: 930902 - protein, 150 aa, Homo sapiens
MEVHMIKKYGLTNVDYAVDILNSLNGHISLVSLGLAPGILFSSIAAWNQGWGDTSVLVAATTGTALSQTQSQHSTVCASPKACCNHYLATAEGPIAIQSACGKASQPISFLSDEVTSQLSDHASCLPGEQYTWAESNTKILDFEHDAMLT

SEQ ID NO: 930903 - protein, 135 aa, Homo sapiens
MTQCSGRRKHLCDLNYCHCLHYPSQQGGVEAGAGTCHWETRVQVTSPDPLQTFPRTIISMAAPLGEQTQRSSRITELGVDKPVDSPPRTLQGDSLPTGGMPSRFRLAEEVASQPLTTWNTSIPAAEKRCLSDLNS

SEQ ID NO: 930904 - protein, 250 aa, Homo sapiens
MAVFDFATPIGWPASPGLTPTLGPLTDTAPPRDSWMFWAILPPPPPPLTSSLPAAGSKPSSEQRAVTGSGNHLCDLKPEGPPEANADPLGVLINSDSESDKEAQHSVIPKEVTPALCSLMSSYGSLSGSESEPEETPIKTEADVLAENQVLDSSASKSPSQDVKATVRNFSEAKSENRKKSFEKTNPKRKKDYHNYQTLFEPRTHHLYLLEMLLAPDIRHERNVILQCVRYIIKEDFFGLDTNSAKTKRD

SEQ ID NO: 930905 - protein, 136 aa, Homo sapiens
MLMFHVESEFDATSYLSLSMEGTPLEVMQHKYRLQRRSEGSSLAFGEMFQGGAQLPLLHKIIHTETGDGSRQQPHPSTPAHEAEVSNSCTHVYNTLLTCPLILLIKVPSHSIFDCRSSLGAYLNLCPSPELAGRVL

SEQ ID NO: 930906 - protein, 136 aa, Homo sapiens
MGRKQSRKAENSKHQSTHSPPKDCSSLPEMEQSRKENNFEVLREEAFRKSVTTNFSELKEDVQTHRKEAKNLEKRLDKWLTRINSVEKTLNDLMELKTMARELHDACTSFRNRESTTNILFEKSSPKTHNYQIQQS

SEQ ID NO: 930907 - protein, 179 aa, Homo sapiens
MIVGFLRPCKPCLTASQLNLFPFINYLVLVFLHSSDLLNNFDQNADSDKDIEVQAEVVLDGDEELGNWSKGDDCCVLAKRLTPEGRSTNSLHSVPGKATDTECQLVQGAVPCKATEVKLPKAVGAHLLHQCYLDCPYSTAEDKELREFFQCLPLAKFIRKPVIWSSEEDSFLQTQVEQR

SEQ ID NO: 930908 - protein, 169 aa, Homo sapiens
MPLRGFPPWAGQVFLALIPINPQSSSLGSKNIMPSDIAVVYISMFFLCDGTLFLGKTFLPSSQAIAIIHFHIKDKANRKVKLNDICNSDEINEILLSFIMLLVKVQPKPFLTHRWELNNENTWTQEGEHHTPRPVVGGWEGIAFGDIPNVKWVDELMGAAHQHGTCIHM

SEQ ID NO: 930909 - protein, 169 aa, Homo sapiens
MGKMSPGHVRNFCSSLSHHRPGGLRGKKWPCGHSPGSLCCAQSRDLVPCITDAPAWLKGDNVELRLWLQKVQAPCLGSFHVVLSLRVHRSKELAFWNLHLDFRCIEIPGCPGRSLAVQKGNMGLQPPHRVSTGAPPSRTDGRTEQWVKICMSLLVIDYFSTGFSRCWYQ

SEQ ID NO: 930910 - protein, 156 aa, Homo sapiens
MQAWVRCLCWRPPLGLRLRRPLAGTRGLCHKKGEDAPDTSVAETAFLEAKWAIQQAQALQVVDQGHPFELDLHVTTDGFSWGLWQHTEGLRTPVAFWSQLWNGAKLRITSSGIEKQDWEGKDIEGWCTKQSLLEAMTNSVLVNLKICLNIVCERRL

SEQ ID NO: 930911 - protein, 145 aa, Homo sapiens
MKKSPVFCIDHTGRLLPRIPHKPLHCHALMNCSTLMISPGLGVNPDVTDLIAFLFSGKDIKWYKHSLPQEVSHLALQHKKLNEVTTSMKAQTSYMEFLHTIAHALTCSLRIDNRNRLHSTSDAQFFLERRRTLSLASVSCSYLMQ

SEQ ID NO: 930912 - protein, 157 aa, Homo sapiens
MGKKQSRKTGNSTKQSASPLPKERSSSPAMEQSWTENDFDELREEGFRQSNYYKLQEEIQTKGKEVKNFEKNLGKCIIRITNTEKCLKELMELKTKARELQIWDYVKRPNLRLIGVPENDGENGTKLENTLQYIIQENFPNLARKYRECHKDTPREE

SEQ ID NO: 930913 - protein, 173 aa, Homo sapiens
MSVAGRGPVLVLGMLGTWMHSSSTGEQLQIQINICREAWLHRDHNKSIACRLISKLYQRVAGDKLHLVTGFRVASELIYFNYAAASGWQALSQKLTVILVHTRPAHYFLHCFHGHPFFTLHTCLSHSFALLLNHRRLLNWEERDRDPFVNKPGQKDIKFVPFDGYISRSNGEH

SEQ ID NO: 930914 - protein, 200 aa, Homo sapiens
METSIITSCFSTAPVLLSWATPETARPTLPLPPPPQPPQSEDEEDEDIREKTHGKIKEGYVSKSTTDFHDRKCIHFVQELFLKGQESLDQSEINIFLQIGPFQKCSARHLKISIILKDNESVENGKLLAVRYKLRNYNVTKDEFSEVEFPKIMKFIPHQSSLFFLPCPIAPSHQNLECGKRRLSLGQSRSCSPFSYMEQW

SEQ ID NO: 930915 - protein, 136 aa, Homo sapiens
MPTQQDLTVKPVPMADSHCRAQVAFTGSHSWWPVFVRPLDSIDQLTVTYRKHRKPASRSSNFTDMRNPLRVKGFWYHFIMFLSCLVTDGRATMLLSEALSNVSKRSGHRASGSQCWLPIPTCWVWFAKFQDFGPYQ

SEQ ID NO: 930916 - protein, 355 aa, Homo sapiens
MAHVYICESLEDNRYLVGGRLSILPFCRMPHLLSGAFRQFTFNVHMEMTRKMSDGPFKILPGENVSDVHYIFTGFHTSGWCEEQRSIGSETQSMEEQLHAVIMKHAILTTESMPADISLCVLPAIPCWKSRLYTGSLSCQATSQVITFILLSLEGAKRFSGTVLQGPGWSAVLSPPLQGCAASCALQAPTPRANEASDFKLNPMPIYHSKNPRALKHYAKSTLLLFRKWNNKAWLTAHLLAPWFTGYFKPTVKTYCSEKKITFHRLLLIDSVSSHLRALMEMYKDINVFFITAFILQCMNPGEISTSKSCSLRNTFPKAIAAIDSDSSDASGESKLKPFWKEFTILDVIKNIRDS

SEQ ID NO: 930917 - protein, 137 aa, Homo sapiens
MQLLDFKVSDHLHAGTQTRHRHSKHSQLAELQAAIGKWEYFYMTKLQVCGCEIRDQDDWKHNLLNILQFKVTFWSAIDNPLNESGKSLVLIKLGESMITGPFVPVLHDSGTSRWSAGKTTNPLVISEITSLLSLPGE

SEQ ID NO: 930918 - protein, 127 aa, Homo sapiens
MSKFTSYILNFLLYFCVTNFFYSKYVGGLGQSQQEYKEKDSSLGFSLRLLEEDFRVCRKALVLKGKLCGERISLASIESCPGGLDYNKQQGQREVANDRGGGTCERGWKIDGGEAGSKTCPDHSFTG

SEQ ID NO: 930919 - protein, 154 aa, Homo sapiens
MVGVRPALWFAWELTRLALPSPDGPSLPTLIVEDNGHIVFGVLEPHPALIPLHTTSADAFWKTFPLTEPTQMRRNQKTNPGNMTEQGSSTPSKNHTSLPAMDPNQEEIPDLPEKVFKRTAEWIRTHQPTICYLLETHLTHKGLHKLKGVEKDIS

SEQ ID NO: 930920 - protein, 170 aa, Homo sapiens
MPKGQGCGDGPGAGHCILSRPAGAVLVDRHGYSPPEDKADRTWLFVGAELVVSERSIIENLLMELPFLQRKGRTLCTATKALPIPSHPHPAKTVTSPSPELITREPTSAQNARTSPSSGTPRVNSHTSVDLLFPPLLPSVAKNLCTQYGWLYGSQGRDVCLGLNVSSDHR

SEQ ID NO: 930921 - protein, 139 aa, Homo sapiens
MRKLVLGQKRGIGHGLKMLTVHCDGSVSDEVTCGSRLREDPRRLSARSVTSCQWEESPVSARLGETRSSDLEGKRQEHTAGWSSQGEHPFREASETSGNIRSCQTYDDAKRRYCCMYAKCQALSCQVCILFANDIEPKC

SEQ ID NO: 930922 - protein, 148 aa, Homo sapiens
MRKTCHHDSITSHWVPPTTHGNYGSYSSRRDLSGDTTKPYYGAQPSELKCQAHSHVPDLPQGILAPGPPLQIQAPGPPPWTHVSGNPKGTNARHSHSWTPAAGLPFQSVKNGKGDYFFKYTHIKATKIMKNQKHDTTQGIKETSSNEP

SEQ ID NO: 930923 - protein, 185 aa, Homo sapiens
MPQGALIRKLSIAYPPTPLRPQLGLKPDPGYDIWCSGEPDNSHGVKFIDLREDAIRNIFVTWKEVKTATLTGIWKKLILTLMDDFKASVEEVTVIMIEVARELELEKKPEDVTELMKFHDKSLMNEDLLFMDEKANFIVALFPEIATAIPAFSNHHPDQSAATSIKASSSTSKNTLQLNEVSDDC

SEQ ID NO: 930924 - protein, 142 aa, Homo sapiens
MSLIGHRSSFLWLLCVKQPKGTQNAAVVIEVGGVGDGENSGGQKAASDKDKKLLDVGDTYLWEKTVPHLFHCCLHTCVVQTFSLDVNWIPSLQGDCPAPGRAHGLVASDAPILVPSFICHTNISFFSLCQYINGVGVIYFSD

SEQ ID NO: 930925 - protein, 248 aa, Homo sapiens
MRPEFLPSGGFVASLTSGVKLQTFKVSVTALKGGVCGVVHSFMVSLASGVKLQTFVLDRKVLQVPTQPRSPAGFTSQWHSPWDFAAPSLSTPAAQRELIPRSSPAGTSQLHRVWGPPSVGSTEPTPTRILHQPMSATHSPSSCPHLSLHISLQAEGAGSSLSQLQRGAPTVQQRAEGLLERGQSGCQGQGGSESKQGLLARCHPSIPPLYRTPQLLFGIWLMTTLATSCWIEAKKGPCSCSVLQSGTL

SEQ ID NO: 930926 - protein, 246 aa, Homo sapiens
MLWRHFPHCPGPGQLCPCGSAGYSHRAGFHWLVLNACSFSRCTVQAVDVLPFWSPEDGGPFSTAPLSSALNDWVGQQQLCYSPATGEGRVAFNASSSRQVAKESTLLHQMAAVGRIACPEGTHKWVATHFGPGGSCQSWQWLWVEDVNGLQECGDTRVVGLQGWMESVYCYERASGHAAECGKIGKAHGNPEQRRSSGVNAKRCLELTRKVLEIRKLNRGNSGHEKVKDRPYRNQSYWHQASHPQY

SEQ ID NO: 930927 - protein, 288 aa, Homo sapiens
MRNVQVCYIEEEEEEEEGEGEGEGEGEEEEEEEEEEEEEEEEEEEEEEEEEEEEEEEEEEEEEEEEEEEEEEEEEEEEEEEEEEGEKEKEKKEKKEKEEKEEKEKKEKKEKEKRKKRKKEEEERRRRRRRRRRRRRRRRRRRRRRGRGRGRRGRRGRRRKKKKKEEQGGEGGEGGEREEGEEGEGEEEEEEEEEEEEEEERRRRRTRRRRRRRKKKRKKRKKKEEEEVERSRRRRSRRRRRRRRQKKKKKKKKKKTKKKKKKKKKKKKKKKRKKKSSWVTELAYDWLQ

SEQ ID NO: 930928 - protein, 154 aa, Homo sapiens
MRTVCGGVHSQVGAQKAFIAGEHGALTMGLHRVPAVGAGSRSLHGPAVEVHSLAAWLMVLGQPGWLTGLADRLLKARHQVLLAPTNSLHPGDLAMPVSSVFLSYNSPCMAQDSISWNPWAKNPRSENTSLATILEAAHHHLGSSEIKDPLVTLV

SEQ ID NO: 930929 - protein, 199 aa, Homo sapiens
MVPDNVEFSPWGQRRVQPLGGPTPGEDHLLSPSRYWPAHPSHRQLLPPLHETLHPSSKSMCRAWNSLESSEEDRKICESVELPRDLLNGFDENADSHMDNEVQAEVVSDGDEELLGNWSKGDCCCALAKRLVAFYSCSRDLWNFQLVRNDLGYLEKEISKQQSIQEVIDYKSLENLQPDHGIENKNSFSVEKFKPVAEI

SEQ ID NO: 930930 - protein, 277 aa, Homo sapiens
MVKGSLPMMKTVKMFVSHVSAYQRVTSAEEFNNQVDRMTCSVDNTQPLFPVIPVITQWTQQHGLPLTKSDLAPATAKKVRQWAHDHEIHWSYDVSHHPKAAGLTEWWNGFLKPQLQCQLGDNTLQDSGKVLQKAVYALNQHPIYGIVSPIARIHRSRNQGVEGEVSLLTNIPSDPLAKSLLPVPVTLHSAGLEVLVSEGRMLPAGDTTITPLNWKLRLTPGHFGFLLPRSQQANKGVTELAGVTDLEHQGEISLVLHNRVTGAQCEGNIICKSEQIC

SEQ ID NO: 930931 - protein, 345 aa, Homo sapiens
MSSTQFNKDPSYGLSAEIKNRLLCKYDPQKEVELRSWIEGLTSLSIGPDFQKGLKDGISLWTLMNKLQPGSVLKINRSMQNWHQLENLSNFIKAMVSYGMNTVDLFDANDLFESGNMTQLQVSLLALVSKARTKGLQSGVDIGLKYSEKQEPNFDDATMKAGQCTIGLQMGTNKCTSQSGMTAYSTRRHLYDPKNHILPPMDNLTISLQMGTNKCASQMGYTQGAKQSGQVFGLGRQIHDPKFCPEGTVADRAPSGAQARGRSLNIPLTTRRRLATEAPSTLSPHIISPSEFLGFSVFSSFFFLTCSVLPINPGSDNAGKSGIIDDFEFKQLLYNEVICCVKGGP

SEQ ID NO: 930932 - protein, 146 aa, Homo sapiens
MPRYFLATSLFSPNPCKESSKEGTCGPHNCILEQRFPRADSCEDSFMGHNDGCCGEPHPDGPESVHSPLTSSWSDPIQWPSGLPLPEQLVLRKELQLPGLRFLLNKMPSLPSSEALTTASTADTSPKFLKEKLFLCRCFRFSLSLW

SEQ ID NO: 930933 - protein, 143 aa, Homo sapiens [sequence omitted]

SEQ ID NO: 930934 - protein, 141 aa, Homo sapiens
MVQEAVQAKESEPAAISGDHTVLEGNIALPDICHYPVTDKWQNKENEGDAQLEEVKRYICPLDPGDCNAKRFLKCLTVTSKSQFKDRSLGHPLVAEKSHEISAHVYQKARPSPTFPYNIENVARSGMWEGLKRIWNHKNWT

SEQ ID NO: 930935 - protein, 572 aa, Homo sapiens
MNRLAQILFPSRHVLFICLCYRLQNQSVHQSQPRVLEVETTPGSLRNGPGEESNFRTSSQQEINYSTHIFSPGGSPEGSPVLDPPPHLEPNRSTSRKHSAQHKNNRDDSLDWFDFMATHQSEPKNTVVVSPHPKTSGENMASKISNSTSQGKEKSEPGQRSKVDIGLLPSPGETGVPWRADNVESNKKKRLALDSEAAVSADKPDSVLTHHVPRNLQKLCKERAQKLCRNSTRVPAQCTVPSHPQSTPVHSPDRRLDSPKRKRPKSLAQVEEPAIENVKPPGSPVAKLAKFTFKQKSKLIHSFEDHSHVSPGATKIAVHSPKISQRRTRRDAALPVKRPGKLTSTPGNQISSQPQGETKEVSQQPPEKHGPREKVMCAPEKRIIQPELELGNETGCAHLTCEGDKKEEVSGSNKSGKVHACTLARLANFCFTPPSESKSKSPPPERKNRAVGCPGEGGMALGWDCLQLKAVSGGGFSCELSAANTLSSWKKWAHQSSTGNVGSAPQHLLPSVSGQDWVDRASSGVAGSILAHDAGRGCGRSCQALNPGSPFLMCTKLQHLCRDESEPKGTGW

SEQ ID NO: 930936 - protein, 201 aa, Homo sapiens
MTELLWVKGGCHHCSSSPLFSPVGDWTDLTQEEFPTVQHSGCGRSYSSQEFRDRPLISLGLSPWRQRWPQSPQISRLSLPLLALRNPGRPEEWDFPPVQRTASAKVQPQCFIKQVLDPVPPDWVRPLPTGVARHLTQESSRWHQVGASPGQRSQRKEQAAMFAVLQPPLVTSPGAGGSQVTKFCSESPANFSSPMEEGPEF

SEQ ID NO: 930937 - protein, 149 aa, Homo sapiens
MANLGLFRKKLVFWWVQTCPAKELRIYADDGAVGLRPAADTTAYLKYTWDLQQRLELVYVCAVRSGGFVVSLASGVKLQTFPVDVTAHKRSAGPKSEQQQDLLQRAKEQSFHSVEDLTRLPLLARAACFYSLIWPHPHPAHWSILQRAD

SEQ ID NO: 930938 - protein, 142 aa, Homo sapiens
MHDSLLEFAEGPLQTSFAWVSPQKLQNSKDCCLFLPLEALSQRGTHQIPAEALLYEVRARVLCLESRCSLQSLQAGTFKSAEAVPTEIPCPERRNLERQSGYSGSVELWWAPPSLNFLEALFILLIVLTRIPNFRSEKMVEQ

SEQ ID NO: 930939 - protein, 144 aa, Homo sapiens
MNILYVSSSCVRQDVSDRHSLEIWYMVLQPFEIENTEKGAGWGGKFIILVLYLLDLMCLTCVLRLRCVVGSCRYWLGTQKWLVRSRCRSGSEGLTYSSKSPYGKIAASELLKCHSSLTPCFIAVQLFPKWLSLVVGFRLNIQAQ

SEQ ID NO: 930940 - protein, 142 aa, Homo sapiens
MRRRERGTPVLPLIAICDPGKEGNADGRGRLGKDMGLPLKRVVDFPAQCSSSGKSQTASSSGSLTLVYPDWEISPSRGQQTPHTGELWLASSGCPSGTKLPEERTGSNLCCSAASTRDTKANSIWSGPPANSSRPAAEGTNS

SEQ ID NO: 930941 - protein, 145 aa, Homo sapiens
MKPTESWWIIFRICCWIRHWTAGSRGQQFLRDEKQTRYPTIIQLNAWRVFRPPCGGTQASSDSFPESNRYSWELKDTKKKCIIRQFHHFANIIECTNANLDTIAYYTPRLHSMLLLGYKSVQHVTVPNTVDKCNTMGSICVPKHN

SEQ ID NO: 930942 - protein, 284 aa, Homo sapiens
MLVVALDNPFKEDHLVQLNEIYIFCILTETLAAHIEAMFLDHNNASLSRCDKSENSDQIFTDGSSRAAGDPPCFQGLGSPRSRCLLILGLVRGHFLVYRGPVFLYPHKAESRDRSSYQPYHPKCSRFLLISEAKQGLWEVGVAWTMAGQPSGSHVVHGGVGSGCDGLSICTLLSCVGISVIVALCAALSGPRVLSTIISRKAEFWYPAYCAKTVTAKGKLPLRPLKEIRAAPADSQQANENLSLTTTNTVHPRITQLELANEEEDIEAVVPESKLTLENPSEGF

SEQ ID NO: 930943 - protein, 142 aa, Homo sapiens
MTQNRIKSLTNYWQGRNVERMDILLQMGLLAAFPRCSLEDGQFQGEAFHPTQPLSSGYQGIKPGSMWMSLRGASVSSASPGGVGEHQKERVVGRGAVIEICMNGKDPEQGILMSRGHSETCNLSSATQLVEICYSSLRKQIS

SEQ ID NO: 930944 - protein, 145 aa, Homo sapiens
MGSPVAPGRSKNAIHEPRSGAPEACLQKGSLHIVVTAGNDVLGHTWRQHSSEPHPQPVDWVLPFKAADSSLAQSVFRDVIWEIGPGMGASGLCLLPSSTVSELVSKFQDKVLFTLLSPLLKQREAVSPRVVMVVEGELSQGRKFE

SEQ ID NO: 930945 - protein, 261 aa, Homo sapiens
MLTVTWIIKSRLRWSQMEMRSLLGAGHVAFCPCPRDLWNYELGKHDLGYLVEEISKWQSVQEEAEPESSKRLQPDNAVEKKNPFSGEKFKLAAEICISNEKPNANDPDKSWSRSRAPLLCATSGLGAPCPSHSSPWLKGAKGSVKGKCGVGAPIQSSHWALPGGYVRRGPLSSRPQNGRSTDSLHQASGKAADTQHQSMKAARSRPVPCKATEAELPKAMGANLLHQYGLDMKHGESAMPGLLLGTYPNKLKTYIYTKPAH

SEQ ID NO: 930946 - protein, 173 aa, Homo sapiens
MGRLLGRGAPHIPDGAAGQRRSPHLRRWAAGQRPSSLPRQDGGRKEALLALVFPYLRGLIYLWSLMLVTFGWGFCVHILFVGIDATPSYLLLFLQKVRLLCCRSFLEVHSRPCLPGYHQQRLQNSKDCCLYLPLEALSLRGTCQMPARALLYEVSLDPCWEVFPSQEAWQREF

SEQ ID NO: 930947 - protein, 147 aa, Homo sapiens [sequence omitted]

SEQ ID NO: 930948 - protein, 142 aa, Homo sapiens
MFPSLCPCVFIVQLPLMRSSFCQDLGCAHDTDSGGPEDMCPSWLGHSLVLHILGRHETSINTCRCTLVQSGKEIKKKIKRMIRGKHMATGHLQQHKQFQIVVQQFGEDHQLPLVHDCEAFFSITCTGAVYAKQISQCLVTLT

SEQ ID NO: 930949 - protein, 144 aa, Homo sapiens
MLKHDLRVGDIAQGESEGKEKRLQNIPQESPIHKVWIKEEPQNRSEEHITRKEINFQDSFHGCKSVYFTLTMDDFGSTLYYMGLLYYSSTPRWCQGAERSLGTLSALVQLGGETSDVPLFLVLAFESLLASMEMSLSLPEHRAS

SEQ ID NO: 930950 - protein, 138 aa, Homo sapiens
MGVRDPLEEAVCPLAELKHCAGRSSAVFRAGRQERCSLLKLHSQLPLPPGALSQGDGSFIYKPLTGAAAFLSEMPCPEMRNLESFVLETQGPGGVATGGNLLVCSCGDHGKSVVSGPECTIPHGTVPHSFPWLREGVS

SEQ ID NO: 930951 - protein, 147 aa, Homo sapiens
MMPRYFLATSLFSPNPCKESSKEGTCGPHNCILEQRFPRADSCEDSFMGHNDGCCGEPHPDGPESVHSPLTSSWSDPIQWPSGLPLPEQLVLRKELQLPGLRFLLNKMPSLPSSEALTTASTADTSPKFLKEKLFLCRCFRFSLSLW

SEQ ID NO: 930952 - protein, 137 aa, Homo sapiens
MLQCTPNLLVLEDNDSLLAASSTGLQNLQQRLSLSPICVSDVRPVPAMCVQQVAEGNCCDDCRRNREGTAASRLWFGQFKPKARCRTWLGLRGVHSSSKSRGPVYKGGPREQVSNHQPQASVADTGRVPPGSHYTDF

SEQ ID NO: 930953 - protein, 136 aa, Homo sapiens
MVQEAVQAKESEPFCSSHLEKSFQANALKFHLHCKVRQGSAQSNGAEMPKRKNAQMNLDYLICVKYHSRDLQGGVKNMCKDLSDLGAFLGVKAWQGVSDGPSLDHLPFGMEAHNKNAAFQRLQGPYPCDQNAVLPH

SEQ ID NO: 930954 - protein, 169 aa, Homo sapiens
MLSLPLYPTPQKAPAPLPQVCCSLLEVHSRPCLPGVSPVEGAEQQRLLPAPSSGSFVPEGHQPDASRALLHEVSAEPCWVVSLSQEAQGDALPSEEESREGIWPQPIRHTVVDSTQSKPPGLLSTVRGKPPTQASVTGDTPPPTSSIIPSRLQNGVLAARISSQWFLAC

SEQ ID NO: 930955 - protein, 171 aa, Homo sapiens
MVPLCSRQVLQSHSTKIIRFNGLTVPRGWEGLTIMVEGERHVLPGGSQERMRAKQKGFPLIKPSDLMRLTHYHEYSMGETTPMIQLSLTGSLPQHMGIMGATIQDETGVWTQPNHITLPPPDAKPRCGSPRQKGEERLEYIFSFYGLPRGEKGAGERKAGQEGGRGKEVEN

SEQ ID NO: 930956 - protein, 150 aa, Homo sapiens
MSGLLTCGNFLILISLGALWETGAYFIPTVSTIEDSRTQGGRFRGLPLGMHSLSQGCSLLRKRIQRYFSHLLLKEEKYGSVLPSSLAVTETLESKTTDKGGLRTIVVWYELQRSMIRGVSGCSHTGAVWTQRTARGLAANYTPLCQRDRK

SEQ ID NO: 930957 - protein, 140 aa, Homo sapiens
MSYTLRIQIIVILSTRCSNTDFLMTKICFLGAYILFFSVILLLSSKQLEHTYYMDSPNMFTYHGSLSIYSNWKEREIHAFAFFATLFIYFLNFNLILDARCIYAGLLDGCIATRCTDESNIVACLMQLTSASHCVTLQKE

SEQ ID NO: 930958 - protein, 195 aa, Homo sapiens
MYTSCFCAYYQAVRKMGLYCGRRRTNLETMRATLEPTSANWKQHCLSLPPSIKCDEIDKSVEYAATTQEEFISLPIQSGLCGVRPESNMQLIKWFLDIFESHMDPAPYHEFPNLCQIYLPPNRQASHLNSSFISQTRFTLPGSQPNGLHLPSNLQNYSNKPVTFSHGNQKLCWLIWAMAATLYNTFLGVREGPGP

SEQ ID NO: 930959 - protein, 140 aa, Homo sapiens
MSFLFVSFPSNRQDPQLQVCWSLLEVHSRPCLPGYQQRWLQKSGGCRTADIGELQMLLPDRSSGSFVSEEYLAVSPAACWENHYSLQSCQTGTFKSAEVTAVFFCLSVPCPKRWSLQRQEGLLELWWAPPSLSFPAALFT

SEQ ID NO: 930960 - protein, 149 aa, Homo sapiens
MAYGPNIPGNLFQGFGFPDENVPALHYILKQLTLHKNCSRIAANSQAGLFGYVQAIIDVSKLLKSQQIELKVGYFLKTCSQLAKLRGGEYSPPDCQVCPGLPILTTKSWDPATKLEERVYKRQFSLLAENPSLAVYQNYSNPKKTCRTP

SEQ ID NO: 930961 - protein, 144 aa, Homo sapiens
MPIVHGDFVAGIGSFQWVLGLADFKNEAADPRSECSDVSRVSSFWWVRGLADFRSEATDLRKVKVQTFAVSVTAHKGSVGLKSEQQQDLLQRVKEQSFHSVEVDPSGLPLLAWVASFYLLIWPHPHPADWSILQSTDRSIFTEC

SEQ ID NO: 930962 - protein, 171 aa, Homo sapiens
MPLPLQLGSSQRLLQTHHRCHHFLMFICPFICQLTLRLFSILAIVNSAATNMGECRYLFDTLISFILDIYPVVGLQVHILDYLVALVSTWAELAPGSTRVVWELEFIKASLGLGSTGVGLDPRFMRTDLVLGSTGGGLSTGFLVLRLEPVSMGMGLEPVSTGKFKEGPLFN

SEQ ID NO: 930963 - protein, 147 aa, Homo sapiens
MTEVVACSIPQALCPREKLELCQPPGTQAVKLGEISSSKENKRGYISLAKILRNSCEIQDTRDLNEGRTHSKLSSCERVSLLEKWKQVTILTKDKHCGSKEDLFGKLCLSEINGKKEEKGETHRKFLFGVFKNSQSSIASEKLGQQL

SEQ ID NO: 930964 - protein, 149 aa, Homo sapiens
MGLLVCGGSTAVCCLQSILLPLPLFQTLISILIFYKPSSELWKINLNTINTQCGTLKKGDSMIYCAEALLDLHTGGSEVGSMTDFSRLLMSMADKWVLAVSYGPGAFVLLHVCLFTGCLGFLKSRYLKFKSEGLDRQELEAPSSLNFGP

SEQ ID NO: 930965 - protein, 143 aa, Homo sapiens
MLDVISFVYVCIVAFAFEGLPKKSFPGSVSCSVSPAFSPSSFIVSGFTFRSLSLYFSYGERSSFILLHMNIQFSQHHLLESVSSPLYVLGNFVKKELAPTDSNVNLIWQHPHRPTQKQYFASFNTIKLTLNINHHKSTLRQLH

SEQ ID NO: 930966 - protein, 132 aa, Homo sapiens
MVLPILSFRVFIVLGFTFKSLIHLELIFVYDIRKRGPVSIFCLWLASYLSTFIKQGVLSSLLVFVNFVDDQIVDIIDRLIILNSEAKIRSLFNYEQSHIFGLSKVTFLDLREINDNSPPKKGSNYFSKVRIL

SEQ ID NO: 930967 - protein, 136 aa, Homo sapiens
MRTHTRGAPSVFFIYLLCFVSAYITDENPEVMIPFTNANYDSHPMLYFSRAEVAELQLRAASSHEHIAARLTEAVHTMLSSPRNPSPMRIQSSPGPRGMLLAQPTLECSGVIIAHCSLDLPGSGDPPSSASRHHHA

SEQ ID NO: 930968 - protein, 149 aa, Homo sapiens
MRSRNQGGESASDGHISCPKPSIIGNAGEKSLSEDAKKKKKSNRKEDDVMASGTVKRHLKTSGECERKTKKSLELSKEDLIQLLSIMEGELQALGKSVALANSNFCVMLLHHGELWKVFKIHVVFMFIVVLDKVSDPRYAKYKLTLLKY

SEQ ID NO: 930969 - protein, 139 aa, Homo sapiens
MVELVYSPTNSSGPSAAGLLEFTGGPLQILFAWVSAAVAAEQRILVNHKCCCLILWKFCLRGVPSCEREFPDPLHFLGQVTFLPPQLETMEPKSLNIILHQFHFFIASMTYSRLIPNDVHYIVGKNSSKYLISAVIAFR

SEQ ID NO: 930970 - protein, 271 aa, Homo sapiens
MLWSFSSFFFLLYLSSRVHVHDVQVCYIAGAGHWQEWGNGISTHACTDIGEGGVLVGTGIPVSVHAFALVVVVQQDVCESVSSSPCPLKCPWQLWNLLLLQFCRSVARAGQSLPVQLTPSPLVSGSQESSPGSQQNQGSMLPSTSPQCLHPPPFTLNAFPLKICRKCGSLPKIPVSQWEMFLLVCCEPLNGTETVHSGSLDFKAVACRCYQLNKALPSTTRCLRSFVCSSSCYISWFPDREVREQQHKWLAEARKDQQREKEAIYTNSKLV

SEQ ID NO: 930971 - protein, 156 aa, Homo sapiens [sequence omitted]

SEQ ID NO: 930972 - protein, 144 aa, Homo sapiens [sequence omitted]

SEQ ID NO: 930973 - protein, 138 aa, Homo sapiens
MTPHQLCHILFNLKMDRKYRKEGKGRMKNFKAGKLQGRACAGVSAIRSRSSCPERATASILAMWIRGDCSVHFHIGLANAYGHNTLIKAVVKTGQNRLEIMDFLTELDGFIQIFHHQNGEISCACRNCHVYSPLDEKQ

SEQ ID NO: 930974 - protein, 126 aa, Homo sapiens
MPGAFPSRETGSPHSLCWTHHLVWKYLSLLFLDVCFVWLECVHLMAPGQPLEGCMQTIYLHWLSGETSWLWGTSAHLLKLILLCVFSGLRISNANSLTNLLFEKSTKSQQSLIVLVPHPTTLKPLS

SEQ ID NO: 930975 - protein, 136 aa, Homo sapiens
MEATRSWLVRGWLRTRSSILRPAEEVPRAGEVEPITGALGRPGLHQGHRREDVTPARPSNLNKGVAVHLNAVKVCVTMPCEHKRREEGLSSTSPWGVGRRGASPSNWLVKDLKKVRKDLGSVLKISTQNNPPLEPP

SEQ ID NO: 930976 - protein, 156 aa, Homo sapiens
MINTILQSFANQLLGLGPILYQVGAEHGHGNECSQQEAVVDPASKLSCTNGVSHGRGPGGAHLRLPDGVQACQWAPVMGPGSLALGTYFAGLEMLERVRSQPLTNDDLVTSISVPPYTGDLSLAPRISGTVCLSVPQPSPYQVIGCSGFHLSSLYP

SEQ ID NO: 930977 - protein, 125 aa, Homo sapiens
MVDDAGAAESQRGKQTPAHSLEQLRRLPLPPPQIRIRPWWFPVQELRDPLVFYLEAWLADELFGPDRAIIPEMEWTSQALLTVDIVDSGNLVEITVFGRPRVQNRVKSMLLCLAWFHREHRARVF

SEQ ID NO: 930978 - protein, 141 aa, Homo sapiens
MKAILDFPLNFQEKYEVGNVNCQTQREGVLPGIYVTEVLGVSKKRCLTHLNFHEEGYFSVSAFIFAQYTGGSIPKKIGPCSMDYDPNLLEEDDELHSQGDSLTDHSVKGKSTVWRIGEAEDYSQDISYLEELEEHRFSVWL

SEQ ID NO: 930979 - protein, 167 aa, Homo sapiens
MIRQQHLLFSNVRCSAASAADTQANRVWSGPLANSNRPAAEDPDYKTTKMGKNQSRKAENSKNQSASPSPKECSSLAATEQSWTENDFDELREEGFRLLNFSELKEEVRTHGKGAKNHEKRLDKWLTGITSVEKSLNDLMELKTMAQELRDEYTSFSSQFDQLEERV

SEQ ID NO: 930980 - protein, 149 aa, Homo sapiens
MGHLLFITRVLLVVPHLSNRREPPCLASNSHFCKVQMENNRTELNSQSFLLTVAVSPPGLLCLCSPTSDESPRGSASDFCFSSHWPFVCKQTISKNVKHPMLYIPRGICIYVIFFKYECKDLLEGFLKVIQLFNTYFRFVGTCEGLLHS

SEQ ID NO: 930981 - protein, 166 aa, Homo sapiens
MLNAMAGYHEGVAKEHTNDKQRSLNAHVEKVLVVWIEDEASHNIPLSQSLIQSKALSLQLHIQAQRGEEAAEENWKLAEFGPEVLRKEAVSITEKCKKEVLLWVKCYQTALHATEKPLVKESINEAMRLPQPFQPSATTILINQQPSTSRMVLRSLVKLVKPLKWF

SEQ ID NO: 930982 - protein, 146 aa, Homo sapiens
MLSPLKRIQPINMRAFEGHNLQSPECTERASRCLGYALRQLFNSCVSQLNFQYEDSSSGSGSHYIKAATERSPFQLSEPQDSPGHHLKSFWRQPHSHGPCTLQTSEDVKMAPCKCHQDLLPVLSGGVATTVPRLARTKPRAAEDYC

SEQ ID NO: 930983 - protein, 184 aa, Homo sapiens
MQFQKGKIPSLGNTALSLETCWDTKISGASKMQDTERNLKCIQKEAIYIFLQHFYNRKAKMRRNLFAVIISVIKNLLSKEAGTYSRNLQQCNNCGNLLGHKNLDEELGFSAMTPVDVSTAVELWSWSVERGPVLLVQIIAAFLIGMMLLSQDPKGEEKTCTFLVRVTEKLHEEEHGYKGAELGH

SEQ ID NO: 930984 - protein, 131 aa, Homo sapiens
MFTTFVFSQSTFIYSTSFYNSFVSILKDLEASQPLQILDLMTSLHLPVSHGAPVHNFPANLGCRSPWALVPMDFQYSLGKIYERNYPPLQFTFYLWNALTIDQVLKIIVEVFIQHDVLSPGKVFAQMSPSS

SEQ ID NO: 930985 - protein, 316 aa, Homo sapiens
MLSANYSAEERFLLLGFSDWPSLQPVLFALVLLCYLLTLTGNSALVLLAVRDPRLHTPMYYFLCHLALVDAGFTTSVVPPLLANLRGPALWLPRSHCTAQLCASLALGSAECVLLAVMALDRAAAVCRPLRYAGLVSPRLCRTLASASWLSGLTNSVAQTALLAERPLCAPRLLDHFICELPALLKLACGGDGDTTENQMFAARVVILLLPFAVILASYGAVARAVCCMRFSGGRRRAVGTCGSHLTAVCLFYGSAIYTYLQPAQRYNQARGKFVSLFYTVVTPALNPLIYTLRNKKVKGAARRLLRSLGRGQAGQ

SEQ ID NO: 930986 - protein, 229 aa, Homo sapiens
MRFGALWMKEVHGRQTCLGKQQPQRFSPHGGQEWIKLERDTTEEKMFEQLKPIEPVQKTLPWVGEVAATLQEAMKRDCWREARVKKKPVTFEDVAVNFTQEEWDCLDASQRVLYQDVMSETFKNLTSVARIFLHKPELITKLEQEEEQWREFVHLPNTEGLSAWVRKKEEEEEEEEEEEEEEEEEEEEEEEEEEEEEEEEEEEGEEEEEEEEEGENKSRIQLTLEQCMG

SEQ ID NO: 930987 - protein, 147 aa, Homo sapiens
MRGSIRVCERGCEDDVEEATPNLICSQGAQKKLLFGESSLGNTGGLYLDITERGTFQKDSPPHPPGRPVRAIFMVRSRWRRRHLETVIIQAMFKDSCQRTQKPPANTPIPHSETTTHNLECSQPTRSTFYSLKSLAAKRSVERGSPP

SEQ ID NO: 930988 - protein, 262 aa, Homo sapiens
MGKKQSRKTGNSKKQSTTPTPKECSSSPAMEQSWTQNDFDESREEGFRRSNYSELQEEIQTEGKKVKNFEKHLDECVTRITNTETCLKELMELKAKTRELCEECRTQELIKAGQHSDSGNTENATKNATKNASRRVTPRHIIDRITKVEMQEKMFRADREKCRVTLKGKPIRLTADLSAETLQARKEWGPIFNVLKEKNFQLRISFPAKLSFIREGEIKYLTDKKMLRDFITTRPALKELLKEALNMERNNRYQPLQNYAKM

SEQ ID NO: 930989 - protein, 139 aa, Homo sapiens
MATRDWERRGSRKGRNRELLIQEYKVSVVPPFWTEPIYLLYILVDVSHIPETYTIKLYPNHLGPKSSGPPEAVSQDACEAPVSIHSLIPRDLEVFSMHRLCSAQEAQWRTEQADWSVFLVCWDPETKKRTMTTSVKRYD

SEQ ID NO: 930990 - protein, 144 aa, Homo sapiens
MRCKHYSTVCFLLDSAPKWYTNGQRAHEKMLNIISHLTNADQNYTELKKEELYLAGSFGKTHVSNNRAPRVSNSCPFQGLTTLRGSLDKADSVPGFKACAGPQRGQSGHSTPLAAVAGSGLNMRPNSGNEAHSWAFPGKAIPFR

SEQ ID NO: 930991 - protein, 124 aa, Homo sapiens
MLISSRNTFSGSQTQNHITMQPVLKGYIFTQITHNLIDYHFENQCQWRENSFFTLCLLFSGYLTFLFTEIFKSDMGRRLLTVYNNFQIPIFNGLSKIRKPIKDAMKSSSDALNRALALALEERV

SEQ ID NO: 930992 - protein, 151 aa, Homo sapiens
MRGREVLQCGKYNALGRLKTTLNKNLLEKDLPYKLNVTFPLNRKLGEPAETILFMDAEELTVTRRANWEICPFDPVISHEAPPPTLGISAQHEIWAGMKIQTLTMGKTNLDCYKSGWWLFLGWVPGIAGTGCEGLVMFLDLGSGYICVFSL

SEQ ID NO: 930993 - protein, 187 aa, Homo sapiens
MIDVTVSFAKDFLGDGVATAIFKIAVAPTVQVKLLMQVQHASKHITADKQYKGIIDCVALNFAFKDKYKQIFLGGVDKRTQFWLYFAGNLTSGCAAGATSLCFVYPLDFAHTRLAADVGKAEAKGNSEASVTAWLRYVNLMGLRARTKASTCLCRLLSSTELPTSVSMTLEMECFRIPRTLTLSSAG

SEQ ID NO: 930994 - protein, 132 aa, Homo sapiens
MTVGSMRARMLEAHCLLPPLPPAHHVEDSRHRGSKEPLPGHGLSPLPERWKQSRTVHASGDSLGHVSGPGRPELLPLRTVSESVQRNKRDCLQGVILPEKCSTQIQDNITNVKFLISSELNFPVILHLTSFL

SEQ ID NO: 930995 - protein, 151 aa, Homo sapiens
MQVCCTDYFITQVLSLVSIKLESNFSATSADDLPWLGKQQALIVAGQARGPVTNGAAQTDIEDKEEREKGRGEKKSGEKLGNGRRCWDGSRQLRRFVLWCAAPQARLGPRDSGGDLQNTCPTKHTRVLGQRCHGSIVYNSEMWGTYLVRRQ

SEQ ID NO: 930996 - protein, 154 aa, Homo sapiens
MTTQNLTGFVFCREEKKKVNELQRDENQKYSISLNLSTQERCKPTAFLSRKLSCFPAKVRTEAAMGTMHPQPRDAGSPHQRLEEAPPEPVLDFRPRPPNTSAVARMGLWLWLQPPGTPAGEKEATHGERPGSKYLKENGTRSQSSVLNVVISKI

SEQ ID NO: 930997 - protein, 226 aa, Homo sapiens
MSSQSVLVSWVDPVLEKQKKVVASRQYTVRYREKGELARWDYKQIANRRVLIENLIPDTVYEFAVRISQGERDGKWTPTTAPENLNVWPVNGKPTVVAASWDALPETEGKVKVSSFQPSAKSFQNTFFHTPRLSNHLEQSPSPILETLLLPWWMVCSLGNAIFSKSGPQTGEAWDLTPKPSLSLCQQVSIMCLWLSSLSLHSCCLFCVPLNHALGFGTAQQMIFPG

SEQ ID NO: 930998 - protein, 177 aa, Homo sapiens
MTGIEMLSIERHKHMDPSRRAGGVFLSLASRLMEPPSSRKRPNAPYVTYLNKDPSAPCSLTDALDHFQVDSLDEIIPNDLKKSDLPPQHAPRNITVVAVEGCHSFVIVDWDKATPGDVVTGSDPAVSVTISSRWATHLSLFGVSPGLVPLPLSLLSRLLGASRQIWVLLSSLCGNRR

SEQ ID NO: 930999 - protein, 142 aa, Homo sapiens
MKPMSLGARRHCVGTVCWSLLFAWVSPEKATERQRLLPIPSSGSFIPEGHLPDASQSSSMPCLEKRNLERQSGLSDLAELWWALPSSNFLATLFTLCNSNMMVNSKQLCTLEAGVEVGRRSLTALVAAFGLLCERGEKSCLG

SEQ ID NO: 931000 - protein, 140 aa, Homo sapiens
MRCVPGLSPRFSTHLNTHALCQRIYSAHSVAEIPVLPVEVMCTSSWKDRLTAGGRHSSAPFSCFGGCEGTGPFQGHGAFPPLRYIQLKAALKCAFRKSNLGPTLDLLNWNTGGSQDRQEVEWLRRPRPGLLAEAEASSRD

SEQ ID NO: 931001 - protein, 170 aa, Homo sapiens
MHGRSLAAQRCVSVPVTSPNINPPHFQFPGLLWMFDLPNGRPFTPIGSTFLASPMRCAEHLLPETSLACLRDKGAMPPSTTAKLIAGSFKIHEEKQIELQEEIDKSKIMLRDFSIPPNSTEQVERKIRKTTKDLNNIVSQINLLDSYRMYQPQTAKYTFFSRTHRTYRPR

SEQ ID NO: 931002 - protein, 239 aa, Homo sapiens
MSPFKMGQNINNAFGPETANKCTVQQRFKKFCKGDESLEDEECSGWLTEVDNDPLRAVIEADPRTTTREVAEELNINHSTVIRHLKQIGKVKKLLDFIQQPAMTSSIVEPRRSSKALLKVKLALKKVMVIVWWPAASLIHYSFLNPITSEKYPLQIDETHGKLQCLQRALVFSMTMPNHTWHNQRFKKFSKVNNILICPGLDPGLKGFWEQETFAAKTGKVLDKLGSPLSPLIGFSFYE

SEQ ID NO: 931003 - protein, 157 aa, Homo sapiens
MCGERAWFGFKSEKLARKVSRACVLQQVVTVGNRTMVLLETLCGLGALHYSKLMRGGLCSKHGGLILSLSPGPICSIVLGRCHCWEAGGSSSCLAQTVEAFLAGSCSLCAPHLVQGLEVKCSTLLLRVQGSSSPPRATALPTLNPYDILGSRATFLP

SEQ ID NO: 931004 - protein, 150 aa, Homo sapiens
MIAAAGKSETLGPASSWKLRRRHLQKAPVSNNTVERTLPLRQGSRAAGELEVLRESGPDPDPKRGFLDLAQEGILGKSIEQSESKFIRKPCWAARSMGLDHIRCDQWIPNLCGSTCVPLTAGLPVIKVVREGQGGCAGVPDLVALSSEEK

SEQ ID NO: 931005 - protein, 128 aa, Homo sapiens
MKKVPPVHDTFAFTVRFQRRCILLIKKSYFGLLAGTAIFRVTMAKLGVYDVPQHAVGIVVNKQVKGKILAKRINVRIEHITHSKSRDSFLKRVKENDQKKKEAKEKEPMGRSLSCWNLFPINSWHNRC

SEQ ID NO: 931006 - protein, 135 aa, Homo sapiens
MLMRPEMYEQACTAAVCVRPEDHLEHAYQREDNTDIQEKTQRSPREGGSKDWSWRGWSCSKSRNARSHQKLEEEGFSLQLQRESGPADTLIWAHWCNAVLTLTTLCPVLRAQSSMDCPHFRHQLLVQRSQGYPHS

SEQ ID NO: 931007 - protein, 150 aa, Homo sapiens
MRSPYTVHISCTAYSDPLKIHNSYREQLCGTAGFNLDLYDSKVHTCEYNTLDCPRQCGLCPEVNLEVADPSSSSRELWFRAGAQGAGAMQGVTELRPPEFVKSRKPQVGSGHMGNCLSKGKRFLGHCQYKQGLPQRHQLQAEERESGMRQ

SEQ ID NO: 931008 - protein, 153 aa, Homo sapiens
MALWLQGSPWLAGHLTGEALPGLKLHLFHVILISFQTILHPPCLLPTGISGLTSRLCFNKPSCSGLHVLVSHKQMAFQPLLKRPGSSAEVFVGCLKEEKPRMRAQPPTQASTKAALSSSDLILAFRVMFRLKKKIHERNIQKPLLSPKLEPLV

SEQ ID NO: 931009 - protein, 141 aa, Homo sapiens
MLCKTASEQEAHCIPKEMQQATLTLHHQQRPCGSGSPSAQFYLLPFMTGFLKVERTDNNFIQNILANIYVQIPMKLSVLANFHVTVTTRNTHNHMSEDSGVLPLVRGYTFMEKHTEEQQKGIVSISWEKPDTELHDLSEAI

SEQ ID NO: 931010 - protein, 151 aa, Homo sapiens [sequence omitted]

SEQ ID NO: 931011 - protein, 159 aa, Homo sapiens
MALMGSRLDHRRYTNAPSNSRHKIRGRTCPHLPPCAIITKTTCPVTESKDLNLLGTNGSDTEPLKVVFCREQEVFIEGTDDGKVVKGLDYRINVLGLQRSFYRNDCRGTALDIGKDVFNLYCFGANRMVSELQRYLNSPIKCYPVMSLDIVRGFNVKLN

SEQ ID NO: 931012 - protein, 153 aa, Homo sapiens
MYIRQFQNPKWCKKISLILPLHYLQISITFDKKATFNYIAALLYTVSPFSFAAFKIFSSPLTFNSLTIMWVLHNEKKGYRPYFLHAASTLAEKGSEVLRVNWVHTGKKGFLPAGPRGRMFYFLETISIGSFSSFFKMEHDFRPFFLANKFLKL

SEQ ID NO: 931013 - protein, 135 aa, Homo sapiens
MGRDALDASDSKKCLRPRGLRKKTADAGVKNLPRVSVTETTSSRTEHQGVSEKEIGTSKALLPLLALPFLSRVPQLQVCWSLPEVHSRPYLPGYHQQRLQNSKYCCLILLLESSSQRGTRLYEVSFGPYLEVSPS

SEQ ID NO: 931014 - protein, 134 aa, Homo sapiens [sequence omitted]

SEQ ID NO: 931015 - protein, 169 aa, Homo sapiens
MARNGLRRNIFIANKNNSPEIPTCLTAVLTHKYLYTKLKFVTILILLIVGIQVYQILQVAKAEQKILEKNTLITGDAKETEIILQPHVVVIEFLRLFSTPLQGIPSNHVTEVVFVRFLHCKVTTCPSSLSLPLSLEDITIDSPHLREEKFMLHFLEGYSKILIAFRPFG

SEQ ID NO: 931016 - protein, 125 aa, Homo sapiens
MNTRFRRSEYSLEPSVLAFFITFGNAFWRKPSQNFTELYLLPMVAALHIPEIYVFLGSDIAHSACLLFRTREGRRWYYWSSCSSSAFARWYHKKIGNSGNVCKTYVTIIPPEGCRDLQQLLPVIS

SEQ ID NO: 931017 - protein, 263 aa, Homo sapiens
MSQPSEGKIEKERARPESSCLISSDARKVCAYSFSWAHRRGLCVSPFVHPVLQGCIASSSTIIITIIIIITIIITTTIITTTIASTTTIITTTITSATAIITTTITSATAIITTTITSATAIITTTITSATAIITTTITSATAIITTTITSATAIITTTITSATAIITTTITSATAIITTTITSATAIITTTITSATAIITTTITSATAIITTTITTITSATTIITTTITSATAIIITTTTIPSIILTTHITTSITSIISNLL

SEQ ID NO: 931018 - protein, 141 aa, Homo sapiens
MDWYLSAAVLDSHRSGNPIVNCICEGSRLQAPYDNLPPNDLSLTAIILRWDHLVAGKQVVGGKAALKAQGQGSKETQVLGVRSKSMSGALRKQVTPGNPGGADDCPLQSLLLSKFPPAWTFHLNFRPMHPTAYLTSLLGYL

SEQ ID NO: 931019 - protein, 197 aa, Homo sapiens
MSGYWYTLGFTENTHSANPLLRCFTSDLDINNRKVKLHFEDKFTFTAHLALKEDGITILCSDNNRGKRPYPPYPISEEGEEHDFTKLHNKDGRQHSFRCAHSRHHQHSCHRETHQHSSLPQSGLQASKAKMANANSQEARYSIICANSPLGARWLQQVQVRELSCVTPKEQKPGTGEWRTKDQRTNAQDAQNEKVSC

SEQ ID NO: 931020 - protein, 156 aa, Homo sapiens
MWPTAGGGEWCPKYACASEGDMQLDTTLASLPGDSNSGSLRGDGKVNFKQANLTTANLGTTDLQSGTQNPENEACILTNPPLENLSLLSFDYDQRGVMKSKIYIHGICVKNLDLDSSEGWYSTFSESVKVPFLIIRYSCPSGKEEKKSCFKNIAQY

SEQ ID NO: 931021 - protein, 147 aa, Homo sapiens
MGISSEAGSESSPAAKKTLRKTETEKSIQDIGIPQKSYLPNFGWQHPKMKGAWIPKSLFGGEPLQRTACCALDCEPPCLQCLQLTEARITHLPFSKPFLLKEYSDHLVTLDWWSLCVLLEFMNITIAEKQHKLALYILPDNEEFLRG

SEQ ID NO: 931022 - protein, 162 aa, Homo sapiens
MSSTLCFTKDTATERNRKRKRKAEGKENPWGSYIITLDSHSNQCYADLSDELEKQEEAETSVSRQERSAPGQIFRDQFLSVWGAPWKPVASNGPLTGKGSRSLDPKKGLLDLVQERIQGLRCQWEIETSIDSLPPSVVRVMMDRKAAHITVLAAICFFSCSW

SEQ ID NO: 931023 - protein, 164 aa, Homo sapiens [sequence omitted]

SEQ ID NO: 931024 - protein, 362 aa, Homo sapiens
MIGQVTALRLSSNPLEPGCPDDLVWLERILPCMDVTLWDDVKGSGKRGASIRFYRGLRKLKIMVEGKGEQGLHVAKARARRREPVVGGATLYNNQISPFLAKVWAARPKLDFHKHICISQVSGCMDSPEKPPWSQWTVPYETLLTILRERCVSLKLMVNNENPWQDPSAKKENNMEEKHPLLKNCGPEWLIPLPLTLRGLELSCMATPNCKGDWERRRRRRRRRKKKKKKKKKKKKKKKKKKKKKKRRRRKKKKKRRRRRRRRKKKKKKKKKRKKRKKKRRGRRGRRGGRRRRRRRRKEEEEEEEEEEEEEEEEEEEEEEEEEEEEEEEEEEEEEEEEEEEEEEEEEEDSSLLWRCGVGIPS

SEQ ID NO: 931025 - protein, 185 aa, Homo sapiens
MEQQDCALPLLTDVIQTNKEVAFKDLDVAILLGSVPREERFTENVKIIKWQGAALEKYDKKFVKVIVMGNPANINCLTASKLVPSIFNENFSCLTCLDHNQTQVQITLKLGVTADNYPDVNQAKTKLQAKEVVYEALKHDSWPQGEFMAVQQHGAAVIEAQKPSRTMSTTRAISNHLRDIWLGTP

SEQ ID NO: 931026 - protein, 157 aa, Homo sapiens
MGVFTQAQQHTPPVPPLSLDGLSFSHTGLLQSFECSQSFLSSIFCLPAYKNTAPHPCKDTAYYSSSDGPLGSSRWLPPFPWLEIQNEGVDGTMLPLKPPGKNLCSSLPPSGSCWQPCHSVAGAAALQFLPLLSHGLLPSLCVVYVSPNLSSPTETSH

SEQ ID NO: 931027 - protein, 137 aa, Homo sapiens
MTLVGKNHFVPGISGSKKGIPVILPHLEAIKGPFSLELKGTSRNRLIQRFALQQIRWFNPHFTEEDVVSESNTHQKHLEGSSRTDGWASPEFLIQQAWVRPENLQVQQVPGDADADAVCAGTALKPPQRRLHKGYAG

SEQ ID NO: 931028 - protein, 142 aa, Homo sapiens
MPFTVKRNVNKCKGGSIKSQLHKIYCEKAKSLYDNRKQKDVEGSNAGEFNASKGWFDNFREKFVFENVKITGEAFSANPETAKLSEPNKKYKTTPGHIINKLFKTSYEKKIIKATRGIKTHYVQKQQDKDDISLLVENNARF

SEQ ID NO: 931029 - protein, 145 aa, Homo sapiens
MEEVETVGFNEIQCWACRLPALMGYISSLSLSFFICETAEKQSKKLTLVEALVRLPYQRAQSYSPSQVNGYVMYPEHLLAEIISVGHLALDPYLLMTLRWFHCFQSFSHILKHKLDHDSALHRSRPIASHQDKIYTPYPSEQGPT

SEQ ID NO: 931030 - protein, 151 aa, Homo sapiens
MRKGVQRFFPERNPCTAGAHSRLSLHLLCPPTQLMSGRFIEGNQLFKGSAPQMALLSPAVGTHLRLCIQATLSLPPPPLLFLQTGPHTHPLYTMVSLLCGLHVWVNPVWAENRGSFQLQKEIPAPLLLLSDPGHERRGLPLRIPSPPLKHL

SEQ ID NO: 931031 - protein, 170 aa, Homo sapiens
MGLQRDMSWNQSPTDPEVWLLPGSSTWKQQCEVWSEAVGGSSRESEPWLLLWDLLLHTCTCAGFRLLNAGLWTYLPHGAVVWVTVRSSASQPLKPQTKSRDMEVRLRGVDKKTASTHKGNLQSLIIGGACFSFVFCHDSTCSLRKEQLPSCLIEGWGWRAGNCYYAKSQL

SEQ ID NO: 931032 - protein, 355 aa, Homo sapiens
MAVPALTPAALDVGALYPFSRSGSRGRLPRFRNYAFASSWSTSYSGYRYHRHCYAEERQSAEDYEKEESHRQRRLKERERIGELGAPEVWGPSPKFPQLDSDEHTPVEDEEEVTHQKSSSSDSNSEEHRKKKTSRSRNKKKRKNKSSKRKHRKYSDSDSNSESDTNSDSDDDKKRVKAKKKKKKKKHKTKKKKNKKTKKESSDSSCKDSEEDLSEATWMEQPNVADTMDLIGPEAPIIHTSQDEKPLKYGHALLPGEGAAMAEYVKAGKRIPRRGEIGLTSEEIGSFECSGYVMSGSRHRRMEAVRLRKENQIYSADEKRALASFNQEERRKRESKILASFREMVHKKTKEKDDK

SEQ ID NO: 931033 - protein, 148 aa, Homo sapiens
MGSEGTEGDNRAEESQQRPHGPHGLEDLLVGPLERKSVALPWKLNGASTELHPLASFYLPPLTSCVSAPFSYCVGKRVAASHMSFWPTQQGKGEGEILFPTQRKEPRLSPIGLAWMWCLSPWQSALMVQEWVTHHSWSWEPTCHSPVS

SEQ ID NO: 931034 - protein, 227 aa, Homo sapiens
MILNRFQYLEAQDFLGLRLALLAPQLAACRQPTVGPCEHVSTVKVRALIGKEWDPATWNGDVWEDPDEAGDTELVNSDELFCQKEQLPHPQVTVHWGKGNDQTFQGLLDTGSELTLIPGDPKRHCGPPVKVGAYGGQKTDGSWRMAVDYHKLHQVVTPTVAAVPDVVSLLEQINTSLGTWYAAIDLANAFFSILVYKAHQKQFAFSWQGQQYAFTILPQGYISYLAL

SEQ ID NO: 931035 - protein, 163 aa, Homo sapiens
MGSKPNNVVVLVGSESSLKDLGIYDQHVAKLAITLSPSEQQVPPGPRWAEEPLSVATTTTDPCGVLPGHHHCSLKAQGRFSQLVVNAARPGTHPSGPLAPVWTKAGPEMLINSLGLDSGTPRACLVLYPIVVELMEKPMLLATHTQCSLCRGADKVIFCGSEV

SEQ ID NO: 931036 - protein, 188 aa, Homo sapiens
MFMTVTLEKYYYLRINYPSSGIALSLRKPKVPHKRRQVEKTRGCCLNPVPCLRSRGATQRSKPLSWSLPPEQRHNGFAQLDTLVLRGESSKAPLKELTLFGTESKGNSSLRAFWETVESNQLIINMNLCLMVLEAKKSKIKGLASCEGLLAVSSHSGKARAYARMRVKALNLPLYNEPAPAMRALIHS

SEQ ID NO: 931037 - protein, 168 aa, Homo sapiens
MQQFSNSASYLSRKLACIWLCFPGSTHALCPQLDPTASMKLSLGETWFHSFYLSNVSRIQPLLTTFLLTTCEIKPLALNLNPAPSQIIMPPLDFGINSLNCLLNCHLCPQYSQQGSQVILTKSLVSSPQNFWSQDSFILLKITGDPKECFLMWVVGLSWIYRLFFGSI

SEQ ID NO: 931038 - protein, 141 aa, Homo sapiens
MAEWYCENATGYTHNCPQGWKKLREEPGKEGAVASLVAGSCQQGTNISQSPTGSSFQNSILTATKTGKKLGQVKMLIAEENLEFSSPIHHSFGWCKPFAIFQSSKRVGYDHFGLLFNVSAGRWEIGAAYSPILLMSLLGYS

SEQ ID NO: 931039 - protein, 136 aa, Homo sapiens
MACLLQAPLMCLHCKELGGHFRDLCSTLSHNRPGGLGGNNGFAGRAQVPASLCSLGTWHTVSQLLQLHPWLKGAKVHQQLAPCTWKSCKHSTPTHETAVGAVPCTATEAELPKALGAYLLHQRALDVRHGIRGDYF

SEQ ID NO: 931040 - protein, 306 aa, Homo sapiens
MRSFYGCFDLHFSSLNVIHPFHPSTHENKSQSLPFIISPLYAGLKLSPNNTLKGVETNNNLENKTGGMERSKQMKVRITEAFKPLIEVTITLVFKKQGYNKRLAVSNSEEGPHLIPTMLTPRSWTSSLQLKDSEVHLPLPQPTQGQRPGCEHQGPYEGISRVPGASSLRESKRAQKPTTEDPCLPFSSNVKKVHENQERTIQKDESSRTCAHASPRIVPFSSDQIGKCQGSWLQPPVTFSPHLESVVSFNISSCAAIPFMMDFQLPFISKTKHQVICRSCSLLFPSDTVFWFPSVSSQGWSPRDGN

SEQ ID NO: 931041 - protein, 154 aa, Homo sapiens
MDLPIRDVTPAAELNTPVFSHSTDFHKERSDNDFLLVTLRKDKSECYSTFLVLNLTVLLQVAFYFTIFIPEIKDTFNSSSLKNVHWFTEFIVSTRISGFFNGFWHHSNSQLAIFVGTRVPCEEENEFNCYGLNVCAALKIHMLKPNPQCNGIKR

SEQ ID NO: 931042 - protein, 151 aa, Homo sapiens [sequence omitted]

SEQ ID NO: 931043 - protein, 170 aa, Homo sapiens
MQNARTQWLAVASFGALQKLTLRLPDHIKELKLSRSSHPDQKTDPTSLMILLPLPNSSLPACSYISSLLYKPPILVGQGGGFETDLPSTWMQHQIKAFFSSNTCCLSDWLSVSFDPGQQLQARAEKVATACSLLLRCTLQKQKGHLLKQARSTSSELPTDSVLSDCVLLP

SEQ ID NO: 931044 - protein, 158 aa, Homo sapiens
MPYITVVRSGRLQICAYVKRSQLPQRHFRDLYGSPSHHRLGRLGGKNGFMGGAQSPTGLHSLGELCLTSRLLQLQSWLKEAQRICGKDSMSQKKPAAGMEPSWKTYPRAVLKENMGWSLHTEFLLGYHLVEPREESHHSPNPGMVEPLAARILHLEKP

SEQ ID NO: 931045 - protein, 169 aa, Homo sapiens
MLSVCSMIRDIELNLSRGPPHSSPSYTHLGEGTLYFSEVNCWSAKRDSDISLHQPNNYFSTNDSAHPPPLTPLFTVYWSLYNVLFMVILTVFSRTDIMENNPPLHGRILSSFLVICVFSVCSRAKKVIRDKQQLKNTAGVTFALWMRWGFPLATWCTPHANEVVVSQLG

SEQ ID NO: 931046 - protein, 149 aa, Homo sapiens
MIGKLVTRKSGEEAVYALNEHLIYRTVSPITRIQGSRNQGVEVEVAPLTIIPSDPLAKLLLPVPVTLHSAAPEVLVSEGGVLPPGDTTTIKLNWKLSLPPGHFGLLLPLSQQVKKGVTVFAGVTDLNYEDKISLLLHSGDEITLDFHPT

SEQ ID NO: 931047 - protein, 162 aa, Homo sapiens
MDPKSEQRQDLPQRAKEQSSHSMEEDPSTLLLLAQGSLASTLSCEDCLKFERASQGSRGEHMYVPLPTRSLTGHVGPGPTSPPTLCSLANQRGSMEHPVLSLFPLIGASLISQRGSTPLNKLEAGASQVCFMLEVKPQYALSQTTTESFQGDQGRHMFKNTE

SEQ ID NO: 931048 - protein, 152 aa, Homo sapiens
MFRERGRACTSPQLAFLGHCLPLPYRHTETHRTDSQRGCTMHCPVERTTGHRTARRLRHLAPAKQLGDVLWHARGERHSSVTCDISLSSDVPRKWITTAAMPQKEITILGYKDLNFPILRVTSDMSSRRWYKALKCDPCSFANVLIKMKGDL

SEQ ID NO: 931049 - protein, 183 aa, Homo sapiens
MPQGESPAWSENTISNNFTTSGRPSSRGLGSGAVPTASFRTARRSRPAAERLPCPQFSPRKRSDRGDGPRGSPSPVWDLAEGGSSGPFTEAPTFFQQGPLLHQGSSRVTQPRRCSLSLTLRLCRPSVKGSLPGEAGQVLADRRRTASPVVLSSQRTADAGYCSTGRLALFASAPHGCVPVPRT

SEQ ID NO: 931050 - protein, 140 aa, Homo sapiens
MITRRIGAELRSRESLLQGSVTIVGKRRGGEMKKKPHLQGAVTQKVTKPAGYQAVIEGSSRCIISSLTCKEFGDCHSHPHKKSIKLNKQKIIISYTCQRTEVTGQTSALNIGDTGEHREPFLPGTETHEQKQIDGTCQNT

SEQ ID NO: 931051 - protein, 236 aa, Homo sapiens
MPSTVGVLLSVWKPAVLCGRHRKTGGAGDQVFGFKCSKGESCQRNMKTGASDHLFNCYSEMDLSNGYSGLQHSGWLNRKIHPADDSKLLSLFGLALSLDLGPVLQKAKSHLSMAVPLPKGDAAAMPRRHAVPTILGHTMGIQDTEVSSSGAVQCGTGESKVKKYGMGWVCPLGLSSKLTDTEEEVMGQATVILKCTIFLTKTGFPGFLHLCTCSSSALALYLHVAFDSNLLGLLLR

SEQ ID NO: 931052 - protein, 157 aa, Homo sapiens
MTSPNKLNKAPESNPEETEICDLSDREIAILKKLKEIQDNTKKEFRIMSDNFPSNSQDPPLQVCWSLLEVHSRPCLPGYHQRRLQNSKCGCLILPLEASSQRGSWPYEVSVAPLLRGASQLGYSGVRDPLEEAVCPFSDLKLRAGRTTTLFLSDRDV

SEQ ID NO: 931053 - protein, 151 aa, Homo sapiens
MLLFLYPKSDSGCACASACVYWVDAAFVILSSESTPVNPWQTVTPGTMLDPGAGPGYPQSTFLHGEPSHGTLSFSALGTSSPTHWKGCALQGKDPFLPGASRSLCTLTHLLLGVQLCQGTLRKATQGQSLLLLVFTKPGGHSQSVIQMAFE

SEQ ID NO: 931054 - protein, 134 aa, Homo sapiens
MWQAAQPALATRWGPLPHCGRFVISLFAINPAAAHSLGPHCLYELFTPEASETKNPPGGTNNSRRATLRALTLTAKVCSFTPEPGDHEPTRRKKLRTHPKIRRNKLQRRHLKCCNTHRKANWMAPRCHALQALN

SEQ ID NO: 931055 - protein, 169 aa, Homo sapiens
MLAEDANSEEFQRCHSLFQRVLFLVQISPDSNMKMEQQEELVKGLELLKIKAADGRIIRSPCDSGESGYRGQLRSAGGSAVEQEEAHELCSPLAWRTGLTCTQRPQPSITASSGPRYCSHSFRYETEFIHFTLHATKVFNNASVVASQINAVRKLSKGISGSGARYNFV

SEQ ID NO: 931056 - protein, 144 aa, Homo sapiens
MLVLRPQLKTNRIQRPEWSPASCFNQPSRRCPCRQKFEPCCIRRCQYTSMAKDVDIYHGDAIKQETLPLIPHPFPDIRISPGAGPESPGVKSGNLHSCQVPRLFFFHVKNVTVPHCTVLSPRLRWARGLQCPAPTSPRPGLLPA

SEQ ID NO: 931057 - protein, 142 aa, Homo sapiens
MVHKHMKRCPTSLVIREVQTKLRGHLTPMRMTSIKNQEFTSVDVNRQVTRAAVRATDFMGSGRGDGKRTPPRAFEVAIPASLPCPVNVAYSPSSFQGPVSHSVIGDFLTPPVSSGDVLGSVGHGCRHSMDTTHQGAVVCFRK

SEQ ID NO: 931058 - protein, 175 aa, Homo sapiens
MKQTAWAGKKAEPAPGLTETRTTRNNPQSLDPEEKEEQKQQVENKQKMEPGTVLLPGAGFRREALKGPLVTCIPNSLTSHAALVSSPFHTTTPKGHEAGRMGSDVHLAFLEVQWSHAKSCGRQGEAVYSFGGCAVLPPHLWTPPPPNLAPVSCALGTLCACTSLRSAGSLMPLSL

SEQ ID NO: 931059 - protein, 226 aa, Homo sapiens
MLQLYLNIFLPFKRVICFSISAPSPHPVLLVWNSLSSLSTQPGPLPQIDLQSFHWTCSQGKVQLQGPKSNSKVKVQAQFLCLRSDLMSRWEQGPRSSFKIQVLIHFADPGSDARYRSKYKVYVKGPGLMFAPMVLVPRSKSSTFEGQGFLLLKTVATVSPTCDSPANCKNTALPTCCVSVHEIPTKEKKRKRAVLECETLNSPGCQASMLHSQAVSNNYLQLVAIE

SEQ ID NO: 931060 - protein, 175 aa, Homo sapiens
MEAQGRDTVRWLVSQLRELAGSPGARLAPSVYLSVGNSTSDAFHFEEITGKVHTSEWRIICWHVHILDTRLNASVHSFQPYFLYSWSTYKHTCTFTLTAEICMASQLQHPKMLMDLNLGTEDDCRFFLHLFQRNFIIQVERIMNPNPMSPSPSCNCQCFANLLSCIPIIFLFRIL

SEQ ID NO: 931061 - protein, 142 aa, Homo sapiens
MGKKQSRKTGNSKKQSTSPPPKECSSSPAMEQSWTENDFDELREEGFRRSNYSELQEEIQTNGKERKKNKKKRQSLQEIWDYVKRPNLRLIGVPESDGENGTKLENTLQDIIQENFPNPARQANIQLQEIQRTPGEEQLQDT

SEQ ID NO: 931062 - protein, 175 aa, Homo sapiens
MVSAVVCLAPSLPHADKCKVSLALIDGLMPLPRRPQPSDEILTQYQALIAVIYPFPVCNQFISMLFSYKIGIFIVLFFLETFCFSNWQRSVSSPEWWLHIFVPFADKKKKAQEEVIMRYWKIFLRRECLPVHQVLVHQLAMGEIPERILEYANTVDPKYKAQGRALGYAVSEKGS

SEQ ID NO: 931063 - protein, 174 aa, Homo sapiens
MRLPTDRQQTCDYVTLYDTDDFVDVIKDPEMRKLSWAQCPHKGLLIDLFNSSARETRWPTNNGGPQLGPDTQKIPKWIKPPPLSARRLLISHTRKGSDSLCGHPADDDVSVLGIRKHSLCGVIDTEVGSSDNTLHRHVKALVQALNPIRFVDLNQAVTEASEFPFSFSFTHISC

SEQ ID NO: 931064 - protein, 142 aa, Homo sapiens
MSLKMFQSLSELVPRAMTFTSASLVLLSLGALGFLAGPLRVLSVLLLYGYRLAVPPFGPWWFGLAQGLLQSLAQVKVDHTDPEHVAGTLPCAQGLELLSGFASAPTSRNISATTAHLLLCGPVTNRPQTSPSQQPQGQGPLL

SEQ ID NO: 931065 - protein, 152 aa, Homo sapiens
MVDKHFDVLLDSVCQYFIEDFSAGLLDFAGGPLQTLSAWVSAAEAAEQWILVNSRCCCQIVPLEVLSQRSTQPQLCCFGYYHFVAEVEDSDFTQKECPRTIPIIHPHSLISNKLSMRYSCVQKLDVPYEEKNDQMFLAEGWGCNNRPLGQWD

SEQ ID NO: 931066 - protein, 179 aa, Homo sapiens
MIIWYSLEDYCSQEIINDSEEDAPVVSNHHSSTCFCSQDPVEDSVAIEGSMHGFPVMVLTLAIYQGANNPSGGSAVRCLLLPGAQAAVMYPLLQHIHIMYYLKEWTQRSQTKPLGKEDLRSPLGHSEFDIPVERQSLPNRIPGGRAEKRVVFSFQESHKNIKRLRQRQTMRQIIKTHHS

SEQ ID NO: 931067 - protein, 353 aa, Homo sapiens
MCAPQGSLLGPALNSYTSSLAAIISFLCMVESPPAQFHLCEHTAGIESPGTYTPVSFSGCQALAVCPFILTLTPTQSITRTSGYSGTSSKPAEHQSLLHARLEQGTLRTNERLLPNKKAAAAHYSYGQKRPNRGVTLSQCEHVQTSQCRDQDMRLIVESECMAPGNASLLITALQPSLCGSRCPEGLLLTATTASLEASPVAPCDMGLCTVCMPTPSVDDPLCMRHLHSAGLLLGCSVNFRPVPATSLNPDLMGAHPHRFCVVCEAALYLYLASCCWAVKIKGVAMPPAEEKQGRNTTYMCGHQEPWEMGGSLSWRRLLHKKCGLCQKCEDESLEYNVMLFPKVKREMGTKND

SEQ ID NO: 931068 - protein, 146 aa, Homo sapiens
MLSQGKFHSHEEDGKYEDLKKQIGLSKYNPFLIKDDKFQNKGKGCSGFYHLQAVGRMKECFSQPQQQPERQHMHQLPEARSLSAKEGSEIRCLPALVKEELERTHQKRSFSYATCCDRGHGMGGADDYPSSSQHGSEKTFKRCSSC

SEQ ID NO: 931069 - protein, 134 aa, Homo sapiens
MVVKPFLTFSDHAKLLDRTLICVLILTATPVAAKVLAITNKAVMTTYIQIFESSWRKAIEMEENRTKEPIQMDAEHREVLPESLPVLHNQREFSMADFLLETTLSDFGQSHSTEEKVISDCECVPQKRADQSHR

SEQ ID NO: 931070 - protein, 144 aa, Homo sapiens
MGTGCSGLLSGPQSSVTSAALHPEPSSCLGDAAGSIHVGLNCAGPGCILGIYYKLSYIKAEQMLKQTVQKEGQQDGNHSDVYKQWVLCSWGKAKRSLRVCIGLGNQNVFLSFYAQEEMRIIKFGIQSRKLESRRAFSDISRKVV

SEQ ID NO: 931071 - protein, 161 aa, Homo sapiens
MAAGIGQHPAIVTGTYTTKQILKQNSPPSLDSRKIQEADTIALGRNYYIISICKVLNSRHVTKLSMHSQGILNVVCKEGDQCVLVAFIYEFSSLNRCFTMTKLSILLWQRFLDIYQIPIPFLLLAQLEYIYQTYYSMAAAMFPLRETYNSSIKFLYDSPKQ

SEQ ID NO: 931072 - protein, 143 aa, Homo sapiens
MSFFAMQILNFISVISDISVWLRAISGEVVCLFVVKGSGANLLLLGTASVASIVARALAPGCSGSETCGGLHGYCMLSPQQLWALYQFRGPGERSREWNGGCQGMRGGDNGELRYNGCKVSFMKDESLLEICCTTLHLQLTLL

SEQ ID NO: 931073 - protein, 137 aa, Homo sapiens
MCKFRQPSPYAVLVPPQCFLRAQLEDPSNSSTSGHSGQKDKTCVLLENSPLLPKADRTIARSNTQHQPTQRMTDLKLTNIFYKSHFRKINTSEATGYILEILNGFTLFGPSSYLNLADLFPFDTLLCILWILLAQCY

SEQ ID NO: 931074 - protein, 149 aa, Homo sapiens
MLLLESGDRGRAHPRGRHGGYKEKKRKPRGLGGPSRSLPTVSLRSRWSFHCQRLLLSRPEPFHLKGPYNLRETEFLTVHRSYHSTPVKVNPSVPDEPIMAFAGGFSMQDSAILLRTHPYHAALLLDLQLDSVPREGKLKTVHDRKAIFP

SEQ ID NO: 931075 - protein, 143 aa, Homo sapiens
MLVKYDGWEAEKKRRSPLAVEVLLTAVTAVDSSEPALVPEITVKSITGVIFLLAFLRLKHPEIMHPSRRGKWTCMESLILLEENTPDARSMKTGKTKQNKTTLEGEGGISLSSPTQPGKGTEVLPGFLNAYNYFKGSRVSRKN

SEQ ID NO: 931076 - protein, 128 aa, Homo sapiens
MYLLFFLMLFLPLPPDRTQCVLFTPLCFCVLTVQLPLISENMWCLVFYSCISLVKIMASSSIHLTAKDMISFLVLAAWYSMEYMYHNFFIQFTIDGHLGSFRVVAIVYSAAMNMFVKDQMVVDAWSYF

SEQ ID NO: 931077 - protein, 189 aa, Homo sapiens
MNSAKRQTDSGEKKGRSLEEPHLQAKEGLKPGGQAACPADLNGNLWGSLQAHPWLPIDQSAHAFSPMKARNTPGLARLKERLQDVKAERSEKVAEEKLETSRCRFTRFKERSHLHNIKVQGEAASADVEAAASFPEDLAKINDEGEDIIGRKWDNEFGDFNLKPMFIYHSENASALKNYGKSSLPVLYQ

SEQ ID NO: 931078 - protein, 155 aa, Homo sapiens
MLQAITISPSTSWLVRFKHKITKHNILGLLFFWSLNLSFNSDMISYIVGFSNVTQIILNVNKYCSLSPINVIIRRLFVTLSLSRDVFLVGIMLLSSAYMVILLSRHQRRSQHLHSTSFLLRTSPEKRATKTILLLLEFLKISHKCEIMQYLSFCI

SEQ ID NO: 931079 - protein, 138 aa, Homo sapiens
MGSQGKFQTALSQRASADRKEREHVKEKALSDVTAHFWAKGEEISTLRPFRLINPLHLFSEAPAKNRDIIPPPPPQILSQKYVTLSCRSVEVCWRSTPDPVCLGISSRGFRTANIAEQQMLLPDCSSGSFISEGYPAI

SEQ ID NO: 931080 - protein, 166 aa, Homo sapiens
MPGGRGRVGYRPTVPASAGLRGGEQSRREAQAVWTSLLPNLCWPLILCHPWLRGVSPERDLRGKSGLGSEKSVTLRSAPHLCLNRAGLSLTPPLAAQLGFPPEHHASSSTGAACFPRLLWNWPEVPDAVHCAAALRALQPERQFTGFWENSAASPARGQGHSFAGG

SEQ ID NO: 931081 - protein, 177 aa, Homo sapiens
MCTTCRSKLLLFIYDRTHMQDLKDVTNNVHCENYGSRKLAAVTYNGVDNNKNKGQLTNALLTCPDDDCSCRGLQNPQLPGPEIMECSMNEDHPGYGRRGHVSAPGGGSPAWAGRGRKQAGLGRCPWHWVSGPGPSHVQVEHGRHHVHAAGWLPTLLAPEADADAEDDHEQHLPVWVA

SEQ ID NO: 931082 - protein, 148 aa, Homo sapiens
MNKGSLEVRSKMESESQSSGARRESFLKKPEKSRLAPPGWNFQRQILNHSLKMQLHVSARSYPLEAEKGKEIDDHLGQGSSTPRLWPVRNWTEQQEVSGGQASEASSEFTHAPHHSHSCLSSTSCYTSCGIKFSQECEPYCELGMRGI

SEQ ID NO: 931083 - protein, 137 aa, Homo sapiens [sequence omitted]

SEQ ID NO: 931084 - protein, 129 aa, Homo sapiens
MFCPNTALYQANFMGDAQDKDVLLLYPEFLRLSSVEGLKTSCKSVEMSDKFNHSISLDKGQEHHPTNYSQPWSGVIVETEGSPQTEIQNVQGRPRISTQIWRLHCPCPRAFTLKSFVTFNTLKDFGKGS

SEQ ID NO: 931085 - protein, 139 aa, Homo sapiens
MQPQLLYTEPGAPCSLVYSAEICGSDPPLLTPFLVVSAQLPGLVQCFLGACCVTAFQRVFRDSTLTTPCPKGVHIPSGLRFLLNDRKLAERGLRKPFQNPTLPMDPEKHKMRTNKESLGFRWRKRKGRNRQDQKTGQTR

SEQ ID NO: 931086 - protein, 140 aa, Homo sapiens
MYQEQLLVLPARDPNITSRDGKTLVVISMSEVTTREDGINSFDILEENITLLEEIAGCRIGFYNCDPKWTGVTQAMRREDRSVHVAWHLKPLPLGITLKLPNNCTCMASDIQGAPVVMNTILTGYIVFANTSTALCMTKL

SEQ ID NO: 931087 - protein, 164 aa, Homo sapiens
MRSQPKMFNKNHRKDTRSWSCCPPGLLCDSPHAASKVPDVLLRAGESVDHHAGESAAQCKSVGAQEVDMDVSLGQEKGSCSQIATGQVWGSTKRAFSSTEGPELLKGRDLGQRRTGRGLAAQEKAGFMLSGGIQHGIVEGEVLHLPVPGTTGILLHEPSSTAGD

SEQ ID NO: 931088 - protein, 162 aa, Homo sapiens
MGTERGTRGDRRGVLWARSGVGTGVRVVVYGPGVGVAAGGLGCTPGPARARSEGGEHGGRGRPVDPTPPPRALPNLAFYGEELGPSGPGRPRGGVGAGEGRAGGRPGPRWTRTGPGLSPGAPRGPGTREAPRAAAHVSRAGLGAPDNNYPPSPGRVGPRTPS

SEQ ID NO: 931089 - protein, 644 aa, Homo sapiens
MEVGPATETFVLELQCLEDGGPGPDTLSGGSGGSESQEEEEPQERNSSPQRPAVSAPVGASEIAEETRPGQRELQLQQLEQQPEPQQQPQHEQLQQPQPHLELQQQPQQDGQQQLSQLQQEKHQSVHHQELKPELQLMHQQQQLQPQQVQEQQRLQQQQEQLQTQQAQEQQVLQQQEQLQQQVQEQQLLQQQQEQLQQQQLLQQQEQLQQQQFQQQQEQLQQQQQLLLLQQQGQLQQQLLQQQQAQLQQQLLEQQQAQLQQQLLLQQQEQLQQQQQQQLLQQQQEQLQQQQLQPPPLEPEEEEEVELELMPVDLGSEQELEQQRQELERQQELERQQEQRQLQLKLQEELQQLEQQLEQQQQQLEQQEVQLELTPVELGAQQQEVQLELTPVQPELQLELVPAAGGGGAAVPGAPAAVVVAPPGYVVVQELMVLPAVAAPAVVAIPGPAGSAALTPARQRRRRRARDRPTICGECGKGFSRSTDLVRHQATHTGERPHRCGECGKGFSQHSNLVTHQRIHTGEKPYACSYCAKRFSESSALVQHQRTHTGERPYACGDCGKRFSVSSNLLRHRRTHSGERPYVCEDCGERFRHKVQIRRHERQLHGAGRSRGLGLLRASRPAALGGPARAEQAATATAPADKAL

SEQ ID NO: 931090 - protein, 213 aa, Homo sapiens
MIHHNFLVKSNSVLAQLFHKNWYFCWKRKREWLDKCEEEPEKKLTPEPEETWVVEMLCGLKMKLKQQRVSPPDLDTPPPKIPSEPTILGASPTSLPPSDLHPTIEYPSTLLFPNEYSHPNTEEADVSQKSLLVVPLSSNLIAVPSYLANDMEEDSETPKQNIFFFLYGKNCSQIALFHTLHFRVFRSVCCRACISLEEFEEIQAYDPGHWVWA

SEQ ID NO: 931091 - protein, 4219 aa, Homo sapiens
MIPKDWPLIIIDLKDCFFTIPLAEQDCEKFAFTIPAINNKEPATRFQWKVLPQGMLNSPTICQTFVGRALQPVREKFSDCYIIHCIDDILCAAETKDKLIDCYTFLQAEVANAGLAIASDKIQTSTPFHYLGMQIENRKIKPQKIEIRKDTLKTLNDFQKLLGDINWIRPTLGIPTYAMSNLFSILRGDSDLNSKRMLTPEATKEIKLVEEKIQSAQINRIDPLAPLQLLIFATAHSPTGIIIQNTDLVEWSFLPHSTVKTFTLYLDQIATLIGQTRLRIIKLCGNDPDKIVVPLTKEQVRQAFINSGAWKIGLANFVGIIDNHYPKTKIFQFLKLTTWILPKITRREPLENALTVFTDGSSNGKAAYTGPKERVIKTPYQSAQRAELVAVITVLQDFDQPINIISDSAYVVQATRDVETALIKYSMDDQLNQLFNLLQQTVRKRNFPFYITHIRAHTNLPGPLTKANEQADLLVSSALIKAQELHALTHVNAAGLKNKFDVTWKQAKDIVQHCTQCQVLHLPTQEAGVNPRGLCPNALWQMDVTHVPSFGRLSYVHVTVDTYSHFIWATCQTGESTSHVKKHLLSCFAVMGVPEKIKTDNGPGYCSKAFQKFLSQWKISHTTGIPYNSQGQAIVERTNRTLKTQLVKQKEGGDSKECTTPQMQLNLALYTLNFLNIYRNQTTTSAEQHLTGKKNSPHEGKLIWWKDNKNKTWEIGKVITWGRGFACVSPGENQLPVWIPTRHLKFYNEPIRDAKKSTSAETETSQSSTVDSQDEQNGDVRRTDEVAIHQEGRAANLGTTKEADAVSYKISREHKGDTNPREYAACSLDDCINGVCRCTQQLRRDSDHRERAMMTMAVLVKVRSSVVIEDKSTRDPEYIYSQPYDLKDWKRIGKELKQAGRKGNIIPLTVWNDWAIIKAALEPFQTEEDSVSVSDAPGSCIIDCNENTRKKSQKETEGLHCEYVAEPVMAQSTQNVDYNQLQEVIYPETLKLEGKGPELVKENKTQPPVAYQYWPPAELQYRPSPESQYGYPGMPPAPQGRAPYPQPPTRRLNPTAPPSRQGSKLHEIIDKSRKEGDTEAWQFPVTLEPMPPGEGAQEGEPPTVEARYKSFSIKKLKDMKEGVKQYGPNSPYMRTLLDSIAHGHRLIPYDWEILAKSSLSPSQFLQFKTWWIDGVQEQVRRNRAANPPVNIDADQLLGIGQNWSTISQQALMQNEAIEQIRAICLRAWEKIQDPGSTCPSFNTVRQGSKEPYPDFVARLQDVAQKSIADEKARKVIVELMAYENANPECQSAIKPLKGKVPAGSDVISEYVKACDGIGGAMHKAMLMAQAITGVVLGGQVRTFGRKCYNCGQIGHLKKNCPVLNKQNITIQATTTGREPPDLCPRCKKGKHWASQCRSKFDKNGQPLSGNEQRGQPQAPQQTGAFPIQPFVPQGFQGQQPPLSQVFQGISQLPQYNNCPPPQAAGTVGLILGRSSLNLKGVQIHTSVVDSDYKGEIQLVISSSIPWSASPRDRIAQLLLLPYIKGGNSEIKRIGGLGSTDPTGKAAYWASQVSENRPVCKAIIQGKQFEGLVDTGADVSIIALNQWPKNWPKQKAVTGLVGIGTASEVYQSTEILHCLGPDNQESTVQPMITSIPLNLWGRDLLQQWGAATVEPPKPIPLTWKTEKPVWVNQWPLPKQKLEALHLLANEQLEKGHIEPSFSPWNSPVFVIQKKSGKWRMLTDLRAVNAVIQPMGPLQPGLPSPAMIPKDWPLIIIDLKDCFFTIPLAEQDCEKFAFTIPAINNKEPATRFQWKVLPQGMLNSPTICQTFEQVRQAFINSGAWKIGLANFVGIIDNHYPKTKIFQFLKLTTWILPKITRREPLENALTVFTDGSSNGKAAYTGPKERVIKTPYQSAQRAELVAVITVLQDFDQPINIISDSAYVVQATRDVETALIKYSMDDQLNQLFNLLQQTVRKRNFPFYITHIRAHTNLPGPLTKANEQADLLVSSALIKAQELHALTHVNAAGLKNKFDVTWKQAKDIVQHCTQCQVLHLPTQEAGVNPRGLCPNALWQMDVTHVPSFGRLSYVHVTVDTYSHFIWATCQTGESTSHVKKHLLSCFAVMGVPEKIKTDNGPGYCSKAFQKFLSQWKISHTTGIPYNSQGQAIVERTNRTLKTQLVKQKEGGDSKECTTPQMQLNLALYTLNFLNIYRNQTTTSAEQHLTGKKNSPHEGKLIWWKDNKNKTWEIGKVITWGRGFACVSPGENQLPVWIPTRHLKFYNEPIRDAKKSTSAETETSQSSTVDSQDEQNGDVRRTDEVAIHQEGRAANLGTTKEADAVSYKISREHKGDTNPREYAACSLDDCINGVCRCTQQLRRDSDHRERAMMTMAVLVKVRSSVVIEDKSTRDPEYIYSQPYEQGTLDLKDWKRIGKELKQAGRKGNIIPLTVWNDWAIIKAALEPFQTEEDSVSVSDAPGSCIIDCNENTRKKSQKETEGLHCEYVAEPVMAQSTQNVDYNQLQEVIYPETLKLEGKGPELVGPSESKPRGTSPLPAGQVPVTLQPQKQVKENKTQPPVAYQYWPPAELQYRPSPESQYGYPGMPPAPQGRAPYPQPPTRRLNPTAPPSRQGSKLHEIIDKSRKEGDTEAWQFPVTLEPMPPGEGAQEGEPPTVEARYKSFSIKKLKDMKEGTWWIDGVQEQVRRNRAANPPVNIDADQLLGIGQNWSTISQQALMQNEAIEQVRAICLRAWEKIQDPGSTCPSFNTVRQGSKEPYPDFVARLQDVAQKSIADEKARKVIVELMAYENANPECQSAIKPLKGKVPAGSDVISEYVKACDGIGGAMHKAMLMAQAITGVVLGGQVRTFGRKCYNCGQIGHLKKNCPVLNKQNITIQATTTGREPPDLCPRCKKGKHWASQCRSKFDKNGQPLSGNEQRGQPQAPQQTGAFPIQPFVPQGFQGQQPPLSQVFQGISQLPQYNNWEPPQKTPTGVYGPLPKGTVGLILGRSSLNLKGVQIHTSVVDSDYKGEIQLVISSSIPWSASPRDRIAQLLLLPYIKGGNSEIKRIGGLGSTDPTGKAAYWASQVSENRPVCKAIIQGKQFEGLVDTGADVSIIALNQWPKNWPKQKAVTGLVGIGTASEVYQSTEILHCLGPDNQESTVQPMITSIPLNLWGRDLLQQWGAATVEPPKPIPLTWKTEKPVWVNQWPLPKQKLEALHLLANEQLEKGHIEPSFSPWNSPVFVIQKKSGKWRMLTDLRAVNAVIQPMGPLQPGLPSPAMIPKDWPLIIIDLKDCFFTIPLAEQDCEKFAFTIPAINNKEPATRFQWKVLPQGMLNSPTICQTFVGRALQPVREKFSDCYIIHCIDDILCAAETKDKLIDCYTFLQAEVANAGLAIASDKIQTSTPFHYLGMQIENRKIKPQKIEIRKDTLKTLNDFQKLLGDINWIRPTLGIPTYAMSNLFSILRGDSDLNSKRMLTPEATKEIKLVEEKIQSAQINRIDPLAPLQLLIFATAHSPTGIIIQNTDLVEWSFLPHSTVKTFTLYLDQIATLIGQTRLRIIKLCGNDPDKIVVPLTKEQVRQAFINSGAWKIGLANFVGIIDNHYPKTKIFQFLKLTTWILPKITRREPLENALTVFTDGSSNGKAAYTGPKERVIKTPYQSAQRAELVAVITVLQDFDQPINIISDSAYVVQATRDVETALIKYSMDDQLNQLFNLLQQTVRKRNFPFYITHIRAHTNLPGPLTKANEQADLLVSSALIKAQELHALTHVNAAGLKNKFDVTWKQAKDIVQHCTQCQVLHLPTQEAGVNPRGLCPNALWQMDVTHVPSFGRLSYVHVTVDTYSHFIWATCQTGESTSHVKKHLLSCFAVMGVPEKIKTDNGPGYCSKAFQKFLSQWKISHTTGIPYNSQGQAIVERTNRTLKTQLVKQKEGGDSKECTTPQMQLNLALYTLNFLNIYRNQTTTSAEQHLTGKKNSPHEGKLIWWKDNKNKTWEIGKVITWGRGFACVSPGENQLPVWIPTRHLKFYNEPIRDAKKSTSAETETSQSSTVDSQDEQNGDVRRTDEVAIHQEGRAANLGTTKEADAVSYKISREHKGDTNPREYAACSLDDCINGEEISVGLSELVGEDVPSVLVGTIQSAASPDRANTEVKLVSLGAGTDFAAAALDIRSAPASQVCGLQDLHQWPPLGPEAFSVGLKSYTINSPGSEAFRLELNHKAAITPGSPACRWSIIRLLSPYNHVSQPLQ

SEQ ID NO: 931092 - protein, 136 aa, Homo sapiens
MAYVTLLNEFYANGLHGGWARFDACGIDKSVKVISGSSTTRPYFLRKSCQLCLVLPAGVLTPAAAIPLTAETPLSLAFCNCKAKSSITERGSNAGNAIIALVIYDGGDLAVNQRFLERGGTGQLAIVDVVSQLLTL

SEQ ID NO: 931093 - protein, 130 aa, Homo sapiens
MVICFLLAAFHTADRFRLIESFSSFGFQDTKASLFSCRLPSCAFSIPFASSSSPSPHFLTPEAIISSLPTPRPLATSSRLVASSPIYVLMVLQVCLQPSPLPAISDTESSFLHFTDVLTVLPAGTCPLGL

SEQ ID NO: 931094 - protein, 135 aa, Homo sapiens
MMTMAVLYSCWTQILQPLSTLVGLRHYNQWVLLLDSDTTTTEVLWLDSDTTPSGYSCWTWTLQPVDTTTTEVLWLDSDTTTNGYACWTQILHLLSTLTGLRYYNQWVLLLDSNTTTAEYSGWIQILQPLSIPVGL

SEQ ID NO: 931095 - protein, 413 aa, Homo sapiens
MRNGNGSDLSSPQPSLAESSRRSPGLRSPRLGEAHLAVGWSLHLLRVRAYSAHFVPTSCSALVTCGCVQGKMLNCYPCAPAVSLLKLQGDLLVQNIGKNVRSKWDHRGGPRTDEDVAAFGGVETALPSPHAFPSLHLRKRLHPGGHLGHRLLHARLLTCPACRCSSCLHQHPQIQPSMLLAMLLCQASHRRADPLSVLEIQVSAGLRPSEGAGKESGPGPSPASGGPPPLVVRRFAGKTRNSLEAVIVPAMVYHREKTPIKISMQGQSPRGFHTLSVCCPLLWSCGQRYPSDNVRSYAQNTVSQEGFLPRPQQCRDMQCENPINPSASPGFTPLLVDLVVGAFCRLSGRVSSFWWVRGLAGSGVKLQTFAVSVTALKAARLELFVFPGGLVVSLASGMKLQTFVGTDWCVYNP

SEQ ID NO: 931096 - protein, 135 aa, Homo sapiens
MSRPSVSRSIDPSRIIRHPWLPPACHELHLPWTLNNSSSGSRRKERTSSELDADSFGRQQNIQMPDLVVIVLGTPWGSLDPPALQAKHIGGGWRIPQKRTHFRDASEIRLFIVIKIFEIFFEIYLKFSPIIEWFA

SEQ ID NO: 931097 - protein, 139 aa, Homo sapiens
MGEKTGREEDGEGASSLITPGRSLWISGLGGPTEPSAHLPPASVPSKNLLTNLGEPPQARALAAKLLGRPSSSQSGSRVPAVWAQAGNATYITVHTLCSHNTHMSPMQDPYFPALRPCGKEKPDFTRCGGLTTGSTSMH

SEQ ID NO: 931098 - protein, 547 aa, Homo sapiens
MRAPPPSTDMKWQVQPRDEGLWDMFVKDIPRSATSYTLSLDKLRQGVTYEFRVVAVNEAGYGEPSNPSTAVSEPPRQLWGSPRVPDKRSRLPGTSQKASGGAGDSSCSGLKVSSIAVPEDGVQVKVLPIPGWAFLHVHTFAVRYRRLQRPPWVQVQVCSQGNRLQARALGGSERDGLCLRRGDLSSMKGREASALGQQSLSQKPQTQSWPCHELDRTELISPSGKPATITCWRQDRARPAARVSCPKLRVAVFGRVLAAVSQCLGFACERLSVLGGFQCHRTYSPSRPMEGPEWDAGTTQHPSRYNFPLFSQVEAPFYEEWWFLLVMALSSLIVILLVVFALVLHGQNKKYKNCSTGKGISTMEESVTLDNGGFAALELSSRHLNVKSTFSKKNGTRSPPRPSPGGLHYSDEDICNKYNGAVLTESVSLKEKSADASESEVSVGAYFRAVTISPYFCKARCMYESSRLCGAGSLRAGQSGQQRGSSHSAGLGPVPAAAAGPLLFRVSRHRGGVIAVGGSCVLSARCCVFPALTVGLAQVKFPDANQG

SEQ ID NO: 931099 - protein, 163 aa, Homo sapiens
MPSQPLFGGAPTFHRTPSCLPCTGGGHVAGTSPRPPRPCLDHCSPLDFLLTSRTIIPTCCIGHPAIVLEDSFSPKEESQPKIGSRGHRLCDFPLDLPDTPSSALAVPASVTPPPSPFCFRDGSPSNPLNLLWFQLNGGPSSQLPDSPGDTAVPLQGVLNVLEL

SEQ ID NO: 931100 - protein, 417 aa, Homo sapiens
MALWEAKLCTAEKLFALPHSQQHTHKSKRGKAPECPSLEEQTHQMRHEKEGNSDICYNPVEPQKPHAEGKDLDTGRQALHDSICTKYREADPPPAMGANWGPVTRIQLESTESAMAAVRSGTHPLLTAPWHPSLTAPLVAPPWPSMGSSTARSIPEGKLSRTSVALSDPFEHIFVQREAEIPDTLIIPGLKQHPSKSAPAEKSRNIRLYVKSGNSLKSPASEEAEPIFPCQWRGDLSPDSNVFKEKERCWTPEGLGRSVPGCPHHCGPLWQWGWGCTELTSLADKDLHGRAGWALADDVIGAPTTIKQKTYPSYPVFREPRLEEPSKPPQGELRDQGDANCLVVSKGHLWGVPTVQTPVLQFPVFNIHQHHAWRCTGVKLCEHRSIGAAAVRALGQALALGKLNICLPRIRATQALG

SEQ ID NO: 931101 - protein, 136 aa, Homo sapiens
MKNGVCCCAGPVIAEGLYPRRISPGSWRETISNSPREPQHVTCDITTCAGKSLRRNLNCVSGNSGGWVGGWSLLKIKVMTLGKRWIWVMTHCLHKRTELLGPRRQRGTNGQKLLKERFQFSIREILLMMYTLHELT

SEQ ID NO: 931102 - protein, 166 aa, Homo sapiens
MDLGAGSRIQSGCAGAHLPQLVRADPGHLLPAPSSLTSYWELEIGCAGFTYSKKTTLSVLKRFSQWSPGLAVWASPEYLPEMPGPEAPAQKLWYGAWECVSSQVLQGKSDGVSTLIRRDCLYESLVAKLSSFNPDTEWRQMNACRMLLQRRRVLAVVSHPDRLKKC

SEQ ID NO: 931103 - protein, 241 aa, Homo sapiens
MPYTVNCCCHHHYHNYIITTTITSTATIIFTTTTTTTIITTMIIIIITIIITIIIIFIIITIITTTTITSTTTMIFTITIIFIITPTIIITTTTTIIFITTTTFIIFIIITTYDHHEHHHPHHHHHYLHIIITIIIFIIITNIIAIIIFTIIIITTNTNIIIMNIIILTTTILITTIIITIIIFIIIITTNIIAIIILTIIIFTIIITTTTTISPSPPPSLPLHPQKFLIYNDKCGTYRNI

SEQ ID NO: 931104 - protein, 405 aa, Homo sapiens
MSTVSLETLSYPQGTSQGLRPCNYPGAGFHGNKNQKGTRGQANPNMACLFQASPCLISVDIPLAKALYLSHGSLQKSSWTSYMTHRAPETQKQSYQAFLRLRLGTGRILRLPHSICQNKFQPNPDLSGGVTQGNGYLEKWNHGDSDGGDDEDGDSDADSDGGDMMMVMVVMIVMVVIVMVVMLMVVVMVIVMVMMVMVIMMVMVMVMVIMMVVIGDDDSDGGDGGGDDGDGDDADSDGRDDGVGIGDSDGGDDGDSDGGDDDDGVGVGDSDGGDDDYDDLMVMVTVMVTMMVMVIVMVAMMVMVMMLIVMVVIMVVAIVMVVMMVVVVMMVIVIVMVVIIVMVIAKVVMMMVVVVMMVMVMMLIVMVVMMVTVMVVVMMMMVLVLVIVMVVMMIMMITMVMVTVM

SEQ ID NO: 931105 - protein, 142 aa, Homo sapiens
MNSSMQLLGGFAKRIQNSENQSMVSCPKARHLRGQMGEHECPELCGLGQPDLGYLVTGPVWRPLLLRAAEPPWGGDADVLFSSLWTKKGKGRRKEKRLSLPMVLIAAGLELGCSGRGDVLPPVPVRTSLLQEQLGFQCEAWL

SEQ ID NO: 931106 - protein, 140 aa, Homo sapiens
MEISSESSDTPGPGLDQQGRQGGPASIRVVPWEGAPSERMGCAGQACEAREGPQLCGQHEEAEPTAQRLQSRVPVNGGSRSSPLASGPTAASSQNPPGTHFGDSYKYLFSVSLRPGVQAGDEGSGHLCRPSNEQQYHQAL

SEQ ID NO: 931107 - protein, 152 aa, Homo sapiens
MIFLAILRNKSILYTTQFKWTASFLNHHVTREILAAYSEHFLHDLENDYPNFVVKAAVDLAKTMQTPLTVPVPVLQLPWGPDGLSLGFAPMDAGAVEARAALWERYLHSMLAMEYQQVSFTLYNYVHMAAHFRTTNLDMASFYVSQLNCRFP

SEQ ID NO: 931108 - protein, 237 aa, Homo sapiens
MENVDMRNYNLKNAVKVWVNTHKYVKVFGKFSNSNRDKTRYTGKKHFKCNKYGKSFCMLSHLNQHQVIHTREKSYKCKECGKSFNCSSNHTTHKIIHTGEKPYRCEECGKAFSWSANLTRHKRIHTGEKPYTCEECGQAFRRSSALTNHKRIHTGGRPYKCEECGKAFSVSSTLTDHKRIHTGEKPCRDLLNAFDPNANSDVDDKVQAEVVSDGDVKLIFKMEAEHKSLETLHLTMR

SEQ ID NO: 931109 - protein, 163 aa, Homo sapiens
MCFVKQMLERQHAPEHKTFPKVILRRYESYGIQNLNLRKDWECVGDCKGQKKSYNGLNQCLSTTLSKIFQCDECGNAFNQCSILTQHKRIHTREKPYKCEECGKAFNWFSNLIQNKRICTVGKPYKCEEFGKAFNQCSHLIGHKRIHTGEKPYKCEECGKAFN

SEQ ID NO: 931110 - protein, 145 aa, Homo sapiens
MGPGAHTDWIQLWAGHCALGRDFHDEIAEHWPPDQTSAESGEGDLLLRRLQDEGQVPQPGGPIFCDPDVPALRLPSCSPPPHPCHPAPASPAMDTSPSLVHMPCPPIPVPLHMLFPMLQCPFPPCLSKSHPLFKACLTCYLHSPR

SEQ ID NO: 931111 - protein, 149 aa, Homo sapiens
MPGSSCSPLTEPEMGQWWEKVCAVISAGFPKLAPVLAHGQQRCVVLEIPLPFEDFLDAAANFHSCHEASPQTLPGTSLFHLFRAQEKQQEEEPCRRLRGRNLEQRTVRVQCSVPPYLRSTCQQQVHLAGAQVSEKLKDIFGSHQELNIL

SEQ ID NO: 931112 - protein, 143 aa, Homo sapiens
MKTEGRNTSAQGHFAWITRETANSFKKMFINKFLYADLLSPLTVKRVVVLLSERIRVRMGSLSIRFVFLVFYVVDVFGAACDWSLRKVPCFYKEIRSELGSTARTLQPLEKSERGEAIDPGELRTQSFTVGRGKKEKKTFFLM

SEQ ID NO: 931113 - protein, 146 aa, Homo sapiens
MIAIPYRSSSKELNARDWVLTKCQKGWRKGLSWASNDNSWSTRKGATRKTEFRTHCCSNNPRIRSCCHYCCYNCLPTKGAGGKRKTKKHWNVIGEKTQKFIFPYPVTINKSKKVCENGLSLLFSTWDTKPFTLHCKILVAKKSWCT

SEQ ID NO: 931114 - protein, 177 aa, Homo sapiens
MGHLEKGRVRDINEEQPSYSSLVFKINTYIVKIFLHIKAKSWQNPCNAFLTGRVRANMVGKAKWKPLELPLPRKIVNQKQYCIPAGIAEISATIKDLKDAGVVISTTSPFNSPIWPVQKTDGSWRMTVGYRKLNQVVTPIAAAVPDVASLLEQINTSPDTWYAATDLANAFFSILVH

SEQ ID NO: 931115 - protein, 136 aa, Homo sapiens
MTLPCEIPSPGSSWLKSSPTEHLLLDDIVVLYEDFAHCQSTKLELSSQKSLICMFSGNSWKQDIFASFGRHECGNNEAIIYCLKVGVGQVLLQLTLMIPESLAALVVWQQPPHLQRTLGWLLQRLQILARLKRLNG

SEQ ID NO: 931116 - protein, 162 aa, Homo sapiens
MRTHGHRDGNITHWGLSEEDVEDVPASKKAKGPISFFQCVYLDGYNGYGFQFPFTPADRPGESSGQANSPGQKQQGQQLRICNPENFCENILLFGLNNRAVVESPPDEESTNPRSDFNSRSNSGHLSSLSFNTSSPNENKSATAAKGLSSLARNIMEMYLVK

SEQ ID NO: 931117 - protein, 156 aa, Homo sapiens
MGGRGKNYSVKMHGNALMPRQKFAAGAEPSWRTSARAVQKGNVGSEPPQRIPTGALPTGAVRRGPQSSRSHNGRSTGSLHCMPGKATDTQQQPMKAARIEAIPCKATGTELPKTMGTHLLHQCELDVRPRVKGDHFGVLKFDIPAGFCTCMGPRLA

SEQ ID NO: 931118 - protein, 481 aa, Homo sapiens
MCKLSCKAGNADTCESPHLPCKYLFVQGHSIANIEHYDRPRKTIKESNFSQPVVQLCYEDVNGSCIETPYSPGSRVILYTAFSFGSLLAVFGNLLVMTSVLHFKQLHSPTNFLIASLACADFLVGVTVMLFSMVRTVESCWYFGAKFCTLHSCCDVAFCYSSVLHLCFICIDRYIVVTDPLVYATKFTVSVSGICISVSWILPLTYSGAVFYTGVNDDGLEELVSALNCVGGCQIIVSASIYCQNHPTFLICVVPPDGSHYVPLLFGPETDSSGAQRPVTRNCKQMRSQRERAHCPFVMWMQTHCRCVPRALKIRNNPVFFVIINKDKTSPYVNNSVMSSNSSLLVAVQLCYANVNGSCVKIPFSPGSRVILYIVFGFGAVLAVFGNLLVMISILHFKQLHSPTNFLVASLACADFLVGVTVMPFSMVRTVESCWYFGRSFCTFHTCCDVAFCYSSLFHLCFISIDSKEFARLEAMWNIHQ

SEQ ID NO: 931119 - protein, 139 aa, Homo sapiens
MYVGYLLQASCHPHVGCMPQNIFGKNKSAWTGQRWGLCELGFLKCEMEGVLLQRRKKLHQTKLKTRKTLLQTIATGEKGQNSTHLSSTSLKQRAEKFLKVKGEEVVDHLCLLMGPTKRESELSYIFMTGGNRGKNEKWC

SEQ ID NO: 931120 - protein, 144 aa, Homo sapiens
MGVGANGLSKLASNVRRVTIQYRGIHSQRDSPWRMQDNHRSSEACCFHSDVATTNSFARHILDIKAHIVSRRSPLKASWCILTDITSVVMLTGAECLRYWFENTSVHLAHRDSANIPNFVDILEGQTQGLVNWMSWCFNDGSIL

SEQ ID NO: 931121 - protein, 179 aa, Homo sapiens
MSFVFGYQGRQRKTISCLQGPAAALRFLQRICEFSQLSWYVLVVVLGAKVHDVSLHTLLCQSKWELQVKKWGIAIKIPENVEVTLELGNGQRFKSLEGSEEDRKMRESLELPRDLLNGFDQNTDSDVNSEVLAEVISDEDGELIGNWRKGHSCYALAKRWWHFAPALEICGTLNLREMI

SEQ ID NO: 931122 - protein, 240 aa, Homo sapiens
MLATMCNCPVWEMERPASLLKPARPRTHHKEETPKTSEHQKEQTLDTPYLRIVTLTARVRGFLLEVSETKNPPIPDTAGQAGRNRKSHPLGLYVKMQFEQRHVRSFLGLGKLQCGEGVDGLVCGLGAALLELSTSQILSASTEAMAWPPGHPRLPCKQVWPGWDPRKASRPRGAQVESALSDGQDHPAEIRMDSSPRAKVSYGSKSGLGRWLSLAVLHCRCSHIKSSWLHISLLALPRLL

SEQ ID NO: 931123 - protein, 137 aa, Homo sapiens
MFLPDTVKEETNNSDTIWKMVTYPSQMDVWYDCTFGFHSSGHFLLSNSDVPDIMLEITDGFGDMTDMVWMVFSPPNLMLKCDIRCQSWACITAVVNCQQPSDSVSCLQRSTIAHDPTHPPHTKPQRKAARVLYVCFI

SEQ ID NO: 931124 - protein, 181 aa, Homo sapiens
MSLGLGLGLGLRKLEKQGMDQTYCNKMEYMTDYFPRINFFYMYEGPAPRIRAHNIPHDFFSYTIKNICDLWEVKISSLIGVWKKLIPTLLDNFEGFMTSAEEVTTVVVKIERELESEMEPEAVTELLQSHEKTGTDEELLLTDDNHHFDQSAAINIEARPSTIKKDDNSLNAQRIIGILSN

SEQ ID NO: 931125 - protein, 130 aa, Homo sapiens
MLRTLTLSQTLYALLRVQPPRNYLCEFLNVGRGSAALIQGSEGEALSTVPSWEATEGCVVCESLGFLGPWFDSTIINFALLRCYELNCVLQNLYKGSIRFGLDYVTDDVFYFILHLINRPTISGCPPVGC

SEQ ID NO: 931126 - protein, 198 aa, Homo sapiens
MFQWSQEIYYILGIQFLSKNNTDSDSWNLQPSDKIDINQTTAPERRDNLDSQSRKVDAPNAWRYVQGEPNTWKYVPQRGKEYLLQSGVTAATTGSWRGSGEWVWGWEEAAQAPISGKQNWWVLGLADFKNAVADPRVMKLQTFAVSVTVHKGGASGVVRSSWLVRGLADFRSEAADLRAIAIILKFTVLCKPDITSIL

SEQ ID NO: 931127 - protein, 139 aa, Homo sapiens
MGLNRTIQQGHSALTVRSPVDPQLPMDKVRAGCGEDGSKENKNKRMQEEKKGEFQKGRRKKSVKESDEGEEGRKGRRRTSWIRLAAYFLDAFELICISFLWLLLQITTNMVAIIYPEMMNTPVTSSCSTLSLRPVSPDL

SEQ ID NO: 931128 - protein, 156 aa, Homo sapiens
MVSSCIHVAAKDWVVYTLAQTWHLRLRSIDVKLTCPRIWANRAHQRLVSKCSRKEHLWEKENEGGWLKREHQFVNSCLIAASACEKESERALWGPFIRALIPLIRAPPSDLITSQSLHLLIPSHWGVGYQHINFGGTQTLSPKHSPSIFPSLFFFS

SEQ ID NO: 931129 - protein, 143 aa, Homo sapiens
MSASGPSAAGLLEFAEGPLQTLFAWVSAVEAAEQQILQNDKCCCLIVHLEASSQRGTRLYEVSVGPYQEVPTSEAMPHPALAHTPWAASTVRHPQSGKPHASEPLVTTLQWVVSAKLFQCGDSGIHPCLHVPAAVVAAAAAGC

SEQ ID NO: 931130 - protein, 144 aa, Homo sapiens
MRETLLLGLLFVPCKTSNFGSATPDRPPQTNPPPYPTGAGKHSKDGSEERKAINLDLSLLVSAQQERDAISNIQCPRDQMSQLFRSSTTIPGMVPEYALGYWSPPPPHPCHAQDRKELSLSDDGHSHPQALLELPLSFSQKLTG

SEQ ID NO: 931131 - protein, 175 aa, Homo sapiens
MAAVGNGSVVLRPVELCSQWVMAAFAASKRKPADCRFLHSCIYYQRIMEPFLQSVHQEFCLLKNEKRDKKSQFLVTIAIATHTNVNYLDAFCSEDHFIGQVGGKPRWLVILITTSQSRAPQKPGLDCLSSGSWSHTGDSAAASEAVLDKRGDIFPLPALSFPICASCWPNQLPVS

SEQ ID NO: 931132 - protein, 148 aa, Homo sapiens
MFLLSNCGKGISQLSHGSTSRVSHEICNIDQQVNFKPQLQWETQKVDRRQAATGAGTPPSPALGHQTSRFSSLQTLEFAAGTAHEGAWFLQGLGKRSVRKAIDKSSKKDRMRKTGTEHERCKPDSFCNLIVEVASYHFIAFYLLQVSH

SEQ ID NO: 931133 - protein, 155 aa, Homo sapiens
MFLLSNCGKGISQLSHGSTSRVSHEICNIDQQVNFKPQLQWETQKVDRRQAATGQSCQLEDRLKVYVKLSYTPDPLSRNLALFYLYGTDLPLERFTAENGQWGGIGERQHRKKLQPKRKAPQMLRAGDPQEKTPPLAEEDSKGKGQEGPEEERAP

SEQ ID NO: 931134 - protein, 134 aa, Homo sapiens
MRILRALPGRHLPTLVPPLEFPVNQSQPEDHVLVKRWKEEKLEPASEGPYLVLLTTKNAVHTAKKDRLIMPDSRKRHPLQSLGPTSKPSLNSSRLRAVRGWEQLHQPLQSGSEEDNKPCFSHTWKLTGPCTAEA

SEQ ID NO: 931135 - protein, 136 aa, Homo sapiens
MGWSHGSSHGLQRGGTGPSYSEEEVSGAALLALNDRMVQQLVKKIGHQAVLMDLIKKYKQNTQGLKSPENPKKAALVMQTEAAREATALDSGLQGPSSPMSAEKSSPFDEELLQMGFGSGLSSPLFFPLFNLGPHL

SEQ ID NO: 931136 - protein, 154 aa, Homo sapiens
MILSMDATRTRENLDAGCGPLPVSGFLLETCEEDELLHRETKTAYSLRPITPSSINLGVNRNHGEDLRVSPIRELGMELNITDLLSQARLSTSLYHTHPSSEDLCFTEMLQDLGPTCLKFSLKALLLSVTGLGTLVLAPTEWKVFSNSIFQSEL

SEQ ID NO: 931137 - protein, 202 aa, Homo sapiens
MSSAGQSKTQSKVHPPAIEVSGWQSDTAKIPELCIISILLFSFSLLIPPLGILLCDLTSFPYGISALLICFSTVNVALGFPRSHGYPRQGSESINLTTQLPYHNSKIDILEVVTLWVIGPYVDTDVTKNEDQGSGRKEEGEFFLGMAMARMDKDLQGMVVILLHPKTKCSVGCRRITIITCKDHRGSKALKGESGYSERKKV

SEQ ID NO: 931138 - protein, 161 aa, Homo sapiens
MLKPFYSLPVIVHQTPQLQICWGLLEVHSRPCLPRYHQWRLQNSKYCCLILPLEASSQRGTCLFEVSVGPYWEVFPSQATRGSGTHLRRQSVCSRSSNAMLREQLLSSELSDGTFKSAEADCCLLFYYALPQEVESIEAVGLAELWCAPPSSCFQASLFTL

SEQ ID NO: 931139 - protein, 146 aa, Homo sapiens
MGCCCYHVPPPHGKEEVRIASYLVEVFVSLRIGYPTVASVPHSIINGYKRVLALSVETDYTFPLAEKVKAFLADPSAFVAAAPVAAATTAAPAAAAAPAKVEAKEESEESHIYNSPSSITISSLSKVRIFGHLNRFLSRVLLSLKC

SEQ ID NO: 931140 - protein, 171 aa, Homo sapiens
MASEDTSHKPWWLSHDVGPGDAQKMRIKECLPQCFIGAIEVGSLPASTYQQEPWHGEVHVHWQGWAMGEGGRPASMHMLTLATAVQQGAHILVGWHAHGGLAELSIQAHLCQWQWSNVVCACMLVEKTRQSPPACSSKTVYGAGVGERASAKCTLRCICTSVHLPSAQRRW

SEQ ID NO: 931141 - protein, 135 aa, Homo sapiens
MPLHCSPGNSARLRLKKKKKKKFIVSLTGVGCYLIDQCGMWIKKSQNDLGRSVSRLLGIAVKLFSSTARHGSTLRRILRCRCYSIWFCKLRAHIYECVECVEKCLPCPLHLYHPGWSIEAVPKEVTIKQKPERND

SEQ ID NO: 931142 - protein, 160 aa, Homo sapiens
MEQEARVYSHGLGSVITPTRKEQGSHLSAAPFGFTDNAALAIGAVRRGLPSSRPQNGRSTDILHCVHEKTTGIKCQLVKAATGAVPCTTIVAELPKAVGAYPLHQHSLGVTHGVKGDFEVKIDSAPTLLEDNAQTSNGLLKENFCPSQVQGKAIPSSTDN

SEQ ID NO: 931143 - protein, 167 aa, Homo sapiens
MVMDLEDSHPGQEINTEKAARRKSISWPSMIKRTRGSLHSPAQQQKQPLPKSPQWSLNPADQNSCAHQRSSRNTSFPPRPQGGPRKMCPEFRPSGGFVVLLTSGVKLQTFTVSVTALKGGASGVVHSFCGFMVSLASGVKPQTFAWVPGLAGFRSEAADLRGECYSL

SEQ ID NO: 931144 - protein, 142 aa, Homo sapiens
MRWGKGNDQTCQGLLDTGSEHMMIPGDLKHHCGPLVKVGAYGFQIGLCEDTASVLYGQMLSPSPPFVKFGYDFMWDLMLLKNTLKSLDSDAGESPAGNRNKNKSELSVILENMICILHMALYGSRKLCACHGFTIGIYINSM

SEQ ID NO: 931145 - protein, 165 aa, Homo sapiens
MGLDKFITTCIYYYKTDKSIILVGDAIILVSITERTSRQKVSKHIDDLNNAIVSHLGRQNVSKIGSFRWVLGLADFKNEAADPCKLFVPPGGFVVSLTSGVKPQTFTVSVTVHKGLYVELCSAKFWTVENIYPATSHCSTNFSSLAATAYNFLCQRVSELLSLYG

SEQ ID NO: 931146 - protein, 157 aa, Homo sapiens
MKLKPAHLIDHLHVYVCACVLFVTTIPGVWSRSCCLLHRKPITEKTNIAKGEGFNRVPQQGDGKMGLQVLEGFSRVFIYTWNLKTEDICDIISTDEVWRIDNVPEHLYALYVGSRINFNVQYVGKWAKGTSSEFQYASDEDYTQLGHRLHQGRLKDL

SEQ ID NO: 931147 - protein, 144 aa, Homo sapiens
MVILHSPFYFIAFKMRNFGCVYVFQFMGHTLFLWLSHKFCWKVDILDDIATFLGALKDKCYIFFNMYLEIGSMINSQHHEKIVSNTYTTEKFIFYKLKMETFPWQKNLELKVSNLEFAYRIWLSQEYKRLAPTSHKFLVMIATN

SEQ ID NO: 931148 - protein, 135 aa, Homo sapiens
MNKLHRSAVQCCVYSQQDTDIAVIDSDYIDESGQSKLKTFWKGFTILNAVKNTHGSGEDVKISTSTGIWKKWIPYLKDDFEGLNTSVEEVIADVVEIAKEPELETEPEDSSSQSLTFYAANGRTYTKPQDPEVQK

SEQ ID NO: 931149 - protein, 137 aa, Homo sapiens
MTVDYHKLNQVVTPIAAAVPDVVSLLEQINTSPGTWYAAIDLANAFFSIPVHKAQQKPFAFCCQGQQYTFTVLPQGYINSPGESEQRPLGFWSKDLPSSADNYSPFERQLLACYWTLVKTESLTMGHQMTEEEKNRA

SEQ ID NO: 931150 - protein, 127 aa, Homo sapiens
MWNCLNKEDFQEGGDKCFHSVGSAMWCSSNDSKQASISCQIGMTLRVGQTRIAVHRYKNVACFGAKTAFRIKGPQRAESCVIPQRLKKRVRQPSFLRGFCCRQLELPEGYILTMGRVRKKYILRKGQ

SEQ ID NO: 931151 - protein, 139 aa, Homo sapiens [sequence omitted]

SEQ ID NO: 931152 - protein, 168 aa, Homo sapiens
MISFDSLSHIQVTLKQEVGSHDLGKLHPCGFAVYCPHGLVMSVCSFSSVLPPRTGDECARSKLSVNLSFWSLEDSDPLFTASLGSAPVGTLYGCSDPTFSFHTTLAEVLHDGFTPVENFFLDIQAFPYIPGNLDRGSQTTIVDFCAPTGSTPHGCHQVLASVPSEAMD

SEQ ID NO: 931153 - protein, 134 aa, Homo sapiens
MLFKGLISGPYTGGLGPLMYKALKVGTENLCLPSLLSCNSVKAADDRLEIKWSKVMAEVFKSLTDGNICGYPMGIPGLDEGLGVWKVGRSAKAMNLSRASAHEVILGVFNECLAKTKMGFQNVQKEDCSYGYIL

SEQ ID NO: 931154 - protein, 178 aa, Homo sapiens
MIISSLRSSLEANAGITLLVLSAELEEAERETAVIAIALLGLATQWGYQALVLRSICKESCDVIRLQVFQPWIPAPTLVEVAGECNTMYTKATLGVIDQTEIVSLVNADDIHKSSRENDEGETLSKLVRTGGLMKSKHTGQCIQHLVLWSCHPFQMLLGTRSHGCARHGNSQTLTQNG

SEQ ID NO: 931155 - protein, 204 aa, Homo sapiens
MCWISPEASTSESSTQDQRHSSWVLLLVIQSPRALQLADDECFQDWVLLFKATGFLLAQADAESVTKPCTTKEIFSLSLTMSCFSGENLEIRHLCNIKVQDETVSADIEAKVQDETVSADIEAKIQDETVSADIEAKANYPENLAKISDEVCYTKQHIFNVDEIDSHWKKMPSGTFIAREEKIMPDFKDRLTLLLRLIQLVILN

SEQ ID NO: 931156 - protein, 163 aa, Homo sapiens
MPAAGIAVLVHLIDLLIVFLRCDGFTRIQKAVVDQTGSRPSKSDHGLFVMQVWLWEVLWSFFSVEPLSWEVGSPVAQGRSRNAIQDSCPGIANPKSPLGALFTCHQHSTWVLLLVIQGLRALQLASDESYQDWVLFFHKADSLLVQVMSKNVVWKQRLGKKTS

SEQ ID NO: 931157 - protein, 187 aa, Homo sapiens
MAHVYVCNKPTCSASMPAAGIAVLVHLIDLLIVFLRCDGFTRIQKAVVDQTGSRPSKSDHGLFVMQVWLWEVLWSFFSGSGLPCGPGQVQKCHPRFMSWNCKPQEPTWCSIHLWLCWYLRRALAEFGLVLFSAITGEFNALKLLCSPSPQCTKTLCTKPLMLRGMEKKWWRRLKTVFPTSSVPLSAI

SEQ ID NO: 931158 - protein, 157 aa, Homo sapiens
MNSLDGLIVVSLGGDKFQGKETSGFKAMQMFQLCAVIIPIMPPTFSKVPMPGRIRPERKQQLCQEEMRSSEQAIELRAEILMGKGTGIYAAPGMGLGSLFLDIEPLHQKAGELEATLVVIGLGLFLGVESARGLIYGTAVCVKPDTQGHFKALYVII

SEQ ID NO: 931159 - protein, 285 aa, Homo sapiens
MRCPPGSSYSPCSSPCPDTCSSINNPRDCPKALPCAESCECQKGHILSGTSCVPLGQCGCTDPEGSYHSVGERWYTENTCTRLCTCSVHNNITCFQSTCKPNQICWALDGLLCVGVCQLPGESHYVSFDGSNHSIPDACTLVLVKVCHPAMALPFFKISAKHEKEEGGTEAFRLHEVYIDIYDAQVTLQKGHRVLINSKQVTLPAISQIPGVSVKSSSIYSIVNIKIGVQVKFDGNHLLEIEIPTTYYGKVRKTSGSSRWGGSPREIAPKNHSPPPGLRHVWELQ

SEQ ID NO: 931160 - protein, 616 aa, Homo sapiens
MFQPLSGDRHAAAAGSSGRGSRGLLLCGSGLPYWTLGLVSRVTAKNEEQGQEGVSCLSKVYVTLPESTVTLLKGRRTLVGGQQVTLPAIPSKGVFLGASGRFVELQTEFGLRVRWDGDQQLYVTVSSTYSGKLCGLCGNYDGNSDNDHLKLDGSPAGDKEELGNSWQTDQDEDQECQKYQVVNSPSCDSSLQSSMSGPGFCGRLVDTHGPFETCLLHVKAASFFDSCMLDMCGFQGLQHLLCTHMSTMTTTCQDAGHAVKPWREPHFCPMACPPNSKYSLCAKPCPDTCHSGFSGMFCSDRCVEACECNPGFVLSGLECIPRSQCGCLHPAGSYFKVGERWYKPGCKELCVCESNNRIRCQPWRCRAQEFCGQQDGIYGCHAQGAATCTASGDPHYLTFDGALHHFMGTCTYVLTRPCWSRSQDSYFVVSATNENRGGILEVSYIKAVHVTVFDLSISLLRGCKVMLNGHRVALPVWLAQGRVTIRLSSNLVLLYTNFGLQVRYDGSHLVEVTVPSSYGGQLCGLCGNYNNNSLDDNLRPDRKLAGDSMQLGAAWKLPESSEPGCFLVGGKPSSCQENSMADAWNKNCAILINPQGKTCPCWPFFLPEGQEAGEGV

SEQ ID NO: 931161 - protein, 262 aa, Homo sapiens
MLNCAGTAVVDEFVANNHYQPQLISELAQIWKAAAGLQFPIVTAGQYTTGRGSSGVGLTAAVLRDSVSGELTLEGGALVLADQGVCCIDEFDKMAEADRTAIHEVMEQQTISIAKAGILTTLNARCSILAAANPAYGRYNPRRSLEQNIQLPAALLSRFDLLWLIQDRPDRDNDLRLAQHITYVHQHSRQPPSQFEPLDMKLMRRYIAMCREKQPMVPESLADYITAAYVEMRREAWASKDATYTSARTLLAILRLSTALDS

SEQ ID NO: 931162 - protein, 265 aa, Homo sapiens
MIPAQASPPWPVCQYTTGRGSSGVGLTAAVLRDSVSGELTLEGGALVLADQGVCCIDEFDKMAEADRTAIHEVMEQQTISIAKAGILTTLNARCSILAAANPAYGRYNPRRSLEQNIQLPAALLSRFDLLWLIQDRPDRDNDLRLAQHITYVHQHSRQPPSQFEPLDMKLMRRYIAMCREKQPMVPESLADYITAAYVEMRREAWASKDATYTSARTLLAILRLSTALARLRMVDVVEKEDVNEAIRLMEMSKDSLLGDKGQTAR

SEQ ID NO: 931163 - protein, 253 aa, Homo sapiens
MAEEKKLKLSNTVLPSESMKVVAESMGIAQIQEETCQLLTDEVSYRIKEIAQDALKFMHMGKRQKLTTSDIDYALKLKNVEPLYGFHAQEFIPFRFASGGGRELYFYEEKEVDLSDIINTPLPRVPLDVCLKAHWLSIEGCQPAIPENPPPAPKEQQKAEATEPLKSAKPGQEEDGPLKGKGQGATTADGKGKEKKAPPLLEGAPLRLKPRSIHELSVEQQLYYKEITEACVGSCEAKRALALALRRLLLGAL

SEQ ID NO: 931164 - protein, 149 aa, Homo sapiens
MVGSSQAASGWGLAIKNTKAKLEEHVKGNEVCAEKEDIGMAKVKKMPGGENGMLKGRVEEVKNKCSYLCVMLLKHHLRGGENIGQFLELKTSLRDGSSVRATVEKNPENLRGQVRSGKRPPYSSSAIVFNIPCKSAIFFLKSNWAITFF

SEQ ID NO: 931165 - protein, 168 aa, Homo sapiens
MLMLGSHPQVIVSSSTPQYPSVEQPTPQALYVTAHQAYPNYATQLHAHQLQPAITPTGNQPAAPSPVQHQAGVAPHLGSGQPQQNLYHPGALTGMLPSLPPGPSAQSPQSGFPQPATVYAIHHKQLPHGFTNMAHVPQAHVQTGITAAPLAPGDAAAPTPDVIHIVKK

SEQ ID NO: 931166 - protein, 144 aa, Homo sapiens
MADTPPPASLPPCSSISDCCASSERGSVGVGPSKSGKFLVGAFNKALVRQKRSPSPHWTQEFQLASPLMSTDLFVSFFTESWVLQRIAALPGTHQPQHTQRSSAHPLCKVTPGTPKSQRDQGTQCKWQQSFRLDRTLSMTLGGL

SEQ ID NO: 931167 - protein, 262 aa, Homo sapiens
MSVTVVKNAKFYIVQVNHAPYYGHKKGKRVLAPPGKTGKTVNEHDLWTIILSQAPFPRLKKAFPSTRLASMGPGFRLAPVDTGSRPVPVDPMSRPMQVDPSARLVSWTQGPPTPADPSCRPVQVNQGSGSYPANPSAKPAYLLTQTPNLPRPGHIPCQMACPESLQAPLPQGSCGLLGDHSRPNLLEFLPYLERGTKLMPAGTLLYEVSSDPHWEVSPSQEAQDQGPSGCPLAEQAVSSLLLLAATRADCTALCLGPKALVA

SEQ ID NO: 931168 - protein, 157 aa, Homo sapiens
MEWKDNLPPEFHHPRPNSSLKSRHQVIYLTSSCCFSSFLLCRSSLLSCQWCLGFLWVQGRKWGRPGWFWKRQHSEIDLEKMQRVMNFNPICQYKSGTFHFYKKRSSEMKIILKTSLKGPVIITCSLEIKGKLKEVSRKPQTWLYLSQTLWSFPEANR

SEQ ID NO: 931169 - protein, 144 aa, Homo sapiens
MGRNQCKKAENSKNQNTSSTPKDHNSSPEREQNWMENEFDELTEVSFRRWVITNSSELKEHVLTQCKEAKNLEKREKRMKRNQQSLQEIWDYMKRPNLHLIGVPESDMENGTKLETTLQYIIQENFPKLARQANIQIQEIQRTP

SEQ ID NO: 931170 - protein, 168 aa, Homo sapiens
MYSCFWVASNQVMHLLVLILYPDDWMPPPRLLLLPANWEKTEEDSRILGDTGGGHRWKKNQVLDSLYGKNMTTGTSSHAQGCLSQETRQCYDSRANSKSAGIGVFNESFCNGTLKLNFAEAYPKCSPLVVTECNTGFNRHHHSRRRWVIYKPHFQFPVDWAWKFNCIH

SEQ ID NO: 931171 - protein, 127 aa, Homo sapiens
MLTLDPPPGSLLPSPPSSIQYLATFPAPHGRFGSLNSVELFPITEAALKTTSLQTPCTCLWPSCRLTPGMALFTLPSWPSNQSPMGEIRDSKQLLPGMIRWHPDQCPSQLVQVHNCLLLAHKEKSRN

SEQ ID NO: 931172 - protein, 243 aa, Homo sapiens
MHGLFKLTGWECFCFSLQLCCQEPGVMNKPGLSAMQEEKAFSYWGNRITLCTDQGKKGHGSRQSISLVVRTKARKASGAVKYSLVGIYQGKKSHRGASTGDTWENRVWSGPPANSSRPAEEGPVRRKTNKTEKNSSNINKKDVYSETPSEGHQHQRPKVDKSTKMGRNQRKKAENSKNQNASSPPKDHNSLSAREQNWMENEFDELTEVGFRRWVITNSSELKEHVLTQSKEAKNLEKSTRTS

SEQ ID NO: 931173 - protein, 171 aa, Homo sapiens
MCAEGGQDRDPASRSSEIPTLAGASVSWEIRSTPTQISSALYPPPAFAHTWPLRQRHPWVYVNSLFSFQNRFLGGRAEHGFPNPTDLIWNSASPPTACVTLRKLCNLSGAQLTHPKMREVAVTLKESLVLEGDSRESQPLSSSSPSASLTSFHLAPRGASCAHLRVPTWSV

SEQ ID NO: 931174 - protein, 139 aa, Homo sapiens
MGAVALPSFWGMDGRPVLPSTESLVLGAGCRPGLGFASSAQGHQSLDEALRRLASFREETFLEALYMSDTILDSGSTMMDQSQIGLMDRTGNWQQSKNCASKCKERKDKNTRGSTYEETSIENEFQKRREQMEMQSKGK

SEQ ID NO: 931175 - protein, 141 aa, Homo sapiens
MRGPLSEGPRLMAPERKNEMPRPRHLAGLITLNETQLAVGAGGAGAGPDPCTQLPGATKACPNPASYPHPGISQPETIEGRGEVLLVLLITLSEHWYRGGLAAGSSWQADACGLQYLGAGLVLRGTNRSDKFLSSRDRARV

SEQ ID NO: 931176 - protein, 221 aa, Homo sapiens
MNAPEHLGEASQQHIQAASLPPWVSLPPTRLHRESLRRTPCTNVALAFSRQPCLSPAEVHPCLHWLVPNGAAAATNPQTPGLLLASPRHPLQTQLQPPQASGQGSLQDGHHPSGHQPPSSSELPQVSRDWIQGSCVLERTGDALSFIPTSCLSAALDPQILPQDKRWCHHPLGAPLTHELSVAPGGAITLILGEGASRGRESMEQETKPQNVHQNIVEFSI

SEQ ID NO: 931177 - protein, 186 aa, Homo sapiens
MVVVAVVVGCGGGGGGGGDGGGGDGGGAGGGGGGGGDGGGDDGGGGDGGDGGGGDDDGSDGGGGGGSDGGGGDGGGGGGGDGGDGGGGDDDGSDGGGGGGGSDGGGGDGGGDGGGGGGGDDGGGGSGDGGGGDDDGSDGNGYDGGDGGGGADPRNDGGGCGGDGDDCSVGGGNGGMLEVMVSARGK

SEQ ID NO: 931178 - protein, 505 aa, Homo sapiens
MVPPYLHLLLDGEIQHRKKQGDAMARKLSVLEVLLIIFCLIVVTIDILLLLLVLEETSDTSFTPECPEIPQSERIDCTPDQEVTEDICRWQYKCCWSPVADANVPRCFFPWNWGYEASNGHTNTSTGFTAQLKRLPSPSLFGNDVATTLFTAEYQTSNRFHFKITDFNNIRYEVSHENINLVDGIADASNLSYYVEVTDKPFSIKIMRTSNRRVLLDTSIGPLQFAQQYLQLSFRLPSANVYGLGEHVHQQYRHNMTWKTWPIFTRDATPTEGMINLYGAHTFFLCLEDARGSSFGVFLMNSNAMEVTLQPAPAITYRTIGGILDFYVFLGNTPEQVVQEYLELVGRPFFPPYWSLGFQLSRRDYGGINKLKEVVSRNRLAEIPYDVQYSDIDYMDGKKDFTVDEVAYSGLPDFVKELHDNGQKYLIIMNPGISKNSNYEPYNNGSLKRVWILGSNGFAVGEGYPGPTVFPDYTNPVCTEWWTDQVAKFHDHLEFDGVWIVSYYS

SEQ ID NO: 931179 - protein, 135 aa, Homo sapiens
MCAWTLATHTSPSLCHGHQCDHAHRGQQALPQVQMQAQTSATLSPPMTHCWHEHVQECHSPASASIPLPQPTCMHPAVLCHGCQHNPSDIVPSKIEETSAHTVRKNQCKTSGNSKSQSVFLPANNCTSSSVMVFR

SEQ ID NO: 931180 - protein, 139 aa, Homo sapiens
MHFHMACPADLELEVNSSDPWLLALHLTMERTWTLRASPTQTGPHLSTEEFSSGLIKAGEDPAKVVCCCCELLSSNWGVVREKTNASRGQPQPLTLGLTEKAGSSAAIWKQEAYLGPGPELSQEKRRGRSLGGTDLEEQ

SEQ ID NO: 931181 - protein, 165 aa, Homo sapiens
MPVEEQPSSWALPEFCPFPPTVPIDTEVTQTPKHLVMGMTNKKSLKCEQHMGHRAMYWYKQKAKKPPELMFVYSYEKLSINESVPSRFSPECPNSSLLNLHLHALQPEDSALYLCASSQDTALQSHRFPVQKPSGPARKPWGPRRARVNISSKSPEEASEHHSTC

SEQ ID NO: 931182 - protein, 331 aa, Homo sapiens
MHRPRRPLHPVAPAMSIGLLCCVAFSLLWASPVNAGVTQTPKFQVLKTGQSMTLQCAQDMNHNSMYWYRQDPGMGLRLIYYSASEGTTDKGEVPNGYNVSRLNKRDDERVDEPITGTLQEPNPGVCLATQSAADNSLPRAFGIRLETAGKAMDWTFCTLNAGLSEIPQINVRKDNELTFWCFVLAELLTHPREHAQQTEERLWDEEINSEMQHHTGAGVSQSLRHKVAKKGKDVALRYDPISGHNALYWYRQSLGQGLEFPIYFQGKDAADKSGLPRDRFSAQRSEGSISTLKFQRTQQGDLAVYLCASSSATALLLQCQLGSLGNGVSRT

SEQ ID NO: 931183 - protein, 255 aa, Homo sapiens
MLSDPDPGHALVLKGNQHMGRWVLGGAPCVDFKAHPLSTGAVASALSFSAGPVNAGVTQTPKFRVLKTGQSMTLLCAQDMNHEYMYWYRQDPGMGLRLIHYSVGEGTTAKGEVPDGYNVSRLKKQNFLLGLESAAPSQTSVYFCASSYSTVLHGCLLSAQKGKGRCCPPPQHRFSDALGPSTENFGAPMGPGGASLHLCQVPLQSVSARPGSVPGPQMSSLLPSGLSSEVSFWASARGFPALTFLVIHLSLRPPR

SEQ ID NO: 931184 - protein, 239 aa, Homo sapiens
MSIGLLCCVAFSLLWASPVNAGVTQTPKFQVLKTGQSMTLQCAQDMNHNSMYWYRQDPGMGLRLIYYSASEGTTDKGEVPNGYNVSRLNKREFSLRLESAAPSQTSVYFCASSEATALHGHHTGAGVSQSLRHKVAKKGKDVALRYDPISGHNALYWYRQSLGQGLEFPIYFQGKDAADKSGLPRDRFSAQRSEGSISTLKFQRTQQGDLAVYLCASSSATALLLQCQLGSLGNGVSRT

SEQ ID NO: 931185 - protein, 134 aa, Homo sapiens [sequence omitted]

SEQ ID NO: 931186 - protein, 175 aa, Homo sapiens
MSIGLLCCAALSLLWAGPVNAGVTQTPKFQVLKTGQSMTLQCAQDMNHEYMSWYRQDPGMGLRLIHYSVGAGITDQGEVPNGYNVSRSTTEDFPLRLLSAAPSQTSVYFCASSYSTALQGRLLSAHKGREVLPSSPTQDSGMPWAEISAPGTLEPTVAPSGLDRLSQLLLFYSLS

SEQ ID NO: 931187 - protein, 251 aa, Homo sapiens
MSLGLLCCAAFSLLWAGPVNAGVTQTPKFHILKTGQSMTLQCAQDMNHGYMSWYRQDPGMGLRLIYYSAAAGTTDKEVPNGYNVSRLNTEDFPLRLVSAAPSQTSVYKVTKRGQDVTLRCDPISSHATLYWYQQALGQGPEFLTYFNYEAQPDKSGLPSDRFSAERPEGSISTLTIQRTEQRDSAMYRCASSLATAWHSRLLPVHKPHPSLSLQLPEIINRGLSLLLTFPGKEVDLDLGCPLGGKRPQIHS

SEQ ID NO: 931188 - protein, 180 aa, Homo sapiens
MSIGLLCCVAFSLLWAGPVNAGVTQTPKFHILKTGQSMTLQCAQDMNHGYLSWYRQDPGMGLRRIHYSVAAGITDKGEVPDGYNVSRSNTEDFPLRLESAAPSQTSVYFCASSYSTALQACLLSAHKGTEALPSSHPRLKDALGRVLCTRNLGTQSGPKWPGQFASIKQGHYKFESVTDL

SEQ ID NO: 931189 - protein, 196 aa, Homo sapiens
MLGHLEGLRLHPREDLSSEASSIPVTLEVFCHKISNLSSCLKLRDQKDHILSILLSWTECGHSPSQSLEVVQSSLRIPALGQNHQGSSSPAPHRLQQGFPARCAGANPWRGKWSSSAVTGDRRKQSHLIHSPLADLLPYDTILHQRVLISRCSSASSSVISSLFAAQISGCALYKVIISYSSPFATLSYIHPYFLH

SEQ ID NO: 931190 - protein, 173 aa, Homo sapiens
MGTRLLCWVVLGFLGTDHTGAGVSQSPRYKVAKRGQDVALRCDPISGHVSLFWYQQALGQGPEFLTYFQNEAQLDKSGLPSDRFFAERPEGSVSTLKIQRTQQEDSAVYLCASSLATAWHSCLLPVHKPHPSLSLQLLETLNRGLSLLLTFHGKELHLDFSCSLGRKRPQIHS

SEQ ID NO: 931191 - protein, 293 aa, Homo sapiens
MVCVPYSTVDTSIMVLAMGSSHGNEESQKESNPAAWFSRQKDLVEGCWLGLREDDELRKQTKRNPRRKLLKPWRNHKSNFSQKMVAVTHLQRRPVNWEMSSNSTTTDTHSPGTGRGQILASCSTRALNALYLLSLPWDLGSSPGRWTCLGFSKPDHADTGVSQNPRHKITKRGQNVTFRCDPISEHNRLYWYRQTLGQGPEFLTYFQNEAQLEKSRLLSDRFSAERPKGSFSTLEIQRTEQGDSAMYLCASSLATAWHSRLLPAHKPSGTYFSFQLSEALNKGAALLFPQQGE

SEQ ID NO: 931192 - protein, 194 aa, Homo sapiens
MRSMEVQMLPGGIWGKALTKQHIILILCVWDIRMAELIDARVTQTPRHKVTEMGQEVTMRCQPILGHNTVFWYRQTMMQGLELLAYFRNRAPLDDSGMPKDRFSAEMPDATLATLKIQPSEPRDSAVYFCASGLVTALQNHLLPVQKPWCFLFSSSTQQLSAAFLAPPLAQEVHRFRVPHVLGKARTGHKDTSR

SEQ ID NO: 931193 - protein, 136 aa, Homo sapiens
MYWYRQDPGQGLRLIYYSQIVNDFQKGDIAEGYSVSREKKESFPLTVTSAQKNPTAFYLCASSIDTVKHGCRLSVHKCAQDKKFLEKYESLSRIHKPWLHEFSSNYFLDSVFSFGFLLLHSLWEFDSHRVPQKPKY

SEQ ID NO: 931194 - protein, 199 aa, Homo sapiens
MGANSAVNTLLLFLLSPSSTGSTDTKVTQRPRLLVKASEQKAKMDCVPIKAHSYVYWYRKKLEEELKFLVYFQNEELIQKAEIINERFLAQCSKNSSCTLEIQSTESGDTALYFCASSKATATFIRSIVLQHRVSVVGNVVHVSAGNTWDSVVSAQLCCGLKIAPKIQFTNLKMDPSIQMENYHIGGTKWEHTVESVAI

SEQ ID NO: 931195 - protein, 148 aa, Homo sapiens
MHWLCTKSGVGRTASPHPVNQPGRDWNSLEDSEEDRKMWESLELPRDLLNAFDKNADSDMNNKVQAEVVSDGDEEIVGNWSKGDSCYVLEKRQMAFSPHPRDLWNFELERDDLAYLAEEISKQQSVQKVTRVLLKAFHFKKETEHKSL

SEQ ID NO: 931196 - protein, 176 aa, Homo sapiens
MPALPISRIQVRLGEHNIEVLEGNEQFINAAKIIRHPKYNSWTLDNDILLIKLSMPAIIVSFSGLIYTSTFFVLLLILTANYPDELQCLDTHVLTQADCEASYPGEITNNMFCVGFLEGGKDSCQVGDSGGPVVCNGQLQGVVSWGYGCAQKNRPGVYTKVYNYVDWIKDTIAANS

SEQ ID NO: 931197 - protein, 188 aa, Homo sapiens
MNPLPILASVGAAVGVSFDDDDKIVGGYNCEENSVPYQVSLNSGYHFCVGSLNREYCIQVRLGEHNIEVLEGNEQFIYAVKIIRHPKYNSWTLDNDILLIKLSTPAIINAHVSTISLPTTPPAAGTECLISGWGNTLSSGADYPDELQCLDAPVLSQAEYEASYPGKITNNVFCVGFLEGGKDSCQVI

SEQ ID NO: 931198 - protein, 146 aa, Homo sapiens
MECRPPLLSRNNVRAQPPPGACPLRWVSPERCVSDISQRENKARLHEGLYESQSKLVRACLLVTGPAGAMCRARQPRLAAAAERHEQLAVRVGAGSLAAVPHVGNDLSRSQGWAGVFWREKDTFQDSPSAGVPNPQATDWYWSVAC

SEQ ID NO: 931199 - protein, 116 aa, Homo sapiens
MAQCRVPAGWHNGLKLGYERRREMYALLSQLWNAAEVCIESLTLIKGPSALVIHQIGTKDQTSRGRSHKAIPAGRPSHLTAGTYAKRQMWWGLLFRGKGASAVKPLPCTSLPSDYP

SEQ ID NO: 931200 - protein, 135 aa, Homo sapiens
MVIPPGQVLKGHSILLIDDWIQGSLTAPGCKDRPNVACLCAQEEEAGLVGFAKAEMRRDWDTGEQRSSNSGESGGWCQQEAVIPGEGLDRVKCGSKGCTSWVKLGASPYGGRQGAFCKDWLVCVALGGPCNVGNA

SEQ ID NO: 931201 - protein, 244 aa, Homo sapiens
MLTPPEALLDADIRGLGRAPTESFYEGSVEEKCGVGAPTQNPHQGIVFGAVGRGPLPSRPQNVLEASMSGELHVALLISVEGACPGVCILQNSWSAAFQPEFADQELFSGAQALGLSAVQDPQGHGPPKPMQAGLVSKDSFSHKSHEKPLPVELDPCRLLPASGSLQFVEPDFICSSNLQLPTPLLATKLPSHPLIISPDFPSSQPLRLTKLSGLMPDFLLHSLHSCAPGGKDSPPHTTDKGQG

SEQ ID NO: 931202 - protein, 333 aa, Homo sapiens
MKELPMPAASSAHLPFSLGPSAGRLPATITRVLQVGKANAGLSDRHVYQLFLIYGNCSINVINTSTTITINTTIITITTTTITTTTTTTTTITTNTVITIITITTTTTISITINTTITTTIIATTTTATIIITTITTITTTTITTITITITISNTITTTTITTTTATTTTIITTTITTITTITTTTTIIITIITSITITTTTITTTITTTITPTITTTTTTSTTTITTIITTIITTIIIITTITITTITVIITTTIITITTTTTIITTINITTMTIFTITTTTITITTTIIIPIDLNHRTMLFFGMWHVAPCTYLALAGSRSRETIPPGLSKL

SEQ ID NO: 931203 - protein, 140 aa, Homo sapiens
MSVQAPDNCMPLGRGTWKVLLKTDLSMCKNELFRGRRKMKARAPPPPGKAATLHVHSDQKPPHDGALGSQQNLVRMKEALRASTMDVTVVLPSGLEKRSVLNGRAASYEEAGSETRAGTAVTYTPGWDSSHSVPQMPFKK

SEQ ID NO: 931204 - protein, 174 aa, Homo sapiens
MDLLVELCLQNHLNPSHHALEIRSSETQQPLSFKPNTLIGTLNVHTVFLKEKVPEEKVKPGPPKVPEKSVRLVVNYLRTQKAVVRVSPEVPLQNILPVICAKCEVSPEHVVLLRDNIAGEELELSKSLNELGIKELYAWDNRRGEAPLRLTHLPIITRMRGVYMSPVGSPQHSQ

SEQ ID NO: 931205 - protein, 140 aa, Homo sapiens
MNTAICFSISWRGRHGRTHLHTSHLLISYGETLEGQEHMALEESVTGEEAWSLDRPVFDHSDMDSIHGPRPWKPLCQREDGGQQDPDKEGLSGWPWAGSQCAGSQLFSREGRPHPATCKSRADTAWRSQLPQGCGVLTGF

SEQ ID NO: 931206 - protein, 146 aa, Homo sapiens
MGSNTCYHNLLCTRGPDPDSQQLLSGMSLCCLYICKEESDRKETHLQLYGIPEMLMQLAGPPVSARSPCCTPMPVIKISVRTHQINIMEMLTEIRDRLGIHIWSEPCRKPRQHRGGKGRAGRELPRQQNSGVARWSRPVRWSRSLQ

SEQ ID NO: 931207 - protein, 803 aa, Homo sapiens; identical to SEQ ID NO: 900657

SEQ ID NO: 931208 - protein, 171 aa, Homo sapiens
MQLYLFTSEIPLLLHCLLERSSWTRGPYHKSINIENTLRTIKAKLTVGSLPSDAYALCHPFIRQTHSEHPLSFTGTKKRNTVPASWNLGTRHSSVLCKNPHSVLPGKSRRRKEAWERQRKAWSLLAAGLRRARIKGSTHSTLRSEGLRQRRKVLGMWATSKSEFHILHFDL

SEQ ID NO: 931209 - protein, 138 aa, Homo sapiens
MNSNSTAVRTFAVVPQATEAFLLLLPLLLLCLPCFFLFTLCLSFNPFYCYDFRLIDLYFLFFLFHLCNISCKIVVNYTKGYSPLLSVVFSLFSKTAHVGLRTVPASCVLSAGVVHCSHGPTSAAPLPNRGWQGTVPGM

SEQ ID NO: 931210 - protein, 136 aa, Homo sapiens
MDKVTCLSLTKGPGVASKGPTWVNFHRAARYPGHFIDPIDHGKWPLDTNSVPAPAQGLPHVVHVTQSYPVPWLPHVTAEATEARCGPQSQKDFTAPLRPGVSWGMKLQEATYGLGPQSQKPGLGRTSLVFRKRGLE

SEQ ID NO: 931211 - protein, 312 aa, Homo sapiens
MPAFLDPNASCWPESNGTALQEFVILGFSVWPPGLRVLLFVLFLPLYLVTLAGNLLILGLALVDPALHSPMYFFLGALSAAQAAYTLVLTPRMLAGFLLPSRGQAVDPSTCAAQMGLFVALGGSECLLLAAMALDRYLAICHPLCYPRLMTMDLPFCRGGLVNHVFCDLPAVLVLACGCRALQERVLLVACLLLLVLPLLLILLSYTRVLVVILGVGGVAGRRKALLHGGVPPHRGPLNSRSLEEDKLVSLIYINVTPLLYPAIYTLRNRDMQEALQCMVGQRTLGMATRGSVIRDDKQKKWYVVLQWASLV

SEQ ID NO: 931212 - protein, 157 aa, Homo sapiens
MLLTLCPKHLFPLQTASFFRAEAFPSAIPTWGTLIYFGHWQQKVHLAVAFILVIFELHQQVGPEASLAAISLVSGGPGIQEWLSLSAPTFLSPPNVDFNLPGVWVHPDPEGSGCSPVPKPACSVASLKLWLAHLSTYAINPAFSGGRAGLEEDVIFG

SEQ ID NO: 931213 - protein, 177 aa, Homo sapiens
MRRPRVGGVYSVAVRHQQETAALCQVAGAEFSLASDGMVQGWEKALSSSAANVASLRPCACSGEDAVPVAVSGFDLDSFRDTEKPMWAFSSINGSVDPRPAVPEVSGISFEGGCRVLSCKAQAHRDSLHALWFGEVFLQALSHRSKAGSACCPRKDSTHLASDESALPPDPNYSGVP

SEQ ID NO: 931214 - protein, 150 aa, Homo sapiens
MWHGQGPLCRGFFSNCAVLPPWPPPSEPLRPGLAGQMPPKQHVCTPPLAANRALLELCVCAVQRPRSVAFLLVAAARESAAPLVTRPWVTGVFSLEEYLSFISSIKFSALPSASGLYPISMSSPSTCERDAGGLTGLQALSFPGLPCCWP

SEQ ID NO: 931215 - protein, 147 aa, Homo sapiens
MCFFLFQAQLATASIHYSPASLTLRGFLAHAVVLWYFLSIQCLMDTGLRGPSMLTVTFPAHNAIDIPALTKEQGTYPKVIINSGPFYLAGIAIFSARFLPHGLRWLLELHLLCQHPSQFPLNGEKKKKKGSETHCPHALKTIFGTYT

SEQ ID NO: 931216 - protein, 140 aa, Homo sapiens
MTGATETQTLAIHHNLAPGVRALIPLLIHLLKKEEEEDDNDNDDNDGNDDEEEEEEEQEEEEEEEGGGGEGEIIVEEGEEGRERGKEEGKGEEGEEEREEEKEEGEEEKEEEEEKGGRGGGEKEGEEEREEEEEEEEEEE

SEQ ID NO: 931217 - protein, 146 aa, Homo sapiens
MYTVLNKFGLLRRGSLSCALPSSAASVFACETAQGPPFNSALWIPVLFQFQFPLRKKPHSVSYYIRGKNCFGGVRGQGGGPHLRRRPVRREMALSIPRQGLRLLPAWWTAPSSSPPSQSRSLHFPLFPEGSLPAPDRVINGPLGQL

SEQ ID NO: 931218 - protein, 159 aa, Homo sapiens
MCLLDIPKYYCCTMMVLSLENGVDYAMEERIGSSSIVGFLVFGWSGKRKSQMEVEGRYWEANAPSRPAFRAQSKFCSTVGPTDRIPHRDSVTSVGKDIFKHFHMKNLDLKEKLKFHKLAFRSSIIWLRCTSSLRNHFFEMREYLQRTEIVGPGIKQAGV

SEQ ID NO: 931219 - protein, 200 aa, Homo sapiens
MGKMLSTKWAGAFFAQCIALHIKLSPLHFISLKGGVFGEKGPCEESLTFLAVSPLPGPTSPHSQLFHSCLISDRAEELPDLPKRWCMCGMTRTRDEGREDKMMAEPTVDASLSSRGGQGVAISRGMWPESGLAGLGVYMCPWGGPQVPGEHVLYQEAQEEGPKEDAGRQCQGREYMCQGYRGPLHHRSSQLPIIVEDFNL

SEQ ID NO: 931220 - protein, 277 aa, Homo sapiens
MARVHAARQDLLENAGEIPTGARPGLCEPGKGCTEQAATPQLHARYMSSSQPPRTFAVSVTVIKDGVSGDNPSAVHMCPEFPPSGGFVVSLTSGVKLQTFTVSVTALKAGACGVVSSFWWVRGLADFRSEAADLHRVKLQTFAVSVTVHKRGVSGVVHPSLWVCGLAGFRSEDADLRESEFFYQIMSIIKTNVWCILCSNRAERARSKEGCPGPEGAWALPALLLAGPFGVYRVVSLVGATNETAGKHTFYFICDVRAAVLSPSPVSRMTLRGLLRE

SEQ ID NO: 931221 - protein, 154 aa, Homo sapiens
MIMWKSYGVETPTLVLLIHMIWDSPCIFSKGKTKGEITRLLLLARNKTCSHQLGCSSISNHSKKKKKKLKVTPRTDFPFIREVAGDDRRDGQYSHTNECFASGLTQLDRELMQRQKFISHEKGEKCTGNRVTPEQVIMKLELMKAGRNLEWMGW

SEQ ID NO: 931222 - protein, 153 aa, Homo sapiens
MENLPSHKRHCSLLLALYLGLVTLGEASCHVVRTIEQAYEEVHMKKRDRLPYGIYKPEWKTDMEQETASVSCTTLWVALEEKAQDCVVRREGRTSVEVGPAKEPPDKRNPTCELKHRSLSPGGHGHSYHVRLHVAVWFVHCTEAMADRTINSS

SEQ ID NO: 931223 - protein, 145 aa, Homo sapiens
MHGTAFRNEALSSPKCKIYEEFILLECLATRVYLIDLASANYNTHERLDSEVTIMKKWLGRRMDLLSSTRAKNVVLSGTIVFSANSHGCPSAVLMFLKGYLSVIGHYNCAASKSGFLILMNFKSRPHQENSGQAANIENATCLWK

SEQ ID NO: 931224 - protein, 146 aa, Homo sapiens
MAIFSWTGLQISSWKIRNWCRRVGETHRVWHNNNSLHLHTILELTILFLNGSWETCLIHQVKAQMQTSVSYPTPDESESQWSLATAKSGNEGPRSRQGVTHCAKKERVKEDAILNVDGLALTHRHTHSYLTTITQLTAKPYEGSSI

SEQ ID NO: 931225 - protein, 145 aa, Homo sapiens
MHTLLLNTLCTGDESGAALDLADCSSDTSAPLRPFVAISKQPTGNLEAAINIESSSSCQKSGSQGHFSSSGRGLLRVLENRETGMCGYHTREGTAAQAVHNHRCSHRAPPSCKEQERRAWEAKNFVSLAGAHGSQDQHPYMVMPN

SEQ ID NO: 931226 - protein, 159 aa, Homo sapiens
MNPSGPGLFLVALSRPEGNSRSVVIHGGNIRSHPLTAVEWQLYIFLVLCLSPLYTERQAQVHAYLWNITSGPTHPVWAKQQAQRCYPASVPCTQHFSTSDSRQYCPAMETIFIPAQSEIFTGPSQQLCDGIVQPVVSPEHGAQPTIPHDLRAQEVTQPN

SEQ ID NO: 931227 - protein, 151 aa, Homo sapiens
MAITQAAADTALLHGSLNYTKCFEQSQFQNILLSSQTLEFLFIPKFQEPMLVGRESPNMGHFGSRHQLLHLWIVKLFERDCSNSQLLLRAEFCPPNSYVKALTSNVTIFGYGTFKEGEPIGCQPPKSACSWDGKLALLQSAIKASARKRLF

SEQ ID NO: 931228 - protein, 162 aa, Homo sapiens
MGVQFQECGGTLFSCEIMNPKFKVPKFCCSVDGKSSLSLMFSEDPIHARLLDSLSLSSPTEPVHHTIAVEVKLQDKRKSLLFVCFMEPQATVSQFCKMLSKGLHGMGPVIFNPFKVDKGVSTCGLWARWLPWVTEKIRKGKERKGKRHCLWQGGEDVTKLKG

SEQ ID NO: 931229 - protein, 160 aa, Homo sapiens
MELVAAEEDVGIIVLCWGFKGGCCQLPAKVETAATKKGASPSCLISRGCTSSSLQVCLRALWLEGDGRLPDRPLSSSVYGRLEGEFNSMVRGSGIFPSVKAKSMSMAMEHILVSAINQDRNKMGSSGSRSKGTLLSVGECGKKLVVLSQGYFMHNLSILG

SEQ ID NO: 931230 - protein, 124 aa, Homo sapiens
MRASACVCIRSYKRKTDTGQGSPHPDRMVWEPCTKVSLICFDLFSPLHREGCPVTCAVGRCIETTANPLETYSQGIGMEGIEGGRCETLNNAERIRSTPLDAIEKCKLNCSCLEMRNDQTVRTP

SEQ ID NO: 931231 - protein, 354 aa, Homo sapiens
MQTFGVLTELKTCQVHTYGLIMGGSNRSAEAQKLANGINIIVATPRCLLDHMQNTPGFMYKNLQCLVIDEADHILDVGFEEELKQVIKLLPTCRQTMLFSATQTQKVEGLARISLKKEPLYFGVDDDKANATVNGLEQGYVVCPSKKRFLLLFTFLKKKQKKKLMAFFSSCMSVKYPYELLNYIDLPYVAIHGKQKQNKCTTTFFQFCNPDSGTLLCTDVATRGLDIPEVDWIVQYDPPDDPKEYIHCLEKLIEKNYFLRKSAQKPYKPYIQAYDYHSLKQIFNVNNLNLPQVALSFGFKVTPFVDLNINCNEAKQKKQGGGGGFGYQKIKKIEKSKIFKYISKISSDSRQFSH

SEQ ID NO: 931232 - protein, 236 aa, Homo sapiens
MQGHEWQGGNVNSSHSAIPLCGMQEPPEWLKFNTVTSKYGKKCGASVRLINADHPGQQTEIPSLQKEEEEGEGEGEGGGGGEEEEEEEEEEEEEEEEEEEEEEEKKKKKKKKKKEEEEEEERRRRRRKEEERRRRRKEEEEGRRRRRKEEEKNKKKRRRRKEEEERRRRRRKKKKKRRRRRKKKKKKEEEEEERRRRGGGEEEEEEEEEEEEEEEEEEEEEKEEKKNKTARHGGTI

SEQ ID NO: 931233 - protein, 170 aa, Homo sapiens
MGDGADSLHASPETGFPLIDFPTSCELRQLQFIWSVFLDVVPSELHTSGEQLLVWAVKDVPNPLSVHSSRLSLPKAAAFSTGSSCVTFDKDVTRNGSLGSHQDRVCAGRTQGKQIQKDQLLVLLNSQDGFHSIQAFTPLILGHYLHILEEGAATVPIMQLQEMLGQSPVV

SEQ ID NO: 931234 - protein, 149 aa, Homo sapiens
MQLIYEARLDHNNPDARWLPFTFHHEWKQPEALTRSQADADAMLLVQKVKVKEALPEWLHNEDLIHSLGVKVLLGYSHQSEAQLARINWLSLWQNVTCCFYAKVDALLHCLNSLLEHSFPQSLKNGTDDSQPRNCPKKSSFASYYTLMM

SEQ ID NO: 931235 - protein, 125 aa, Homo sapiens
MPLTIEVNISLFVYLHTITKKLTGSNKKTYAYYSHSIPYKVDLNSILIEEINDCEMHEIRNLIGLPRFLACQHCDAVALWVDMEGCQQSSRHVEMQMTKQKIEDKKVKKNYSDLKDIKEQSTADF

SEQ ID NO: 931236 - protein, 144 aa, Homo sapiens
MSRPKCAAGSEPSWRTFARAVQKGNVGLEPPHRVPTGALPSGAVRRGPLFSRPQNDRSTENLHCTPGKATDTQCQPMKEARRRAVPCKTTGTEMPKSMGTHLLHRCDLDVRHGVKGDHFVALRFDCHAGSWTCMEYFISGRSCH

SEQ ID NO: 931237 - protein, 139 aa, Homo sapiens
MDTFLLNELIHTYIHTYVSPVVLKVGFLAQQQHPARNFLEMQRESVLIFVTQLEIRGNSQKSFGQSVNPRVFTPSQDPTAGCLQAEDQGEPVQVPKLRNLESDVPGQEASSREKGIGWEGRPVSLFHVFLPALYSLEAD

SEQ ID NO: 931238 - protein, 173 aa, Homo sapiens
MFYHYVGYLLYSFDRYHLPELPIGVSAGLFDICNDIFTPQAEKKPKQKPQCRNKLTHGSGTWKVKGGDRTASGITVGLAVALFQHDTVTISNQHSSGACQKPIKLMDLQENYITFKSMLVTQVAFIKSKEIDINTACLCCLPMNTPALLKKDLLSSKKRIIFKCLNLNLSKIA

SEQ ID NO: 931239 - protein, 146 aa, Homo sapiens
MTMAVLWNRKGGKVGKRLRNRMGKAELYVFNVLKCVLFGEVAAEVEHGFPFLLASFLQLIIFPWNASPLFSIGDSFSLFKKSTKVQLSVGNPNPMSQSKERLWVTVEGRNGEAALYICVWEEALSINKQAFNLLSPFPQQSIHLEK

SEQ ID NO: 931240 - protein, 178 aa, Homo sapiens
MNSVNQRLWCSYCVPSASSVPSSCWAGKLHHLFIGLRNEIESNTRILGNFSTPLTALDRSSRQKVNKETLDLNYTLKQTDLTDIYRTFYPTTAEYSFYSSVHGTFSKIDHMIGHKTSLNKFKKIEIISSTLSDHSGIKLEINSERNLQSHANTWKLSNLLLNDHWVKNKIKMEIKKFF

SEQ ID NO: 931241 - protein, 148 aa, Homo sapiens
MEKTKKVVKRVDSCDDYELLRSIVVSIVVRLKPKNMYGHLIHGQENVKPFSASAGWFACFKKQCYMENVKLAGKAIKKHLPTVIQKKGYVQQQVFKGAGVGWWCIMNALPYLLNISASRNLLRDKEKTKSIVKRLPRKSEDGKTKHLS

SEQ ID NO: 931242 - protein, 180 aa, Homo sapiens
MLNRSGERGHPCLCRFSKGMLPAFAIHYDIGYGQVPLLQVCWSLLEVHSRPCLPGYHQRRLQNRKDCCMVLPLEALSQRGTGLMLARVLLYEVAQSSSAVLEESSLSGPAAVFRAGRQEGLIPLKLSPQPPLPPGALSQRDGSFISKPLTGAAVFLSDMPCLERRNLERQSGRSHFAALC

SEQ ID NO: 931243 - protein, 134 aa, Homo sapiens
MIVRPLQPCETLYRQDTFAYATSSNYRKFIFSHFQQVWEPLSLWPCRRLQCLRHGAPSPKWRRPGVLAQLHLNQYLSYILYVNMLILKIELNYLLKEDKFLDNGYNLYPHQEKPDSWNYNQNINTGSAKKLNGS

SEQ ID NO: 931244 - protein, 189 aa, Homo sapiens
MCLGVISVGVFILLIILRASCICYNSYPCSSRHKGVFLVLCSEDLVGFLEILSYNLRILLGPKRVFDFQLLAFSNGADIHKFEDTFASSKRSTNTYHSLIQLAWGSPTGTAKPNADMEISVKMRHLLLGTKQGEPGSSCFRPVFPGSLQKVLNCPYSMPENNCLICFVQFYRFSHWENKSFTSCYILER

SEQ ID NO: 931245 - protein, 145 aa, Homo sapiens
MNACTHTETRGPSPPCTTIAASADMQMDSNSPAPQLCTTTTTIGVNACMEATNDPCFALTLLLVQMHTWMPAALPSYAATNASQVSEQPTPLLLLLLLARVKEHGSCCYHTMKHFSWHYTSEGCGQWSRNTLAPLAQQVPKLKGT

SEQ ID NO: 931246 - protein, 137 aa, Homo sapiens
MQKSETTGLYRNPSRHRMYNCAFSPSSRLEVTPCCIFHLHLDVIQGKTPDNLWKVWSIPTLKPLCFTALPSHYLDLHSGQHQSSGHADPITRRGTYLALWGWSVEASAGLEDGTGTPHSSSLEVVWATVFQRRALQT

SEQ ID NO: 931247 - protein, 405 aa, Homo sapiens
MKTDSYSKLVQESGALLKRYPKMWEPFWNWVAGRVWNRLEGSEEDRKMCESLELPRELLNGFDQNADNDMDNEIQAEVVSDGDMELAGNWSKENLQPDNAIEKKIPFSEKKFKPAAEICISNESNVNPQDNGENVSRVCQRSSQQPLPSQAWRPRRKKWFCGLDPVSPCCVQPKDLVPCVPAVPAVAERDKCIAWAVSSEGASPKPWQPPHGVEPASAQKSRTRVWELPPRFQKMYGNAWMPWLKYAAGVQLSWTTSARAVWKENVGWEPPHRVPTGALPKGAVKRGTPSSRPQDGRSNYSLHCVPGKATDTQCQHVKAARREVVFCKATGVELSKTMGTNLLHQRDLDVRNGVKGDHSAALRFDCPARFRTCMGPIGPLFWPTSPIWNDCIYPMPVLPLYLGSN

SEQ ID NO: 931248 - protein, 128 aa, Homo sapiens [sequence omitted]

SEQ ID NO: 931249 - protein, 218 aa, Homo sapiens
MHTETKDESLKVEDNESRVGQSDAMCEGFKPLLFEDGNLVEGCGQSLEVALKRIWWKSVEEDPGCGSRKNLVEGCGESLEVASHENLVEGCGESLEVSWELGTYGTHQLDSFAGFRSCSCSSHDAQRDVGSKASLLGLKRPSNSPAPAVTMTTASCFPEHPPTPAFVWLLTSLLPPEAVVAVLTSCWNCTQPSGGDAQNITIPWILSKHKAAWSRSGV

SEQ ID NO: 931250 - protein, 155 aa, Homo sapiens
MCFHNGVPGSQEKDFLLLHLSPLWGGNISGQPQQTSYWMTGSLLAFSPGKGSVWVPLFGPFLRATVLFPEHNQAAPQDGGGNGCNVCFESCELKPVDFPQPSRTHLPKQQTLEPRADTSVLVLRAHLEGTSDKLHSLQTLSPWSLELTCQSLCFV

SEQ ID NO: 931251 - protein, 136 aa, Homo sapiens
MCKLIHFLPKEPSPGKMKLLGRDHLQEPTGGQPLCMCDQTSNYKHGAWCKLLVDLAFWGLEDGGPLLTAPLGSAPGEMQPPLDRKTPDSFKKEKPRSPKSLTPAAWEQHEPSAVTLSPPAAASIQKSISGSVLTGT

SEQ ID NO: 931252 - protein, 232 aa, Homo sapiens
MIYDLFRKRKVISFGGCIAQIFFIHVIGGVEMVLLIAMAFDRYVALCKPLHYLTIMSPRMCLSFLAVAWTLGVSHSLFQLAFLVNLAFCGPNVLDSFYCDLPRLLRLACTDTYRLQFMVTVNSGFICVGTFFILLISYIFILFTVWKHSSGGSSKALSTLSAHSTVVLLFFGPPMFVYTWPHPNSQMDKFLAIFDAVLTPFLNPVVYTFRNKEMKAAIKRVCKQLVIYKKIS

SEQ ID NO: 931253 - protein, 177 aa, Homo sapiens
MGLPGPAPPSVFSGDTSPLPPTVPDCLRADVRVPPSESQKCSFYLADKNITHGFLYPPEMWDYFHSVLLIKHATERNGVNVVSGPIFDYNYDGHFDAPDEITKHLANTDVPIPTHYFVVLTSCKNKSHTPENCPGWLDVLPFIIPHRPTNVESCPINENVAISPSDFHYSTSFYMHS

SEQ ID NO: 931254 - protein, 777 aa, Homo sapiens
MEEPGATPQPYLGLVLEELGRVVAALPESMRPDENPYGFPSELVVCAAVIGFFVVLLFLWRSFRSVRSRLYVGREQKLGATLSGLIEEKCKLLEKFSLIQKEYEGYEVESSLEDASFEKAAAEEARSLEATCEKLSRSNSELEDEILCLEKDLKEEKSKHSQQDELMADISKSIQSLEDESKSLKSQIAEAKIICKTFKMSEERRAIAIKDALNENSQLQTSHKQLFQQEAEVWKGQVSELNKQKITFEDSKVHAEQVLNDKENHIKTLTGHLPMMKDQAAVLEEDTTDDDNLELKVNSQWENGANLDDPPKGALKKLIHAAKLNVSLKSLEGERNHIIIQLSEVDKTKEELTEHIKNLQTQQASLQSENIYFESENQKLQQKLKIMTEFYQENEMKLYRKLTVEENYRIEEEEKLSRVEEKISHATEELETYRKLAKDLEEELERTVHFYQKQVISYEKRGHDNWLAARTAERNLSDLRKENAHNKQKLTERELKFELLEKDPNALDVSNTAFGREHSPCSPSPLGRPSSETRAFPSPQTLLEDPLRLSPVLPGGGGRGPSSPGNPLDHQITNERGEPSYDRLIDPHRAPSDTGSLSSPVEQDRRMMFPPPGQSYPDSTLPPQREDRFYSNSERLSGPAEPRSFKMTSLDKMDRSMPSEMESSRNDAKDDLGNLNVPDSSLPAENEATGPGLIPPPLAPISGPLFPVDTRGPFMRRGPPFPPPPPGTMFGASRGYFPPRDFPGPPHAPFAMRNIYPPRGLPPYLHPRPGFYPNPTF

SEQ ID NO: 931255 - protein, 224 aa, Homo sapiens
MESTEWNGMEWKGMNGMEWNGMEWNGMESTRVEWNGLEWNRMEWNGMEWNATESTRVEWNGKEWNEMEWKGMEWNQPEWNGMEWKGTNGMECNGMEWNGMEWNGMEWKGMEWNGMVWNQPEWNGMDWNGIVWMEWNGKESTRSVWNGMEWNGMEWNGIKPSGMQWNEMEWNGMEWNGMEWNGTERNRIEWNGINPSGKEWNGMEWNGMEWNGMEWNGMDWYGME

SEQ ID NO: 931256 - protein, 162 aa, Homo sapiens
MALITLQRVIATINYMVDLLGVMGGIYPGQTNPHQVLHAERCRPPLAFGLRGQVKPHANATAPMFCPLRGTGSSDTPAAMSTPNAQIWLLNIILHNNELRLFGEMADTRTGEEKVKELRIREVPVKTTLEVFLYLGKSMLFILFGSENNDYSELFILLLNAG

SEQ ID NO: 931257 - protein, 147 aa, Homo sapiens
MPFRDSNYKSTSSSPRTDFPNGPLNPINHNQSYRAQISETLILGVAELQYKLNSQPHGTSSVQVRALIGKNLDPEYWNGTNGQILMKAYPTIFLASISITRLKSQPQKVRYKVTHETGYCAPKELNDFSNLYKQKSQECVWGWILRA

SEQ ID NO: 931258 - protein, 138 aa, Homo sapiens
MLEQTPWCWTGIEGIGKDLELLGEVAKSRTGTGKPKMRLEHSIVLACEKVPSSQNGGDMPDGHRSQSGGTLTGRTWDNMIKKKKEEDKKWDMEIRIKAKQCSKASQAFRNSDFVKIYLNLLVGSDPLGHLFRLYYVAM

SEQ ID NO: 931259 - protein, 161 aa, Homo sapiens
MLTGVGARQKAPRKSAASAALPPPPPPPPPPPPTPSSPSPPPPQDCGLPPGLPLEDTSPFAGNSLTKQKCRNVARRIPDPASGKRLTKGGRRNCPQWQVLNHPVSSSYCLASGVCNTEIRGVEDQPGGSEVKLPTKVALTVPQLVTTSEDFFLTLAPTFLY

SEQ ID NO: 931260 - protein, 143 aa, Homo sapiens
MVFSLACFLSTLLICLDLCVLTGFKESFENIKTELCLKMFLQHCLQNIHALSDEYLNISQSEWLSFLSSLICITMTKCGLLISFSHNGSPCSDPHTSTNLGHSWNVVSVACLSQQHDLRLGEPSWQVTCCVIPSLVIKQCPVK

SEQ ID NO: 931261 - protein, 140 aa, Homo sapiens
MYNYIVMQTTGRFAEIFIIISYSNEAHPPLDTQFPVLLIGSFWWVLGLADFKNEAVDPRGELLQFLKMVCPEFVPSDVQMCPEFLPSSGFVVSFTSGVKPQTFAVSVTALKGSASGVVCSSPWVGGFVVSLTSGMKPQTL

SEQ ID NO: 931262 - protein, 157 aa, Homo sapiens
MSVSRFCFCESQALAFCCRFIFKSPQLKTTKCSLMDVWLNKLAQPYHEILFSNKWEKGRGKEDLPCYCVFTDQGCGRGHKVCSIMCGPLFPVFFVESTGLGMLDYYNPSPLLIDVFFHMHLSLAKITRKPVGMGAWKMECPEHTANRGSGELKLCTR

SEQ ID NO: 931263 - protein, 156 aa, Homo sapiens
MEPPAVGEEGDFLGAQVFVASGAILLWGSQCFQARSLDIVEYSLPCLLGACCETLLEMSSLFQRSGSGQMFNQLQEALRNKFVRNFVENQLHIDVDKLTEKLQTYEKSIASTGDDSSACVSALKTSFQWDKRWRWKKVILMIMTLCRPRLMCGFVS

SEQ ID NO: 931264 - protein, 229 aa, Homo sapiens
MSVFYSSMNSEDLGAGKPVEEGSKHERQRQLSVGTDAAMSGDKCPQDGSGRIHIHFQIHLHNLHYMSGGLLDEMFNHAGAGRFRFLGSILVNLSSCVALNRFQALQSVDILETKAHELLQQNSFLASIIFSNSLFDKNFRSESVKLPPHVSYTIRTNVLYSVRTDVVKNPSWKFHPQNLPADGFKYNYVFAPLQDMIERAIILVQTGQEALEPAAQTQAAPYPCHTSDL

SEQ ID NO: 931265 - protein, 549 aa, Homo sapiens
MFQNNTLQPPIWRGLAEQGQDSIIKVGIFEKLFMTYQIKSQNANLLNGHSLLKLLIWQEPAGSTGWVAACPHVHLMIFRVLALTVSDTCQNSKSRLADICCRMRHDGAEGMAQQMTCAEEFHRVGLLKDHLCLESIRQCGVALCIVLGFSILSASIGSSVVRDRVIGAKRLQHISGLGYRMYWFTNFLYDMLFYLVSVCLCVAVIVAFQLTAFTFRKNLAATALLLSLFGYATLPWMYLMSRIFSSSDVAFISYVSLNFIFGLCTMLITIMPRLLAIISKAKNLQNIYDVLKWVFTIFPQFCLGQGLVELCYNQIKYDLTHNFGIDSYVSPFEMNFLGWIFVQLASQGTVLLLLRVLLHWDLLRWPRGHSTLQGTVKSSKDTDVEKEEKRVFEGRTNGDILVLYNLSKHYRRFFQNIIAVQDISLGIPKGECFGLLGVNGAGKSTTFKMLNGEVSLTSGHAIIRTPMGHPAELPGSRMVLGSVCKESCDVIHLQVFQPWIPAPAQVEALGLYNQQVEKPAMFVSFPSGEEPLSVATITTGSQGVLQGQR

SEQ ID NO: 931266 - protein, 116 aa, Homo sapiens
MMREREGARNGTWIGSRNWPSPESESERGLRDPQPEDLRRFHSLAPRPTCCLCYAYPGSFSCYGDSVGNSSARRGMLLLETAGVLEERCETSGKIWLQNILELCPHKPRVIAPTKR

SEQ ID NO: 931267 - protein, 134 aa, Homo sapiens
MSTLPKISTWLLLARLAISPYCHCVTVIYLPLQKPFFGYLRRVICVGCTSGLSALWLKTVGPKSNDCVIRRGYLKTQGHMTMEAEVGVMQLQAKEGQGLLAATRCKERGVGWFQKEPTLLTPWLWIAGFLKICL

SEQ ID NO: 931268 - protein, 195 aa, Homo sapiens
MQYFLPGRRFPNVKDSIRRGWYNFRSNLFQRQRLKIDNSPGFFSSYWGMGAGLPLRLASCQQMTSPFMFGAEHSFESAYTSRRRPGVNGMTSLRQSARWASDAFSNLVIILPTPPAPKGGSQRVPGEKEAGPGILDRVPLGSGEGAGAGANKIDAINGSVYTGEQGERENDKAEDEGMRRKRGRGKREWKEGKAT

SEQ ID NO: 931269 - protein, 181 aa, Homo sapiens
MTTPSQPAEKAAARGPPAGLRGGARGKGARDSPPRRAPARPARAVGLRAAGLREEPAIPPAAESDRGAAKSRRAAALPSALTPGAPGPPSGGRTRGWGAPPGGSPAGGRPAKAALGRALLALTEPRARGPISARREGRGIWNCAALTAKADCLVCAAGRAARAVAPHLEPRPDGPAGGWPG

SEQ ID NO: 931270 - protein, 130 aa, Homo sapiens [sequence omitted]

SEQ ID NO: 931271 - protein, 203 aa, Homo sapiens
MIHFKLIFAYVPGQGPNLHWLPQNSPWNRDDPSPAPCCGCPSFLGQFLLAEYSLIPGAGNALSVMSASRSYPYLLEAEHKPHSTQAPGGNVPRTQKEADPEMAGIVNWTVATAWGKAVKPGPAPRTTKLFSSSVNKWSPAAPCSALGLCAAVGLKTPETSPSPHNRTITLGSRDQGHLGKDREMWCECVCGAGDGMHEPAECM

SEQ ID NO: 931272 - protein, 136 aa, Homo sapiens
MNYPSPGDQAWIPGKGPGQITVTAALVEHLLGKEGTALSTFHAFAHPIPTTSLWRGSQFPTLWDPGNSAGGCRARGEQLGFGEGLLGPGSTPHSQCEPPGYISQFCGAGLLNVEDAWRKKLSALEHLLYSSSGPGV

SEQ ID NO: 931273 - protein, 160 aa, Homo sapiens
MPDPSFHARTSQAALSQPQRGSCAYFSLMKPLEMSELQPTKLGTIQLNPFIQPGRKWGFREGVRDALQVTQLIGCAARNELQASGAQIQLSLTLGGNVLQTLKATNLEQAAKGGMESLAANSSFNYSTDVYYLPGRCWGLGKALGLQKGETQFCPSGHKV

SEQ ID NO: 931274 - protein, 145 aa, Homo sapiens
MLRARWLGRRTQTLAPVFPDSTFSNPAISEEGELAVWLRTSCSAWKLSLSIPRPASSPLHLPFISQTSLSPGLRPGGEGLWAALGRVLPCKTWRRQAQAVLLDFPSLVVPRRGVVVLGEGRGPWDPPPSPLPLKVMVINLLAEGN

SEQ ID NO: 931275 - protein, 135 aa, Homo sapiens
MAGGPGEDVQARACLCGGNRTELLPRARCRLLLSLCSPEGWGRQADNGPHGPASWPWPLELGRQPLAKAAASIGPSRSPRPACWVALITGQQVLRLASHCVGKHAASLLLEAKTCSNWARQERVLKKPNPQIHTL

SEQ ID NO: 931276 - protein, 148 aa, Homo sapiens
MGIMNSFVNDIFERIAGEASRLAHYNKRSTITSREIQTAVRLLLPGELAKHAVSEGTKAVTKYTSSKQQDSLKLEQRNENSRCYIQTLLSVIGPSWVKEYEKHRGQEGLSDFSQLFSPETGHRTLMSPRESERNLNKKTLLGFCFTLS

SEQ ID NO: 931277 - protein, 137 aa, Homo sapiens
MRRPLVFGSPTKCIKYRMHVKNPLLGSSTALESFPLLLFLTSCLSSPSLCPSHPSHPPLPLVPATLSPLNCGTNTVPHFLPMSVLPTVLSSSANVTQVVSFLHLQWLGFGLPFCCMFSICLVSFCFYSSFPTFLCVK

SEQ ID NO: 931278 - protein, 141 aa, Homo sapiens
MGHGLGGKHGPIEERARRKKRGRWAPVLEKRDQIQSKKQRNVFFLKFFCCHFHCRSQLCSSRVPPLALHCSPLADRGRLLFSLQTAHPCPRSALPICCRSFQVHEYLELNPRKPSLRDSAPSRETHSSFPSGPLTDLQQRA

SEQ ID NO: 931279 - protein, 140 aa, Homo sapiens
MKCGASVRRQCSLSLIAQLRIPTWEDQHSHIKTEIPFREKHFLVTLISQERTMPLSKIYLFHISNLDLLVQVFYYFLWKMLIATHELHVGFVSPTPVDLRRNPDFCVLNKRHSCFSERLCQEPFEITVLRIGLRENSEKF

SEQ ID NO: 931280 - protein, 166 aa, Homo sapiens
MVHTRGAVISLMEQFCLHNGHLTMFTAYLLRADGRGPGFFASAWSLESLEGEEIAPPTSTCRGGRGAAAPDNAGRTPSGGCLGPSGVLGVLNKELDKTHKQSKERMKGFIENESILHSVGVGLSTGAQRPRYRVFVSLNIIYLGEIYKKKEEEEERKGWMAEDRQW

SEQ ID NO: 931281 - protein, 150 aa, Homo sapiens
MWQGDTSVLEVWIRHQDLSTDLGPFTVKEVAVGKQMSLENSTDHKQFRDETLNVASSVKLEKAFLNTHCYGGLTFSFRGSAGLTAGLEEIPVSSNDNHYFAKLVQSYNLDIDNDTAKLQNISITPWIHHVSLDNYTYLTPQPLYMTTTKL

SEQ ID NO: 931282 - protein, 141 aa, Homo sapiens
MAQGKAQWLLILCKEGGEREQGESHKGKTRAAKMSSLGYSGTEKGTSQQRRTCLPTFIMSAPEVDSRSLSAELVPTTLHAAEHILRKHCSMNDDRGERKGRKDSGDVVQEGSTLFAGESAMAVAGRLLLTIGYLSDLMGEG

SEQ ID NO: 931283 - protein, 148 aa, Homo sapiens
MRKLSQFFQIHKCHVPFVLRPRRSSKDPNNYQTSQRTLWARVRRQSIALFPLQFAVINFMEESTSHRGQDTVGTARLSSTDIPECKKHRRCQQEKEAGIQTKRHKPDKELENAGEPAGTLGRQIPGRTRLRAELLRYCLGQSSTSLRV

SEQ ID NO: 931284 - protein, 173 aa, Homo sapiens
MPRQLPQEFPNFFPQVRTHTCRCLCLYVYIHVCIHICILVYIHARMLACMFRWVNTHVHTCMQTCEHMSICTYIYTNTCMHTVYTIHGYTYIHAHTPTCICTCMCTYLYTLTHARTCIYMYTYTYECAATCVHACTCMYAYAYVSANTHIHTHIHTVYMHVYINMHACIHMYV

SEQ ID NO: 931285 - protein, 141 aa, Homo sapiens
MERYSLPTLNYSNYSKTSNLSPTGLKRRMRDKEKSCLAASAVYRLKKIHPAEPSLDQLTSPISLYEINAYCYVTLSFEDSLLCNNLNYHSPTTEDGNLDLPQPSSFIFNCSLNSPEDKSHITGMTEWEARKNLVFTISWNP

SEQ ID NO: 931286 - protein, 184 aa, Homo sapiens
MKEQTPDLSPLRTAHCEDSSRQTHTRLDVKTNTLAEEHTSTWMWRGCREHADRYRQACRPSTDRPNDLEFGQGGLTTLKLSHERVVTDLSNQAVRDRGCMHRWEVEWLKLLSRCFCALLTEKAEVKPASLGIPCYTGNSTMAASSMKPSLMLSLFAERLGPPREVFTGFIMWVLHLNYQHSDNQ

SEQ ID NO: 931287 - protein, 137 aa, Homo sapiens
MNIGLVWKGGTTPSGGRGLPGHRREKLYYPSNEITLLKCEKQIGLGKPEHSLMCQFPLPRKPNHAEHENIHFLTTPFKKRDLRKAIHNQASPGLQFPHKFQTWKARTECYRILFQDLPMLSMHVSLSAKPAPIVISW

SEQ ID NO: 931288 - protein, 261 aa, Homo sapiens
METSSSSHDNYDSFASDNFANTRLQSVQEGCWTSSQCRHSGLLRQAMKFPGRNTRGAANKKAEYPKPSRNSMTGSNSDSEDEILEASLVCSPEDIPRQAPTHNQGDPKVRILGSLGALPTEEKEEKTEAKYMLVRKRKIVDGYMNEVEMLRNRPARSPMILPHIIRPPEEITEEGLENICSNSQEKIYNRSLGSICHQCRQKTIVIKQTAETQTVGAFKACSAAPTLETLVVKRSGILCWMRTGIVRLVEAVQLQFPLAAR

SEQ ID NO: 931289 - protein, 194 aa, Homo sapiens
MDMMVFYLEPNGFLHCPMFCGASSLVAENRRVSLELPRKSTEENMWPIWGSNPRPWRFWHQRGPCYYISAAACLPGLSGDLGASGFLGQADVELCLQAPTGTTCLKSSGYKPQATSRYPSPEEIGTPSPRGSMGIFWVIAIWHSLGDCEWMNGTRPEPEFPTASPLSPCLKPSLSFPTTEDKKAFVHHFKQLTF

SEQ ID NO: 931290 - protein, 178 aa, Homo sapiens
MEETCSKWIIKQRRQLAISTMHFGPGTANERTVQWWFQKFCKVSSSFILRNKEPFLHRIVTCDEKWILYDNWRRLVQWLDREEAPKHFPKPNLYQKKVIFAVWWSAACLIHCSFPNTRETITSEKYAQQLNEIHRKLQCLQPALVNRKGPILHNNVDSTARRTNNASEVERIGLRRFS

SEQ ID NO: 931291 - protein, 156 aa, Homo sapiens
MQTMNQIRILSRTPVYVHAGKHPSFTPYPPGASLSGTLPCFGGSQVHSSEPLNKAPATLIPDVFVAIGTIKGNDRGETGDAWSGTLGLEAETLLTEIPKSLSLNKASRRQFALGREQRPLHPNLAPFKGRDLLLFRTLPTTCREKHLIEQYSAFES

SEQ ID NO: 931292 - protein, 145 aa, Homo sapiens
MTLERSPTLQPNMIPSVSQLLRVSPASPSPEGAGSLISGNASCLVSFCQNVRIRGPPRELKFSTVTYANGQSILCVVVAEWLRRWTRNPLGFPRAGIYFSKVNILIHTEKEIPGNPGSNTSESKDSDMVAKMGITWALLSKQLSN

SEQ ID NO: 931293 - protein, 134 aa, Homo sapiens
MSSFALGGNEHTTKAIKCLWKTGGEGPKLDLRNPAIAKIAVQHLLKSLLPVAPICPYLGMLLAGASRTDHGPSLLASPKGIPAEDYGKSFFVIFFVWNDGKHEKRAILALLMIALSSEAQIFLGCLHPLFTALQ

SEQ ID NO: 931294 - protein, 152 aa, Homo sapiens
MISNSAAGLRPNGTENIPGFCKCGVFLCRLTIRTVISPPEVILTCFISLHSSNEPSYCLKPEAASHSSPGQMPPHPFLTEVIVGLKKPHYNYRFYDAYLMDCKLPDSRHHILFNIVSQSLAEYEPWSLLSNSFLNEAQLKKYNQAGHGGSSL

SEQ ID NO: 931295 - protein, 171 aa, Homo sapiens
MAVIPDTGWQTGRAQTKIEQSSNKVGLKIEAPEMRLLSGYMSQSQTFCNELEKNIKTEGGALGVNTALTFVTCCTNKEWLLCQFSLKRCLTSWLCEFEYSFQAGSGRVLGNPERQPRDAGLRMQARCRRGWEGRQERCGYRETRRGRGRRRAPLLRVLALKATTGQRGGAR

SEQ ID NO: 931296 - protein, 193 aa, Homo sapiens
MFFILLVLKRATVHWGKENDQTFWGLLDIGSELMLIPGDPNRHCGPPVKVGAYGGQVINGVLAQIRLTVGPWTHLMVISPVPECIIGIDTLSSWQNPHIGSMTGRVRAAMVGKTKWKPLELPLSRKIVNLKHSVIKGKLATPDLSQFIDSEPFEWSGSRVFLRKDLETPDHCGTPVRVGAYRSQVTSEVLAQV

SEQ ID NO: 931297 - protein, 180 aa, Homo sapiens
MAVSRASRLGLSPSWILSLEFWYFWFCYVECIRKGKKRRKYDNGCYSSFSRVVVLTFTSPWKDPPSETGRKYLPDSSHSPLYFSLGNLFHRTPPQLKEPMLSQEKDRYGALTNLSLYADVTQVLHLANSAFLICDSSSSSNNNNNKNNKPNQTTTTKNQYDTDTKTNIETNGTEERAGEV

SEQ ID NO: 931298 - protein, 144 aa, Homo sapiens
MQTRGTLPPVNTSGAGGTQPTMQEGGAGNALNDAPGSIISKLPFLPRNSHSGGTRTCKTELLGLLAFVTEQKQAAFFQIPPYNFTLHINTTHSLCLEVVVGLPDQSGESLCLLFPLLSILSSMGARNREPLLTLRSCELVVAGS

SEQ ID NO: 931299 - protein, 141 aa, Homo sapiens
MGLWGCSQFDACSWTACLVQIECNSLQVGVGFRDFRFLNGHTDTLEVVFEDRMLPLVDDNSSQRQTNKKTTTQDPENSKSESLTTILQDRLSDERAHPAHFEQPIYPVVRRSLPGFLTGGTNPIHEDAILMTYSPPKGPTS

SEQ ID NO: 931300 - protein, 134 aa, Homo sapiens
MKHASLDWTNLNYNTPDPTKSATAPKKGKKRKRSRKESCSVYLYKVLKQVHQHRHLVQSNGDLEHLRYAIFERIAGEASRLARYNKRSTITSREIQTAVRLSRMLCPRAPKPVEIRRPTPKTNDHFRRSRFWFL

SEQ ID NO: 931301 - protein, 213 aa, Homo sapiens
MACLDVRAVEMLAFAFAVLIVLLPLTLILVSYGYIAAAVLSIKSAARQWKAFHTCSSHLTVVSLFYGSIIYMYMQPGNSSSQDQGKFLTLFYNLVTPMLNLLIYTLRNKEVKGALKKSPDCLNQGSPTPGPWTSTSPWPVRNWAAQQEEHIVKFQVNSNPLVLGTYYDFKEIRDLQTTVFLLYPHMVENRKDEQHVISVLIKAQIPFMTAPQS

SEQ ID NO: 931302 - protein, 213 aa, Homo sapiens
MPHRTNRKRAIHTELVAQQQVIREMKPTGADPRILSLAAEVAKSPEWNVPVILLKLKAIAVQAWSQEKMQRNFPMNYFHQLQKIFYPVIRSTAAKLLLLMAESYQEILILLRQSACYKGLRSLLSKQETGTEFSQELRQLIGLLSPTVYQEVEKQKLHQAACLIQAYWKGFQTRKRLKKLPSAVIALQRSFRSKRAKMLLEINRKKEEEDLRL

SEQ ID NO: 931303 - protein, 431 aa, Homo sapiens
MLGMKQEFCEVTEPHREEFDGCNETVSQHAKHRRDSEPNGNLEMHDGDATGEKIYKCDECGKTFTWIRGLQMHRRIHNGEEPYPCTECGKAFITHAELTQHQGLHSKKKTHKCKECGKSFSQKAGLFQHLKIHTGEKPHQCSKCGRCFSWRSVLRKHQSLHTGEKPFECMDCGKAFCHSSHLIEHQQFHNKEKPYACNECGKAFRQCSPLTEYQRIHSEEKPYECKVCGKAFTQYAGLNQHQRIHTGEKPFQCPSMFRLNKHKLGGKHGNPPEPRKYKCDECVKTFTLSTGLRKHKRIHTGDKTYQCPECGKALTRRQDLIEHQGIQNKVKLYQCQVCGKALSQKTGLSCHLRIPPGEKPFECSECGPAFCWKSDLNKHKRVHSEGKLYKCEECGKAHRQRATLDQHQRSHIVPRPGSGVSGAKPAVEAQP

SEQ ID NO: 931304 - protein, 149 aa, Homo sapiens
MVPSLSNCCLFTRVGVDQSMINQQQDSERKKVFLCLAQDWLSPVATDTGKGLWGPSFPNINPKAVKRSLLSEQLRSSLDISGGFRMTLLRAAARSEAGSWVYNQFYALPRGPSPGHNLCIHPNQLPLFAATRESGTNLSTHLLKDSFVS

SEQ ID NO: 931305 - protein, 171 aa, Homo sapiens
MLGASYAAVPLYRLYCQTTGLGGSAVSGHASDQIENMVPVKDRIIKINFDADVHASLQWNFRLQQTEIYVVPGDTALGFYRAKNPADKPLIGISTYNVVPFEAGQYFNKIQCFCFEEQRLNPQEEVDMPVFFYIDPEFAKDPRMINVDLITLSYTFFEAKEGHNLPVPGYN

SEQ ID NO: 931306 - protein, 138 aa, Homo sapiens
MAIRVILRSLLIKDKGKQKIDLLVPYKKGIEILVSTHTLLVFFATELGVWCSDSHLHSGGSYLEDRSVNPFPISGGQKSKLSITGLKSRCWQGYAPSGGSREEYVLTFSQPLVAARIPWLVVALLLSVSVWSHCLLLF

SEQ ID NO: 931307 - protein, 142 aa, Homo sapiens
MKCFVLKKSTNVGNYFLSYIVMVIFVKFQVDCNKGVTGTIYEYGALTLNGEEYIQFKQFAGKHVLFVNVTGIEERVQNTVEDSLGISLSLPLPGWSTKEYSWEWDWNWSVWLCHHGTLYEWGRGDAGIGGPRFIHVINGYIQ

SEQ ID NO: 931308 - protein, 135 aa, Homo sapiens
MSLLNGGGRPYPSLPILSLAGLSKKSLQPRVYISVTGRPELFPPAASWISFFFLRRKGWAGASSWLGLQRKPAASPALELAPLGLNPLTRSLPLACLALSHLTRHASPTRALSSTLPPPLRGPARPAARPLPCPL

SEQ ID NO: 931309 - protein, 186 aa, Homo sapiens
MWRTFVSSSGIVNAPISALSKQTTRLYQSAGRGWGPDKRIKAGCPSQQRQPTGVSSHSVEALFLLLFAINFVMADSLVYTAFIHSSEATSPPRGTNNSRSVALAVVTLVWRVCSFISEASEMMSPLEGGNNSRRPALRAVKLTAKVYGFTPQPGRPRIHQKEETPNTPKHQQEQTLDMLPLRTVIS

SEQ ID NO: 931310 - protein, 224 aa, Homo sapiens
MGQTEKLFQTGEDSVSVSDAPESCVIDCEEEAGIESQKGTESSHCKYVAELVMTRSMQNVDYNQLQEVIYPETLKLEEKGPKLAGPSESKPQWPTPLPAVQMPVTLQPQMQVRQVQTPEEYQIEKDKVSAMAMPIQIQYPQYQQVENKTQLPVAYQYWPPAELQYRPPPENQYGHPGMFPAPQGRALDPQPSTVRLNPTALPSGQHSALHKIIDKARKQGDTEA

SEQ ID NO: 931311 - protein, 162 aa, Homo sapiens
MARSSWPVLDGRCLFGAAWGDTTVDTIIKAASSILSGVCVSFVFSRHFVANCVSFFNCAQVSSFVFLVDGNFIYSSDITILFILERKVGPGDRRSAYGGPVPPVLVSEFPQYLLFTISTISEKGMWRDYRVMVGRGSAGKNVNKDLCVINKFKEKCCALMCT

SEQ ID NO: 931312 - protein, 254 aa, Homo sapiens
MFGALDVLQMNEEDVLKFLAARTHSGGTNLYFQMEQYIYKTRAIAAIENLADVSVISSRNTGQRAVLKFAAATGATPIAGCFTPGTFTSQIQAAFREPRLPVVTDPRVDHQPLMEASYVNLPTIALCNTDSPLCYVDIAIPCNNKGAHSVGVMWWMLVPEVRRISCTISREHPWEVMTDPCFYRDPEEIEKEKQAAAEKAVTNEEFQGEWTAPAPQFTATQPEVADRSEGLQVPSVPIQQLPTEDWSAQPDTED

SEQ ID NO: 931313 - protein, 154 aa, Homo sapiens
MFAIQKKILVSWSPPKPIRPLTDLGDPMFQKHPDKSGVIKDTLQKVRENLDRCQQERENNIPWYQSMFNWNPWLTTLVTRRESEDIPEDSILELRSRWTETDKESWLTAVLEIDDGCERIQGSFGPECLSPLDTASRQDSIQKFQKQELKHSGL

SEQ ID NO: 931314 - protein, 178 aa, Homo sapiens
MKSMLGFSHGAGPGAGEGKDRQRPTSWVFISKSWEFHLLTSSPGPKSPRRLGDRACEETIEKPKKKKKQKPQEIHQENGMEDPSISFSKPKKKKSFSKEELMSSDLEETAGSTSLPKRKKSSPKEETVNDTEESGHRSGSKKTRKFSKEELVSSGPEEAAGKSSSKKKKKFHKASQED

SEQ ID NO: 931315 - protein, 136 aa, Homo sapiens
MSVNSFKFVEAQGMRLGDRACEETIEKPKKKKKQKPQEIHQENGMEDPSISFSKPKKKKSFSKEELMSSDLEETAGSTSLPKRKKSSPKEETVNDTEESGHRSGSKKTRKFSKEELVSRTSGTMPLFLPQDIFLLV

SEQ ID NO: 931316 - protein, 174 aa, Homo sapiens
MPKSRALPPSIGTGHAETSESFAIPLLLSDDSGFLLTFLMGMTGPVSWTLHIGLQGIGGLVLPPRIHRDASGPGHLLVNARHPELQAEASAGAHLDVITHSRAQHNGPDGSRLSGRGAMQRPLACRALILRIFWLNHSYTTIIINIEDYCGQMCEGFSPHIKQQTPARCPPIQF

SEQ ID NO: 931317 - protein, 134 aa, Homo sapiens
MEQFHPTCMLPTTPGFPLQMPFPDSLFGLSDPVCDANCYEQNLGLDSENEKRRIKGNKMEERKLSTYFWVYFAEDTGCKVQVEEKVGMEPKRLIPDQKIEGSSPFVVVVLRSLVRKIFVDSEHFPFSCSGLAAN

SEQ ID NO: 931318 - protein, 149 aa, Homo sapiens
MEQGGPTGPHLQYWGLHLNEFPFPFLSLNRERSNDLTLVTHSLQSKIILICDETIKNKSDETEIESSKVHAQGYRKQGKRREMKGTLESFAGIHPFKQGACYKISAQLVCIGYIFWKSPSLKRWSKLPQIQAPSSAFLASQHSPRTPDP

SEQ ID NO: 931319 - protein, 136 aa, Homo sapiens
MLPFSAEPFSPPTALWEPLSGLAKAGVHFLSLQGGVDGEARAGTGAVCGACRPAGVPGGRGLGGPRTRSSQPALLAPGNRELSTWASGCGGCTGSPAVPAHQCSSHPLHGLLCGPSLPDEHHPLLHGAQSHGPPKG

SEQ ID NO: 931320 - protein, 164 aa, Homo sapiens
MAHSFTQQPLPASKPQDTDLHQHMGQHYLPNSVEKRTFHHWVMRVDSDSWLLNARHDWRPFIVLLEKSMKKLSHCGPRTWARNESGYSATPCKVPRFLTLQPRFYVLPLSTLNAFPPKIGSEYASLPDILAEPIIHDDYIVEGSANSHISVKGHNSQKETLCST

SEQ ID NO: 931321 - protein, 311 aa, Homo sapiens
MNDDGKVNASSEGYFILVGFSNWPHLEVVIFVVVLIFYLMTLIGNLFIIILSYLDSHLHTPMYFFLSNLSFLDLCYTTSSIPQLLVNLWGPEKTISYAGCMIQLYFVLALGTTECVLLVVMSYDRYAAVCRPLHYTVLMHPRFCHLLAVASWVSGFTNSALHSSFTFWVPLCGHRQVDHFFCEVPALLRLSCVDTHVNELTLMITSSIFVLIPLILILTSYGAIVRAVLRMQSTTGLQKVFGTCGAHLMAVSLFFIPAMCIYLQPPSGNSQDQGKFIALFYTVVTPSLNPLIYTLRNKVVRGAVKRLMGWE

SEQ ID NO: 931322 - protein, 272 aa, Homo sapiens [sequence omitted]

SEQ ID NO: 931323 - protein, 146 aa, Homo sapiens
MREKALLEGCRPAVFVSVELLWNLKGPDKTITFLGCVIQLYISLALGSTECVLLAVMAFDRYAAVCKPLHYTAVMNPQLCQALAGVAWLSGVGNTLIQGTVTLWLPRCGHRLLQHFFVSFWIWVWAWDSQMGMAPVGGTWVREGER

SEQ ID NO: 931324 - protein, 136 aa, Homo sapiens
MLNPSISSNHQASLLQVSWSLLEVHSRPCSPGYHQQRLPDSTDCCLFLPLEALFRRGTCWMPAGALLYEVSVDPCWEVSFSQEAWGDYFEHLYAQKLENLKEMAEFLETHYLSRFNQEDSKTLNRPIMSSEIESVI

SEQ ID NO: 931325 - protein, 321 aa, Homo sapiens
MVNLTSMSGFLLMGFSDERKLQILHALVFLVTYLLALTGNLLIITIITVDRRLHSPMYYFLKHLSLLDLCFISVTVPQSIANSLMGNGYISLVQCILQVFFFIALASSEVAILTVMSYDRYAAICQPLHYETIMDPRACRHAVIAVWIAGGLSGLMHAAINFSIPLCGKRVIHQFFCDVPQMLKLACSYEFINEIALAAFTTSAAFICLISIVLSYIRIFSTVLRIPSAEGRTKVFSTCLPHLFVATFFLSAAGFEFLRLPSDSSSTVDLVFSVFYTVIPPTLNPVIYSLRNDSMKAALRKMLSKEELPQRKMCLKAMFKL

SEQ ID NO: 931326 - protein, 150 aa, Homo sapiens
MKAEMVCLMVLTITSARGLLGCCGRDLVGSDWIMGVVSPFCSHDSEWILTRSDVFMTGSFFYTCTSSLACHPVRRVFASPSPSATIFENAKSSFKNKKFIPFATTWMNLESTMLSEISLSERLILHESTYDQKVHKCMVKKCFHLQKFYR

SEQ ID NO: 931327 - protein, 316 aa, Homo sapiens
MVNQSSPMGFLLLGFSEHPALERTLFVVVFTSYLLTLVGNTLIILLSVLYPRLHSPMYFFLSDLSFLDLCFTTSCVPQMLVNLWGPKKTISFLGCSVQLFIFLSLGTTECILLTVMAFDRYVAVCQPLHYATIIHPRLCWQLASVAWVMSLVQSIVQTPSTLHLPFCPHQQIDDFLCEVPSLIRLSCGDTSYNEIQLAVSSVIFVVVPLSLILASYGATAQAVLRINSATAWRKAFGTCSSHLTVVTLFYSSVIAVYLQPKNPYAQGRGKFFGLFYAVGTPSLNPLVYTLRNKEIKRALRRLLGKERDSRESWRAA

SEQ ID NO: 931328 - protein, 180 aa, Homo sapiens
MSHTGGEWLVDRQVVFSLTVLVALCGLVGNDVICWLLYSQVWSSPYVTYILNLATVDMVNLSCVTVILLEKILMLYHQAALQVAVFLDPVSYFSDTVGLCLLVAMSIESFLCALCPTWCCHRPEHTSAMVRWALALSLYAVSQVWGSAPPQRQGLPMHKAVKGIMSGKHAESSKEQGECS

SEQ ID NO: 931329 - protein, 202 aa, Homo sapiens
MLPDGITGLRGAVEGNVAELPPGAFSSLTMYCSRLIHPHTDFVEWVLMYPFEDEMPETLSVGSDGYCGTHQALEFSSLGAELGALCPRIVVENEETLEVWPKGLWNLPSLHQREAALETIDQAFSEPNILLLDWCYSSNGFTGHMDTGDEDVYIYKATLTTPNTIEDVEPQELCALLLQNAAAAECKMVQPPWKTVGNCSQS

SEQ ID NO: 931330 - protein, 216 aa, Homo sapiens
MAQFLSVFSGKLDWDNRTETPGQVNMSHTGGEWLVGKQVVFILTVLVAFCGLVGNGVVCWLFCFQVRSSPYVTYVLNLAAADMVNLSCVTVILLEKILMLYHQVTLQVAMFLEPVSYFSDTAGFIIFHMLICLVVGISSLTLIIRSLYCLKNCSPIRIYHIVRFVAISFLVWGLPLVVLVYLPGKEYLTFAFDLLLLLSMVVSMAQPAIYFLAGYL

SEQ ID NO: 931331 - protein, 169 aa, Homo sapiens [sequence omitted]

SEQ ID NO: 931332 - protein, 156 aa, Homo sapiens
MRFGALWMKEVHGRQTCLGKQQPQRFSPHGGQEWIKLERDTTEEKMFEQLKPIEPVQKTLPWVGEVAATLQEAMKRDCWREARVKKKPVTFEDVAVNFTQEEWDCLDASQRVLYQDVMSETFKNLTSVDVKGPYLGPTQRFLIPTHQPESFCISQS

SEQ ID NO: 931333 - protein, 149 aa, Homo sapiens
MVWGWMSPRYDPTVLAWRYLFPKAKIQSHSVVGGNKSIKKKDIHVSDKEKKCQQSSTEKGSYETTFSACGEDTSNGEKLPEALLRPSPGGCPSGYEALRFCHPVCPCDGILAQLGMARGQVIAGGLQAWGNFLKETGKGTSIPRCISFM

SEQ ID NO: 931334 - protein, 196 aa, Homo sapiens
MLCPCLCQSHWVPHILCTCIPTRLCTPLFCLPDLPSHRNLPSAPPGFLSPHQQNLLSLSQDVPASRSSSSNLGFPEDMTPSEVLPHGGVSPGTCTPGFRVLIVGTCEQVALRGKRDITHVMKIKDLKIGRFCWTLCVGPIKSQEPLKAESLPWLESDSAEEEGRGEAGEGRSEVPSRRIECALGTVCEYLREGSRS

SEQ ID NO: 931335 - protein, 141 aa, Homo sapiens
MNIPYHGASYLVRNQELRSWTAADKAAQMPWRRNRQSCSKPTCREGYRTFQKWAAVVVSSGEEQRYTCHVQHDGLPEPLTLRWLSSQPTIPIMGIVTVLVVLGAVFTRAVVTAVIWELACILPSHEAPSLSINTYSFVKNL

SEQ ID NO: 931336 - protein, 442 aa, Homo sapiens
MAPRTLLLLLSGTLALAETWAGSHSMRYFSTAVSWPGRGEPSFIAVGYVDDTQFVRVDSDAVSLRMKTRARWVEQEGPEYWDLQTLGAKAQAQTDRVNLRTLLRYYNQSEADHLLPAPCLTDGPGPLSLRVQDRPRGCGTCRDPRPGRAPGAFTWFHLQLRPKSPQVARVRARARWAGLTAGTGPGYHILQGMFGCDLGPDGRLLRGYEQYAYDGKDYIALNEDLRSWTAADTAAQITQRKYEAANVAEQRRAYLEGTCMEWLRRHLENGKETLQRAGITRSWVLGFYPAEITLTWQRDGEDQTQDMELVETRPTGDGTFQKWAVVVVPSGEEQRYTCHVQHKGLPKPLILRWEPSPQPTIPIVGIIAGLVLLGAVVTGAVVTAVMWRKKSSGPVITGTWMSPRVVPTHRSPSVEIGRLWQEYTEERASQAFNGGDIYEECR

SEQ ID NO: 931337 - protein, 117 aa, Homo sapiens
MGELGSGSFQVAEQVEVFGEFDFLKKIGEKMRRIVQETALEGQELGGSKNWSLDTTETPVCRGHPRACEDNDRKSNSYGCPRGDWRLGDQNSDTRRRTGIVFCQNKTMNKMGAEGQT

SEQ ID NO: 931338 - protein, 162 aa, Homo sapiens
MEGKVWCKIRKKCEPGFTQVWVKGPRYLLQDDAQAKVVNITMVALKLQDSGRYWCMRNTSGILYPLMGFQLDVSPDDTKQTPEWTAAWDPRYFIQDDRFYGVFTVTMTELRVEALGFHGCGISKSPEISIVRIICLVVSQEIFSFHLLITENWGHGEEKPLA

SEQ ID NO: 931339 - protein, 166 aa, Homo sapiens
MLRAAPSNRGAGAVPEELHKHPGQTLLLQCQYSPKRGPYQPKSWCQQTSPSRCTLLVTSSKPWTAVQKSHYTIWDKPNAGFFNITMIQLTQNDSGFYWCGIYNASENIITVLRNISLVVSPVLITSPEGTSGHPSINGSETRLQPWSPQAMTQNLVVRKGEEDAGC

SEQ ID NO: 931340 - protein, 324 aa, Homo sapiens
MLRGRVDLSWMVRTITSTRISGSETWIPTKWICWHLDFSHLGVGVLSVTAQFALLAALQINAFLSSAANLGVDVLALLCQTFRKALEQFPERIPSGTIRQIPQAAYKAVNYDKLKETTQGKEENPAQFMAYLATTLRRFTDTDPEGSKGCLILNMRFITQSAPDIIKKLQKLETGPQTPQQELINLAFKVYNNREEAARQQRISELQLLASAMRQNPATPPAHKNFKMPKLHKPKPHTPKPQQSSIPTGLPPTGSCFKCQKSGHWAKECPQPGIPPKPCPICAGTHWKSDCPALPAATSRAPKALAQGSLTDSFPDLLGLVVED

SEQ ID NO: 931341 - protein, 249 aa, Homo sapiens
MVPEGVVTASCCCQYMDTSLFLTNSLNPAHPSINFFINVSSFETKKGRKREKKYLNFDPSLEMTGRYLCLPHSCHRKTMMKTTCPQPAPCYVSIITTENLHHCLYHHHHLHHHIILITIIIVIFTITITINIIMIFTIIITIIITSIIIIIFTITITIITIVIFTVIITITITIIIIIFTITATIITVIITISITVTVETIITIATTFYSIITVFIITKNYTCTFAKGSTEKVNLPLSVGKLVIDDYNI

SEQ ID NO: 931342 - protein, 130 aa, Homo sapiens
MKRLLRSAPSKLASSQYLLSHMHYLSVEILPSRTGEGDSRYPPAWKWQELGCEAYRSLITNTAEASTGQLIQFGCLPPPNLMLKCNLQCWDPQCNPVSIGALPSAMIGSFLRPSPEAGASTMLLIQPAEP

SEQ ID NO: 931343 - protein, 144 aa, Homo sapiens
MSVRVKWGQDITSPGAGLSLWLPALMLPLCTCDPINCLFNYDTEEKPQTGLPYSRFAASVLHPGPYWAHILVSLPCDALKSLLKEYGPADTFISEFWPPDYERVNLCCFNPLSAWLFVMEAPGNKYTRLSTYLRRCPGFPHYTY

SEQ ID NO: 931344 - protein, 455 aa, Homo sapiens
MAFAVVDACPKYCVCQNLSESLGTLCPSKGLLFVPPDIDRRTVELRLGGNFIIHISRQDFANMTGLVDLTLSRNTISHIQPFSFLDLESLRSLHLDSNRLPSLGEDTLRGLVNLQHLIVNNNQLGGIADEAFEDFLLTLEDLDLSYNNLHGLPWDSVRRMVNLHQLSLDHNLLDHIAEGTFADLQKLARLDLTSNRLQKLPPDPIFARSQASALTATPFAPPLSFSFGGNPLHCNCELLWLRRLERDDDLETCGSPGGLKGRYFWHVREEEFVCEPPLITQHTHKLLVLEGQAATLKCKAIGDPSPLIHWVAPDDRLVGNSSRTAVYDNGTLDIFITTSQDSGAFTCIAANAAGEATAMVEVSIVQLPHLSNSTSRTAPPKSRLSDITGSSKTSRGGGGSGGGEPPKSPPERAVLVSEVTTTSALVKWSVSKSAPRVKMYQLQYNCSDDEVLIYR

SEQ ID NO: 931345 - protein, 144 aa, Homo sapiens
MEGNKHASGQDLAAALLGGSQGKWGDVLKAVSAVQSQLSGALKGTGQPNGAQEWASDASSKAGPKEDGPRAQTHAASSWEIQGFRTSHTFGNDLSKSQTPTAGCGPPGWVGGFLHIFVSPVPTQWRSHGRCQLDKELHEAQLEP

SEQ ID NO: 931346 - protein, 198 aa, Homo sapiens
MRFPENALQMCLLFPELPAQLVSVVSLMLLLLQLSQCPFPTCHPRPVPQSNESSSGQTDKATQEEICKKIGSRNSVLTSPLSEIYKTVVSMFQLVGVQVSEEQLRDTALNPGVYQGCCIQLHGLYTTQLQHNLSEAKEQKTSLIPTLDLQQVPAKHAAWQTQKMQPIFSLSSRPGSHHWKPQCLFSAPTAQTTYNKRQ

SEQ ID NO: 931347 - protein, 145 aa, Homo sapiens
MYQKAWVPRRNPAAGAEPSWKDSSKTMLSRHMGLDPSQKLYCQGRNISARGHNCDSIKLEVWTVTWSLWARHITESTSKEWDDMMSPERPDDSPNFQLNGITVVSPGRNIPPLAIGLKVMGTGSKSFASDSLGIIAREDTLISTP

SEQ ID NO: 931348 - protein, 146 aa, Homo sapiens
MHGKSHHLSCLIGYGLSSNRPSLLSGDLKSSGNGHQLSSALRGGCTVTGMAGIWHLYSSLALGDRAQQQLSSGIMCLQADCDAPAVTQPGLNNFDHNARQSGPTFKYHHNDEMFSTYTFGGGHKYLVYSTAHSLRERSNFPSLYII

SEQ ID NO: 931349 - protein, 135 aa, Homo sapiens
MATGPSRQLAAQPFGYYVLYQYEARYYQWTAGWLWLSKCKDCLVMSHLCTSPGQALGPVPLVQKGASGGPVDLCLHPIHNGRQNDLSLTRQDDSQVFVEPGLCIDSPSCLPSKSKVRAAACKLVKDLEVSMMFSM

SEQ ID NO: 931350 - protein, 143 aa, Homo sapiens
MWVRWDKLYTAVVDSSLNSHTFHGGASHQQHFIWSILLGLQLIIRVLVSKQPARRLMAVKPKDCTYLTVSSSFTPMLLWHFSLEEKHGKFLPCKISKGLCLDPIVGTTLTLIRAIGKALFQLKHPGQGDEFDGCCETLVVLSL

SEQ ID NO: 931351 - protein, 173 aa, Homo sapiens
MWKQLWNWATGRSWNSLEGSEEDRKIWESLELRDLLNGFDQNPDSDMDNDVQAEVVSDGDEELVGNWSKGDSCYVLVKRLAAFCPCPTDLWNVELERDDLGYLVEEISKQQNIQKESHRKADPGQVHVAVDSRQDPVSPESGAEQATCDGKGEEWGKQKKYCGTWSRKLPRKG

SEQ ID NO: 931352 - protein, 152 aa, Homo sapiens
MRLNPSPTGPAPELAPCFFSPTSLPSLPLPYGIGTSDWPTAFSLTLSSSARRLGVYPGPTMRPLEDKALLCSPPTLLADETSGEDNECGRGCQIPHNSLSPLGKKSFPTEVGFKAQQADSRAWTAGDNLAAVMPMTKVGNESGEAFLKRRTW

SEQ ID NO: 931353 - protein, 182 aa, Homo sapiens
MSPPLDSIPGLCRSTIHDTPRCSPAPCTSAIISRWHTICELPVYLFVSLSICSYEHVISNNSILSINANKSSNPKKGLADNLLRRPFQCHPLHPSGLCLHSHVTRGGRGLECLLGGNENHSAKPWTAEDVCKCLFLPSFSATFLPELTVNGQLGGKDHSRAHGTVAAATPGRTYNALSNHWD

SEQ ID NO: 931354 - protein, 167 aa, Homo sapiens
MLPSPSKTSPHPNKVPSGKAPGPCEVGLAQNHFRDPQMASEDSRSSRIPEKVGSITPPPDRAVPKPQGGQKPAGHRICHDKCLPGGAYMDTRWLSRSRQKEAEMRGQLQLNPWSTDNNFAQTSSANSAQSWLDLGTWPAPAARELGKGSLHKLLEPSFLHVRKARNA

SEQ ID NO: 931355 - protein, 135 aa, Homo sapiens
MSTIPVTYKRHEGRQEHPLGYGRGEPRQDGNTSGRRGDTVSLEASGNSGSRYEDLNWSLISRGRRRTMESGITQVKGRESNDMVALRSQVLSPTQSGGQSHLEHFPGQVSPEPPGDYCEPKNMSFVGRRLQGPWE

SEQ ID NO: 931356 - protein, 128 aa, Homo sapiens
MRGLCPYLQDDKSVGVSGTGNSASSDITEKEVTRGGFAIGSLKNGTCWAKPHIHLRPGLEERGMSELSNSLYVEPGELILSNLSVDLLAARFSWQKVDSWPTAEVSAFSQQQIFRLSGKGQPEGDGEH

SEQ ID NO: 931357 - protein, 136 aa, Homo sapiens
MENVATIADCASVIEGVSRSRNALLNGDTKNYDWDSGYTCHQLGSGAIVVQLAQPYMIGSIRKASLRRVKCEQIPKDGDSKSSGDEHHRQCQALEWSLPGRPQEQLGGQSYLHHSKVFFYHPQTSELWFPEKSYSK

SEQ ID NO: 931358 - protein, 217 aa, Homo sapiens
MDLVYGMERSVCVCTIKGNLREHTLCRMAQRSICMGRQQQDRKSASGYLSCPPGPLGSGPGVRQNLFTGFGQTSLIPLSLAPRGFPRQHPPEDHRLSPEAPQSSHMLAPGPEPPVGALCALWQSTERANGEAALSLQKLLVCREHQFQPSDSTSVWEGTWPSRGFMFQQLEMDAHKENLLGNRNNGNKLRFQMAARRPCMVHARYWAREEAVQGQPG

SEQ ID NO: 931359 - protein, 150 aa, Homo sapiens
MVTISPGKRLGPDAEMGVGDELGSLVLSVVRLQVHIQHADCHPGERDEEGRPSCGRDRPSSRETENTPTAAIFDLDCRSAAKHYFKIGADMPIFMFANFHGGNTLIVAIFKKKQVLVSSHEGGTGSKEHYVRQVDKEACPRANEAETGEK

SEQ ID NO: 931360 - protein, 159 aa, Homo sapiens
MAAGKRRSSLPRLGSQAEGLLTSQTMVPGTSWIVERLPASALLYSELQPCLPCSHHPDHPSTPSRCQLRRQLRRHLFMETLITAESLEVSDPVSTTMQETDDSIRRNRAATPLLQCEDTVRRLPSINQNAGPHQTSHLLVPGSLASRTVRNKFMLFISN

SEQ ID NO: 931361 - protein, 158 aa, Homo sapiens
MCTWDFILEDMDLAANEISIYDKLSETVDLVRQTGHQCGMSEKAIEKFIRQLLEKNEPQRPPPQYPLLIVVYKGTLITIQNNLPRTSRNSCSKASNNFDPWWTNDCEQNESEPIPANCTGCAQKHLKVMLLEDAPRKFERLHPLVIKEETSEQITNVT

SEQ ID NO: 931362 - protein, 172 aa, Homo sapiens
MAHRLLASYSTSTNPDPVLQPHYSPHEEVFAPLEDTATRTILEAETWPSPDTIPAGTLILNFSASRTVKVQRLKGNGVTQTSVYKRPWGCYSKCCHFARLLGRTSILLLTCSTTCNGSLLLPFPTRPHFMDDFPSSGPILKESGASCSESGFGLNCLVSHSHYASPQLGDDE

SEQ ID NO: 931363 - protein, 146 aa, Homo sapiens
MGFRHLGGWGPTTPSETVHPDMAPVVPTCLDPADFHECTYVSVPCGRGDSNDAQPPPCKHASQKSVTIPSKAVEELLTWTPKAEPGRLVSTADKGWLVGAKEPTSKLTLLVASGYQFLVNVDKSFSASSSGPLYWEPTFLAADFLQ

SEQ ID NO: 931364 - protein, 500 aa, Homo sapiens
MRKPRRKSRQNAEGRRSPSPYSLKCSPTRETLTYAQAQRIVEVDIDGRLHRISIYDPLKIITEDELTAQDITECNSNKENSEQPQFPGKSKKPSSKGKKKESCSKHASGTSFHLPQPSFRMVDSGIQPEAPPLPAAYYRYIEKPPEDLDAEVEYDMDEEDLAWLDMVNEKRRVDGHSLVSADTFELLVDRLEKESYLESRSSGAQQSLIDEDAFCCVCLDDECHNSNVILFCDICNLAVHQECYGVPYIPEGQWLCRCCLQSPSRPVDCILCPNKGGAFKQTSDGHWAHVVCAIWIPEVCFANTVFLEPIEGIDNIPPARWKLTCYICKQKGLGAAIQCHKVNCYTAFHVTCAQRAGLFMKIEPMRETSLNGTIFTVRKTAYCEAHSPPGAATARRKGDSPRSISETGDEEGLKEGDGEEEEEEEVEEEEQEAQGGVSGSLKGVPKKSKMSLKQKIKKEPEEAGQDTPSTLPMLAVPQIPSYREVPGTIGGMGAWQRSKR

SEQ ID NO: 931365 - protein, 138 aa, Homo sapiens
MEMQPSTLLSPLLLSYLRTCPSSDRMARTLAQSWWPLRLLEQGGWKAQGNSHGLVNHPWVVVPLHSEGQQEAFNSLDQELRIKAKMALGYSSGYSLTKEINPEMHIEPRYQQDVTPDSLRDMKTFFKNHLNQVIIHIQ

SEQ ID NO: 931366 - protein, 213 aa, Homo sapiens
MGVAAVPAEAKCLSYDECALMSHWLYWSHGFTGHKGFWEVDTAIVIIIIIIIIIIIPIFKRRRMGHREISPPWKTEPIRNVFQKVPSYCKENILEVLRVGKNNSCPGDGDGNGGDSGGGCDVLVMVVVVMVMVMVVVVVMVVMVVMVAVMVVVVVVMVVVVVVIGSSDGGCDGDGGGGGDDGVVVVVVLVMIVVIVMVVMMVMTEASPTEPQF

SEQ ID NO: 931367 - protein, 135 aa, Homo sapiens
MGSYIPVLKGLALSGVHEGIDKYTGNSTSVVSNASFWKLEKGLPCGGAGSRLLDPRYPARPTPQGRAGPTRECGQRPRTVSRPGVCVLLPAPRQPGPRPRLPPGPPPSAGEGGPAGAGPRRAEGAELGNGKETEP

SEQ ID NO: 931368 - protein, 133 aa, Homo sapiens
MSPHSWRWLLPSRQLQQGGVERDSTCSSQQRGGTGAVCADLGSGRVVRLVARVGLTLGVSRGCLAPPRGRGPLRRAYSAELLEGAGTRSVTVELRRAPGPALLSSGAPMALVAQCQQPASIFCLETPPSWQHD

SEQ ID NO: 931369 - protein, 298 aa, Homo sapiens
MSFTTRSTTFSTNYQSLDSMQPPRYSAQLNQKETNQGLNGCLASYLDRVRSLETENRRLESKIQEYLEKKGPQVRDWGHYFKTMEDLRAQIFANSVNNASIILQIDNPHLAADETELAMCQSGERHLSGLTVEVDAPKSQDLAKIMADIQAQYDKLSQKNREKLNQYCSHQTEESTTVVTTQSAKIRAAEMTLMKLRRTVQSLEINLDSPSGVLLHLELELAQTRAEEQRQAQEYKALLNIQVKLEAEMATYHHLLEDGKDFNLGMPWTAAIPCKRPPSNRPPSPRRQDSGWQSGVRD

SEQ ID NO: 931370 - protein, 134 aa, Homo sapiens
MLFGALQFLASPSFWAPPCSLVPTVEAACGTSGPAAAGSQCLCWRLERPASPQLVCPAVYAVAGPCACSLTHPLPLRTWLAFGRHGIQAGVKLRPGSDDSKRSLETQRSNTCDKSRGRGLCQGRETRWWLSLVA

SEQ ID NO: 931371 - protein, 128 aa, Homo sapiens
MNKGYSVFATGIMICPMPGEKEVLRCPRVCVIHGSCIIRDRGSCRHIFKAGVGTFYYGPSLGVIRDAYGTLDIPRVTKLLKLAEELAGGKIHDGALSFPFLGSSVYNGTKAALTKAHSIKDDTGTRYP

SEQ ID NO: 931372 - protein, 139 aa, Homo sapiens
MVCVFVCVCEWRAELKSHNTGAIKAARKQGIPQRSRSLLGLSACSVKQIASFVNATCPSSWRYPELPVIITELYEQTETNDIDIEKIWRKSVNPKVGFLRRSTKLANLFIIEKEEEETQIIKINNEKVVLLLIFQKVED

SEQ ID NO: 931373 - protein, 173 aa, Homo sapiens
MIDPAICLLKGKPHTGNTRHNAWCREEAGQLREKELGILTSVLEWVAKGGSEDRESVSWKREYGDCAAQGVTLQTELLWPPHIQDTSPMGTVVVTCMCQLAQAIECPDIWSMIRLGVLDMIDLDTGGLQAADSLPYVNGGLNGTKWWILSRAREFFLPDGLQTERSASSCLQT

SEQ ID NO: 931374 - protein, 199 aa, Homo sapiens
MDICQGFQVTAFIGFHLFLKEDRFSEWFEFHDNVGRPHGQLYKSYTRRNGLKGLNFQAKVLLYKNNDETLSLNKMAKAHFSLPHSAKSRISPGNKARVPEENSERWKEGSGLIWDQELKSNAIRGSYTPHPTDEGDRRWPRPREEDKKASYRLGENIANHISDKELVSRIYTFSKLNSKERDDSTTKCTEAVNIFLKSI

SEQ ID NO: 931375 - protein, 138 aa, Homo sapiens
MWLMVGSLLRHSTELSPRNVFGDCPVKGKPKNMCGQPHYSNINKYQVAVLEEENLISLSSSPRGILITPPDFPAAYGPAHTGDLDLHISLLCWKKQPAPGLHGPERKSNTKKRAEDITEKWQSWGLQGSVPPENQLMS

SEQ ID NO: 931376 - protein, 136 aa, Homo sapiens
MSRVELAVGEQVVVSEQDVEGSVVEDSSADFTRKAHPKGQGGHSSRLIGIFSVPCSVTCRTGSLLEMQNLKPCSRLPGLESGRDWKSLEDSEDRKMRENLEVLEDWLNGSDQNHRNVDSEGQADEVSDGNEEVTGN

SEQ ID NO: 931377 - protein, 124 aa, Homo sapiens
MMLSADVLRPCSTQLFPTPGTTLAHNRCPGKSPMLRSDSPGSASRRKPFSTAHSDSRVDLWGSLGVIYLYHLKVRGPSDNDLVQHCPDFVARTWRCRLRQQVFLENCLPVCVMSLFIPDDIPVL

SEQ ID NO: 931378 - protein, 145 aa, Homo sapiens [sequence omitted]

SEQ ID NO: 931379 - protein, 134 aa, Homo sapiens
MALPGLVFSWVSVSAEHVDSTWPTLSSKGCHGLGCTRLPPQKPTNTGYLSAVPICFQAPGASAFRPSAPSLQPPPLASTLSSMALGTPCSPSLQLQAQNSYCSRWLVHAAQRSSSLFANPSIFQVTEIQPPARS

SEQ ID NO: 931380 - protein, 169 aa, Homo sapiens
MDTIRHLLLPVGSPRDPCLLPSYRGSVLGGCCIRRGGSPSPMKALSNTAWPTLFKAFLSCPEQPSLRKVAKDCVEEGGVETFSSQFPGIALRTFALIPSSCEISVSLDNWLPPIGTKKVLSVPIAQDQDLTCVLSDFTEKIGAPKLTLHCYGPRITTGKADYGQDGGSL

SEQ ID NO: 931381 - protein, 262 aa, Homo sapiens
MSKEAGIARKTEGIFTWVHRVAPAALAIISPSRQEHSSDLCPTLSALQTLPSGSHSGLLQFSGGHSRPYLPESLLNPEVSPVEAAEQDLLDEALWLPLCGGGALCWGNPTRWNCPDSSELAGENTKSTDLWRPRPPLLAGTSFQGDQISVCKLLAGVPEIPIGRPCPVSGDGPRSGLKRQSGQDLPQPLCCAVGNSSWVQTAQSPQHQRRKTADWSRSDGSRPSPRELGSLRQPPAKWPPRISTALGLGPKALVVWAHEGIS

SEQ ID NO: 931382 - protein, 148 aa, Homo sapiens
MRLHFNVIKALECSQQFLGAQFCVLQIINHVYPYHCTLMLSIYSQSSSVRSGRKDNHHSSSYGDSKSNRVPRCLKPYRKKTPSQIRGAGVPREWGKLLLPLLSLAFHHLTRDVIRSAWQSRVTIAPGSKVISTGNQKVPGSSQIGRDP

SEQ ID NO: 931383 - protein, 139 aa, Homo sapiens
MRKKVPWALAASSCWLQSIPSALLSDRGYSLDLKRGRETYEFLLDSLTSSQPLPQGGKVRTQATLTAKCAGFFLQPSVKHNGEDTNQLKGKAAQLKEVRGSRAIKQDNNREERQAKAPNPALERIIRCLGYLHYIHGSP

SEQ ID NO: 931384 - protein, 183 aa, Homo sapiens
MNWVLFDPSSHKVGHAKQHSIIKWKWHMCDWAQACPEGTNKLHEEVAQMPMFSTPATLPSLPQPAPMASWGVPYDQLTEEEKTRALFTDGSAQYAGTTQKQTAVALQPLSRTFLKDSSEGKTFQWGELRAVRLTVHFAWKEKWPDVRLYTDSWAVANGLAGWSGTWKKHDWKIGDKEIWGGGI

SEQ ID NO: 931385 - protein, 168 aa, Homo sapiens [sequence omitted]

SEQ ID NO: 931386 - protein, 138 aa, Homo sapiens
MKLTILAEGLTDSSYMTRVGAREVGGSVHQLFGDDHARPLSSSSPCGYMYCDFFLTSTYLAFTASFLPFQAALLDWIQGHCLLHGPYLIHGKHKCILGPLGMCGLTADHCMPFSGGRRKRAKRMTQKWSWSLNTPPNC

SEQ ID NO: 931387 - protein, 170 aa, Homo sapiens
MDTSTCSDGGCLRLDSPWAVLAVAAVGLSQGACSSSPPPSNDLWILFTFLVLDLLAKGMSGEGTTEQNVTFAGLELFMDGLEESLGLDVKYEQVSDSSKPDFVGYTIHQTTQFGDDGSKQHGYEDNSHHDIRGNYVFLVSMVKFIKLKEGPKKFKRDSAYNTIVIEQKLY

SEQ ID NO: 931388 - protein, 146 aa, Homo sapiens [sequence omitted]

SEQ ID NO: 931389 - protein, 201 aa, Homo sapiens
MARIKAGRRTFKDYTGLVFWPTSFSCAGCFLPLNIGLQVLQLWCLDWLPCTSACRRPIAGPQLVIVVPSHIASLAYSKGSPRFYCELSCGKAHSKELMPATNNQQGPVASLQPWVGYLIYTRSAFDGPKAGEECCSGAPENLLFVCSEYDPLSLLPLVLTFTGKPRLSNSVCSQSLKIISFCPRFLHLVGEQDIIPDSAYK

SEQ ID NO: 931390 - protein, 124 aa, Homo sapiens
MISFQGSDFISSGYISEKGIVGHIVVLILISLEISILFSIMAVPIYIFHQQHTRVPFFLHPCPHLLSLDFLIIAILTSLRWCVIVVLICIFLIFNDVKQLFITPEHWERSRDTARQIHSFIFTS

SEQ ID NO: 931391 - protein, 140 aa, Homo sapiens
MQNLFQRKWEIKEKISHLIIGILSRVIHWYCFSFSWIKFNPFPDAICYTKLIPKSLCCLQISILLSVHQGLIQNDNLGCDGEKVGIPPFSSIFLSPSPSNLGRCHPWVQKWLSSTLTGGLGVEVSTLMLVCPISLAVDNI

SEQ ID NO: 931392 - protein, 229 aa, Homo sapiens
MAVACPAWWEGSWFPGELSKRKNNFKMNLVGTRSLKEGRETAGAKGMHSSPGCGHQGPVGSNLSSSTGHQSSQKLLPRGALAWLGSSELYLTLACLYLWSLLHLSLLDTVHPQLATTTQRSVSDSQVFIAVFILVLGNQLIQIQGRFLAVTQLLAVLGKSAHSWSRGAPGPSKLPQFIYTQSPCSTIHQGLQTQMPLGTRRAVKGSRPGEDRIELGEHSPSRVPADFCL

SEQ ID NO: 931393 - protein, 190 aa, Homo sapiens
MGLGAVEQGVVLVGEARAAQETMEWVGGSGMAGCRSRALPRREAAKARTPSAATGPGAKSLIAQSRQGRPAAPSAGPAKPTPTRNSSWPASAARSPGSRSRLSLHTYLQVEGVGSSRGQPRKGLPQGSGGLKGSSNAAKVGAQAEEVPRESEGSEDCQHAVTSQYDHNHHTRKAMGPPIKEARILFSLTI

SEQ ID NO: 931394 - protein, 151 aa, Homo sapiens
MILAVGDGPHVPEEHVLFQEAQEGPKEDARAKAIKALVKPKEVKPKIPKGISCELNRLAYIYHYPPQTSSEGRGNCAPPDPSGCRLVQDGWVNSSSLLPSWLGLGLPRVLHGRLASLPCYASMESSSSLAKGSSSIRQQLSFSPCCRNPFA

SEQ ID NO: 931395 - protein, 398 aa, Homo sapiens
MWTPHLITQNIKKSMYLLQDNDSAASDPDAETTARTNGKGNPGEQSPSPEQFINNAGAGDSSRSTLQSVISGVGELDLDKGPVKKAEPHTKDKPYPDCPFLLLDVRDRDSYQQCHIVGDHGNISLQKKRIPACVVSMMGNHPVPAGVTVGMGLSIKNAHGKIIILYDDDERLASQAATTMCERGFENLFMLSGGLCHKALMLKTRAKGFLVEFSESHVTTDIFWYNLLNDEIVKKDFMSLCWPQLDDQRLEDMQASFQVLAWPCHINAAFSDDFPNLGLKVLAQKFPEGLITGSLPASCQQALPPGSARKRSSPKGPPLPAENKWRFTPEDLKKIEYYLEEEQGPADHPSRLNQANSSGRESKVPGARSAQNLPGGGPASHSNPRSLSSGHLQGKPWK

SEQ ID NO: 931396 - protein, 551 aa, Homo sapiens
MFVVPSSFIIQVASLSDQTLEVTAEEIQRLEGTEKYLQERCRMLWESSKEGKTLPVRRPRSPERALGMFGVHYTLGTYNDSAASDPDAETTARTNGKGNPGEQSPSPEQFINNAGAGDSSRSTLQSVISGVGELDLDKGPVKKAEPHTKDKPYPDCPFLLLDVRDRDSYQQCHIVGDHGNISLQKKRIPACVVSMMGNHPVPAGVTVGMGLSIKNAHGKIIILYDDDERLASQAATTMCERGFENLFMLSGGLCHKALMLKTRAKGFLVEFSESHVTTDIFWYNLLNDEIVKKDFMSLCWPQLDDQRLEDMQASFQVLAWPCHINAAFSDDFPNLGLKVLAQKFPEGLITGSLPASCQQALPPGSARKRSSPKGPPLPAENKWRFTPEDLKKIEYYLEEEQGPADHPSRLNQANSSGRESKVPGARSAQNLPGGGPASHSNPRSLSSGHLQGKPWKVQMSLRFQPPADPTPAGSLSKELSAQHIAGPVLSMEASACVLTEIEDEESSCTLTECSPLLDISWSQKGMHVGVFTPGRRASHGKALATTPACAP

SEQ ID NO: 931397 - protein, 136 aa, Homo sapiens
MLCDSLPGVCILAETALEVRGKRLINFKDLELLIGKMEHLQITKSSGDADAAGQRPALLTGNPVLVHSQQLSREPLFSVGLIPPCCYSAPSMVPVTQAWSLESQCSGKVDGYLCELSGFALKCLNNYDKQSVVRWR

SEQ ID NO: 931398 - protein, 343 aa, Homo sapiens
MTPFPCGSEDRTQKMWPGQPLTLRPTWDSCALQNKDLQTRVRQLESCECHPASPQCWGLGRAWPEGARWEPDACTACVCQDGAAHCGPQAHLPHCRGCSQNGQTYGNGETFSPDACTTCRCLGAFTDNGSFELGLHGKVGFHLKEREYVRFLWAQGQGGERLPQGHGVGETWHPGPCVICTCQTGAVQCQGPSCSELNCLESCTPPGECCPICRPGDLLPCPALPRHPFNPKGCDYEGQLYEEGVTFLSSSNPCLQCTCLRSRVRCMALKCPPSPCPEPVLRPGHCCPTCQGCTEGGSHWEHGQEWTTPGDPCRICRCLGTEVLNQKASAWRGPFITLSSNKS

SEQ ID NO: 931399 - protein, 117 aa, Homo sapiens
MRRMKRPATDWEKIFAKPISDKGCVSRIYKELWKSNKSKEFNFFSKSDFTCNGLIAVIKNQSDNQRGMSPGSWSPGRTLEDIDEGFEFVQGKSLWGLNAVVWNQSSAVSMALPELLL

SEQ ID NO: 931400 - protein, 279 aa, Homo sapiens
MAFQAAIYAHLETGERRMFSRTSRFLWASRPDLRDHLWTSVDWELYVDGSSFINPQGERCAGYAVVILDAVIEAKSLPQGTSAQKAELIALIWALELSEGPTVLSGIQAYGEAPFEDLNIDFTKMPKCGSNKYLLVPVCTYSGWVEAYPTRTKKARVLLRDLIARFGLPLWIGSENGPAFVADLVQKTAKVMSVDQRLERSPLAATVERTPDCHLDHSHSCEGRGNPSLGPPQLRKTCSTGDLVGETKPRQPLQSDSEEVDKPCSSHTRKPTGPLMAEA

SEQ ID NO: 931401 - protein, 163 aa, Homo sapiens
MHVTCREHKQTLRKQAGSAGHEEGCSELGPHGTCWDTGRGGESWKMSDPQGEEETPVGEHTDFLGSMPGWKAGHLKAAFVPEPKDHGSHAARGGVIRCVFWLDGSCGCVQNERRSWTWPLSPRWQRKQVPWEKDLGYMPRKEMWAERFSVVINSSIIAVPKYC

SEQ ID NO: 931402 - protein, 136 aa, Homo sapiens
MVVTAGMQRTHFGYDGGKLPSTEGESKVLFQLKEPRTGGRFEGLRLTDAWIPGKEPLSPFSLWALAQNGKMGMTSGTPDKLKENLELLACPSLVLHVQCDTGATPDSSSECQKGIKNSRQDLLQFTGHKHNIPRDP

SEQ ID NO: 931403 - protein, 138 aa, Homo sapiens
MWVGPDKGIKAGCPSQQWQSAPVPFHAGSFVLSLFAINLAAAHSLDSFLKPARPRTHQKEETLNTSEHQKEQTLDTPSLRTVTLTTRVHDFILEVMTKQKGKNDQLQTGHDQRVNFRENKFLLVLKSKKYFSSGSFYT

SEQ ID NO: 931404 - protein, 144 aa, Homo sapiens
MSRSVSGKSPSLKLTITTNQSKLELNLFTHRTFQSSKIPGPSPCRHADYGKAQQVHNQNFQAWENILGPNPERMGTAAFQWHMKGCSQGQQVTRAPSKGGELGLCNSSSVHEQHLNLHTLLRGLFSVIYVYGDGSLYRSNFYFL

SEQ ID NO: 931405 - protein, 155 aa, Homo sapiens
MDCGSTVRSEAPGDEASTWQILDTERTKEDVPERPGGPAVGFGVLDEPADWDTLLWALQAAQGEHFQETEPHSPKAPLSPSQGEHQSRESREQSIIPPPPPPPLLLWALFMVLMSRAGELPGWADMMIKGKALHALPAPGWGLWLEPPRTRDPDV

SEQ ID NO: 931406 - protein, 137 aa, Homo sapiens
MGSGKRRVETEPPAISPAPRPCWDSHCAVFPSYLWTIPQTPSSRQGIPKEVQIKMLLVVEATYSVKIHQGYWLRLEQDGGEGNTARGRQEGPGKRSLDSTSRRVLAWGLGGGRERKLLSDFRMGIMDAESPVLHLQL

SEQ ID NO: 931407 - protein, 152 aa, Homo sapiens
MSGKTKARRAAMFFRRCSEDASGSASGNALLSEDENPDANGVTRSWKIILSTMLTLTFLLVERDCLFIHGLLGLSATSIIYCPLSQLGFGSMSLKSFNRYCHFLESYRRGINTGLLNHQWLKETDVPQKSRQLYAIIAEYGSRLYKYQVIFC

SEQ ID NO: 931408 - protein, 209 aa, Homo sapiens
MMVTIVIIVVMMVVIMVAVEVTVMVVVVVVMVIAMVVMAMVSPKKVVVEVMVMVVMVVVVVVMVIIEVVVVMVIAIVVMAMVSPKKVVVEVMVMVVMVVVVIVMVIIEVVVVMVVMKVVVVVAVMVVVVVTVIVVVVMMMDMGVVMKKDGEVVVVVAVMVAVVAVMVVAVMVMDMEVVMKKDGAGGGDEDEGFDGDGGGGGGYGGREEK

SEQ ID NO: 931409 - protein, 172 aa, Homo sapiens
MSSPTRKEQAAARSEHPEDVGRSWSADCHTCDQLAQDMAEEAAQNISDDQERCLQAACCLSFGGELSVSTDKSWGLHLCSCSPPGGGLWEVWGEAEIWGPHFENNQDCGEWGLPLKRGVGAIPGVGSGCCPPGGEWELPRDGSSTDKASSSQSTETLLNLRSVGSSLKTPIN

SEQ ID NO: 931410 - protein, 164 aa, Homo sapiens
MEASCCVLRLLCCAEDVATGLLPGTVTMETPTKVARPTQTSSQRVPLSHGLPPGIPRTPSFTASQSGSEILYPPTQHPPVAILARNSDNFMNPVLNCSLEVEARAPPNLGFRVHMASGEALCLMMDFGDSSGVEMRLHNMSEAMAVTAYHQYSKALDPFYSDNY

SEQ ID NO: 931411 - protein, 397 aa, Homo sapiens
MLKAVIYNEFHGTEVELGPYYVEIGHEAVSAFMNSSSVHEDEVLVFADSQVNQKTVSVYTNGTVFATDTDITFTAVTKETIPLEFEWYFGEDPPVRTTSRSIKKRLSIPQWYRVMVKASNRMSSVVSEPHVIRVQKKIVANRLTSPSSALVNASVAFECWINFGTDVAYLWDFGDGTVSLGSSSSSHVYSREGEFTVEVLAFNNVSASTLRQQLFIVCEPCQPPLVKNMGPGKVQVQIEGSVVYSNYCVGLEVRAQAPVSVISEGTHLFFSRTTSSPIVLRGTQSFDPDDPGATLSHSDDFSNRYHWECATAGSPAHPCFDSSTAHQLDAAAPTVSFEAQWLSDSYDQFLVMLRVSSGGRNSSETRVFLSPYPDSAFRYLTLYSAQLSSPVFVPTWC

SEQ ID NO: 931412 - protein, 228 aa, Homo sapiens
MSLCMSVTFDMSHPPSVGHQCLEGWFISHVMVKELHTGQGWFFPAQCWLSAGRHDGRVERELTCLQGGLGFRKLFYCKFTEYLEDFHVWLSVYSRPSSSRYLHTPRLTVSFSLLCVYACLTALVAAGGQEQVRAIAFPYSSFQIRLHCGPFLPKKSTKLTVLREKFKPGEASLAAWGPEKEQEGSARCGTGWPCTALTLLARWTAAVWELVPRPSSRTFPERLAAGCL

SEQ ID NO: 931413 - protein, 115 aa, Homo sapiens
MYGNAWIPRQKFSAGAGPLWRTARAVWKGPSGAVRRGPPSSRLQNGGSSDNLHCAPGKATDTQCQPMKAARKEAVPCKATGAELPKTMGTHLWHQHHLHVSPGIKGDHFGALKFD

SEQ ID NO: 931414 - protein, 147 aa, Homo sapiens
MGIDCMGTTKLKVPSTKQYSLQADPSDSTFFRLLCSGCAGSRLDGAHHIEGGSSSPSPPTQMSVSSGSTLTDTPRVHQPQQVTWTVPTQWGGEVCSTHAVRSIRATGERVWVCNLRQRRWNGTRRPAGHRCIPRSVSARSQGMCRST

SEQ ID NO: 931415 - protein, 149 aa, Homo sapiens
MEARFCFTNLMLTTARGSCYRKIPWTEWFRRGRSSFLTVLEAVKPKIVVPADLASEHAQHVPAAAFAGLTKFLVLTGRVTPPGQLHPSLFQIPVVHIMQRLLKNSPLVGVDWTFLPFSFAVVAAVTDAGSACHSGGAQGWWEEWSGQGW

SEQ ID NO: 931416 - protein, 182 aa, Homo sapiens
MLLLPMPGCFLDTLILMSLSGVDAGIQNTWLARGCLQLSCSGGDPQNQHVASCSQHLPGGQKGLRVHGQPDISRGLQTGSPCFLPELGRSFSIQPETWLFPPVCWGPADPGELLLSQSANSQIVNHRPPHTGFPCANPAIHVQRRSPHLPPPLWAHTPGRCPPTLVTPGQGPDPGQLLSPEG

SEQ ID NO: 931417 - protein, 121 aa, Homo sapiens
MGCAGVQHTEEENLQAKLFSLSPKSHSTYRSGDKNANSTIHDSSEFEPTFSRAQLTDVLSGSKDIEADRQLCQGNEREKLWLLPRQSGVPSLQSLPTCTRCTKLKGNLNVYWTLGGNDVSP

SEQ ID NO: 931418 - protein, 218 aa, Homo sapiens [sequence omitted]

SEQ ID NO: 931419 - protein, 116 aa, Homo sapiens
MITGYISPFSYCYEEIPKTGQFIKKKRFNGLTVPHVWGGLTIRVEGGGGAKARLDVVRQESVCRRTALYKTIVSHETYSLACFATMRTEDLACTQKPPRSRVVRLTPWEQTSTNGV

SEQ ID NO: 931420 - protein, 128 aa, Homo sapiens
MNGKSVSAPSLIPTRQAIYLWLNMTLDSGTEANFTSFFFFFFLKTEFRSCCPGCSAMARYWLTATPASQVQVILLPHQVAVITGTRHHGQLIFSIFSRARASSWWAPAVPATREAEAGEWLEPRRQRL

SEQ ID NO: 931421 - protein, 245 aa, Homo sapiens
MTGCRSPALPRGEAAKAQQEFERSAGGPVVLGDPAHPLLLLLARVLSPSLPSQRHQLVALSGGPTQNSRWPMSAACSPGSRPRSPSTPPRKQREPAPARPAQRGAPSVQPGADGLLKCARVDAEAEEAEEEDQRHSKALSQVHSRGHLPHSRKLPQRHRPSRPSCSFLLPPRRPCWNTGSEIRLNELQWIILLTDLAGLWVRVGLTTTDDLRFTSFAPCHLRLGRWPPRAPCQVCLDSGSHTAGN

SEQ ID NO: 931422 - protein, 238 aa, Homo sapiens
MEELVDEGLVKAIGISNFNHLQVEMILNKPGLKYKPAVNQEKLIQYCQSKGIVVTAYSPLGSPDRPWAKPEDPSLLEDPRIKAIAAKHNKTTAQVLIRFPMQRNLVVIPKSVTPERIAENFKQAKTETDTSPVEPCAGAGLGPPGPRAVHAYTYTFAQALQPHREPGYDHLTQLQQELEGLCLVEVSEPQCEEQFPGDIQMLHSKRVIPAGLSANVLSSQLFLLCTLPCFLSHVTCIS

SEQ ID NO: 931423 - protein, 202 aa, Homo sapiens
MLIHVLPQIYMYSGPEGQLLIAPPELHFRFHRAALLLVPLLAGLSIATSAAIGTTALIQGETGLISLSQQVDADLSNLQSAINILHAQVESLAEVVLQNRRGLDLLFISQGGLCTALEESCCFYANQSGVIKNTLQRVRENLDRCQKEQESNTTFLIPGVPKYQSMFNWNPWLTTLITGLAGPPSPPLVRVSLQALYIKLVS

SEQ ID NO: 931424 - protein, 143 aa, Homo sapiens
MGILPGPGLISPLETNNTYFTGQNQNLKMQTKYEGTLTKLFIFNLYTNPEPNLRMQVGAWGTRNVENGSGRWKENSTVHCTTPGVVIHILVYVGCALQREGRVKTQMHCPGLTNLELVIGGTWQSKVSSVPKEEKEEKEKIFA

SEQ ID NO: 931425 - protein, 234 aa, Homo sapiens
MCLFLFGCLQQFDYAYKEPCFVYSRVGGNRTPLKQPVDYRDNTLMFEARFESGNLQKVVKVAEYEYQLTVRPDLFTNKHTQWYYFQVTNMRAGIVYRFTIVNFTKPASLYSRGNSSDAQLLRDTFVFKVVPMLNPDGVIVGNYRCSLAGRDLNRNYTSLLKESFPSVWYTRNMVHRLMEKREVILYCDLHGHSRKENIFMYGCDGSDRSKTLYLQQRIFPLMLSKNCPDKVSTF

SEQ ID NO: 931426 - protein, 197 aa, Homo sapiens
MLIPNWKTVCQNVTTALSCSCSVAAGLAASFGIFLIPALPVYSAWVSPCWFTKAQSGRSGSHKSDRVKSCESQNGFSERDVSGGRSPGPIDYFTLKVQPMGVEVGSYEWQLSRKHIERARGSSSKGKERMAGGRRKKRLRISKRTDLPPGEKEFSLRGSSEAPVRVRPLGQEAFYQSQQPWLALGRCHQPSGGGTSN

SEQ ID NO: 931427 - protein, 145 aa, Homo sapiens
MLHLCFPTQKGLESSQKGPAQCKMEATAQGHSLAVACPHPSTLRHGNSQPAAGHAGLQPIGKKWLDVGEDYTSSNSSWPRDQHSHADQGSTTHGGAGPFSPISFSSSLFPFSQPLAQLPDPCPTCPSLSSTVTALRRRLHFPYFI

SEQ ID NO: 931428 - protein, 145 aa, Homo sapiens
MYWSPRLHPRTLVEVALEAETQLLYHRKRKAYGGKSHDLTDFLKRQCHPMSINGKVINLISVLPFSGILRGYMKKRKGKNDILTWRNAHDMFISFVENGLEKGKNENGTTNEENISVIQMVVLNVVVAVIDCTPVMFYLLTENGK

SEQ ID NO: 931429 - protein, 137 aa, Homo sapiens
MPFALLGVLMKGNGLRRDTGILGQGFQVGNEGVQFRGTYVERQHDLPEVTQQTAGDMARTSGLERVTAAGASTHDGPEQSEGFVTDLHLQTSPACSAAATGLRGCGWHFSSPPPLAFPQAEGSHRKGSYSWGTGATS

SEQ ID NO: 931430 - protein, 210 aa, Homo sapiens
MPGVSDPAGLLYRKHGNICFWGGLKKLSIMVEGKGGVRRLTWPALEEEIREGGEVRESIVECWCGGRDRGSRRAWGGIWTFDLGQWEAIESFQQKSEEHVSCRRRAMTQRLLGGAECQGWAKEEEEGNWKREPKRWGLLGEHRVTGANGIEWQMLERINTITLKYPLDLATKRYLISTFGNSFFFSMNKYFLNICSSMPDITVGLKLTSY

SEQ ID NO: 931431 - protein, 147 aa, Homo sapiens [sequence omitted]

SEQ ID NO: 931432 - protein, 285 aa, Homo sapiens
MWGKMAMGGKGISGLDDIIGASFLLIFSSLADGLGCTSIWKEFLVMEDLEDLGNKRGVGLVYESCICAQGVLSPRNPQARLQTAKQHVVQALHQVDNAGTSVSRSRQANPWAYGQFSWMPVVPADDQAGGWVHRPLGSRPAVGYSSSGGITFWLPSSPHWCCQHMKMLSSFAAGGISVTANGLCFSPGKIKYRLLQQNNSRKSSSISLNNSLDDGLIIPKVRMYSHPNKLKMLTNPSTANSNLLLHQSDQHLISSSLEFIDDKFRGGSFLKKSPKQLKTAAKKPG

SEQ ID NO: 931433 - protein, 213 aa, Homo sapiens
MEHGAVPGFKVELHWGPTSFCPGACLPPATINHIICGNKVVPAEGHLQDCTKLPSALPQAPSCACWQPQSTWAEMAEGCCDSIAPSLCTPSWVVTAPGLGLNFAPELEPLPGVRRGQAQEQEQTFLSLHEERGFLGSQEHRDAWVHSCSCAQESGDPTLSTQKGAGLLPIASSCQIHGVFIPSCNSPAAAGIFTAAAPDGPPLPSMRGALRGS

SEQ ID NO: 931434 - protein, 141 aa, Homo sapiens
MSIFPSTQFLLERLKYTVAMKQIFIPTYWDQVLLAVWSALELTVSHREQGLTLSSGDIGISPEAFSGFDFKATAKPKWIKIGNNKIRKAQQVGPQVQVLQIPVYLSISSSNNTMTVKHKEGRGKSLPLRDKPPFQMFSGTV

SEQ ID NO: 931435 - protein, 165 aa, Homo sapiens
MGVTVALWTPHRAGLSEAPAGLWASRTEGRWQCEDGVVCQTPERGFLWLRAAHSVRGQRHQELDADEGVNKGRDREGHSMEWAEVKDRSRQSGAYQKQYLLLSASSGQISKGEGKGGTQLCEERKRACHRDPFYQDEKMWASPCVSAPPRRMQGEHVHRHQRAHR

SEQ ID NO: 931436 - protein, 147 aa, Homo sapiens
MTQNDTRTHVALAEAEGRKLENRTFATLEANANQQIKPLCASFWLRSFSQFIAFGQRFREKIDAILSIKARLISWRNLNHRVLMDPVVLNLSFASQSLGGLTGKQLAGNRPPVSDSENLGLILGSKNVFLIPKCQVQAARTHFSCAE

SEQ ID NO: 931437 - protein, 152 aa, Homo sapiens
MRQCKVEWSAFCSPFPPVLALGPKETEQIHSPGYMVDPLTLNSQCSACRMCNGARELQGCPGADEGWLELRRGNGVDYVGLLNIFTNTMRISEAIECLTHTKRKKEKTERKERKRKKKEKERKKERKKEKKERKERKKERERKKDRERKKEI

SEQ ID NO: 931438 - protein, 157 aa, Homo sapiens
MNLYKHESEPQLSLSLWTDHLNLSLTCCKEELTDNFPFSVGSMQSYTLKDENMPLTWWDVNLNKGSHSYLSECIDDQEMWVQNKSIQKAVWWKLFQSIPILYNIRWLLLHLGPKRSNIALHFSLHHGSQTFWFCEPFILLKCTEDNKDLFLMWIIAN

SEQ ID NO: 931439 - protein, 158 aa, Homo sapiens
MELHHQQSWVSSLRQILRLVSCHNHLLIIIILYICMVFQISKVLSHSLAHPIFKNLYVNKRFICQILNLDILGEFPTVKLLVGQVPGQALPNVIYILDVACTNNKGVPVFVVLFDGSTLTQDIFMYNSCSSFKFYIKVTFSESFPYRPYNVNPLLSFL

SEQ ID NO: 931440 - protein, 300 aa, Homo sapiens; identical to SEQ ID NO: 772931

SEQ ID NO: 931441 - protein, 137 aa, Homo sapiens
MTSTNEWLTRITNAEKSLKDLMELKAKAQELHDECTSLSGLFDKLEERVSVVEDEMNAIKSSYPAKISFISEGEIKYFTDKQMLRFCHHQACPKRTPEGSLKHGKEQPVPTTAKTCQIVKTIKARKKLHQLTSKITS

SEQ ID NO: 931442 - protein, 164 aa, Homo sapiens
MRYHLTSVKEVVHVPELFKLDVDRNELKAQRKPWGPSALYRRRNKKPTKATWKNGRCREEEGNGSQLASQAATDCSREAGGGGSGRRRSLERTQIPGPGGRKSGENWDGAQGKLLMEERKKGLTCQGHLSHPAEVAGWGMAAAHLLITTLPPPVNVWTSKTITK

SEQ ID NO: 931443 - protein, 173 aa, Homo sapiens
MVKAEGGYTGGFAVPDSAALRQACRESLDTHQTGCAVMIPGPSRGPAVFPALPLSYTTVYITLLLKLSAVCPDTFIIWLLVVASNSWHLDDICKGLISKESHVHRDQVDMDFGGHDLTQYRGLRLVYFNNNDNNDNDNEQQQQSYSNSLFLDSVLCLQNISSCFTMNMEQSLS

SEQ ID NO: 931444 - protein, 181 aa, Homo sapiens
MLQVLKTAFSTLENSVLTNTPHDTKARTSAALGYDMSLLTTQVIEAIRLCIIRGVYGAFSNYFCKPCIPCSHVVTEVFAPLFQWTANDLTNISLNTFSQKAKTKTRKILLYKTMYLGPDLRFFFNMKPGHLWLCFILHHLPAWSPQICQNASLGLAQVFPEHASGSEHMWLVLSFALHLLW

SEQ ID NO: 931445 - protein, 140 aa, Homo sapiens
MRTHLKQTPRSRCKSLTYIALRQVQAPQPEAHLCPTVPQVPKITHGEPTLRLYTSDGFTEDRVTILELTCNSQVSLTLMGALRVNTHTAGTCWMLQNEHVHKGPGENCSDIDEIPQLLFVQEGKEMLPFSNKKESATFAF

SEQ ID NO: 931446 - protein, 175 aa, Homo sapiens
MRFGWGHRANSYHLVTFHSQLFPRSCPWTEKVNHWLEVASKIAKERKEWRRQSSFFIMLVTKLNTCFCSHFIAYNGTHITMHSSWLGSCWLEHCGATTQIAIPATLQCRNYGRIGVSDKLPGLLSGGLSGPVRADVHKKAEKHLPAPGLAPKMGTSMKYQRKNNFKPHEIFSQVG

SEQ ID NO: 931447 - protein, 143 aa, Homo sapiens
MHSSPTTGGEGVTANDSHFSSDGNSLWQHPAMNKGYPWGSKGVEMQDLLGPGAGQARCPSWQEEDYKSMAHVDVHRHDCIDKNVKQEADGAGGARNRAEKPGHGEDREKHFELQFHKPSCIYDFTLTVLTKEMRRELSSPCHR

SEQ ID NO: 931448 - protein, 149 aa, Homo sapiens
MGQLAFLGCNTATFLCNGCTVWGSTPFPRPVDSAEPGDSKGEGFKRAKMATCPFHRELCPRELQSCYWLDSPSSKAACERGYLDTQANYRDSILNLNSNGNEMYRIVYQNYFYLLNETCSNKNLPVETFMVPMSVSSCSPKICFTGSQE

SEQ ID NO: 931449 - protein, 171 aa, Homo sapiens
MGAPAAPAWVLLCIPAGQGPLPGPPLPFHIPILKFCYCGILTTVSGNFLSIIVYPYVRSWKQYKKRLIHEISTEKWDIDIKIPEHVEATLEVVNGKRLEQLGGLRRRQEDRESFKLPRDFLNCCDSDMNNAVQAEVVSDGDEELSGNSSKGQPCYALAKRLDALCPCSRDL

SEQ ID NO: 931450 - protein, 377 aa, Homo sapiens
MSKSESPKEPKQLRKLFIGGLSFETTNESLRSHFEQWGTLMDCVVMRDPNTKCSRGFGFVTYATVEEVDAAMNARPHKVDGRVVESKRAVSREDSQRPGAHLTVKKIFVGGIKEDTKEHHLRDYFEQYGKIEVIEIMTDRGSGKKRGFAFVTFDDHDSVDKIVIQKYHTVNGHICEVRKALSKQEMASTSSSQRGQSGSGNFSGGRGGGFSGNDNFGHGGNFSGRGGFGGSRGAGGYGGSGDGYNGFGNDGSNFGGGGSYNDFGNYNNQSSNFRPMKGGNFGGRSSGPYGGGGNTLQNQGGYGSSSSSRPSAAGLLEFTGGPFQTLFAWVSAVVAAEHRILVNHKCCCLIIPLEALSQRSTRLCEVSVCPYWGVPPS

SEQ ID NO: 931451 - protein, 141 aa, Homo sapiens
MSKHNYDILSMFTLEQSAGIKMDEICLFTSKGIQFLIGKVVEKKVNEWNLLTTAGRICTKLNSLFQAERLDHSLPGEKVYVYMQIQRYKSISQEMYFKVFNGQLLWHELYPLMMCTSYDRSLCSEYHLSVIMYILRKVYFI

SEQ ID NO: 931452 - protein, 173 aa, Homo sapiens
MEYNNTKCSLVNSVFRESDGTTGTTIPLKRGQSSSKPKITSSHCASGKAKATQHQLVKVARKGDVPCKATEVEMPKTMGTQLLCQCDLDECVLKRADGFISGFPLCSHCLSCQPVKRCLPPLFFLNFKIIMSMVTVRSPAAGFQGSMVRAGQSLPAQLTPSPGVTGGQECIPV

SEQ ID NO: 931453 - protein, 160 aa, Homo sapiens
MWVGSHGLGQLCPCDFEWYSSAPGYFHGLALSACSFSRNMVQAVGGSTILGSRGQQPSSQSSTKAGKQGTKSLGCTEQEGPGPRPGNCFSLLGLWAYEWRGCCEVLCHALDTFFPLSWRLAFGSLLLMQISIASLNFSLENHFLFTTALSGCNFFNFYAL

SEQ ID NO: 931454 - protein, 139 aa, Homo sapiens
MGGHGKAWKKHQKFSLQATDSTWNLQPGPHAIGHFSPEGAGSRGTQVMEAGNLRDTGGFPGPQGCRGAQLCGETRGSGPEDLEVGEAPTGSAEHAAPLYRPHISRHLLRTWMKLEIIILSKLSQEQKTKHRIFSLIGGN

SEQ ID NO: 931455 - protein, 236 aa, Homo sapiens
MLSTWVMGSITLLMLTFLRFCENLYPENGRLALVTVRPGWRREVLPMRQGQSDLSGPPLSWPLPGPQPGYSFLQRSLGGPTGVFLKDPHYSSFTGRPCLTIGELLQIGLCRHAPAHQHSSPTAASPTLLCWYALAHSHLPCPLLCQHSHGQTSPPLLFQHRYSTVCVTAASQAHPAAPRLLMAGSMMADLEPVSVEARMKPGLTGADLVLGWDMSLSQQELGMCWDGPDPESIGLS

SEQ ID NO: 931456 - protein, 211 aa, Homo sapiens
MKRNSEHHKEHKSFLDWRSRRKKWFCRQGPWSPYCVQSRDLVPGVLAAPAMTKMGEGTAQDVALDDASPKSWQLPHGVKPMGAQKSRIEVWEPLPRFQKMYGNVWIPRQKFASWEEPSWRISARAMQKENVKWEPLHRVPTVALPSEAVRRGPPSSRLQNGRSTGNLHYAPGKAADNQHQPMKGARREGYTLQSPRGDATQGHGSPLLASV

SEQ ID NO: 931457 - protein, 208 aa, Homo sapiens
MEPGLYGGRCHHTPVLRASSTLLGKHHVSGWIVVKPSGTFSDGNTVWPKRSQPIRGLLQEQMTCLPGTSLFTMNAAISRDLMNGFNQNADNDMDNEIQAEVVSDGDEELVGNWSKGGFCYVLSKRLPVFCPRPRDMWNFELERDDLGYLAEEISEQYIIQDVTWVVLKAFNFIREAQYKSSENLQPGGLLTQCRPLPLRQLSLLAGQP

SEQ ID NO: 931458 - protein, 287 aa, Homo sapiens
MRQPEERINQCAPSMQWNIIQPMNRNEVLKLSTVQGAPKPLPSCREQEEEGYPNNPTGSVLLQPQTVLLEHGPEDGQAVVDGGAVPPAAAELVLALLDANLDALGHAGHDLHVVPAEAELLGDQARDAGTQDGLRAQGGILWPNSQRPAEGKIRWPPLKPAPLQSVLAQSAPLFTSLFIHYTQSRQLDDHPGSLGYGLHCHCPGPSGGDQGQLSVTWTVELAAYKTGTGLGDAAISKAHPFSEARCWIHFGGCHSAHPQNTMTSMEPGPPQLAGSGLGGAALSLVSR

SEQ ID NO: 931459 - protein, 151 aa, Homo sapiens
MRAPVDITDVGMSWQGFAEAVPLLGKVVGDMSGASSLALGCPAAQVGFYIVGMTSLMGIVVTTTPAETCMTQLIPETTGDAVSPSLEHKPEPRLRGQEQDSQGCCSHMGLGLGSLTVTLLLSTPITQDHGSWTPSSLEMLSFTLVHPQLHL

SEQ ID NO: 931460 - protein, 140 aa, Homo sapiens
MSLASGGGCLCPAGCPSSAQTPRQLRQPLYMLSCVGIVRVCGCGGFSTSQGRGLHEDGCLQERLDVMSIHRQLTFGFSLYVDLHKPLLCLGPLRPAGSPGINVGAGLCPAIPERSDYLLSPLHGHPGKRPEVPLGKAGRK

SEQ ID NO: 931461 - protein, 558 aa, Homo sapiens
MENHRAVGDSGLNFPWPWGAAVQSCPWLPAALSLQRSPQQRPQILLALLRFLFASYGSKVFLKEEAALTSSAASTPRDARSPRRRHVDTSSLYALRVALPHLPWPCALGAGLTSAAAILVRTSGHSPGGSGPTAACEGPMALHTERRSSRLWDLALHNQDFREEWGGGTTGILTSQGSTSLAAMVGSTQTFMKLGVVSAQRQVTVQEGPLYRTEGSHITIWCNVSGYQGPPEQNFQWSIYLPSSPEREVQIISTIDSSFPYAIYTQRVHGGKIFIERVQGNPTLLHITDLQARDAGEYECHTPSTDKQYFGSYSAKMNLVAQPGAVAWLWQKVGEKPVEVISLSRDFMLHSGSEYAWRQSLGEVRLDKLGRTTFRLTIFHLQPSDQGEFYCEAAEWIQNPDGSWYAMTRKRSEGAVVNVQPTDKEFTVRLETEKRLHTVGEPVEFRCILEAQNVPDRYFAVSWAFNSSLIATMGPNAVPVLNSEFAHREARGQLNVAKESDSVFVLKIYHLRQEDSGKYNCRVTEREKTVTGEFTDKESKRPKNIPIIVLPLISRYSY

SEQ ID NO: 931462 - protein, 135 aa, Homo sapiens
MQSLADSVHSDSPKDDVCLIESGMTQLQSLTVTVPRRKLSKPKLKLKIINQNSVAVLQTPPDIQSEHSRDGDMDDSREGELMDCDGKSESSPEREAVNDETKGVEGTDGVKKRKRKPYRPGIVPEVDISISSTLC

SEQ ID NO: 931463 - protein, 254 aa, Homo sapiens
MSVPIHTLYLAALFRDCKRTNQRPVKTDHLALPISRTWVGPDKRIKAGCLSQQWQAAGVPFHTVKAVTLTAKVCSFTPEASETTSPPGGTNNSRRAALRAVNTHPEEGTNSRRATLRAVTLTARVRGFILKVSETKNPPLPDTLAPRASKMAEGPLQDGGNPCVGFLASRIPRNGILGHAPNLEQQWVPCWIRSTADTLPDPEVWKSAGDLRQPQTAVVDKCAVKSSVQVQRWFLNEELGHEVLAHAYVLNGIV

SEQ ID NO: 931464 - protein, 144 aa, Homo sapiens
MNLSVVSIIKSTAKFFHDLLSPFIKEGDTNFQFVHENKDVIFPLSFTIMDSLNSNHGPLWGGQNSSYCVNSLGTSGCPRDHGIELQTPWIQTLSEVAAPCGSVGKEFEKGQTKEGVIQERGCAQSKALCKVHDKGNHLACLQHP

SEQ ID NO: 931465 - protein, 145 aa, Homo sapiens
MPEPSPASVGSCAAPASPMSATSCSPAHSPIDHPRAEECKRMARDWLAAPPASLVGDPLGEASWAPESASLLSQRDYEPTRRKKLRTHPNIRRNKLQTRHLKSCNTHCEGKMHASFSSFTSKGKFGRFRSSLSIYQFLNHAESGS

SEQ ID NO: 931466 - protein, 151 aa, Homo sapiens
MAHVYIWPPAPVRAEELPRGSGSKGSFDGAMLGRKGLASHGTSCIGACSLEALAGSCGHIGRMVVMGLTYEKQSCFYCKLLEDKNELDTDCQERLSNIQGLCMPLADTCLVFVKILACGKQVCSTILAILYPSRKLLVYLEANGLREKVRL

SEQ ID NO: 931467 - protein, 134 aa, Homo sapiens
MEKPQGWILGNLPRPWDSTPCTSVHWTWDMESTPCMESIPRPCYSSLYTSVPWTWDMEMLSYLLCGVVKPGMWGSVSSVTLWVDGKNTDLAAVAVDTGCGSRIRCWKLLITSFRYFLSIGRLPFPGAGCDQLLP

SEQ ID NO: 931468 - protein, 174 aa, Homo sapiens
MGVGPGKCWIEKGSVPVKGSTLRPVPVDLTEHGEEQTVRPAMVKRCDREREKGRTSGYQGDFSCGKSEKSLAAEHLYAHKLENPQEMDKFLEIYNLPRLNREEMEVLNRQIMSSEIESGIKNLPTRKSPGPNGFTAKFYQTYKQRADTNPIEIIPKNLRRRDSSLTYSMRPASF

SEQ ID NO: 931469 - protein, 164 aa, Homo sapiens
MPGNPYLTFYFIFRFHICNLGSKIQQGTVVTRATGEITPHSGDSGHWSGRIQHWLKLCDAKCDDRKDPGMAGYSSDLNSRGLCFPECKAPHHSGARGYLVQLFWTRLWISERSDAIWAQAPVSQLLPWAEALIQRGKEVGKQGAGHNVGSSPGVMQLYELQAAP

SEQ ID NO: 931470 - protein, 191 aa, Homo sapiens
MHRNRVRNEKAGPSGGIPEKGIVITGDDSSICVINPEDFSARQDVEVEDSDIDDPGPVAVWYVDADWDTKHVLTHSADNHLWACETGKQLALLKTNSTVWICSFDFGGNIITFSMEKQKSYQCFVSFFDLQDLSQIDSNECYLKIPCSDSKITSAIWGSCGECIIAGHESGKLNQYSAKPGEVLVNIKEHS

SEQ ID NO: 931471 - protein, 168 aa, Homo sapiens
MIACGPWSLAPSLSGPLEKELANSFSSEKEGTTDPSRTLDASPESYDEQEKPIPKGSLLYDSVDMTFWKCQVYGNGEGVPGGWGYRASGEGGGDEDAGYLPHLPSLTRYHHALSTECDTTGCSRTVLISWSPRGTACLPVTMDPYSKSAGPSRALTSLIMTLHGSMSP

SEQ ID NO: 931472 - protein, 144 aa, Homo sapiens
MCLLRPTVLLGLLYESEVWQLPKRLSPTFLCRQEDNQLDGIHIVCHHHQLSLLVLHQGGDGVNSCLKDKWSPSGDVPFAGSFLLSPDQQPLLLLLLCLWSVVVGQLKQLSSCLEVQGLGELVNRTQEALSSRLRRMALCHCNLI

SEQ ID NO: 931473 - protein, 157 aa, Homo sapiens
MFIHWPLSFSHLFIVWASAEEKCVIFTGLAGVCGTSCQSVKKTQNSHLEFGDSQIIVTLENLRQRCSYYRINECRETPSPVPQDPIASPPVFGHACEQHLQGRLLTAANFTISKQKGKGKQYQMRKESICEHEVNTDNWKRATFCVLKLKRTKFAQK

SEQ ID NO: 931474 - protein, 208 aa, Homo sapiens
MPLTATCHAHYFFQYARYKDVVLGTKESAEQWGATLKRGADETQPILFRADDEKGWLFKRLVILEVISTCPLKEHVLTHRKEAKNLEKRLDEWLTRINSVEKTLNDLMELKATAQELCDTGTSFNSLFDQMEERISVIEEQINEIKWEDKIREKRVKRNEQSLQEIWDYAKRPNLHLLGVPESDGENGTKLENTLQDIIQENFPKPAR

SEQ ID NO: 931475 - protein, 134 aa, Homo sapiens
MGKTQSKPTPLGTMLKNFKKGFSGVYGIAMTPGKFKALCEIDWRALEGKRKETGEQQHKRLAEARKDQQREKGERERREREREEREREKKRGKERKQERQEETKRKSKRKRQRERGRDRDRRKSKRERERYTSS

SEQ ID NO: 931476 - protein, 147 aa, Homo sapiens
MPVALGIPNRITVVLRLWAQNANSQALPQTYYINNSGNLPQMYKIDHLLFATLSDVYRLGYAAPSQITELSVTFFLAVHNMVVCFFKPAGESCLPNLLRMSSIMQHNHRNDFHYLCCILLIRRKPQVPPALKWRELIKDTDIRRQEI

SEQ ID NO: 931477 - protein, 153 aa, Homo sapiens
MGQTSTHSDRPFAGPVPLLALTASPVHLTTTGCSQKVFLMCTIALVTIVPPATVNVPLLWIALLNTSVHSDSGQVPRSHSDLQECGGPPDNGASVPNAPDSLEKQLFLFLLTAFFSADADMGLKINECVWKGLDPTENRRLKPRSFISISKHL

SEQ ID NO: 931478 - protein, 146 aa, Homo sapiens
MVFPTLPGNVAPKQQRFLRACEDTEELRKSCTCKGLVPEHEGSCQSHGPMNDQRFEGNPASLPGQNVEWPQVLADTSGNPQRAYVYQLHNGSDLLLPLHPQPKVCFSTAVGGGFYFLPHHLVSQATPFPTSPHNIIDTGNVHSRFY

SEQ ID NO: 931479 - protein, 124 aa, Homo sapiens
MGVWGDLPGGEDHVFPLEASGDRALIVLAPGQSDHRGLLSCTIEPVLQPETGLATGGHCPGQESNCIPRGMKASGQLQDSNQLFSHAAENKAKKVNCHVRNCRKRSKISPKPIHQDSSVLRLLS

SEQ ID NO: 931480 - protein, 165 aa, Homo sapiens
MVETSAAVILPGLKTSPSPISLGKLLALINVLPDGHGPGLFGIYIHALAESLEGTVISFVDDKSLERIANSLADRIKTKKTDRLEQWDKSNKMDFISNRKKILHLVEFGKKIEVKSVCLRRRSVYSFYCSTLERQKTKYHKKALQLNKFWNSLWFIPYLGVLDSR

SEQ ID NO: 931481 - protein, 138 aa, Homo sapiens
MPPLAYTSVVFEGPTSDDPKQVELVVGVGCLCSDVEWSFWMGSTIWQNHWVGSAMRVLQLAEHRSTTKICMLVTTISASFLCFYVTQGGLTMPLSPVFPVRHSYGLWVYCKEPNRQDHFPHGIYITMEEAHDKQTCEI

SEQ ID NO: 931482 - protein, 165 aa, Homo sapiens
MHKYILHLQVYSSHKNSNTVKIFKSPFAISYRLVSCLVKIPCLICILWKEPVDVQMCPEFLPSSGLVVLLTSGVKPQTFTVSVTALKGALQTLPISANYSVPKPLPHFQEEVPPGSKLILKEKRVWQREVASLPSLWCYPGFQCSTEFLPFRWCSLLLQSLLVEI

SEQ ID NO: 931483 - protein, 169 aa, Homo sapiens
MQEAAFPFVPEQIATDRCSYAFWFTLIKNWKHPTSLHRGVTKGPQRAFSARTSHSCCKELDRALAPDTENPPGILLKEKESCRIRNKAIESEKKAVESESYRIILHCMMYLCKTATNKTHLEKLSIAASIRAQREPEERNCMYRLGVLRIRTHIVQYLKYYLKRETDLS

SEQ ID NO: 931484 - protein, 142 aa, Homo sapiens
MLPSAVSSIIVLSHQHRAPMANSWGKTPVLCTKVQLVCQFTPVEGGQALSMPLPPVLGIGLNQTRYSALAFHGYHHQVRGNLLQQPQEANTGLFKRYCTQESPREQDATGILIQWVWGGALDAAAFPMLLGDAGVGGPWTTL

SEQ ID NO: 931485 - protein, 189 aa, Homo sapiens
MRQSLQHPNSRSTKTEQSVETRSHRPHVPTYVDGLPQGFRDSPHLFGQALAQDLGHFSSPGTLVLQYVDDLLLATSSEASCQQATLALLNFLANQGYKRLDRRPSFAYSSEIARPLYTLIKKTQRANTHLVEWEPEAETAFKTLKQALVQAPALSLPTGQNFSLYVTERAGIALGVLSQTRGTTPQPVT

SEQ ID NO: 931486 - protein, 344 aa, Homo sapiens
MMKPCLGKPAAGCLPNALPAEGAVLQERGKMIANMSRRQLSLWRLKMMHMQIQRPADTEIDANTDVDADTDTDADIDTEIDTDTDSDADTEIDTDTEIDANTDADTDTDTDANIDTELDTDTDSDADTDIDADTEIDTDTEIDANTDAGTDTDANIDTEMDTDADTDTEIDADTEIDTDTEIDANTDAGTDTDANIDTEIDANTDAGTDTDANIDTEIDTDTDADTDTEIDANTDADTETDTDADIDTDTKMDTDIDADADTEIDANTDADTDTDADRDTEIDTDTDADTDTEIDTYADADTITETEIYIDADADTDRYSRDAATDRCRYSYRHRYRHRDYKYR

SEQ ID NO: 931487 - protein, 152 aa, Homo sapiens
MAPDGSCSISYRVWQPGPLGMKAPDSHLGAQLPGTPDFPAFQNSRPHMQQNDIPLCVAAFFAHGSLDGHLGCFPALAAEDAAALSTGKALKPRKRKNGVCSGKRGQIARWSRVSTTVLGSWLSHRHSESRALCCLSEGFMVVGVKGQGVTRM

SEQ ID NO: 931488 - protein, 169 aa, Homo sapiens
MLSEVINFGDLEGCGHLGTITSGDYYPVPEKVQVCAVVRTECVCSTRAPVPIDTKAGASEMERNSHGHLAGSVVSRFSYVISGKLASGLHGIGVLPAWPGFIEDQFLALWTKPYSSLKVVTNLSLNSILFGLHELAVKLSWFLQFCLLRPTANVLLPLWFSDSPQGCSG

SEQ ID NO: 931489 - protein, 166 aa, Homo sapiens
MRSRRLAPWGLVNAWLLSDRLGCTATLPGLSTQPEELLCPVLLRPCAIHLVTHPPRKATQGQTRSRADPQGLGPTSGASPCQVGLKSVHSCSLSLDHLLHRLQLLGGPKLMQRNSSKAQPAQTIRPKAQSMADTFRSMKHGRTFPSPAPTAACSLNRDQSPRPTAM

SEQ ID NO: 931490 - protein, 165 aa, Homo sapiens
MKSLKRRQLCFQKLLSKTFKKITPITPPAVPCDGPASPLTRMLVLVSVLGFGGRCLWVSGCESQSRLGHGGTLSVIPLVQAGVQGLTEPPGRTLGESTVAVEALLGMREERTCKVPAVFIPESGFHRLTASRWLSLPRAGSRPSRQVREGHTAILHALHLCVMHM

SEQ ID NO: 931491 - protein, 167 aa, Homo sapiens [sequence omitted]

SEQ ID NO: 931492 - protein, 170 aa, Homo sapiens
MCSVPGHLAPENSPHTYTRTLLREFTPRIHSHAPAGIHPTHTLARSCGNSPHAYTRTLLREFTPRIHSHAPAGIHPTHTLTRSCGNSPHAYTRTLLREFTPRIHSHAPAGIHPTHTLARSCGNSPHAYTRTLLREFTPRIHSHALAGIHPTHTLAQWAALPSDVASCGLM

SEQ ID NO: 931493 - protein, 191 aa, Homo sapiens
MAFNHMISKHWAVTSTVSRGTRGPEAMTTLSWAQRFPHARQTPAENATGAMVKESVVREQCGDVFLKPERPGPSSVHITGPLITNQESFVIERTLHLGILHGKGPTRRRMMGEAPSQPPCRSRLCGATDSNKCCTSDNVLVQNPGKASEAHGVCCLFRQITNFQDIPLHRNLGNGPVPQQPPSQRTKETQS

SEQ ID NO: 931494 - protein, 141 aa, Homo sapiens
MIPECVEGDHQDGHQGPSSAHTQYQFMEVSKPRKCFHAEYLIPSTSSTGEELKPGPLEGVAGCGLQVWFIDSLSSSFHRVKPINQDQGQTNQHRDNKPLKAQEGLFQLQGLLSPELIFLLSRAFPTPVLFISTVLARTPWF

SEQ ID NO: 931495 - protein, 122 aa, Homo sapiens
MGQLTKERGLIELTVLCGWGGLTIMVEGKEEQATSYMDGSRQRERACAGELFFIKPSHLMGLIHYQENSTGKTCPHDSITSHRVPPTTQSLAGKPPGFTEICEQENLPDLLKYVSRKTYRIY

SEQ ID NO: 931496 - protein, 145 aa, Homo sapiens
MPALLQGLGLLTICLLGVDDSWRLAWAESIKMVIVMAIDICDFCDDRQDNIQEQGSFPCFGHKSRWWKRRWLSHGYVLKKLPGLCPRPWNYELSLPDSLVFNREIIFQGAKFLTMVTSYLDPSYPIERSGLNDPAVPRVLDPPQT

SEQ ID NO: 931497 - protein, 140 aa, Homo sapiens
MLIATTQPEATEAKRQHSGIFVTSGPFGGDSKKAMPSAAENYMPVDKQFLVFYWVPVETEHLAIRHRLTSQRQLQCFSVNVNNDFAKNLSRYPCTSRFYVAIISDAALWAHVPSIAEAGDTASGDFVCYDVNLYVFFTRL

SEQ ID NO: 931498 - protein, 134 aa, Homo sapiens
MRRNRKHEGTNCSQQCLHSLHQDTLQPAADSLLCTKTPSSPRPAPCSAPRHPQACSQLLALEKKHHLMRLTPATGLICSTLCHAATFNNTDKTWFGGLDPIKHSINVMSTSTELFTHLVVDGVITFFCLSKGKT

SEQ ID NO: 931499 - protein, 138 aa, Homo sapiens
MCLPENTRPTSYGFSLLPPFFHGRAVETQSPPWSWPRLPDTPQTSPKPVGLTERGPKPVIRTQQDPCLSGGLGRQGRGLTVGAQDDVPGDISHVAPSTSPCRGAPSFPGLLSTSGLPWPPLGRMQKVLLKSTKYHFHK

SEQ ID NO: 931500 - protein, 117 aa, Homo sapiens
MDAGTLDAKQRKRNFALTTPTVSQCRPEHTHALVLMPWSSLHLHGSVTELLWTRLLCLLQGPCRQMLPAAREGSYCMKKGLFLGSLVQSQLTKCLGSLPCADAGDITDLVYDIAWGT

SEQ ID NO: 931501 - protein, 139 aa, Homo sapiens
MGERPPTAVPSAFSHPLVPQYVPPTATRHPGTITMDSLHPVCLSPGPLLPPDRCGLGTFYALSMDRGTKDAKLSLKPNTCLGSAPQGRLLGALDVSIPHAEAAGPHMQVSLKWASFCSRGRRTQQRGQEMDSSLSSQGC

SEQ ID NO: 931502 - protein, 166 aa, Homo sapiens
MRIRIEFLGASQSLRERVPLPGYLTLGTRGKMATNTVTQLEDISAPVTKIINTLTNNSVRLGSNDPSGRHKYKVKNGRLDFQNAISPSTPQQIKTLSVSIMKNHSIQKRKAIKITTEEKKKVTPDVKNRFYKTVTRRGRKAREEVSGRCAAEGDDSAQKVIVVMAA

SEQ ID NO: 931503 - protein, 149 aa, Homo sapiens
MSEGGMGAKVSTPTHDIYLIHECPLISMRVHPIYQDGGAAALRRGGSQATQGSLDCHGPPQRVKDVVAFKELFPPLCKPWIRHGAKLAALELLPGTPSTPPPSMGERGLQSPRGILGPPAPRAFCEADPKPTLLLDAYSYKPVLSSLFY

SEQ ID NO: 931504 - protein, 302 aa, Homo sapiens
MHLVAQQALTAFRPWVDSFRRLLVCGSLMGHREAAGAVLGLWLVLAQGTHRSHQVTPRLASQSSPADSPLSNLRQMHQSPEKDFCASISSEPPITGKQALIKSFRREVLHGAREELNLEEQLKSCWPWRSSWGGAGPGGAAGEELALEKQLGRSWPWRSNWGEAGPWRSSWGGAVPGGAAGEELPWRSSWGGAVPGGAAGEELSLEEQLGRSCPWRSSWGGAVPGGAAGEELSLEEQLGRSCPGGAAGEKLVPGGAAGEKMSLEEQLGRRCPWRSSWGRAGPGGAAGEKPPLEELTSEEGMG

SEQ ID NO: 931505 - protein, 165 aa, Homo sapiens
MRGVTASAQLWMSPARYLQRGTRSSPPPPPSAGENGEPWDEKSMTQVRRGVLPSGCSELSKPYLLQPSQHTWSSATLQTASESFRKVNSPLVKWLFIVEPGFALGQSDCRAAPLNPRGGTLSREDLGVQPPFQGCRENVEYSSLVTRSLTTWWNYQPGTHETVKP

SEQ ID NO: 931506 - protein, 116 aa, Homo sapiens
MELENWVLLVFTSSRAASAGMKMGNWLSPTNQADCRSSLCLQLCNFTLASEWLLSTACQTDGWLPPHLHELAHGKNTIASAIPNSWFRSKRSSANMGRFDLPEKKGSKIFVKCPVL

SEQ ID NO: 931507 - protein, 261 aa, Homo sapiens
MTSYLTTRTYYFPVMKMGTFSGQLGVLLLAMEDEVVKQTTVTLPLSTERDGCDCGPRTYEGSNGAGKSPDALCSGSQRASEDQGGKARPRVSPPGASVLKHCPLSCHNEDIALEGNAAWSICLRGLANANDGDDHCCDYWRSANCHCHRHHHHHHHHHHHHHCHLLIIIITIITIIIIITIITTIIIIITIIIATSSSSLSPSSPPSSSLSPSSPPSSSLSPSSPPSSSLSPSSPPSSLSPSSLPPPHHHCVVLLLIIITV

SEQ ID NO: 931508 - protein, 145 aa, Homo sapiens
MNMPRGQSEILSEKQTKSQTELGTFQIRFPPIWCSLSAPSSSKSTESKTYNVVIIDLGGGYTRVWDEALANSLPCRELSCDGEACEDNSQRRESFLDLCYENLMKFWSDMQLEEEECMSDIGQPVARTGLTFDSLTNHKCKDDSF

SEQ ID NO: 931509 - protein, 147 aa, Homo sapiens
MVQPTAPRLQTCAAYYCTEYCRQLQDNETIWRGNTWLQYTDTRTHDRIHILHVGQKKSPPSLCEEKLEMNDKEEKEESDMGAQESSTLDKDGVTTALRRGGDQATCTDLNFKLARASSTLLNRSDESGYPCFIPGLTGKTFNFYLLI

SEQ ID NO: 931510 - protein, 227 aa, Homo sapiens
MGSIFVNLFESIFGKKEMHILIVVLSAAGKTTILYKLKLSDIMTTIPTIGFNVETMEYRNISLTMWNMGSQENIWPLWHHYFQNTQGLIFVVDSNDRKCGKEAWEELFRMLAEDELWVQSSWCLPTSRASPMPGMQPRSQTSWGCITCATGTGAFRPPMPLVETGSVKDWTGCPINSGTRSECNTLSLSLLLFPFTLSSCGKCAALWCECQNLLPWFFVVKPLVCAT

SEQ ID NO: 931511 - protein, 171 aa, Homo sapiens
MSGKCAKDLQSGEWGETGQPPRTGKARHPWFEGLRLPGQARQDTAGAEVTGKDPIGFFKVCFVLPSPPPTAAPFPNLRSQTMTRLMPSDKSKVSVVKIGNLRQTIAIETGYKAVNAWLKWIKYSVHTLNKGNCYACVHSRPEAQIVPFPLGWSSSRPGVGCMVALFQDSAA

SEQ ID NO: 931512 - protein, 153 aa, Homo sapiens
MNSSVLESTYMCLLLQASSSELLLQHPISLGRCGNASWVGYSSSGFRECAVVYSSCSSIIEVSTGDNSRSPRQPRLQISEVMAAAAKAVGILGGKDFWDLPVSSFSSRERSPNRGDPSWCQVWYGLQAVAAALGSGEVDVAVSKDCTTAIYPG

SEQ ID NO: 931513 - protein, 243 aa, Homo sapiens
MCMNSTHQPSRFYLALAPCPVKCQVQTEIHLKNRKHGPVNNLQLTREIHLHWRTEEQLQVRTVSRKVLQLPWLPPTLSPASSPKPSSPLAVPQTCQATPTSGASPGYSCVLEKPSARPSQYSLPLFHPFSASIPLRREASPVTVSKTLSKLACNVSRVAIQYRGIAGAYLAWMVQDNHLSSEARCFHWWVIFAVTSDVATTNILDRHILDIEAHIVPRKSFTQSFMVHFDRFYFRSSTSHKSY

SEQ ID NO: 931514 - protein, 251 aa, Homo sapiens
MLKRPVLLHLQQTAHADEFDCPSELQHAQELFPQWHLPIKIAAVMASLTFLYTLLREVIHPLATSHQQYFYKIPILVINKVLPMVSITLLALVYLPGVIAAIVQVHNGTKYKKFPHWLDKWMLTRKQFGLLSLFFAVLHAIYTLSYAMRRSYRYKLLNWAYQQVQQNKEDAWIEHDVWRMEIYVSLGIVGLAILALLAVTSIPSVSDSLTWREFHYIQETSPVGLGHTLMTSGELDHLQRPYLPVRSQSQG

SEQ ID NO: 931515 - protein, 142 aa, Homo sapiens
MGHLYIFECKYIASGMGTSQSQAGFWQRNGTLLSCWILSAITTITAPDCNSWCDLAYRGTRESVEPLAWSDAGTITMGPSPNFTIIYGAKIYHLKTESSLPELPGWCELQFLLLAKHLKKISVFLLHYNLMVLPSYMQSIVV

SEQ ID NO: 931516 - protein, 149 aa, Homo sapiens
MGELRMLFLGKGTQQQQGKKTWGSFSGQEIPEQNLKRWVENCQVSYPSQGRRYRHGKPASCPLPVPGGALCQNPGMLIWALQIFGMRSSRKLNPFDAIISASLAFCSHGDSRGLEVQNQGTSRFGVWRGSTSHRQPSSHSNLTWQKGFE

SEQ ID NO: 931517 - protein, 145 aa, Homo sapiens
MSESRGPQPGTSPWRVRNRPHSRRMVKMTNSDNTECRRGRIWRRTLGSRRLDHSYILVGMKEEGMWEEGGCGYRGQQGELHVLLAVVHGQTYTGGAHDRQVKLEKSDSSDVDAADLATLCKPLSCTRAMILEYACPLESAGSLKD

SEQ ID NO: 931518 - protein, 141 aa, Homo sapiens
MFPDRPLMLGVDSALCGKSPGTLTIPAQCLLNQDTQKLRVTLPSETFKSQYTIYNTPFSPTSVIEEVSVEMVPCHPGSLMATMSDVSLLTRARQLSDSSSEVDLECGGTGQKTSYRSNCEVGPAGIRCDRDSSGNGERVRA

SEQ ID NO: 931519 - protein, 172 aa, Homo sapiens
MKETLEPDSSIGNEYGENENIMHQIGRTEDGVTISGHKHRVCLSVFSGQLVTAEYPREEVAFLQMDSKASTANKKFLQNDEIRSLQPYLHLCPTGAGSRPKFGNWKKFHTGTVYKDIIKVKDTTRLVTLELLPPLGFNQQGEEGVYCQRELCGKGSLMGAMTKALCQGGARN

SEQ ID NO: 931520 - protein, 173 aa, Homo sapiens
MGGWRFSAAFLIGGCLATASESLAQHLLRFYYACIMVLAIALKFAIYLFLLIYIHFHMTPYLLDALQFSSCKMNIMYQTVETGKHISQSLLKEISSCGSFSHKPDIILQPCWKPSDHVKLIHYYEKNMRKSNPLDSITFHPVPPPMTYGNYYNSSSTWVHFRDADSETPLQTY

SEQ ID NO: 931521 - protein, 127 aa, Homo sapiens
MPFSSNSDSKYLLTSKANPTKTKLDNWDLIKLKSFCTAQETINSVNRQLTEWETIFANYASDKGLIFRFYVELKQINKKKPPDNPIKKGAKDINRNFLKEDIQSHQDKEYWRFVLVQEMSPNLTVIK

SEQ ID NO: 931522 - protein, 116 aa, Homo sapiens
MPCHTETGDCGGVAVWSETEVTQEWKTKHRMFSLIRPGCGERNLSFLVAVEMAAKFTSETVMPLCKELVLRTMQGWGNLCIVDLRFTEFAACQGCVLAASQVIEMPSRDTTISFLT

SEQ ID NO: 931523 - protein, 155 aa, Homo sapiens
MLQLVTALDQEIPRPGPPEGLPLFHCSPANESVSPPASWRASQELVTALFTLVIQQAVGSCPVTKNKVMWTTREEEINKSYQFSFSGELIDTGEEVAPVVNNFALKELSEIFPKIESTKNRTLEADSILLSSMTVHQNVHSVVHIVVQTGEGKHC

SEQ ID NO: 931524 - protein, 299 aa, Homo sapiens
MFMWRNVEPRSVAVFPWYSVPFLTPPCSHTRPGNLPVTQWPPTRANNLPSWQLLLMSVHQAQSLSALRKEQDSSSKKDGHSPNKWDKDHIRWPMSGGHELQQAAPGSGRAHQGHPNQDNWTVSQILSKRWYTLGPNETQKYHDLAFQVKHMASEDTASDEEPMVIHEEEGVTMSLLMMALAPLTLISSSRSGSLQSPGVWSGQQSRPPVAPTPGDGGPGMPSKATCFLPMDPATFWCKRPESVGDLELPGPSVITVGEAEDGLRELETEKAVSSSLHVPWTSAGPDHAALPGPLLLPVH

SEQ ID NO: 931525 - protein, 172 aa, Homo sapiens
MHVSTVLLMGTWAGGSAPAMKRTTVTQYSTCALLTALCLLLPVLQETAQSRRMVTSHPEDRPALARKHGASQPAGLGFPRTQTVTPAFTFQTPTAAEPALLSAWLGRAPETETITDMAETVDGAEPRICYAFSCPYVPHSLDMLDKGMTHVPGWTQQDDQTSSCYYPEEYAI

SEQ ID NO: 931526 - protein, 150 aa, Homo sapiens
MGVLQSAPSNHKGSEEAPAHQRSQQNTLLHTMLHHRLLLCKCSESTFPAMKFQLIKFTLSRFWYPNDAGQHIWQSLFQPLNWDLHHHLPWFSGLQSQTGIIPLVFLGPQLYSANHVTLTNVFYKLLFVHIIFMSPRSILALWGRQYISDT

SEQ ID NO: 931527 - protein, 171 aa, Homo sapiens
MKLPEEGSGSNICCSAIFAVLQPPLVTRRQTGSGEDLQQTPTDLQLRVLTVRRKTNKQKGIASTSTKRTSTPKPHLYVTIIKDQSSSPATEQSWTENDFDEMTEVGFKNLVITNFSELKEDIRTHRKEAKNLEKRLDEWLTRINSVETLNDLMELKTMARELRDTCTSFSS

SEQ ID NO: 931528 - protein, 158 aa, Homo sapiens
MAAAAAITIIAYCSLKLLGPRSYFAPFALMPCEDAAVSLRNKPHQTCVAPGALLPHVQSALSQQEGSHRSYPEINPPPLQSRALVTIWTNTVCTLKWTQGRGHAGSGTFSQGPECPACVLEERVRALGGPGYSQWRAREALSQAQDSGQGSSCQDRWL

SEQ ID NO: 931529 - protein, 163 aa, Homo sapiens
MVPATLTLTVLSMELFLPSQNVSSLRTGTSRCLGGSNTCLAWQCPKKHRVGGCKSPPGGAAAETEQNPQSEQEAPQGPAEAGHSLYVRPKPPHPWGRRGMPPVITGWVSHLLQAGGHSQPNLSLWPPSSPLWVRKLMDVENITLKIMTATAAISAAWNLSLEA

SEQ ID NO: 931530 - protein, 150 aa, Homo sapiens
MTDHLYLGPSAADLLPFAGSPLQTLFDWVSPAEAAEQQRLLAVPSSGSFVPVGHLPDASQSSPEIKQGFTSVILKIEHNQSNVYQEVKVVQAKQKQAGPEQSPSSYAIQSDNEGVLNGWENAREYLSNQCILRTYQLPGTVTGFVEISDE

SEQ ID NO: 931531 - protein, 377 aa, Homo sapiens
MCLLPIHLLPCLNLLLDHMVEKKNPFSVEKFKLAAEIYINNEELNVSSQDNGENALKTLGSTRGKCGVGAPHRILIGALPNGIVRSGLLSCRLQNGRSTSSLRPVTGKAAGTQHQLMKAAAGPVPCRATGPELSKPLGGHLLCQCSLDVRHGVKGDYFGALRFNDCPARFQTCMGPVAPLFWPTFPFWIGAFTQYLEFKMAMFRKCREIQDKTENEFRSLTDKLHKETEILKKNQAEILELKNAICILKNASEFCNSRMIQAEERIREFEGRQFENKLSEEAKEKRVKNNEACLLDPDNCLERANLRVIGHKEEIDKEIVVESLFKGITTENFQNLEKDIKIQVQDSYRTPRRFNPKKTTSKYSIITLPKVKDKERI

SEQ ID NO: 931532 - protein, 152 aa, Homo sapiens [sequence omitted]

SEQ ID NO: 931533 - protein, 146 aa, Homo sapiens
MHLSYIRGVSLHTLSIYCCHVRHDFVSHSPSAMIVRPLSHVELCARPIAQTDGTCYVISDVTKGPRPIHGHVTRSPVYVFSTPRGHLNSLVVCDYVMKPEKIQGSSCQVVYGDTKLQLNIVHWAAVAVPVQSQWLLKVNVVVPLSG

SEQ ID NO: 931534 - protein, 149 aa, Homo sapiens
MRSHSSAVGWSMGLGAVEQGAALLGEVRAAQEPAEAGEGSGMAGCVPHGPGPAGPAGCSECGPAKPTPTRNSSWPASAARSPGSRSRLSLHTSLQAEGVGSGLGQPRKGLPQCSGGLKGSSSAAKVGAQAEEAPRAASTLSPLNCPLLE

SEQ ID NO: 931535 - protein, 173 aa, Homo sapiens
MIHTARSVQNSNGSTSVGMQQDSKQVQADTEISDTLLVLFLDIHNLTCGACVLSKLSETVHLTENAVGGCEMGSGWSKKGKLSKPKALDREDILMKTIFNILLVYIFLIFEADSMYRVKVPEYRTTHRVYPEVAVSSQGKASETKTEAVGRFASRLSTKGSSPSMLKRSSKNK

SEQ ID NO: 931536 - protein, 140 aa, Homo sapiens
MDDEIQAEVVSDGDELSGNWSKSPSCYTLAERLAAFCPSPRDLWKFELERHDLEYLEEEISKQQRIQEVTEHKSLENVQPDDAIEKKNLFSGKKFKPAAEICISSKEPNVKSQNNGENVSRSEDLVPCIPAMAKRGQGTD

SEQ ID NO: 931537 - protein, 146 aa, Homo sapiens
MKFTELQEYTITQCKEEIWDYVKRLNLRLTGVPERDRDNGTNLENILQNIFHENFFNLVRKANIQIQEMQRAPRDLDSHIIIVGDFNTPLIALDRSSRQKNNKDIQDLNSALDQIDLIISYRSRHTKSTEFTFFLSTHGTYLKSIS

SEQ ID NO: 931538 - protein, 149 aa, Homo sapiens
MAKVRIWALHQEEDCTGVTLDVQGSEHLLHTLLQQGAPAQMSKCHTQGRRHQPSLRLAIHPGAFLGLRAMVTGVSVTWKDSTRDTLRHLAEAAVRRGRSGRHTTSGHGLVARSGLPGPCGLACWSKVFRACWGTLGIIVELWRTGIPNH

SEQ ID NO: 931539 - protein, 155 aa, Homo sapiens
MHAVMGVCEGFCVTYNEEWDGWLCGRCICKLTKYSPAVVQSSMPLHTHTSRAQGPVYSRLLYTLHKVETQFQLQTAGLWGSVGDESLSPQDPGNTLLSSLLGDRGSLRACVPAGNECFSPGGRPGDSCGETAVGDPPPQGKRKLEDWTGVEPGQF

SEQ ID NO: 931540 - protein, 145 aa, Homo sapiens
MRRKENSRRQAPRHLLVKTTKKRRCVLGYCDSCDWDRQVGKGSGYFPQKKQKTSGADMLMNLPSAAMENLGLGWGCGGILLAHAEGEAERNWAHLQVAGPGPLLSSPSSPSLSPSALTHAYSIFHFFYLDAGVASQVDSLSWWSL

SEQ ID NO: 931541 - protein, 135 aa, Homo sapiens
MEGERKRERRRRRGGGGEEEEEEEGEEERSKEKRSRGGGGGGGRGGVEEEEEEKENSKSKERGSPLTDKRGTTRDIEGRQAEMLCREVQEKPQRNPRECSEKVLLDNCVKFCQEDSGHKKIKRMNIVQRYGRLDM

SEQ ID NO: 931542 - protein, 139 aa, Homo sapiens
MVLLFLPVTESLIEELLEPSAWLSGPWEIWMLELTGSDRHSRGAKCAKLVRHRPCEKSAQNKMGDKDAEPILHQVRGGIQNPNLGAEVRAVLGSCVCLDSIFYPTNNQQALRGLWHVRALCHGAWINRSPSKCCTIAST

SEQ ID NO: 931543 - protein, 153 aa, Homo sapiens
MSWRRKCFVSRTYCGVCDPDLRASEEIWRDEGILRGTAKICLPGTKAAGAMNCKEHFSGDLDQLPECWLVSKISTCLRQRGEHYCEICKGSSTAKAYSAGENTFIRGLSYGSGAGEEIFQTPASSSFSASTNGMRECWGGRILQPRSTLKIGN

SEQ ID NO: 931544 - protein, 134 aa, Homo sapiens
MFLFILYAVNFLDSLISSKNFFRLLGIFYTDNFIYKAPWLGGAGCLCTAPYLISTDRSGGKGLIASQRGRVLALYSAFSDTTGEARSTSLPLDTMGYNGLATMALDKYTHSKWDKLAKIKVLKAPCKSEIQQGN

SEQ ID NO: 931545 - protein, 222 aa, Homo sapiens
MSSNSSSSSISSSSNSSRNNGSISSSSSSNSDSDGSVSSHSCSSSGSSSSDISASISSSISSNSTSSSCGGSGSISCSSSSISSSNSRSRNGNSRSSSSSSTGGSRSRNSSTISGSISSSNSNSITVVIAAVLVVLVAVVVLAAIVALSHVAKEGLRCEVSCTQLGPHVISIEICGSRSLALLRVHGTSAEKPVDITGYHVAFAFADEKSDAILNAIIIDTY

SEQ ID NO: 931546 - protein, 136 aa, Homo sapiens
MPLPPPSSNIPGGSQIVAVLAARISSQWILVSWAPWEWEPPSQTTWLPGFSTPFQGSEQFCLTGIPGTTGNLRRSPGTDYLSLPSDGTNPANILSCTSTLHNCERIKFLLCKLPGYTALALTTQCPETMIQQVLYL

SEQ ID NO: 931547 - protein, 134 aa, Homo sapiens
MSGIQMKGACTEEGPQLGLQALLPQAGRWSFTSLLFKETFSFTFQESQCLVAPRAFCFTWALNTRSPTFHSAPLCCCESNTFHDKPQRDDNVETPDPKEIDCSTNWLALWLRSWKKLLANSQECGNLSPTATGD

SEQ ID NO: 931548 - protein, 143 aa, Homo sapiens
MGTVDGYHSQKLKCRQAKTSRKGLSKSCNIGQMYREKDLLSDLPVTRGLQRTWRKSENFSQMPRGSWHRHVDGENQEDMFTTYCQSSSFPKLRVPSCRGTPCGRDIHLRPTFPTGYQLYHIYVLENTGKQKQKNKITPNTINP

SEQ ID NO: 931549 - protein, 143 aa, Homo sapiens
MLCQFLEICKGIISTVMRGGRRKSPAELHVLRCLPGKYGSSAAQGLREGMEQDHNMERGLWVGDGCGTYERGVDVAENVKDREKESSCTALGSGPGDSQPFVAWRLPLPAQLSRTGATLRWAFQRGSGGCTKEIELLSMEHGC

SEQ ID NO: 931550 - protein, 138 aa, Homo sapiens
MLSERPFQSTETVLPTEPSQGHCTASGMKQTAPAGDQPSRRAGTEHLTEGFLYESVLMLLITTYPRVGVGACTIAHMWSLEPHCDSQVHLLTMHVEPAGVLDQGEEPDFPRSAKLLAGHVRLWITHASLRAVRHGCVS

SEQ ID NO: 931551 - protein, 136 aa, Homo sapiens
MAFGLKYECEKEPTTHLANILGTALGGGTGAKAQRQGCLHWGGTEVSTAGMTWFPRGMPSALQARHQLVTLWKERAPHPPQCVARTVIQSTQHFLFHNQPKLPLQCIRKATLPPASSCYLLQHSCQKHVDLQDLFV

SEQ ID NO: 931552 - protein, 140 aa, Homo sapiens
MQQQGVILEEESHPHQTTKPDGTLISDFQPPELKASAPWDASAPGLLHNSVFVSLAPGSCPFSLEDTRKERVHSISLTAAGAASLATQGPLKNLYSGGITSSRFSCVVTNGKFTLFLRANNISLYVYATISLSIHPVTDI

SEQ ID NO: 931553 - protein, 208 aa, Homo sapiens
MDAACRDQLSRGDPNPAVLEELKTHTQKYRVKRRSFLFEYVDQRSCKMCFAEQKSALNDQIVDVDSQTVSPKNFINRAESHGESRASLEPLRFAIMNKGFLLGDMDQTCIPLYGAIQATVPGEVAVVDENTHVLGSWCTPNPWGQKLLCPGAFWTMPCAFYLIKKLDCPIEFPTLDFADCISLLIYLEELKTYVHTKAYIGRSQQLYS

SEQ ID NO: 931554 - protein, 458 aa, Homo sapiens
MECSQHLFLTVPEAGSPRSGNQPTGSLVGAPFLVCTQPPATSVLTDDATDLFLEKFQSQPYRGGFHEDQWEEEFEKVPLFMKKAPSEIDPRENPDLACLQSIIFDGEHSPEQAKTYKDEGNDYFKEKDYKKAVISYTEGLKKKCANPDLSAVLYTNRAAAQYYLGNFHSALRDVTAAKKLKPCYLKAIIRDAKEKKLLEMRAKVDKLKLIEQRDVRKANLKEKERNQNEVLLQDTKARNIRLSEAACEDEVSASEGLGELFLDGLSSENPHGARLSLDDQGRLSWPVLFLYPEYAQSDFISAFHEDSRFIDHLMVMFGETPSWDLEQKYCPDNLEVYIEDEDRAELYWVPAKSTLLQDLQHHRHFVKALTPAFLAILDLHALSSGYTDPHLCDFLESHFLDEEVKLIKKMGDHLTNLHRLHRLAGLEAGLASISLKGSPSSTTRSLLSPGTSGGPLAK

SEQ ID NO: 931555 - protein, 330 aa, Homo sapiens
MPRTCSWKSSRASLTKAPSEIDPRENPDLACLQSIIFDGEHSPEQAKTYKDEGNDYFKEKDYKKAVISYTEGLKKKCANPDLSAVLYTNRAAAQYYLGNFHSALRDVTAAKKLKPCYLKAIIRGALCHLELKHFAKAIDAKEKKLLEMRAKVDKLKLIEQRDVRKANLKEKERNQNEVLLQDTKARNIRLSEAACEDEVSASEGLGELFLDGLSSENPHGARLSLDDQGRLSWPVLFLYPEYAQSDFISAFHEDSRFIDHLMVMFGETPSWDLEQKYCPDNLEVYIEDEDRAELYWVPAKSTLLQDLQHHRHFVKALTPAFLVCVGSKLF

SEQ ID NO: 931556 - protein, 146 aa, Homo sapiens
MAGEVLEHPPGAIEPVMLRLGTALLNIPSALSAKFLGALVDAPLHTDGPRGEGSILQKGHNQAPVGTEEVLEAHGNLPVHSRTAEAAVGVSQGPSGPSAVGGIHVYALFRMRKAQVEMGKVQEDTDILTLIRALNKQFLEPTHAKR

SEQ ID NO: 931557 - protein, 241 aa, Homo sapiens
MPAHFSQDLASHPAGVSPPATVRKRRLSTLWASKESSLDLSAPGEEPPTSASLTQRQRQRQQQQQQQESLRAKSWAQNPGLPGILNTTGRKRRDPKKRAAAGSSQLGGALALSWQNSASSPISWFILWPCSSSFLRRGTFPASSLGALSQNWKALCAPVPDSHLPKPLQVPFVVLGGAEFHFGDLSNEASNRLSPVACRELGKYTSICQWFRLERGRVLIMDDEALGVLRSHITKEAAEGA

SEQ ID NO: 931558 - protein, 203 aa, Homo sapiens
MTGANTFPPKPLLPSGSSPESSPLSVGHPLLELEISVSGAKAVISNDIITPSSSWMTMGSSSCSLVSELWSVWAATDRRSEDTPGAVAVPVSDMLRSHEPLYTPASPWLVGLASELDFFRSLLQVGHLHLEGQVVALLRLIGPQGVPPLAQDLADGPVILVGVTLVRPARAWCRLLKIMTTTHGPPDVVLVPFVGAASILLRR

SEQ ID NO: 931559 - protein, 229 aa, Homo sapiens
MFQRRAPQGWARACAVTHVSLQQRGMKGRAHKLFYKAIVCGKEIIRTGDCAVFLSAGRPNLPYIGCIQSMWESWGNNMVVRVKWFYHPEETSPGKQFHQGQHWDQKSSRSLPAALQVSSQRKDFMESLALPLLLSLSLWLPGAPSAFVPPTCHPDVPACPQRVLYQSSHVDENDVQTVLHKCLVVGLEQYAQMLKTKKYQDSEGLYYLARTYEPTTGMIFSTDGMPVLC

SEQ ID NO: 931560 - protein, 416 aa, Homo sapiens
MISLSRILTELLLPDERASMLIFFLVSVALELLCFLLHLLVRCSGFVLFYTTRPRDSRRGRPGLGRGSGYRVHHDVVAGDVHFEHPAPALAPNGSPKDSPAHEVTGSGGAYMCFDVLWPRVQRSWPTFRAVLLHRYVVAGVIWADMLSIAVTYFITLCLFPDLESEICHCILGEWLPILIMAVFNLSDFVGKGGHVPGSLQILVALPVYWRGTHLLACSCLRVVFIPLFTLCVYPSGMPALRHPAWPCIFSLLMGISNGSFGSVPMILAAGKVSPKQREPAETASPKQNALAMKESEPWVRMDPPAVCVSLWETTAVMPAGHVRTSPHTHVMPQVGGCAGLGSPPIAFLAQDRRGEPLKDEGRRLHRRLQAEFVHGRELGLPSRDPGGTWAAPDKPVLSLPICESPRRALPLPEAG

SEQ ID NO: 931561 - protein, 139 aa, Homo sapiens
MTSSDSVGAGYSPGTCFWRHMEKGAQVDKKYPWKDLGGENNATFSFGFQKGVRKESTFVQESGLSAIAQYTGYGTSKFEFQSKTLSPNQIKRQGPRPCQHVIHQKCGVCSGLLLCWFALNMAVSKTFEESKVVLGFFTV

SEQ ID NO: 931562 - protein, 200 aa, Homo sapiens
MVLLLGSSDPPTSASQIVGITVVSHCIQPFITYLKTITRESQTSGARRESFLKKPEKSRLAPPGWNFQRQTLNHSLKMQLHVSTRSYPLEAEKGKEIDDPLGQGSSTPRLWPIRNWTEQQEVSGGQASEASSEFTHAPHHSHSCLSSTSCYTSCGIKFSQECEPYCELCMNERKGSEALSVTKGAHSLLVVYVTGKASGH

SEQ ID NO: 931563 - protein, 134 aa, Homo sapiens
MDLKLPAKLCCKILILPAYLFCLTCLKWSGRALEVTVVAIREHEFIKGQSLGDEIFGKPRLRTKGSELSENCMEMSVRYESETHMQDLKDVTNNVHYENYGSRKLAAVTYNGVDNNKNKGQLTKKYTHLAGLEL

SEQ ID NO: 931564 - protein, 322 aa, Homo sapiens
MLSHLNQHQVIHTREKSYKCKECGKSFNCSSNHTTHKIIHTGEKPYRCEECGKAFSWSANLTRHKRTHTGEKPYTCEECGQAFRRSSALTNHKRIHTGGRPYKCEECGKAFSVSSTLTDHKRIHTGEKPCRCEECGKAFSWSSNLSRHKRIHTREKPYACEECGQAFSLSSNLTRHKRIHTGEKPYTCEECGQDFRRSSALTIHKRIHTGERPYKCEECGKVFSLSSTLTDHKRIHTGERPYKCEECGKAFSLSSTLTDHKRIHTGERPYTCEECGKAFNCSSTLMQHKRIHTGEKPYKCEECDQAYKEKLYKSKECGKAVN

SEQ ID NO: 931565 - protein, 148 aa, Homo sapiens
MTALQKKEEGEEKKGEGEEEIEKKKEKEKKEKEEEEEQEEEKKKKKKKEEEEEEEEKEEEEEEEEEEKEEEGAKGREEEEEGGGAGERKRRREKKRKSRKNKKEEGGGGVGEGGVGGGFGEGGGGEGEEEKLQLVTCPKTRTQLSWGP

SEQ ID NO: 931566 - protein, 141 aa, Homo sapiens
MPSWGLAGLQWAPRTGQGCSGMAPPCRVDIANRLLSPTSRIGDLFGSSRERAWNCPGTQAVSDTSEVCVTQCCSPCILDLLQGLPLFSGDSPVGQGVHYLKLASFSCPSLCVWWVPDQACSPGLITPDGLPPPSGDTTVIS

SEQ ID NO: 931567 - protein, 127 aa, Homo sapiens
METVISTITEPVQGFMRLLVWRSSLCSPFTLGLQLARRPSDKTWQMGMVFQDLQGFSGRSYGIYITEDFSLFLLDSRKDKLKQSAKPICRSLVTQRANVVFALESVGRASRLDVRHSGFPGRPCGWV

SEQ ID NO: 931568 - protein, 141 aa, Homo sapiens
MSILCDAKVWGTDSVTQICASLVITDAEHILICLLVICISSCVRNWWVLGLTDFKNEAVNPPGVKLQTFAVSILAHKGSSDPKSGQQRKLPQRQKEHTFHRVEGDPSGLPLLARQPAFIPLSGPTHILLIGPLYRKLIGLF

SEQ ID NO: 931569 - protein, 150 aa, Homo sapiens
MVKALLWLPHVLEECSLSSGLCFNLQLHYMPLFQPLVILVLFSTLRSSKVLFHGLRTPCHFWCTGPLSNIGLSQYICCGALGGPLNHTVKTLEPASITAFSASTAVTTILNTNTITSATIPTTTTITSHSLVSLNYLAGTIIGDLMFIFH

SEQ ID NO: 931570 - protein, 134 aa, Homo sapiens
MINRFWALCEVNKQLPTKDVQMCPEFLPSSGFVVSLTSGAKLQTFTKEGSVLAVLFASSGQLVSQDPSDCIIFSSIDCAHQEPSTPTIRIPSKDLNLDMSICLAGWEWGHSIEEMQEIKRNESWEKDKGDKEKV

SEQ ID NO: 931571 - protein, 143 aa, Homo sapiens
MCCIHMQTLMCASQPSRGLEAEIEKLVLKNKKHSLAGTEGTWRGEVTDESGHRVVLGEGEFEGNGQKFIFGPDGFGHSLTEGRSLDLLISHARFQALDYDSSIRTLVDTHEEEAAVSVEFPLERKEGSLLEMQKLRPYPRLTK

SEQ ID NO: 931572 - protein, 137 aa, Homo sapiens
MAVVSFSKEAKKTLMDEMLCTYGMENCARLSQKAAPEERNVAAASQVPDPLPCDSAALCVWPCSSTPAGKGGRMDSVRQKLLEPLRIAACAKEDLLLLTLLSTHRSIEELNSSHLNFLPTSLLARPPLRSSCFSADV

SEQ ID NO: 931573 - protein, 175 aa, Homo sapiens
MAGQKELASLSQGCHALFEVPGVSNLLGANAFPSSRRGCLQHKPRALHMVQLQPCMEPAPVPGPGAACSTTAADVPGCVQRLDPVLACPHTPHHSAPGWPLAGVGSGSAAQAEHSLPGGVGRPSPAGMSNIQAEGAAGHRGFWLVKNSTTRSRDFRIYSKNVQYLQCKNNLPRCI

SEQ ID NO: 931574 - protein, 223 aa, Homo sapiens
MRKKRFPAETVACVDLSCVVQKISILGANSGKGKTEMERWRDLGLKYELTAISIRMPRNLKITVPGGAERAQLAGGKCGEGQEWQAEHPPGGHSKGRDRHCLRLWMQTMLIERRIDILHRRVCRCKRKEANELPDRKCLLFSKAGVQLSAGHEGPCMEVEPRSFLNVFLLHFSPPFLSLLAKEEPNGDIPYLGELLRSQAHGRGHPFTLLKMIKENTYFTGLL

SEQ ID NO: 931575 - protein, 178 aa, Homo sapiens
MYLAVMVDSGVVKMEDEAFQEVTKSNWCSLSINHIELDRQCVAMTQPSPQPELSNTVYHCLHFHRGSDRWLERHLKEEMQEDEQSAVQEVGDKEKVMSQKPTGTWSLLQGTHYTKVSMHVTEGALERGHSLPKRVITKGHVTEGDLWFGLEGLFRILLDKARWKEDVMRPCFLVVARV

SEQ ID NO: 931576 - protein, 167 aa, Homo sapiens
MTILHVMNSERIGHRGSPGRIEYEEYNLTYGLLSSRVTLKTFLCSDTVQGDAEVPMAPAGQDFLTSELTNRGHHPSQDAGLWTHRGSGIVTGIEDSEEQNSDIGLLRDKPTSRVEKQQKGPPATWCFRKSFLQVKMTDPNLKDDSELNGRREDSMSRGRKVTNSVKM

SEQ ID NO: 931577 - protein, 160 aa, Homo sapiens
MARSKGRGFGVDSMQILGLLLSSGAPWGLGTISFLSVPGGFGADEVALLLLKVGKPFGVIQGPRRNLNIPLLHENYGIMQRLLQEEGQTRAKKAKTSRVLCFRKTNVSRCPEERLCANFASTSELHYPLLCSVVVAYNISLTKLHMCLYLDLAHLSNMEF

SEQ ID NO: 931578 - protein, 141 aa, Homo sapiens
MLPYATSCSHHLLKGKQKEENCSQVCDLQKARSYSKCTLSGSLRWVQHQPLGASLPAKVWLRLWCSICFVSITNKTSILPITLLIGPGIGEKPIDWPAAYEEASIGRAFESAEWLWNHYTTVGTVEQNGHHGPISQYGSER

SEQ ID NO: 931579 - protein, 137 aa, Homo sapiens
MMTVGYSAPTSFVMVQTLTLFPLPATVAMKPSVAGAWSAWACLAVMGRVLPLPMMGGQQEASGSQELSLFLHIVGLLSCNSVLCSPCQGEGKERTTTQTFTEHLLGAEYARHFISTISSPLFQMRTLKLQGMNTLNI

SEQ ID NO: 931580 - protein, 147 aa, Homo sapiens
MLGRTGAKKQDLPSPALHQVRRELYVEFPVPRLPTLPRLCGAQLTLPSCSWFPFSYLRLPSLWLRSGLASLLTRLEGALQCRRAGQPHPGALRLEPRLAVNFRKHLACLDRRMCMDGLALLSSCAASAFVLLPHLKKDPLVTPIGRS

SEQ ID NO: 931581 - protein, 148 aa, Homo sapiens
MITGKMITFQKKLQQSQSRPGELEPSQKAVLVYAGLGLPILIPFAEDLSDGDSGRKVFSPSTLLSSQCGSSLALKIQLSVDNKACNHSITVQPVITESQEGRCSIWSGALALAPCTRSFSLQTILQSLQLHLNCVSNTVAMQNKMSSS

SEQ ID NO: 931582 - protein, 135 aa, Homo sapiens
MKQICFSIELEPLNKCKKGMPITRGALNGSDEHKYVCQKSVPRQAQLEAIPLTHKTDLLLEVLKSGLNHLLSGLSREDLQEIQQGPREVSTTQSLNQPASQPTNQPNLPTNQPTKKPTSAFNSKCNISLNQCLKG

SEQ ID NO: 931583 - protein, 142 aa, Homo sapiens
MSAEVVCCLLFSYALPTEVESREAVGLAELWSISDCFTSSEQGSMGMGPTEPGEGGNLLAYQLLRPWEKCSIWTEVYHCSRAVPIWPSWKRLQNFHFLNHEISWDSFTGVRIAQERPTPMTQTSPMGPSLNTWELWELQDEI

SEQ ID NO: 931584 - protein, 168 aa, Homo sapiens
MEQPLWCRPGAFSLKTHCTCKLAKKISNPIKPMQIPNDSFTTQRSVPTLVVNSAMRSEKSTCQWTSESLVRCLIYSKDERGVTLGPSSISCQIGHCPLGCSTCSKPMADLRCYNPIRTQELRNLEVEVGLAPQLAGYYIARLDILDAQPDETLQCPQGWGCGTFPSGL

SEQ ID NO: 931585 - protein, 138 aa, Homo sapiens
MRIWLSASAVRTRPVSLWRPAHMCPGRAVLWILQGGRKAGGTGHLPKDETHQKNAFKYSKILGWGPIGHQSSIFCQHTVAQPLIGEKVCSTHGAWPPGKETVVMEPAAHQGRTLSFPENGLTVEDPSSPNVGGYHLIG

SEQ ID NO: 931586 - protein, 256 aa, Homo sapiens
MGRNQRKKGENSKNQNAASPPKDHNSSPAGEHNLMENEFDKLTEVGFRRWVITNSSELKEHVLTQCKEAEKQHENFVKHTQLSIAELISGRKRILSKKNTAGGITLPDFKLYYKATLKKLSSCLAVQGLGELVNRRRRFQPLTEDGSLVLQPDTMGPFHKVPQLQVCWSELQTLFAWVSPAEDAEQQILQNSKYCCLILPLEALSQRGSHLYEVSVGPYWEVSPNCCTSSEQGSMGVADTEPGTGENHLVCQLLRP

SEQ ID NO: 931587 - protein, 153 aa, Homo sapiens
MAVLFLMGDGSLEGVFPRSVSSLNAIYFPVCPRLWRTPSLLEGSQGNTKYQSTFLVQKMQQKVGSGFELATEFCKLKQPKSYSVIPASKLSTGHFWLSGEDQNRRNEFPVKNCEGSEIPLYLQANKSAIYNFMYADRTHETPGSETEEIHLQR

SEQ ID NO: 931588 - protein, 140 aa, Homo sapiens
MGLEPPHRVPTEAPPSGAVRRGPLSSRPQNGRSTDSLHCAPGKAADTQLQSMKAAGREDVLCKATGAELSKTMGTHLLHQHNLNVRHGVKGDHFGTLRFDYPAGFWTCMQPVALLFWPISLIWNGCVYLMPVPTLYLGSN

SEQ ID NO: 931589 - protein, 173 aa, Homo sapiens
MGFQGRTFTHHFPRGRGGSPGSVLLLVPLSSCSLLHPPALWCAFPSNTQLLTPNCCQAAGANLLLNRDLEGVVLKTEKFDSGDGERKGVAGGIGKGANESEFRMVLWREDLGRSRESCGSWRGEEKAGDGRECVGLVNVNERNNTSHIPIYIEDSSEFTYHSCGVCYKHFPEL

SEQ ID NO: 931590 - protein, 215 aa, Homo sapiens
MSKVCSLAPEASKTTNQMGGRNNSRCAAFKSCNTHREILAPEKDVAVMVDCSLQALARYILEYRQQMMQSKWKESSKSLEKFVTTDLLKPTSVKSLKSFSIQLCSIADIKDTIFTSEDGYIKNAAFCVKDQHILFDSNHPDQALSSSSGIWVTGNTETISRKVKEKNTPDTVPPLLRIYPRETLIQRMFVFYLPNAVSYIYETNQFFYSTYSSNW

SEQ ID NO: 931591 - protein, 161 aa, Homo sapiens
MSDGFGYITISLSLSFIPGYPLFNPGWHQPAKKDSKAVLGLAAIFWDSQMPVIGMRPAGILTSSVSGFHILIIVPYLLPLGQPLHFSRSQYVTTLSHKMACQKSRGGNLGELLFKGLRPLNETSLVLLGILLLEPQGPLRKILGASWSLPSLKPKGRSSTA

SEQ ID NO: 931592 - protein, 125 aa, Homo sapiens
MKQFKSVEKLTEYAPYFNASVVNSLPHLLYLSIYVHHLKGCEAFPNNIPQKLQLTKFVVNFRILRHPEMGHCSWIPDSKLPIAKCLVKAMVTTVSVSLSNFLSPNGILSFKYCAADLGSQVSGPP

SEQ ID NO: 931593 - protein, 174 aa, Homo sapiens
MYACTLPSGVSVEQGRGASLVYTAVGREGLGTSQTFFQPQRKPPPRSQRKELSMAKLEQFVQRQQLKEITLDYHSKYKINIYESILMHEFFSPLHWTCGRGTTSTWPTVLSPMWRELVSGRVRDPDGCSGCQHRSKLHVGPAVRPGVLPQRERGGTQVRVPMTLKAQSRCHSAV

SEQ ID NO: 931594 - protein, 165 aa, Homo sapiens
MALFSIVASWIPFEKISSTASGFLTAGTQLQSCTLELTALVAVSGRVPPQGVRSIRSWTFKATQAFNVALTGLSATGRAHSPAPPRSATPIVNCACEGCRLQVPYENLMPDDLSLSPITPDGTKCDTHKCMVLKDLNKKLLLAVKNFTLSPANSILPTPHKFIQM

SEQ ID NO: 931595 - protein, 140 aa, Homo sapiens
MKLLMEGFHGKAAELQSGQGEIRAIINFVFHCVLQQEKCLLPLQLALESKNVKLAQHALAGMQKLLSEERFVSMETDSDEKQLLNQILNAVKVTPSLNEDLQVEVMKVGLTWPRVCVTGTGTHPDPLHLLSENASALWSC

SEQ ID NO: 931596 - protein, 150 aa, Homo sapiens
MGRNQSRKAENSKNQSASSPPKERCSSPATEQSWMENDFDELRQEGFRRSVIMNFSELKEDVQTYCKEAKNLEKRLDEWLTRINSVEKTLNDLMELKTMARELRDTCTSFSSRFNQVEERVSVIEDQMNEMKKYGERHKDTPREEQLQDT

SEQ ID NO: 931597 - protein, 224 aa, Homo sapiens
MASAEQWCMLAGFSLPGPKLNPRGSGGATGWKERVPEVHPGRKELVNIQGDLNGDLESLRKLELGFNVFGHGYPFHLDNPSQAARSERFHSDFLEGHIMITIQTLARLAFCQRKGKQEIPEGQRTPARNWAFEKPRGQISLSSHYSVTSATIHWGFFQGYKLPMIPVLETLKAAFDLGSHVVVESIGGISVKALRLACGSKNQIGSTGSPSQGSLEGKSPEQKQ

SEQ ID NO: 931598 - protein, 146 aa, Homo sapiens
MEVTRVVMTKQTGFAGWQRLLYTSKRDINWIFLLSFPGRLSDFASSGRLLGHCFDDTHSNCVSHIMNSKTTRRRIVREALSTRELARNHISDGALAEFKNLGPSSSFLPEQQSVSFKLSKPEIVPLHSSLGDRARLCLKKKKWFLL

SEQ ID NO: 931599 - protein, 132 aa, Homo sapiens
MNGSHLKVPPARHQAEHHLSVIVSECYTLQIHTLLFASGEIDGKGRRSAETEAISQQEAPRLMNNKAAHFLDFTAFLARCAPSPTALWPADGNLDSLLPNCECEIAPDGKAESTDPSRKVGFISQQMKPQAR

SEQ ID NO: 931600 - protein, 266 aa, Homo sapiens
MVVALIYRLLVCFYEIICIWGAGGATPGKFLLGLRVVTSVLIALSWVLVIPSSNVSITTSTIRALIKNFLIASFFTAFITLLFFQHNRKTYDIVAGTIVVKRNGFTLPGEPPKKVHTGVRGPLPSGTVDLLRGRSSLNLKGVTVHMRIIDCDYTGEIQLVISSSTPWSASPGERIAQLLLLPYLKLGSSTVKRTGGFGNTNPAGKAVYWVNQVSDKRPICTVAIQGKDFEGLVDTEADVSIIAINQWPQHWPKQKASIGIVGVGAA

SEQ ID NO: 931601 - protein, 129 aa, Homo sapiens
MIFTSTVNRTTKQLCQIVQTTIKISKLPKVEVRGSLLNTCIIGYLRSGDSDCPWINVESEVYQRPSMWFTCLAAFGFACTTEHVLHEAARWLLSSAGWIQQKDEEFKLYDLWVPYSPKLYTVLPVGMPH

SEQ ID NO: 931602 - protein, 152 aa, Homo sapiens
MEGQGYQILDTALSFPDPLKRLAIAIAVVLPARTGGSLYVQEINSKRLKSECLPRWLLKWHLPPSVNSARYFVHSGEDPPSMRAGTIQSAGGPERTKQGKVLWPLDFRTYTSDPHNPQVLRPLALDRKLHYQLLIFEAFELGLSHIIRVWRL

SEQ ID NO: 931603 - protein, 140 aa, Homo sapiens
MITVSLTLSVQVAIQVPSLFTIYHRKSPQKCRQKCKITTALKARIFVNELGFNNCRCASSFDRDGTFTKQGRERAPQTLRAAFSEGTPISMISTTLGWIGKTVTHCILKYETSVKKRQSLSEPLEQCTLEVCFAPTVFDK

SEQ ID NO: 931604 - protein, 145 aa, Homo sapiens
MTEGKEEQVTSYMDGSRQRRRKSLFDNGKCDDRDVPEDYTTQNSEPGWTTGKLGGKKQKCRFLENDLEEVDGSKEAVPVDLKVGGAQTIQVAILTSSSMESLCPLVAAFLPLELKPLDQQKLFRDDGDHGKTSESHEQELTAAFL

SEQ ID NO: 931605 - protein, 180 aa, Homo sapiens
MLRLVYSSSSCPSQKPGNHLTTSLFNVDEELLTILPPNLISVFPTLFNPAVNAPAWSSPALTCCVTADPNCPPFRPHLSQPTVFTAASVGSLSQPRYCFLQASLLQVCWSLLEFHSRSCLRQYHQQRLQNSKDCCLFLSLEASSQRGTCQMPAGALLYEVSVNPCWEVSPSQEAQGSRTN

SEQ ID NO: 931606 - protein, 239 aa, Homo sapiens
MRKNQCKNAENSKNQNASSPPKDHNSSPAREQNWMKDEFDELKEVGFRRWVITNSSKLKEHVLTPRKEAKNLDKRLQELLTRMTSLEKNINDLMELKNTARELREAYTSINSQINQAEERISEIEYQLNEIKHEDKIREKRMKRNKQILQEIWDYVKRPNLRLIGVPESDEENGAKLENTLQDIIQENFPNLARQANIQIQEIQRTPQRYSSRRATLRQIIIRSRVETTKKMFRAPRKV

SEQ ID NO: 931607 - protein, 138 aa, Homo sapiens
MCYRQISLLLFRSLKKREREGGRLARPVACFSHCGLPGSLGPFSETCFSQRPPNSSDIQPAPAPGPNTRRPAVTTFQDAPKFSKCVPYKNKIEDGECSGALCVKNITHPAAWAHYFHILPQLSVSPRASEQFSGKLKA

SEQ ID NO: 931608 - protein, 127 aa, Homo sapiens
MTNSISFSGQCSETVLVRVIQTNRNNKWNVCMYICACVCVCSVRIYAYKDLLYKKLAHSVVEAEKSQDLQLAIWRIRRASDINSSLNVDRLKTQEECKSNSIKKGLVTQTQNLQGLGLNMPSSKPLR

SEQ ID NO: 931609 - protein, 150 aa, Homo sapiens
MYLGKDSTNTFSVLSITLPVVPFLDQKSLIGQSSRSTIRPLFSIYCVLAIALNIFHILNHLIPVANMRKLSHREVKGLSKFTQLVECEMTGRCEYDFSKRGEFLTFQGHVHSPNSLGGRKALSGRIVNRLRCISNTTSKDVNLSFRILPV

SEQ ID NO: 931610 - protein, 141 aa, Homo sapiens
MVQSWASISIIACLHAKKHLAQKIREEILKEFTSINGLKAKFITLTLRQQCVILLESCEDPIIVCLKCLDPIALAHSVSLELPLLNNACDNKHKMVIFDAEGSFGFGRLLIAASISELVIGLFRIRLLPGLVLGICIYSGM

SEQ ID NO: 931611 - protein, 136 aa, Homo sapiens
MCLEIYLYTKIKSKWSKDLNVRPASMKQLDVNIGKFLQDISGQRKESLSKTSKALPHVLGCLQRGVLSHVEADTEEDPNCHEQHPSNTATHLGTDQEAVTDGGRKPEESGTTSQNELWFYGNEGKEHLARTGRKTA

SEQ ID NO: 931612 - protein, 157 aa, Homo sapiens
MSYREVQNESSEKSSWKNCKNNPLDRLQPCLSTRTAPGSRPVTVVPGSSGPRVWDYPSRFQFQNNPNRLSFWGYPCRTRLKAHTSTKLTPVETNFRLHAVDTGSRPALIDPINKSIPVDPGSRLNPTDPDARLMHLLTQAPASLPKDSSRKPAHEEY

SEQ ID NO: 931613 - protein, 152 aa, Homo sapiens
MERVLKVHQYHPYPCLLPQHLVLLEGLQGQARTELLSSTITMPSSGILPEELACGYFTVIDKNATKIHETQSHQTTSKSFIHVDAWCHKGMMQIVLNISSIRSCSTLFFYQYDILRDKLSSQNVQSIKASRLQVLVFLREEIRPFGDSHASL

SEQ ID NO: 931614 - protein, 172 aa, Homo sapiens
MDSEKTENNLNFIHLLTMKSSRGNNLGDKKQTKELNFSESYCELELNVHESDVSKIFIIDDLGPRCCSPQAVKTPIDFSGNFTCPRSSCLVPVAVSRFSPYSLSWIPLARKGKSPNPLCFREQVGMAENTGGMDPTLGTEPYNQERNLKHSASPCGEEGLDFTYTALTLRSS

SEQ ID NO: 931615 - protein, 152 aa, Homo sapiens
METGLYDLGGTGLPRHTLCKLENQESQWYNSGMTGVRQRPYGKEKYIRSILLAFQQFNPNDVNTEQNPKVGKFMFGLLLLLFHKLSVLKINAAHKVSEGAFFVSKDIELATDIVSDQNESCFGSSIKVVDHKETIEKLNLEEGKGFALMISK

SEQ ID NO: 931616 - protein, 161 aa, Homo sapiens
MEKNPWKPKYFISCGSFGKPCIQTVHESPRINYQSFHIMFIFECIHLTFIDLIVQNLQKARGPKGGQNNTLLDTFLQGGVEGEALAGTGAAHGTCGPARVLGGRGLSGLHSERLAGAVSLGQRPPPTPQPRVPSTAQGLSTAAQCGTGGQLHLQPSAGSTR

SEQ ID NO: 931617 - protein, 142 aa, Homo sapiens
MLPQNSAYLSRDQQELKSPSQFKHPSAKARETCMSAKEVEIPPRRKRSKTPKSNSIFKPFHEETVLSSIYVLDTFVKNQFTVDSMDLFLGSPFCSMGLCVCFYKNVPEETTRPRGIHKESFQEINRAPEEIGSSHKFNTEEA

SEQ ID NO: 931618 - protein, 144 aa, Homo sapiens
MTPDGTAYPGILRMLGIVFKYLSGKEKWLVRRRIKRYLYPESNTDKQDIDYIDYIDIDYIDCITQIANNLKFFQIVFMCVSIEIYEEDSILMNKTLKISNSETITLRSSSRIFQPCISELAISLKYQMQAHCQSTYESEVTLNI

SEQ ID NO: 931619 - protein, 166 aa, Homo sapiens
MTWIVPLECSGMITVRCNLCFPGLIDSQFCTAGEASGNLQSWQKSPLHRVAGRSECKQGKCQMLVKPSDLVIVMRTEWGTWYKLLVDLPFWGLENGGSSLIAPLGSTPVGTLSEGSNPTFPFHTVLEDVFHQVSAPAANFCLDIQVFPYILRNLSRGELDLTSYLR

SEQ ID NO: 931620 - protein, 139 aa, Homo sapiens
MLDTWSSHRSRRYYCSDVMIALECLQQRTLLISFMMFLYNLREWQDSEVSFLLFLSCFLSMNDFFFSGKGSFIWLRSFATNSSFSAVDPFQCPFSENHWERFVQLIGDIEHRIDASLLWESFLEETELSNKMQESISSG

SEQ ID NO: 931621 - protein, 154 aa, Homo sapiens
MRPQADGKTDVEPKLIHLCKQGAYKSHGLSSKLDPFSQDWSSWDTRQYLFSNAPLYWYQFTALVHFHNADKDIPETGQFTKERALIGLIVPHGWGSPTIMVEGKEEQVTSYMDGSRQRESLCRNPCSKWHQWVLAVPELSIRVYCEVSYIIEVM

SEQ ID NO: 931622 - protein, 480 aa, Homo sapiens
MQVIHTPHVDKYCSRSLLKELLRGLLIQTQQEKYWGHCALSTRQLTTGPHATPLPLFGRGRFGQVHKCEETATGLKLAAKIIKTRGMKDKEEVKNEISVMNQLDHANLIQLYDAFESKNDIVLVMEYSLMKSPTVPLGPTQDVNHPFVQRLHHSLRVDGGELFDRIIDESYNLTELDTILFMKQICEGIRHMHQMYILHLDLKNENSHHHHSGIHVVALSSGQVGLQESPAAPRVTQEAPDFGTCFSVGLLPCGIESYGECSRGQSEGWGQSAKEKRGWGIETKLSKTLELLRLKNDWREKPSSAVRLSHRRLCLNSGIMVNCEAVQRTGWIMQGWQDTRNLIHHIIKGESTHTDKPAPKYKPREKLKVNFGTPEFLAPEVVNYDFVSFPTDMWSVGVIAYMLGLSPFLGDNDAETLNNILACRWDLEDEEFQDISEEAKEFISKLLIKEKREGCPWSGPSQPPYIFFASFLSLEPPSHV

SEQ ID NO: 931623 - protein, 160 aa, Homo sapiens
MRVVPVMKYVHANYTPRDSEDDYGVGLWVLWTPVAQTCARTPLINWPLHALLHQGSSGDIMTFGIPGSHWLGPAAVLRIGPNLLPKTSTPPARLGCDLTPENVLFLYFMQSVCQAVNEHALLHIFQTPLLAPALVAHGWAMAIKVWQVSNPCSPQTQGKA

SEQ ID NO: 931624 - protein, 178 aa, Homo sapiens
MPAESLGRPRFLHLRDSRPSVQMGLPATVPKISRGSAFHVVISGPQAFGGPYGFGYQAEPSTGNAGRWLEAGMKNDLRLPLGTHIASTAPQKFLMVEVNTQDSLAMGFPFPEEFSLTEPLRIPPAARRSTQSVCAGAMSKAQKARHAAGEFRGRPCGSCLNGVTFGSSAFRNSFPLAH

SEQ ID NO: 931625 - protein, 129 aa, Homo sapiens
MGTRFRWSKLIIIWLAEKLVGSFFLNSLVPMENKPAAKPHSVRGTNEPPAIRPLMSDLLAGANIYTHGNDQSLEMDNIYQASSHVAHFNKSPSQKGPTYALYGNINLQKLLTYLQFVTQDSLCNRNRVL

SEQ ID NO: 931626 - protein, 139 aa, Homo sapiens
MVKVPHLLPPCPLPPQKPKIPLPLRLPQPRFGQSGIPNVSAFNLLSSAQVDIRGIGRSIFCTRKLNFSEGYGGVLRVDGAEDALVADLCLGDVADLAVEERGDPAHGATAAPGARRAADPRRLSGDPQYPSRLWQPPQT

SEQ ID NO: 931627 - protein, 152 aa, Homo sapiens
MKKTEDNNTLVFIVDVKANKHRIKQAMKKLYDIDVAKEVNPAMAVIVFAIIRLMMMLLRQKDRTPCSLRIRTYMVYNALVLLICGDLLAGTLYLQQQLDPLDGSNLRLGDGRGHSTCQEVLERKEEAGCCQKGLGREPALTPGLRVHLKLLN

SEQ ID NO: 931628 - protein, 234 aa, Homo sapiens
MAIYFTWVQAGENKRVSEREIRVGLFYRIWVGKGKLQSKGVCSLAGRSRDTYFGYGFAYPACNASSKTIICGLMECLIHHHGIPHSMYSDQGTHFTAKEVQQWAHAHGIHWSYHIPRHPEEAGLIEWWNGLLKSQLQYQLGDNTLQAWGKVFPKAMYALSQCPTYGTVSPKARIHRFRNQGVQVEVEPLTITPSDPLAKFLLLVPMTLNSAGLKVLNPEEGMLPPGDTTTIPSN

SEQ ID NO: 931629 - protein, 128 aa, Homo sapiens
MVKKDHQSVLKAPRTPNLENVADFFDGATCVFSFLFKHALMENDFVWTQEEISTMSAFACEPYGLPGLCVQELDPPTESPFRRLLTQREEMQRGHQGKDVAFQGPEDISQHFIGCIAFGTEHADPLAA

SEQ ID NO: 931630 - protein, 143 aa, Homo sapiens
MVLGESLYEDVHLGIMNIELVCQTIIMEDIIREVNVDGEEKDPNTEPCKIPTRRAWRNEKGASKRNQRVGDLVHEGGRGLRGRTYFPSIATGRKTEYKGLNAGVGGCGGGSLQKVSSHGFQFPQDMEAEWEDRGGGCGHELGE

SEQ ID NO: 931631 - protein, 160 aa, Homo sapiens
MPPSKGISLNGKKCVFFNPPEVPLNDFLFCNDISSQRGQRDKTADLKTFSSAPGGSLGTNSQSAQWGSEIDGAKQHHLNKQNPEGDMKTSSFLYGCETWTSRDIMEDSQRITVPTDELNNTTRVSAPNPPYQRALAQSSAYQASDLGCHLCDICHVRYLL

SEQ ID NO: 931632 - protein, 137 aa, Homo sapiens
MIKMMLEDNGSCCSGCCEQSGLDEGDPQAGGADLRLFHKPGVRGRGLEQDSGDGVEGAELEYVMWDKHSFILRTGHWETNVTGKGSGSRLQERVLGSCERKYLGRESTNIYNLFSLNTATWKPHLHNKNLGLYNPLS

SEQ ID NO: 931633 - protein, 165 aa, Homo sapiens
MNQQQPQEWDLGFILHCVPPMLGPNGYLQIIELIGCSQAVREASVMEQLSFAHPGNVFWNEHLEKVWWFKGKEPKEQNESEGMSLVKTTLQQGRHWRRHLLEVHWKPEEGYSPMHSPAAGLQHNLLPPAMWLNAHRGALTLAILQRSRGQWQLVAAGVGSPQQRD

SEQ ID NO: 931634 - protein, 285 aa, Homo sapiens
MAATGAVEVGSPGSAVAPSPALDLLPALGHLFWPISAEDKEQQPTQIKSLCMNCYRNGMTRLLLTKIPFFREIIVSSFSCHHCGWNNTEIQSAGRIQDQGVRYTLSIRALEDMNREVVKTDSATTRIPELDFQIPAFSQKGGNSFVENPQAAQKDDALVITHYNQTRQQEEMLGLQAEAPTEKPEEEDLRNEVLQFNTNGPECNAPTQTNMKLVQIPHFKEGPSTRTACKFTTLEGLLKDIWELVTKNPFTLGDSSNPGQTERLQEFSQKMDQIIEDLPGYGSHI

SEQ ID NO: 931635 - protein, 164 aa, Homo sapiens
MFPWLKYHSLISSISHFKNSNFFYYTLSFRVHVHNVQIKHTTLQQIILQWLPLTAKLRTSAFVLNSRISMLGLNSFIVLSHCSPFENNNLAKRCFSQEDCTNLSSQTRPSPLLHSQEFVCLPGIPLILSCNICIYLSFNPPSNPHSLGPWSMRTDVTLLFFFFF

SEQ ID NO: 931636 - protein, 161 aa, Homo sapiens
MTWPTSFSCAGCFLPWNIGLQVLQFWNSDWLSLLLSLQTAYGSSASCWVVAEVLRQGSSGFTRAEVLQAGCAHHSHLSSSKRLAPLSHTPTYPRQRISSSGWVLGRDGAEALQVTPLCSQDGATVRPGTRRHLRVSTKIEHPALCYTSSSLQVGQATATIS

SEQ ID NO: 931637 - protein, 302 aa, Homo sapiens
MQEYNDTLQRAERLSVARENFLMGKNNPPNLVTQEDLTIYTKWLVCHLHSLGTVHQYLQALQYLPISKVLSVAFNRVAEAGQKNENVCVNDIDPDIQGSASPDPVDTSISVMKVPPQGPTLEGEEGMFSILTVGTDVVESTCSLSLKVSQKFQSVFMEQQRLQMFPDCEAGIAKADNLGLAGPRMTLKKKANWISFIKVVVFWKVTRNTELANIESLPLGEIELVPVNLSAMTNSDGFRVPAACGWYGVIPDRSTASYSPGTNRNWCCCLLQWICEPMKTLSKSSLVLANLAPKPDTISEGP

SEQ ID NO: 931638 - protein, 225 aa, Homo sapiens
MTLQLLGLEDGTDPSDRNPVLMRGAYLSFLYLCHLRIRELQHICLGILNYFRSVERTLTINTSGLTLVSGKLVPTMEDSSWVNMAKGGLGTLQGLGAHHYVRETPAEHKDTLLFWVSYPKKHPPTPTPSRHTDFLSDLPLPLCPPPWVLAHQAQLVWPSVELERDMGLREEDSKLWQKEKEYVCLYKGFGQWDVDGKSGKMTTNIDDGIKVGILTILLLFISFRT

SEQ ID NO: 931639 - protein, 177 aa, Homo sapiens
MMLIICLWSTELGAGNLKRTKTQYPRLLQECQHQQTAHKVTVFIQGGHQIFHSLTWKCMCSHSHVTPLDDKHSDFVSSLPMITFLQQPSEQSAHKNFQMPEPQQTGVPPKPPPPGACYKCQKSDHQAKECLQPRIPPKSCPICVGPHWKSDCSTHLAATPRVPGTLAQGSLTDSFSA

SEQ ID NO: 931640 - protein, 141 aa, Homo sapiens
MKLYQTHSPTLPPLSPFFAPGFHSVQCLIPSMKVSTSNSLALPSTETQKGHITGPEESMLSETRCSLFRGSWSTLSFPIRNSQFLETTILSKLSQGQKTKHRFSLIGESFHQDNFGVTFLGQGSYLAHLLLVNGAFQGFGV

SEQ ID NO: 931641 - protein, 144 aa, Homo sapiens
MGTGSLVSALLRAASLSYHSCGRAKVFPPSPSFPNQSLHGSRQGFQFHVASPEEHTRFMQFLPHHAGEFRTLSLEAGSQVNAEQHMGAPQKPPSPPAALHEGFGASVQNSHSYVPSSGELRKPYSCIAVAQLYQYSAKATIDNM

SEQ ID NO: 931642 - protein, 153 aa, Homo sapiens
MVVYSNCTSRLSNEDIPILLNYSTLFLAAELPKQCCHFQGQGKGSKRCIFVRRNHHITGNTENRRGERWLTESGLTGGGWGPGHSVRGKRSIDRRRWGHSSPTLTGGKVGIIGTDRSKFMGGGRKFIEFLPDNLDSSEGGVPVKRLLQEVSRT

SEQ ID NO: 931643 - protein, 191 aa, Homo sapiens
MFLLCTDLSVHVPPSYSDLRVHVPPSYSDLRVHVPPSYSDLSVHVPPSYSDLRVHVPPSYSDLRVHVPPSYSDLSVHVPPSYSDLRVHVPPLYSDLSVHVPPSYSDLRVHVPPSHSDLSVHVPPSYSDLRVHVPPSYSDLSVHVPPSYSDLRVHIPPSYSDLRVHVPPSYSGLRVHVPPSYSGLSLYIPPA

SEQ ID NO: 931644 - protein, 138 aa, Homo sapiens
MRSSLSARGPNSSLQGFNMSFGEAHCHPYKESSQNGRCVSIHQSSLKPFPSVCGTKLPHNLTPLSKRQLILWTQLPLRRAAAPLVKEKVEKEKEKLREKGQQRGGRLPLSLRAVSEPRHREVVDWGVGKKNLPTTVQL

SEQ ID NO: 931645 - protein, 159 aa, Homo sapiens
MDSWRQRGLQEISSESRHLGMAGWLWSPMLALRRQGGSDSGKLDTLDLIKRWSCSCCSKSTQSLPDSEGSPDCELNLILHKGPAAPHSKALPGCGPQEASRRNYKEPPAVFLTTRSSCAKTILLISCRGSKMTVGLHVALWSPETWPRAHSHDFPVLLS

SEQ ID NO: 931646 - protein, 124 aa, Homo sapiens
MSECNFDHGHFKAFETGFVAGLGHHELAQSPQEAEPSEMTAFSLRRSLQFTHGLPSISLPWGYKTFHNSDAICRSSWEIYKSCNPGFHDSGSGSNLWKNKLNDDGSLFNSATSSSAKFNTLPEF

SEQ ID NO: 931647 - protein, 123 aa, Homo sapiens
MCMPEPTHRIPELPITNFKYFLYIVKLPLPGPVTNYRSSVTVVGHQEIASPWLQLPIIIFREALSAKDRVLCPMAIKIQACKQFEWQKLGSTGDSLDLPLATEVGEHSCGTEHLTCGVRTNSK

SEQ ID NO: 931648 - protein, 150 aa, Homo sapiens
MREEHSIQMKEMEQRHEINWAWFIRKTPLGMVKGSNGVKPRKKIMDILQNAEKQSMEIGPLKTHLAIQSGMESTSGEDAVNIVEMTMKDLEYYVNLVYEEVAGLERIYSNFGRNSTIGKTLSNGISRYKEIFHKRKRESIDASISIVVLL

SEQ ID NO: 931649 - protein, 128 aa, Homo sapiens
MRDGRPVQETTMAHVYLCNKTAHPAHVPLNLKVEENKEAVGNVRPCRMVHYICKGPSGCQSPPRDQKKAPHEMAAALAIPCSDLQSRFSAGHRDSVCISSIFLGELSTSFPRALSAVIFFPSKIGENA

SEQ ID NO: 931650 - protein, 154 aa, Homo sapiens
MHCRGHQKGTDECGKAPSEELNLSTPLQKQNGPLLEGIHFGPQDGDSRRMASSTCQPLANGKYLQNDNGPSFKAAVTQGGLKSTRHRIPSPLCLKTRILRKDQETSELVKQVTSLAHLQQELAQLAKPQPQEIGPPLFNPGDLVLVKALPSLSS

SEQ ID NO: 931651 - protein, 168 aa, Homo sapiens
MTLTSWKNEIVVEAIYCTLEQKVRPSRGYNKFSYSITDPKLGSASERCKRRRWRPGSSPEMLRRWMADVWVRTITTEEDTDAQRDSICPGDWKPIHGSSKALSLANAPHEGLRVVRPPCLLFHILIPVPERGNPFTTHLKTTRPPLRRPPHRHHCSQLTAHPAYGSLL

SEQ ID NO: 931652 - protein, 141 aa, Homo sapiens [sequence omitted]

SEQ ID NO: 931653 - protein, 194 aa, Homo sapiens [sequence omitted]

SEQ ID NO: 931654 - protein, 193 aa, Homo sapiens
MWRTDKRRGRRKKQAAQHSCWCPFRPRDACQNQHQPLGGAVVAQQALTWVGDKSDPAPGGTATGSLPCHGVPTSLAARSPRPVAASPWEHTSGARCPQRLYWMSPWHRAAPMYPLLSVFSKSTNATAIHVATLTSRGQHPRCPPVHFLTKPPGRSALTCPWLCPHREFSCEIPSGLCKFFLPPKLSLKKFLNI

SEQ ID NO: 931655 - protein, 134 aa, Homo sapiens
MARILVYIRQHSLGHCQWVTLSPLKENDDNTMLLTQGDHKQLSFSALIQPILAFLGLEHSTAFPHNVEGILNGKITNTNAKNISLNRLQKGHLVHSTGADTRGRPFFLTCLIELKSVRAFLWIKPWPTGMLWLV

SEQ ID NO: 931656 - protein, 211 aa, Homo sapiens
MPIVHPWPLPTRSVVLDAFVARDQFHERQFFHGHGAKGAGRSKKEKKLKDKAGRVDHVDSLPSGPECFCSLARTTSLPDKDTDTRTKTQTHGQPVTAWDPLGSFLRDFTQFKVEISWGKVRSDMYNYGHIEGGRDTIWNAGRKPCEAPCEGRTVELSIMTMSLMPEHSFRSQDSCVELPWVRGLPQNYAGNNFQGNKKENMIGSKILSLFY

SEQ ID NO: 931657 - protein, 156 aa, Homo sapiens
MATASSVQMKHLTHSLIVALNSPEYRRAGFLDQGSLPRATGYWQRTARGSTNAWENMLNRKLTDLIVRIRNRNLRVEGENSVNLQDREQDMRKLRLGEVGSKQAFILYTKLPPEKVPQSRTSLGMLSYPWPILRDAAVLPSQRPVWKENGFKAPKK

SEQ ID NO: 931658 - protein, 166 aa, Homo sapiens
MKSVRELLLLLLMVGIHLKWNCIPIMHIVKKSYKVLRLKNKIPSGPYSIFMGTAWNGPDCCDEFEFVAIFAGPYSIFMGTAWNGPDCCDEFEFVAILAGPSRKSKGMSYMGEDKRACAGKLPFIDPSDLVRLIYYQENSTRKTHSHDSITSHGVPPMTHGNYESYN

SEQ ID NO: 931659 - protein, 137 aa, Homo sapiens
MSCFVYLRNTSSSQTLLFSSRKTERENLAVFAVTKGWSQNWAGEDFQHSSPAQQVNGDFDKTIMKMMRGAGSSCFPFILSNFPAALPCGTQGHLQCVVQDGSRPFLMSSINLIPWEKHHDWALGGHLILVIFTGRNG

SEQ ID NO: 931660 - protein, 159 aa, Homo sapiens
MFLELSSMCQKFLPFTEIPPFKDTPWKFQMTLLIIDHWPQVGIFTSGIFTCPHLASEEAGNWSYSNPEWCSHQAAMWPVKESGLHFLEEGNWVVGTLVVCNTGLYQITLLSTEYGSSFSSMFSFKFDVLEKKGKIQGGAYIKKSFPESSAYVSLRVKVT

SEQ ID NO: 931661 - protein, 135 aa, Homo sapiens
MISGVICENSISLEITVDPHAWEFGETQCEYKSSPVGEEVKEPWNGKKRGSLMSRCQVNEKWSLLSELTAQVEDLTCKMIVGVHRPPEGLSSVSCVTHTTMPRKVDRINQVFSQVLQPDLCGEVFSLIQSLSFQA

SEQ ID NO: 931662 - protein, 145 aa, Homo sapiens
MNRKDTISEAPHILASGIGFVRPVSLRRDPKIPSSPQDNGALGKNYVFLIGEPRCLKKAQPRSTRKVEAGSRHTNAPNSKESGVVREPYPRKPDTHVFSLAATLVAFNWPTADSFSVVQTPTYMYPTYVRASTVLAYPPALFASF

SEQ ID NO: 931663 - protein, 143 aa, Homo sapiens
MLSPTTSPGPLVTLHILRQRWSPLFLANCHIAKESQKDQNGMYTPISRFFLSPIWYIDPQFLTNLAALNSIHCFFWFPRPLTPGWVPFSCTKVRKMPFWKILANVVLTSCASPSLKISYLTCYNNVLQCLLIWFGCVLTQIPS

SEQ ID NO: 931664 - protein, 147 aa, Homo sapiens
MAASPQLGPLWHKVSSSFTAQDNPFSNDPPACSENRVGWAALTGIVLALMSWLPTLKVAAITCRQRPLQCSVEGALHLSIPQTVDQGVQNWVQDTVKQGQHFLLLLSLIRVWDYVNHHGYAKEESNHTQVGGAGREGLYAAFLCLDL

SEQ ID NO: 931665 - protein, 241 aa, Homo sapiens
MLLGPNIIWNLGFNVYWESGTALHVSRLLCCSSKQGAWLMYDTLLWYCLAPVIYGVWGGLAFKNQTAMETVLPKILVHSLHWIVCWGKVKPASWYCYLMAKVPSYWNKTSLTVPLYTSNTMLNQSGSQCQSDADFPGHDGRISERVADGHVPIIGHHHQEETFCMCKTQKQKHLGHAASKGDGLGWMQEVHQHLGHRAASTGDVDDRQFVMITSDACLLYSFIAGYLYPCMWKCAGVYVYI

SEQ ID NO: 931666 - protein, 181 aa, Homo sapiens
MLFISYFLSLVFSAAGIFPPLDFKFWVWESVIYLCAAVHPIILLFSNCRLRAVLKRKGRADMLKGLIGSISPTLNIYIDDFPEDSRSRHWQIQCLVRNCSIDGILSWCHSHLAKVMEEQKGKRQKGKRHVGTPFNFFWKYIQGKGSNCLGSSTHMSPPEKAAFSPQVYGGNIFFSSQSPEI

SEQ ID NO: 931667 - protein, 272 aa, Homo sapiens [sequence omitted]

SEQ ID NO: 931668 - protein, 313 aa, Homo sapiens
MANLSQPSEFVLLGFSSFGELQALLYGPFLMLYLLAFMGNTIIIVMVIADTHLHTPMYFFLGNFSLLEILVTMTAVPRMLSDLLVPHKVITFTGCMVQFYFHFSLGSTSFLILTDMALDRFVAICHPLRYGTLMSRAMCVQLAGAAWAAPFLAMVPTVLSRAHLDYCHGDVINHFFCDNEPLLQLSCSDTRLLEFWDFLMALTFVLSSFLVTLISYGYIVTTVLRIPSASSCQKAFSTCGSHLTLVFIGYSSTIFLYVRPGKAHSVQVRKVVALVTSVLTPFLNPFILTFCNQTVKTVLQGQMQRLKGLCKAQ

SEQ ID NO: 931669 - protein, 194 aa, Homo sapiens
MYTPWKRGIYAAVEKNEIMSFAATWMELEAITLSQLMQEQKTKCCVFSLLFKKCLAAALCGPCPGSSPVERGRLCAEEPIRTLAGESKIPFGVFLQSPSCVLESSKRERSSIEERQVVSWHRGAKNIDKVVNAIWFQDIADLAFEKPVRKPHPFPSVCKIIADMLSNLLLQALFLNQGVFVGLFPIHIVVQLRC

SEQ ID NO: 931670 - protein, 138 aa, Homo sapiens
MWDGTQCPGEPSPPLDEQFVIGTIYNFVSRSLQVVHAEELPAGFPSSQVIQALEHSEKHCEKFCRMHMLNTEGLERKEEPILVIKGQRGPENLRACSAMLLALSLERRHCLTEGQSSDDPGERTRGASGILKRSISFC

SEQ ID NO: 931671 - protein, 137 aa, Homo sapiens
MSSSLLTHLFSNPSMHLSSQTLQYWILEYNNSQVETELETLRESSGHTCIQDPPGLPGQAVTELNPGGHREDSQEEKWGWDLIFVDRILIQYPLALLCTGHLPGRLVFGRKPVGNRGLHENSELIGQSGLGVDGTGA

SEQ ID NO: 931672 - protein, 145 aa, Homo sapiens
MALGLAQGPHCNHNLGIACIYSGFCGSTISWCPSLKVDEFPQAPGKGASPHGHHHHRPTGSTAMLLSMFSSGPRNLQSACKCYLTWDSPFIAVSVPLNVQDPRPGIRNSKSPLGAIPVAKLVPNVQEKVLIAFPPAFLKQKELTS

SEQ ID NO: 931673 - protein, 146 aa, Homo sapiens
MERENILLKTKQKKINCKQTEPLYLCSLCFCYQVALELWLLFLAMIVGKWAKDLNRLSSKDDTNGHGYLERCSTSLIIRSGSQANWEITNNITLRELVQKELNEAETKKSKYEKTIITYRESERVGISHLQDLRENCALVSVKNKQ

SEQ ID NO: 931674 - protein, 164 aa, Homo sapiens
MAVLGQTRSQHSTGSHLEPAVMTPWLLSMFAQGSTALLSAGGKASQTLSFPSGWQAPPGQGDMKLKPGDRGPQAPPPRCCHRAHMEYAPARAQKRWFQLLHLLNCVLPPTRGGTQWVRVRQLMGFMTRTAGRVYGPGVWVHRCGVGDAPPSSTIIAILGVLHIA

SEQ ID NO: 931675 - protein, 137 aa, Homo sapiens
MVSHHQHSHTQSRECSSLHSDLSPEKRNKEEKGCYQSLGVVARAEDGPFWTFSASWDLRRKNYLVGDGATVDICLPLEVPPEAERENKKHPGFISASTLFPLAESLQKSERKEPGETVPRDTEQNRGSQETDLQTGK

SEQ ID NO: 931676 - protein, 142 aa, Homo sapiens
MHLLVTLVEKHVYEKTTDFFFCCYSRRFPRSSYCHLNSRCRSSEQMPPEDFCAWKISVNRLLLHLHEETEAQRVKVICAGLCEELVAELGILALGSAFGHLTVQCHRNRKLEKINCQAVFWSQYFNTVTISSMICGTHRCAL

SEQ ID NO: 931677 - protein, 130 aa, Homo sapiens
MADFSLQTFVFVHKPADTNQGTSAHRSVWPLEMSVQMDTLETCANDHVGKEHANRHGGNERANAHVGNECANGHIGNEHANGHVGNEHANGHVSGRQVVKCVQSPSFYPMISHVGIYLTHILTRHMHDDV

SEQ ID NO: 931678 - protein, 463 aa, Homo sapiens
MEPRRLEPAHLAQLLLFAPDADEEQRYQAFREAPGRLSEPDQFVLQVPRPQPRPEASAGSTGAVAVARAAGVPRAFGGRHCAQASESQFNTFNGRVLSGVQVPEYKTRLRSLHFQATLQEKTEEIRGSLECLRQASLELKNSRKLAKILEFVLAMGNYLNDGQPKTNKTTGFKINFLTEVRGPAGSNRLVCSTSKALTPGLAQLWQRAEEDILNSTKTVDGKSTFLHILAKSLSQHFPELLGFAQDLPTVPLAAKVNQRALTSDLADLHGTISEIQDACQSISPSSEDKFAMVMSASSEQPVPAPGWILGWLDPGGTSGLAVSLTEACQSFLETAQPALRALDGLQREAMEELGKALAFFGEDSKATTSEAFFGIFAEFMSKFELRDGFTPGLVTVATPRPLRPEQGDGGREGSPDTAEVRGHCAPGSEHTASLSCSYLSRRAVVGPSSASPCSYPQAQSQML

SEQ ID NO: 931679 - protein, 168 aa, Homo sapiens
MGQCRQSRAPLVHMSIYIERGGDMHLGLTGAAFLSCQVTGQCREVESDITPFYATPPQDLAEGNLQGYCNLHARNPLGTWIRSGGALHMVVLAAPPDSYLLYTQKFQSKGNLFFKQCQPEAWTDSEPHSQSHKIIFIQSLQLQALGNQGWPCHLDGQQIVAEGTVYQL

SEQ ID NO: 931680 - protein, 165 aa, Homo sapiens
MAMDHIWASPCYYTLREDQCSSTHPFLAYFDVLPNNGSTSLKHEKPKPIYQTGGRDTVTNRDFLGQTGTYSPHIFSLADMKNLKEKNAHFSKILTGSSMYHKKEQDHVHCRDMDESGSPYLQPTNAGTENQTLRVLTYKWELNNENTWTQGGEQHLLGPVRGVWG

SEQ ID NO: 931681 - protein, 154 aa, Homo sapiens
MHSTSAFTLAGCSSTVSLTAKMEGPAGYAKAGEPLRKLGTQVRKLMVPVPAAGNRVDCKEDTWVWDQLHIYCRGPGGAQRGPEGNGSKNGKKVHLLNGIRERGRKGGGERERESEREKKKKKKKKKRKKEEEEERRRRGGEKGGEGERERERPH

SEQ ID NO: 931682 - protein, 143 aa, Homo sapiens
MQILRPQPSLWIRHSRDGSPKCVSPGLRSGSATHGALGITGPKKQDLSWKRNVTEIMKAAHYLKLSKKTHLADQRNWENGGSNTSGRYTTFISSGFVLLAYVVSSLGYHIPPLRSTANSDKVLIFQHQCPTFIIFLLWIHKVR

SEQ ID NO: 931683 - protein, 200 aa, Homo sapiens
MAQSSSRAASLPENCCTVATYTVFPPVSLATLPTLALEASCPGGQRSPHLRCVQLCIFPRAWLEEARCWSHCTASSLGKPHGVSVGEGNVGFLLCISSWYCDVGQSGACLRLQGTLSCLGLLTTPVGIQLWVGEMSLKEGHCDPECQIGPDDWGLKPHVKARTHGWSHGCSFHLLLGSLSVSQEVEGTSTFEAASSSAGC

SEQ ID NO: 931684 - protein, 169 aa, Homo sapiens
MVGIADGIALCNSGKGSRSIRQRYLFCSTALKIDLYANAISSLIKYLYNKPRNQHNTNLMPSLCLPKLMMFWMEMLNLLYYKKGVKQKSRCVASPFFLPSFFLNALQEEARDLTSYSQRLLNLSQEKMITTGLRGLALRVKWPFTVDTDLSFGHITAPTSVLLSGKYGQ

SEQ ID NO: 931685 - protein, 174 aa, Homo sapiens
MGGLLWKHSHWSSSSRPAVELSPGVHWDDTDIKRKHKTIILAMLFNSFLPSPSPSPSPPPPPRPPPPSSSSSSSTSSSSSSTSSSSSSFFFFLVHAVPSYHPHGGTLAAGDFPRPPLLHLVLLSEAAAPLGMRRRSAASSFLSSSDRAEHGGCQAGVLITALRPPGTRVVWIYI

SEQ ID NO: 931686 - protein, 164 aa, Homo sapiens
MLHTHTAIGSLTTAGGELFLKRPYQLSLLGGVGDLKPEARNNSAESSPVSTSCHTQHAGLPAVIQNKSTSLGHSKRRSGPRPRYPSIRSPELSVPRNYPHYTYKSIQLVLVSNEAGDVTGLPSFLQTLNTLEKQTHKGQETKTMLRLNVLINLVYKDKGSYGCD

SEQ ID NO: 931687 - protein, 222 aa, Homo sapiens
MATVRIVLHSTFHPLGSSPLRACNGGVARFFGALLLISLGGACRQAGRGEHRPHGNIQAVQLLLQLAGMFLRKPQYLFASHQPLHESDNLAAVVCFKRETEHKSLKSLQPDNVIEKKISFSEKKFKPYAEICISNDESMLIPKTMRKMSPGHVQGLQGSPYHHRTGGPGSPCCVQPRNLVPCIPATLALAERGQHGAQSMASDGASPKPWQLPCGVEPVNAQ

SEQ ID NO: 931688 - protein, 142 aa, Homo sapiens
MWPMEADTGAMKLPGKDGWPLPAQRRGKEGFYTEPQGGCSARLDALSENLTRLALASRGLAPPWHLGEASLTPTWFWHIDITFSKSRFSDSLQTYWIRPSKGGAQPSVLQGALQGVEGTHGAHVECGKKPEMFRPRNGHHFS

SEQ ID NO: 931689 - protein, 135 aa, Homo sapiens
MCFFSGISFPLFLCPLTSASAHQHGHPYVANTNSGAHANQASALPACHRHTCILTGDPQGKSESSTPGTWLHGSSFCISLLPCHLTPECVSFLRVENQDSESTGSITLKTDPLGPGSEERTEALTSGSCTMFLEL

SEQ ID NO: 931690 - protein, 148 aa, Homo sapiens
MGARLWTPALTIPCHCLLPSLLHSPFRPAIPAAFSFPTCHPCCILLSDPLHVVFIPYTSSPDQQTHGSRQGDINRLKYSHTNGSPWPNNLKSSGQRINRFPNNRSSSPLIRPYASPEEDKREDACKTYLVTECSFHGGFYRLVFGMFC

SEQ ID NO: 931691 - protein, 118 aa, Homo sapiens
MSIFIMKYEERSSGGRGRWKFRTGKPWQLKGFPGLRSRSVPYLTYSLNSSRMSTAGFPFCQVSLQNPGCKAKLKILLAAGLLRAFNTLTWIVKSQKYINCVVDLESTEKHWTKTSTLL

SEQ ID NO: 931692 - protein, 130 aa, Homo sapiens
MAQRPTSVTTGIPLSLGNSKENCYISYFRKTHLPGTMERQVLGVESRLKGETNKLRNSKSCVNQYWIGAKVIAVFAMKDNWESMQQDAGSAETPYIKIILDGFNRFCTVQAKMKYEDGVVEDDLDDTRKW

SEQ ID NO: 931693 - protein, 155 aa, Homo sapiens
MTMTFLFAKAELDQNSELLSLISVPVSVTQLLKSSCFGLDLSILLSVAPAPMRLDPEDKTGPHPTSSQGASVEMPSLHCTGLHHPHKKHPGISSRLYNHPSVNGTLVHKSRCCLELFCLPLCSSSARGREVLIAEDFQKVPLVKIINARNGVPGF

SEQ ID NO: 931694 - protein, 141 aa, Homo sapiens
MSPCILPLILCSSPPTPSPAPRHSNFIVQGAGLNQNKAAHEHSTKQYGTEVPAPKDLPAQERRGDGGGEAMGQNDPACPSEGSQEEGQMAMGTPPVHGPLTIKNVAMGFSRKNWDHQALIKGVYTRCEDGRSVPGNISFPN

SEQ ID NO: 931695 - protein, 154 aa, Homo sapiens
MQAAVGPGYLYTSQLDPLPVARTEGFLYPGFLPWCTGRIESHVGLENECKVLSSGSSSPPMGEPEGRWFFPGVPPIAPAKLCLVLRVVRPARVRVSLCWCVLLPACSPRCPLDIQLLVFFRQRVPLTNSIVHMFNTLTSSHTDDNLAVSILLLL

SEQ ID NO: 931696 - protein, 198 aa, Homo sapiens
MSSSGLRFLTLTGKQPTSRALFWASHLHARSIQGTTLGAAPQSPGCTFSTAPTLLASRFQGGGWRQQGEDGESSGKMTRPRHLCADMLFSTRTAQGVLKCVSGASGGSLGVCLPFWPLLPPGAPVSPSCPGGPHAVSIHHAPVLQGGPPILTDYLSKSSQSAAGYRSQVMYLHFGLSGFKAFTWKEPMASGACSPVAL

SEQ ID NO: 931697 - protein, 154 aa, Homo sapiens
MMGLLFLHSTQHLLKACPGQMHCTGHRGDGGNLEVYNKGCPKDLVSSLDHSFVTQWVKSAQVGASDSPFKMALPFRATLLSPANTTTLLPSLRFSHHEWTPFSSCSGSGIPVLAATPLIPCVGDYLAWLYLRAFGLSYSGRKKGSEKRKALSYF

SEQ ID NO: 931698 - protein, 321 aa, Homo sapiens
MRDKHSDNRSSVLESSESYVRDKHSDNRSIVLESYVRDKHSDPSSIVLESYVGFKHSNNSGIVLESYVTDKHSDHRSSVLQCYGSLSVGQTFRPQQECSGTLSVLKSYVRNKHSDPRSNVLESYVTDKHLDCSSNVLESYVRDKLSENRCSDPRRSLLELHVREKHSEPTSSVLESLATDIHADISSSALGSYVRDKLSDGSSSVLESCVRDNHSDPRSCVLEFRVMDKHSDPHSSVLETYVRDKHSDHSRHVLESSVRKKHSDPRSSVLESYMTDKHLDPSSSVLESCVRDKHSHPRSSVLESYKGTNTQNPAAVFWNHM

SEQ ID NO: 931699 - protein, 291 aa, Homo sapiens
MKALSKPMVLPRFSFSWGLDPVKTQILSQGWEVNPSKIQGPAQTVKFLGILWNAGKQSILPKAKAKILEFAALPLKRRSKIVLVCLDSGDIIFPTWVTFYNLCMRSLENAMTFTEDRKPRSCQRLAKLILFEKQLLTCYWALQETEHLCLNHDVFMRPQIPNMTWVMSSLKPHWIGYTQESKWKWHIQDQAKPEPKQVSFLNEDVQNLPAQQTTEQVLQIGKETSPAQWGKSFKEPSPDDQRHAWFADDSTKYIDGTRCWEAVSYNPVKNISISEEGRGVSSQLAELESVL

SEQ ID NO: 931700 - protein, 145 aa, Homo sapiens
MMDNHCFFLKRLSTLWLSLSGTLGIIDCIFFFFCELRFLLLFFYYLEINLYLSIFSFCCDGLNVYVPFANSYVDNFRRVAFGEVVRPRVLHPHEWNQCFFKGKRFSPKNDAHPGQRTQHSDPCTGCTEHTRHWVNQEQSEQHCLA

SEQ ID NO: 931701 - protein, 125 aa, Homo sapiens
MKDLNRHFSKENIQTGNKMQRYSILLGNSSQNHNFVLTRMATEKPKTEYKLWQGGETGTHTLLAGNKQKPITPETAEKLAHDLKIVKYVECSALTQKGLKNVFDEATLAALEPPESKKSHRCVLL

SEQ ID NO: 931702 - protein, 152 aa, Homo sapiens
MASAGLLSCHFTKEVPGLPGQCTRRRPGAAQRGVLFSVGGKGDSQPRLGVYVDNLLLPGASCPGFEVREGQDRLALSGQAFCLIGTRWCGEGVQAAAAALVLMNGAQPTRGSSWDQIGRCWPSFPLAHYSEAHTRKTPAGTPAATLLLQIYM

SEQ ID NO: 931703 - protein, 123 aa, Homo sapiens
MGRSESCVIVCTHTCAHRAGRAWHLRRGSEVLLGWPLSWEQGTRAPCEFSPCQGMPEAGLQLPCQRVREAGPQLRSREEKGGAHSWSESLEPTGSDLPQNELERVWGWRTLGMLGVVQSKPHP

SEQ ID NO: 931704 - protein, 260 aa, Homo sapiens
MVKGILAFPRSQCRLPLMAEVRVDLGTSKPCSQERGVCSSITTDKRGDSYYYFLGPGTSNSNRLLSKRFGKCAGTFLLMDRHTMCGHTKTPNVATQRVIHGPTSTAWPGSPFPTDECDHQLKWEFKGHKIKSLSGSFTKKESYSCSALPSGSGEETEVQKEGVYTNVHAEVHQKYTVASGALLFTLLRMYVCSIVENSFLFMFISDVWSGLSPFVKTGTSALCQTALMLARPKEESYHAHLFRALTGPYSHSDITGHTPV

SEQ ID NO: 931705 - protein, 137 aa, Homo sapiens
MPASISQSGSFILIEQFGNNPFLKSKHHTTKRNCPNKLCQNSGKWSKDYNNQVKADSRKRQLENFTTFLACLCLSKLAVLKCQKPTFPVRKPGPSSKGTREDLTRKLLCVCSDWEFKITKLTFLKECIWAFNKYVNP

SEQ ID NO: 931706 - protein, 196 aa, Homo sapiens
MNALCSDKETVAPMSYLLGCIASAHAGLDAAQSVKGAEGSRTPRPGDNANAGRGWRSSERHNLRQDGDEVGCTEKIFRGDGDDKDGDGKVIMMVMMRKVMVKVVIMIVIVMLRMMMRMVRMVKDGDGESGGGDNDGDGEGGDSEVGDDTDSYGEDAAADAGENGEGETDDNDDGDDPKLHGGKEYTMFIVVSSMPS

SEQ ID NO: 931707 - protein, 155 aa, Homo sapiens
MDTSLQSDIRPQENISPPVDISFQVDIRPQVDTGLEVYIRPQMDIWSLKAPGVQQAQVQIKAQVTPCPRWLPRLQVDIRPQVDTWTSGGHQALGGNSGPRCPSRSKWTPRPHGDTQVPGGHWAPDEHQAPCGYQNLGGHPALRWISGSRWTSSLR

SEQ ID NO: 931708 - protein, 170 aa, Homo sapiens
MVKLLVWQKSVHKLWKLLEKNETTSFESLTSANGSTFQHVANAIHFPPLSQEKLRHNYTILPLYTFCACVLVKTPGSKWTTRPQADVYWGQMSTRPQVKSPGSKWTAWPHVPGRHWNPNQHQAQDGHAGLWWTSDSRRSSGLRWTSSPRWIPSPQVDIRPHFDTSPWVDT

SEQ ID NO: 931709 - protein, 167 aa, Homo sapiens
MVDSLTSCTMSLEKLRTLNISPTQHQPMKTATRWAIPCKATGTELPKAAVTAIGHDSFDGSGQSQLETFWKGFTMIDATMNIHDSPEEVKIAALIGVWKKLIPTLINDFEGFKTLAEEVTTVVVKIARELELQVEPEDDLPRGSGKLSRTVHLKHEPAAFVHLSHTG

SEQ ID NO: 931710 - protein, 390 aa, Homo sapiens
MVLKMGVFLLKFFLPATMHVRHDLLLLAFRHDCEASPAMWNLRTCDICLSVLGLFKITAFSSIHVAANDMMSFFLMAKQDSIAYKYRIFFIHSSVDGHVGGFHIFAVGTSAMINMSACFINTLPPFEIEAQLTSININTDLKTDGLFKINLFKCLTDFLFIDTSMPFHVKGCKIYHLLYQAPWATTSHPQARPLSPSLVVENGCGKQVFLLCSDNASPEVSTVALASCPGTFPRHCGAAESTHICATGLGELTPQGHGECQGSYGYLSLHHYCYCHYYHYCHYHYHCCYILKSLLPLLPPHNNSYHHHSYYHYSYHFYHYYYNCYHHHYHCRHYYHPHDYYHYHAATTPSTTAITFATTTTVVTMITPHTSTTTTSVCRESDTLLNIYSI

SEQ ID NO: 931711 - protein, 240 aa, Homo sapiens
MLLLGNLTAWSSRPLCVSGVWILGPEGPGEKSSGGLGGSGKRLLPAVDLISSPMDSHWTEQDHLSLPLDPKGDQETGSRACVGKSSVRVSLGVNTPARVGKSSVRVSLGVNTPARVGKSSVRVSLGVNTPARVGKSSVRVSLGVNTPARVGKSSVRVSLGVNTPARVGKSSVRVSLGVNTPARVGKSSVRVSLGVNTPARVGKSSVRVSLGVNTPARVGRSSVRVILGVNTPARVGRSSV

SEQ ID NO: 931712 - protein, 142 aa, Homo sapiens
MPPSPPQSSLLTKGEDLLFSVGEIFVLSDEGGSVDTLWGEDKGGSRVPLALSLGLLPHFPESWLLPTLPPTQTFIPSALRTCWVHIRRKNLGNAIVNIGPGKDFMTKMPKAGAAIHGVIGNLQNGRNICKLCIQQRSNIQHL

SEQ ID NO: 931713 - protein, 134 aa, Homo sapiens
MNTSRVISSPTPSLCFLHSLEAVPRSWMFLVTFPLCPLLSHLELHATPSCCTEPGPRCPLRGKSLSSHGFLLVPFPQTLRNNYTILIPNGNWRHGAYAGVSSFSRGRNGHSGLHCMLVDLGECDPSKPCENLHD

SEQ ID NO: 931714 - protein, 337 aa, Homo sapiens
MGPLDGELHHGTPGRRITPWDPWTENFTMGPLDGELHHGTPGRRITPWDRSMENYTMGPLDGELHHGTPGRRITPWDPWTENYTMGPLDGELHHGTPGRRITPWDPWTENYTMGPLDGELHHGTPGRRISPWDPWTENYTMGTLDGELHHGNPGRRISPWDPWTENYTMGPLDGELYHGTPGRRITPWDRWTENFTMGPLDGELHHGTPGRRISPWDPWTENYTMGPLDGELYHGTPGRRITPWDPWTENFTMGPLDGELHHGTAGWRITPWDPRTENYTMGPLDGELHHGTPGSRAFGLNCTTSLPGAPACRGHITGHHSLRNSVSRDKCMTDAYR

SEQ ID NO: 931715 - protein, 138 aa, Homo sapiens
MYALINNVSAITPYHCQDLEVELHNLHPELSDSMGAVFIPELSLGLTGTALEPGLGSRVKLGVLQELAWIQSEASEIPKSLKCRHLGNDASEGRKNGNTVEKNWQMENRKVLSICINKRLWPSEQVTLSAKNTIWTDQ

SEQ ID NO: 931716 - protein, 269 aa, Homo sapiens
MSKRGEQLGQPLRTECNLGGEMSEDDEFIAKEMPWVVSPFQRHLHCLQHGKIGDIQQGVEELELDAGILLCQKENPQEIRQPRRRTHRKFSSPGEPTGNPAAQKENPQEIRQPRRTHRKSGSPGEPIGNPAAQKENPQEIQQPRRTHRKSGSPEGEPTGNSAAQENPQEIWQPRRTHRKSGSPEGEPTGNSAAQENPQEIRQPRRTHRRFGSPEGEPTGNPAAQKENPQEIRQPRRTHRKSGSPGEPTGNSAAQKENPQASQLLEEDAT

SEQ ID NO: 931717 - protein, 161 aa, Homo sapiens
MYNALCKTLQRGCLVLQIFEIMDYSLLMFVKKLEHSWKALVCDGDTVSVHRPGFYTERFQCFMCNTAFKKIPARCPLHISQLPFTSPPTCAPVLGNGLLQSGLCFSQACAMKTSMQGAPHSILKAACGFLGDAGNRELKIEESMSVWVPGLMNGMEKTPLF

SEQ ID NO: 931718 - protein, 209 aa, Homo sapiens
MCPSTATKWKDGTSAYSPISQAKDQKAELCFGSYGKRVTDEVLRQCGTENKTVYNDGIVKHCTLKSPTLSCQSVGVSPPDLFAWVSAVEATEQRILVNSKCCCLIVPLEASSQRGTQPCEAMPRPALAHARWAASTVLPPLSEEPQPYSSDSLPCLEMSLKEAGEQQRWMPAPSSVTSDLKGHQPDAIGLLLYRVCDYPCWRVLPSWVA

SEQ ID NO: 931719 - protein, 140 aa, Homo sapiens
MASSSICVPAKDMIAFPSNSEDPQLQVSWSLLEVHSRPFAWVSAAEAAEQRILVNSKCCCLIAPLEVLSQRGTQPYLRLRVGSNSTLFQAVKQGHEREFPDPLHFLGEVMPRLASAHAWCAAPTVLHPLSDNPHKTVLKL

SEQ ID NO: 931720 - protein, 134 aa, Homo sapiens
MVKKRRPLYPVDGNVNQYSRCGKPIWRVLRKVAGPTCYLLPPGVRAAPWFLEGTHQGTQDWKPRMASAARDEGQGEAGALQWPGKVQPLRPRGFLFRRCRCSGSPGRRWLHRLHIAHGRLSKVVKQRSERGNGT

SEQ ID NO: 931721 - protein, 333 aa, Homo sapiens
MESHSRHSFVYLMSWCYVEESLIVSLKVSFLILSFLDHTFNVFLAQMALIISDSNFILFSCTFVHSRDTEDTIGINVKSDFNLRNTLGFRRYAREFKLAKQVVILGHGTLTFINLNKHTRLVVRIGNEGLCLLGRNGGITVDEDGHDSTSSFNTKGKRSDNNRGYLLWIEAFGLSLVFYLDLGPVSIIHYHEGPMLHIRLDNSIIKSASNQTFGIKNCVGGVHCNLMLCGITNQLFSVHKGDIAWSGSVSLIIGNYLYFSVLENTHVRVGGAKINTNCRSLGHGCWHVALAPIKKKATGTRELQASGREHRSISHFWGSVTVMAAGYLSDESS

SEQ ID NO: 931722 - protein, 141 aa, Homo sapiens
MQGQCLLLLTELPYFIFILRGLLDGFDKNTVSDMVNEIQAEVVSDGNEECVGNWSMVWEPPPRFHEMYGNTWMSRQKFAAGVETSWRTSAKAIWKANVGLEPPHGVPTGALPSGAVSHSSPDPKMVDPLTACTMHLEKGGS

SEQ ID NO: 931723 - protein, 145 aa, Homo sapiens
MVAFMDRGCSHFMDRGHASIHGIDKTVREGSRRASDPPHRCLYQMFCADKGTCKGGLIKHASSRLRAHMHTGGIGWRHQEFSPYTNKEVSPISPNKKTYYFLPVPCGKKFKFSKFYKGCNFRNILPFIQEVLEYLLNANHSFLDV

SEQ ID NO: 931724 - protein, 155 aa, Homo sapiens
MVTLTILSLPIHEHNMCFYNFFQQSFVVFFADIFHFLAAFKHLFNKAHLAPPLIHLTLSGHSTCFREHRVGGKVTDQQDPKAEEFFLVQNKMKSLPSLLLSTQTRQPSNFSIPSPHFPPFYSTKPPRSSWPVLNELLGTPPRRGGGRAEGLLTSQ

SEQ ID NO: 931725 - protein, 148 aa, Homo sapiens
MGLYNQQETKPARFVSFPAGRCECAESTFKPTSLSPTQGPQHSTRVLPLVRQGPWALQLAEAYNPLREIDKKIYGDNSVINIVREMQYEKDLTPPHLLANFEDGRRGSQMPVAARSWEEPSAYMQQKMVTLVLQLQDLLKENAALQTP

SEQ ID NO: 931726 - protein, 412 aa, Homo sapiens
MFRSPSIGKGGVPEEGIVIIDDSSMCVIAPDDLVVGQDAEVDNSDIDDPDPGVCMEIVRKGDSHCGGGLSAAGSSPAAEGLSLPLALSLGLVVWGVLLLGGHVGHEVHHPVAVAKFIVISGNELDKVVVEGNASPRIEGGRMASQVHDRHVGSGNMEGHASELPIQLRDDLAYTFGSSSRCRDDVLISPQPSYHSFPEGPSTVFWMAVTARTVVMTVGGTGCIADNLEALILLLMVHNHNEHGGISRGGRDDDPFGSLLQVSPSLLHGGEETGGVHYVLSTSITSFDFGGISILEDDDGNSIDDKLPVLSLDAAMAFATGRIILEHVHHVVEVNEGVIDGDSIHFTRVKSSADDQVPNMAKSIDLGLYFHHSVSGMPMALHEKMQLSVKLEEQRAYNFHVELFYVNFIVTLV

SEQ ID NO: 931727 - protein, 144 aa, Homo sapiens
MSTFTCVMTVAVSITGFAVGSHDPPTLEDPYTNYEILMKNQTTPPTDTVFPICWHEVFMYVCFDELPAFQGVGHCVDLGAGAMTATPGPAFAVTLQPSEWMWLNIYHLKLKYCSQIKFSPTGYQYTSLIISFIRLLSADLLNDM

SEQ ID NO: 931728 - protein, 145 aa, Homo sapiens
MILFWIVKRPGGTAINKPSAIRVRNREEGNVGKWGERQVDQRDAVMRVRCGIWNNVGGRIEVQARNNGNCGRLNKELPRQSGIVSLQLLSQEDLGRSQSESWARVPGALGVAASPHPDIPLPNTNTFSLLSSFQKMPKIAEGIIY

SEQ ID NO: 931729 - protein, 150 aa, Homo sapiens
MSLEEAGEQQRWVTAPSSGISGLEGTDLMPVGTHLNRRLTTPVGWSHPVGWHREEDTFNQALRLSLGGGETVAAPPSRAQAQGDQHSVSEPLVGVVGVPAGKPHPVRRDGSGSGLKRHSSHSLPQLVCWAVGKTSWDQAVSLSGSSRGKA

SEQ ID NO: 931730 - protein, 160 aa, Homo sapiens
MESFYEIEWNYHRMESNGNLEWNRMESSSNGIEWNHQMELNGIIIEWNRMESSSNGIEWNHQMESKGIIIVWNRMESSNGNQWTLHQMESNGIIEWYQIESSSNGIEWNHRMESNGIIIEWNRMESSNGMEWNHHRMESNGIIIEWNRMESSNGIEWNHH

SEQ ID NO: 931731 - protein, 147 aa, Homo sapiens [sequence omitted]

SEQ ID NO: 931732 - protein, 130 aa, Homo sapiens
MGFFSQRWQHCERKTEAFKTAKPQTGTLSWSHVFTALSKQGQPDLGFGKQILDLNGNSCKNPWQRATTLIRKFKVYRVTIAFTVKSATDPIIGDKFLTIASFTLNHGKKDLKIMPIQRSNGFLAMLPNQF

SEQ ID NO: 931733 - protein, 142 aa, Homo sapiens
MSREDGGERSGPSAASLLEFAGGPLPILLAWVSSAEAAKQQRLLTVLSSGSFNPEGHLPNASQSSPVRGVSQLVYTGEIFWRKNDLIVQILSVKKMAVMQERAHHQTDLKPLGKKIIFTLLFERCIWNEIGHFRTSGLPASC

SEQ ID NO: 931734 - protein, 116 aa, Homo sapiens
MQITVIVLKTTGKRRDWELVREKGKSCRQSAIRNIFQRGVGTIKAGAGLQQPAGVTFFSDLHKGTVWTSSSPVRSCVGHYGGSCVLQTEKPSSDWVLLTSTFQGCTIEHVRFRWAK

SEQ ID NO: 931735 - protein, 151 aa, Homo sapiens
MDQSAGSGSAASLLKPARPLTHQKEETGNTTEHQKEQTLDALPFRTVTLTARGPRGPEGVPGERGLPGEGFPGPKGEKGSEGPTGPQGLQGLSIKGEKVLYNRVYTGNNANKIVIVLYVIWEQVVIGYMILKVLCVFLMPLRPHNLAPTYE

SEQ ID NO: 931736 - protein, 220 aa, Homo sapiens
MPYVSFLFEELQITLFLCFHPQSFVRELDHHRKSYDPLQSLGVVELSLIFAQRRSNLDLGLGPLNHQVVGISLLAEKTCWIVVVITEGVTGDVGKGLLQFHSQTAEVFALNDSWKKVYGKGEPGVRGPPGPSGPRGVGTQGPKGDTGQKGLPGPPGPPGYGSQGIKMVFKVLRLDEDVWRVRVYIEEKKSKDWALGPPAFGSLYDEEDLAKKAEMEWPVG

SEQ ID NO: 931737 - protein, 145 aa, Homo sapiens
MACLTWLLAGDLRSLPCGPILGLLGCSHNMAAGLPPNLIIKDKSLATTCGKVGLGPSKTPKDQIFIEKVKKQHPHVSLFLLVHSFMNFPFTYCPEHSQHKVDIGRGEKVTWERAVLQIKTYLVIGKEVPPPLHSHHHPKPHHGVT

SEQ ID NO: 931738 - protein, 382 aa, Homo sapiens
MTSQEIPVPGEFRQITISKEAFTSEKNNECNKPEKSFSLDSTIDADQKVLRIQNTDDNDKNDMSFSQNSASGKHEHINLTQDFQSSICKESLMDLSLLNKWDSIPNTEESYKCDVCEKVFHQSSALTRHQRIHTREKPYKCKECEKRFSQSSSLSRHKRIHTREKPYKCEASDKSCSPSSGIIQHKKIHTRAKAYTCSSCERIFSHSVHLTQHQKIHKEMPCKCTISGSDFCHPSYLLEHQRVHHEEKSYEYDEYGLAYIKQGIHFREKPYTCNECRKDFRLNSHLIQHQKIHTGMKLHECNEYGKAFSQTSCLIHHQIMYRKEKSYKCNEYEGSFSHSSDLILQQDVLTRQKVFDCDVRKKNSSQRAHLVQYRSIHTKENS

SEQ ID NO: 931739 - protein, 138 aa, Homo sapiens
MAASKLAQRAAQRSVHGSRQPYSQKSSAVLARLQGGEGLRAQDQHRTAGAVTRLALRELPGGAERPEASVLVNSWQRLSRWKRGERAGTAPGDPAVDESPGHTEGKSLKEEANQWMTPGAPLSFFLSHWLLQPITTPF

SEQ ID NO: 931740 - protein, 142 aa, Homo sapiens
MARSAATLRRFTALDPKSSGPQTPQQDLINLAFKVYSNRKKLQFLASTVRQTPAASLAHKNFQTPEPQRPGIPPEPPPPGTCYKCQKSDHQAKECLRPRIPPKPCPICAGPHWKSDCSTHLAATPRAPGTLAQGSLTDSFSA

SEQ ID NO: 931741 - protein, 154 aa, Homo sapiens
MHTTPLNTLCMLPLPNADKRHRHKWRDVKRAEEHSNRHQQTTSGHRWLHDVEFGWGQLEESLAIGRPDSRGRLPSHSIPLGAPHASHESYLHHSIKPCTHPPSPRVIRLLGRMAKYQKEPLTFTVSYQEVNWDCGLSKQDGKIEANTIYYHPPH

SEQ ID NO: 931742 - protein, 134 aa, Homo sapiens
MLPLLELAVVEEATADVVEIARETEVETEDMTELLQCYNKTLMNEELLLMVEQRKWFLERETSPDEDTVKIIEVTAKDLEFSINLADKAVAEFERIDCNFERSFTGEPDSADKGCGSGTCVIQKPLVHSDAHGP

SEQ ID NO: 931743 - protein, 151 aa, Homo sapiens
MVYDSEYLSCTLQVIITQAHSSASVLRVKKPLVSRESSEKELKHPNSAQFHFYEKPLDRSFNAGVPNPRAMGLVLGHGLLGTGPHSRRLAPLILVGWGRSPNTSRTWTQADVQTFDTIVRRNLRMNPKIMKVGRFICKTKLHTQEKEVQAY

SEQ ID NO: 931744 - protein, 210 aa, Homo sapiens
MECEASSILCSTFNLYEINIFSFQAILIPLNLFGATVSQGWWSVLFLSTEATSQPSKVSGFQHGTGEECGEEWTYLNAGRKELKQNERRAFQKSEGSINRANHKMGRALAFTPRSSAVPSPTASLLKRRWDRVERNLKSTALDGFKSTAGDWQFPGLSGPSPQSRAAMGASLDQEHSRHPARSRGVEVSSGSAMAVNINGGRRAKAQVQP

SEQ ID NO: 931745 - protein, 150 aa, Homo sapiens
MCLTGILTKPLHPPLSHNIPHTQQFPSRGTNGTSRAQQQVELWIKLPWPVSKPSNPGHPHFSCTASGIPGASAGPASGHLTHPSAVQEPGTQFEQFWAPSLVLTRIPELKEQSPMSRCTPAHTIAKAAGIFLIKVKSAHGLKKYYVLSSN

SEQ ID NO: 931746 - protein, 137 aa, Homo sapiens
MCMHVCTCVHVCVPGSALWREPSLRGGEAVLCGRREARTVLARHGPREGMNVHALAGLSPRDGSVDTHGYSQRGLNQVWEATGTGSSGTRSRDTWVPVVAPTCKAGLCLQPCSPKAQSGQRVEWTSRSERAEGDTCW

SEQ ID NO: 931747 - protein, 168 aa, Homo sapiens
MSRERHCAELFIKWHLKYSPGLCSWGNTTKSIGREHNGSMVRNKCIVKKEKQQLLRGNDLQMTQQAKHQRNSDGSSDVTISTCHASVKVGTRLVFDHDGKIIQKTPYPHPRGTTVSVKQLFSTLPVRHKEFQRNVKKGLGMEVMLLLRLHAEQGTESPKVKGMKLLGF

SEQ ID NO: 931748 - protein, 145 aa, Homo sapiens
MTSVTCFCPSRSISHSLCKFPRAAENEHIAVIRIEYQASHNILLSQSLIQSKALTVFNSVKVERGEEASEEKFEASSGWLIRFKKRSCICNIKVQGETASASVEAGVSYPEDLAKITDEDGYIKQQIFNVDKTTYIERRYHLGLS

SEQ ID NO: 931749 - protein, 211 aa, Homo sapiens
MKEKTKKYKNTRTKKQSNTGESQDDSGPSGFKVVVLECHRRMLGSGRETNEEKRRCHAGDSVIEGMAQSGELPMHINNRNIVISINSAETTGYYYGKEMGLHPYLRPYTKTDSEWITGLNEAEKWPHKDFHLFAWKGLISRNYEYITFLRKRDFAGVITLKILGREIILDDLDLDEFSESKEPEKFIWDIKYSSNCDLYLIQRQRTKPKMC

SEQ ID NO: 931750 - protein, 149 aa, Homo sapiens
MILEVTQVLGWKAPRSQGQRPRPAAPGPATMSSTVNNGAASMQSTPDAANGFPQPSSSSGTWPRAEEELRAAEPGLVKRAHREILDHERKRRVELKCMELQEMMEEQGYSEEEIRQKVGTFRQMLMEKEGVLTREDRPGGHIVSTHSGM

SEQ ID NO: 931751 - protein, 130 aa, Homo sapiens
MCHSWHFITINNKCLSGNPVDCLQHVLKIPTQQLPGLLPNFSPLTISHHHHDPGQDHYHLPPRCCHNLAPMLLSKSSHSLSQLSSQRMLLNRQTDHVASLLRTLLNFPSSPAITSQGLHSLLVVEGMTSG

SEQ ID NO: 931752 - protein, 641 aa, Homo sapiens
MSHQPQPQEERSPQRSTSGYPLQEVVDDEVSGPSEKELAPEPEETWVAETLCGLKMKAKRRRVSLVLPEYYEAFNRLLGRRTPQRAPPILFFLKRKLPITTLFQWEKYAPVEDPVIKRLLAWDKDLRVSDKYLLAMVIAYFSRAGLPSWQYQRIHFFLALGEEKERRSGHDTSPSKQTFPVVLSPSHINRKSHQPPPGSRDREADLSRRSLLVVPLSSNLISVLSYLANDMEEDDEAPKQNIFYFLYEETRSHIPLLSELWFQLCRYMNPRARKNCSQIALFRKYRFHFFCSMRCRAWVSLEELEEPLGVDPSPPRRSLGWKRKRECLDESDDEPEKELAPEPEETWVAETLCGLKMKAKRRRVSLVLPEYYEAFNRLLGRRTPQRAPPILFFLKRKLPITTLFQWEKYAPVEDPVIKRLLAWDKDLRVSDKYLLAMVIAYFSRAGLPSWQYQRIHFFLALGEEKERRSGHDTSPSKQTFPVVLSPSHINRKSHQPPPGSRDREADLSRRSLLVVPLSSNLISVLSYLANDMEEDDEAPKQNIFYFLYEETRSHIPLLSELWFQLCRYMNPRARKNCSQIALFRKYRFHFFCSMRCRAWVSLEELEENTGPRGDVDFQQELYSNANGRHQEGGEEPFVQII

SEQ ID NO: 931753 - protein, 458 aa, Homo sapiens
MSVSKEYNLRRHYQTNHSKHYDQYMERMRDEKLHELKKGLRKYLLGLSDTECPEQKQVFAHPSPTQKSPVQPVEDLAGNLWEKLREKIRSFVAYSIAIDEITDINNTTQLAIFIRGVDENFDVSEELLDTVPMTGTKSGNEIFSRVEKSLKKFCIDWSKLVSVASTGTPAMVDANNGLVTKLKSRVATFCKGAELKSICCIIHPESLCAQKLKMDHVMDVVVKSVNWICSRGLNHSEFTTLLYELDSQYGSLLYYTEIKWLSRGLVLKRFFESLEEIDSFMSSRGKPLPQLSSIDWIRDLAFLVDMTMHLNALNISLQGHSQIVTQMYDLIRAFLAKLCLWETHLTRNNLAHFPTLKLASRNESDGLNYIPKIAELKTEFQKRLSDFKLYESELTLFSSPFSTKIDSVHEELQMEVIDLQCNTVLKTKYDKWFSESFCQSFDGQPILLTTICSPYDFL

SEQ ID NO: 931754 - protein, 146 aa, Homo sapiens
MPAARLGPGSPAHSGPPQPSYHAAQTPGLSLQKEGKHSLSWDPSVGADYPQLCPAPCSATPVRQLDIGWEGRGAADGPVLPSGSCALDPNGGILGRQEGVSAAPASQPPGGAELAELFQAVDGSPLGRRGPQAVNTRLESALWALG

SEQ ID NO: 931755 - protein, 162 aa, Homo sapiens
MANDRDWLMSNGRVQSTLYWDTTQLTHDGACWLHGRLMYQVSVPSTLHFIKVFPKVDRFRKQTIRIPDSIKELKLTRLLHADNETPEPSSGMSGPSAAGLLEFAGGPLQTLFAWVSAAEAEEQQILVNSKFCCLIIPPEVLSQKSTLPCEVSVCPYWGVPPS

SEQ ID NO: 931756 - protein, 153 aa, Homo sapiens
MILSQMTSMSRLLQKRGPYSRRKNLGILEEAHGRCGQHSAGAHLKSGAIEACLLLRAFWSLALLTMARKWVDIEAQKADTSCLNHMRHGNIPGAGGPSGRVPGKVLCSLAFCSSKSTVSPCTVLPGLGVKVTQNYLEGLQNKTERHSLNFKTW

SEQ ID NO: 931757 - protein, 160 aa, Homo sapiens
MVWLCPNPNLILQCNSHSSHMLWEETGGSHAPSQCSESVGSSPAEVLTADLNLALPGCTPQSLGELRLCFFLSEISGAGPIYNIDKSRAAQDKTGPGLLGLLHAPEATHQMESFSELDRDTKGLFCLNRAFQLTLITCTNNNNYFGYDCTLVKVEMLLKG

SEQ ID NO: 931758 - protein, 153 aa, Homo sapiens
MHFLHSEAHKNPRLRLGQIIGQHAYEEDLPTVGLLAAESCTLIAATCLRKRATHSRSSLSQGCDTLFGALQFLVSTSFWPPPCSPVPTVEAACGWPDPAAAGNWYLCQCLELTAPPQAVCLAVRSDLSLRSLTHVPLTVLCLASPWRSWDLGW

SEQ ID NO: 931759 - protein, 155 aa, Homo sapiens
MLERSGLTSEGQLDGVTSEKNPSRDGQTSGEDYLPAPSPFYFPFPLKATFIGNKMPRIYHPSIRSCDLIFPGSQTRTQVPQMWIQKTVTLALCPRWWKGWNPAGLSEWSLIPPAQSGQAVPVLLHSSSRTCSLTCFLLGGVENGGLSKRGTPVTI

SEQ ID NO: 931760 - protein, 203 aa, Homo sapiens
MQSYDSYNFVLVVGCCAGSSNWVAVHWGKGNDQTFQGLLDTGSELTVIPGDPKRHYGPPVKVGAYGGQKAVYALNQYPMYATVSPIARFHWSMNQGVKVEVAPLTITPSDPLVKFLFPVPVTLCGNHLISCRYSQNKKQAEEHGEIRMAQPRSLHLSPMVNASGPQTSDSRFFGFETQTGSLAPQLTDGLLWDSVIILSNAQC

SEQ ID NO: 931761 - protein, 142 aa, Homo sapiens
MDCFLLFSTADSLLAQGASRNAVQDLWPEIRGFRDLLCALVYCSQTGAQVARQSNNILGFNTDNFVIDISRLTSINKTVTLTVMQNDADCPQWSIVKESPCFERSKRLCVPTETIEYKWTAQIREPWEKTRGQQYSRVIYLL

SEQ ID NO: 931762 - protein, 155 aa, Homo sapiens
MSRTSNSILNNNGESGHPACPPDLGEKAFSFFPFSVILVYKLLVDLQFWGLEDGGPLPTAPLGSAPAGTLYGGSNPTFLFHTALAEVLCEGPTPTANFCLDIQKDMSVTSPFSFLNTVKKCEGSGIFPIYKMGKQHSNCQNTYAVSLTTNFPRTT

SEQ ID NO: 931763 - protein, 138 aa, Homo sapiens
MALEQANNVNCKKSQQCVNCTAVDNQVSENGTITCNVSYSPYSLFTDDRQFRIRLYNGGKRLHLGPVTPSFPEAEISIRISNICSVTIYVHFVSELPYRSVDIRTTILIEVEVGLYILSPLTNILLIFINFEASLCDF

SEQ ID NO: 931764 - protein, 156 aa, Homo sapiens
MGRCLWCVVAGACENGGASARWTSGIQQGSTGAWAGLVSGALEPAGFLESTAAMVFRGVLPCILQYTVGSTQNANGFSTCLCLVKLVANILRILFWFRSHFDSPLLWQSIIMILTMLLMLKLCTEVCVANKLNKTRFFADFWPHHLQHWSQKFRGL

SEQ ID NO: 931765 - protein, 357 aa, Homo sapiens
MIIGTSQADRAVLIVAAGAGESEAGISKNGHTHEHALLAYTLGGKQLIVDVNKMDPTETPYSQKKYKSLKKSALSLRKLTTAPGTVVAFVPVSGWNGDTMLEPSANMPWFKGWKVTHKDVNASGTKLLEALDCILTPACPTDRPSPLPLQDVYKIGGVATLPIGGVETGVLKPVTLPQNNVAFNVKNVSVKNVHCGNVAGDNKNDPPTETTGFAAQVIILKHPVQISAGYSPLLDCHTDHIACKFAELKEKIDCHSGKKLKDGPKFLKSGDVATKFLNSGDVDMVLGKPMCVEVFSDYPPLGCFAVHDMRWRIAMDVIKAVDKKAAGAGKITTPGEQGRIFNLSAHGWCYLRKCITM

SEQ ID NO: 931766 - protein, 160 aa, Homo sapiens
MSHRQNLSDTEIVKGVALISWEHRQASILKSELVRRRLCFSLVEEPLTYLQSSSPKALGSNGPPFHVIRTSNTDFCDFLLVDISSAARLLFLLPNTLLTDYWKTDGQVLQQTEESWILKQLLRRHLTCQKIFPKGSPEVLVALVTSDNRDEGGAKTKMIG

SEQ ID NO: 931767 - protein, 182 aa, Homo sapiens
MYLRFLACLPWVRTCSFSSEKFVITDLLKPTSVNSSNSFSSFFPLLSCQAGMFKSAEAVCCLLFRYALPPEVESREAVGLAELQWAPPSLGFPVALFTLTALNSMTHNCCVLSPTVPRDALRTKPQMWRRQLAILFLLLGAFSPFTFKVSVYMYVFDAVIMMLAGYYAKLVMWLLHSIMVCT

SEQ ID NO: 931768 - protein, 202 aa, Homo sapiens
MCLASPSPSTMIQCENGLIQRIGTKVVWYCYKDNLRMWKQLWNWITGRGWNSLEGSDEDKRINESLELPRDLLNCFDQNANSDIDNEVQAEMVSDVNEEPIGSWSKGHSYYALAKRLAAFFTCSGDLWNFELKRDDLGYLAEEISKQQSIQEGPGPCCSVQPWDMVSCIPATPAPAVAKRGQGTAQAIASENASPKTLAAST

SEQ ID NO: 931769 - protein, 156 aa, Homo sapiens
MNSFSSNCIYFLRKIYQLGISGDTIVDFSGRKMCNSSFNRRENRVLIEIHEDKPVLKVLPPPSLSLPRVQTALLAARISSQWILACWDLWGGTHQARPLGLPGFSLLSTGVNGSVSWEGELCLEKEGTGLTASCFLGAVPSTPGGPSLTWHMEYAL

SEQ ID NO: 931770 - protein, 164 aa, Homo sapiens
MTWAQVILVLWPPSCFFSHSTCSPLLSKRPSHVHQSSALNVSKHLLNTNFKTAFFPIYVLFLMCLGPLDVESGEKESLWAGIWGHPDKLAKTLRSHSSREEEQTGPVTLEKQQDEPLNGETKTPRSCEEFQLPAPGGPYVNAEVLRFPGSKNNGSIKREMVLSS

SEQ ID NO: 931771 - protein, 139 aa, Homo sapiens
MLGYCQVCWSLLEVHPRPSLPGYHQQRLQNSKDFCLLLPLEASSQRGTGQITSKEGCLIPLKLCPQLPLPPGALSQGNGSFIYKPLTGAAAFLSEMPCPERRNLERQSGSGSFGELQWAPPSSNFPLPCSNFPAALFTL

SEQ ID NO: 931772 - protein, 244 aa, Homo sapiens
MKWAQQVLQRLQMFWSNFASLRYLFLGNPDHALVYQKYVEMTTLLDQFESRIYNEWKSNVDEICEFNLNQPLVKFSAINGLLCVNFDPKYIGNLDLLVQGYNKLKQTLLEVEYPLIEDELRAIDEQLTAATTWLTWQDDCWGYIERVRAATSELEHRVERTQKNVKVIQQTMRGWARCVLPPRREHRREAAFTLEDKGDLFTKKYKLIQGDGCKIHNLVEVMAFNLSRFIDLFIEFREEQKSLT

SEQ ID NO: 931773 - protein, 236 aa, Homo sapiens
MHDLDFFLKNTEKQLKPAPLNELQEFIKETDSGLQRELNEGDHDGLVDIMVHLLAVRSRQRATDELFEPLKETITLLESYGQKMPEQVYIQLEEIWSLNKEVRVWDAYTGLEGTVKDMTASLRAITELQSPALRDRHWHQLMKAIGVKFLINEATTLADLLALRLHRVEDDVRRIVDKAVKELGTEKVITEISQTWATMKFSYEVHYRTGIPLLKSDEQLFETLEHNQGTRAQCAG

SEQ ID NO: 931774 - protein, 325 aa, Homo sapiens
MGRTCLRDSVTSHWVLLTKHGNSSILRLDELDKETKGDKPAENRALEKTEFGEQEEETKRRQQESEDIRIQLVKDARRFDGVDAEFKKRKILCGPKVVTVLITFIFIKTVCFYIAFDLHLRVEKQNLEKIVLISTAPYCTFMQELMFKTAKVENVLEATCRPNLYEKLKDLQSRLSLCEKALAEYLETKRIAFPRFYFVSSADLLDILSKGAQPKQVTCHLAKLFDSIADLQFEDNQDVSAHRAVGMYSKEKEYVPFQAECECVGHQVLNTYYASDARSGFGEFRNGPCLRGALRPIEKMDMHIIMELPKPSTPQPVVTTILLFM

SEQ ID NO: 931775 - protein, 141 aa, Homo sapiens
MIVFNCYSDTMGYIRIGDKECEFNKNFRLILHTKLANPHYKPELQAQTTLLNFTVTEDGLEAQLLAEVVSIERPDLEKLKVIEAKENERKINEARECYRPVAARASLLYFVINDLQKINPLYQFSLKTNVYYDQSRQMLVT

SEQ ID NO: 931776 - protein, 146 aa, Homo sapiens
MIPPEEETSDTSEHLKEQTLDTPSLRTVTLTASVHGFILEVSETKNPPEGTNSKHNMTLVGHLAMDISEIPKSQKVAHTGLRVNVAMTDIFDRYVLGVESHIVPRKSFTRSFMMHFNRLYFSCNVDWSKAEEHNWFARLDDQYQVR

SEQ ID NO: 931777 - protein, 147 aa, Homo sapiens [sequence omitted]

SEQ ID NO: 931778 - protein, 139 aa, Homo sapiens
MSCFSLQAALNDFSVLRRRDRPAQKEEGSVGRDMQLWKLTGGCPRETERTQCWHCVPGLRLSQNGKTTPNPLTSVRGPRTRTAAGGRREQRAEPGWVGVFPRRELSGQSFLPAGKQKQKQKTNQNQNKQKKKTWLGVDL

SEQ ID NO: 931779 - protein, 143 aa, Homo sapiens
MWKRGRGGSSGVNFRISVGLPVGAVINCADNTGAKNLYIISVKGIKGRLNRLPAAGVGDMGMATVKKGKLELRKKRKDGVFLSFEDNAVVIVGNKGQMKGSAITGPVAKECADLWPPDCVRCWQHCVILQYICKSKTKQTKKF

SEQ ID NO: 931780 - protein, 190 aa, Homo sapiens
MKMKVTVYGHFLNQVPLRNDGLNSVLGPELLAWLHSGQAECSCCRYHHPLLCRHTAEHSSRCLWVVDNTVQRQRETKKNNNGFGRKDNKSVQERIMFKSVQNMQRDVPNRRLETQAGSLQLYLNLHFLLVQSLKVIQRENVALQKASGYHSWGGGEDAGIYKAEAGDAAKHPVTLRTAPHSKQLSSPKCQ

SEQ ID NO: 931781 - protein, 202 aa, Homo sapiens
MEASSCGRRAGGCDSGQKLFPLLRTLDAHELNIDLTPRHQCTICLFGQLASHVFMVPDKEICFFLDLNSLTKQNQVAISYKYQIPGNCLLGKRDLSRTTGIASWQGPRIRCGEAVLVIPGDNLYYLREEGSLPEIKMLTQGQNSPESKFKGTVVTEQSFHMTTRPLNPIPSLHFQNGWLAQLSALQNQKANIVTGAPISANS

SEQ ID NO: 931782 - protein, 176 aa, Homo sapiens
MFHLLAAGIRLRFFLKSTNKMIFLKVTLLELAHAYELPENFDQVQILMQLSLGSNLEFSVSYKYSCDTAATAMTEPQGGERRAAGVLVVSCLILTVPAAPHVALVCRAPSSRDCTWGNWLTYKAKAPPEGVGRGFSQGAKGGSDQLTQQPWEESPSQSPIWRLINAGSAGMETHTT

SEQ ID NO: 931783 - protein, 142 aa, Homo sapiens
MWREECEQLACRSCKKHVAVTSTQPTVVKGRMRPCIGEDRKRGKGTVGVSSCDLGAVEEAGVAQARSPPPHNRPQRVMFPSLCTCVLIVQLPLMSENMRYLVFWSCVSLLRMMASSFINVPAKDMNSFFFMAAMDKFFSGDF

SEQ ID NO: 931784 - protein, 174 aa, Homo sapiens
MCNLHILSVTSAFLKCTPAFKNLSLQATGEVSSLARAARILLLGALQLNAFFSATAKAQCSIEKLFMLVHEKGPLPHLRTHLVVIKTLLIKQAAVKKLAKTHQNQDGDESDLWSSSLLRSHQRHDSLQMPWQRQEVSAIKHGNLIVKLEILQRASELPSWVLPVSASLVMRENS

SEQ ID NO: 931785 - protein, 536 aa, Homo sapiens
MGRATQQRPFGEHYLGLTSTGKSGEQFCRSREAKSQPTVSLSPGGICFHSNYNLGRLLPSDCPRKIFSLHYQFWMARKSTEYKMQNSLGLREVEQIASITTEPGASSQQPPPDDNNDDDKSNNDHDSNDKDDDDSNDDDDHDEDDNEDKSDDYNDNNDRIMMTVMIWMMTVMMIAMMIMMTMMMMMTMMMMLMTVMMTKMTMKKMMMTVMIIITMMTMTKMMTMIMMMMIMMTDDDNSDNNDANDDDNTDHDNNDNDNHGNSDDNDNSDNDNNDDNRQFSNSDDDNNDHDDSNDNDNDDNDDDNDDDNDNDDNDDNNDNDDNENDYDNHDDNNDNDNDDDNDNEYNDNYDDNNDNDDNDDDGDNDNDDNDDDNDNDDDDSDEDESTKLNCNVHTPSRPVGGVSGHFKRSCAVGVSTPHSQSPSLWQWIWGSEEEQQPRNQKPGAWALFLHTIKFYQRIPGNQSFYGDVFVQRNEKFRTIPNQEDEHSKEKTKEGHLEKVLRVQAIPCGLICHLQIPGLLSVDGFYGSTTASILAKA

SEQ ID NO: 931786 - protein, 142 aa, Homo sapiens
MPADTACCVGDLITANPISTSQIPRKLQTSILNRCEVIAPCGVDLRFSLMISEVKNIFLYVCRPDPAIPLPGVYPKEKKSVSRRDHVHGSIINNSHETETAKMPVDGNSYLSQYPHPLPKILPPSKVFLKYRNPELSKNPKL

SEQ ID NO: 931787 - protein, 181 aa, Homo sapiens
MGRKAAETIRNINNAFGPGMANKCTVQWWPKKFCKGDESLEDEEHSEEAPKHFQEPNLHQKKVMVTVWWPAVGLIHYSFLNPGKTITSEKYAQQIDEMYRKLQCLQLALVNRKGPILLLDNAPPQVTQPMLQKLNELGYAVLPHPPYSSDPLPTNYHFFKHLNNFLRGKHFHSQQDAENAS

SEQ ID NO: 931788 - protein, 154 aa, Homo sapiens
MPPRANLVSMSFKGQQLGLLRGLCSADKLNGECEESRKVLCLYRVLGLTLSRRLECSQRKRKEVYQGESGIQEAPGASHLEHKLDKQTSPGRFPSWEEERLHGKLLLANPTNSKAWQARSSSTELLNRDTMLDTGDRKVGDASLEVSMKDTDIK

SEQ ID NO: 931789 - protein, 209 aa, Homo sapiens
MNLRTLAWLSHWVCRWSCLPVPRHALALLSPWVVDGTGRPGAGGGTRRGGSGCTGAHGGGGRLRHGGLQSQGLPRGKAAKAGGEKSSTAPVGGHCWGTQYTLRSRWPGCQVPHCPGPAGPAGCSECGAHQAHAHPQLRVQPRFRSRHSLHTSPQAEGVGSSLGQPRKGLPQCSGGPKGSSSAAKVGAQAEEAPRASEGCEDCQNAVTSH

SEQ ID NO: 931790 - protein, 133 aa, Homo sapiens
MGGEIALRPVWFSSQEIKRLELGCLGQTTSNCYLIFSCTDSSSLMEQKNIIHGPCPARHLGSLDGGPSFPSGHLIYNGEENEDNCNKNSCSEKRGERETTAITNLDKLSNPAGQLLSPAGQDLVSDQPEVHGL

SEQ ID NO: 931791 - protein, 167 aa, Homo sapiens
MYGVFVRILTERSQRKAFLQARSCIEDRLRLEDENEKQADGDSFMLVHLLYFFVISTLQPSVPLHSDFPGSRVNFSLYNRDTDASSPRFPSSGNPRVSSLSFCGQCCNIAEEDAGAGCRLGLWEALRHVLGGCEEMEVVANMWLLDTLVFLVLPDGTAQAQKPHAKI

SEQ ID NO: 931792 - protein, 157 aa, Homo sapiens
MKAFAYPPPGSEEHFCPAANHLGSEEHLCLVANLLGSEERLCPAAQSLGSEEHLCPAAQSLASEEHLCTAANSPGSVELLCQAANHLGSEVHLCPAANHLGSDEGLCPPTIWEVRSTSARPPPHLGSEEHLYPAAHSPGSEECICPVANHLGSEGHL

SEQ ID NO: 931793 - protein, 137 aa, Homo sapiens
MEENLIIRVNVQDLTKRGLLFKCKDKTSCDKKQLEMPVILQNNVKNTDLSPPTLLLNIIPGFPTNLPPTSCLKAISTTELATGERHSPLFMYEKIKFEPALCLNPFSLLRIFTNLNIARILCCSHTSMIPYFKFKMS

SEQ ID NO: 931794 - protein, 130 aa, Homo sapiens
MDLRVSSHLPAWLPAILKLFLCCKPCCLRALDCDCITGTRTCGPTCSSSLLSVTSGHPTWPPGSGFGKEDGAWIAKAFQSHALRHGVNCTLEPPTGRPRAAKNPEKQVRGRHKIQAPAGSVSAEGFLVPF

SEQ ID NO: 931795 - protein, 213 aa, Homo sapiens
MSLEVLHQAVSPLPPMQAQAYPRCTAWTSGCTKHASPSPAPASLVHCGQSRAASHGADPSPARDQLTPGPCRAARAHDSPALGPQDGEIMRTPMHPQRPLDPPWEDSAPPEPPGSPVGGLCTSGAPGIPHGRTLHPRGPQDPPWEDSAPPEPPGSPVNAFPSTSTCLPSARHSSLNRNITSSDAPPRTTRPGTIAPLHVGTVVALIAGNGLTH

SEQ ID NO: 931796 - protein, 239 aa, Homo sapiens
MSPSGCVGITVTDNYEVTMAGGPFEGARRLIEASPGAGVTASAPAEQKTVLDVALCGRKGIALKSEHCPLSRPQRLPWAPCSSLTVSPQELAGWRRCLALVCVVTGCQAAVKEDLGRALGGQSQLYARFGIAFKAGPLPLAVILSRPPTGPLPLAVILSPRSRPDRSPSSGGGRVPAAVPTHMLPAGASLLCRCSSPFPPIDSFKALKTVGSGAGTTAVGDPAGTMALGAQQVLNLLKE

SEQ ID NO: 931797 - protein, 187 aa, Homo sapiens
MFKVALSVQMCPASTLPFGFKLADCAVRCVQRRAHSSGETIWIRHVFLSASSSVGNGGHSQSLKTYLDRCQEWKDIPDLNKGCYPGLLCFGELIHNQQTCERLMDQPTGQRPSAQTASTTQILNIFFGCPAPEGSAVSQSLRPGGPLGAWEQRAWERRTYSLSTAPSSSTTQLPVNDFTLKMLHLVN

SEQ ID NO: 931798 - protein, 134 aa, Homo sapiens
MKSSHSYPTSTSSNLTHSPTPKYPDIALKPPMPQLTPFVTPRLLRDSFYMFGAQLEEVTDPCTWYPEEFVIFDPSGVLSSTPNHFSCSYTSRDFYHHHHSLQAQPNMTTLCARSPCFYIPAKIRAQAGHGVAYL

SEQ ID NO: 931799 - protein, 173 aa, Homo sapiens
MKRVNTRRADAIPMRRLHERRSVSGRDWAHKTTMGVNGGKRLCLDLEGGQTAIVLLKTQLSSGEWQPQGDGPSFHFLACIIFWIAYLFLSLTGFTLQLYPMASRVKSKLPNMLCRACLTASSLTPGASHSIILYFGHTELLLPGMDLTSHGLSSLPASVLSGSFFPALHRKAH

SEQ ID NO: 931800 - protein, 175 aa, Homo sapiens
MEFFSWFWGFWSWLLNMIRPQNAKDSTANSTENTNSHWCELFRELCKINAFDTPDSPLMRDFNQSVIEEMVGNESGTFYGKKTETRTACPTEAEETVMGTITFMGWGHWLSSHPTTSTDFPGARIRHLRTNSPIPSRTTPGLQAERNNFQGAYLNELNPGHRSSTQDKWIWVGCR

SEQ ID NO: 931801 - protein, 152 aa, Homo sapiens
MWGDGDILRNPEEKHMNNSQYNFTFIKSIIYENTIEKEEEPSENHPIKCELSAFFFPCPFSHLQRGGGWATLVNHGETVGVITVTGIQPIHNSLRKQVLHVSLGLRSLGHAAFHIPSVLVRSHAAMKKYPRLDNYEFLHLILMLVDAFSINH

SEQ ID NO: 931802 - protein, 181 aa, Homo sapiens
MELAVLGPCRPCPFLRDSPKSGKGTNTHRDPGFSCTGLCPPPAQGAVAAPHQDPPAPPTSQPPLIYDAKYLVRGWGLLQRTWLKLTPGWDRPTYAPKKLGSRSEGWATTWLLPAYTGLLQVDEEKKQVTMEAGILLANLHPQLDEHGLALSRDATGALQVCHCLLWLTVTMRKGPCCMSVL

SEQ ID NO: 931803 - protein, 149 aa, Homo sapiens
MTDFYTFPWHLQRKPLLTLFKHFTLRYLLILMEIAFDMCSWWPGAWGERTHKAELILINSEQRPEIGNWQKWGTWGAGYHWAPSGSEPSFEEEMRMSMLGSGESGPTHPSMLCCKASYLGGRKNDGCEWPQSFPFRSPIPSDAPMTHVV

SEQ ID NO: 931804 - protein, 169 aa, Homo sapiens
MRKIDTEPIPLPTQKSPPSVLGSGYSVLEGTPQQRPKDRPGAWFPGYETIVARDLKGAPDSMGPRGPDEQQILSPWAECRKKTTEALLELKAVLEAHPEVVSHYLVGVGLRVRASRSGGAAAVHHALPCPAEGTALPCASATPGADPGDAGLSPNYPSTLSWVLVPTAQ

SEQ ID NO: 931805 - protein, 150 aa, Homo sapiens [sequence omitted]

SEQ ID NO: 931806 - protein, 212 aa, Homo sapiens
MTDTPGTENLSVEISQVLFVNFEQPWKARLGHWWYPHWIILCHLEFLPVAHTKSRKIRNSQMMRTGEDPELFLNWAPSQSSPEPLKTDSSWTMDSPQTNLVRAKLLRLHRRGLLAKWAQVSEVAAGVPFVTGKGCEIVKTQLGSAFQDQTTMALTILTASLKNPQMGGKEPALGPLLQWGCQQPGCKSARHERLSSFSLTPALCPCPRGSSG

SEQ ID NO: 931807 - protein, 151 aa, Homo sapiens
MVRPGNSNPVVQHVKTQVQRSFVTCLPHRAEEGGDGSQDQASWLRIQCLLHEASLKSTIHITNRSVGLYNTGKGYNMDLLRAGFTSRLFRPNGRIHGLMAPPQTPPVWASFTMWHLEHYGTLGTFPNISLYFCICKMEQQHLSLGGNVRIQ

SEQ ID NO: 931808 - protein, 159 aa, Homo sapiens
MIVSLTVLGVSCKISLTWVLKYDNPEQSGLDSYHLGNTNFTWKPGASPTSSRTSYLPSQQHVKEKQKKYRLSIVQNSRFHAHGFCVSVVLGCHNKLPETGWFINNGNLFLTGLGAGKYKIKVLADSLSGEGHFLSHKWCLLTVSSHDRRGEGNLLDLKI

SEQ ID NO: 931809 - protein, 139 aa, Homo sapiens
MLPKDPDVGPLGGRHHLEATCICDSRLLIKEGPSHVSTSFLTASTLVSSVRTDEYTHPSGLLVYHGQSPQISELEGGGEILVHNAPVGAPGAWSGDLCPLPGHYPPPRTVVPKEDRTFCRALSVACALHTPSKQSGSEE

SEQ ID NO: 931810 - protein, 142 aa, Homo sapiens
MSTVCGSPPSGFTPCGAVKQEANVSFACNNPPSAKGNSLCFPEATQSQTGRCPWGVELVQQEPRGSAGERDWGRAGPDISAFAMVARELAATTLRARPPLGPRPHSQPNPDGVIERGCRGAQGRVSEQDHRGHFCRRTSPVR

SEQ ID NO: 931811 - protein, 180 aa, Homo sapiens
MPSACLFCAPKHNSVTPFPPPFRGHLSSPWSCEHCQRYSLVLQWGRALISPRQPTVGKSPSHLLLGDPFIQARPPEARRLQLSPPFPQFRICFSGHGPIGWLLAEPKLAVTFSPTQWLKSRTLTTPNADEDVEQQELPFIAGGNAKPNITLTIPPPQSFINYSKAPLWCGMLITRKAVGV

SEQ ID NO: 931812 - protein, 174 aa, Homo sapiens
MEDSGADWPGSRPRTEPWRIPMAALGMLMDGMAIGNVHLPESRQLQQRRLHIPCVPGPQGMVAEGDHLPSAHLGGTRNAIVWMGGDSYQEERRAGEALGPAMVKREGCEEPAWTCELPGDSGERGFANAVTDKRCMVLFLSSLLLKEHRGSFLFIFLPYADLETAMKILLLQGP

SEQ ID NO: 931813 - protein, 161 aa, Homo sapiens
MTDPSAPALPFQDPMWPQPHTRTPVSWFAALGAQVSWFVALGAQVSWFAVLGAQVSWLLLVLRRLSRLPKSVTGPPAPVLLPEATVPHLDAAPMALGPPLPSPPPGCCLGRPGKGEEAGPDLPSPFHGLLMGWVTALNPSTWPVLEQAALFFNIILIIVFI

SEQ ID NO: 931814 - protein, 134 aa, Homo sapiens [sequence omitted]

SEQ ID NO: 931815 - protein, 147 aa, Homo sapiens
MASWEGKDLTVPQPDTRKGLSFHLTRNTHSTGFTYNFWTSKFTTIPILSEIMCHGPEGSHDPSPKDGCGCQDTASTHNSLLVKSASVLPSLCLTPEQIRCQQCECRRHPWSPKESEEPRGIQSWDKDLCRHHTSLAPPIVECWAKPT

SEQ ID NO: 931816 - protein, 485 aa, Homo sapiens
MWLQEAVVFEDVAVYFTRIEWSCLAPDQQALYRDVMLENYGNLASLGFLVAKPALISLLEQGEEPGALILQVAEQSVAKASLCTDSRMEAGIMESPLQRKLSRQAGLPGTVWGCLPWGHPVGGHPAPPHPHGGPEDGSDKPTHPRAREHSASPRVLQEDLGRPVGSSAPRYRCVCGKAFKYNSLLLRHQIIHTGAKPFQCTECGKAFKQSSILLRHQLIHTEEKPFQCGECGKAFRQSTQLAAHHRVHTRERPYACGECGKAFSRSSRLLQHQKFHTGEKPFACTECGKAFCRRFTLNEHGRIHSGERPYRCLRCGQRFIRGSSLLKHHRLHAQEGAQDGGAGQGALLGAAQRPQAGDPPHECPVCGRPFRHNSLLLLHLRLHTGEKPFECAECGKAFGRKSNLTLHQKIHTKEKPFACTECGKAFRRSYTLNEHYRLHSGERPYRCRACGRACSRLSTLIQHQKVHGREPGEDTEGRRAPCWAS

SEQ ID NO: 931817 - protein, 193 aa, Homo sapiens
MRQRQKGAGTQGFLGCWCVSFQEVVTFGDVAVHFSREEWQCLDPGQRALYREVMLENHSSVAGLGEAAPWGPFPCIISQHPPSQASIRGWVSSLNSTTATGSHCGALYVHACVLTSCILSLDCNLRTRILGSSRDMVGEAEGLSLSIPNMELGSLGHGQESTKVRASLGNQELCHDPFHLGQLPTCPPLGSIT

SEQ ID NO: 931818 - protein, 243 aa, Homo sapiens
MRESLFQKQLRHPKNPFSRVDTGPHLQELRMRSNSSEASGPWLRTATRWQHSRFTALPFAGPRSLTASQGGGQPTRGVLASQSGPDGASDPDSRLTSLPDRFRLAGREGRTGEVGLPCCSAALRPSPARCPCARSSRGAAGVGPSRHQRHFLFEGPPGQGPEYGLRLAALCQPWGRSSRGSFRSRAPDNSLAPRGVPWTPAAQSGFCVPMRSRPLGPSGPRLPIPAPSHAPLLSAFQGRGSPF

SEQ ID NO: 931819 - protein, 164 aa, Homo sapiens
MACPQPPGPSCWGETPADHLSRVQLRPCPSTCNHDAMVASFVVASFEGVQGGCRAEASRWTGLWARGLVRRSWAHVPFMLKEMQGHQLLRQLVTWGRCSSQPLWPSARGSSDILALTIIFLIDRFFSVHTQGYLPAGAGENAMGHCSARASLHSLHAACMQAFF

SEQ ID NO: 931820 - protein, 196 aa, Homo sapiens
MIVRPLQPCGTVCNSRGWNSLEGSEEDRKMWDNLEPPRDLLNGFDQNAENDMDNEIQAEVISDGDEEFLGNWSKGPRRHLQFPGSNTCICEKQVQLEGKTLRSPKIKDSILHRILRPPKEGNATGWDRVMLPQCTSQQRHSLSLSGRSPISPSPTGGLSLSAISKTAALTRDLSTTIHPKVLVISQYKIIPGIPQS

SEQ ID NO: 931821 - protein, 150 aa, Homo sapiens
MGGTRKWTRSVNIEAQHHGGGGRRFRPPDDCGQPWIISSLPQEAGRADCSLTPPRKGDSLSRSAKNGILRKNLCEGMKMWTLLLTLLCSPGDDPWMELGHTFPSFPRSPGVSLQEAIKVGRYWEQSTLPCKVTALRIMCVAAAAYESNCC

SEQ ID NO: 931822 - protein, 499 aa, Homo sapiens
MGQTEKPFQTGEDSVSVSDAPESCVIDCEEETGTEFKKGMESSHYKNVVESVMAQSMQNVDYNQLQEVIYPESSKLGEGGPELFGPSEFRPRWPPTPSPVVQMPVTLQPQMPIQTQYLQYQLVENKTQPLVVYQHWPPAEFQWDPVPNSRALYQQPTAMVFDPTVPASGQDSALHETVDTARKQGDLEAWQYPVMLQPIPAGKGPGKGVKQERLSERRLETRDKLIDFYMFLQTEVANTGLTIASDKIQTSTPFNYLGMQVEERKIKPQKIEIRKDTLRTLNDFQKLLGDINWIGPTLGIPTYAMSNLFSILRGDPDLNGKRTITPEATKEIELVEEKINSAQVNRIDHLAPLQFLIFATAHSPTGIIVQNTDLVEWSFLPHSTVKTFTLYLDQMATLIGQTRLRIVKLCGSDPDKIIVPLNKEQVRQAFINSAAWQIGLADFVGIIDNHYPETKIFQFLKLTTWILPKITRQKPLENALTVFTDGFSNGKVAYTGPKE

SEQ ID NO: 931823 - protein, 224 aa, Homo sapiens; identical to SEQ ID NO: 803990

SEQ ID NO: 931824 - protein, 140 aa, Homo sapiens
MVHVSWVDMWVLGSDQEKAKILWEAEFKEIVKKVSFKSSTGKCVVEEGLWESGVCGMRVECWMNWYYHLVNNSEILDQVVQLTAGPVGPQTHPVVIFQVPGCIIGIDILSSWQNPHIGSLTGKGYYGWKRQMEAIRAGCT

SEQ ID NO: 931825 - protein, 241 aa, Homo sapiens
MVLKMGVCLLKLSFLPAAIHVRCDLLLLAFHHDCEASPAMWNFAEKIPKNVEATLEPGNSRGWNSLEGSEEDRKMWDNLEPPRDLLNGFDQNAENDMDNEIQAEVISDGDEEFLGNWSKGPRRHLQFPGSNTCICEKQVQLEGKTLRSPKIKDSILHRILRPPKEGNATGWDRVMLPQCTSQQRHSLSLSGRSPISPSPTGGLSLSAISKTAALTRDLSTTIHPKVLVISQYKIIPGIPQS

SEQ ID NO: 931826 - protein, 737 aa, Homo sapiens
MGFSGHNPINFEYVIHCLLTSISSDKKSAVYLIGAPLYMISCFSLAFKIFSLSLTFNVFTMMFLSVGCDSRIEKEEMIPKQDISEELESQRAKSEDHVRNIFKETEEMSKTEGKLENCWRKYAVEGVKNSFSQKSNFREITMRYVKTLSRENGQKFNAVGENCITDSNPAKHLRGSREESLHPSVSSVENLQQHEDLINLQSFQLGERAYQTDVLVKVPRQSSVLSENQRMNNPERWFESTGCGKTYNQNRAFNQHQRFHSGEKTYEHNECGKAFSWPSILSKHQRIHTGKKLYTCEDCGKSFSVHSYFIQHCKIHTREKPYECIKCGKAFSTHSSYVQHLKIHTGEKHHECNQCGKAFSHSSNLIHHQRIHSGEKPYKCKECGKAFNRQSNLIQHQRIHSGEKPYDCKECGKAFSTQLFLIQHQRIHTGEKPYECNECAKSFSLNRTLTVHQRIHTGEKPYRCNECGKSFSQCSQVIQHKRIHTGEKPYICNECGKSFGEKPYECSECGKAFSQSFNLIHHQRTHNGEKSYECNECDKAFSLLSSLVQHQRIHNGDKPYECHKCGKAFSQGSHLIQHQRSHIGEKPYECNECGKTFGQISTLIKHERTHNGEKPYECSDCGKAFSQSAHLIHHQRIHTGENPYECSECGKAFNVCSSLIQHHRIHTGEKPYECSDCGKAFSQHSQFIQHQRIHTGEKPYMCNECEKSFSACLSLIQHKRIHTGEKPYVCAKCGKSF

SEQ ID NO: 931827 - protein, 164 aa, Homo sapiens
MRLIAALHACHMRLGVKAEYTKRCASAGDCEDINELMFSCQSETLPTPQDKLRDLVMAVMQLLLGGLQGCIKILSFHIVVSFEDVAVPLSQEEWDCLIPAQRGLYKDVMMGTYGNLLSLVGEWLSKLWYIHTMGYDSTIKRNCPDFTTMQYMHVRNLHLYPLNI

SEQ ID NO: 931828 - protein, 171 aa, Homo sapiens
MRNTHRCGGATHPYSIKAFLCKRADVITVDYYATVYFHQKLEEFGDLEEDKKMRESLELPRDWLNGYDQNDGSDIDSEGQADEVSDENRNLLETGSVGCEDHGKSVVLGPDNTVPHGTVTHGGFPCLGEEVPQLLALPGSIDEKNKMRTSFLILTLPLSGHRSLLAWFCHP

SEQ ID NO: 931829 - protein, 138 aa, Homo sapiens
MLLLPLLLGHMNEDAPCCHCVGEVVLDNILKSVFQLGSVLPITFSKCRRNEIITTTLLDYTTIKLEIKNKKFTQNHTITCKSNNLLLNDFCINNEIKAEIKMLFETSQKKNTTYQNLCDTAKAVLRGEFIALNTTPKS

SEQ ID NO: 931830 - protein, 162 aa, Homo sapiens
MADCGQIASSGQTLTLLPHWCGNTAASCKEKAPSLDQCEWVFVVVVLAGWDSLTSGPEARAAGTGLPVGLPVGLSGACAKTAGVSLCHFRGPENLGGSPMARIVRVHVGSVDPLGTLTHSTFSRVRELLLAPCQSWVCSYLALLLSVLCEAPGFLGGSRGDF

SEQ ID NO: 931831 - protein, 171 aa, Homo sapiens
MLVQRQMSVIEEDLEEFQLALKHYVESAFSKVDACGSPHSDLKSSLVDEAPTLGHLAVIAPLAVRPPMSVKCHRKYEDFKEKDTGCFGCAFWLFTRWPTVRKKKGEPTSSPLMSDPEDANVFPESLLPSILPLASHWPEFKSHGHCWPLGRLGNKCPAERSKVIRVFSVQH

SEQ ID NO: 931832 - protein, 141 aa, Homo sapiens
MGINQSRKAENCKSQRASSPPKDHSSLPAMEQSWTENDFDELTEVGFRRLVITNFSELKEDVQTHCKEAKNLEKRLDKWLTRINSVEKTLNDLMELKTTARELRDACTSFNSRFEQAEERVSVIEDQINEIKQQEKFREKK

SEQ ID NO: 931833 - protein, 191 aa, Homo sapiens
MGVDVGHLHVSAKSTCGQSESPLCWEKVTVQDDSSALPSHPGVASGFCAASELPRWAARVLQSTAISLRAGALQTSGCDYSQRRVTTTQRDTLGANLVKGACLNQLQNPCASNRIYLQTSPSQKIVPTSPVHSDLSPSLSSGCPCNPDRAFTLFMAEESCKIWKPREKWLTNTDYDFPDCTAQEIEFNHLN

SEQ ID NO: 931834 - protein, 209 aa, Homo sapiens
MFMFFHASDKENQQTFQNVQNTGEDRCKDHSWKPANTTNRSCLGHATLVWARGETKGVYSNMKTEHACELSSDMQHACPLILAAHSHTVFAMPPGHRIPVDPPRVGIQGRLKANTRKHETEFLAKMTLEDMMRDQNARARTGDESTNLGQNWKSSEGQLCHVVDLWSWDLLLAPFYILGKYDPGNPEPSKYVPNVKCKANSVPVRFSGS

SEQ ID NO: 931835 - protein, 135 aa, Homo sapiens
MADAYQKIRFSIYGNVFIFISFYLKIDPIEVATSGSGLSQICLYQQCENGLIQWKKARWGQVNQAFDFKTSSAFQMRDVLRGRSSIPEQSFNHPHTPSQKVCHDHRVARKAPSRTGENGSPLGAISSEPVIPSRV

SEQ ID NO: 931836 - protein, 136 aa, Homo sapiens
MEFQAQQANNGRKLGPQAGCTGGLLSDSLLKEAALGQCDSVMAEFYTFHGLQIRSEEYSQKQPQTFPSRTLSRTETWTNIKTVTDCTSNGALDFLGQQVNYQNHSQLPQLTPLDPESWVSAQCTHVYPDQSDVPSS

SEQ ID NO: 931837 - protein, 151 aa, Homo sapiens
MDGVHWNWVFSFFHMEESDQAPRGETHKYLVVALDWVAPEFLTLRLVRPDSPAICKLELRFSCPSTGPHSGFHRSVVALDSHKSDNPIVNYACEESRLHAPYENLMPDDLKWNSLIPKPSSAPFWSVEKLSSMKPVPGAKKVGDGGRTSFN

SEQ ID NO: 931838 - protein, 151 aa, Homo sapiens
MAEWPGLEPRTFSLWLPASCTTWPGEHADTEFLPPNILFTIPNEKTLQGPGAPGPPLLAPAPVCLGPLRGLTSLSKRHKRVNTSEHLVSHVFCVGVKGRPMQRSWGEAVGAAPRDDGLVGSLVGLLLSAIQCCWCLKEAAVEAVDISDISL

SEQ ID NO: 931839 - protein, 164 aa, Homo sapiens
MGFLMEFKGLLLNGAIIASSSSTASQVFPLVLNINAVSSNLLLQTVQMTFPELDFSTAILQGHQHSGHGIQHTREQPSWMVLNNDVLLDYPNTGHLLSTAQVPPPPVKMNHPGEKGGPLMQHEWYPCKEEGRDTGRRRPRKQSLGSHQHPSFHCVAPGNGSGTL

SEQ ID NO: 931840 - protein, 152 aa, Homo sapiens
MQVNWGKPGFGCKSVPACSVCLILGSRMKSQWLPEAYTPCVGVKTHKVPWFGSLAAPHIKGPDTTMVKSRSGERPLSKKRSILEGSEDNKIHSTTVSNGVGSFASWSRTSQPLDSLLAAPADKPRTTAAQTSSLCVPGCSVLLQSRWGTEGR

SEQ ID NO: 931841 - protein, 136 aa, Homo sapiens
MFTTHRHEDLCPGDMVHSFMGFTIWCGLQTYQQAVIIKWKGTMIGEVQGSIGTLRIGTRPDLAEWRVRKGLQGEVVSKLNRNWPGKGRRKKSGYQAEGNTLKVRKRLTQYLGIANAHVAGYKKQQMRYQPGEIINS

SEQ ID NO: 931842 - protein, 165 aa, Homo sapiens
MSCWDRAQPPATLNWKKQGTAPLAAFMGWCCVPVAFPGTWCKLLMDLPFQGLEVGDSLLTAPLGRAPVSTLCGSSNPTFPLHTALVEVLHEGSAPAADIPEQLQECFGQVDGSPPAKVQEDLHLTGMASVLSHWERAVWRKCGSDKEVGDPEVSGWASIQCSGST

SEQ ID NO: 931843 - protein, 158 aa, Homo sapiens
MVYCPMLLCASPESTLDSPPLRRKTAPSLCYLWPLRDSALGYGEGFIGSTLLEAPAMESVCADLFMCPPSGEGDWSAAGEAHKIKTLAVDPGTDRHKQAIVGITCTSVEEQGGLLLSTWEDHQGNPTNNWERSGVDTACQRRGMLGGERGEAQSLCQS

SEQ ID NO: 931844 - protein, 116 aa, Homo sapiens
MFISMGVEKPSERETHESHSPLGFGYSDRSDGWVGSDGEQGGEVLDRAFLDGLALMLVLATERNGQNVNGEVVPEFEKWLCHLQYVRPGAQLPLLKNEDEKSHHLIARGEIRGWVI

SEQ ID NO: 931845 - protein, 123 aa, Homo sapiens
MADMGTLISLRRRKCHLYLQGESALGVNQDHISDAGTWIYRQLTVCLMWFGCVPTQISSPIVAPTVPMCRGRDPVGGNWIMGAGLSRAAVLVIEKKKNPVALSLLSRNSDSKAVQIFAISLRC

SEQ ID NO: 931846 - protein, 157 aa, Homo sapiens
MYVTEKCTNHHTLANYYKVNTPLFFLILSLFPPFVLQRAPVCVVPLYVSMCSHHFLPLTRENVQYSVFCSCTSLLRIMVSSSIHVPAEDTISFFFMRSLSLWCHSSIPGLYSVLLFPKLGFQVTVSEVASKSPTLLPLLSILNRCCDYRSTLCPVSF

SEQ ID NO: 931847 - protein, 172 aa, Homo sapiens
MKSSNLASLQINTNGIIHLDEGIRVADGVSIMSHHMRDSFCAHKDFSHFAQLVLGFLRCNTMYSKVTLGVIDQTKILSHLVNADDIHESSRMNWKNWIFGRSQIKLWTDNPTKIPPSWGSPVYEGSLPLFLRVPTLNPVFFCDRHPAPNVNPLDALLSILSPVPPGDSSTIM

SEQ ID NO: 931848 - protein, 153 aa, Homo sapiens
MKQTCVGGSGVAEQRHEPPQTLASTEGARSLGIPKVITILTLCHVICFWARSAAATIQAALTTGIFRIVSFVIIKCLWSSVMWVDAVYRTTWTNQPPPQRNTGFPLFQWIIMLTVSGSVLSAATNGKANSNEFNQKGNVLAYVTGSSQMGQAD

SEQ ID NO: 931849 - protein, 154 aa, Homo sapiens
MPSNNPGRQTIILFIRPKMTKINVWVQTVYFWKARPCEKVMTWAFSMFFSQPVPLKHPFYVWGVNSENATQKASSQAPCNLSSTNQTSKSESDSAVDQGRQEDPRRISLLVVKVSSLQKQQCLQTWIPKVQKWLQWLEFVEISVVLTCWQQCKL

SEQ ID NO: 931850 - protein, 143 aa, Homo sapiens
MNERRPLLHRARSHRPRRAEIAGPQAAGLSGSSTCGPSGRSTGWKVWLASITISELAVTSAICHGGSALAFFQNGNINAIVPCEIGEVNYTLKLFSVALKMLALVYSLNQRLGGGVNPENKGLERGESELAGTVYCSCDRNRR

SEQ ID NO: 931851 - protein, 166 aa, Homo sapiens
MAAQKEHPGWAVLRVWPQELLASEWQSQCGLTAHKVQVMPTAWLMDTEVQVMPPAWFMGAMVQVMPPAWLLGTMVQVMPPAWFTGAMVQVMPPAWFMGAMVQVMPCMVHGYNGAGDAPCMVHGCNGAGILPCTCSLIALTPGAEPAGSPGLELGPNGYTHLEAGSS

SEQ ID NO: 931852 - protein, 186 aa, Homo sapiens
MALWVNPLLPCFGRQLAAEQEFSCVRPMAVIALFLPFRLHFKAPHDAKRAAGYSRSTTSQMLVQGKRGRWPLTVAAKGYEKSLTQLLASLYRSTFWTHVPTQACLWNGRELTVLSCLNLQGRSIRLAMRHEKGCLYLCDIIIFSSALRSVHVGETFPGLPQNHHVCSIPRATRQQGSEEEQATTWC

SEQ ID NO: 931853 - protein, 144 aa, Homo sapiens
MPGIEDVTKNKGDPCSQGAPIPPLSASLCEKEYHILFLFLLPNTHREQIEKTPTNKNWPNKHTQVKAALVEVSSGTFLHGCQPCLCNVNHAYRKPPEKPKRTRCFPESCELLQQVNQILRGGYENANLKTVDQKFQRPAHVTDV

SEQ ID NO: 931854 - protein, 138 aa, Homo sapiens [sequence omitted]

SEQ ID NO: 931855 - protein, 458 aa, Homo sapiens
MSAKDGSSKSLTAQTYLRHYSHTTIYSHTIIFSHTTIYSRTAIYSHTATYNHTVIYTHCHLSHTTIYSYTAIFSLTAIYSHTAIYSHTATYSHTAIYSCTAIYSHTATYSHTAIYGHTVIYTHCHLSHTTIYSYTAIFSLTTIYSRTAIYSHTATYSQLPSAATLPSTATLPSTATLYTTIFSLTAIYSHTATYGCTATHSHTAVYGHTAIYSHIATHGHTATHGHTAVYSRTAIYSRTATYSRTATHGHTATHGHTAIYSHTAIYGHTATYGCTATHGHTATHGHTAIYSHTAIYSHTAIYGHAAIYSHAATYSHTATYGCTATHSHTAVYGRTAVYSRTAVYSRTAIYSRTTTYSRTAIYSHTAIYSRTATYSRTAIYSGANIYIHAAIYSHTTIYSRAATYSCTAIVITWGGTARPPSALPPHFTFSFLHMPRSCMNEVFTLHLYFKRNKEKQSH

SEQ ID NO: 931856 - protein, 134 aa, Homo sapiens
MSQGYLFQMEEVKGPEGTAVLRVPVFCELTQQRTARDTQSHTVAGSLAAVFLIPGADGQKGFLTRCFPGAWEEVTLSTDTTSCSRPWSRLSRHSQQRPHRELLGRQGDVGHRHQLNGGWHSASTIQPVPQIKEK

SEQ ID NO: 931857 - protein, 185 aa, Homo sapiens
MHVVLLQPSGLCVFSAAGASRVPSCGLALLLLLLGSWGLLSRNWEESLRNWEESLRSWEESLRNWEESLRNWEESLRNWEESLQNWEELLRNWEVSLQNWEESLQSFEESLRSWEESLRNWEESLRSWEESLRNWEKNKLIVKQLQAGPVGGVQKKALSSQEVTALCVSLPLQTFQWDQMLGGRQ

SEQ ID NO: 931858 - protein, 156 aa, Homo sapiens
MVKEKPQSCPQSCGIEAAMAGFIWLRRVRWWVEGVRVTGSESARVRSNLNSCLLRRNNSKEGHKAEKDRGKFQSRSGSLLQSLRAGKKVHSEEIQAGFYTLVHLRRSEPLSRDSSLRVGCPPAQNPPHAWEVSVRSGLEVGRMPIRGLLPSSVCRC

SEQ ID NO: 931859 - protein, 147 aa, Homo sapiens
MFETCRQTRAFSKAAQEMFHGPRLPACLASGFGDADTQVQLLRDRGTCSVWGMAWGSGAISGVRGKGEEQCLSAEIFPHGPHGHVRVGSSPSSTLLVGFGNGNHVKAQPNKDPEVRKAFPVETTCLSASDQFTPGPDRVILVLRGME

SEQ ID NO: 931860 - protein, 216 aa, Homo sapiens
MLQRQSPVYNCSFRYTGNGIKGARDVGPYSYLGPAPNTGSCQQAAGKFRGISDAKAPEEDSNPCGRNIRHEECIVDLPEVVALKKKPEASLHLDEAHSTGARALQLSCCGIPQPGSEDADVMMGASAKSSRASGGHIEGKEEQTDSPWTPSLSATHATLLSPPVVQRSLYGVCHGAGWHGPGDALLTYGNKDSLTLCGMPKLVPLDQLLEQNLVYR

SEQ ID NO: 931861 - protein, 156 aa, Homo sapiens
MSILSSFVLFSSSSLGQGPRNSGLAEPQSWCFCWRGSGAQGSALNVVTCRSQDCRPHGLQSPGRWGNIALEVPEQGRTRYKKPHTVYFHVHESPEQANPEGEKVRQWLPGAGGWKGTAKENAVSPGRLEIFRSQGAVMVAQSRECTSTTELYTLNR

SEQ ID NO: 931862 - protein, 140 aa, Homo sapiens
MAKKHAFGLILTEAPLLVVVAKETGLALPSAPTRGSPYLTRRDRCQHFSPQHPVEEAKFLVSMTDSPLPPASPYSSDGALAQEQRAKKAGIQLLCPAPLSNELVCEGCQNKAPQTGGLNNRNFSLTVLRRKRLSSRRWQV

SEQ ID NO: 931863 - protein, 124 aa, Homo sapiens
MLPGRSRTSFVEKCFQSRETHSLSREQHGKDICSHDSITAHQVPPATVGIQDEIWVGKQPNRINCPLTSIIAEEKTAISPFGFSCTRQLVPTFCFQDFHVGFKHLYYDMCECESLCIYPTFGIH

SEQ ID NO: 931864 - protein, 210 aa, Homo sapiens
MSFNAIAAAMDGSYEARTATQRVHQGDARCSNTGCAPGGCEMQQRSVCTGGWEMQQHSVCTGGCEMQQHSVCTGGWEMQQHSVKERKVVRYRKSPKLTETGGPATHDCCQGPGQGKLLSPPVTIALAHHANPAVTIKLACYEKSPVTIALARHANPPETIQLACHANPPVTMHWPAMLSHPSALCMPTLACCDFFSHRTKFSRETTFTAV

SEQ ID NO: 931865 - protein, 225 aa, Homo sapiens
MGIPFSKPLGWEVNEAAQQVPRGERTGWRGSVGALQAFGLCSGISHGGSQRDPTHNGPEGVLPIRIHLSSRVHEGLSELSSSDPRIRAAHHGFTCPPGPTRGSQSFHPQIPGSVLPITDSSVLQGPRGALRDFILRSPDPGGGSVWGGADCRENPLAMELQPPRSGPSPSPRLILGPPGHEDPHQVPGHPRTTRKPPEPQQEGGIYTFRMKSGEASLTLQMPTQV

SEQ ID NO: 931866 - protein, 133 aa, Homo sapiens
MGRNQCKKAENFKNQNTSSPPKDHTSSPAREQNWTENECDELTEVGFRRWVIANSSKLKGHVLRQCKEAKNLEKRDGKSLPQKSRGACIGYDSVMGTHVSTAQFRCKDCGLVRGLGDGSSRQNTDSGIQEFPS

SEQ ID NO: 931867 - protein, 135 aa, Homo sapiens
MISNTHVRGPTDPPVPLAASSPPGALGSLAPLQFSVNTFPLLRSFTRRIRRFSDLIAPPPRPQRATPSSHAGIAESHVGIPGLTRSPSSRTFCLPAPGRDPQAQPWGCLPDGSCGSVPRAPLDHLELSPPCSLLQ

SEQ ID NO: 931868 - protein, 287 aa, Homo sapiens
MAYGQTGSGKSYTMLGRHSDDGPVLPLDPQSDLGIIPRVAEELFSGDTTVEGGDVVWQHVPDVGFAVFPKRESEQTRTVSSLITSTHDLERGALGQGWGLILENTSRSPKVEVSIVEVYNNDIFDLLAKDSIAAVSGVKREVVTAKDGRTEVALLASEAVGSASKLMELVHGGLQLRAKHPTLVHADSSRSHLIITVTLTTASCSDSTGHAEQVQARLQLVDSAGSECVGVSGVTGLALREMACISRSLAALAGVLGALLEHRGHAPYRNSRLTHLLQDCLGVRQSS

SEQ ID NO: 931869 - protein, 158 aa, Homo sapiens
MGRNLGQYLAFLGRGPCGLPQFFRARALCLEIRCCLQSWQTGMVKSAEAVPRAAPSPRCSVPDKPLTGAAAFLSEMPCPERRNLERQSGYSGFPELQWALPNSNFLAAAHSRGANGSVLLAFQEPLGYEKKFLQLAQCLPKQPLSFVLETQDVGGVDT

SEQ ID NO: 931870 - protein, 154 aa, Homo sapiens
MIQWTLGTQGERGSGARDKRLHIGYSEHCWSDGCTKTSEITTKELFHATKYHLFPQNYIWVVSSLDLLCIKLLWMFLHMSFCGLRHSFPIVRARSRISGHRIGISLNLVNIAEEFFQNGGTTLYSQSNSIFSALYTLKYISFLKVMKIIYKTNF

SEQ ID NO: 931871 - protein, 144 aa, Homo sapiens
MNKNLLYIFLGDQMDGLLLSECWEYNCQELKLGPSMKKTEALVQVYTSKVHEQFAKKSRQTTWVITRALTFANAGWAQEQKSWCQQCSHAWKPLKAVAGSSEWGGDPHGTQKCILPGLEDPTSCGLSIPAVLPCQPWQSRGELC

SEQ ID NO: 931872 - protein, 179 aa, Homo sapiens
MTSEGASPKPWQFPHGVEPEGAQKSRIEVWEPPPQFQRMYGNTWMSRQKFAAGGPSSRPRNGRSTNTTNNLHRAPGKATNTQCQPMKAAGRKPVPCKATGVELLKAVGVHLLYECDLDVRHGVKGDYFVALRFDCPTGFQTCMGPLAPLFYRFLPFGMNVFIQCLYSYCILEVIQMGFP

SEQ ID NO: 931873 - protein, 150 aa, Homo sapiens
MPFLCYHADSAGSSWGLPEQPCGHRDCSPFPCLPQPHHLLPGGHLATLLVSKAEAMRKKDRRGMRTSFQIRQEEQGPGEHVVEAASGELWWCQIPWREEAAAPGSREPWRKLPLQTRGNASSGFHSFVHCCFPSARRSLELSGCSKDTVE

SEQ ID NO: 931874 - protein, 136 aa, Homo sapiens
MCRAHTHHTEPTDTAHAHDTEPTGRGHAYHTELMVRGHAHHAEPTGRGHTHQAEPTVRDHARHVEPMGRGLTMQNPRAEATLTMQNLGKRPGSPRRTHGKRPHSPCRAMCRGHAHHTEPTLTMQSHGPTNQKTRAS

SEQ ID NO: 931875 - protein, 197 aa, Homo sapiens
MRTFPSGSWSTWVLICLCSWLLLDFARMNGTSLHLHQVHTPKDDYAAIPTEVQRVQAVHLSSVTGSSGLRVCVAPTSVTVLSVSPCYICSLLAFKFVFHKVRKRENGWGVLLYLQNKQNAEVLQDKGVSMTWLVNGTARIQIQAAGPSPVCSELLCCPPVPMGTRTCLGNNESMKVLKNLDCRENPLRNLQTAFHSG

SEQ ID NO: 931876 - protein, 157 aa, Homo sapiens
MWSARGAELALLLVPCARNGHCICLLLSWRDIGLGPAKGWASIRSHLIDGLARNPRSHPDLNESIPTLIYPVAQHPRKEQVQADLQALHDGCSRHDQFIGSQRLLFPYPFSRILVGFYALSVVPLAEACAEHLTSYSQLAGTGPWKCLTSTPAAVQR

SEQ ID NO: 931877 - protein, 153 aa, Homo sapiens
MWSARGAELALLLALHDGCSRHDQFIGSQRLLFPYPFSRILVGFYALSVVPLAEACAEHLVKFMKHVTVTCRHGTVWVVSPIVKPAPDIVLAAGRNRTVEVFDLNAGCSAAVIAEAHSRPVHQICQNKVTNQFSNIFKRIILENDMMLFGVIL

SEQ ID NO: 931878 - protein, 163 aa, Homo sapiens
MHRRCSAGSWSTWVLICLCSWLLLDFARMNGTSLHLHQGREMTWLVNGTARIQIQAAGPSPVCSELLCCPPVPMGTRTCLGNNESMKVLKNLDCREKSLFLELDVIYSSFCKLGRWLSMNKETGLSACENIEEKDSFKNLPSGQEQWLMPVIPALWGAEAGGS

SEQ ID NO: 931879 - protein, 141 aa, Homo sapiens
MAMEETVPYIDTDSEHTQHSGNFAPGLQSIVTYRKVSALVRGNAVWNTMMVDKAFRESPDGRVGRSIVCRTGKPVSALYIMEEVQYNQPITSTIGSAGSCGPNGRAAAQQPGPVAEPSPILDPTQSWQCFGSLNKRARVTH

SEQ ID NO: 931880 - protein, 137 aa, Homo sapiens
MSRSRVRHYLTREMQGVREFPFLAKERGDRRHLENRVTPTLILCFSDSLSKRHNRRLYPAHSSEGPMPTEPRSLLAQQSEIKLQGGNKTSRGTIRQQHWLFSNTRCSAASAADTQANRVWSGPPANSNKPAAEGHDC

SEQ ID NO: 931881 - protein, 143 aa, Homo sapiens
MSPVEAAEYQRWLPAPSSGSSVPKGHQPDAGGNGPVQSAAEWPLRICTALCLGPKALVPWAHEADVLIHGLHRSMEKNVVSQIIEKGPSCHTVECMSCLEVEEKRLDEKLSQHQERRHVSVCMNDCDPIHMQKSGIHSLNSFS

SEQ ID NO: 931882 - protein, 136 aa, Homo sapiens
MSENHYFLSKFFSNYEQLTLMFLREFLIHESKAHLVSLPTHLDCSVLEPACTACKKLLVKFQEFGNVTLTSVKVSVPFKRTLFFAAVFIQFLLVSAKEQSISPNGRIQIGTSTKLWSSCAAELILGELAGSKQEAC

SEQ ID NO: 931883 - protein, 138 aa, Homo sapiens
MPSLHLGGLKHSSGWSSVSFRNPTCQCNLKFVLCALCKKPYLENSLRGDFLAAGYQSSFHKPVAGVAAIPAGRTLLSKLPSLPDTSREKWLIGATVMAATPLPGNSVALDSVQPAAAGCSPSRLHSSVLETQGPGGVG

SEQ ID NO: 931884 - protein, 168 aa, Homo sapiens
MVNIDCQLDWIEGCKVLFLGVSARIKQAEEGKGADLLSPPAFIFLLCWMLPALEHQIPSSSAFGLLDSGLTPVICQGLSGLARLSGRPKAAEDKGAHAQKEVDWECLRTQRLTIKEDLFYTFWHMNNGSISLEQLLLLTHYVHQHNVINVMDECDILWKGKAIKILAN

SEQ ID NO: 931885 - protein, 155 aa, Homo sapiens
MQKGNVGSEPPHRVPTGELPSRATVSRPPSSRPQNGRSTDSLYHALGKATDTQCQPMKAARRETVPCKATGVELPKTIGNQLLHQCDLDMRCGVKGDYFGALRFDCPSGFLTCMGPFPEITTTDMLEWKKGKKQDGRIEGPRLCPTMGKPNSTTS

SEQ ID NO: 931886 - protein, 143 aa, Homo sapiens
MKNERLRKNSQFLCLGLLKNGQPCRNVTGLKVAEELFPITASGLHQVLLGYYWCSLKAQGLFSQLVVNAARPRILLSGQWAPLCPTEGPEMLSKSSDLKSGTQKACLVLYPTVAELDPKLKDKILFTLPSLFLKQKGSLPVAT

SEQ ID NO: 931887 - protein, 140 aa, Homo sapiens
MSWYTLRQLLKSLHLLPCPTLEDTLVIPLEHPDLSLDCFLLGVSTTLFELRLSGIDHSSVRPPHTLVGLQNDAAGCTPLRVLPQPHTATFPWDANVEIPSLLRNSSSPQSASLTLLSMDSLFGLAPPNSLWTVSYLTSFP

SEQ ID NO: 931888 - protein, 130 aa, Homo sapiens
MRKEETNSPLKWMAGGRWGKTYDYLIGSHRKQTQQKSGFRLEKKGEDCSLKMTLQKENRPSSDSKKKTEKEGAEDCLDIKGAKENGPNNIAYLRELLCKLKTGKCCKSFSVFAGTSEHSINVNYCWQSKG

SEQ ID NO: 931889 - protein, 138 aa, Homo sapiens
MSKLSTIPQVFFQLPATRPPTPLGPQLEPDISIWISKKSVFADFQSLKFQSGSPQHDQSFFIVKGNGLGIELPLFQQGPQPFRVKPWLPSRSLILRAASVRSMLIGRPLGFREKTGGVSGLQIQVPGEIGLNRSEEAL

SEQ ID NO: 931890 - protein, 270 aa, Homo sapiens
MRTAWERLAAMIQLPPTRPLPQHMGNQENFSKDWLQSMSIHVSNRRRSQQLKEGGKVTQLFIKNALSNCYMHALTATGWAQRESSKNTCCALFPGLLDRMKAVKQQCPGLSSIREAGSRHSIIKFMIAEKKIKVTKQQGGMIPVLCSSCTCIPMSMQPEAPTESGGKGRATGNTAELLDKFSILFVSLAPSHVRATKLSKNYPRHLLSKAEKLQLTSPEPNSARIPDVIYILGREKVYFILVKNIWKNFDVHTFKKAKNLGKSLGIILTT

SEQ ID NO: 931891 - protein, 146 aa, Homo sapiens
MENGLQSASHSTALEQRGYRVQGDKVGSRKHCTDIKTPLLGKQAATAGILLNVLSGRNTADKEANTDRKASHALELTITALNVPETGGQCEWSGAGQEDSGRRGSQGSTMEDQNSRALGALVVASCCCYWKGAVALTVSPETLSVL

SEQ ID NO: 931892 - protein, 143 aa, Homo sapiens
MGWPEKFSEKWILERRPELCIGVVGRMGFPGRGHSKSKGRKAGVCLACESFFNEARVAAAEDNQSDFCTSYIMMTPSEAPLSQTEWQLISLSPCFYEKTSPEECMQLLVKTPWIHFENLWIHFENLWIHCGILAKVTFSPGCS

SEQ ID NO: 931893 - protein, 141 aa, Homo sapiens
MEERAANSEELAAPPPAGVCTSGPTIRTLPRDNQEDSSAAPLCLGGGGCFSCSGNYLCSPCQAIDVVQTLTLRRFYGISIPLPDDEKKSPIDTGLSMHHGSPGEESWGPVPTGCQHLLNLETVSEEGRRVCEQVEALRGQT

SEQ ID NO: 931894 - protein, 161 aa, Homo sapiens
MRSCSWQSFEGKQSLLTTGKREKWQGFGREVDPTDSHSFTLTFQDAGARPRLKQERFPRPLSHALRDDRGAFPVSGIANHRLGADYFAANDSDAGIAASVLRNEVELCVICVVASYRESNNNIQGADLHDLSEERAIQKQEFQEDGASHRPNWIQWLYGYQ

SEQ ID NO: 931895 - protein, 164 aa, Homo sapiens
MKVMLRLLPQETGDVVMLLSDMGNVEEGEWVCRENGVSAVTLTVKVCGFTPEISETMNPPRGMNNSGRATFKNCNIHYEARPQTHQKEETLDTSEHLKEQTLDTPSLRIVTLTARVCGFILEVSKTKNPLEGTNSRHILVTQMGLLPIAKQIPPQKSRPNKSYS

SEQ ID NO: 931896 - protein, 143 aa, Homo sapiens
MLVYPALLKFLLWFLLICDTGTCNFCKFFMQEYKRELKGSKEMEKEGRKEGRKEGRKERRKERQTNRKRKKEGRKEKEKEKGREGKKEKEREKREKERREGGKEGRKKQKEEKRKGEKKRRRGENKKERKNEEEMREKDLKSE

SEQ ID NO: 931897 - protein, 147 aa, Homo sapiens
MAGGGPRALKSPCVECCLAWSSPFRKVGSPLAQARSGKAVQESSPGIKDPKGPLGALPSEVMLILKVQDTTEFSVSKLLCSFSLSAQETLSASCGCLVLGRCGIGNHNCVCYLFSASFSDRKNKAGNVGCSQITKNLACQPKVFAIY

SEQ ID NO: 931898 - protein, 150 aa, Homo sapiens
MPITIPLKPNHPYPAQCQYPIPQHALKGLKPVITHLLQHGLLKPINSPYNSPILPVLKPEKAYNFSIHTKPYPGHHQSFYTTNVSSNNPTISPLTTRSPFSLISPTLGSHTAPNHARSSPEKHRPFSLHTTPQKFSPPQHFNTILFYFSY

SEQ ID NO: 931899 - protein, 137 aa, Homo sapiens
MGVPEHIPFLHSFHNGSTIGCHAAPAQMPAALKNMEQSTNLGSGFCGITLVTRKNEVVSDGDEELVENWSNGDSCYVLAKRLLAFCPALNGWNFELEMIQALSVQLHLEHKTGRSHVVSLEFCYMHIFPLLILICIF

SEQ ID NO: 931900 - protein, 165 aa, Homo sapiens
MSGAMVAEEIVIREVQLETSAASGAFAGVLLGPTGPSWPGRLCLAYATGLISCQEQSERLVVCERVSVGSGHYTQPGMQWAALELCVGARGKYAAATSTGTSNGLALQRYREESGLKAVITISAMKCMACGRRGSYTLFSNINPSGLRTNSIPHRDHGLLRRKRV

SEQ ID NO: 931901 - protein, 228 aa, Homo sapiens
MDNFNSVLTFTKVSVLTFTKVSVLTFTKVSVLTFTKVSVLTFTKVSVLTFTKVSVLTFTKVSVLTFTKVSVLTFTKVSVLTFTKVSVLTFTKVSVLTFTKVSVLTFTKVSVLTFTKVSVLTFTKVSVLTFTKVSVLTFTKVSVLTFTKVSVLTFTKVSVLTFTKVSVLTFTKGSVLTFTKGSVLTFTKGSVLTFTKGSVLTFTKGSVLTFTKGSVLTFTKGSVLTFSM

SEQ ID NO: 931902 - protein, 143 aa, Homo sapiens
MRDVNFSLNWSRFSPNFRGGGECGGEREGGERLNEATIAQKTSKEPSLSAFTDDSVLMRAEASQAARCAIRLRWLSASFAGPFSVILEKKNLKDFFKDSPTLRLASHVKNLSSNFASNTYTFRYLCLFVHYSEGLHQHPGPHL

SEQ ID NO: 931903 - protein, 212 aa, Homo sapiens
MRSHSSQWKPDTAVRWMHQIINDPVSFVRCTLMAKLLASVPLLQKTFLVALYRIVNLINLAIKKRDLWNFELERDDLGYLVEEISKQQSIQEVTWVWLKAFSFKREAEHKSSKNLQPDYAIEKKIPFSEEKLMLAAEICMSNEELNVNPQDNGENVSRYIQCIGGIVGLEGSDPPGPSFHYLVCVYYFSTCRSASEGRESPVALRAAGQIPQ

SEQ ID NO: 931904 - protein, 151 aa, Homo sapiens
MSCKRYSRRSLIIIGDSSFMHVINHEKLPVGQDVEVEDSDLDDPCPVKHGCRGLRKPIIIVEDKGETGSTPLSQLVETILEYGEQLCYRKAYFSSYNRATEDTRRWESIEPHFPPLSLPFQLPLEVLQGKGCIFNIATFPPGIFDSLCTQW

SEQ ID NO: 931905 - protein, 165 aa, Homo sapiens
MMRGTSDFANLFRSCHVARLKETHREGVWQLGQRQQKGGSRRNGEEQKPLLLSSSLSPDVASGKPKFKPWGKTPSWRRRAKEKLSKEDKCKEDENKNLCFTVKAYTGECSPSAQCNDFLTLSPQIGHIYQPRHRQLKQPQASQHYAFPKGLMTWWSRSKCAAGRS

SEQ ID NO: 931906 - protein, 168 aa, Homo sapiens
MVIFMLEEAGEPPGCDTTAWPNCEGRGAAICPLTGTPVFMPKYCIFQDHSGPPRPQSCAYKSPETLAGTDTSSWTSRRTHGQNTLAEHTGTHQQTPAGHIQWCHVKFSQRRAPLLGGLTPGEDHFPTPSSFCLPHPPPWELLPLNKNLAPILQAPEILQSAQALKDDF

SEQ ID NO: 931907 - protein, 240 aa, Homo sapiens
MNPGGIGHQAYRRSWRWSMGFQFRELKKFVHVDVESGVIDTGDSEGSSVIFPLKHSQKDVTGNAELLYMKDTKGSMNWDIQSRRGKAKEKKCGLMALIFIAPSQPPHQKYSEGEVDATGAFMRDQQWGSFSYHQRFYFQEKSEEERKLRESLELPRELLNGGDQNSNSDMENEAQAEEVSDGNGELIGNWSKEDVWKSLDVQPAAGAEALERASTGVMQRRNVGMNVYDIKIPCYPTLYN

SEQ ID NO: 931908 - protein, 140 aa, Homo sapiens
MMDDRQGVSGLGKQETPNVRDYYHPWTVAQKLWDLPRRIHKEKFAQFAPITSCPRIQRPVGKGLIAACQRGTKPVVDPIPRPARHPPHHALANACAVILLSHYTATSIHKHSKINVLEIRYLYFVVIAGFLASLNLFPYI

SEQ ID NO: 931909 - protein, 174 aa, Homo sapiens
MLCSSLVGNPRRGNKTALFLWIHKISLKSDPSCWTNSRGSGFCPLTLPLSCQPSESPHNTKPSPDIRLLLQGKNTYFQVRYQELGFPGNSGREREFKMIRNIHSDQLDPFSSLLLRLYLQHKAGSQASPSHYTFKVKRKVKSATKFSSPAEILGRLLLPSGYISPPFPIPIRRL

SEQ ID NO: 931910 - protein, 235 aa, Homo sapiens
MQTGMKIDSKTPECRKFLSKLMDQLEALKKQLGDNEAITQEIVGCAHLENYALKMFLYADNEDRAGRFHKNMIKSFYTASLLIDVITVFGELTDENVKHRKYARWKATYIHNCLKNGETPQAGPVGIEEDNDIEENEDAGAASLPTQPTQPSSSSTYDPSNMPSGNYTGIQIPPGAHAPANTPAEVPHSTGVASNTIQPTPQTIPAIDPALFNTISQEGRIVNYICLVYHLEPEP

SEQ ID NO: 931911 - protein, 139 aa, Homo sapiens
MNFCKAETFSPLQAAKVNIKYIKFKFIRLIYSITYIVYVVFMYVWAMQKKNVELELPHRVPTEELPSEAVRRGPPSSRPQNSRSTDSLHCVPGKASDTQCQPMEASRRGAIPLYPAKPQGWSCPRLWEPASCTSMTWMT

SEQ ID NO: 931912 - protein, 160 aa, Homo sapiens
MGTTIQDENWVGTQPNHITKTWKVAGLPNIGIKIYQTFNRAVIKKLVTRAQNLPQATSLITEKQANSQFLGCSTELTEEIHIIQRVCEFFWLSWYVSAVVPGVKVHDHASTKERPCEDVRRRQLQTRKRPLTRSAGILILDFPDSRTARSNDLLIKSPSL

SEQ ID NO: 931913 - protein, 141 aa, Homo sapiens
MTPFENVHAVLTTIFMGHLSCPRPSRQDLYESAKITALLGLGCPLNKNSLDLNTKSLQISEKPFQKGQAHVASWRWIYHSGVRSMVVLFSQFILGSAPEENLYVDSDPTSPFCTALAEVLHEGPAPAANFCLGIQVLNREQ

SEQ ID NO: 931914 - protein, 148 aa, Homo sapiens
MEFPDALHFPSWRKAKEKQSHVLHGSRQEREKEHMCRGTPLYESIRSSETYCHKSHMGKTYLHDSITSHQVPPTTHRNYRSYNSRCYLGGDAAKPYNSISGSSEISCPHISKPTILSQQSPKVLTHFGINSKVQSPKSHLRQDKSICL

SEQ ID NO: 931915 - protein, 205 aa, Homo sapiens
MSSLKARTGHLHFFCVTSGHLGIYVQVTGDAGGLAWAQRPDTLPHFLFDENKVAYHICSSLGEENTCTNPGVRNILSTYLRYYSSRTETLTALLQWLIADKSIGIQTSRKQPATKAAKSVPSAGMVEEPHSRLVVGCFLKSNTRIPLTNKLYFWDLVQKHCLGFIVMLVEHYCWSSTQEEEKIVGTDDPEGKVKKLLLVQVWNGP

SEQ ID NO: 931916 - protein, 156 aa, Homo sapiens
MVEDKQELAMQAMKTAEAGSCTLQSHRVGAAQGCGSPPHASAEVGMIRFQTCMGPVAPLFWSISPICSECVYPMPVLSLYLGKDDPKQGIVKSSLAKSCFLIYFKVDIKVSLYLVNYHLNRSVNRLEPALVLIIETGPIKEAQLFKPCSNKANADL

SEQ ID NO: 931917 - protein, 134 aa, Homo sapiens
MSENILVFLPNENFPAPFPLEENTILLPVNIAEEGTLAVIVAKGLLLELYPREMQTCRFPSRDVCLGQMISLSHFHSLGTHSIWGVFRVLQEQSTSFRGSVVPSVFLIYSYSRSGAKVHEASLHMLHVVRAFSG

SEQ ID NO: 931918 - protein, 152 aa, Homo sapiens
MDTNPSLKSTPKIKFFFFQDAHATPYVTTEKQEESRWEDTYPGWKTRTPEDRERSRLDIHHSDITNIDPQKDDCFNPLTIILCSRPFLLDSQIHALQEHWVPQGTCLHVYIKDSLVTWLLLVQPQEALAGSQGEKEDYGQANLSNNYYIFFS

SEQ ID NO: 931919 - protein, 155 aa, Homo sapiens
MRLAGAWGNILLGVRRRSRVRANIVAGKAVPVSKGQCKERTRGCIARDKEGFLHCSEFLDRPLEFCTRYRACSPRQNRQEAVLKVSSATGIVCQDLGNLDSRDCFVHLIEAAVSEWRLIGLPASTFAHPGEHCLQGSQKDLLTSCYYFVKGKKES

SEQ ID NO: 931920 - protein, 144 aa, Homo sapiens
MALTRRELYSRGCRSTVNGSLGPYQRSLLTPGAHKERSEGLTGTSVSFCKVSKRSSPTEADVSRKDCPLNRCWEGCVSGKGDEESLVKGYKLRLDKRRKLWGTGSCQNNPFRSDSQVRERVGGRWKVDWRGKRRSLTHADTIQI

SEQ ID NO: 931921 - protein, 162 aa, Homo sapiens
MIIYRDLISHDEMFSDIYKIWEIMDGLYLEVEGKMQCESRLIHYAWVGPNWSHYELTPATQNNLLPMVRMRAVVHLKEDESSLDAICPGTLPTHANSTWESWVMLTLCRLLISQTKEGCQSHKQSTISPQRFDNYQDKAQAAVDLQGQLQQGENLQLQARAV

SEQ ID NO: 931922 - protein, 169 aa, Homo sapiens [sequence omitted]

SEQ ID NO: 931923 - protein, 134 aa, Homo sapiens
MGPVEPGMGEYLLVCRLLRLWEKCSISSEVRCFSRTEFFPSMQKFPFCLGVCLEMVSMSLTLEQGPHDSAGCSVILWLSCYPKCKTKFSLIFDLKQKEGVTFIAMSCTACDWGMSGSSTPLAALAGVSLGQIQP

SEQ ID NO: 931924 - protein, 216 aa, Homo sapiens
MEDAPPPARLAALKFDLGLAVSKALWPWDPLSQAQDIISWCAVCYNRLKSTVFSWQCPNFSGTVCHGFPWLGKGNPLTSSTSWVQATFTPMAVPAKVTRTWGCKDRRGKEDAPPSLPHVPIICKEEKGTRDTCSPFSRWVAIHLQSVIVSPSYRSLPSDASSKLESANFPNHKLVGLRLGSGEGNPEAQHVGKRGIKLQTLMQLEPLMMPLSAGNP

SEQ ID NO: 931925 - protein, 153 aa, Homo sapiens
MCGVISQASVLFHWSIYLFSINTMLFCLHLAPGKAADIQQQSVGEAKGTASHNATGAELPKVLGAHSLHQCALYVGHGVKRHYFGALRRQIEKDPKQLVVSQRSWREESKVIFENTWIVSCKATNGILIYLTPKSKLVTTMFSFDKLIHGSTQ

SEQ ID NO: 931926 - protein, 139 aa, Homo sapiens
MIAPLTACIVCLEKPQTLFPLSKDSCSVLSAQWAPCHVAWGGCPPPLRAKGQCDSLFWVPTICGPQALVRHARRTRLPGYLKDNLTVIRAHMATKEFDDRSELIKLLGFLLTRENVVANKFCHGEIRSSKDLCPTITFL

SEQ ID NO: 931927 - protein, 164 aa, Homo sapiens
MPVKLSKFKDKKRKTAREKSVVIYKGSPIRLSVNSSAEIQGSTNHHPQGTDEDEAREGLGDERQLNFVFLCDRNFDIAIRPGMSHSWVHQGAAHKGPAGKNSNEEDASTTLNLVMARGECCYLCYTEGFVQGMGSKPHGVVSPTVPTHLARQIYSHSVLPATVN

SEQ ID NO: 931928 - protein, 151 aa, Homo sapiens
MPRFALAHTQCAAPTVLHPLSDTRHLKYPNKENSRLRGFHYQILPKFKKEILPFIYNLFQKLEDRALDNSFYEARITIIKKKKNSLPTGGDFRCLQLYVGASALKFHIVQLTAFVFYLVLRRSAFYNGHVSFHATEHVKLSPLVILVSLSG

SEQ ID NO: 931929 - protein, 182 aa, Homo sapiens
MGYVSSQLEAQEPKSSESTLTSMEDSGCDLSNEQRTESSDLSQHFVESCTPTHFPPLPLVKRPCAILQNPLSSHMQFLQYLLELKNLTESGNLKRDLTHFEKDSSTVSDSVFQLLDGLITFYRNPKLPFSRFWTEAVGTLASLISDYNLSSHILKKCSKKLEEFEKTLLHAILGNNHINQFW

SEQ ID NO: 931930 - protein, 912 aa, Homo sapiens
MGQTKSKIKSKYASYLSFIKILLKRGGVKVSTKNLIKLFQIIEQFCPWFPEQGTLDLKDWKRIGKELKQAGRKGNIIPLTVWNDWAIIKAALEPFQTEEDSISVSDAPGSGIIDCNEKTRKKSQKETESLHCEYVAEPVMAQSTQNVDYNQLQEVIYPETLKLEGKGPELVGPSESKPRGTSPLPAGQVPVTLQPQKQVKENKTQPPVAYQYWPPAELQYRPPPESQYGYPGMPPAPQGRAPYPQPPTRRLNPTAPPSRQGSELHEIIDKSRKEGDTEAWQFPVTLEPMPPGEGAQEGEPPTVEARYKSFSIKILKDMKEGVKQYGPNSPYMRTLLDSIAHGHRLIPYDWEILAKSSLSPSQFLQFKTWWIDGVQEQVRRNRAANPPVNIDADQLLGIGQNWSTISQQALMQNEAIEQVRAICLRAWEKIQDPGSTCPSFNTVRQGSKEPYPDFVARLQDVAQKSIADEKARKVIVELMAYENANPECQSAIKPLKGKVPAGSDVISEYVKACDGIGGAMHKAMLMAQAITGVVLGGQVRTFGGKCYNCGQIGHLKKNCPVLNKQNITIQATTTGREPPDLCPRCKKGKHWASQCRSKFDKNGQPLSGNEQRGQPQAPQQTGAFPIQPFVPQGFQGQQPPLSQVFQGISQLPQYNNWEPPQKIPTGVYGPLPEGTVGLILGRSSLNLKGVQIHTSVVDSDYKGEIQLVISSSVPWSASPGDRIAQLLLLPYIKGGNSEIKRIGGLGSTDPTGKAAYWASQVSENRPVCKAIIQGKQFEGLVDTGADVSIIALNQWPKNWPKQKAVTGLVGIGTASEVYQSMEILHCLGPDNQESTVQPMITSIPLNLWGRDLLQQWGAEITMPAPLYSPTSQKIMTKRGYIPGKGLGKNEDGIKIPFEAKINQKREGIGYPF

SEQ ID NO: 931931 - protein, 698 aa, Homo sapiens
MNPSEMQRKAPPRRRRHRNRAPLTHKMNKMVTSEEQMKLPSTKKAEPPTWAQLKKLTQLATKYLENTKVTQTPESMLLAALMIVSMVVSLPMPAGAAAANYTNWAYVPFPPLIRAVTWMDNPIEVYVNDSVWVPGPIDDRCPAKPEEEGMMINISIGYRYPICLGRAPGCLMPAVQNWLVEVPIVSPICRFTYHMVSGMSLRPRVNYLQDFSYQRSLKFRPKGKPCPKEIPKESKNTEVLVWEECVANSAVILQNNEFGTIIDWTPQGQFYHNCSGQTQSCPSAQVSPAVDSDLTESLDKHKHKKLQSFYPWEWGEKGISTPRPKIISPVSGPEHPELWRLTVASHHIRIWSGNQTLETRDRKPFYTVDLNSSLTLPLQSCVKPPYMLVVGNIVIKPDSQTITCENCRLLTCIDSTFNWQHRILLVRAREGVWIPVSMDRPWEASPSIHILTEVLKGVLNRSKRFIFTLIAVIMGLIAVTATAAVAGVALHSSVQSVNFVNDGQKNSTRLWNSQSSIDQKLANQINDLRQTVIWMGDRLMSLEHRFQLQCDWNTSDFCITPQIYNESEHHWDMVRRHLQGREDNLTLDISKLKEQIFEASKAHLNLVPGTEAIAGVADGLANLNPVTWVKTIGSTTIINLILILVCLFCLLLVCRCTQQLRRDSDHRERAMMTMAVLSKRKGGNVGKSKRDQIVTVSV

SEQ ID NO: 931932 - protein, 162 aa, Homo sapiens
MHFIAPEDLPVGQDVEVEDIDIDVLDPVKGIQRKGYGNGLWKWLKSMGSVEFGKADQEAVVESMVYFTVEDVSELQRMDVQKWYLRTSKLALALAIIRSKPADKSSREYTEHLAMLLSEEQSKWRSKVEILEAEVMQLRQKLLVSRLCSGSFKSDLDKWSNC

SEQ ID NO: 931933 - protein, 135 aa, Homo sapiens
MNSFNQLTIRKPFNPLSQQKGEASGCQGLQLDLRERSGLTSEKQLDGITSEKNPARDSRTSGGDYLPTPPPFQHSFPLKATFTCNKIPHTYYPSIRSCDLIFPGRWTRAWEPPVRIKKAATLALCPCWVEGSRLA

SEQ ID NO: 931934 - protein, 169 aa, Homo sapiens
MALGNSLACFLSLPARFLTVGLRIYNPLEEKRCYGFWNFQPFCAGFSSSSWIYLPLVFAVGDLSMEFLHGLLFVDVDATAVAKAAEQQRLLLAPSSGSFVPEGHLPDASQSFPGDESFVYKLLTGAAAFLSEMSCAERRNLESQSGYHDFVVWWWALLSQNFQVALFTL

SEQ ID NO: 931935 - protein, 145 aa, Homo sapiens
MTAEVKGHSVGYFNIFSSCFIKKALFVQIAKTCWSDQLTKIKRTFTYYQFLKENNQASVKNKYQRIEVPGNTEGLYLFLNPLLEIAGTVDFKAPGELSIVLALDSPLHNLNLGTSICPGVSYHIRPSNRFLAFQLNRISLRLPEK

SEQ ID NO: 931936 - protein, 143 aa, Homo sapiens
MLRGDVANSGFPLMVVTEEWEASLQGEEKVECTSHTPTSAAAFQDTGFYHTTLKGKKMQVAGHGEDFLTSAGKRAQRRNPRIRKALCTCNKGKEGDPAGIQCMSAKYAVKLSTMQRMVPYNKELYGPKCQQIWSLMTEDSISS

SEQ ID NO: 931937 - protein, 181 aa, Homo sapiens
MPFSSLCSRQQEGEKSFGPSGVPDLGASQAWAVTYCNTVFGGLPSWSLRALGHEQTQAEVPPATEVSGWAASFLWPQSSPEMMTGSQGLESKTLEIYLIFYVTVAKLAFKPQYKVLLALPFPFHRQRNLSLWPPRPAAHGSFCHDTAEVLQSARGECHQACDSPFREVKSPLVQGRSRSTL

SEQ ID NO: 931938 - protein, 143 aa, Homo sapiens
MKLPEERSGRNICCSTIFAILQPLLLIPRQTGSGVDLQQTPTHLQLRLKEEVQTHCKEAKNLGKRLDKWLSRITRVEKSLNDLMELKTTAREQRDKCTSFSSRFDQLEGRVSVNEDQMNEMKGEEKIREKRVKRNEQSLQEIW

SEQ ID NO: 931939 - protein, 243 aa, Homo sapiens
MVTLTYFNGGQAIRHKRSVPFSLCPVVGDSKNVKEERYKSSMRSKKLLSPFYFAENDGFRLHPCPCKGHELILFNGCIEFHAFLLTGPSAAGLLEFAGGPCQTLFARVSLAKAAEQLPVPSSGSFIPEGTHQRPVGALLYEVSQSSSTVLGDLLLSSQPPGSALSQGDESFIYKPLTGAAAFLSEMPYPERRNLEIQSGYSDFAKLQCAPPSSNFLVALFTLCEGKTAYSSLINGGRPSPYQA

SEQ ID NO: 931940 - protein, 184 aa, Homo sapiens
MSLFYRTAVVCWGFTSGLILLVHSHAWKCHSVRLEDSKNGCLLLPLGSLSLRGPNLMPVGKLMYRISDNPCWASHPAGWHGKQDPFNEVLWLSTGGGGVLYWGKLTHLGCPDSSELAGGKSKSAGPWGLWPPLSLEAQAQGNQSSVLELLVGVGVLQGGHAASVLSAAPHQHPPTVNRQGAQMA

SEQ ID NO: 931941 - protein, 136 aa, Homo sapiens
MNDWKRASKRQTPWNHQRTFLEASLQSIPLAEGVSLIIGTPKVPHTRYSPYLRLQRGLLTQRKRRQKQSSCKDKKAGRAPDLLARDDTSSSSCEAAPWGHLETTFYSERSQCPSPLKRPSDLRQSSALIPALIFLK

SEQ ID NO: 931942 - protein, 142 aa, Homo sapiens
MVSAFMLELRGKQQVSNRPRSRRTSAANNRYSLESTGDPIYNSFRNWEKVYRTKRCSHHLGNSKKYRSSVSDTPITSYHSGNDKDVRSSVSGTGGQRPNIRTKDSPSTPIYKGFRNCISENKDKDQIYISQCQGSITRVFIA

SEQ ID NO: 931943 - protein, 182 aa, Homo sapiens
MRESGRHCRELEEQFCFLALPQSDVAQIYQNGISTRASTLKILGNPLLGIYMFRHVDIALNYSHSQSITVESILIFKVLFGKVKKIQPSVDKNKVSLDPSPNFDCHMSRNAPSLKDTIELQAYSSAVYFYEYSVLSKPVDKPRQCLPYAVVTVKFLGSKVDNGRLMTSLRFLSTGFPKRAGY

SEQ ID NO: 931944 - protein, 150 aa, Homo sapiens
MISESLLLDLQNENSTYLPEALHTFTSAGFCGHSGRAACTATALVELPLTPGVPNLAAFRILQGALEQGWPFTCPKLKQEERGAAVKIGRQCAQHLEDRAPDLKRDWRWSTTASTAHERFTLNEGNSTVLENGEGTLKFDNSPLRKLITR

SEQ ID NO: 931945 - protein, 140 aa, Homo sapiens
MLMVVVVVVMVAVLVVVVVMTVDSAGGGGVGGGGNGDGGRGVVVGGGGVGCGGVGGGGVLVVVMMMVMMVVVVMVVMTVDSASGGDDGIDDGDVMVVVVMTVDSSPASGEAFVASSLAEGPPRTPANVTQGALTAVLKSL

SEQ ID NO: 931946 - protein, 135 aa, Homo sapiens
MLGLRARDRLDPTAVNILQQIIELGAETHDATALASVVAMAPGTVTVVKQGGGPGTQECCGEHQGPVYLGLGWGQVLSREALVMTCLVVTWAKDSKSRKYLSLVSPFRPSAHLESKQFIALWHVLGHNVLWPWAS

SEQ ID NO: 931947 - protein, 263 aa, Homo sapiens
MSFLKLGPVVDHDIPGLAPGQQLCSLVPPSQAPAVLEASRCSQSAGNNTLTGDAGKSTLAGSAGKRDMAVVTGKLRLHCKQMWPRRDPGRGWKTGGAQVRLSLSQGQDSPVLPRSDSQQRLEPPRRIWQAWGMGAHGRTLYSSHSHAKPLGLWAGWSSVSANSLGSSSCQLRCLWGSWGLLWLGYQRSITRVGHSTPVSLTFSVGVAQGQERVLALRNLVRGSQLPLPTLQPTVHVLPLSTLNAIPLKICAECASLLGSLVSF

SEQ ID NO: 931948 - protein, 165 aa, Homo sapiens
MYQKGSSIFELSSQILCLVWAYPVNEERIYPTARCLHLATVHFQAAWKRASHNIEQRQPRYCRVIRTAPASVFLWSLLPLQGICRMGLHNSVVHSVNSDLLTTYFVLGTVPGEPLWLLCENRAREEIGDLLGDNWSSLGEILQCQHLSDMGRKRSDTQNTEMAQK

SEQ ID NO: 931949 - protein, 141 aa, Homo sapiens
MWPGTGEFIPVPVLLPNTVTVGHIHACLTYQGTVSMCSCCRTLRPRDSSCGTGSSLSLPVTCGHSVDGRPGMTARLVSELGSLVVTGNSPTALERPTDTWVFSQRHNEPCRKVESSDALSNNHRTEDPEGSLGAACCTVVV

SEQ ID NO: 931950 - protein, 149 aa, Homo sapiens
MTSLPRRNVFTEKRTSRDTVALKTRTGPWGRNEAQRTNRKQDGDCQGLGKAEMGIAVQWLKAIAGSAGKWSPEQGGHTGGGWPQHHPSCLQLPWHKKQSLRQGLSLDASLGRSSPRVVRVKEEGNESKKEGKQCKLLHATVLARPHNEL

SEQ ID NO: 931951 - protein, 177 aa, Homo sapiens
MTCLGNVEYNKGVCVDNLPSLVLIFRSQRSFLTKHKGWLPAGHIPKATSIQDREGLAVLEWDWVLIALCFLSLLASNPWARKRGQPLWILIRSFTNQVAKFAEHFDLKFASPTSLRDLIAAGARIVMIRLVMGTEERPFALPGQSGLGTGPEGTHLAADPQVPCEKSRQARGQSQRV

SEQ ID NO: 931952 - protein, 166 aa, Homo sapiens [sequence omitted]

SEQ ID NO: 931953 - protein, 133 aa, Homo sapiens
MLNRSGERASLSCVSFQSWSCRISHTVRDDVMNDKGVCTTCLYSLLMPSGPGLLFIMDGHNFKYTTVIYNQTHPDGRLPQSQIYTQDADFYRKMQPSQKKKQLREQTVPTTVKPWFPLLLRMEHHMKEAALVW

SEQ ID NO: 931954 - protein, 131 aa, Homo sapiens
MLLTSQTGWRPGRGCNLSTLGGQGRLILEPALAYWKPFGEKDTTNSHYQPGRADIDRLQMYNEPNQHHLEQKNCLVSPALSSSHRGFCPRRAKHYPSALSPGRAMPIPPSSPYGERVQQFQRQLVKNKSCE

SEQ ID NO: 931955 - protein, 163 aa, Homo sapiens
MFHCIFSVDKVIKENDELGDSVSQLQQQLLSLKSAMIALRESLISCREEAEIVGKQTQALIMRVADLQQKMQEQPHQVSTVKAENPKKKEVKLFKKVGAKFHMARLVRTRWPGPCAGRADAGQQAASESEIKWHENRCEKKVESSLNRPTGARSLREQLWLLN

SEQ ID NO: 931956 - protein, 157 aa, Homo sapiens
MEQSWTENDFEELREEGFRRLVITNFSKLKEDVRTHRKEAKNLGKRLDEWLTRINSVEKSLNDLLELKTMAQELCDACTSFSSRFNQVEERVSVIEDQMNEMKQEEKFRGKKRYYPGELPQSSKAGQHSNSGNTENATKILLEKSNSKTHNCQIHQS

SEQ ID NO: 931957 - protein, 176 aa, Homo sapiens
MGTQSLIFTRELGGRILDHTGTTRELGGRILDHTGTTRELGGRILDHTGTTRELGGRILDHTGTTRELGGRILDHTGTTRELGGRILDHTGTTRELGGRILDHTGTTRELGGRILDHTGTTRELGGRILDHTGTTRELGGRILDHTGTTRELGGRILDHTGTRKKEREELHRKTRI

SEQ ID NO: 931958 - protein, 556 aa, Homo sapiens
MEWSAGAAANIHTQVTSCPRCSHSPHRHLRRPDLFQAWLHNSGKKAQKLLSQFLELAREVRHYGYLQLDPCTCDYPESGSGAVLSVGNNEISCCITLPDSQTQDIVFQMSRVKCWQVTFLGTLLDTDGPQRTLNQNLELRFQYSEDSCWQWFVIYTKQNWNHYPRTPVLSVWSLDQQHLYHVDLIRNSNSQAPNLLDQQLWGKAAAISLTRPPDKSDACSSLRATVLGQQITLSTTVISSVVLSDECPFGPYGGKHVQALIEELTAEKHATGSGSAQKSSPIKWKLFLGDHATWGMQEGDIHEQGASLPPGLTQTAQNANKNCPVCQQERQKLPVAMGQIAWWEGPDQSWQVKLMLLLPHEDTGRRRYLGSREKTSPDTESADALILDFSASRAGDYSGLSKCAQYNHKGPYKETGESQRKCKDRSRSQRGVKMLYTASFEDGKRSHEPGTHSFDAFPNSEQAFPESLTQSSPSHREDRPPAGGAPGAAARDRSGPAGTPTTPVWPLPSARHRLLEAAAVAAARSSRRYLARGLWAAPGLEPLDISCTVPVALEVQ

SEQ ID NO: 931959 - protein, 140 aa, Homo sapiens
MTVPPPASSRASHLAKSSRKWFVCEFQNFVATAHSKKYILHCKPKPDPGQSPNSLQFYEVERGKETAEEKLEASKGWFMGYKERSHLHNVKVQGEVASADRETAASYPENLAKIIDEGGYTKQQIFQCRQHGLLLEEDAI

SEQ ID NO: 931960 - protein, 228 aa, Homo sapiens
MERRKECGFDQQILLSVTCLPRAPSAWSSGSGCLCSLPAWVLWLQPAGYFQGPTQAWSTGLNPGVWLQLGILEAEQDLTSLPSCGRRGLGCIEDSAAVAEGGIAIGGIVGINTALQEVLTTLIHNGLAYVLKPHTIKMQRNNAQLSRRKEPKEGLCGERGQDRMSRAKGSSSKGKELPPGCRRVTMKPLLVRETQEGQAAERGAEEQLQTLGPFAVYRVGMFNSWATE

SEQ ID NO: 931961 - protein, 154 aa, Homo sapiens
MLNVQTKTFVLETVHQAAPATATIQRDPGTTRASALAPEGVSSKAWQLPHDVKPVDPQNARVNKAWKVTPRFQKMYEKAWVPRQKPAVGAEPSQITSTRAVQRGNVELEALHRVPTGALPSGAVGRRPLSSRSQNGRSTSSLHSAPGKATGYQL

SEQ ID NO: 931962 - protein, 177 aa, Homo sapiens
MAPAPERQIFTSRPLKQCFSTFYPSGHTEKILLLRTVTNWQDLKPQGKLQKLNVTSSGLQPPRVNVLGSAVDLHLFPGATEFAAPYYHSVTAGVSELVYGSKGRLQWVVRVKGFVKPEYLMVVFLDLDGAKDNNGTEIGGWNFGTSHYPQGMKEWNKEIRCQRLAHDDEDEDEVADD

SEQ ID NO: 931963 - protein, 210 aa, Homo sapiens
MLTQCLYSHCILEALMIYIGFSFKGKNTSSKRYNNDPWTWKLRLPPSHFVLLMAMNPQANSYCTGWGDWAHSGEVNGKLQQHNSGRTTNVSDPLGMKAWVTLPGKELQPAQVLAKGKRNMEWAVEECSHKYYDQVITYHRFCFASRLVGFDEQAAMLKKPIWQGTEGSLKPTANKEQALSPTALKELNLSNNKKVNLEENPPQLSFQVRP

SEQ ID NO: 931964 - protein, 134 aa, Homo sapiens
MTISMPGQRTSSENQKSILASEVSWESNRKTFKEYVPWTFGAVPSVSLSSQLSKTKIHKEKALMARFLFQGASVKENYCEAFKTPEDLTDAYLISSNGLRDLQCQCPLFLNNYTFQPQLLFLWAFRLLDWSTRI

SEQ ID NO: 931965 - protein, 143 aa, Homo sapiens
MKKWNMTSTSQAFLMPPPGHYLYPKGVGILTSNTIVVTSEIMMKGTSAQPSQDLLLLLSQQALVSVLRASASCVLVEQGVGLAYIASRSLNREKTLTKIWNFTQKRNGVSGTMVNSTSLDVQREAGNIASRRDIVEGVQAPNE

SEQ ID NO: 931966 - protein, 141 aa, Homo sapiens
MHKNIFFPMRNTAIRVGGGVRCEVIGSCGRISHEKFITIRLGAILSISLQNGAYIQEGFSTLVGESLNIPWPKVFSTVTQSCSDSDVFLFGVWEGLWLSQGQSFFALFLGHSEKLHLKTDLFTSSARFFFCYPLDSWANFS

SEQ ID NO: 931967 - protein, 273 aa, Homo sapiens
MHLHALGGAIVCEKGLMKEELRGVLLGSPGSAHLFLSPFMAVHWASHLAAFGSPEHFPPSRLSPPSFRVDVVHGLSPSVEYDSGYGHHQSAQCCLLFNSAGARIQTLGNVNVPIWLTIMEWDQQMEIGGFIFFILVLRLHQPGFQHTLNPERTLCEDEDRDWSDASASWGILKSASSHQQPGEGQGANSPSQPSEGTNPADTFVLDFQQYDSVVATLSLGPADNCTHYFLVLRKDKLPSKASGMTDAFLGQHSCHTPPQAQTLDHVLPPSIIT

SEQ ID NO: 931968 - protein, 146 aa, Homo sapiens
MKEAQLLCWRDNMERLSWEKKKGSAEHCLPAVPTKAPAKRKFFKTEFPDIQRFYPQNGQAPEPREKVGRKELLQCKIQEATVNLGQAGLKFNAKSFPAWRREAMPTCSDKVQTSPSGEATWGGTDDLSQQPASTTRHVNGQTFRRF

SEQ ID NO: 931969 - protein, 134 aa, Homo sapiens
MGGGGPPAAGLLEFSGGPLQTLFAWVSAAVTAEQRILVNRKCCCLIVPLEVLSQRSTRPFSVTWHSAGLSMVLLCLVMDQEQVFSLIAPDKVVEATMRCFSPSTYMHRKATRHEDGNRFFKCFLLNWHFSRWTQ

SEQ ID NO: 931970 - protein, 171 aa, Homo sapiens
MLRLSGLTQGGEQRRNLCCVQKPQGFSKVYADLCLSQAIRPFVNEFTMTLPEIWKLSKDRSSNLTEVEPGFNPSFLYFGVHAVNHHAQLSPDPPFCHLDLHNGKSESRAAGEGCERSQQPGDAAEEVGNPPAAAALLHSHAYMATNMNNQLYAERLSTRGYENEGTGTPPF

SEQ ID NO: 931971 - protein, 142 aa, Homo sapiens
MAIVKGQKERPWDVLKVLSQRQNSQLTSEVKASSSPDSSRQSEMVIDPVFKGLWGQDFHSLPWRAYFIAIAAQKYFLVSAEPSLPASEASWRTCEGGKPKNMAPASGEDFVLCYPMTEEQTISWTERGNSSFYQKPTPKIWH

SEQ ID NO: 931972 - protein, 137 aa, Homo sapiens
MEPPLGPGIVNCKDYINLELLVIAFAFTRSGGKNLPKNGAEKWQDNSLIVSCEPLGLSFEGLLQSAGGPLQTLFAWVSPVEASYQRGTGLMPAGALLYDVSVNPCWEFSPSQYIPKEMKVCIIDFCKAVHSRFLDDG

SEQ ID NO: 931973 - protein, 146 aa, Homo sapiens
MSSVNGAVTRSVFTVWGIPIPRHTASAVPFLLIRFPRSSSSNHPLDSGTLPEPCYPSCLEDPGIPVRPDPQQGYEVGEARLVPAHEGIWEWTEEGKRAKALGTSWNRERERGEIQKQTEECVLRSRELLAVSNAARSALMLRLEIV

SEQ ID NO: 931974 - protein, 155 aa, Homo sapiens
MSMCHCEWSGEEVWAKSVSHRTATLDLLPIPPPLCFGNFRLLAFMNSSAVQPFQHRTPHGETQATPQLMGPSPREHLLGTVSPELADGGNKDSSDGRSRQVAKERTRMVADGVQGELNDENTWTHEVQGEHTHWGLQECGEADAGTMLLVQPAEP

SEQ ID NO: 931975 - protein, 127 aa, Homo sapiens
MLPFNVPSFAFIKGGHRKMPIQRMSPYLLHNHCKEISSYIVNLNDREMLSKIKYLFGYRSLQWEYACHNCCKTESVTYEGLFWLVAVKPPQGQVMREGHGHGVGVEVVTRTSHRLGTAFTVATVQVY

SEQ ID NO: 931976 - protein, 176 aa, Homo sapiens
MDSDKDEEGFGWLIIQQEWKTEYREDEHAELYWKTWPDYGRDNQTLGNLIIPGCWARAWDPLSVGTRKGRYTGLLPSLAEGSCPKQQGKGPTELLTHHCPQTAKLKEHCNTLWDLGVMGTLTQVPLQGGHRNPHLGTTRSPPWSLLLPAPGAADRISHSLTHVDFEMGPQFVCDEL

SEQ ID NO: 931977 - protein, 131 aa, Homo sapiens
MVIPVTSPFNSSIWHLQKTDGSWRMTVDYCKLNQVVTPIAAAIPDAHQKQFAFSGQDQQYTFTVLPQGCINSPALCHNLIQRDLDNFSLPQDITLIIYIDDIRLIGSSEQEVANTLDLLAALGLLLDFGEN

SEQ ID NO: 931978 - protein, 153 aa, Homo sapiens
MGYVTNQMVKEANFLKTLKSLLSAYYYLDDLQAPKIDIIKMNLIVSLQTLYSQSPYLSELCSYLYRPDVSAFCLFPLNQAPQLSFSNVHLSISTSTSDACVRVYSCNKDYVSRNMCVPLCFFVKTLFDTMKYIILQHRFAQIPKRINFRPLKT

SEQ ID NO: 931979 - protein, 135 aa, Homo sapiens
MDKMQIRVIFLFEFKMGCKAAETTHNITNAFGPGTANEHTVQSWFKKFCKGDESLKDEEHRDQPSEVDNDQLQEKLSRNSTSTIIQSFAFEEIGKVKKLHKWVPHELSENLKIVVLKCHLFLFYATKTNHFLNRL

SEQ ID NO: 931980 - protein, 143 aa, Homo sapiens
MCQAFRVVGALAWVLPHSPGNDMPALAASPSQSLLLCQQSGWLDLALAYSYAASCKEPRTIKLQMVMKLKPQRMACLHWGLLDRPLRRSVGCFPKTAPPASRKQLRSIFVPILTAARDIPLQKGELIVAGGRQIPRQIGMPPR

SEQ ID NO: 931981 - protein, 212 aa, Homo sapiens
MAARRPGLSSDCPGQTLRCSAGRWPAGLLVPAGTLLSTSSCLCICLLGDMPSQRYLLIKTGFPNPNAIKAEFLDRYLLPPGEDGGGKLACQLSERNLKQENRHSGVLLQGQKPLPGRLAPHANSRFSLSCGTGTKFTGWCPSADHAWSSMTEDKEPLGISKQGNNFIKFCPRKVTLAARWRKVFGQRLSQGDNSRHQKHQCRQEMRGSDPGP

SEQ ID NO: 931982 - protein, 141 aa, Homo sapiens
MGIPGADFNTDTTPATNVFRFHFQELKMSSDCAMRHWVFCESCVLAAPSDTIPVGEGELPHFTKWGWMPRASTRPLLTVGGMGSLLPQTTVPGRGEFQSPLVIGAYPVSAGRLSNINLLAGTASSTPSSSSSGTGLKHLFP

SEQ ID NO: 931983 - protein, 159 aa, Homo sapiens
MFLLWVLAEFCLVLAALHPKAKSSYKAGLVVANFLKIHLSEADLISPSLIKLSFTGYKILAWNFFLKTMLKNILTCFWPLFHRAVEVSWGSSSDPSHLGFSSTWRADLGLLDSLHVFAARASCRASVAAAPLGAVTGLSLLLELLLLAVAMVLGNYISY

SEQ ID NO: 931984 - protein, 129 aa, Homo sapiens
MAACLSPWEIKTLFAREYKRGWLEALVGRSCPLRQNGSGSQLKKQSIHVLVEQLCCAVLGDPFVPPVLGKSVLTLLSPQAGTAESCKQQRWQPAPLPGNYIPSQVPGLHQCHTSHCGLRFQAYLNGPRL

SEQ ID NO: 931985 - protein, 138 aa, Homo sapiens
MAEGDSGIPPAPLTAELALEFTIPLRRGTVEKYFSKEKLDREGAPGSHPRELEFMERLPSTRELEHTPEPMLGTEHTQRASKKDSPQTPDTETQSRTLRLVQPCWEGLSLNTLPNVTCSGHTGPHRAEPTGGNSSIFL

SEQ ID NO: 931986 - protein, 149 aa, Homo sapiens
MWVGPDKRIKAGCPSQQWQLSWVCSFTPEASETTNHLGGTINSRHATLRAVTLTAKICSFTLEPVRPRTHQKKETANTSEHQKEQTLDTPPLRTVTLTVGKSADTAKGEQVAKALSAPLGWVLLGLECSSSPATPKIYHQAGMYPPGPS

SEQ ID NO: 931987 - protein, 249 aa, Homo sapiens
MAETSVLTCLDINAKVILCSQAALKPAMPPVIKSQPFNIFWAAPTMYCMPSFNVDINLQVFNIISNPLETQSGSKIAIFYPNELGYYPYLSQDGKSFNGGIPQNVSLSEHLRKTADDIGEGVPWWRSEELVVIDWESWKPQWDRNQGSRIIYKNHSLAFTRNHHPYWSEMKVETVAREEFENAGKNFMNITLTLALEMRPKCLWGFYLYPDCYNYDYRINPETYTGGLSACNWRKCSIGGSRSNIVGRI

SEQ ID NO: 931988 - protein, 158 aa, Homo sapiens
MSFSTSSHLCLILLTYSSQISSKDHLNFGKHVFFLPLHGHCQFYTLFHQWLPKTPGLLYPTERKPQFFTGHRPPRMKTAFSILLYTGCGHINVKRLATFKISDIYLIEEENIKCLRLTFYTLSNKLAHSDTCADRMITKVENSAGSLSSPLQNFYMEL

SEQ ID NO: 931989 - protein, 148 aa, Homo sapiens
MGANLLHQRYLDMSSGDIGMQDHAPETICFPKLLHSIQSSNNKHSFAIETGSEQNRKNKACWLKHWRLAVTTPWLLPMFTEGSGALQSAGGKACQTCVFPFRAAQGLLSQLVVNAAWFGTHPSGQRAPLWPRKGPEMLFKYQKLHELN

SEQ ID NO: 931990 - protein, 143 aa, Homo sapiens [sequence omitted]

SEQ ID NO: 931991 - protein, 134 aa, Homo sapiens
MQNCESIQPLSFINYPVSARLFITALCDLGMENCPPDSPCPGSENTRESTRSGSQCQNDGQGGMMGVELPSRSYGLEFGALGICLLLHFTVAELVPKEMMINDCNIIKRDNIGHDVPFDDKKQPHLRSIPDKKK

SEQ ID NO: 931992 - protein, 174 aa, Homo sapiens
MIRFYFFQGHHPGTEEARLLPAAKGANFPKLHPVFPANRKMHIVLISSILLFPDEEVLLFPLNFIAWRPYNSQFIMGSSETLGPMIKNSSLFGPTVNNGDRCGMYTSAYNLQIDESGLGKVSAILGKSIMFWLMEMKKELNFDLSFKEIKTWHLEEKQIRTFVSSDKSPETARG

SEQ ID NO: 931993 - protein, 139 aa, Homo sapiens
MQQRRAERPGGESKEALHSKAALWNRPWPGCTYFGFAQTANFSFLLLGPRDRAPGQSKRRGATSPRGASTSLLLSPAQTKGTGRALLGQRGVGGSLSHDRWVAVKTLIADFWAGSDSFSYLPLPSSEKSPSCCTPPPPG

SEQ ID NO: 931994 - protein, 239 aa, Homo sapiens
MHSMIPLPKGSELKGKKRTSLSKEEEEEGEGEGEEEGEGEGEGEEEEEEEEEEEEEEEEEEEEGEEEEGGEEEGEGQGEEEEGEGEGQGGEEEEEEEEEEEEEEEEEENAVQDAKGGSGNQCTVNLLHTNTREERRKKKQKQQQQQQQQQQQQQQQKKKKKKKKKKKKKKKKKKKKKKKRREEEAEEEEKKRRRRSRRRRKEEKKKKRRRRRRRRRRRRRRRRRRRRRRRRNAAQDAMG

SEQ ID NO: 931995 - protein, 133 aa, Homo sapiens
MAQVAEQLSQQPGPVEEPSPLLDPTKNWQPSRSLNKWARVTHQNEECVASKIQIGPLAEGKLLLVGLMDRNGKKGICQINGCIPDLECREEQSQSPSKMQVLPSQIYFTKHSSRLHLLDPPSWDDEERNKVFS

SEQ ID NO: 931996 - protein, 134 aa, Homo sapiens
MAPAFARMPLPNKGVGLSGIIRKACEKSKVPQSQLSGWEKYLVTACPRTPRIVTDLEDSSPGQESFFPVFFSSSSTQVSKCLRHQSPCSDSVSHHLGGTIYLLSRREFFLGLEGYGLSVVSVFWATPLFTLTTT

SEQ ID NO: 931997 - protein, 145 aa, Homo sapiens
MPDNKSNFVDVVKMKRKRNSLREDDVMFKDYKEKATDTTLLLSKSFYLSMTRFPASSTNEKRENPPKALERSGSGVNPDEDRATAKGTKERVAGSFPISGKRRECRSKKHLVSSKQQAGVDSGSSLRLREGSRSKTWGKGNWKRS

SEQ ID NO: 931998 - protein, 145 aa, Homo sapiens
MSQLVVTLRELTSPLTQGRSRNAIQQPRPGIQMFYPPVAELVPKVQVTGLEQGPHNCDWYPILLWLSWYTICQTKSSALFPPLSSTEGRDLFWSHKLCSLIPIDTSADGSAGHVPSQSTVSGSNSTLGITQELQFLYPRLFLKFT

SEQ ID NO: 931999 - protein, 148 aa, Homo sapiens
MTFLEDCPHANGAACWRAQTANHLLQITCRQKREENCGCSTQDCMLMKILASLSGIIRIILGGTWYRNRIIFKKALAWKCQKMDEGLEKRMNGEEDKKHWIRREKLTILQGWGHDCMEEAKLFSNTTVVTKHFHFLPGAGNEIPLLST

SEQ ID NO: 932000 - protein, 123 aa, Homo sapiens
MTSWSQELSPFIKNAPVWSSHYGQGTVLGVRGVQRMRGMEKARIAMRPTLMVERRPMSIEYVSDTRRGTWHTFLINPHCILLFMSISQARKLKLRKLKQVFHSQTTMIGGGQIITEHMTCIVC

SEQ ID NO: 932001 - protein, 147 aa, Homo sapiens
MGSCLMATNDKIECLVVKRTVKSNQVGKAHSTVLQVSTGYTEVPDMQNPRRRSLGRGGPRGCQEESTLSGGRPLCRSSQRGKLAVGNSPFRGRPQCPLKVYLAAAPESLPGPDGSSTPSGKARDKPLHAELCRELEADTIHSANLQW

SEQ ID NO: 932002 - protein, 145 aa, Homo sapiens
MMSQQHRRFVTVKNVAEHGIQRPACCVCPLLLLAVPWLTWDLRNSLASLSAFHTHPSTPSLDQPHSHSVSKRNNEKPCKLMPPKAMVFNLIGASAPPGNPLGCPHFSWQLFSMFIICLKSSPTNPADNLAPTALTPTKASSCALL

SEQ ID NO: 932003 - protein, 193 aa, Homo sapiens
MQSFQISRRNAESLINPTEEGTCFSFAYPHDCKFPEASSAMWNCVETSYSLDFKSSLVKSVKMQTETNSKYGPAAAPASFTPTPLQQSFAVNGTIIELSWTPLSLTPVPCKLPQSSSETSVQPCDSGSSLVKEVAVLERSISKLRTGLSGKRLIYKKWGSDPLRPAGVVSYHPSEHSNCFGALSTGILRDTSN

SEQ ID NO: 932004 - protein, 143 aa, Homo sapiens
MQFYSSRHPRLLQGRSTCAEPQGHLTEPTPGRQEMSCSTHSGPRFQSLALFHREHLGYMSLGNCAPAGHPSGWTFLDFGISAYTKGAILGMGPKSKYEIHFFSYTPYAHSLKNPPLVLKLLLVLGDIPGYVSNCVDSTCLFNI

SEQ ID NO: 932005 - protein, 162 aa, Homo sapiens
MISFSHIPHKYHRYQKVENHLFPLYSKSLFHAFESQMLEAKCCPRAAQQKPCWHAYPVLWPLPLPHTSWSYGLELSGKEDESKLKSKSTTKNMMTVESGVDPMSAPWSSPQISACVMLTQAKELPEASRKAWSRSFPGAFRGSMALPTSGSQAFSPQNCEAI

SEQ ID NO: 932006 - protein, 136 aa, Homo sapiens
MLLWHYSQSATFWAPGAQNSQSKQPYLQVHPIVPPVEHPRTKGRPKNSHFQGCGHSLVLQAEEPHTGMRGPLARCSGVEPLPSPGMGKAALEEAGVAGFFSLSMPNAPTPPQHAKPLGLVHGAGVGERAPGKFFID

SEQ ID NO: 932007 - protein, 216 aa, Homo sapiens
MVVVMVVVMVTMVAMMVIVVVEGMVVMVVMVVVVMVVVMMVVVVVMVVVVVMVVVMVMIVVKVVVVVVMVVVMVMIVVKVVVVVMVIMVVMVVGVVVVVMVVVIMVVMVVVAVVVVMVVVIVVVVVKVVVVMAMVMVVVVVMVVVVVVMVVVIVVVMVAMVVVVVTVVVKVVLVVTMMVMVMVVVVFVIVVVVKVMVVVLARSQAAVRTYLRLANL

SEQ ID NO: 932008 - protein, 154 aa, Homo sapiens
MGRYSFSKVFYWRLLVAEHGKLRLHLSSHGDRTVFVSAAKAIISKSAIWTQAYLLKSTFLILGLTWVLHPPTWIPKLPQGTLIWWLTVKLLFTGSSCRAIRQKKDIECIQLGKKEVILPLWRHHFLSIEKPRSHKICLELMNTFSKVIAYKINT

SEQ ID NO: 932009 - protein, 139 aa, Homo sapiens [sequence omitted]

SEQ ID NO: 932010 - protein, 191 aa, Homo sapiens
MDRAACGDSHREFLLQELLQKHTTKTKRIHRPFEGKRWIAPAGSVGQLENCESACFLIWEAYSLGQVLSAAHRLPRNTLSVLRGTVGVRQAFWPVGCMGGPSTPPDPPYTTTADALLKAPPLGWRPANTKLVHLTKIQPRTLRKSHFTPLLLPLGQVLVSMAERPEDESHHKTVCKHSPVQVQSSVSLLGG

SEQ ID NO: 932011 - protein, 191 aa, Homo sapiens
MGRNLGQYLAFLGRGPCGLPQAFVTFPTTNLHVMKFYYLPLVLCVCLYLASDEVRLQTMPKSYNESRECQVLNRFCIHTGTVSLGELYISTPLTSGLAIELLWQMCCEQRREVQDNQPAQNIRRNHLQEGAEYDHLIEKTQSSMDKNLAIKVNTLVEVYCELVKENKRPRSHRYSSLSQFTRPSYTDSTRS

SEQ ID NO: 932012 - protein, 243 aa, Homo sapiens
MRAEKKAEFISTIDNCKTELKKAGCPNKCSAQQSGDTGVSLAESRVFIGLRKQEVCSNWTMGSHGQAQKKHHKFPLQSAGLAAYRTGNWQPRPQASGPPWLEGGVLLGTNPLPSRTLSAIHGTQAAIHGAQAVHAKWHMQASAELPSAPPQAPSHAHRCPKSGGGQGGRGPPRVPGSEDAAWAAAAMRGRAGLLPAPGPQEHGEAWVCSHDLVAAAVPREHKAATLLIQKGAGLPPVPGSRWL

SEQ ID NO: 932013 - protein, 153 aa, Homo sapiens
MLTQVNICEFSKIYQLSSSFGCSWPGEDHFLTPSPLQLPIPLTATSHHSIKYSTFTTLSIRSHDLILPGCRTRTGARSGHTDPPLSCVTLKPSMDGKAKRSYCNTSPLGLQGSQATPRHHCGPTRSSVHAGCPEALILDPAPTPLHTLHAMRV

SEQ ID NO: 932014 - protein, 168 aa, Homo sapiens
MGHGLGGILGRGHSLAQWTKAGVPAWSDTFETWVNNQRGVPAVIKHQGKAAFPVRDRRWSFGATDKTNEDPKKQEKLYLMLSFDEMWTVMSTYDEQKEKYSKGYRKWNNGLKKVMLFTENILKVYKIITGCTLMEMKYMGKNDMGERKGKCWIDPPDLEGMRKWDLGQ

SEQ ID NO: 932015 - protein, 167 aa, Homo sapiens
MEDKGKTGTSLGKSRSKNFYQIIYSITTIIIIITTIIIFLICKPLNLELLSPLSIRGDRAPENYICWWNGQNPNVSLTPVLAGLRNKKKAYKERNFTAGPPGVSSHIGRTVMVTSSRKTSKFLLGILKEEGVYEQGGPEYCKSDVLHTTDPLESKWMSITKISASKS

SEQ ID NO: 932016 - protein, 151 aa, Homo sapiens
MPTGLVPGLLSQLRGLGFNNTLLAKSKNSNPYEPGSKKVEHHASLYLEPGQFPNDGTERRNQEEPNGIFQAKPLVHLNNDSKLVNSNNATNTIKGTSHIGLVSSVIIRAKNLFPNNSKHSQITGMMTSELTVRNNFLITIITGFYHLVQKA

SEQ ID NO: 932017 - protein, 164 aa, Homo sapiens
MSQFTQNIDLPLHSAFDIIIFMKYFLFLQEIICGGSLWPRMRVPQKIFRYLWLLNLLCDLIWACKCSEAQFIFLTSLGFYQSSTLLTAKAIIFTLAWLRKNLFSLLSEAQAKIEVPQRNIKMSWFRAPCKLPDNNAKDQPCEKIILDIVGKLNIHMTSVTAGTT

SEQ ID NO: 932018 - protein, 140 aa, Homo sapiens
MLLIYYYYCLWRKCLEQDAKIKMIPSERPVTICYKRPRVKPQTFTVSVTALKGGVYGVVCSSRWVHGLTDFRTEATDLRMWKGTQAVCHCWLGWPAFIPLFGPTHILLIGLFYRDLICPFYRELIGPFYNPLARHRVLIE

SEQ ID NO: 932019 - protein, 138 aa, Homo sapiens
MRFKHSRVGYFSPGRWQAAGNTAKNHNEVHHDEEGDVAGEAAAADHDEDDDDDEDDDYDNVRIHLILKIQMTLKMTYSGKEESVAGLQAAEHPEETEDSQNKKGTRILGHNSKNTIRYLRSSFWSQICHSEVCNLTIC

SEQ ID NO: 932020 - protein, 153 aa, Homo sapiens
MGNGELGSEAGTFRGQPLCPSCLEHECDKKGTLLHCWWKCKLVHPLCKTVGRSLKELKVELPFPKVELLAIPLLGIYPKEKKSLYEEDKCTCMFMAAQFTIAKIWTQSECPSIKEWIKKMGYIYTIEYYSAVKQNGNSGFCSNLDGVGGHYFK

SEQ ID NO: 932021 - protein, 141 aa, Homo sapiens
MDSVRKMSQGYRANAETFIQENLLKLSINNETVALEAMIHCHHIPSPKPKQLSRSSTLDGYGPEDELPLLLSSRTSVTISHLKQQPTSISYPLRLKCEVTKFWKAENTKTLNSFTPLAERQRFHAVRSKPRRPEATAPPST

SEQ ID NO: 932022 - protein, 146 aa, Homo sapiens
MTIGDVSLVQELLDSGISVDSNFQYGWTPLMYAASVANAELVRVLLDRGANASFEKDKQSILITACSAHGSEEQILKCVELLLSRNADPNVACRNKSSWDTKSWDPMESSSGKEEEDWDESIEVPILSACTLATTKDLYKNKELAI

SEQ ID NO: 932023 - protein, 136 aa, Homo sapiens
MIIIEGVGHLTTDLQEGEASLTAGAGSFLETEEERDHCLGREITSCPDPSLGLIADLRQMKGNTRPVCKRRGVQETTSFDRTRIQYAAKLHKQALKAAVKHKPSGKKKRCSIKLEVFKKSNGSPKSRCWHIWFLAL

SEQ ID NO: 932024 - protein, 136 aa, Homo sapiens
MKFHVWTDINALEVQHMLWTQAPQMHHRTYIIQWSRKCFFNINYLRICKTMASNGQLNPSHDAIPLVLALLLPSSLFKGPCSYIGPTAGVPLPSHADTVANSFMVDSSKCKEYRRSWNTLGNGEYSQIYNSKSIVP

SEQ ID NO: 932025 - protein, 144 aa, Homo sapiens
MILSVLEKVDSLICVPLSDLLIFRYLKDPYEHAQRQEFDFLFIYWVFAGGEIFTFFGPELESGLIIMMKKKKKEEEGEGEGEGEERGGGRGGGGGEDEVTEEPGSYWSSPNCSGPIAAEFWFGFLGWLLPNSVVIYVNSGNQIE

SEQ ID NO: 932026 - protein, 202 aa, Homo sapiens
MQPPKLWLQTWASLSSRGPEAGNGPTLLGTAAAAQAAAADLGISALSGTQEGSPLSPVPFSIKSLGTTNSGKRQTGSWAERGRSPVKPHLQAGEGLKPGNQAASPMDQSGYLQCFFWACPWPPMDPSACTFSPLRPIKNPGLSHTRRDDGTTSCRRELPSLLRAQEMMGQPACREELPSLLKAEHSSGHHGYVEELPTVGFL

SEQ ID NO: 932027 - protein, 146 aa, Homo sapiens
MENVYLQVLFLLDLDVWLALANGILEDLTQQIRNVPKLLGSGIAVIVTMMDISKTIAVSDFLVSAVSVATNPVEEEGEGEGEREGGGGGEGEGEEEEEEEEEEEEEEEEEEEEEEEEEEEEEEEGRRKEERRKKEEGRKKRRRRRR

SEQ ID NO: 932028 - protein, 178 aa, Homo sapiens
MSKPLSEYKFSITAQGLGNQRTSKPSRKAPPYEASIKTQKEKEQRPFTQIKQEKWDLEMEKGNQKQKGRYESALLTLHRCLTNSCSCSWRTGKLSRVNLSPQQCKALDLVKLICQSQRLSLLSGERWKAKVPSDEAHEGDPALEPGRTEKGSKWIFGVFSWKTESDLHTHQAIPEEVS

SEQ ID NO: 932029 - protein, 140 aa, Homo sapiens
MVLQEALEPAMCLDRYPHVQLEASELLLEDGGSALATELNTAKLALAYAGMEMNDLVVSCGLGLAPGSVPTWLLDPMRLEEEHTAPGVTLALLPMLNQAWASRAASPRPHAAAVPGVGCLPQGHHCPTLNQKPEQRQTPR

SEQ ID NO: 932030 - protein, 152 aa, Homo sapiens
MRDSEKGLGSIDWRFQHSQRIVGVGHKREGNGEAEDSCLRENACCPGNVKVAVPSNDWGMVIDMSVPELGGKFQWEKKISERRQLKKPHSDIRAMGSESGRTMSSLIPGPFCGNMKATTVLSHAGTDFFLLMVHLKFQEKEQMCKELQPGET

SEQ ID NO: 932031 - protein, 247 aa, Homo sapiens
MAQTRWRWLSGKSICKAHSQPLPLPPKLFPWWAHGVNTGLAEDGGWLTSRQSCSRSPTFHKPGPDCFLHQLVIGSTPQGHGQKLGRRMDARALNDMGQSLFLGAAYGGDNHLLDMMADLRPLMKPKIVKKRTKKFIWHQSDRCVKIKCNWWKPSSIGNRVWRTFKGQILMPNTGYGNKKTKHMPPSGFWKFLVHNVKELEVPLTCSKSPCAEIAHSVSSKNHKAIWKGQPSCPQSHQPQCQAAQQRK

SEQ ID NO: 932032 - protein, 151 aa, Homo sapiens
MGPGGRLGRSTAAWRAWSLRQYATLALHAGRLPEVSSAPEARTRLPKRVRRVKGIDEAGGGGLGLESLNNGRRIKMPGVAAHEVTKDVYRTRCEIKVREFQDQICECRVCSNADVTNIHDSLSELCRAGQSVNATFNKTGERLGAHNSRRC

SEQ ID NO: 932033 - protein, 137 aa, Homo sapiens
MEQGVEGWPPVDSWALASGRKKMSGFSIPSFFLFLVLLIYLKITFVHVKLPLDTHCWISLGHPAVLSVSQGFVCLPCAIHFPTALLVASTEANILCHTAHCGQFASFWAWRKNDLWKSREAQKFTEKKALKFFLQQW

SEQ ID NO: 932034 - protein, 162 aa, Homo sapiens
MRYHSTTIRMLTFKRLTTSGIGAFEIPKKNNQGDCLVQWSRASLSNPQPTGHMGPTTALNVAQHKFDGKARELETIGEQVGGDSKKTFGDTMMKKGLEYDHKRGGKIRVSVKTRNYEGPSPKQMSMWENRKSEGPSDRVKRGWWCGAALQTEESREPAGSAF

SEQ ID NO: 932035 - protein, 124 aa, Homo sapiens
MILCISTPLLRYSPTLIFSGSILFIVFNPNLDLALKVYQILSKLAFPNLFPATSQKELSMPSGPVGCTHWPTDELSAVSLRKTVGRSKGEAPTGKRLTQDSEFLLCVILNLIECPQNSYFEFCV

SEQ ID NO: 932036 - protein, 144 aa, Homo sapiens
MVTGCTPKTKQGNLNSEMDLQQPCGYTTAEVIRTEAITQGPSRMWYITWRLACSTSMSENMSASFYTQESPGASPRVQRLKNLETDVQLKEKREQVSGTGRKREPEDSSTDSNVNLLWQHPHRHTPKQYFTSHVGIPRSSQVNI

SEQ ID NO: 932037 - protein, 256 aa, Homo sapiens
MNILELEQSHFRTCSERPTLPRHPQERSHFRTCSERPTLPRHPQEQSHFRTCSERPTLPRHPQEQSHFRTCSERPTLPRHPQEQSHFRTCSERPTLPRHPQERSHFRTCSERPTLPRHPQERSHFRTCSSPAPHRLPSPHPWSWVAPVFFQLLSATYTFSDVPSLLSSLWKPPLTGSIHSPADHRKLSDDHSVISCPLPSVGLSPGRSSLTSMPVVSCRLPTCLLPTVGLSLGWSSLTSVYVISCPEQGCPLDVPH

SEQ ID NO: 932038 - protein, 131 aa, Homo sapiens
MGGASQRCVFRRDCGGQAEWQLHCKMDGGSWAIPDGARGMGGHNLHPQPSLMEPGGWVVTTCTGQWRPREGSPCIFRQGIPSKGSGGWGESSCDGGTEGLTCDFGMYPEWELCFHGVHSASTSSEEIPEAL

SEQ ID NO: 932039 - protein, 180 aa, Homo sapiens
MSSPSLSPRLNKKMQQSQQQILGVQKLNSQWRLAQDFRLINEAVIPLYPVVPNPYTLLSQIPEEAESFTVLDLKDAFFCIPLHSDSQFLFAFEDPTDHNSQLTWMVLPQGFRDSPHLFGQAQAQDLVHFSSPGTLVVQYMDDLLLATSSEASCQQATLDLLNFLANQGCKVSKLKAQLCL

SEQ ID NO: 932040 - protein, 135 aa, Homo sapiens
MLPGLGLLFWVSGLPYGRGKVQKCEPSPRTFGALPPVAELVPEAYNSQSLTQGPEHSTWVSLLVIQGSRALQLAERGPHDSDQYPILLWLSWYPRCKTMSSPLFHLFSSSKKKWSLLDPRATQLGVRGVVMPALS

SEQ ID NO: 932041 - protein, 127 aa, Homo sapiens
MRHAGSCSFQLSYVIFVTLLSLAKFHSPVKNIVCLRQVIECSSARLIYIEQLVTTSYNFEFLGNSTMNTGLIPPPKTTLPGIPIGFLVIVKLPTECFANCFSSPVDCELLEDKAMKDMLDIQSLLNK

SEQ ID NO: 932042 - protein, 167 aa, Homo sapiens
MHYTLLLWVKEGYYPHYPHHTWLCALHFPEVMGATSQWKLLELSDTSLLLLSQQAPRQELLLQPAVPKINRTQSRAPAVGDACTAVARNALLSWLAAEDVGPLTTPAELSRHSKQAASRSLASIQGDQLVSVYPGLCGFKTGSPTFEEAPPSQRTGAAVTLTGENVP

SEQ ID NO: 932043 - protein, 180 aa, Homo sapiens
MQNAQCGALGGTIKMNGTRILPPGVLMELTGTLGLVSPLGGPSSCSSARLASTAGPAPSLASVTQGEFSETSQIKESSENPVSPEEKPDPGQVSLESVTEQIQEKQVAGASSKQPIPHLCASSCDAQGMGFEGAAQLWHQRTLRGERRQTGRGEVRPASQSLLHTVAKAESCGNTFPPSL

SEQ ID NO: 932044 - protein, 159 aa, Homo sapiens
MAQMPHEQPRPPWGTQLSTSGYQCSLYPGTYQCPLYLGIYQCCLYPGTYQHPLHPGIYQRPLYPGVYQCPLYPGTYQWSLHPGTYQRPLHPGIYQRPLHPRTYKTYQCPLHPEIYQCSLHPEAYQCPLNPGIYQCSLHPETYQCPLNPGIYQCSLHSGT

SEQ ID NO: 932045 - protein, 160 aa, Homo sapiens
MWVAGERIPKQKAAWLLWREKTVQATGKEQGSTVRRPSCHQAGGDSAQARVGEEQWQEGIVISGYVLKTESPEFADRLDVGSERRKGQHGSTWNDPTYWDGRGREGLGKQFAFGYSKLQTYIKHPSEESRETGVRVTRDACLEVVNQGMEFKAVRWEEMV

SEQ ID NO: 932046 - protein, 155 aa, Homo sapiens
MAGPDALHAASAVGTHNWMRETQWHLKIWRCQEPQSPKEGVTALAQGAPKSGLPEGLQLFCPHHPQHGEHGGVFQPCLCYSSFSSAIQWVQNSRPASRKNEVHRQLEEGRKCMLIGPWAAMDGPAKSTISSHSRLWTPPETDSPAPGFQAIHGLK

SEQ ID NO: 932047 - protein, 177 aa, Homo sapiens
MDHSPAVGPSVRLGIWVLGNESIFFLWNYHLAWSPSVGNAPSVECPQHGKCPQRGKCPQRGVPPAWEMPPAWEMPPAWSAPSVGNAPSVGNAPSVECPQRGKCPQRGKCPQRGVPPAWEMPPAWEMPPAWSAPSVGNAPSVGNAPSVECSHRGVLPAWSAPSVECSWRFLVPFDTIA

SEQ ID NO: 932048 - protein, 137 aa, Homo sapiens
MANIKKMKEASFLKKLKTECPCDPAIPLLDISPKDLKSGVRHPEPQGGPWRWFGGVPPGNPRETRDLTTDLNTINSKVRDPSLGTMKNSGDTDTDRNGGSRLRKDILQHKHRPGCCADVSCARQDLNDPFPDRVICV

SEQ ID NO: 932049 - protein, 137 aa, Homo sapiens
MVMLLIVSIFLSELWTRDPAITPCKTPKLHCQNEPASNQKKFWESMDKMTARVQEAGEGLKPADTRGAKVALTRRLCPKRDGAPSLGTTLGRGKGELGNILSLSRQGNCLNLSTRQVYFLNPERMCSTDQPCHGLGS

SEQ ID NO: 932050 - protein, 162 aa, Homo sapiens
MRQQKVQGKREESGKNSSVPITKTVEGVNLENSSGPTLVAAEHARKPLSSPSGWEAGCGTSGTVWEAVHGEAAEHHCVSFILDKHHRSKKREKKTGTKKRSPFLLQSPLIFTDKASLWAGWQRRNIYKIQLQDHQQAMKGNQGRKEERKNRCQFITTAGKTT

SEQ ID NO: 932051 - protein, 169 aa, Homo sapiens
MDPTLLNRFAILNIGHLIKCELQISNLLKISTCSLKSCFWYKILILNYVRYPPVQNPFILPSPKNTLHLSPGGKGQVASTLQPRCRRDKLLSSTEEMGETWEATGFSNSLHLDLLIWGPTSPPFPEVLGAIMLINVNLRKPLPSPGKGVCTQIQEAGTDVVEHWKQDDE

SEQ ID NO: 932052 - protein, 155 aa, Homo sapiens
MIQPSEGGNLNPCYTMDDLEDIILSEISHSQKDKYCMTPYSGCGNNTNENQQYLGNNWVLDGTVRSGDSGAFDRWPTWGRAIPEQRALTPCEGRTLAGGSPPMLQGGSPGPMRGPSRCGNGMQGVELKAHQRQTRLTTLQFCPRRCSLQLIHSWK

SEQ ID NO: 932053 - protein, 233 aa, Homo sapiens
MSLGTAVTLGLEGFEGGVHSARALRKRVSLAPPGTQPLNFIAPMPPMRNMDRAFPGSFLGPRCLLFLGEHTGSVHGTLCLKQHEDKARRPQQGCNQNPQGLHGDAAVPPPPNGRSPQQSWNMNVIAGTEAAMLDSEVKASCAGEQGTDRKRGHVAMSSSCHVPSTSQMCLVGPLPPAGSYMWLLATLSPGNYIPTPPKHLGPHSPTYPHLHAFLTPRRTLLPSRLLLSAGISD

SEQ ID NO: 932054 - protein, 153 aa, Homo sapiens
MCKICGSSCNYFLHAFLLLLSQETVRGNECATLTSTESPPLLSVLGAQILTPGSRGQHHGKPDKRTRTHVLDSTVGVLRSSYQWGMDPGLSDGVGDHVAPSFSPSHCSLWGSVEVVYGGYPITSSATLLSNLTRSPPHQDPSWLGRITLATIH

SEQ ID NO: 932055 - protein, 166 aa, Homo sapiens
MAIASLPASLDALPSKVKGPVIPHLYHSECTSKKGQQEVPPRWQGFMARGIGALQNDIIEAQVKGCKELLQGSNYKIRKLSKVGRSRGQKKKTERHCSIIQGAKQMRLARVRSSSDLVRVLPSLLHLDIYTMVARGRLIRQSLIGELKNLFILLVLLLPLFSFFLL

SEQ ID NO: 932056 - protein, 296 aa, Homo sapiens
MGWRDHARNLEVTHPEVHKGPKCDRGSYQKAGGDFLPGSKPGQEERRREACVPSRTRLASVATRGAQQGPGFGRRVLHSDAALSRWPQAWGAGRSTPAARLQARRERGAGMLASNLTTRAHGTEAGGPAFPSEFAGASAPPAAAAPGASACSRRRNEGRRLRQASYLHSPAVIFICGGNEVVSGAPSVAEPDIQIALPAPPAPARWSREPQAARARTASPLCPATARASSSSPAPLFPSPSPFPPLLCRARLSPRNQPPCRVRLPGIPHAARNPTHSYSVRLPRKGCSAVAALVRQ

SEQ ID NO: 932057 - protein, 144 aa, Homo sapiens
MLACLASSEKFVITDRLEPSSLNSSKSFSIQLCSIAGEELLSFGGEEDPQLQVCWSLLDVHSRPCLPGYHQRRLQNSKCCCLVLPLEASSQRSTQLYEVSVGPYWEVSPTSLRWVQTSSFSSEKFVITDLLKPTSVNFSKSFSV

SEQ ID NO: 932058 - protein, 140 aa, Homo sapiens
MPLLSQIALSFKSAQISPVPTTTPPHTVESHALDSLLDLVISWQAAHMAYWETQESCELPRANSSRPIPHTLAFLAHKDLSLPLPIYTLYWSIPWYCYLSLLSAGYVASLRYNFPEGKPCPVSCVPILCLSSAGQSIFMC

SEQ ID NO: 932059 - protein, 173 aa, Homo sapiens
MLVMWSKSPRLPEEPPRRNDAHGLLSQVAQSALVKGSPSCGLKGELLPTPFNPQLVAKGPSTQEQFREKGSLIPRRAKPHPAVYGFSEFLEPGPGTQMFDKYPGEVSSILKSEARRGWPTCVKLKSTTAARELDEAPLTVGSEQQLHRKRQQMPFSSGLSSLGCQCLLPVAQS

SEQ ID NO: 932060 - protein, 241 aa, Homo sapiens
MGEFGIGFIENINLAEGTFKQSPEEGEGAGQVDTWGRGHCLGVGYELSCAIPQKRYVEVLTSSTCECNLIWKQGLCRCSQEEVTSVGPHPMAGVLLRRGKSGHRYPGRRPCGDAKTHRGKRPWEDGYRDWSDAASAKERLGFQKLGEAGQGPPTEASEGTWPANTLTSNFWLPELLIRCSGHRRSPCGLEESGRGEVRSGAGSLWEEVEGPRGIQLAKGTWHLDHSSSMKQTNNTLQTLNK

SEQ ID NO: 932061 - protein, 181 aa, Homo sapiens
MKVQSKTASAGVEAAASSPEDLSTTIDEGGYTKQQIFHIGAFPPFARHFLQPPCGEGSVCSSFCCDLSFLRPPQLYGTLIALAGGESSMHSILNVTSMRQVTSPSIPSSQQVHPTLCPSSCAGETTSPEAASPPPYLQQTKALLITRDCPPENEAKGLAFPQLPGGCASGPDHFSVHLHDF

SEQ ID NO: 932062 - protein, 168 aa, Homo sapiens
MSQSYIIGESKFKARSPDSQSKPFPNLGHTTCFSGGVYCVGPEANTAILDVDEGTASQPVSLTVEESSESFIYSEHNLRDTLELSGWGRKTWQKQLKDSGLTLCLLKRLQFLEGFQSEFGEFINRKTNSWQALYLLCPSQGCNINLPTWKALRPRRHFVSSGTLLQSA

SEQ ID NO: 932063 - protein, 190 aa, Homo sapiens
MPTFYRKHGSRAHHLQPEDCVRTVDTRRSMHRRSLGHGQSFSEGCGYQPYGVLEIWTDLSVCLLWGEPKVKGKDKVGEPPGEAFYSAWGLSSGMEDTGVVRIPESSRKETVFAEWWALDIQQCGWLLWAENVCECERMRARACWCWAWGTVLFERRREQTLCTQMHQFPTAAECCFWLKEKEESEIFISA

SEQ ID NO: 932064 - protein, 161 aa, Homo sapiens
MTTGPFFMRLSSLDFLSPPGLTHSEVGLGWGIWKVLIISTFKYHYVSWALTSMWWRKGGQSLHHENVFPGGPVGTAFRVGHQLFLPREYNGGAEKWGSEAVIQRPPGPLRRLICMRSQKPQRSPLPMTGKVWYKLNSSGGVQGTANIFFSGAFIFKGQNWP

SEQ ID NO: 932065 - protein, 188 aa, Homo sapiens
MSMGTKEDLMDSRETRCPALVCCQGDADAAGLGTTEQIAPRVPYTQRGTDVAERGPGPMRHSTGSICGDENIKEVIVVCLCVGALHKGTNWDYDEVVGHLENVGETNRNIVAKSQLCKRAGDICDRFSWLAERHTIAWGERLQSCMGENDLPPSLADGQLAVDYVLISSGHAPVQEHRVPVKNLKHKH

SEQ ID NO: 932066 - protein, 145 aa, Homo sapiens
MQGPGSRIINRLLRRGPRSKMLSGRAWLSEKTSSRKRFDCCLREGVRYLKVSELRVIPSDWVGKHKAGVDEEEGDVIRTARLSEETNLAARWEVSNWLEICKTILLVTSSLTEVENKMCVTYIKLFQTCVGGSERLKRVKPKQYY

SEQ ID NO: 932067 - protein, 200 aa, Homo sapiens
MLIAPKIALYGSNCIYSPYVLLIKYREGEVTQHAVCKLRTQEGSLSPKTSKVGKLTVQPSVCGRRPESPWKVTGVCPELVPAGGFFVSLTSRMKLRTFAVLQFLKACPEFVPSDVQMCPEFLPSGGFMVLLTSGMKLQTFAVSVTAHKGNVDSEGAAVSFMANSERAKLPKLQSGSLSTVATAGSPGLLFFPYLAPPTSC

SEQ ID NO: 932068 - protein, 142 aa, Homo sapiens
MSAGHTGNHVAPEFSARHLAHTAPRQSILPYTVLLCEVQFLSWEEEEERGAAPGHKYQLRSLTGESQFCVPIAPSFTLMGLPEVAEGETKHCPLALPYPPTPQTLFPYTSLPTPPPCPGIVMEPSPAETQKEASCLALARSR

SEQ ID NO: 932069 - protein, 170 aa, Homo sapiens
MYLKLPEIKAFILGQIQHNGTIEQQGQQVPKVLVRSKIPSRSQGLELETLEVYLVLYSTVADLALKPQNSPFHFSLFFSQTEESLPIATTIPGLHKMEVIDDIDKQGSGEVVESRFWQQPLGAYIAHLPAESVTYLRPLQTAGCWRLLLPVACLPTAYQSPPKVTSSSFV

SEQ ID NO: 932070 - protein, 151 aa, Homo sapiens
MPLYSGLASWRHKASLSSPVLCPTRSFLRGVSARFPLHKESLGLSLGHIFSVPSPRDPLNAGSCGTHKTHLFFTYLAGKAVLYFSAPAALKTTVSSILPLLREGIAPGSSLFFEETSLCFIVFSILLTVLTPPAYFSILYISCKMLMGLET

SEQ ID NO: 932071 - protein, 142 aa, Homo sapiens
MTAFMSTSTPEEWMRRSCLHRLKTELGCVNWGVLQVPHSSGRIWGWDEKGPPRVVLGGGSCTSGVPNPQSCGPVMVRGLLGTGLHSRRAIDISAVTAPVSGSRASSSSSESGSGAAADTLQLQILIYIFLRTAPHLKICELK

SEQ ID NO: 932072 - protein, 152 aa, Homo sapiens
METCRSLRQGDGVSEAAGQQSTKKGVPSPHALTQPSTLCGQVGIQPDISVNLRDTRKEDEENLNCNSVLKPDAREVAGSDSVYLKIANLSFPQWSEKAQDEKSELPKAEDLRKATYVLCPWEFCDDNDDHVHIGSGHPPPLLRPFLRTVQPW

SEQ ID NO: 932073 - protein, 142 aa, Homo sapiens
MSLATHRAAMWKRPLEFQSSNRDPVQHGEPPEGLLYPNLHPASGVFTDKTHFCLSQSSEPLSEWETRVSIRMTPCYHARAQSLYSSKDPVEMQTAWERLYHKHDRQTDISSQEELLSHLRGCPPPQSPGCWPLLFPSDCHLT

SEQ ID NO: 932074 - protein, 241 aa, Homo sapiens
MREAELKSLEILQPDNAIERKIPFSEEKFKTAAEIYISNKELNVNHQDNGVNVTRACQRPLWKPLPSQAQRFRRKKRLHGPGPGSLSCVQPRDLVPCIPAALALIKRGQGTARAIASESGSPKPCQLSCGVEPAAAQKSRIEHHAPGKATGTQCQPMKASRMEAVPCKATGMELPKIMGTHLLHERDLDVRHGVKGDHFGVLRFDYPAGFQTCMGPVAPAFWPIYPIGTAVFTQCLYPHCI

SEQ ID NO: 932075 - protein, 198 aa, Homo sapiens
MSCNTHSSLLSQRDHEPTRRKKLRTHLNIRRNELQTRHLRSCNPHREVWNLDAAYVDASSSREFTHKAAINVLSRAEVSSEGLTGGEHMIASIFTHVVVGGSQILGDCWAETSLSFLPCEHLHRVDSNISASLPQNKWVREFSAKPTRDMDCLAESLGQRIKGRKKDPDVSIGVIEFSDTSNLDELYPWTSMSSGTTG

SEQ ID NO: 932076 - protein, 277 aa, Homo sapiens
MCKSFKCYQTGRSICKTMPGLAGWSRDGVSCLAKHPKILATLLSRGCDGAVRIWNLTQLKCIRIIQAHEGFVQGIRAHFCGTSFFTVGDDKTVKQWKMDGPGYGEEEGPLHTILGKTVYTGIDHHWKEAVFATCGQQVDIWDEQITNPISSMTWRFDSISSGKFNAIETFILGSCASDRTTVLYDMRQATPLKKRCCPEELTNKKFLEMEQECMAEEESDPPQEEPQAGPSGGIPEEGTVIIGDDSSMHVTAPEDLPLGQVEEVEDSDIDDQEAVYA

SEQ ID NO: 932077 - protein, 145 aa, Homo sapiens
MPLDTIPSPVENFEKHHSSQENTLALVWKGVCCSKCCTSSGLQDSSFENDNYSVIKKVKFTHIHWMSTTEPSSTVPQCLYAKLYSAPVFISQETKENMQQRLSGLYEKQKVSIVSGNPSEKKSFEEERVIVVTNAADRSRKIRGN

SEQ ID NO: 932078 - protein, 144 aa, Homo sapiens
MRKMSSEIKFFKLTNARNVTKLGCLSWWLGGMDLKERDGGWRISNARESFWSTGPQPAGASAGNWFKMQILGPHPRPIESETQGWGPAICFNKPPDDLEAYSSLTTPDGRGEWNPVVHLDKNQGDGTEKVQTDEAVLGVEEHHM

SEQ ID NO: 932079 - protein, 145 aa, Homo sapiens
MRPFKRLFGQKNFALISGIDAFIKERGLEDSGPLLTAPLGGAPVGTLCGGSDPTFPFHNALAEVLHESPTPAANFCLGIEALPYIFCNLLEVPKPQFLTSVYSQAQHHVEAAKVLGLHPLKPWPELYVGPFQPWLDWLGCRTLSP

SEQ ID NO: 932080 - protein, 145 aa, Homo sapiens
MKHVLSTWLLQWELRVILAGRAGGRSYGKLPQSSGRLASARVWAPDKGLESKIYKDILKLNSKKTNNPIIKWAKDLNEHLTKEDIQTANGISTYSGPSAAGLLEFAGGPLQTLFAWVSQAEAAEQQMLLPDPSPGNFISEGYLAI

SEQ ID NO: 932081 - protein, 154 aa, Homo sapiens
MRVPLRESGNPVDKFQLTIEEENLRIDALKRPHPAQLSGWERLEAEKRDGDLQQPGHGIQPKALDATNCFGDLIRKPAHELLGRPCLQTPSAGSWAPPTLCTSLLPLTVAGSVHVPVNTKYRPLQMAYELAQTTSLILKNRKKLYKLEHFRART

SEQ ID NO: 932082 - protein, 137 aa, Homo sapiens
MTFGADEVKELRSHYIGKINYIDIIKNHNRKKMGNETMSQEIKFSRNDGIVEATVDSGKGEVANNWDVQSPESNLAIRLAPVREGQQCKSHCPQGLCDLNSFHARIDTTVVQEGSGWGPFSSNRSVRSFYGSIWTKS

SEQ ID NO: 932083 - protein, 151 aa, Homo sapiens
MIVAELFDKYVVEKDAHINHKSLNDEDTSEKYVVRLFYHHANIIECSYTNLDGTDYCTPMLDDIAYCSHAVKLYSRETHPDQATFEQRAEGGEGSSHRCVGEEDSRKDYIDALQKRVKFHNTLTRHEKDSEHLYIFWKHPLLPAVIYICYY

SEQ ID NO: 932084 - protein, 167 aa, Homo sapiens
MGRNQHKNAGNSKNKNTSPPKDHNSLTAREENWKENEFDELTEVGFSRWIITNSSELKEHARNLRTLKKNINDLMELKNTAQELHEAYTSVNSQIKQAEERIPEIEDQLNEIKHEDNIREKRMERNKQSLQEIWNYVKRPNLCLIGVPESDDENGTKKYREHHKDTP

SEQ ID NO: 932085 - protein, 145 aa, Homo sapiens
MELSHRWPERTSDSLENSQSSCSRVFKLLFLLVLKTAWKHRMPCLMVITIFSHQAAVSCILYSMVHTGALLRDRRQTQSSLRRGCGLDCRRKWKHLDHRIGEVNKVLSYSELAPESYSVKHMQNPEKKPTGNGKAYGEAPPYKGR

SEQ ID NO: 932086 - protein, 150 aa, Homo sapiens [sequence omitted]

SEQ ID NO: 932087 - protein, 200 aa, Homo sapiens
MGSCAALASPTSAAPRSTVRSPIDHPMAEECGHTAQDWQAAPPAAPVRDPLGEASWSPESSGNLENLYLRDCKHTNQRPVKTDHLALPISRMWVGPDKRIKAGCPSQHWEPAGVPFHTVEAFFTPEANKTTNPPGGTNNSRRAALRAITLIGKVCSFILEPARPRIHQKEETPNTSEHQKEQTPDTPPLRTVTLTARTRN

SEQ ID NO: 932088 - protein, 329 aa, Homo sapiens
MVALDILVQLDLLAFEALRVTKALLSTENLLPWMSLTVTKYKASPISLSPLQGPPGPPGPPGPPGVSGGGYDFGYDGDFYRADQPRSAPSLRPKDYEVDATLKSLNNQIETLLTPEGSRKNPARTCRDLRLSHPEWSSGYYWIDPNQGCTMDAIKVYCDFSTGETCIRAQPENIPAKNWYRSSKDKKHVWLGETINAGSQFEYNVEGVTSKEMATQLAFMRLLANYASQNITYHCKNSIAYMDEETGNLKKAVILQGSNDVELVAEGNSRFTYTVLVDGCSKKTNEWGKTIIEYKTNKPSRLPFLDIAPLDIGGADQEFFVDIGPVCFK

SEQ ID NO: 932089 - protein, 178 aa, Homo sapiens
MQLWVNYLTFLCLSFLILLKILEKDTRLYQYIVLLQTSIKKTWHQLTAPVCINYYYDGCYMIILYFSFFWLLLTEFYQERAFLYPLPHYSSWSLYSPPYDPVSAATALSPSLAPLPHNPFTSMPAFGHDADSKERGVRKPIRHRILELQRTMAVTSSGGPSIGAHLNFTGCVRIAISY

SEQ ID NO: 932090 - protein, 154 aa, Homo sapiens
MGVAHLLSHHTNPTQEWEHAGKRVPGPGCLFDIQMLLFFSPSLLCCSAPLPEEFGVFMGTQDGGMAGQGAIKTNEATKDTKSMHKKSVAFLYTNNIQTENQIKNTIPFAIATKRIKYLGIHLTKEVKELYNENYKTLLKEIIDNTNKWKNISCS

SEQ ID NO: 932091 - protein, 151 aa, Homo sapiens
MGIWFNVFAIVNSAAIIIRVLTFSPWNLLERVQTQGEQSSVFDPLNGVGVPAGRPCSGSVGCRPSPKELRQLRQQELGSTSADYTKTTQINNTIITEITEPPSVFICFNALLAANLSASPSSTPVPGIKVRCAWDAFNICSLNLEYPKTSL

SEQ ID NO: 932092 - protein, 158 aa, Homo sapiens
MWTKEQRLKAPLMPLLGSGPLVWAVQMKGGTGPASGMYHLLLSLDTDALWVGEGAAASAHAGAPFWRDAHSSRCCSLEDEQRSKPPTTAAVCPVLDKLSAFVRCGRIVVPTSNVAVGIGPQPQTSPTGVCSKRHWPGPAHRLPRPPPPHSTFPEFCRH

SEQ ID NO: 932093 - protein, 166 aa, Homo sapiens
MNCFLLSLVASYSNDTEKYTVVRNYSQGQRKSSISKSCVLHLQNTSQIRPPFAASADNTLSKHQLSYPSPVNWYPPSPFPTAYLPHSSHSDASGWPSSVSETGPGCCPIKDPAFAGPLPFHSPRSSHSSSLSNQDGAPTSLLKHTALPLPTDAPIYLLCVIFSLDF

SEQ ID NO: 932094 - protein, 146 aa, Homo sapiens
MSLTATFCSEGQGWKTNETRFTLSSFIDILLVSIGEIITTVFCKADAEWNLSGIGYTKKKDRNLSGARVIPILGAHRRCLKVDPLRKRQRFGCRKFTEVCSQKQHSEGGGGRTGPEELDGNVLATEASAHPPEREAFQLSLIKARG

SEQ ID NO: 932095 - protein, 137 aa, Homo sapiens
MKSSFFHLVFSWLLEETLTNIFRIQKECRLTSRYSMLDIQLKDKVDNSPSHLGSYSLAHHRRPLWKLLNHPPLSSSNPNLGKLYDTITIPSHGKTDHLWGQREDGNQHLLNLLVSDRDTLGAFVFTISFNPAKPLKN

SEQ ID NO: 932096 - protein, 139 aa, Homo sapiens
MTCTGLKRNTSVKWSASEFLLPASYGSRYEYSPASFVFSISILPQPEMQQNILFAIKENTVFLFVFAEENWCCLFGLDVGAWKKEVADSQFGLEFLVMIINAILHDSFNAEMVVEEGATPRKEPGPKPEDGAESPPHPH

SEQ ID NO: 932097 - protein, 157 aa, Homo sapiens
MIQFQSFSGLVPPDYELHKCFPLPAYPYSPIHHPSSFFSNIHCENLVKLLEEKLNNSMGPPVTEPTPLEFLSLRLVHAEPPVIDQLQFSFPTLVMVPVDVLVLVNCYSLYLPVCLSNSKGSNLSCDIIIIKLILCSNTAVFSVLAFLGSRQEEPIRL

SEQ ID NO: 932098 - protein, 165 aa, Homo sapiens
MLWDFSDCFPYLIIAQDVKAAPGFRIYSAMRNALKVQKNRSHAQRGNQERILSMKHRTNNQRMKPHDIGKPKSHGEHITSPNRCHGGHCETQQPAVMLRALASKEQTESSSQLCPWLTALSESQPIPSFKVVGGTYGHTINHDTEDKGNNRQTDARRWSRPMTTL

SEQ ID NO: 932099 - protein, 398 aa, Homo sapiens
MIKSQIKLPQRKKSKSDTGYLQEPTGKAGHQGDNVCKSWKGRNAAATPVNTEDARESTAATPVNTEDARESTAATPVNTESPRESIAATPVNTEDARESTAATPVNTEDARESTAATPVNTEDARESTAATPVNTESPRESIAATPVNTEDARESTAATPVNTEDARESTAATPVNTESPRESIAATPPLKTQKVQENTQLPPLPENTESPRESTAATSPGKHGKSKRIHSCHPSPENTESPRESTAATPVNTESPRESTAATLVNTENPRESTAATPSTGKCVTNAVVTTQEKKECATNTHIMSCNILTVCERAQIAPLPQFHTPPGPTSVSPGVCEQIHWGFLDRAEGRKGQSQDTRRPGGDGHIHYFNSKRLPSEYLLNMWPNTHYFIIFNKISS

SEQ ID NO: 932100 - protein, 269 aa, Homo sapiens
MRMSGSHASPPDLAACCCDLHGFVLHECVPSQFLGHVHTHNGGFIEGPVHYSLLSPEHRNRQTHNKMCTVTRCPTSRASTGVDLQQTPTDLQLRVLTVRRETNKQKGIASTSTKRHPHQNPICSHHHRRPKVDKTIKMARNQSRKAENSKNQSTSSPPKECSFSPAMEQSWMENDFDKLTEVHFRRSVITNFSKLKEDVRTHRKEATNLEKRLDEWLTRINSIEKTLNDLMELKTMARELRDTCTSFSSQFDQVEEGVSVIENQMNEMK

SEQ ID NO: 932101 - protein, 147 aa, Homo sapiens
MSHIILVLSSEHKHEQGRGVYSRDSRCSRTHSCEDDGRVARAVINHGGLISIWTPGLSQGAENLKRAGNDQAIVDRYLSFLTLFHPELFWANPGAARAASNFLTLGLALLLWGLEFATEKAGRRSGRGPWHGLEHREGGGLASRRSL

SEQ ID NO: 932102 - protein, 185 aa, Homo sapiens
MNWRGKRVGIRDLLEAKLHTLDDLTLSKIFDDFLASLPSCIRNSVWMLLPCVDTQNLQELLVLNLESALEIPNETAGTTITGKLIPKGSRASPSYIFTAEYTQGSEASWKPLAGWTGLHLGLECSASGICIAAGHFLLSPQEFGNTFSAVVLNDFVSYNWEVELASSSTDPGDGHISLSSGSISY

SEQ ID NO: 932103 - protein, 143 aa, Homo sapiens
MIPVFSSGLTSNYFLSKACPNIPKGYYSSSFITYLYFSCVITRLYTNVEKEEVVQPIPYMVSTSGMHLASGGEGKINPASSVKECITLDGFGLVVVFRSGLTPCVKVNNTEEKAGVKPSWTYLRFQPLHALMDGIKCGHDWTP

SEQ ID NO: 932104 - protein, 138 aa, Homo sapiens
MSRNYKFFHKWRKVDSYYSIHVANIRKPEEWKQQARVKGSGVTVDRAGKGQAMGYAIVRGELRSSLSFMWTTSMETLLEVGPGKKCLGHGGGSLMNGLVLSSQGLPYPVPMADITSQSWQSFLLNLRITIIGFFIIVC

SEQ ID NO: 932105 - protein, 186 aa, Homo sapiens
MLPQLLLLSSPLLLLLLILIVRGLTFRTLIDLKLIFVYSDRGCELRRCWVGSFGFASIALCTSDGNFYTGPFSLTYKLADGTYREELASVNVAGYVLFLVYQEKLSVTSGNGLICGVHSDLSSLLSSGGAGAKISSFGSFRYHIIKHKDSFLSSPKIQYVYHPLSKAAVFYFFGHILAIPSRRQVG

SEQ ID NO: 932106 - protein, 140 aa, Homo sapiens
MGKQGNLLLVDVPPGPHSSTPDSFQTPAGPDPASGPLTPQCFIVSSPAGTDIIPRPSEASAWAEQAETNCFTATTLNLTHIPFPKCAPHWQLLSEIHGKVFSKSHADTFILLAVKMTRKIYQKPYVQALPQMQAKKPWGR

SEQ ID NO: 932107 - protein, 141 aa, Homo sapiens
MGNYVLHQCDLNVRPGVKGDHFGALKFDCPTGFQTCMGPIHYWASEEPLPNHWCHTRVSFVRCSRPGDFLRQRSQLADRLFPSRERRHALFPGQPTNQVISPLCVLRMEAPPLHGHHPNGQVLPARSSGRVRWGAVTQSAA

SEQ ID NO: 932108 - protein, 144 aa, Homo sapiens
MALVMAVEVVGTSWDLPVAYMGTVVAAVDLEGQFPGLQVAHEGKETCVWHSGNNEVEGYGLMDDENEMFGGQEREFITIIQLMNNNLNQEVAVEKEKEMSIIKIFWGSLQLNCISTFLWYSTDLLNIYFSFCHMAYYKHIVFKG

SEQ ID NO: 932109 - protein, 148 aa, Homo sapiens
MLYLPPPPTPQQAPVCDVPLPVSKRSHCSIPTYDSVEFVITQLLKPTSANLSNSLSVQFCSLVGEELWSFGDPSTAGLLEIAGGPLQILFAWVSPAEPAEQQRWWPVPSSGRFFPERHPPDASWSSPQSLSTVLGDLLLSLELAGRNV

SEQ ID NO: 932110 - protein, 169 aa, Homo sapiens
MGRNQSRKAENSKHQSASSPPKECSSSPAMEQSWMENDSEELREEGFKRINSLEKTLNDLMELKTLAREPRDACTSFSSQFDHVEERVSVIEDQMNEMKREEKFREKIVKRNEQSLQEIWDYVKRPNLLLIGVPESDGENGTKLENTLQDVIQENKSNSKTHNCQIHQS

SEQ ID NO: 932111 - protein, 147 aa, Homo sapiens
MNSSSVKDMRQQFWQVTILDSHFAMPFAQSRTLDGIYFFACQNLLLKKAMRELCDQPASLLWSELGHMLIPGPIIGKGQDEQGGWGQFRKVSQWNSNVIITWELIRNSDSQTPAKNCGIKMSGCGLPPKSAWLLSGDYDANLRTCLD

SEQ ID NO: 932112 - protein, 178 aa, Homo sapiens
MGSRKVIIVRFIQLFVVVRVYTDQKPWSHTWHLLSDPTSNPSANLVDSALKTYPELTASHSLHCFYPYLSHSYLGLDSHVNEKVTGNWSKGHQCHTLSKSLAVLCPCLWELWKFELKSDDLGCLVEEISKQQSIPESVFLLLTAYNQMWEQRNDLNLELIFKREAKHTTLEICSLALW

SEQ ID NO: 932113 - protein, 156 aa, Homo sapiens
MKKNEKESRKQEEEEEEEKRKEKERKKEEREKEEREREKREKGRKERKRKQRRRRRNKRKKRRRKKRRRRNKGKKELSWSNGKEQQFFHMPGKRQVGIFLSKQVLTEICDFTKDLHFSKCIIIIYLPMTPPQGGFKVEFDLHQLDVIFYNLYVFRS

SEQ ID NO: 932114 - protein, 162 aa, Homo sapiens
MSSSGIVYTPIGTLYLAQGLDCKCTNQRPVKTDHSALPISRMWVGPDRRIKAGYPSQQWQPRDHEPTRRKKRRTHPNIRRNNSRRATLRAVTLTAKVCSFTPEASETTTTSPPGGRNNSRHAALRAVTLTARVRGFILEVIEIRSSTGGNIPPGVHLAFSRR

SEQ ID NO: 932115 - protein, 139 aa, Homo sapiens
MERAKVPVTLKNWPTSKFCICIQLLAEVWGHSFVLLTDKLPGTPEPWPQSIQMLGQLRQHYNIHVKDEKMEALAGYVNRASELDPGLNPVPEALLLSASLFYTLSDLLKVTPLKFRREKSRADMGISSLALIFMGQDGY

SEQ ID NO: 932116 - protein, 166 aa, Homo sapiens
MGGQPQLCPGNVRLLPCQLRSGAGLLPVPAFSRCSPVFPVFICENFSPVDCSFAFLGPNGGGGGEVKIFFKDEGKIKIFSEKQQPKILIAKREEIFREKLRKYSWSWGHLLILGEGECGDPGLAWVENPGWRTNKSAEILVVTWDRSNNIGKLRSILPWIPEKFTA

SEQ ID NO: 932117 - protein, 150 aa, Homo sapiens
MGRNQSRKPENSKNQSVSSSPKDHSSSPAMKQSWTENDFDKLTEIGFRRLVITNFSELKEDVQTHHKEAKNLEKRLDEWPTRTNSVEKTFNDLMELKTMAQELHDACTSFNTRFNQVEERKLYKPEESAGQYSTFLKKRIFNPEFHIQPN

SEQ ID NO: 932118 - protein, 141 aa, Homo sapiens
MADRPRAGHQIQARPIQCPISPATADCSRGQHLSEVVPDEEKHHDNSHAADLETNLSILEQNRGLSERFLQEDENHKILHMLKYTEKRFMLLKESLGLNNQNVKTKQRKTNEERRYLQCQGKTNARQLRMSCPHCPCLCYE

SEQ ID NO: 932119 - protein, 141 aa, Homo sapiens
MWRDRKASKVNIAELEKSCSKESGIMKSKHCQPPFTFCHEWKEPVALTRCRCPILNFSRRQNYVPNKPLFFVNYPFSGGKKGSTWYYTPMQSLWDTIALRRGDLHPQAPARNCLRSVGAGEGGAEAMKLVSEPVPWSVDLC

SEQ ID NO: 932120 - protein, 346 aa, Homo sapiens
MGNWGTKRGWRERHLKNNGPKFSKFDENYNPTDPRSSTNPNPSKEKEKRKNLHPAAASHAAPAFNSGKVNIVAINDSFIDLNYIVYMFQYNSTHGKFHGTVKAVNRKCVTNGNTITIFQEQDPTKIKWVDAGIDYAVESSSIFSVLEMAGAHLEWVAKRIIISYLSANAPMFLKTVDVPSGKLWCEGRALQNIIPASTGAAEGVGKAMPELNGKLTGMVFHILTANVSVVDLICHMEKLTRYDDINKVNIGNSRQDLVKSKFRITAILKRAAGLEFGNWRENFMRKVSRNNIKLIHHLALNMKFFHTLAKIYCQENRHKRGLGSDDSLELPVISTPSIRYVVKAVQ

SEQ ID NO: 932121 - protein, 139 aa, Homo sapiens
MVLGTQAKQQMLILCSTAAALGPSPVRHCSQSFCLKVAHHRDDMQPSGSFHWKCIVFLSLARARAGYGESTSLLTDGEMEERGNESTKVKYLSKRWPPFSLTEHQLSLRGFSQGCWQLFADFLSTVSLERKRTIFPNSI

SEQ ID NO: 932122 - protein, 137 aa, Homo sapiens
MKLRHSDEISCPKLNSLLVVDTFVIALKLSLGFCDSNVVQRKRQEDTKVCRMRQNIGKRIHVEYGDPVQELASRLISGHRNTGMSRPESAYSQDTKDNEGQHQLFCPQSTQPANHPWSHLKSGLEVWPSLIKQAPEI

SEQ ID NO: 932123 - protein, 165 aa, Homo sapiens
MQEIYWKKIPVKDKRQRAGMGKDSLRLQGGSDICERRVSDNVIEKKNPFSGENFKPTAEICVSNKESNVNHQDNGENISRAYQRSSQYPLPSQVGKPRRKKWFNGPGPGPCCFVSSQDLVPCIPVMAKRRQRTTQAIASEGASPKVWQLPCGVGPACAQKSRTEV

SEQ ID NO: 932124 - protein, 134 aa, Homo sapiens
MAENRENMHAKVLTKQGIEAGSEAGSFQKKRCSADTLRLVQWNPFETSDLWNCKIIHLCCFTPPSVVICYSSHRRLIHTPLPLSWQWWLNSGLERKWGYKEATEYRDSGEKPPGFRTQLSHLFAVTLSEGMQPL

SEQ ID NO: 932125 - protein, 136 aa, Homo sapiens
MDTRGDKGSSPGGQMEDESIWAGSWLLLHSRWGPTGCGFYVVKVHTHSLTCEYPRSFIAIATPLPSLPLCINLRHFPKNALPSPGLSHVFQLLEAVLAAAVVGSIVVVKAGPTAGRLWCYSSSSNVVLMAAASVMN

SEQ ID NO: 932126 - protein, 170 aa, Homo sapiens
MEGSSLWASTLRTPAFHFPPGFLYAVDTSTASQTDTSSPEVLGAIMAPGTTHKQCGQGADGEIVLQSVPRWITLRCILCPPQRLLARLNVRGNLEPVRRTAWQHQAPATTVHTLPGVRGPECNQNNYLNSQLLPPQLACFPGKDGVLSHPERPKCAHFLAPLWTESWELC

SEQ ID NO: 932127 - protein, 142 aa, Homo sapiens
MTLGVKISLGENIFLSQTSFILHKDSLEGVKCYQKEWFRAYRGVRVTQSRCGACDMNVSCPFSLNGGPAPGGTEYKGLWHVEFLKQPAGKVGPIVSKGTDNSICVLCEGCNQRGQGLLRITWFIPVPLTRWLPRAGLGPWEG

SEQ ID NO: 932128 - protein, 155 aa, Homo sapiens
MRNARSPGRDEEGQMFALVWVWDFARQVQQEDRWSKGFEDIGKGAAELMSCRIWTRKRRTIINGKWQLQRSNTESSLHAQKRRQLLLTVSRRCQHLYTLRKDTGLHLTGAVEFLHPRLVSGSKSPGLTGAVWSMNYANSNDDGFKSYRSLQPPKP

SEQ ID NO: 932129 - protein, 197 aa, Homo sapiens
MNFIESCFWRLENPRPKGQHLVKAFLLCHTMAKGGRARERGRNYNIFWMARYPVCSPAGHEKKAYLGLSTVCRIPDSYSGFRASSINPGQKVFGEQVVFGYMNKLFGGNLQPVNRAKNLPRTMNLHIEEASRLTVFRHLREPAVVIQFLQRVCGLSQLSWYVPAVVLEAKVYDVSLHMLLCPFKWQLQASPTSYPPS

SEQ ID NO: 932130 - protein, 145 aa, Homo sapiens
MLRKRAAHHLEIYQNAIDRIGNNFALEPQKDLDTAFQDLETEAKFFITREMLSAMIWIELVPRDIIWWVEPTAGSPNGHLTLERQDVSLRPKDSGNPLKYFKQPDRVGLQGGACHFPTAAVTASRFMFFLFCEPRLFHNIYWSVS

SEQ ID NO: 932131 - protein, 141 aa, Homo sapiens
MTDFVCAHIKNGVLLLVLDLGKCLQLFLVSFPHGVSKTFPILTLAQEKQSALPWPGLLRSPVERGFVRQTGYSLIPSSPSCAEILTPFSGTSVYGVESLLVVGVDKGGWTDSVIGWLVCCNKEIEEGNFRFFSITQFLLPI

SEQ ID NO: 932132 - protein, 140 aa, Homo sapiens
MVAGKKRSSLPRLGGQAEGLLTSQTMGGQAEMLLTSQTGWWPGRGCNFGTLGSQGRRLGGGGCSEPRSRHCTPAWATLSTEETLERERERERERERERERERESIKFVLAIERGAVKADMNCSDRSSLISCQFSKQNVLV

SEQ ID NO: 932133 - protein, 135 aa, Homo sapiens
MGKCRGPHTARSLCSHQQDQKWHDKQYKKAHLGTALKANPFGGASHAKGIVLGKVGVEAKKPNSAIRKCVRVQWIKDGKKITAFVFSDGCLNLIVENHKALVAGFGQKAPTNGQLAGYEDVSSPGLLLEGDREEL

SEQ ID NO: 932134 - protein, 160 aa, Homo sapiens
MKCQILGYDVCGLSYSHFSRCYRYYGIWETIFQCKEGKVSCFDIDLVELPRDLLNGFDQNADSDMDSEVQIEVISDEDEERTGNWSKDNRVPTGYLKQNLTEMKGEIDNSTVVVGDFTIPPLIMDRTTKQILEERQVPVVVQTPIVQMQLYHQRRRGVKI

SEQ ID NO: 932135 - protein, 134 aa, Homo sapiens
MSCLTKYTLACCGCSSSRFSQASQTGPFPKAPDSADGSSRFTRPEQRANLLQVPQKEEKNGSSRYKGKCALSPEFRAANWGDGSDTGSFLRTQRNGHCLPRSICFSHGDGGAPRDAEEATPAEMVNFNLSTGLG

SEQ ID NO: 932136 - protein, 161 aa, Homo sapiens
MSLAFLLAALFLVQPHLSPNQLHRHLCYYEDLINEELFQDEELFQNEEPFQNGELFQNGEPFQNGEPFQNEKLLQNEELFQNEKPFKHGELFQNEKLFQNEELFQSGKLFQNGELFQSGKPFQNGESFQNEKPFQDEELFQNGELFQTDELHLVPASHLIT

SEQ ID NO: 932137 - protein, 396 aa, Homo sapiens
MKNSQHAFNLQQALCCILEALCLVDPPNTPQGRITPPDLQQALCCLLEALCLVDPPNTPRGHITPPDLQKALCCLLEALCLVDPPNTPRGHITPPDLQKALCCLLEALYLVDPPNTPRGRITPPDLQQALCCLLEALCLVDPPNTPRGHIAPPDLKQALCCLLEALCLVDPPNTPRGHITPPDLQKALCCLLEALCLVDPPNTPRGHITPPDLQQALCCLLEALYLVDPTNTPRGHITPPDLQQALCCLLEALCLVDPPNTPRGHIAPPDLQQALGCLLEALYLVNPHSCYPRQSMQQQQQHHLGAGPELPTICKIKGETAADVQSLREPDGGQCHQRATGTTSAPGKAQACLLQPPVVLRSQDLLSGLASPPTTSTAQRCPPGSTVTSHVCSLRC

SEQ ID NO: 932138 - protein, 145 aa, Homo sapiens
MWMCVEIRNQQPRTPETGGAGRVPSTGGDSQPLAEIAVLSFHPGLLVGTTGSESTAGLPSSGCRRSPRTAQGNTDRGAPGKAPTATASLDGAPGAARKSRKDPGKHCRRTLTEVSDKRAQLGITGNPASSSSARLPGRLLRSWQA

SEQ ID NO: 932139 - protein, 192 aa, Homo sapiens
MVTHPGKTQRGLFRNSRTHWSRLNIPDVIKPINFADEDSKAEKARPTHLNSSVCWLMAVARIHMLLAALYLGAVFKYTKILILMSESTWVSSISSLLRTPSLRSTTLQPPLQESHRERPVSEASGLFQDFSATETWEFYPNKIRAGNDACHTAVLGNYQNLSLAPLAWTQPLHKPGVSLKRLVPGRDFCTVE

SEQ ID NO: 932140 - protein, 258 aa, Homo sapiens
MKNSQHAFNLQQALCCILEALCLVDPPNTPRGRITPPDLQQALCCLLEALCLVDPPNTPRGHITPPDLQKALCCLLEALYLVDPPNTPRGRITPPDLQQALCCLLEALCLVDPPNTPRGHTAPPDLQQALCCLLEALCLVDPPNTPRGHITPPDLQKALCCLLEALCLVDPPNTPRGHITPPDLQKALCCLLEALYLVDPHSCYPRQSMQQQQQHHLGAGPELPTICKIKGETAADVQSLREPVVSTPEVPPFPAQER

SEQ ID NO: 932141 - protein, 162 aa, Homo sapiens
MVALPVQVLPGQVKRQAGEDLNADRMLEPAAMWPGDRFASRLHMNLFGQFNQCHPETNTQGSIKNSNTLSKQHLQLLRKEQPSFKCTAERTAGHIGLSAFLLHIFSNRVGGSFFEMGSSGLRDSDPGPAPPPAVLCGLHQAPLKPLDVPSRPPSLVACPLAI

SEQ ID NO: 932142 - protein, 139 aa, Homo sapiens
MGVFFYITGGRCSAGLTPFPVSFALLPMGGELALAKAGTLQLTHSAIVPYLTPQKSDTRNMIKKGVVGKTVEVTQRCWHELWPMGDPMPNLKTFTFQENKEVKFQEITYLLAANSRPLDQMVEPSCGCSAYTVQGFQLR

SEQ ID NO: 932143 - protein, 145 aa, Homo sapiens
MCNTCKMTDGEIRYTPDITGTKQCPGGMLWKVYPGKSGKAPKAAGQQVYTDGRQHAGAEHSPGPVMFDKIEVGGQQLYRELREKDSGRMRIPPKPIQAHFLTWVNSTRGELNYYKTIILVLQNVLDYWFRPREESLHGLPAIFAG

SEQ ID NO: 932144 - protein, 161 aa, Homo sapiens
MSTLCLAEAWQPVGVPLHAVEGLFFCSLQSILLLFTLCVCAAFMSCNTMKVCSFTPEVISETKNLPILDTLWSPISVKAGLSEHLQTPGYTVCGLQKPLTQTKAKGPSSGKSQKVPAEVHFPRALTLGIWLAKLNAVFHQGQLAHMDPMKMHSDSQKLSTY

SEQ ID NO: 932145 - protein, 168 aa, Homo sapiens
MSGLLQQCPQKWQLGLQRISGAGILGSHLGQQKFLMVLYEIRIYTGTMTGAETESNVFINLIGTRGDSGKRRLHQSKNNEIKFQRGQHLLNAFQGIGFMVKPELHTDTHLIPTASLQKEPNQLGYCVFPVHVLWVHLQFELRAGDRVLQAESSRAQGRYLTSIGHFFS

SEQ ID NO: 932146 - protein, 136 aa, Homo sapiens
MKIWNYSILRKPSPGKLVDSIDSVLYSYLFFVNIYQLLREDVKIAKYDCINLKDIGEIYKIRIGHDNTGKNPRWYLEEVRLENIATYELFCLPVDSWIAENENDGDLWKEIPIMGPKKAPLPEWHRTHGYVPPDTS

SEQ ID NO: 932147 - protein, 165 aa, Homo sapiens
MTSKVTMQHMKSKKILDFAANVWLSRIQADGDVVLRYQVDVYTGQLKHAETESEVFLCLFGERGDSGLRQLYKSNMQVKFQRGQITLGRLFSTTIYEKVMCEGVLLILISIALTLGPESLWKCQCIFDITNQFYLGVKSPGYSFTTNPRMCSIFIYRGRCRGRMY

SEQ ID NO: 932148 - protein, 128 aa, Homo sapiens
MVHSFVSVLREVLDCGWFPSCCTALCQWTAESWKFTKGNTLQFYNKLTGGFVRLHPDGTVSGEATTELRVLYQPNRCALLESALVPGHTVVFDRHGKIADASSAGYANLSKEFVIFVKCAGYLFLPSE

SEQ ID NO: 932149 - protein, 177 aa, Homo sapiens
MGKHDLYITGIHYIESESGSNWKVFIITSDLPDAGTSSQIYIILYGQHRSSAPIYLYGTDGARFQVGHEDIFTIQLHNMNSGKQFYVPVQRWLARDQEDGEICREFPLLSKGQPVLPGRKDSTPVTIYEVNVATGELWNAGTVANVYISIHGEKGDTGSRQLFRSKSSFNFLRGQVV

SEQ ID NO: 932150 - protein, 144 aa, Homo sapiens
MGGVKATWKMADGTEDDEVEEKPENLRAPYIFPGASQIHMPPLSAGFGIKISELADRAAELALTLLQPRMGIHVSLDENTGMHSDLIKSDFEASLQSQYTITYPESTHLLDKKGKELSLLVTVNLLTAGKPNHKQRPDAASTFS

SEQ ID NO: 932151 - protein, 157 aa, Homo sapiens
MAEEEANTSFFTSLIQLKRHRAQRDCALGTILPNLDKMGGCPSTSLCSGRDFHRPYLGPGISSSDLTHPTFASGYWRPTITDIQGLQISKGLPFACTAHSSAQSTTKPQSNTDGPSRGRRPKVKGHCLPAACRDAWGPLCLLPTNAHRSRPIFWESV

SEQ ID NO: 932152 - protein, 140 aa, Homo sapiens
MSSLGALFHLQAEEQTEFLQSVWLHCSLATLPVLVEAELGSVPVKWCLCLHGSLPGAKSFYSTCLHFSAAPLSLCKREVSSVRGRCLLFASPSLCKLPGMLVPLVRAWPGVAQLIFAFFHRDGVSPRLECSDVITVRCNL

SEQ ID NO: 932153 - protein, 130 aa, Homo sapiens
MVQLLHVPELASFIFPRVDPKSFSMDNNLHLGIFFPETTSDSSVPLTGNRSILPKWQDELGLREEKKGREKRESKDVANKIPNALLPELWKESCSCPLANAGFKLIWVSAESASGSMEKLLLGVPRGLES

SEQ ID NO: 932154 - protein, 247 aa, Homo sapiens
MMFYKKEIQTIFLFKFKIGRKAVETTCNINNAFGPGTANEHTVQWWFKKFCKGDESREDEEHSGRPSEVDNNQLRVIIEADPLTSTQEVAEELNVNHSAVMRHLKQIEKVKKLDKWVPQELSENKKSHLSEVSSSRVAGNNNEPFLNWFVMGDEKWILYNNQQRLSQWLDPEEAPKHFSKPDLHQKRSWSLFGEALEPERLPSEWRKVIKTLLMKQDAVKNLAQTHQNQNGKENDLWSSSLLIIHLL

SEQ ID NO: 932155 - protein, 160 aa, Homo sapiens
MQTPAAVYRKPILGTTFKQQRDCSGIYVRDKHSENSRSVLESNLEDKYSDPRSSVLESYVRSKHSHNRSSVLESYVRDKHSELHNSVLKSNVRDKHSDCRSGVLESYVRDKPSEHSKSVLESYVRDKYSDPHSSVLESYVRDKHSDYRSSVLESYVRDKY

SEQ ID NO: 932156 - protein, 206 aa, Homo sapiens
MLENYGNLVSLGLVISKPDLITLLEQRALECEETEDSSQIPRYVFLAGPMLLSSAYMVVLLLSHQKKSWYLHSTCLSPRPSPEQSATQTILLLVSFFVVVYSVDFIISFSSASLWAYDPVVLGVQRLVCTIRQGVRCAPDPTRLPLPLPIVLKAAIVPAGLSAWVQGGATGTILEEGPGTPLSPPAYGGLRGCPVLSVAPGSYLTR

SEQ ID NO: 932157 - protein, 147 aa, Homo sapiens
MPVQSCPARAPGHGTVTAQGGDRTPGVLAVSSAAILWLKGTEGRAVPRTTLAKDFGADSGEAGVPPQPLQTGFPGGPGILAVDLPIPTGHRDTEAGPLGAEDTEQRRKDLELRLQPETKAAPNLESRPVHSSCVPDWMDPSPESLIG

SEQ ID NO: 932158 - protein, 208 aa, Homo sapiens
MYSRKAMYKRKYSAAKSKIEKKKEKVLATVTKPVGGDKNGGTQVVKLHKMPRYYPTEDVPRKLLSHSKKPFSQHVRKLQASITPGTILIILTGCHRGKRVVFLKQLARTHQKFVIATSTKIDISNVKIPKHLTDAYFKKQQLRKPRHQEGNIFDTEKEKYEITEQRKIDQKAVDSQILPKVKAISQLQGYLRSVFALTNGIYPHKLVF

SEQ ID NO: 932159 - protein, 155 aa, Homo sapiens
MTLCPFPPGPQAAFQQCVCASTHVGDGGTGVQGQEPPRRGDVVCGQQACILPGTCRLLLQGPPLMFTEEYQKSLPEQYHLGLDQKRRKYVVGELIGNSADFTTMQCKWQFGSWDNVPVLIFSGCLANSGHFDYKNIGNKGGKLAYSIALGFLDSG

SEQ ID NO: 932160 - protein, 181 aa, Homo sapiens
MRGRQQQSGPGTGWPWQSGGPGSEETCELRSRDSGQGPSEPLSSDPRYPKGYFVQNTDFDFFNYAGLQRSVLLYTTPTTYIDDITITTGVEHDSAGIASVFNPNEGIVHECRISLDEINMRMRISIERMFGYRIRGVEVLLVLSWLLEVYKNRNLILHNLYTRSFNTIDVKRKVLVMKYVV

SEQ ID NO: 932161 - protein, 174 aa, Homo sapiens
MVPTTTAVLFSWPGSFIFGIIRERDRGGWLKNAILYSEYRRTQFYIRNTEERNSIFGIQKNAILYSEYRRTQFYIRNTEERNSIFGIQKNAILYSEYRRTQFYIRNTEERNSIFGIQKNAILYSEYRRTQFYIRNTEERNSIFGIQKNAILYSEYRRTQFYIRNTEERNSIFGI

SEQ ID NO: 932162 - protein, 201 aa, Homo sapiens
MAGCSSQALPHGEAAKGRQEIERSAGGLALLGDPVHPPQLLAWVLSSSLPWPAGPVGRSKCGARQAHAHPELQLAHKQAQLRTEVLKRDTTTTLKASSKFFNGPIFDISYTKCHQAPEESTRRKSEIQANTNKEGDKEEECSPRKTGERGSSQELREPASWESRTKVQARVGACQPGRTLAQEHRSRALPRVTGPPFYRAP

SEQ ID NO: 932163 - protein, 316 aa, Homo sapiens
MPNSVDVVSYFSYSTLRLAQWTCGKGRSPSAAGLLEFAGGPLQTLFAWVSPAEAAEQQILQNSKYCCLILPLEASFQRDTCLYEVSVSPYWEGSPNCCASSEQGSASIGPSDSDMGYNLLVCHLLKPLEKQYLGGNVPFFQNCSGSWEVAYFYEIGTASKNGEAEFRETNLSTSLTHNEVSRDECPRSSTAMPILLTNSQYLYHRITVPQQVMALKEDNPERATLAALGAKNAIPGDFNHLQVLETATKRSTRCKLSVGLPFWGLEDSGPLLTAPLRSAPIGTLCGGSDPTFPFCIALAEVLHEGPASAANFCLRI

SEQ ID NO: 932164 - protein, 148 aa, Homo sapiens
MKHCVVLTVYSGMVEFNGIPESVRPVAAAARNTEWQSTAIIWTLQQGSGACDCSWQPKEHFPAYRALLQHRHLGDITALTAKVIFLRRDGTTSAVGTGNKGISGWSGSTSIWFHKEGYNICLQLGFGMLAHQTGVAHWQLSLINEGQQ

SEQ ID NO: 932165 - protein, 138 aa, Homo sapiens
MNDQDISTILLFSCPCPSHRVIFLGFLPRECGWILGSKTQEIVGALLYLHALLGNSQSQSSNSASNNLLKLAFKCTYYSTVPVVFVLSKRFSAVTFNICLWKLLSLPHLTRVIDFAFVQYFLVIRTQVTTSRIFTCQC

SEQ ID NO: 932166 - protein, 133 aa, Homo sapiens
MSKILHCLAISLCFTVPCMSGLFLHLALFHFLPNHNSITVFVGFSLYLSIFTILVRVLFYLIYNKPDTLLQKWKLPPDINFLFLPEINLTKAFLYPLFLFRQYNIFIYIFAWYILVISIDVKIFFILLHPIYM

SEQ ID NO: 932167 - protein, 138 aa, Homo sapiens
MPFFAFIDLCCASFRSCHKLWQGTGRDRGASLFVGVTAVMVAAWCGDTGGPTSNFMCTFAPAVLSAWERGPGGHGASTFCAHIHRGSSGHARSYGGCPQEAAQLDIRTCIASRCRQTGALGEARRQTCSQVGPAPSHG

SEQ ID NO: 932168 - protein, 204 aa, Homo sapiens
MFLGPPQPSRTKIEEEIILPNAFYKAIITLMPKPDKDKTKMENYGPMSLMNTDANICNNMRGSTKRKCGLEPPTHRFSTGELPSGAMRREPPSFRMQNGSSSNTLYHVRGKATVTQCQPVKAARRVAVPWKATGVKLPKTMGTHYLHQHELDARHRVKGDHFGALRFDCPTGFQICTGPVAPSFWPFFSFGMSVFMQYLYPPCI

SEQ ID NO: 932169 - protein, 139 aa, Homo sapiens
MSISFRIIIYRSLLIYKIRTIRVSTPRGCCECVECFDYCPAYEKQSSQSSLCPGWMTMTFWSSLHNIARMVFLEVCSCPLSHSCSLTQDLPLPLGGSHQVINYFHSEGRNEQEASRSQQETELLFQDVLQFFWGGWLLT

SEQ ID NO: 932170 - protein, 158 aa, Homo sapiens
MISPPPGLAYFFSQDCTAHGYNHSFENVLTSTPLSPLPPSTWLANLCSWEAVSSAQPTCGVEGCRGKCPVRLLPATSVTLGCSPPSSPFPFEIPLPRGHRCEVWWAFIPFPRSTLRLHGQSAVNCPSPVPTLRAPSFFLKGLEKVTPPNQLTLLALHF

SEQ ID NO: 932171 - protein, 156 aa, Homo sapiens
MVIPYDVLFGETYNLLANGSTQKMAQPYHLQTLMVHLPMPLALALDVPANWIIIISPLTHGTIFGFWVSVSAASFAGASSTCLSGLISDLADERLERRGLGCCHQQKSLSVPTMKMWEVPEELMMLELLANYAEILLTSPHGNKIAATIVNITPSI

SEQ ID NO: 932172 - protein, 184 aa, Homo sapiens
MGRLAGQGADPPISLPDGAAGLAGADSHLPPRRGGCRAEGLLTSQTGQLPGGGSPPFSDRAAGQRRSSPPRRGRGRAEALLTSQTGQWGKGSPHISEDARPGRDAPHFLDVMAAGKRRSSLPRWDGGRAETLLTFQTGQPGREAPHIPDDGRPGRDAPHFPDGSLPSSNHIQECWQNDHFNMQI

SEQ ID NO: 932173 - protein, 143 aa, Homo sapiens
MASVLKSPKYVSDAHLNTGWQRGHHPCQAYWQTNGACTVSSSRCQLRKGTLSAHGPYCRQKQHSRAPSCTSRARLSLQHFLSMQSKARLLLGTWCSQADESSVDFGSGLVTQSIRDDAESALARATAAIAAASGSQWQQTQLF

SEQ ID NO: 932174 - protein, 135 aa, Homo sapiens
MYEFSVNLNRSTTLPMVVIHLQGISEVQSKLEEVDIKEAFNIDNEPPVVHSLTNGEIAEIVLDQDDHNNSDDEDDVINTKEKVPIEDMASLKLMSSFLLTVFGEAPRLFQSNITQNLPQKQGTGVEKIVRFMLWG

SEQ ID NO: 932175 - protein, 158 aa, Homo sapiens
MHKDIEISRPVMGGAATKTSDMPRRHFPHWSSKLSHIFLSSSEPSKLFQPLPITQFQSCFHIFRYLFSSTPVYWYQLTLLVHFHAADKDIPETGQFTKERGLLDLEFQMAGDASQSWWKARRSKSHLKWMAAGKEKTCAGKVPFLKPSDLISIEKDFL

SEQ ID NO: 932176 - protein, 138 aa, Homo sapiens
MTEGPCFLTAVCWRPPSDPRGLLVPWTLSQHGSLLPQASEDNLFLQFAKMELSIMPPQALLASEAGPEHEEEKVQGKELLDLFWIKHLKESQKLSFNPKGCSNNNIRLLCQNFVDTGASKPEENHKLPTLTHQSCLPG

SEQ ID NO: 932177 - protein, 167 aa, Homo sapiens
MFIEPALHPRDEADLIVEDKLFDVLLDSSGSSAAGLLEFAGGPLQTLFAWVSPADAAEQQSLLPVPSSGSFIPEGHLQMPAIALLYEVSVSSYWEVSPSQDTQGDALPRVEESREEVWLQRPCLAAVGSPQFVLHGSFMYTVRGKPPTQALAVVDAPSPIKLKRPRT

SEQ ID NO: 932178 - protein, 158 aa, Homo sapiens
MPRYRENETADWDSALASYLGHVSVTHTRHLKMSNHQGSTYSLLFPPWLVHKVAWLLWCLLFSLYCLRCLLNNSLRFVYGLCQELGHPDRVGHLLPSRQESHSMQAQRSQKGPQVCEKHTFTHPNPKNRLRDVKNSGSETFNGSLPRSSVCMSDAEDG

SEQ ID NO: 932179 - protein, 136 aa, Homo sapiens
MAQGLISTPSPTITVQTLKRKEKSPYTCMTRLVVRHLKTLKLQAWPSGPATLVGPTLTQIKISLYFALKSQIRSTQNLGHLENLIKVMVYYGLNVYVPPNSYDESSTLSMTVFGDVASKEIIKGRGTPRKCGGAAP

SEQ ID NO: 932180 - protein, 250 aa, Homo sapiens
MNTLHFSYSFKLWTNACNCELPTLWLPVPRLHQPGLSNGITVSLHGSLPATDEKLISLDHILILLAYGTGAWDPLNVGTEKAVTSWPSALRWQRAAASCHSSSSGAELAPEPCAGAGQGADRAVNMPPFIGLQRAGQRMLINMLLHPLWSLSLRAPLPGHHHIPVIWMPESATGVTCDIPVPATSTAQGLLLCWHLEQWARHHIHSLACPLQPGAEYAVTVAAGSVLDCHQVQPGGPSGQGISSGKPRPK

SEQ ID NO: 932181 - protein, 149 aa, Homo sapiens
MRSLKCIQIGSVGLKSVGKSQANSLIAPWKLLLLIVRRKCSEGRNGAIGQQVSGTGNPRAQIRFKKAIREGDKRIVTWMMKMNELSEDLEDWASPFAWRSFSLLLPCEEVSSTMTAHGLSTWYGQNLKLWQSVIKSMLFTIILNYILHE

SEQ ID NO: 932182 - protein, 124 aa, Homo sapiens
MSIFVKAIQQVCRKFQTFPYFPVFFWALQTVPTSSCYPVTKLLPHFQNVSGNVIWELWPGMWTPQFCRMLHPTVAKQGDGTEWKEKQAKDGTVDNSHMCVAGRKCGRENIKLTNGGSSKELRES

SEQ ID NO: 932183 - protein, 148 aa, Homo sapiens
MNLLLIDVVLCFDSQFLLLSRWFSHIWNPWSIIFYTGTEYINSLLVSEVSDEKSTVNLIVDNLFVAGSKKEVELKECHSFSKTNKKREKNQIDAIKNDKGDITTDPTEIETTIREYYKHIYANKIENLEEMDKLLDTYHPPKTKPGRS

SEQ ID NO: 932184 - protein, 153 aa, Homo sapiens
MLSGGQGLEPNTLRIYVVFYSVVVVLATITRQSPPCSFLPLPLAKDSLPMATTSAGLKRVLLPMLIEGSRVFQSACGGCCQTWDSPFREVGSPLIQGKYRNDVQEARPGIRVQGLFSQQVLTLAKTESFPSIQQVLFWPSICQEMSSGSFDLG

SEQ ID NO: 932185 - protein, 193 aa, Homo sapiens
MSNGQQGRIEEKDGGSGNEETLCDLQAQECPDQARSCALSGSEDGQLAHYESQEGLRGLVLRLFWDSLFTNRMFVAFVFWASFAYSSFVISFIHLPEIVNLYNLLEQTKVFPLTSIIAIVHIVGKVILGVIADLPCIMTEDLVGIEHLANAYGIIICANGISALLGPPFAGNAGQKRVTYQMHTTQLVGRLDR

SEQ ID NO: 932186 - protein, 141 aa, Homo sapiens
MGRNQSRKAENSKNQSTSSPPKECSSLPATEQRWMENDFDKLTEVGFRQLVITNFSELKEDVRTHCKEAKNLEKRLDKWLTRINSVEKTLNDLMELKAMARELRDACTSFSSRFNQLEERVSVIEDQMKEMKMLSWKTSQT

SEQ ID NO: 932187 - protein, 256 aa, Homo sapiens
MVLDHKDALFYIPLPSDSQFLFAFEDPTDHTSQLTWMVLPQGFRDSPHLFGQALAQDLGHFSSPGTLVLPYSEIARPLYTLINETQKANIHLVEWEPEAKTAFKTLKQALVQGPALSLLTGQKFSLYITERTGIALGVLTQTRGTTPQPVAYLSKEIDVVAKGWPHCLWVVVAVAILVSEAIKIIQGKDLTVWTTHDVNGILGAKGSLWLSDNCLLRYRHYSLTDWCFKYVRVLPSTLPLFSQRMGNQSSMTAKKL

SEQ ID NO: 932188 - protein, 152 aa, Homo sapiens
MIEAGTTWREAGLFGNISSSGKILFCLIPFSTLMTKVQQGLSLPLFGNKKAAPPDDRVLPRFLQVIWFGYVPIQNLILNCNPHYPPRVPPVGEHLSIKFKVLNNDNSPLRGLRIQKIRAEPKEWLYKSFSKSNSYPLNPTKSIVILTDIKYE

SEQ ID NO: 932189 - protein, 196 aa, Homo sapiens
MFCGLEISSARYPKSSLSNSKSHKSLGQGSSKLSHIFLSSSEPSKLFQPLPITQYQSHFHIFRYLYSNVPLCWYQFTVLVRFCAADKDISKTEKKKRFNWIYSSTWLGRPQNHDERQTALFTWRWQEKMRKMQKWKPLIIPSDLMKLIHYHEDSMGETAPMIQIISHRSLRQYMEIMGVQAKVLVSQERMMYTIIY

SEQ ID NO: 932190 - protein, 143 aa, Homo sapiens
MARFQSSVQSSGYFIHFLSNTSSVKEEDKLASKVELTLSASYDRFYSLKSLLEPSLFIPVSKIAALAFYELISSVPEIIFHSMFHNCQKLKPSLFRGEMPASLLGLDSSRLSGERKGYFKYLDTSSILVFPKKIKHFFKTAVA

SEQ ID NO: 932191 - protein, 144 aa, Homo sapiens
MTPVPKLQDAPNDAKWNGVELPLLSPSIYVCMAIGTFNIKLHHAKGAAASSSITAVFVLAQCEARLGEEKAGKAQEAAKRIKRDAVQSPALCFYLLLLNVTVGQEFDKKQIPRSIPVTPQDHQGKNKNIQGLTLTRATCQAYHM

SEQ ID NO: 932192 - protein, 289 aa, Homo sapiens
MFVLIKQGPKMFGGSDNSGAKYWAPVGQLKATSAATGLKTRVSGFLGKDSLTTPDSSELGALVFENASVRANKSDFPRSSLWSKRKIKVFAAVSVNATIPISRVQGPFRVLGQEEFLLLHQKETSKEISKGPQKPLGYWLCPLQAVGGGEFGPTWVHVPFSLSDLKQIKAYLGKFSDDPDRYVDVLQGLGHTFDLTWREVMLLLDQTLAFHEKNAALVAAREFGDTWYLSQVNDRMTAEERDKFPSGQQAIPSMDPHWDLDSDHGDWSRKHLLTCVLEGLGRIRKKPMS

SEQ ID NO: 932193 - protein, 161 aa, Homo sapiens
MIEDDPGQHTFKRGGEVMGESLWDIDKDIAKDAREGSQPESPLLNRESTKGMSSFTEGWIDYKGDAGLSGRAWQKPKPICKGSSDARDCLTSSPSQIDDEVLGQFAMCRWLVEGVLGGRASDLQESPRVVFWLPIGLYSLVTLVHKVTATPACCSLWLESI

SEQ ID NO: 932194 - protein, 165 aa, Homo sapiens
MRPVRLSKYFVLRILPYTTSHTSSHGGEDREAQSGAITCTSPTGKWCRAGTNAGFLESSPHCIMGSAPGRGADGYGIAQEQRPHWSVALSQQQSDPHLEKQPTQRPLAPWVSPTHCSPASISHLCSCLWVQEGKTSNLDSILLNKMFKRKQNNQPSGCSKRDIRT

SEQ ID NO: 932195 - protein, 368 aa, Homo sapiens
MEENPRCWLVVASFYSLVVPSHVPFLSYRSAPLSILPAIGYFWNPADWCVLQSADWCILQSADWCILQSSCKTGKFLKSPLDPGSSAGLTSQDLLNDFDQNADSDMDNKVQTEMVSDGDEKLFGNWSTGHSCYAKRLAAFCLCPRDLWNLELERDDLGYLAEGISKQQSVQEEAEHKSLENLQPDDVIEKKNPSSGEKFKPAAEICISNEEQNINHQDNGENDLVSCVPAASAVAEGPKGQLRPRLQRVQAPNLGSFHMVLVLQVHRREELRCGNLSLDFRGCMETPGFPGRSLLQGWSPHGEPMLGQKGNTGSEPPHRVPTGASPSGAVRRRPLSSRTQNGRCTDSLHHVPRKAADTQCYLTGICCF

SEQ ID NO: 932196 - protein, 139 aa, Homo sapiens
MKIPRSWTTSSRSEPFQGFSLQSVANVPRAPRQITGVNPRVQKLKNLKSDIRGQEASSTGERWRPEDLAKNEGDFKELTHMNVGGVWQVQNLQDRSAGWRPKKELMLQSKSESSLLASSLHLSLSLSPPPQISRYHGVK

SEQ ID NO: 932197 - protein, 179 aa, Homo sapiens
MSLGSHGSSPLPSEGLRVLLGLLICSCRAPSSQMIARKKGTCFDPEGGTFIQLALAEPKLLQHECSLKQESIHKKVLCHANFKFRIHTTKTEQRRITCYEIALVLFEAGKFIEVLVPDQASPFTQFAFHAHRKLILSISLFRMIFKLHRTCSKAERKHGDHILEMVSITLHSEIIMKSP

SEQ ID NO: 932198 - protein, 253 aa, Homo sapiens
MTDVTLAVPKDALIGWPVSVSLINQSVLAILIYSSQLHEADYYQGVAKAMTSKLFSQIHQSKRSDPRFSATLVMAEQPDIGTWTIRESEPYSTLDCLHVLILMDLHLVHLHITDVPFEIPVLWLKDFVPVPHACVFMKIKSQGHLVQQRTFEPRSSQSSVCLSIKRVSLDNLPATSLVRGVLIAILSGLCLTLDKDGVASPRVCCYKKPFCSCCPEDRDLILSLIASWRDTLQGTSAGYIAEPIKDFLFWMNV

SEQ ID NO: 932199 - protein, 142 aa, Homo sapiens
MFFGPSAAGLLEFAGGSLQTLFSWVSAAVAPEQWILVNRKCCCLIVPLEVLSQRNTRPCEVSVCPYLGGASQLGYLGIRDPLEEAVCPFSDLKLCAGRNTTLFKAVRQGHLSLQRLLLPFVYLCPAPRGGAYRGRQASLSCE

SEQ ID NO: 932200 - protein, 147 aa, Homo sapiens
MTWILWLAAVSVQGCGAGGGRSGRLHAHQHYHITGGAAWGSYDVGPQEVTGLHQTLWALHLLEVCPYHFSNQLSSVCGGWEFPPARITEAYGESELLLACSTHLHCRSPGGPGMSPGAQLSHSGFPTSFTFSLCSVSSLYLLSIPSF

SEQ ID NO: 932201 - protein, 202 aa, Homo sapiens
MSCYRRAVMPFLIRHSDTYSHRSRNPIVNCACEGSRLPEPYENLMPDDMKWNSFIPNYSPTLSMEKSSSMKLVLGARKFGNCYFSHAQAQDIRPSPSEHTGLEHTGLMTMLGNSSKTCLGPRKERGASRSERGNPGGRQTRVLPGSTGHARPFCSHEELLSTKFYKKPRPSLLPGTQFCRYSSSRLSLTLDNFESPESFKGT

SEQ ID NO: 932202 - protein, 172 aa, Homo sapiens
MAERGQHTAQALASEGGGLKAWQLPHGVEPTGAQKSRIEVWKPPPRFQNMYGNAWIPRQKFALGWSCEKRVTILQNGRSTSSLHRAPGKAADTQHRPVKATRRETVPCKVTGVELPKTMGTHLFHQCDLDVRPEVKGDNFGAFKFDCPTGFWAYKSCSAHKSYLWYETQLQL

SEQ ID NO: 932203 - protein, 179 aa, Homo sapiens
MAGAPPPASLLPCSLNSDCYARKVRGSVGVGPSEPGAGYNLLWVLGLADFKNEAADPHGVKPQTFAVSVKALKGGASGVVCSSQWVRGLTDFRSEAADLRSECSAHKGSVVGTFFVWDVSFQYRRCKSSNGSQVYRGWIVTYSLFPQRGLTMDQGIIPLAHLTGFDYLSDDPEEIWPCT

SEQ ID NO: 932204 - protein, 143 aa, Homo sapiens
MCPEFFPSGGFLVSLTSRMKPWTLVAPLLQVCWSLLEVHSRPCLPRYHWQSLQNCKDCCLFLPLEASSQRDTCQMPARALLYEASVSPYWEVSPSQDTWGCHWGMKKKLLGLAQCLRKWPSSFVLETQGAGGAGTSGNLLVCS

SEQ ID NO: 932205 - protein, 269 aa, Homo sapiens
MKDLLASTLSSTMIASFLRVPPPAMLPVQAVELFRSYYLLPIMEEEEIKTHREKPGAVCKEGPPHEDIASAQPSVNAQAMAAASSCQRCSLHPHPFHLGAVRNEAVVISGRKLAQQIKQEVRQEVEEWVASDKDVDDFYVINVGQMCLDQYSTLPAAPWGVWEIIKQTGIPTLGKSVVVAGRSKNVEMPVAMLLHTDGAHEGPRGDATVTISHGYTPKEQLKKHTILADIVISAADIPNLITAHMIKEGAAIINVGINRVQDPVTANPS

SEQ ID NO: 932206 - protein, 204 aa, Homo sapiens
MFVVLHSCQLLQGCSWTRGTTSGFCCGHQCLDKGKVMAPKSLEMPGTAKPQKGYYSCRNPGLGSPDVWAPKRAEALLSFSSPATWGVEDVFQPCLGYSSFCPTIQHVLSSCPVSMENEPVGTGVSSWAPESTGIPGSGAEAGQLQLHPGVQGFCHTNSIGEEAPHQKPTVLVTSSQFSNFQNYNKYISAVYKPPSLIIYYCSLN

SEQ ID NO: 932207 - protein, 159 aa, Homo sapiens
MNAAGGCYSQRINAGTENQILHVLTYKRWVISAFPTEVLGSSHWDCGTVGAAHRGRAETGQGIPSPGKCKGSGDFPFLAMGICHRPYLEKQDTSAQILHFSQGSHSSPAMEQSCKENDELTEVGFRRLVITNFSELKEHVLTHHKEAKNLEKMLRRMAN

SEQ ID NO: 932208 - protein, 418 aa, Homo sapiens
MGRARGKAMQTKAKAAIDNFIKKPEENYNSECRLDLPPMKKNLVGEYTIETQLSGPKKGANSFGTDPISDVVRLRGEDPLDLDTGYHVANVRLGINLIGEFETNMVRKKNIRWYLHEKYNLRKAFRDDFSEWKMKDMPFPLDSINVTEKKSVGEIIARVKATDRDEDSSIIYSFKTQQKMFCLDPFTGTITLLQPLNLDNPSNSKIYSLETEATDNGNNTSSYTFTVFVENVDDPISCDPSFSTGAAIITVIVRVSRINELNPIGSASAFTFSVFENSPVDTLVGKVTFTDADWPFNNMEYTIVGGNLGTPPKFYIEPDTGVIKLLDSLNREIESQYKIAVKVTDLDNDAIPDPLRQRSGTAQVTISVLNDEKYSNTLTTPNAGEYVEQQEPLFIALGMQNNAATLEECSSFLHTLTV

SEQ ID NO: 932209 - protein, 140 aa, Homo sapiens
MTPPTISPGLQKTATTEVLNGDATLTNEFLIDLVSAVSVGPPVEHSLELPRSISGCCTSSEQGSVGMGPAEPSKGISWSAGCEAVGVAQYLRRSVLFLQLPFLLLVQGPGPQCLDSCASGHIYPECYPITQSPDPYSYLP

SEQ ID NO: 932210 - protein, 152 aa, Homo sapiens
MFIGDPSIAAQVSTRAHLTSAAATGYRNPCFGHMAEQESAGTEGSLTLGCCQLCSCQGLLYAGSELTFIPGNSKLHCGPPVKVGVYGDQNHPMVISPVPECIIGIDMLSSWQDPHIGSLTGPPEAMCIQLARPATYLHCPTSGVYQLSSFVS

SEQ ID NO: 932211 - protein, 183 aa, Homo sapiens
MQGWRFLPHPHSTFLSGLCRRQKTNGLWRMTVNYCSFNPVMTPIAAAIRDVVSLFKQINTTPGTWYIAVDVENGFFSNPVHKAHQKQFAFIWQGQQYTFTVLPQNYINYPSLCHNLVHWDLDHLSHPQDIILAHYIMLIGPSEHEVASTLDLLVRHFVCQRVENKSNQTSGPSSSMKFLWVQQ

SEQ ID NO: 932212 - protein, 158 aa, Homo sapiens
MELTSQVSWSHLTSSCFIGIQTKINFIPVASVLLSSLMGRQGPCGPRALAPAGTWGGTGRDLYLPCSIPRRNIFAFKAWPAFSGITHHVCLLNQHWCQRIRQRRAFQEKVKMGGDQPVNDIIICPDAHARNLGIPFGPSFLSHTASNQPQVLLMPTPK

SEQ ID NO: 932213 - protein, 139 aa, Homo sapiens
MGTPLGQNFKRKDQAAIFAVLQPPLVISRQTGPGVDLQQTPTDLQLRGHQYQRPKVDKTTKMGRNQSRKAENSKKQSTSSPKDHSYLPAREQNWTENEFDELTEVGFRRWVITNFSELKECVLTHRKEDKNLKKGKMNG

SEQ ID NO: 932214 - protein, 138 aa, Homo sapiens
MVVSLGIRVITNRKYKEQLAGPSKPLSRGDEIIPLLLVGPIPSFLPLNTVTMATKFQREFWRGRSNNSSEIKGRGPIMGWLHICRVCSHAFDCHNNNDDNDEKDLAGDGNLESISLLVAAEAVGVDEVTQGEYVAIEQ

SEQ ID NO: 932215 - protein, 144 aa, Homo sapiens
MSPAWCWLWDAVLSFMAFIHPTHIFVNSSLMELPQVCPVFPGRTLTCTVNQGPVSSTLFHSIIFMCMGIAGSPYSHPIEENPCDYTGPTWKIQHPLPISKPVDEDLHSVNFPFAMQLCAWLKCGEVLLPKGRRSRMDVRQQFPA

SEQ ID NO: 932216 - protein, 139 aa, Homo sapiens
MQSEKLEGKVLWVLSEEVAICHTKEELSLDTNPAITLNLVFQSPELQSGATIHNANFRKLLCLELQSSPASHPPDEFNSRTCGIERHRRTARPVGLKPHHLPDTEYKLPNKTNKSFPKLYHTSYKLFNPIQKTSIMPVR

SEQ ID NO: 932217 - protein, 143 aa, Homo sapiens
MIPQAEEEREDMEKVKLDNRRILFNLLPAHVAQHFLMSNPRNMDLYYQSYSQVGVMFASIPNFNDFYIELDGNNMGVECLRLLNEIIADFDELMEKDFYKDIEKIKTIGSTYMAAVGLAPTSGTKGKSAQKAPELPPAPALPC

SEQ ID NO: 932218 - protein, 180 aa, Homo sapiens
MLGPPLSCRGRARRHSLVCALLTGKEVQAQRGIRTRFEQPVLFPSAVDSVVRRPCPGEPVQQGSCLSGAVCDASGRSLVLGINVGPVVAGVIGARRPQYDIWGNTVNVASRMDSTGVQGRIQDEALKTKMEIVRGHTALQPPSLGTAGLQRPWREGLVPRHVTAAIHGGSLRDRCTVEWH

SEQ ID NO: 932219 - protein, 133 aa, Homo sapiens
MVSTFSSKFLGTPDQCQHVRNAPSRFCPERAKQESSSVCHIFVESCPFAVNLNSGKVKRLTFHCTANKPKTSEDWLYLQICGGGNGSLWIGTLFCQKANVCQNTDSGKICLGASNTFCVCWFLALGVGEDVSL

SEQ ID NO: 932220 - protein, 155 aa, Homo sapiens
MLHFPPRTQIVPYAAWVALPSPFLLLSKVEGKADKGDFYNHTKKSRPGLPYAPLTAGVLERRQALGELNVAIWLLGPVKEGPAVPTAVREPKELSDAPCSFPIDNFCTGDLPWGQGKGRREQRKEEVTCGMLRKVKTPLNKEEEQTMTYCLLGPV

SEQ ID NO: 932221 - protein, 155 aa, Homo sapiens
MSQTPVPLCPHFKTGAARFPLAPTKPLNSKKAECLTSLREYQASNPNCQTPRLCFHPSPHIEVHSVFYSLCLSWAALPLPNLTTPKSCHGPVCNSQPFITPFSHSSGPTSPVCVSPSDCSLSSRRQVQCSQTCASEQPANMTQTSTARASSMSVP

SEQ ID NO: 932222 - protein, 159 aa, Homo sapiens
MLPGRNLLVKFNLLALKKKRPFRKVHSRAAPQGKEAAHTRQQEEAPVLKFLSSHMRVTGFFCTEIRIRKGKTSQGLTVKASVADHTEGCGFSSDLDWAYLGITTAYDSGQWKATITAMENYNKSIQAGIWVRPFSNEGLGHPTEEEMNAHIILPCKDIY

SEQ ID NO: 932223 - protein, 924 aa, Homo sapiens
MEWFGMEWTQMEWTVTKWNGIGIRTECNGMEWNGLEWNRVEWNGVEWNVIKWNGIKWNGIELNSKEQNGMGCYRKISNGMEWSGMDLNGMDWNGMDSNGMDWNGNGHERNGLGWNLLENNGIEWNAIVWNDIEWNGLEWNGLEWNELEWNGNEWNAMEWNTMEWNWMERNGKEWLKWIRMEWTGVKWIRMEWTGVEWTRMERKRVEWNGMEWNGLKWIRNEKNVMESDGMELNVVESSRTELNGMASNGMETKGMELNGLKYSNVMDCYVIDSNGMESNGMQSNGMECNAMEWNRMECRGREWSGIKWNGMELNGIERNGMESNGMDWNGMDSNGIEWNNMEWYPMEWNGMEWNRMEWNGMEWTQMDGMESNGVKWNGMDLKGIDWNKMKSNVQWNLLEWNRMEWFGMEWTQMEWTVTKWNGIGIRTECNGMEWNGLEWNRVEWNGVEWNGIKWNGIKWNGIEFYIKEQNGMGCYRKISNGIEWSGMDLNGMDWNGMDSNGMDWNGYGMISNGMDSNGMDLSGMNSNGMETNGMQWNGIEWNTMEWNRMERNGKEWLKWIRMEWTGVKWIRMEWTGVEWTRMERKRVEWNGMEWNGLKWIRNEKNVMESDGMELNVVESSRTELNGMASNGMETKGMELNGLKCYGIKGMDSKCSGREWSGIKWNGMEWNGIERNGMESNGMDWNGMDSNGIEWNNMEWYPMEWNGMEWNRMEWNGMESNGVKPSGMESNGMELNGNEKSNGMASSGMDSNGMCSNGIESNGLISNGMEWKGMEWNGIEPNNGKQWNGTHWIRVQWNLLEWNRMEWFGMEWTQMEWTVTKWNGIGIRTECNGMEWNGLEWNRVEWNGVEWNVIKWNGIKWNGIELNSKEQNGMGCYRKISNGMEWSGMDLNGMDWNGMDSNEMDWNGVDSNGMETNGTEWNGLE

SEQ ID NO: 932224 - protein, 140 aa, Homo sapiens
MWLKPEGVPEKCSKDPCGLSDTSAGRGPGHARRIQRALTCLSLATTRLYQPQPLGRESKLGRSSIGKRGIWEDPEEAWKILRKLGRSSGEREEAGKMQKNSGGVGDPHNIIHLLSFLSVPPYGCNDALMDMNETGHSVTY

SEQ ID NO: 932225 - protein, 139 aa, Homo sapiens
MGIIIALISYICLLVEYFIIYIFLNNVRGLTLGDLLMRCTRTSRLQKETQRSISDCQRWDPTGTGTSGALIEKRQPKSERNLYWSASTLILVRLSDIFESKNDPQRPQNKYQQPTHFTLLKKERKEWQRLAKANRLWKA

SEQ ID NO: 932226 - protein, 124 aa, Homo sapiens
MFLTHSWTLQRITCYQELCHPEWPGKLHSLQKSVSSQWPTNTRAEKFGTLASRWELCGSTQAPELPHLSIILHNYSSSVNNSYYSHFQAANVIAAEHKVEKTCMQLAHGSQTSTLNDSFINLWM

SEQ ID NO: 932227 - protein, 165 aa, Homo sapiens
MFVVFLRFAYPFHAYLPFLSLQLGALIFLLGMKATSPVIFFSWRWAEMQENEWECAFNELDEVYLTLSIEGGDLLYSLLIQMLISSRNTITDIPRNLRKEIPIHFESEEEPNRYTFQVLYGYGALSEYLVLDEMTEGVHEFVVEKSKLNAVVQDDKNYGRTCTDF

SEQ ID NO: 932228 - protein, 138 aa, Homo sapiens
MIDRSTLPPPTRSLFHSVCLLEKFLEVDPGVSQEPFTKPFLQQNVAWHGALPPCFLSQSLRASESDMQGDPRGFISTFRAKSQGSMFFPISAHNQGIQAEMETCYVPGTMPGICIKFPGNQITEVRRNHAKQVRYSSV

SEQ ID NO: 932229 - protein, 159 aa, Homo sapiens
MIVNLAYQLWRNDVPFFSLKGGRTWQKQLQFWMTALQGHSAPALTSAAGKTEIQQVASCWLAQRVLLLAPATVQSRQRSLTSLWLSSTGLQCLHSRNPSLATLWPGLVDSEHWTSHVGMTTFQFLCLKKGQTPPDTDPTPPLIIRRCDLSFSRPQFSYL

SEQ ID NO: 932230 - protein, 136 aa, Homo sapiens
MLPGRPVVGARPPQMFLLLLLLAVGSERYIQRVMDPPRSLHFPTCLQGYLESISAEWMHASFWIQNVEPQALLGVQDTCCWQLENHGLKQFESIERELDGAKSKSNYHADQSQESPLTNDVSKWLTTSSLKKEKSS

SEQ ID NO: 932231 - protein, 120 aa, Homo sapiens
MTPCQSIYVNLQSQNSKSIKRKRFSYLPPRALILEAGKSRIKMPADSVSGQGGKGHWYPRAQASVEMGVCLQNMLALLQSSLWGPKLAQFLEETSPGALHGKNGVYPAWEQLPPGSSHSC

SEQ ID NO: 932232 - protein, 172 aa, Homo sapiens
MAFPTSRVPSPVVFMCKNVMACFLRLYRCSPLVLADSHLLPDWARPSQLLLLSPVVPPCFLVCSFTPEASETTNPPRGTNNSRRAALRAVTLTAKVCSFFPEPARPRTHQKEETPNTSEHQKEQTPDTPPLRTVTLTARKKGCYWELGSHPALTLILLQRDHHGLHRPQGQC

SEQ ID NO: 932233 - protein, 157 aa, Homo sapiens
MFQILRISNFAKLLVSRPGVAWQLSGTFRNPGFNVFAPLSLAFIPKVTSWSKMAAGAPVYMSLEGKRKGKVEKVEEGGRVAEKILGHTVLTQYLPTHSHIAGLPIALTPSGHNQEKGISGSIQTKSVLAWLCKLSKILERSIGIHQYKVPQAKPSQG

SEQ ID NO: 932234 - protein, 153 aa, Homo sapiens
MLVQGSPPKTAGSRHRAQEIQVGEKQQEISRRDFSMKNMHVDSLVEASRKYAKCRPKLPGRVSSPRYAFNYLICPWHYEEVTKGRNGTSNSHESTLVHGHWVYNNRDRAEEAEKTKIKSQKAQLLVAALSHLLPRGYSSQGSVARSVSGLPRR

SEQ ID NO: 932235 - protein, 147 aa, Homo sapiens
MGVGGCIKHPRSLNPQYFLWDWALVAHSRNLLMNICLIGFPCFTASSLATENHQHPSPYLKVSFEEPKTIEDNRKVVLDTFGNGGPEINGLLDLCNHNPSFKHLVYSHQFNVTIPYLYSGTLPTLLGLLDKFSAKKISLDRLVVNKV

SEQ ID NO: 932236 - protein, 139 aa, Homo sapiens
MANGVIQGVAFTELHFTDGWCAIYPCPPFCQVVHFLCRVIGLFEKNKTEQKNLRFKQKGPDPVGCGEEWLHAYRPNNWTPKLLTLMTDSPQSQKRDMDGRRKTEGRKASQEAFATVQVKDDNEPQKRSIMWIRKLRLSE

SEQ ID NO: 932237 - protein, 143 aa, Homo sapiens
MQLLFPSPLSSAELAHGPFSLLFLSTPKSQQIHRDSSAATWWKKIYKPKKEMTYRHRQRGTETAGLVPGAFCHFLFYGGKGPYSMASDDVKKSGITAQLDPCHVKDRMNLIQKTAPSGESADGMSVWLQLPLTRSSGEGISFL

SEQ ID NO: 932238 - protein, 165 aa, Homo sapiens [sequence omitted]

SEQ ID NO: 932239 - protein, 161 aa, Homo sapiens
MCPVRASRLSGIWLRGLNNEVAELKPFGQEALVGWTGCFKTCANELEGRRGQCGGRRTAFTGWGSIKRKHASMLYDFQSTMEMRVFKDFRLEAICGKAVWSRSQRCASHFGECCVLLDLPEIGCGSEVGDWLDFFSGHNPADQNRICFGQDKVKKLAETSR

SEQ ID NO: 932240 - protein, 145 aa, Homo sapiens
MRELPPGNDKHHFRYCFMVQSKSYLTSKSKEGRHAPQSIPGGWSDSDGELTTSPDSSIVRLHTELTASSYPVAVSVNTVPSAPGTSCRLKEILSMLNSSCVYVALVAPMGFWALAQGFSMLTTSVGHPLPKGFSGLSRLGTCQLL

SEQ ID NO: 932241 - protein, 165 aa, Homo sapiens
MRAVWDWLYDDGDILPLNMPITQVMKASQLVIRHGSYRCHSLLGTRKGSPEGCVMGHGYSYLAQNKSLQIFTEFNSFHGHGGAPVGDTASHPPDLLNQNLHFKKIPRQFAGMCTFMLTKRVQLCQIFEEIYSESNMSDQWPVTRPQETLRTCAQGDQAIAWLYTA

SEQ ID NO: 932242 - protein, 164 aa, Homo sapiens
MWSLGKMEEQKNTERKIYKIQKEPPLLEKKSPPTPPPAPTPQPLPPAPPPQPALPSPPPLVAPTSSSPPPPPLPPPPAMPSPPLPPPPAAAPPAAPPGEPAPHPPRTLSCRTPGLCTWPRSRRRRPCVERRTRRLTRDEFVIRAEDILSLKVCILKEWPRQGDV

SEQ ID NO: 932243 - protein, 137 aa, Homo sapiens
MSHELGWIFIFDEKEPKRYLMWDKEKGALTLTMALAPATFLRVNCWAGDHVWFFQDCQVYELGTLHAGSEPGGALPCSQAPLLQGCCSLLVVHSSSYLPGSLPSLELSPVEAADQQRCQAAPSSESSVLEGHWPDAS

SEQ ID NO: 932244 - protein, 128 aa, Homo sapiens
MEVKSRTAVTTDTQCRHLQSIGKRLAFCQNLTQIHTESTMKPWILLLVMFISGVVMLLPVLGSFWNKDPFLDMIRETEQCWVQPPYKYCEKRCTKIMTCVRPNHTCCWTYCGNICLDNEEPLKSMLNP

SEQ ID NO: 932245 - protein, 248 aa, Homo sapiens
MPVTKLGRLVKDMKIKSLEEIYLFSLPIKESEIIDFFLGTSLKDEVLKIMPVQKQTRAGQRTRFKVFVAIGDYNGHVGLGVKCSKEVATAIRGAIILAKLSIVPVCRGYWGNKIGKPHTVPCKVTGRCSSVLVRLIPAPRGTGIVSAPVPKKLLMMAGIDDCYTSARGCTATLGNFAKATFDAISKTYSYLPPDLWKETVFTKSLYEEFTDHLIKTHTRVSAQRTQAPADPTMMQHIQIHKCDNTTLI

SEQ ID NO: 932246 - protein, 222 aa, Homo sapiens
MLSNYLLSHLQLFRLTLFSFEQVLLFCLIIKVMLMHHTPHPSNKQDQGKPRDILENCVRIEVGCEWGEQVQEVAAEGAARIPGSLAGKSLKSNGSRGGIFSKCEDHGPLWGHGVGFEGSCACDVCMHVCTCGNVSVPVHFLFGVHKGSDTLGGSSLSTAGDLCVAVVCVFFISISIMFSTCRDMLCVYRCEHVCIVPTGANMSVGTTCACIMCWHAHAHAGT

SEQ ID NO: 932247 - protein, 179 aa, Homo sapiens
MRIKGNEECEEAGKDVKHTQLHLLHYDDGLLSVAVCGDLEHIAAAAALVLKVSSAFTRPTAVPMGADSWMLNWYISVGDTAMSRDEGSPFPSLCQQWGRGQGGPVSLNVTSSREPSQTSRLCSCAPLAPKLIPLLELLRFYSHFLFILSLGYELLEERDHISYSSGIPSAWQNARLSHK

SEQ ID NO: 932248 - protein, 152 aa, Homo sapiens
MVTLAPPERPQNRKRVGAQSGDGDREGLYSMASRRSPEGLLSQLPWGTSVMQVMASDADDPTYGSSARLVYSVLDGEHHFTVDPKTGEGQGGARGGAVGRGQGRGGTRTTPDVCSEPSVPEALRTAQGAPCAQQESPGSRRGRGSQAGRWTD

SEQ ID NO: 932249 - protein, 200 aa, Homo sapiens
MDFPLLEAAWEIWALEDKDLGVSDCKKTDVLLPPGPLCDPATEGFLPGPAGILLQYHCLGSAPTIHSDSDEGDGAIKYTISGEGAGTIFLIDELTGDIHAMERLDREQKTFYTLRAQARDRATNRLLEPESEFIIKVQDINDSEPRFLHGPYIGSVAELSPTGGLWALGVGDGIKVIPKWSLLGRGVADPLGRDRKDRAC

SEQ ID NO: 932250 - protein, 136 aa, Homo sapiens
MRNEEEKGFQEEVLSLAKSIQPQGLYPGCSLHLAALALATPTLQSENKSLSQGPLPKSPRLVRAPCQMLSLYLSFIVIIACFNEVRSGFPAADSLNDYGEVSVTAGLSFLICKMRVISCNYGNDSNIQLPWRAGIA

SEQ ID NO: 932251 - protein, 292 aa, Homo sapiens
MYTGEKPDECKENEKALKKLYHTQNERTHAGEKVYDCKKCGKFFHEKACLTQHQRTHTTGKPSKCNDSERVLKESCLTPNQRIKTRLKQERKTVKEVTTYTKPESSQKKRKPMTAINVEKASVRKQISDSIRAHTHGRKPYECNECEKSFFVKSNYAEHQRTHTGEKPYECNERGKSFCQKSALTVHRRTHMGEKLYKCNECEKTFCNSGEKSYRCPECGKTFYEKSALTKHERIHTGEKPYECNECRKTFSQRSALTKHQRKTHKKKTIINTLHVQKPASSRQICQTSAKS

SEQ ID NO: 932252 - protein, 149 aa, Homo sapiens
MCGICMEVVCEKASPSERGFGILSSCSHAYCLKYIHKWKGTKLFESKIIVSYPECRITSNFVIPSEYQAGERREAETHPESQGGNEQPGLIEERENNDPFDNNEEEVVTFELGEMLLMLLADGDDELTDFENEWDLFHDDLEDFYDLAQ

SEQ ID NO: 932253 - protein, 199 aa, Homo sapiens
MLFCNVILTLPLLVKRLIPRQLLQLQRQVPVLNHAQDRMKGQEVDARKSTFHVYLIVSAIGSEEPAGAGDKQEPCPLQVGAGAPQAQLQPPNLPLQTQAFCSMGRDIHAVLGVAAAIQTMTEDSGIHAFLGACHLDLRAKSAWYHEDSRKQMDSWEEEDRSLVMLHLQARQGLESGGQAASPVDQSGDLWCLFWPWHGH

SEQ ID NO: 932254 - protein, 525 aa, Homo sapiens
MGRPGGWRAKKVLQLEPEGYLLQSVLLLRKASCGQLLTQLLLCASLAAAAAGLVYHWLASLLLYPPGPSAMVATVCGLLVFLSLGLVPPVRCLFALSVPTLGMEQGRRLLLSYSTATLAIAVVPNVLANVGAAGQVLRCVTEGSLESLLNTTHQLHAASRALGPTGQAGSRGLTFEAQDNGSAFYLHMLRVTQQVLEDFSGLESLARAAALGTQRVVTGLFMLGLLVESAWYLHCYLTDLRFDNIYATQQLTQRLAQAQATHLLAPPPTWLLQAAQLRLSQEELLSCLLRLGLLALLLVATAVAVATDHVAFLLAQATVDWAQKLPTVPITLTVKYDVAYTVLGFIPFLFNQLAPESPFLSVHSSYQWELRLTSARCPLLPARRPRAAAPLAAGALQLLAGSTVLLEAYARRLRHAIAASFFTAQEARRVRHLHARLQRRHDRHQGQQLPLGDPSCVPTPRPACKPPAWIDYRLDALRTESSEGEGKELWSCRDLSCNLGPVPPPCVTLEETAGPRNVFCQQPSK

SEQ ID NO: 932255 - protein, 240 aa, Homo sapiens
MRTQVRVQQGLPGPVLRLSQLSPLRTCKEALGFKVLFAGSMKADMSSDLTSHSLSNPEMGGVPEEQIRKSYQLRGEWKWMASKQQMPASVTPPLTESLWDSLKCMSDTVRKRQENEKKTWMFSIFELMQAGDNSCQSCKAEHPEKWNRRIQAPVEGINESRGVWMGLFLSSVWLKLQTPGVTQWHLQRYAGEKAVPTLHRTPSQRDVGKPPKELALCLLDRLVPNPCLEMEPKGAGEEKK

SEQ ID NO: 932256 - protein, 239 aa, Homo sapiens
MAMSLAAALSWGSKVLTGFSSCCTEKRLPRQGQNQETNEKVTAVVQLGFEDCGPPRHFLEFRYGTLSAAIPAGTIAHALTSSPIYERKLAFHQTRRSALSCLSQSCRCKQQEAEGQETRILDLSPPHIVAQGKSQFLMGPGCSDLPNECDGTGTWNLAWLKKFGQVSIPSAISINGFPSPISINPKVFAMTSRAPNKPKRFCPLTLLSHPRSIHPTPVTSQTTFPNTRTVEGAAVGIGY

SEQ ID NO: 932257 - protein, 237 aa, Homo sapiens
MCTCVFATVRVCVHVCVSTCQRELHKLTRQSVSLALVTGSGESYGFSQANQANSGETMAFAFHTSKELPMATCFSSFSSGSDVTTSEKALLTTLSKMHFAPQTSKFSLYSFPPWHQHYLIIFLSVASGVLVDDLSTPTGGKRLYIRQATAASELYHSGTAQPLALRGQVVKAASLGAHGPCHPFFCSVGATCNLLLGVGTDQRWSMSCNAWTVSTLTNCFIQTANDSPIEKPIGGYS

SEQ ID NO: 932258 - protein, 118 aa, Homo sapiens
MYLSSFDNNQQNDPKQNLKVLSHTADSLWCSPQSCLPWSKTHFPHSSLPSKCPLKPEKHINFENYEPHNISNVCIFIVGYVYTYPTNTHVNSTNHAFFLNIFLSHLQRSPLQKKHSIF

SEQ ID NO: 932259 - protein, 116 aa, Homo sapiens
MQDRVYWQVTSVNGRNRDDDDFGHPVRSGFKHWGYNKILWSFQAGIAGHMNKFTGKITATGNSGKWFHSILYRTCASHSIFQHLLTLNGSPALPWPPVLVMSSPFPTQQLEGSFSC

SEQ ID NO: 932260 - protein, 301 aa, Homo sapiens
MKKKNWGELRKRLFSDHEQWSWVAGTKVGVLPLGQAPASQGLKGQEEEEACPRSPFVAALKCTFLAQAKGCAIVMMREPENTHWCACNTAHRPETVLSSQNLTAIPEVSFHQTCSLWSGQALSLLHDQHSHYQNILVFCSKTYSNMLVLDGIVLGIGRDEFSCQEMVAILPLCSHPKPRKVLIIVGRDGCLAQDHMGPAESLFKEAYCQQMKVKVALAEDSILCCQGEHQWLHLHLIRRCGSSASSRGGLHLLHGPHLPLQPDWLHAVRQNMITRDRELVQHLTQQQLWVTSGEPPIAPNR

SEQ ID NO: 932261 - protein, 260 aa, Homo sapiens
MPISTQATTFLCLCVFICKMGTEEGPARAKTLRFREAWSVQDQRRGQCGHDRVDTGFSPKNKMVSLTLLSDTRFPQQSSRPACKVLTTLLEFLRGEHEPLRFICAYRGHINYFMKCTPCGSAGRVLSSPAGCICGRPTARLMCAALGVVCSAISYYLGRGCIPHRWGERELMGHSLRYLLCPGGPSAHPPWLQDGAGPPTALTMGCGGQVPAECTCHDAECECLLNVTCHDAECECLLNAPAMMLSECECLLNVTCHDAI

SEQ ID NO: 932262 - protein, 136 aa, Homo sapiens
MPQVSSHPELGLPDPDGPESPDQTPEGQPNMLGMTIGAKRALGSWGRAVTSNVPLPGSSSFLRDPNLPAGHRSSHKACARCQREKQHWPEPLSQSVRAQLGTGNMDPVTVVLMVDCGPGWHRQLITVSPVAALWKV

SEQ ID NO: 932263 - protein, 140 aa, Homo sapiens
MQHCRGCLLSTCYLPGTVLDVGDLATNRIPAFMEHTFNRVKVFRHVQAPPLPGQAHVTYENNGTSQRKFQSMRMDSMQCGEQKDLDQTPGVLVTVRLLKGPKLSQKELPRNNGAESVRKDCLMASNRTQLGLYSQRRIDR

SEQ ID NO: 932264 - protein, 150 aa, Homo sapiens
MCTVFDIESGTGTDQLRAQALCRHGSSKPALLTPSVKSQPGRPMYLCQCLKCQYHKASRRGDPVELSKDDIKQATKLVCQGAGGFVCFLLRMAAQLTPHSISMLHLLALERVPWEPRTLASSTVGEPHADSSLLWINPDCLLYLEPPPRT

SEQ ID NO: 932265 - protein, 236 aa, Homo sapiens
MNVTQTEGKSPLYKEIDNNDAADGRGGDGDDEVDAAADGGGDNKVEGDIDDGGCVGSDGEGDGDIDGDCGNDESEGDMMVICGGGDDEGGIDGGCGGGDDESDGDMVDGGCGDDEGDGDIDDGYGGGDDESDCEMVVVVMKVMVMMKVMVILMVVVVLVVMMKVIVILMMMVVVMKVMVILMVVVVVVMMKVMVILMVVVVVVMKVMVILRMVVVEEVIGTWGQTSPFGVFVIELL

SEQ ID NO: 932266 - protein, 130 aa, Homo sapiens
MGKMTGMSLNLDNSQDSGVCMEIGKSGETLYRGWERKGGLDVAYKRKEEEKDGAQGLVLSTWKNGLAWAEMGKAAEEAGKLVNNRNFFLTILEAGKSKIKVSSDSVDDGGLLPGSVSTLSLYPRLVEGGE

SEQ ID NO: 932267 - protein, 142 aa, Homo sapiens
MQGNGNLSRHAEELCSDKLLLSYNHDKCFYETEEGDTDTEGKTCENEGWDSTEATTSREHLGLPKAERGWPCDFLRIVPGNTLKTPGLRDTDLSRRKHDPGGANDSVPPSQPHHPRKTRQMDCWVQRNQGLEWGPDYLSMEH

SEQ ID NO: 932268 - protein, 155 aa, Homo sapiens
MRCLSILLLMAAGVISRAQGLFPMPLRWTTWTLDNAKLSKGLASVSMAPSIMRGSSVFLLALGTVGTSHSCLVACPWPEAGPLSEEASAQQEPPKQSGDHSHLDMTPICPAGNDSRWQRETDPGAHVPAAPLGSSVISGDVSSLLSLILLDIECG

SEQ ID NO: 932269 - protein, 248 aa, Homo sapiens
MLDKKGLNQDCKDKLRAKMVISGKHYLQDLIKTIWQSRDSENQNKAGLGEYLVGGISPALEIVQVWKSKCRREWETIQNAPSYWTLIGSGRDIVSCGHYDKLPQTVQPTTKKFTSHSPKNPQGLFMADKAEVKFLLMAHKGLQDLPRHTGLGQLIFGPRTFAPAFLLGFLFSETSTGLISFKDKIQVCELAYSESPEKEKGDPTGRPRGKYPIGCIWEVWSLGAIRTVSWWHFGEGTGPTTSPSCERT

SEQ ID NO: 932270 - protein, 116 aa, Homo sapiens
MAGMDFLEIHCEQVVFAVGQVGEADGAEQTGRCRGREVSGLRCCLEDRQGLLMDLRWAVTMTISEFSPRSFYNYSQQKVEEKKFTLFFKDLNNTKRFIPHPPLTQASIMLRFFCIL

SEQ ID NO: 932271 - protein, 161 aa, Homo sapiens
MCLPPQGISGGQVGNWGSTQPGNNEALLLNPHPQCAVQPKSWESSLIYACCPLTTAVQSIHKCSQPDLCEDLLRGSGHDSDSQRPFSGMQVTHNRRHVSAPGAAGRRGSADLSWGPLGLLGSIGGLCFLLRGTGAGPRDQVPVHPAELSSASGRRLLRVLL

SEQ ID NO: 932272 - protein, 127 aa, Homo sapiens
MQTHEEGAIYESESRPSPDTKSDTALILAFSASRTVGNEFLLCIRREEYFSGLQKPREENSFYDLKGDEKHILAGHCKCVPCSSQKHLQYLHYLERCRRQNNECRICERFILIFKNATKLEKVLQGI

SEQ ID NO: 932273 - protein, 173 aa, Homo sapiens
MVFATEGRICRPREDKFSSPTASSWFEDRFSSPTASSWFEKSGQRIDSAWTGLDSRIQQIFAPSTCQALYFIKTPKGFWRRNNMNYNTPWLQAAPWEMEGPEAAKEEDDAEASKRCMVLQVEDWRHPALELGAKPWAESFPGQFELRDPGEVPPTSQTRFPALGEEATAASDP

SEQ ID NO: 932274 - protein, 119 aa, Homo sapiens
MPRKGYRNHGLAEMLKEQTNSLSWCCSGNKNYIDFVKAKPLISARLWVTAPRGLLGPHSPRFSETLDAASFEVLLLLSELLSVYPAHPGSGIGAQNIPGHTVRSGPGSPGPLPDLTVPS

SEQ ID NO: 932275 - protein, 132 aa, Homo sapiens
MRVTTPVQVSWNCSQMKAHPLGLTGESVVQWWSADSRHKCPGLNSGFASLLAMSLWQVKGPVYYLISRCPLGESLTEVQEGTQKRGQSVQGLMVYYYWEAENKTKMKGCKKQNTMDIGKSTDTESRFVVVRH

SEQ ID NO: 932276 - protein, 151 aa, Homo sapiens
MALWGWRPVFPWTQNHARDGEDEQGFYTRRQKGTSAKENENTRPGEAAGMRAVVVLRGRFERVRPLGSWSQAWEKLLHVRPGAVALATSTPPGNPPPRGLSLPRPGPGGAHGSRDLPNNPCRWLHKPQPVLQPGMPFPPGCLLLSLLSLDN

SEQ ID NO: 932277 - protein, 135 aa, Homo sapiens
MGTRRCWVPFSGRRPYLRSRLLGREWCQTQTRSCRQGTDFLVSENQSGSVAESVGRQGKVGEGLQTACRGHLGQAAGRRAQLAGTGPGSPYPQLADAQGCGSGDMDVNNTGQNLCHGGADTCLGRQPSDNGCGTG

SEQ ID NO: 932278 - protein, 145 aa, Homo sapiens
MASDRVQLTQDQIAARWMGPDGPVILTKGFYKTSVAPYWLKSRPFTLGRARGGLDFSPTRDWALHFVPLWNAGCCRGPPLMALCVFPSLSIHIRISVPGRQGLSQASECKQHGNSKSVTLCLGVLEVIDIRSITSFSDRQVILLA

SEQ ID NO: 932279 - protein, 150 aa, Homo sapiens
MEPGLPGRRGNFPGTSSPQFQLTVALLDPGPRIARSDLGTQCPRLTRRRETGSLVGVARRRSSPKPMQVKVSGPRPPVLAVCYWCHVLPSVKSSHTPQTWLPETKAGGCLQGRRPEKHSQVHLQPEDCSSAAPNALYRHRLTLPLFLTVV

SEQ ID NO: 932280 - protein, 139 aa, Homo sapiens
MSIAKDSSQASPSQGKTLLTPFFPAQDLVSSHSSRAHPLLDKGLAESDAGRCSSVVIPLSGVLQLKRDTPPISWDDKHLLLNVLVFSLDIASLLTLPGPCASQGRCPDAGSLGVSDPATVGDMKYWLWFNPFSFYPGGK

SEQ ID NO: 932281 - protein, 134 aa, Homo sapiens
MGVTREYVRGADCPLESSIDLCSFIPSMALKALTTIVNHTLLVISKKVIIKVFKHLKGRVVDHPKVHPSCFVNPSSESAILPAAVAHRVVIKFDESTIGLDVAKHPTVHKTVLHAKNYPTPNPNVNSAERESLL

SEQ ID NO: 932282 - protein, 148 aa, Homo sapiens
MEPGPGRGLWLLSLRAPVAWTAPAPFRTHTGLLHSPAFRVVMAAPSLPATSAGPLFPRIYWLLKDASKHPMMYRTVPHNQESPGPKMSMVPRLKDPVLELAQVIETSKYLDLEDVTGASSFFLNPREAIWVLHCGWENGTYVYTWKMK

SEQ ID NO: 932283 - protein, 134 aa, Homo sapiens
MWPSLRWVPIVKLVSAQPAECKCKSTTPGAASFAVIDSCLTVSSKNVVFEASPSMLGFLGPGGSGIPGSHFDLCIPNTNAGHFSLGDTLIKRGSPGAHGACILLGETGENQARDTLVPGVETPKTLFLLWKDTN

SEQ ID NO: 932284 - protein, 233 aa, Homo sapiens
MAEGEGEAGTSYMAGAGGRENGGRCYTLLKQAGLSHLLRTQWLVSCDGWKLEACKYQPGFSDESPPAAFSRTSAPPPVPLSPHRREFPGNLLLGAVLGNDGKIPLKGHILKVWLVDLPELYRCQKSIPCYNEVTSCPTLPGTADPQSMKLTILKSGKFQAVEDGLVTFAFQKAGWSLSLGPGTHTAPVVEGPSSELLKEDDGSQRHLILTHVFSAFWNLRNLIYQPPTWALDL

SEQ ID NO: 932285 - protein, 171 aa, Homo sapiens
MIISPYPKQSCLFMSLVVYWLSSSLKIICGFQGIRPLTLNCQIDCHNGYFMKYLTITADNSQGNQKQEKSEKQSQPGGAYGDMMTQCNVGTRMGAWNRKKISPGLQGQMGPQVHQEKGEDAHLHKEEVGGAEHDCQEESSCQGGLSPLPCRLPKIKASQKKKNAFLIPSEV

SEQ ID NO: 932286 - protein, 180 aa, Homo sapiens
MEVKWTSGYRWGAGDSFRKSRCRSGTSSSHFKNIIHQQCLEHYPESPPGQCSQVLISAKNIHLANVHASASLPECTVLPSCFQSLLKYFPTPSLTLSNLVVFILQTNRSFENVNVIDTVTFLPLKLLPSLAVLLWFSGCVSGCWDKVPQTGWLKITEMYCLRASEARSAKTKVLAWHCSH

SEQ ID NO: 932287 - protein, 145 aa, Homo sapiens
MHAVCHPCLCLLLILFFHLPSHLGAPVHVLSSTLLLCTTLPCPCQEPQVIYESSLSCRPQPICSSCIIFPQKLLSTPQPPPSYQPLPQPWPRKLKPGPLYPSIHPSVHPLITHPSINRLALSTHWVPAEHTGPKGRSSESRGVTE

SEQ ID NO: 932288 - protein, 163 aa, Homo sapiens
MLCLLSLSICRKSGKGTLGFTCFHSQPTHTPSLARDLSHIEPTMVLKRALHRPPSCQSPWSLFPPHFSWPIGVLIGVPILAWEATVSSFRTLGAPGFSPTHWAVSLFHPPLNTDASQSSVLHRFLPCPFPKGSFLHPQDICGHPLSFLDIELSPELGLAHPCT

SEQ ID NO: 932289 - protein, 135 aa, Homo sapiens
MGPGVCLSLQRYILGEPDTGDTAEDARSPGPHKALKLAEETDKKNQVVMRVRANMQDEGDRLEDDLSLRLQWVREGAKPFRRDIQGRPLGKGSFLSEISMTRGPDLMRTYENSTEGDGAKPFMRNRPMSPMPRAQ

SEQ ID NO: 932290 - protein, 136 aa, Homo sapiens
MADLADMLLDAFSENSVYTHAGSRGWGRQNYQGLRRQQDQEGSSLAGDHGCRGAMVMVIMVGAGIQGSAWLSSCPHLQYSSYHSLFASAMPYWLQSYHVVPVHASESLHLLFPLFAKPATAFLCFVNSYAWAVACF

SEQ ID NO: 932291 - protein, 126 aa, Homo sapiens
MGCHFHDWVAKDCDFRLASRLSLWPSQLAHFDERLPLLRRGRKEEEEGDKKKMFVKQPPKVKRKNFMSKGQVVGGHTWVKGRANPSIRKDAVCGYNTHYLHDSCTKSPDSTITLYNQVLHLDCLNV

SEQ ID NO: 932292 - protein, 157 aa, Homo sapiens
MPEVSSKLGCFSYKRGNGRCTSPEVRKGNVKTRRQADTEESSRRSPKDELRLDLRQDLVSPELNVGHRWESLEALQELLMSCRGTEPSAEKCDSEASVIPKYSLPSAHCEDPLPQGFQEHRLQRASHTFTEMNHRKPCLGTQTSNFKIGKDKCISAC

SEQ ID NO: 932293 - protein, 136 aa, Homo sapiens
MLERAFFFFAGQKFDRLCNLFNSSKDEIHRKVLPGLVQPLNSVFETQVLSDFLLCQTQSNRLLFMPHLSELDLTTPIRKPVPAKGSRIAVIGLGQESTNFFWKDPDSKYFRLCGPNGLCFTLQFCHCSVKAVKGKV

SEQ ID NO: 932294 - protein, 166 aa, Homo sapiens
MHVYHQDVGTECELDLHLIVKVRWHFKPKRELADQIPVLSGARKMVYMGKRASWVLDIVTGNVSLETEDVTRKKGQRCTREVQGIWKEERLCQVKTSPQTSLGETHAYLPHPDQGADDDGDGEWKISSSPHLPKLEQLLLGGHQMVGPCFLYCSESQQKTEFHSDV

SEQ ID NO: 932295 - protein, 158 aa, Homo sapiens
MKRVLKYTSLVPHILNFNTLFRLPITCLHVADALGSPSADAKLVPFSHPPPPLPCFLQTRHFFLSCLCLHYQQASRDYKANTDRHHAEAKENLLQAVLACAQNQLLFGFLLLASPSFLQSLTKFVHFTPSLSPGVSFLQPTDSAHQKRCTACCSPVFS

SEQ ID NO: 932296 - protein, 155 aa, Homo sapiens
MWGSLECPCKSLSSTNSALTMSTSEDFSPMLKSAQGCSYPAHAVKAGLSVKKCTELPKPAEQRPTSGIQTAGNVGSKKAIRLLFTADKGDLRRVWLLDAFSPSQTLSKNWDLEDFVQSNQISFATDGILAILAKGWLSYLSAKSIFQSGLLGKLA

SEQ ID NO: 932297 - protein, 159 aa, Homo sapiens
MLLARWFLSLASPSMLVCFHTAVKDIPETGQFTKEKGLIGLTVPHGWGGLTIMAEGKEEQVTSYMDGSRQREACAEKFPFLKPSELHAEKLGDMTKEPTNHNRWYWLSEGSNLETNLCTNVVKGGKLSLLGTIDQNVRCPDQTLPLRMSVREFLHEISL

SEQ ID NO: 932298 - protein, 152 aa, Homo sapiens
MHSYTSQLNIDEEGAWFPFTFRHGCCLQAEEQGSQSKSQNLVSREADSVAFSLWPKIREPLANRWYSKSFLRPHQKPSDAVAMLVVCRTITQINPVFINYPASGKKHMTQSWTIHSMVNDQPGTPVKESELKDIALVFKKAMLDNEERYSWP

SEQ ID NO: 932299 - protein, 145 aa, Homo sapiens
MDSFQIFNDVCFLASQQARIGYTLIQYDWCPYEKRKFGCRDRYAQRKDHVKPQGELHVKMKAQIGAMYLQAMDTKIADESPAGESSSKNGLIKLASEIGKWVLAKDYWFAAVDITIKSFRLFVLGCPCTEVGTLLFTFCLVHLQI

SEQ ID NO: 932300 - protein, 174 aa, Homo sapiens
MKQPVACSISCEQLSSGTPSGGFAEFALTGIDDCKSRWRHKEVVKNDSVSDFSNPTDEEIHPRLKTCSQKDLYTNIYSSFTHNSPNLEKSHVTINRRKNKAQPSRAMKRGPPSSRPQNGRSTDSLHCVPGKAAGSQCQPLRATMGSAPCRNSLFASVWPVCETWSQRLFWSFKM

SEQ ID NO: 932301 - protein, 153 aa, Homo sapiens
MLLLSIWMAFVCSSTLYAREQADCNSTSSLMIIDCFENIEPLCVRDSTCNIIIIFIMTPRQDLGDLEQPKTWAAQKAGTEGSIRDSRCKEPVAKDIMWLAGKRKGQPGERSFWKKYGPRGPEPTSQEGLLFGLKLLLLRYRANQHDLGHYSKL

SEQ ID NO: 932302 - protein, 152 aa, Homo sapiens
MKNRAAQQDRKVNDLCWVLLLTSHVTLEVSKIKRTNSRGSKLHRTYSLQGLSDHAIQGSHLEDVKSKHIDNIPFKALGNSKSSNVKETERKIASPGWIECEAAVKCKEVDGYRLYFGSRDDGISSLGKRVEEQRRIKDDSKVSYLNNRESQY

SEQ ID NO: 932303 - protein, 138 aa, Homo sapiens
MVGLKELEPRLESSQSQGCDSLFGALWFLESPSFQVLPHSLVPAGEAAALQTAGACAGTWSCPPLSNSQHVWLCTVAGPYTCSHTPCHSTPVSPVAGMGLRPVVKAEYYSLVYLHHTLLTWTSVDGHLDCFYHVDLPF

SEQ ID NO: 932304 - protein, 153 aa, Homo sapiens
MWQLLSQGCKCSVFVPSGMVSTSHYMKRVQFHSFTSGYSVFLTSFVDETILSLCILGTWSKISFCCASDNMKIKCAGDKNGITKTSQEAKAHRWSLWHADKWPLKDVQVLISGTCAYVVVKKPLQMKLKSTRRIDDPSIITSNKEPANLSAKS

SEQ ID NO: 932305 - protein, 185 aa, Homo sapiens
MSPKSLLGLSWNVGRERLSGERSICESLTAPEAWCSGPVKDPSSTSSSHFWDCLSFLGLLQHIVTNLAPTYSELGKAALAILGAVPIHTVSANSTQRTQYFKKPHNASASLNTFPMEYRNNSCLSGWAGSRESQTGLEILATVPHGILGAGKGENSPGLVDLQPESWADVDSQGMLGSCHQKTGG

SEQ ID NO: 932306 - protein, 170 aa, Homo sapiens
MPGPSVTVQLHHVRQSTMLPPPQLLTLAWAPGKYSCSLSSPGCGRSAAEPLWSHKIILMPLNPAEASGNTVRVLPKAAKLARKHLKLENRGSNYKVHCSMTGQSGYWDYLRQSHHLSSSIERGRKQELVKISKHPAMLIIPSCDSLLTSSSLPFISVFLRPLTQNLLFCS

SEQ ID NO: 932307 - protein, 125 aa, Homo sapiens
MLRGDQDECESKCGASTPKRRRESRIKPVRCSCTQRRDEGGREPSEETTFLILEHELEEMESARWIFGGAESRVKGMTVPRLAERQCYHDHSETQTDRAAIILNVASRQASGKRECGLGKSHGHP

SEQ ID NO: 932308 - protein, 151 aa, Homo sapiens
MSSPDRLVLDANENFASSQVFDLEEVIYPSLSLHFLTCKMGIKMKWDYLCKVLALVPSSQLVEAVLLLVASREQHAQGLHGGMIGAFEEYQGSHGRQNSRAGSRFSFSDYSTKQESRCCCEGFAVEMKVPSQLILGYENDPHGPNLIRGAL

SEQ ID NO: 932309 - protein, 156 aa, Homo sapiens
MLSLACACYPKALEKAAWGPHPRTPVSTPRSLPAGSCRALAPGKAGGTAAEKLRGGKEPGEFCVTAAWQGIQERLEAQQAGPGSARIKAPGVLAEDAVPSPIRGHCQPFASQMRHSRAVGHQPGATLGDSRTQARIQLLNVLPCPTPSRLNCGGGV

SEQ ID NO: 932310 - protein, 168 aa, Homo sapiens
MVAAPWDWLLLSESGTWHFWQPLGAIFKPHSWFSSWLLIGGQLLSGEMLSKKAICSCKKPTRTGSLLVNISFTLCFSDRNSKSQLSRIKVYQASGHTDCCLSVLQAIQVSSLFHSTTSSTYCVPGAVLSVEDRVVLKDNTVLAAKEPTVIMTATHTSSGLCPCNKYHT

SEQ ID NO: 932311 - protein, 146 aa, Homo sapiens
MPPQAKELQGSLCGTGPSRPDHPSPRQPLQPHPATLLLVHCPAATLATLLPPLPQGLCTAAEALPCDLCSGNSSIPSHSPAKTRLLGLLLRGSRTRGAWGGQACIPTPALSPWAVRARAGYLTSLCLGVLIYKMGTKRIYVAAGLL

SEQ ID NO: 932312 - protein, 145 aa, Homo sapiens
MSEYCQAASVSRSRCPGNVGPIPGIRLPEVYKQHCRYPVEMHIPGGTADGLGWDTAREVNPRAPEACWAAWLCTESWNVVPKSREAPASCPQGHPVFAGSQMGTPHNRAGTVNADSDPEGQGGPEMPPWYKVFIPLHSKPLLGAV

SEQ ID NO: 932313 - protein, 154 aa, Homo sapiens
MAGSMDVSVGRPRPLEEAEAALSGTPDPGEGSGQGRPSQAPYGPWFRTSLGPRGQRPSAGIPKDPLGPLGLLSTSVPPGEESPTKTGVTPEGATKSRQGEHGVQALPEPLPWAVSGELLWNFLSMQAQQATVCTTRLLPVNLQTLMARLFAYVF

SEQ ID NO: 932314 - protein, 137 aa, Homo sapiens
MTFLRGKGKKAACLVQRVFSILDTVYHTIPFISLPKDESTIKQNYCKHILNKAAFTLTFTSSPSFGTASLALPAGSLTLQDRGSQEHPAVLQASAHGHDLPGCSLLPHTCCMPAPGPLILSKSYPSFRKPSYENDIH

SEQ ID NO: 932315 - protein, 146 aa, Homo sapiens
MSCHQQLDVKLRPQGAKTCKSYLASSSRNLWNGSIHYNAKLLVWPEDSPFISEPVSPAGRVKIAPCTQWKLEELVKFSAKAKALKSSAVLLNLGIWGPETPWSTGPNPLAILQSAINQVLMAKTPANKELEQHKSRKQAVVKSLTD

SEQ ID NO: 932316 - protein, 184 aa, Homo sapiens
MSVLGAWGALSVEGHGVACTLKHAQQCGLCEAPQDDARVLIPEPGTWWPRCHHRGPSKRKEEVRGKDRGSEPLTLPPSGLCRHWPCWIASPAAGGIQLIVAKATVPRGGRGGQFHLPEWAALESCSGGCIMLRIHNCPRNPCFTGALAEEGFHGMQNPGPAGPSPSEVMWLPVGGCQSAVIRGS

SEQ ID NO: 932317 - protein, 146 aa, Homo sapiens
MAEAERHISHGSRQEKRACAAKLPFLKPSDLVRLIHYHKNSMGKTHPRDSISSHQIPPMTCSNCGRYNSRGDLASGPIMGRAAITIALVINIQLLITYANSVASLNLSSENGVFLYIALSGCKFSKLLCFVSLLKLNAFNSTQVTS

SEQ ID NO: 932318 - protein, 169 aa, Homo sapiens
MGPACKSPATLAASGLEAAAHPSVPVPPRSCPLRLLRKPEAMPCSGSSTCEGEDLGGAAGAVQEREGRNTWGACEGEEVCALIRADTPVKRQGHKSRGTTSIAKRAWRHLTWFVGHGRTIFQDEGACISHPADEPNLARGGKGWGECSRLQPQLGQDWEAEESQGVWEG

SEQ ID NO: 932319 - protein, 119 aa, Homo sapiens
MEMSSGRPDSEPVLITRAGTRARCCLRWPRITCQSELRGCAVPALTLTEGHMPPHAEGSWSNGGNYSLQVTANKIHYNLTYKCIQGGFQLLLQNIKTLEVVVLILTTRKKPNKLKINNS

SEQ ID NO: 932320 - protein, 150 aa, Homo sapiens
MPINERRPHLMAAMLIVPRLYKKHGTSIRFWGGHKLLLLMAEREGELMSDWFERDCVSSSKRWFLERWAFSRGSQNNEGDSGDTWTEQQGPGSLWEWAQHDQTRLVPGSFWLLWEHRLYGAGPELGDRGGHGAMGQGWVLPTTQQLPPGR

SEQ ID NO: 932321 - protein, 162 aa, Homo sapiens [sequence omitted]

SEQ ID NO: 932322 - protein, 215 aa, Homo sapiens
MLSSLLFYKWRNRGPGAQLPKCTQQWDIDTEEVNPERKQVVPVPVVVLSAGKDLTGKSSTEELRTPCDRNGVIVMPGILSKGPCCIQDCEGLESRLDFQVGLLATKAGAPQRRLLQGRGCAAQPGPPTLPWEQVAGADSQPGAWESCPGPQPGAWFPERPRFLGPTATAARRRPHCRSREPAINSSTQALFSVLPTELGLDGFNPRALAVSISLC

SEQ ID NO: 932323 - protein, 153 aa, Homo sapiens
MVSKGHVSAPPFTRSQVLVLYPGRMSPQNWQPSPKSSPGTHPFPPRRLSASTTINLPSTVPMVPKLLMQRGARRLALSCPKLPLGLPLAPNVQRGLRAAGGWEQGEARQWEQLPLTPWNVQPWLRLPYCSLRHGSSCSRRATSAITTMYGLFL

SEQ ID NO: 932324 - protein, 128 aa, Homo sapiens
MRFIMKIFKNTEALKESASTQTLPAEAALTVGCARCHSSIRLFSVPAASETTLAVGGGFPSTGRAFPPPLSGTFCLCIKASTILPEVVHALVAALSAPHTPCSVLTADLSPRYYYYSPHIPWAEIEPQ

SEQ ID NO: 932325 - protein, 162 aa, Homo sapiens
MTTSRGPQNWQPSPKSSPGTHPFPPRRLSASTTINLPSTVPMVPKLLMQRGARRLALSCPKLPLGLPLAPNVQRGLRAAGGWEQGEARQWEQLPLTPWNVQPWLRLPYCSLRHGSSCSRRATSAITTIAPSPDIANPSLYLQNPPWVLHFPLAPGQGQCPLF

SEQ ID NO: 932326 - protein, 140 aa, Homo sapiens
MRAMQGHVPQAPFKEGLPNCGSVLQKAPNSTSAAAFEEPDDDSTFSLSVQLRGTDINAGIKEGQSSVLSLIFPNLGAFRGPEAPAEYRRVEANADAVTIAPGAGVPQWLIRRIHQADGNWGSREGEGRRAVAFGALGSRV

SEQ ID NO: 932327 - protein, 143 aa, Homo sapiens
MLTSRAVGSRGTPGDDTGERERVRGEGWPHSHTTDPGSVSLGCHNKRSETRGLKTAQIDSHSLEAEVKSQGVSRATLLPKPPSGELVMSYEQSLAPERHCVNASADDMISSWGILTGVGQTALTTLCAAHSELCGLEQMALHL

SEQ ID NO: 932328 - protein, 123 aa, Homo sapiens
MGAKSHFTWWQAREACTWELPFIKPSDLVRLIHYHESSMGKIHPHDSITSHRVPPTTRGNYGSYNSSARGSDSFTCSSVRVIVCLRLEHPSEHPNGKKKMGKYDFDANANIDSEPRASGLAVN

SEQ ID NO: 932329 - protein, 160 aa, Homo sapiens
MAEGQASSLCHLGAVGINLGSEPPGSQGKWKHDGSLSCHHHLLMTSMCISPVGSGLTGWRKAHGGLLAQSSGEFTQGHMAEPVRCKPRSVLTPKPVSPPPHRQLFPSGDCKPSPTWGCQTRQRNWMSGPGRPEEARVCPTQSRDVPDHHAGPPPGSNKNA

SEQ ID NO: 932330 - protein, 130 aa, Homo sapiens
MNKAAVSRGRGRRFLNNGTGHKCFPEQPGDLLINTETSPGSHAPTTRTGPPSRAQATSPPPRSLQAAVNVSSFHQANGRGILAAVRKRRSGPDMGVDPRSGRQPSTETCKTAPKSINFENALEFLAEERC

SEQ ID NO: 932331 - protein, 134 aa, Homo sapiens
MKRKQATFLTGQQKEKCQAKGEKPLIKPSDHRRIHSVSQEQHGGTTPMIQLRAWCKLSMHLPFWGLENSGPLLTALLGSAPVGTLCGGSDFTFPLHTALAEVLHESSIPAANLCLDAQMERLSGELEDESILYY

SEQ ID NO: 932332 - protein, 170 aa, Homo sapiens
MLPASSQQWEDDGVPTRAQYCQGGLWDELELGGLFQFRHFLNLEGKSHPGRKSTIGMHVAQTQGPRMYSRIPTSSLLGKENSRTKLRIHLWPSAEKGVFQLKYENGFQKVFQKQNRPHFRCGIEGPSNYLGPSGHVTLICLTKVSWSTNRFLTSLSGHNIWSRETYFSVI

SEQ ID NO: 932333 - protein, 171 aa, Homo sapiens
MSLQKKLFQSCCKTSAGPGRSHFQRFQATARRCHENADASHARVAWIWRRSLDVRADGPGPWRVSSSHLHLVLAPAAECVVGEGNENKECPPGDAVRVAQHLLCTGPMSLLCQVCELAQPCGEQTLGHVLGDMAFDTRRPLLSSAHWPWAVHSARLVPLNLTTFPWGRDGR

SEQ ID NO: 932334 - protein, 195 aa, Homo sapiens
MAGGDVCVSPKRAYRLVRDAPTCSESCWLAQNGRWMLQMQLSTQMSVINACLPWKRGSGVASAFQPQTRYAFSPELTVGKLARTQRMESRLCEHSKQRYLRPWRQLGPGSRSLGYTWLLAATKFAVLATQAWSSCGPCGLLSRAGLGMRPQRGHWSREVERQGSDDIQQPDPDVKPSLSSGTFRLHEPTDLPASS

SEQ ID NO: 932335 - protein, 246 aa, Homo sapiens
MGPAEWEEQQGAFESRPSSERGLLCTSILRTFSKSTSRARYCCEGFACIHLWNPREHLSSPHTHLSTWAETILLNAREIPCKKAACTAHGVGTSWFPELNDLGELSKAAVRENPTLPIRYRTRSEASRCWSSHDRARDLFQEGGMAPRSPAGRLAASQNEIESLPATQFTCSLGKCSSAILSCFVEGTRMIQKLLDLVCKAVTQGIKLLSVSRFPDPWHLLPFEFSGDLIDPTSSGNALRPLEVAV

SEQ ID NO: 932336 - protein, 160 aa, Homo sapiens
MPADYLTGLPLAGLESTSACNFPSLEHVNQLLQICWLNFRPPAQSTMAGLRCQMPKEGQGLREPGVDITLICHADDMILIRPEKQKVVADMLRPLESHTRTRFRGLEINLMNIQGPVTSLKLLRVRKNAHVQVEMISVFMCVCEYVPVPVCARACVSVVW

SEQ ID NO: 932337 - protein, 234 aa, Homo sapiens
MTWEVLVVWGDRCAPLLTHQPGQLQGHQAFGGDCRLRIQHAGRGGLLWMMMAASGVGGLLSSCTDPDLLLHPHSSPVSRGAQEGTELPHQGAALGGSVTERSLGAMCEGTVFSFVSALREREMMKTSPWLHCVLAKPQGCPHTRFSTWGDSAPLGDNWQRLETFLVITQGGRAPGIYRVEMGCCETPCSARGDPHHRGSPAHPGNIVEAEELFLWLLKRPHIGCLKAAEKYSPF

SEQ ID NO: 932338 - protein, 159 aa, Homo sapiens [sequence omitted]

SEQ ID NO: 932339 - protein, 149 aa, Homo sapiens
MRVLRSALFVFIFKQPRYVPRGRTAGGYGNSISGYFEDASFFIAMAPFYVPTNSAQGFQFLHVLISTYFVLSCFYDSHPNGCELLLEMLVPPQHPGVCDGQVLSGSCGGSCPWTAAQVLEPFQYFCEHLSPCSNSHSVQNWDMVSISCK

SEQ ID NO: 932340 - protein, 292 aa, Homo sapiens
MIIITIITTITTTITITIVIITITAMIIIVITTITTTITITIVIITVTTMIIITVTTTITTIITITMIIITTIITITTIIITTIIITTIITITTIITIITIITITIIITITTIITTIITIITITTTTIITITTIITITTIIITIITIIITTTITIIITIITTIIITIIITIIITIIITIITTIIITTTITTIITIIIITIIITIIITTIIITTIITIITTIIITTIIITIIITIITTIIITIIITTIIITINITIITTIITTMIITIIMAAHIYMEITMWWALALFQDFKHN

SEQ ID NO: 932341 - protein, 306 aa, Homo sapiens
MAGTTPRPHPALQAWDPAPGTLRQGHRSPPQHQSQQNPWSQLLKTYVLAASSHTPGQATLFQASSMKSADPSLRGQLSTPTGSPHLTTVHRPLPPSRVIEELHRALATKHRQDSFQGRESKGSPKKRLDVRLSRTSSVERGKEREEAWSFDGALENKRTAAKESEENKENLIINSELKDDLLLYQDEEALNDSIISVPVAPPHVACLPLPARLSLGPSPWASLMVLTPQPQPLRLLLSLEVCKAPPRLKHRSVQEATWPLCGNTWPLLLTQPYFPYGSVPDANTIGFAHAASLPAHGLRETKSSPL

SEQ ID NO: 932342 - protein, 122 aa, Homo sapiens
MKSFSHCWAWTLVFRLHPVRRQNEDQRPLGDLYTAVSLHAVISGFATGWMVHDIKELKLFTNLLSQNCSNGSKENWNLQNAFPSCSWTKYKAQRALTVALKLLSECLEMVEDTRKSAESFPD

SEQ ID NO: 932343 - protein, 126 aa, Homo sapiens
MKPFVKVSLSDSGSVQDIVQFPWCINQCMWVCMASVWKGHRHGSTIQDPPKQMIFLLTCGQKVNSSLTVTHNAYTTHLTSSHHLGASSSHISTRRRQQYCPRGIQQGLDKFWVVATEGRKVGVSGI

SEQ ID NO: 932344 - protein, 164 aa, Homo sapiens
MSWLFLKLTRLTRLFHPSDSRCHPGAVEGTGHSKQLEEKHFYNKEAFEREKPFESQFPLCLGSTVIWRGPNSYCDHMGAFGRQGAGRGGCAQAHMPQPQPLYPALQRQLPKPSSPFWLLPHVYCVYQCGHFENVTETESSTVTLSQALVASPCSTTAGSWLVSN

SEQ ID NO: 932345 - protein, 140 aa, Homo sapiens
MMQGASLHSPFCTQVEVIETRRQFPQCCSRDKITQFGAVLYSSVRIDLYGEVATDANNNWLQMSAWSCLGLDVKTKKPIAFTNIMTSKMVQCEDSSLSLLSTKVLITHISQLNLSKLLVFPQLLISVIVCKELFRSIKQC

SEQ ID NO: 932346 - protein, 161 aa, Homo sapiens
MASQVRTWPRPCQCRKQPPFLPTHQIMRKRQCTLMKIILTQESVEVLPPLWDPMFHVRQNWVQISAKPTKTYIEYLLSAQHYRVRLKGTRSCGCCLQNFTLFGEAEVTNRLQMTPSLSRSPWVLNHGLLCIFSVSNIPTGHTEQWDLRLFWKISGLPFAQS

SEQ ID NO: 932347 - protein, 163 aa, Homo sapiens
MGTCGSHLTQHVSESYPRLTEKTLRLVNNARTSIKGRDKGSEGTSAPEFMSETPVRTLRTMKGSWRSKVLGVCEVPMILCKAGCEFIPSKPSLKAFCALCLPAKTRELKPRGGMGGLLAMAEPVVISAMVFIIVFEAVVHVTNSTSDTLVFCKMLGLESPTPG

SEQ ID NO: 932348 - protein, 185 aa, Homo sapiens
MAPMWPLTTNNLPLSVFLKGKGWKGKNPRTYYIPFLPLNIHEDFYLKEFGIEGRYSTQNVCMNAHNNTIHKTQKEITSHKIGDRDHIHMEGAFWICIHLGRATHGLCDTFSSMVNISTRTTLQTWTHNGKLAYMQNSKTEENGFNCGSMVEIIHKAVPAPKLLEILVAWMTIPKENGKCIAHGSG

SEQ ID NO: 932349 - protein, 151 aa, Homo sapiens
MQTQHVMRMGLESGQGTRVAETRFESELAQEQPCWRSSHTNHIRPWTSGALDTTTHSSPELQPKDAETALPGDTDSGQGKRVLQLLVSGQKTRFCGQARSSILVDKVHQDYVEWAGVISANTKQGAVTIKNKQTNNNNNNNKNRQQSKLNR

SEQ ID NO: 932350 - protein, 146 aa, Homo sapiens
MKALRLQRLWLWLSIVLAPWLQFRAIKSLQLAHWNIHILDKKMENPECDLPGAPGFNQFLAVPAGPVIRRNIMASMAALEMNFIEREFTLRFMIAAMKRVHILSFETQEVLGFFGLSCSSSLYNLDSNSSSDRWLTNIFSQSVTCL

SEQ ID NO: 932351 - protein, 132 aa, Homo sapiens
MATEVLTTVQKKPEVKNVFTLLIVILVCDGHKRRGNRGRFPFSPLSRQLVSLMCTQNNPSFVHLFTPPSVSLLWKYYGTQGSIPDFFRHTKVTQDCTETLFSGRSHSSEEEENICLNKHRARGVPLEVCPPT

SEQ ID NO: 932352 - protein, 140 aa, Homo sapiens
MSRWHPGHTVSYWVGGVCPVASLLESFYLFISELTDACPGHAQATDEPTKGILSLCYSGFDSLHLRFYSVFEFFVVFISVGARGVKFLKCPQFCLYWWLGLPFGLVLRKNLHLAALSAVILLYRMPGTCRKLRSILKSYD

SEQ ID NO: 932353 - protein, 149 aa, Homo sapiens
MGCSQELICSREELCLRCCASNLCIVKELRFLDSKTQELDSCPCEAISGNRGQNDTFIDQCFGFAGQKITLSCPASALIVDSPSRLSSQPTHLPFSQGPAVSYTLHPCQDALTALFSHSSHPSSGLGSPLHHHPPILVPRGLTLLKIVM

SEQ ID NO: 932354 - protein, 141 aa, Homo sapiens
MPISGLCQQKNKAMCAGALLPAPLYDMIIADKRNDDAAGSGDDVNCDDDKNGDDDGDDNNGNEDDGDDEVNGDDDEEANNDEDGDVTGGGGDDDNGDDDSVMMIMRVITVMVIVDTCAECAGLLHRYTCAMVVCCTYQPVI

SEQ ID NO: 932355 - protein, 156 aa, Homo sapiens
MSVFTCAYVSFIPKVHTIPTIWNVSWELPTPASHFIFKSVIEFPRAHHSTDSSSPFQTSSSALFSVFPPSTVLLGAPLVDCCPYKALQGAVISKDLCGQASGMHLGQGFCWTSRSWGLESVTTKKKACNNWESLCRGETPYVKSTCDSIEEALALS

SEQ ID NO: 932356 - protein, 185 aa, Homo sapiens
MICKREPLLSDDCELGLGSFSDFGTEVSVLLGSRADLLLDWSENIHCPASQLADCGKLDFHPAALGGGCWKLHRQSRHGWGEGTCLGGTPGSGFHMEEPIRLCGSLKVPQGHLEALPKYRLLGLTPSVSDLADLGRGLRAGPSNKPLGDADTAGLRMLILLVCGCCYCWSEDADTAGLRMLTLLV

SEQ ID NO: 932357 - protein, 122 aa, Homo sapiens
MQQQEDLLIGEKEEPKALDFGYHFLALQPSKFENVFSLNELVCHLSCRAWKLLKANETTYVKHLEQLTEAPNLTFHSCAPPEPTEKSPKVSCAHLTGLSGALSSRCRDIYFHSRRNHFVADI

SEQ ID NO: 932358 - protein, 321 aa, Homo sapiens
MAGAPAAILDYEKDGNLSLVSVPATLNEKSVVHNILRHVYSFIHLLTSCFLEMYFVAAMVPGLEIQTCSCPPGVDSNTLFNDHSVSENAREADSRVSVDLYSPGCREKCGHRCVKGLCQANLYLPDRLSDPGPMRGCKTGVFTCGDIPGDPSAADPGGGHLQMTGVFPCGDTPGDPSAADPGGGHLQMTGVFPCGDTPGDPSAADPGGGHLQMTGVFTCGDIPGDPSAADPGGGHLQMCMFPQVLLRTVVSLTRKGIPTTVTKCSSFHWSPSDLGCNSCTIYTSHALLKGLERIMEGPMQGKLQGNRSRGRETEGADAGGT

SEQ ID NO: 932359 - protein, 140 aa, Homo sapiens
MIFPDVEFQLIRQRVLWGKALAMTGLGRSEKSRTSKDGKADCQKHFNSQGLAARVKILLESGFLIWEEFREPGIIHIRKLVWSIIIQFKEKPPTSKPAVMKYNIFSTEEMGVPADPSCFPYICGSIWWTILNTPHLQHRL

SEQ ID NO: 932360 - protein, 155 aa, Homo sapiens
MPDLLSALASHMDRVCCFALALCACEREDVLAMGETMGSTDLGLSCNPNMGSYQGWKPSCRCKGQVWPAESCTTQRWQPQKSPHLCDGAVAADRRLVSISIGPCLAPAAPATVCSSGAELGLCSPEEGSAPMAACPNYASTLKMPGATTLLSYQK

SEQ ID NO: 932361 - protein, 335 aa, Homo sapiens
MGSCWSPDSFWWGMVCGPQHLAPLWNSLLLDFYGWALPVSTLHLSGVDADVDIGADAGADVDAGVGACTGAGTGVGTGIGANVDVDVNVDGGVGTGTGLVAGADADVDVDAGVNTGAGVGVDAGAGVGAGVGADAGAGVGAGAGVGAGVGAGAGVGAGAGVDAGAGVGAGVGAGVGAGVDAGVGAGVGAGVDVDVEASACVGAGVDVDVGAGVDVDAGAGVDVDVGAGLGTSVCTGVDAGTGVDVGAGIDVGTGVGTSVHTGVDAGVGTGTGVDSGVDVGVGAGTGVDSGVDVGVGAGTGGDAAVDVDLDAGVGAGTDVGVQFQVQVQVWMQIQS

SEQ ID NO: 932362 - protein, 120 aa, Homo sapiens
MWRGFTLIFQRPGSFIIIEIKQCFESDVKVLEAEKSKTEVPASMVPGHRATLMTSSNLDFLPKPPSLNTVMLGAWLTRRKEEHIPKGKETLRESQTNRLRENCGEKEIYLQKNGEGQIKY

SEQ ID NO: 932363 - protein, 256 aa, Homo sapiens
MGLIWWHSAKEWSGLEALENFRLMPDRLYSSSGAQTKWPKRPQCELHSFSELESKWYILNLVNGYVLKLVNGYVLKLVNGDVLKLVNGDILKLVNGYVLKLVNGYVLKLVNGYVLKLVNGDVLKLVNGDVLKLVNGDVLKLVNGDVLKLVNGDVLKLVNGDVLKLVNGDVLKLVNGDVLKLVNGDVLKLVNGDVLKLVNGAVLKLVNGAVLKLVNGDVLKLVNGDVLKLVNGDVLKLVNGYVLKLVNGYVLKLVNG

SEQ ID NO: 932364 - protein, 488 aa, Homo sapiens
MLKKMVLEHHCHVQTGSDPDVQGHSHKTSSDQAHSGSFIQSYTYLSGSFIQSYTYLSGSFIQSYTYLSGSFIQSYTYLSGSFIQSYTYPSGSFIQSYTYPSGSFIQSYTYLSGSFIRSYTYPSGSFIQSYTYLSGSFIQSYTYSGSFIQSYTYLSGSFIQSYTYLSGSFIQSYTYLSGSFIQSYTYPSGSFIHGSFIQSYTYPSGSFIQSYTYPSGFFIQSYTYPSGSFIQSYTYLSGSFIQSYTYPSGSFIQSYTYLSGSFIQSYTYPSGSFIQSYTYPSGSFIQSYTCLSGSFIQSYTYSGSFIHGSFIQSYTYPSGSFIQSYTYLSGSFIQSYTYPSGSFIQSYTYLSGSFIQSYTYLSGSFIQSYTYLIGSFIQSYTDFSGSFIQSYTDLSGSFIQSYTYLSGSFIQSYTDLSGSFTQSYTDLSGSFIQSYMDLSGSFFQPYMDLNGSFIQSYTYLAILHRPQYEVPDFRFQEGPRRNAGCSPR

SEQ ID NO: 932365 - protein, 184 aa, Homo sapiens
MQFGGVPCAVWGNTVCSLGEHHAQLGGAPCAVWGSTVRSLGEYRAQFGGSTVKQFGGVLCAVWGVPCTVWGSIGGVPCAVWGSTVHSLGEYHVQFGVLCAVWGSTMHSLGEYPAQFGGVPCAVWGSTMRSLGEYHAQFGGVPCAVWESTMRSLGGVPCAVWGSTVRSLGAYHVQFGVLCAVRDT

SEQ ID NO: 932366 - protein, 154 aa, Homo sapiens
MPETPTVLDKGHFWEAFFPCEFVGVQPASKGEFARVSSRDIVFGRHHVASSPLGTWVPDVCADTFHVDVRHQFGNQSTFWMLGFLGWGHRDCGYAGTLKGALPGEEGPLILPSGGQNSDVKVSESHAPSGSTHSHACRGPGSYPLQLGDAGRVP

SEQ ID NO: 932367 - protein, 132 aa, Homo sapiens
MGSDDLIKGSPLHMLFCLPPCKMCLSSSFAFHHECKTFQAMWNCESIKPLSFINDPVSAEVEETNVPCRTRKAHPAKCYETKKASWRFANTSPRQLILPDKHIHLPTKLNNGLPEGKVNLTGSESTFPCLIR

SEQ ID NO: 932368 - protein, 454 aa, Homo sapiens
MVTSSFSARNSTSATSMAARVASSGLTVSLGPSVSRRSSGPSSGRMDQLPQKNLLRLHPAGSAGCSTGVESSSMDGFWMEVEQIQQRDELREEDSGGNEGQLPEEGEAESQWLQDTGLSGLLGGLGLDGDHQELLSTLTQTQVAAVCRRLDIYARSVRRQHKTPVRDVRDVFGVFNSGKMSSENGDSGMKGAQLSSGASKFPPAAEPGGLQEQAGREEAFNMDSAYSEQAAVLLQRSRPSRGGTSAWGKCSLPKFTVPKGRLGVTRIGDLSLQDMRKVPSLALIELTALCDILGLDLKRSKAGKWKAAETRLFGVPLDSLLEADHKVLPSTQVPLVLQALLSCLEKRGLDMEGILRVPGSQARVKGLEQKLERDFYAGLFSWDEVHHNDASDLLKRFIRKLPTPLLTAEYLPAFAVVPNIPNLKQRLQVLHLLILILPEPNRNALKDFSKPLVY

SEQ ID NO: 932369 - protein, 142 aa, Homo sapiens
MVLEDSRDLQGGWGWRWAEVLLTFVFYKGPFGFWEAETETGVQRTKEDEVTAVVQVGENVGVLNGVVQVPLVLGEPLLSSSTCQDDYFVTRARIYKRPGVTSIRQGAGSFHPGSKSLGKSCHLSEPYFSHEIENLTRLLRIT

SEQ ID NO: 932370 - protein, 258 aa, Homo sapiens
MQEQWRASSPIRSSVFTLLNLATAHSFCDFARGYITLSGVQRGANSDPDQKVWGTPLPPTGPECKKWDYFNCVNCSQTPQCPHQNNSQWQNFQDISLVQNASSKVMEDDTLIIRIQGSCEPLPNDWEPYLHLSKCFGAQMIAMVLVMVVTVMMVTVMMILFADELCGLRLAKSCQLYGSTTHSYNCQRQLATVRSRDRELQRQKSVHSNSLNPQIQSQAFSCALPFPPPAPQRELAVEYSHYNNHKIIAITYWACSTC

SEQ ID NO: 932371 - protein, 151 aa, Homo sapiens [sequence omitted]

SEQ ID NO: 932372 - protein, 160 aa, Homo sapiens
MPLVQGPHFVNHCPPLAEDKRDALSWVLKCPQRQSYLLDLAPFTFCQCQEMAWLEPPTSGSLIFFDPQDVLGVDARRAPPIDDSGNNSTDPFNIIEVYYVPGSELLTGSNLFRAHKAGSSSKQASNQSRFPGPAKKLQSIKKQVVSLQGHPNLREVELIV

SEQ ID NO: 932373 - protein, 134 aa, Homo sapiens
MGLEGEELEIFEKKTHNIHSDEYSNILQYWALGTSTYEFWGNGIHPMQDSRPTSRHLKLSGNRGELKGLSKEPSVSFHKDIMCFPSQGFCCLCHVSALPPLSERAGAWCLSTFLSVHGCWRWAADEYLSKSEEI

SEQ ID NO: 932374 - protein, 151 aa, Homo sapiens [sequence omitted]

SEQ ID NO: 932375 - protein, 134 aa, Homo sapiens
MCSQTNSFNNPFHNLLLDLQQTTHLVVHGSYVPPLLKFGMTFFSHLLPLSPLLHQFCQFDKSNPRDEKGELLDMTPHTWKVPGPSACKTLQLQDGKSCGKDGPGSWVCGDRLGAKVHRGELSLLDRPGVCVHKA

SEQ ID NO: 932376 - protein, 137 aa, Homo sapiens
MLISLHIIYGCFHTPPPGLSSCSRKCIPPVRQKVRYLLSGPLQEVCRLLAWGTAEGLWGYSSGSDLSRGGTLDIMDNGALGSEELAAGWAQDDDDDNRVLRARASITASSFRSRMLSSLFNLTPIGAAPPYQKCRQS

SEQ ID NO: 932377 - protein, 138 aa, Homo sapiens
MAQIKAVLWIPIGHKPVVHQPKDSSRKSPKYLRAHPNLRGPHELQNIADWVSHSLFCCCFSVLHKRECQYLWVETGPLTRPLNSSLLLHLPSWYSSRSTQSGPQNSLQQILEENKRRPMDRKLREMVHTLFSSEEQKW

SEQ ID NO: 932378 - protein, 130 aa, Homo sapiens
MGGLQVQRTELAMGGLQAQQTESVMGGLQAQQTESVMGGLQEQRTEPVMGGLQAQQTESVMGGLWAQVAEPITGGLQAQRTEPVMGGLHAQQTELVMGGLQAQGAVCTNTQRQKEVHVVKPVPQHIACTW

SEQ ID NO: 932379 - protein, 152 aa, Homo sapiens
MSQMPRKRFREDPEYSPVAAMSRLMLRRTPTVTNNTCQTQPLIWGQIKKLPQMAEENLRKVGQPVTTSNLMVAMIAVITAAAKLKEICINGLNFINENWKHLIAKEEDMKMRESLELLRDSLNDCDQNAESDMDSGVQADEVSDGNEELTGD

SEQ ID NO: 932380 - protein, 206 aa, Homo sapiens
MGPEHRCGNPWVLIPEHLVSAVKLQQVGVIPQIPLSCPNSGWHNPQEPERASLAYALRTVIPAVLASCCSSDHGEEAPLKLSTLSKFAQEEREEENAKVTRGVECSLALLGLSTPVETKGSPTGDDAAQVPSKGNEKNSQNNAAHVTLMPASPREGVELKLSSPSRCQDRVSGAMVDIVGRDRMDVLCHEWTTITKMDSCCTKKEP

SEQ ID NO: 932381 - protein, 183 aa, Homo sapiens
MGTDGLCSQDILVLLSGEVKVLDFLNDCSGIQECIFPEIGSDSCWSLAAWASNLEYITSAASCWLQPPSNLPRLQEKEHTLGVRTWLVLSLMPTKKAWETGKPRVTDVIYTRRVKPLEEQLPSFLCYTRSSWELQEAPVTTASIRRDPSSGMQALTLHLQWQSLLYSQHLACRPWRNPEADKR

SEQ ID NO: 932382 - protein, 230 aa, Homo sapiens
MPHFWTKLMSFFKWGGGDECGGHADCDGWIVVIMVIMVEVLVMVLVVVLVVVVIALVVMVWFIDGSVIVLVVVMMVWFVDGSVMVLVVVMMVALVVVIALVVVIALVVMFVDGSVMVLVVVMMVVLVVVIALVVMLWFVDGSVMVLVVVMVWFVDGSVMLLVLVVVMVWFVDGSVMVLVLVMMVVLVVVIALVVMSTSRFSFQTTVVSLTLSEEREPDPQKEHPFQNQKS

SEQ ID NO: 932383 - protein, 470 aa, Homo sapiens
MQGAFTAPACAHKKLMASLDIGKTQMYLSHFQTAPWGGATPMRATVLDSEILEDAVYGPYMSSAAWDQASMKEPNMHAEIQLPKQVKFGGDCDVSDSGRDDDNGGDSDGGQVTVIGGGGKDGDSSDDGDADGHHGDGTMVMIMMVLTVLALVVVMSYHGDGHDVDDSADAGGGGDGYGHDGDNSVDTGGGGDGDGMTDTSGGDGHGHDGDGSADTVVVIVVMSYHGDGHDVDDSADGGGGGDGYGHDVDDSADAGGGGDGYGHDVDDSADGGGSDGYGHDVDDSADAGGGGDGDGMTDTSGGDGHGHEGEGSADAVVVMVVMVCADTGSGGGADGMVMVTMVMTVLTLVVVMIMEVMIVMMVIMIWIVIMVMVMTGDSSGIGGGDDGDNGNDSDGDSHDGDGCSGGDEDGDVVAVVTMVTVVGRPLSLGCPVDSILLPSKPPVSRAITRENLLKTRFLIQDLVAFVETLI

SEQ ID NO: 932384 - protein, 460 aa, Homo sapiens
MNWHAVLHFDDFGKGLGFFKIEVSTPVPLRDVTFPIVKASLRRRLQLAHQGPPSSVDPSMHRAHSLCQGGVGSRRCTAEEDPAQAPKGNPSQGESSTVLCQTRPSTICEKDNAFSIELPLSFAKDQLTVVICVDVDAGGIDVLAADVSSVDVADVGAIALDVDADVMVLIVDVGGIDVDGIDVGVVNIIDAGGTDVADTVSGADVGGADVSGVSIVDVGGVDVGGVNIVDGGVDVGGIDVADGGVNIVDGVDGGGVDVGGVDIVNVGGVDIADVVGVDIVDIGGVDIVDIGGVDIVDIGGVDVADADGGVSIVDVGGVDVGVDVGGVDIVDVCDVDVDGGGVDVSGVNIVDVSGVDGGGIDVADADVGGVNIVDVGDVDVLDADVGGVIVDVDGGTDVPDADDSDVGVGWPLCKRRRIQACVSAVAHTRCGPFRSSIVCEPVFLDGNAGQSHDKLSLPTL

SEQ ID NO: 932385 - protein, 134 aa, Homo sapiens
MTNTDLHGPKGGDLPSQKAADGELVQSSRPQAPTETSVQELLPATLIRAGACACHWYTNGQARGTSSSQLCPTIPTEQEAQYIRHPHCPALHLKQLRAPNSKKRSDLYPSVYGTAGCYLQILQRFSHFIFKCAC

SEQ ID NO: 932386 - protein, 172 aa, Homo sapiens [sequence omitted]

SEQ ID NO: 932387 - protein, 193 aa, Homo sapiens
MEPEQVVQCTDPLVRQSPPRLTKSWTEGKKDRGTWRGGEKNAGVYHALTMLDARVPDVTPREFTNLGADTSYKNNSSFWRKCGFLKWIHCKPELLAAIFATKRERFSENEADRKAGMTDGETARVLMLLYGHLLDPAVKSVTLNTYRIQFKVMYRIYLFRSILDITTTRGFLPLTRPQSFSCGFARGWLYLGG

SEQ ID NO: 932388 - protein, 138 aa, Homo sapiens
MILSLYPQRRRLQWKMLLLLGGVSHHSQPSICVSKSTLRYNLHTIKCTYFKCYRAMHFEKCTQPCNYDHKQNTEHFHHPTSALVPLFSRALFPTLVLITSSESAKHFQLPLAMSKQRKNQNPLSQIKASSDSSGNKGA

SEQ ID NO: 932389 - protein, 155 aa, Homo sapiens
MEFCMNSKEESSHKCIRSTLMGLSLRQAPGSHAWRYPGRGGEGVLALAAPSVSVALSCDFSGLGKFKVTSGVEEVETSHQGWQRPTGKLGPIPAPHGSHHKGPSAPKAQARPVPLFMGRVSNLLLAGRLAGCAMRGLLTPQLWSGLCRLRGRAGE

SEQ ID NO: 932390 - protein, 260 aa, Homo sapiens
MGFLSPVCLLITSQSRIKKSRLLPARWKQQYRWTVLPQGFTDSPKLFGQILEEVLEKVVIPEQICLLQYLDDILISGEDLEKEKPNRLLWTSEEVDQIERLEERLITAPVLGLPSLEKPFHLFANVDSRVPSGVLTQEHRGRQQPVAFPSKVLDPVTCGWPQRIQSIAAMAILGEESRKLTFGGKLTLNTPHQVRTILNQRAVRWLTDLRILKCEAILLEKDDLTLTTDNSLNPAGFLTGNPHLRREHTCLDLIDYHTKV

SEQ ID NO: 932391 - protein, 149 aa, Homo sapiens
MRSCHVLGQIVLGLLEWGCGEEAVGRGGWSARRLTLDLAPRQLATRPRVGSCASLGLHTLICKLGKPYLLQEECVVGKQGHSGRTTCQFGVLKYLDPKEEDCPQSESPTLGRGSLLGCSHNPALLPAPPLATPCISTPWMIIEGCTWGS

SEQ ID NO: 932392 - protein, 205 aa, Homo sapiens
MSEPYIKLRHRCIALHRVAGPPSVQPTASDGHLGCSQIPPNRASGKVLLSASLCAWHISLRQVSGHETDGQHVLLTFGGPVNPLLSRRLWPEGRDSSHSRAIDACLSVGQLWLGSVFIFMSVDTITGTRKNQRSTGKRFGCMEECFAVRALEPCALIQILAVSPAGCVTSDKLLDVSEHKLGHQKSQAILLGENRNTTPFQKCAP

SEQ ID NO: 932393 - protein, 144 aa, Homo sapiens
MPKYPGGQSCRHLPYWRMPSRRMNRKSLCWQVEQPFSSEQMIQPVQLPPRPRNSPLCKVLMKHILAPSPWNRNQKSSGPPLSWQQLSDEYCYFPSPHLLFLRFDSEQITVEQRCFGADEEPGAPPIQPDHPGAPGDTEVPGSTL

SEQ ID NO: 932394 - protein, 204 aa, Homo sapiens
MVTLWSCAVPKRPNGPLLDKQPREKFYGNHHRSQRAHERAKESQRAWDIFSLAPKSREEVESRAGVRPILDLGGWVGAEIREAPGAWQLLPLPSPSQHGRRGRCHPHCWAEMYLALADPTRTLGRGTSDKIHLVARQQGLYVSHPQAAGCGSGRDSHWAKGNSLEKREGPCDPTGTAAADAPYPAKGSGRGTHSVHFSPLSVYC

SEQ ID NO: 932395 - protein, 143 aa, Homo sapiens
MPLYCLPFPHPSFPTQDGVAVVETPLTVQGPFDHHCKATGCGIRRTGASLVGVTLSSGVPMSSWHLLDGRHCANHTFTHYLIKSQKDPEKEPHAFQGNHFSSNNKQPERADSKTQIRQLGHRKRWGKSLLGNCQTSPSYNGPQ

SEQ ID NO: 932396 - protein, 158 aa, Homo sapiens
MARIKQAEEVGKTDLLSLPAFIPLLCWMLPALKHQTPTSSAFGLWDLCQWLCYIVTAALASKFAFPAKYDPSPKYDLSPKYDLSPKYDLSPKYDLPPNNWQILPDPQNPHSLLLSVNLSLAQWCLMGNANLLLCIISGDSEFQASRRDPLRHNPSLKK

SEQ ID NO: 932397 - protein, 167 aa, Homo sapiens
MSIRSRRRSAACIPDTQQLAALTTCISRLWFLDVTNNPHFFYIIQLGCIHRLFLNFSSKQKARDSFQEGEYRIWLGDTELSGKQGVTLRTGELHECGHCGCWGSPIPSPSLIPHAVPRTPATIPTGSREVSSQRAQTVEAAKPHLCTRSIQSAVKGSPFHTSRLPDG

SEQ ID NO: 932398 - protein, 344 aa, Homo sapiens
MLVSLNNSYVEILTPEEEVQSTVERGMDSAGKSLCQVAEPTQVENAGRGHFLVVVAAGHRVLKCQFARDRGNFQDTGFSVLNWESMLPHGNITDFPTGHEPMPLFHLLCSPDSNCKCYAGNSHAWMTPIGDWKPSFGTSLVHNKCPTICVAEIATPAPVIPPLKGGVEKGVFRLAGEKRPPPGVGVKGDSESFREKKKIKITGFSLDSAVCESGQWAGLVVTHLEGLGPLRSSDPLCGASPDLRLGGLRKELYPEWKHGDLLCHGRYEVGTLGDPKDLYTKLLNIITNQWPCVSIIYFWGAYCVPWVSERINVSECELPKMDSVVKIREAPLKADRPGLVHTIY

SEQ ID NO: 932399 - protein, 115 aa, Homo sapiens
MPWTALRHAENNGALESLGPASSGQSSSSPDVFAEVTLLSWKGVGSCALGETAWKDWVPAAERRARRPNAGCGCLQPILPPAPRVIFRNASLIVESTFLTPFSALLFVTPLLYKR

SEQ ID NO: 932400 - protein, 150 aa, Homo sapiens
MCHGDLLHRSSAICLLEVRGRVWGWGKEDRSPVVSQVIATSKYFTKHLVGFDKPMTILNLYLDLVSKFQNLGPSTHLKPPRDASQTGNIAVPLHQRCFSSSPISLSQSLAVRVIPSSLSFSILNLSPHVVGFSCNHLLSLPLSLHIHCYP

SEQ ID NO: 932401 - protein, 387 aa, Homo sapiens
MLKAHQLPSRLSPKHSESDVPPDTVHLFCGGHPVGSEVKVSTGLAPPLGGTPVQQHHLLEVLHGVVLDRHEAHGVDHAVAHGDALDHVEGSEVVLFLHEHSGEEVTNDGETVEGCPAQHIGRENAHEHQDRLPAAAQPLANLLRLEPRDCLEPELPGDPGIAQGHGDHRAHELDTKDEEEVGLVVELLIHRPDLATEDLLLALDNKEDRFCCKVSRWDGNENGHHPDQGDQEGGRLIIHPWFQGVNDGEISGENKSRMPPAGKQAPQNLAINWRQRNNGTSVGSARLTPAQFLQFKTWWADEASIQAACNAQAHPQINITADQLLGVGDWAGLDAQVVMQDDAIEQLRGVCIRAWGKITSCGEQYPSFSAIKQGPKEPYVDFIAQLQ

SEQ ID NO: 932402 - protein, 141 aa, Homo sapiens
MLPVYGERPKKKKQIDCQTFIFVPYHCPDGVATCSESIHSVGGTPMFKRLTAKDVQPIHIPGHMGIESPLASFDIVPSAKASHMAKFRVHVRTHCQRTRGTGGLNKLDSLLQTACQGEAIALAEGSNFAFPRLWNMASCGL

SEQ ID NO: 932403 - protein, 188 aa, Homo sapiens
MDKSKSISNSEKHPGIIKNDMVVPGVATLDRLGPGKENSVRRATPSGSGGPNLLTALAPAEMSFQPLPYSTATDSSRPVSLQQWQQKNPNGPTHFTSHLHQQQGAQSARISGNSETHAGQVIYCSTPGDSRSYKKNQMEITELKHAATKFKNSPGGLSGSVEMTKDKVTDLEDNSTEFIQFDQQREDG

SEQ ID NO: 932404 - protein, 176 aa, Homo sapiens
MLAALAAAEAEDMQVGEELWLKGEPQSQSAGADGPHAAVSYCADRHGVWSAGLWGSGQPPGRQGLHGPHCASKHGHMEIIKLLLAQLGCNVHLQDNDGSTMLSIALEVGHKGITVLLYAHISFAKAQSPGTPRLGMKPQKELAMYLPLEKYSVVLCIYGFLYTVSHLLWSYMYLNI

SEQ ID NO: 932405 - protein, 127 aa, Homo sapiens
MNPETMQSPFIQKEPPGGDSLDFQLALVPVLFKEPSASQNNDAKEVALGATGQDSGPNWTQKEKQTLPSLTSNVDVPSGGGARQHSVFLFLLSYRDARRMETESSVVREAPAREPLGQGSNPKSGIC

SEQ ID NO: 932406 - protein, 163 aa, Homo sapiens
MNVAGYTGQHSTTYALTEDMFTTYRRQRGGQQASPGQWEGEPAGNHTLNQRDAENSLTNLFCEVDPPERWTKDILLFASSLHRIESVPTPVSEACDTGARRPEWEEFSSLIWDEALAKSFVPGEAVQGMDTFPGPEAEKLEAKIGMERCSAQKKSPLSSPGVE

SEQ ID NO: 932407 - protein, 139 aa, Homo sapiens
MSRCSGAPLKDLHSRLPVYSPSSITEVFAWPTVPAVLPVDQALPHLWESCLLHSSLLSLRAVFPRLLCSWFQAGLNQWKLQLPSHRPAMFSGSTRSPQPWALETPPPLEVPAVLGVEVAFCCSQCLGVPLALFGFLTHL

SEQ ID NO: 932408 - protein, 136 aa, Homo sapiens
MKLGCWIVTLRLIMKGRRNKGPWLATGSYRTGRIAVWQRVGISEDLQGVKEHDVYHLFSNGLQKIPFREKGENKWETISVSPNLDVDKKYLGGVDTPVDDDFQLEEQQPRCLLTAELAGIDLAAIEALPFSFKKST

SEQ ID NO: 932409 - protein, 170 aa, Homo sapiens
MATQFLLTLRRWFLCSVFDQKMTKPRWKLQMGGVFALCLCQRNIKSYQKLEDTRKNPFPTGFIGNMALSTPCSGTSSLQSYETIHIYCLSHSVVLCYGSPSKLLLYAKAANSWIMPAIALIKRHICYVMDKDCGWWIHDLPLETHCQSSCPQLFKGSLVMQRHMECSGCC

SEQ ID NO: 932410 - protein, 138 aa, Homo sapiens
MARTDKVETYSYMVLLHCLISFLRAIVDKTKQKKLEAGRTAELQLSAGSIVPVPLFPHQRTVDHNSYMERKMKKSKIKVLARSVPSQRCKGELIPYLFPGFWLFAGNLWHSFACGCQGPLPSSSYGILFGCMSFFVSK

SEQ ID NO: 932411 - protein, 185 aa, Homo sapiens
MKSSSLWHPLLAQPNRELAATQKYEYKRRESEAPQNRTKSGAVTLKDLRSICVAATCISFQGIPQTAFPKWAFPLEQPTSLSWPLGPAVPSLPEKPMPQFQSDSTGILSPGNYASFLTVMPHQCSNPIYGSSSCLPSSDLDLTFSNEGEQYDVVERTVRPGFLNLSTTDILGQIILLMWTLSYAL

SEQ ID NO: 932412 - protein, 157 aa, Homo sapiens
MISLEYAPGVPYNQRASFPGLLLEILGKRCSVLSRLDVPAVCKPNIPGDHLCHHIKGSPLRTTTIQRKIELRDEMQLDPIYNPFSHLFELKSQIVVLSRLNVHGSQHLSSHFRSYWVTGLQEGKPHHAFEPQGGERENRLTPKTSDITVVWREIVLL

SEQ ID NO: 932413 - protein, 135 aa, Homo sapiens
MDRCDKPAQEKEVQLSTHTHILSFQFLLSFCHLAIPPKKTRVQELWLKRDEGEVSAIPEQLRYARISFCAISNNAEMNIVCMFFISATILTVFTNQPSSPTMGLMIWLCNMKEEGAMKLKCMDRKNSHPIYAVLI

SEQ ID NO: 932414 - protein, 138 aa, Homo sapiens
MVALSMGLGSGSCSVSQQEELSGNNECQRTQLLSRVPVCDVPLPVSKCSHCSIPTYEEDFHPNPKVAKMGLWDSGISGAATSEESQPVSSVPMSHVVAPGMSGTFTEATPITDFEGLGGKNDFVGQAQGSLTVCSLGT

SEQ ID NO: 932415 - protein, 139 aa, Homo sapiens
MFNVRWLCLPGTSNNVLPEGRHFINIKHWTKQASKPHSDIRQDLNITDGYAKGYEGKSGQHAITTRLLEIPNNSTIICPLIFAFKDVGSKGNQLRKKKRKEKKKQVKITTKRWEKGTALRLCTYQVVNSARPVSFTSRR

SEQ ID NO: 932416 - protein, 130 aa, Homo sapiens
MARVIASWATRFLILPEFLPLHLLRTATYDVSSCQTLHSHSLHQPLHPDPSIASPSPEAAALCVPDDNLGIGTNQYQEWVCWERALETLVNAYKERFVSTVCNNRIQNNIAASPSVNRQVSYFIYTVEAK

SEQ ID NO: 932417 - protein, 138 aa, Homo sapiens
MPCCKNPKTGGGFALALLAIVPAEILTVSNNYQPSASRNEVSKGARENESNESAKRERATGSKDQLPELTLHGEVEEEVKKIGQVCVCVCVCARVCKFLPGRDLQISLGALSSDGSYILYEIIFGHFLHVCCALIVIT

SEQ ID NO: 932418 - protein, 169 aa, Homo sapiens
MARDWRATLPTALARDPLGEASWFPESTGDSENFYLKDCKCTNQHSVSSSRFGNAPISTLCLAQDHEPTGKKEQLWRGGTMNSRRAALRAVTLTTKVCSFTPEASKTMNPPEGRNSEHVRTAEETNFGHTICKNCNTHRTWMKLEIIILSKLSQEQKTKHSIFSLIGGN

SEQ ID NO: 932419 - protein, 162 aa, Homo sapiens
MIYNNDIKLDHTKAPHPLAAITTGLWGVHLHYPCCLFNAQGLFSPLVVNAAWPRTHPSAQWVPLWLMAGPEMPSKSQVLELKTPRACLVLYPPVAKLVSKTQDKIPICLSQVEEVLLIAITVGKVSHLTGSQQASESLQRPLIWYFGIAAGYSGPKDTSVSM

SEQ ID NO: 932420 - protein, 147 aa, Homo sapiens
MTQVLPGCPRGRLPSPQQTQSRAHVWGCTKASLWEEEGASLETHPPSASVPRTFQPLAVPPHPLCNLRVPNTAVRRSPGAPGDPPDPSPVHCPMEQKGTGEITIEKKSESCFLGCFTYDKVFTLVMREDTGKQRSAARQSWVEIHFQ

SEQ ID NO: 932421 - protein, 153 aa, Homo sapiens
MFVFLCLAYFTYHCSLLRGSTMLITYKLCLFQAFVIKSILNKGEHRWLKGTADCLRPLPNINVLNLLQLSSEIKNDHLWHMCVVRRTVIYCRPAQQDTKDIVIVTRWENSLKHQDSSVNLVDTGIGPLCRYLLSETMHDIYEIFINNSFNIPL

SEQ ID NO: 932422 - protein, 153 aa, Homo sapiens
MPSVPCLQPSDLIASVSTGLLSAADNEIEKLRNSPEACISGSRNDVINHHMIAKKKQVQEEWRSQFTLGSGGEGPQAKNVNHQDSAAFWKGGNVFSISKGRLTQTHSYGDARGPRKKVEIPKCFFKACLSQATGSRKESVQGSTITVYSCQEV

SEQ ID NO: 932423 - protein, 140 aa, Homo sapiens
MITGYTVLNFCWAARFLTGHRPEDLYHNFVQNKKVYYVFGANSAQCQAKGFARGASQRTLGPLTEYPHAVRNLTYFVQCTGEQDTKLGKGYPEVQTARIRPVCVLPTFQRYMSLIKVNWANAPVVISVFQSTACKKLGEN

SEQ ID NO: 932424 - protein, 157 aa, Homo sapiens
MDATHLLPYSLLCIPVHNIQSRTHQGIQSKPYHDMRNQYTVYHIGIHLFYKYLLSTTCLHSTVQGAREGTKEDSRQALKKLQIHVEKRASPQRSPFLLSKKWTLATELKLDPLISQLSLSIITKNVFSTWCTLGVCLSRMARRGRHTLRSVDILPFI

SEQ ID NO: 932425 - protein, 142 aa, Homo sapiens
MRTTLSKFFKWSHKLLREPLADSQQETEAHSLAAGKELNAANNHVNLEEDLADTDGKEVLSKVFFLMKSSPQIFFFSNKEQFVKLSCRHKNASWKLVWVNAGSCANKERLPGARRIQNGGSTFPFPCKPHNMAPGHAKTPFA

SEQ ID NO: 932426 - protein, 140 aa, Homo sapiens
MGEHCPPSRIFVSCIFHLPMTASPERTLTAASYRLQARGTLLSCTWIPDPEDGLRYSPYSFSLFLASKVASTCIKMQLISSFVSISKTEKYHFPCWVDRYQVVKVFKKKFMCENTNTEGSDSDKWEKRPTCTEDVNLMME

SEQ ID NO: 932427 - protein, 136 aa, Homo sapiens
MAVKIAELFNLFPGRNFLRNFVVVLQEDSVSMHIGEHYFIPELSVKRWCLLDKVEMTIAGGSNRPPPALLCPPDRDLAGPPLTSSAEHYWSSAWSNPNPGATAYFIFKVQQSLTFCCVPHFVFLFCSSTVEMIIFY

SEQ ID NO: 932428 - protein, 145 aa, Homo sapiens
MEGVDFGRAPLKNKLALELKLYIHNICVQNILQESGSAVRPLFCSTAEVCWESTPDLICLSPFLTWRYHQWRLENSKDGSLLLLLGALSQRHTDLLPARTPLYENAKFNVSCCLGVRRCCYTLTEDKDDSQGAITTSHSYHFSSN

SEQ ID NO: 932429 - protein, 180 aa, Homo sapiens
MVLGFSSLPDIYAAQLLSCSGQGLELIVKNHFGMLLGKSVWDDGHKMRSKTELHLNKNLASVLILSSPPKHLLLGYDNHFKFHKARKLRSKQALLQDLVLGVLNKELEKCATKHRKNEATKERKQGFIENESTLHSVGTSLSSGSKARIQNLLGSKYPLATSCSPHVNEVVACNQRSCEE

SEQ ID NO: 932430 - protein, 147 aa, Homo sapiens
METSVETCGSSLPCDLNSLIELIDFSLTCYVLLGQSDDFQVPYIQLTEPDFAGPVWAPHMTALWYKLAGAGKPKIISTIYGIFGAHCELGCYYSPLCDLSLYVMTHTSGLYLASFSSSLKLALTVCWPVRCTIFNWCLAPEKSALTY

SEQ ID NO: 932431 - protein, 137 aa, Homo sapiens
MLSNSFSVDNALQIWGHSVTFSGVGRGGGTRLESGILALEEEQLRLCKVTWAAQVTVLPAELSGAFPGFLASSVSSFWICGWETFSLSVQTLSQMPCALHSWSFLLLDHLHRCKNHLKSLSNPDTWVTLPAIQVLHV

SEQ ID NO: 932432 - protein, 139 aa, Homo sapiens
MGDGVQGKVLKFKGSSSESLIHKTKTLRRPAHGIFSPVPCLNGPADTCSSIPEGFLLAQEVRSLKVLRSQHLQEQPSANNGWKLEDKYTSFIPAKPVPVRSLELQLHWLLDKSISVDLHLRTTSRHLLKITEVRILQIR

SEQ ID NO: 932433 - protein, 414 aa, Homo sapiens
MLGKVQQQEQTIAKDLVVTKYKMCGGTTSPTGYFGRWWKHLAQKGDAMIMEETGKIFKKEKEMKKRIAFPTSISVNNCGCHFSPLKRGQDYILKEGDLVKIDLGVHVDGFIANVTHTFVVDVAQGTQVTGRKGDVIKAAQLCVEAALCLVKPGNQNIQVREAWSKVALSFNCMPIEGMLSHQLKQHVIDGEKNIIQNPTDQQKKDHEKAEFEKRDSSKQYGLKRKTSRAFFSEVERHFDAMPFTLRAFEDEKKAPMDVVECTKHRLLQPFNVLYEKEGEFVAQFKFTILLMPNGPMQKTSGPFKPDLYRTRSRAGVSLSPPSQFPNPLPSNNNQLQLTLVLGEQFGEPGDLLKSSKYQLNGVCGCVAMFCQVVLKRAFQGLNQPYHQNQSKCQLFFSYPNSGPDWEHLLGILFI

SEQ ID NO: 932434 - protein, 143 aa, Homo sapiens
MISWESALRRKAESRIGQEKKLSQDVVQLRFYLSLILQEAIENEGHRRPSPSPFAFCHDCKLPEALTRSPADVGTVLVQPSEHNSSQNNGYLVEVLSVRQYEESFYAAGNILHLDLCDDCGKKKEERVKGLVYAIKDPETFIL

SEQ ID NO: 932435 - protein, 136 aa, Homo sapiens
MPSKSQVHRDDLEPGIVVAGQMTRTSVGSFTLGWAWSFSLWGLTWHWSRLKVSGHWGQLGTATSPGPGASGMAWWILLGVGTGLEAQSSGTGLESGSMKVCTVLGFTGVGSVIGPQTKSNVHFPLFFHMKIYLSVM

SEQ ID NO: 932436 - protein, 184 aa, Homo sapiens
MSVLEALHPRICRYMAGSASPGIAAFLTRTAHQFEPLYNWKHGYDTSGCPQPEFIVIPQQKSDINGTWQWIQRNIPTPNTNVIPDKMLFQTSIIPFVTSSQFLSDFNHSCAGQVHSSLKLPEATFIWEFLCSSVLEPPSKRQKPLNTQPRSIEEVKSMRDGNVPQPLVCHEDNSEMFTPQNLYW

SEQ ID NO: 932437 - protein, 141 aa, Homo sapiens [sequence omitted]

SEQ ID NO: 932438 - protein, 181 aa, Homo sapiens
MLKPKPCQVYLMFSLKQNCLLSPAKATPDTDLQTWEMLVVVRHPVLRWLIIQHYYGNSQLMHGIDKTSFIKSACSVDLNSMWWRCVWNWWVLGLADFKNEAADPRGMKLQTFPVSITALKGSTSRVVRSTRSSQWSRGLADFRSEAADLCGYICELPPHQESECYQQTRNLLKSLKIYETL

SEQ ID NO: 932439 - protein, 289 aa, Homo sapiens
MNHVLLSYPKLIPVTNFVIKKPYQTENYGRSEGRRYTFGKTEWELCPKSRRHIIRLNTEQTGINIGFQCFSNGRLQGIHSALSLPVSAPPSGRTISRRSMKLGTKLSSTTYQSQRVEEGTNVSCSRCPGEAPDTWAWGTFICTALRNCELLEMPASLAVCCGEHECVPDPEQGRHGPDFTVLGNQSVTMVTVSFWEFPEEGIIIIRNDNSVSIIAPEDLPAGQNEEVKDSDIGDSDPVKIAKISGFGTRPLGYGFQLYPLQFVCPWARYFRPVGHTFRVCEIGTTLVHK

SEQ ID NO: 932440 - protein, 143 aa, Homo sapiens [sequence omitted]

SEQ ID NO: 932441 - protein, 167 aa, Homo sapiens
MLSNRNGVCLPGTVRPNIYIEVCSGRKEGVYLQGTKQGESRQLVLKTQSPRWFSAEKECQPWLVDVTFSRIIQNETLQMGSKKAEDDKEKREITKGIEEEILGNLLLEGRKSGGIAEKCIYGAGDSVPMCSNGCSMLRWTQQEGQKEHSLEEIRHENWEKVVCIALV

SEQ ID NO: 932442 - protein, 424 aa, Homo sapiens
MPNHAQRWRRRRRRRRRRRRSQISGEEEEEEEEEKEEEEEEEEEERRRTRRRRSQISGEEEEEEEEEEEEEEEEGEGEGEGEGEGEGEEEEEEEEEEEEEEEEEEEEENTNIWSRDLSLALDIWSFERGLSVKSPGQPPFPRSGKPVHKRLPDGPCHFVPKSCSLETFRDSGPVQDKLTLKNRISRSKCVVSSFMTAKSTDQSCPPFKHALASSMNKNKPSLYPVVSPSSSCPISLFPFTLNLFKSVFYTHCLQSFTSHGLFNPLQTGFCPLAREAAILKVVDDLHAAKSIATSLASSYPTSEQHWSDGPHLPKHCPTPYDLQVMPHLPSAQDPCIRFLKALYLAGLEHSDSSRGWLLVILRSANATSLLEAMLPNVQVSNWEQELIRMVPRKEAQGSLKKQEVQWSSKEKPIPSLILPKAAFL

SEQ ID NO: 932443 - protein, 141 aa, Homo sapiens
MAYAADPKPRTWNELEEQGHLRQPQPPKIVQNRCSCWATVENASDPLTGCDLLDDVVCCCPGSSSDMKDLVGILRLLLVPQIKAAVIWGFFPNCHLKNITLGLQPDVPLSRFRERGLLPYPNNAKDVCLDIILITFRLMVA

SEQ ID NO: 932444 - protein, 148 aa, Homo sapiens
MSSFSLLSVSLSLSHFLSLFLQLLYPHFCCYVVLTVPNTSSSAGRISVPSWHKRPKKKGGHWASLIRELWFHFPSKLTFWALHDPSLAKDSYNWIAAVIFCTPKFPNSKASAIFSIAFKFPMSAALAKRLLWRLNEIIHGKCLALCVV

SEQ ID NO: 932445 - protein, 160 aa, Homo sapiens
MGHGSLLFPASTGSAEHTALSVLPLLQLAFLQAILYPPIINSINLPAAVTCTASTPDTNYFRHMFTGMCKMDLRLDMLTTELLIFLNSKPVPFLTSPRPVNGSFIHQMLRTKILSSPSASFSHTQYPSYLELYQQNLMYYTVPRNSDYFGGYEPGKKKGT

SEQ ID NO: 932446 - protein, 203 aa, Homo sapiens
MGRKAAKTTCHINNTFGPGTANERTVQWWFKKFCIGEDKSLEDEEHSGRPSEIDNDQLRAVIKADPVKTTWEVAKELNVDHSMVVRHLKQIGKMKKLDKWVPHELNEDLKNHHFNEEAPKHFPKPNLHPKMVMVTVWWSAAGLIHYSFLNPSETMTSEKYAQQIEEMHRKLQRLSQHWSTERAQFFSRTRPDRSSYNQSFKRN

SEQ ID NO: 932447 - protein, 153 aa, Homo sapiens
MVYRASEAIRQCQSSAAKPRRSGKESVREPWARVPGGSGSGCQVSWTVQFSVGSHRDGTRLTRNPRLQAFLGPMARFPALVASSWGRRFWRNAWLLRFRRLEVLVCWRCGWGLSHSGGKELQLRNILLLGCLYSIIVHLEGSRAVKHLRVAAK

SEQ ID NO: 932448 - protein, 232 aa, Homo sapiens
MGISGELVKNGDISACIFTRSPGKSQSSPQPLLQLGSRSSGTWPLDSAQCKALSQIPVRPGCGEYQEAPSPQQFPQCQGTSDTRLLAVRAPAGICSCPVLQAACGEVHDSPVWCMTAPGSQKPCTSGEASCAPANDKHSLKVEEMNEFEETLSQLPPSQLCCHGLSRLNLHTWRQLPCKDTAPGGGLASSHSGCHSALSLHSLDPITGQISVEAGTTIRQFATVWQRPPQDC

SEQ ID NO: 932449 - protein, 146 aa, Homo sapiens [sequence omitted]

SEQ ID NO: 932450 - protein, 160 aa, Homo sapiens
MAPGSAGFMHLGRVTSSTAQSPVLALQEQRPCRIRSLVPEDCKLNGQRYINRRRSTTFIDAKILRAWELLRKEMKTRTRGTNVVCLEPSIQELLGPKPGLLQNLETCPSFSQLQTLNSPAFPLGCADLEIDECTGPQEAAQSSGLLEDINLAPPFPFSGN

SEQ ID NO: 932451 - protein, 161 aa, Homo sapiens
MSLKRQNYSGNLVSVSPRNMGSSSTYLLVTFWNDSQATNASLFANDRDLISGDDRIDVAAAVPLDLEDALFSLLSPGNIAPDAAVNINDPHSSCGHNLDSFREMSGDKANFSSNLAHKISEKLLFQGLCGADTIGISCLYPVTLTIPMPAEGILLQHRYST

SEQ ID NO: 932452 - protein, 136 aa, Homo sapiens
MNSNGFGSYYVQELIVARRWKLNDHLNEIHNKPTEIVNMEDLQALRGYELFDFVSRQNSKEYLPYILGVIMAIDWYHIPKTFHLEQANKVFLKYSQNSRRKKRRREVNKKSWRAYYIFICRPGLSLQCWCNLLSCR

SEQ ID NO: 932453 - protein, 146 aa, Homo sapiens
MAASGTQLCLPPCTFPTAAAGDSGDREPGSGAAEAPGLVADPTWLCEGDGGVVSCLGDARHRGPIASTAAPAAAPAATAHTSLLQPPEQNTDTDFQGHRKEATGLASEWHLRSDRCSSTWKRRNLSEKDAVPMNIAELQFQMGHEL

SEQ ID NO: 932454 - protein, 156 aa, Homo sapiens
MVPFKLLLLIDNACGHPRALPKMYKEINTVFMPANTTSILQPMDQELILTFKPYLRNTFNKAIAAIDSNSSDGSGQTTPGFNNHSPYQPVVINTEARPFISKEIMEIMKAQMIFLSSKLFLIESENMRSKPETDTSLESSPAQPIDLRLIHGPINK

SEQ ID NO: 932455 - protein, 139 aa, Homo sapiens
MAGKEGKMELPCLIWLAPGPCPLTKFVTVLPSKNKTSPGKAILPDLVRLIHYQENSMRKTTPMIQLSPTRSLLQHVGIMGTTIQDENWEVAGDTGCEALPGTEEQGWGPTLKSSLATFSQRSCARGSTLAYDCLGLSKV

SEQ ID NO: 932456 - protein, 156 aa, Homo sapiens
MKALTTVEKRLNSLREDVVKIPLKGTKTSMGKAQDLGMHSPNLMRLSVVHFGSSALFSGLAIALRIVPGISEPNSNMSTTHLTHFRHHPKRIFEKKYFDIELLNIQIFLCLQKQWNHSQIMQPLTNGPLKFTEAAGGVKNMERFTNLHVILAQGPC

SEQ ID NO: 932457 - protein, 159 aa, Homo sapiens
MRSCVHKIGGEQISAIGRGICVLLGISLEDTQKELEHMVRKILNLRVFEDESGKHWSKSVMDKQYEILCVSQFTLQCVLKGNKPDFHLAMPTEQAEGFYNSFLEQLRKTYRPELIKAMNESSCGSPFLLIFGVVIVLDFGHSNRYVEVPHFNLHLPDDI

SEQ ID NO: 932458 - protein, 170 aa, Homo sapiens
MSALTWFFVAQTPAQGLLVTATGPGQHTLFPFLLDNARSGTSLELKSHESVTFGFSLFLPATYRPGGRGSPPQTLPEPTVSPSPEVTCSLHGQLTCKSTASYLSTCPFLLKDTLWPQAGTRPEYRAGQKCPEVKDSRSGPQSLRNETWGAKNPTLLLPTEPTEICPTQSP

SEQ ID NO: 932459 - protein, 134 aa, Homo sapiens
MQLCQCGVMKAHDVDSGVVVSTGHGVAQTWGRILALLLTCCMASGQFIQLFSLLCFCSLICPKKEVLATWSMVINRCITSIPIEPSFLLPMLPILAEIRPYCFHSILINSTILSKNISSAQCVICEFILSSNDH

SEQ ID NO: 932460 - protein, 160 aa, Homo sapiens
MHQIINNAISFVRCTLVAKLLESGKHHMSESTSGLNLSYILQPPGEVLKILVPRLHPKPVKFRYSVTLEQYLRAKPALQTLHHFWWYSRENGIWSRGLVFLFWAKHRDRLCLLCGIINGVEPKEIVGGGCSVCEVGNFMPQSSALPEPGLASVLCKLLEA

SEQ ID NO: 932461 - protein, 134 aa, Homo sapiens
MKEGTFHRGCMGKPWVPRQKPDAGAEPLQRTSTRSGLRVNVGLETPHRVPTRELHNGAMGRGPPSSRLKNGRATGNLHPVPGKDTGAQLQSMRAVMGAAPCKTTGVELPNALGAHHLHSVTWMWDIESRIMLEL

SEQ ID NO: 932462 - protein, 149 aa, Homo sapiens
MNFTKVHGSPEISGPSAAGLLELAGGPLQTLFAWVSPVEDEEQQRLLPIPSSGSFVPEGPLPAELKRPAGRFAALFRAGRQEHLSLLKLPLQLFLPPCFLSQRDGGFMYKPLTGAAAFLSEMPCPERKNLGKQSGFSGFAALWWVPHPV

SEQ ID NO: 932463 - protein, 167 aa, Homo sapiens
MPENNNNKNKDKTKTRQQQQQQRQNQNQTTTTTTKTKPKPDNNNNNKDKTKTRQHNHLPPNQPTKIKNQENRNNNNYNKKPATIPPFLPSSLLQCKQLTLLLISLTRKVFGGRGTVDRNMDVKVSPCVGVVKHPIQECSYWHQVGAPRGQRSQRMEQAPIFAILQPS

SEQ ID NO: 932464 - protein, 151 aa, Homo sapiens
MCTCILVASPAHLLHSGDVVPVSFLMSSCLSKSPEPWVTVFLPVKLEVGLNYLGMDGPQTVDKRRLHIAYFLGFPSNVCLKKRFCEKKIHSEIRSVVAWEQGVEARASRRGNSIKISCTFILPVYLLTSFHTHTRARTHTDTHTPENKVLF

SEQ ID NO: 932465 - protein, 134 aa, Homo sapiens
MRGRKWTGLQLSLSSALISQPENAFCKVTELGLAAPSVDSKVEGTQIQFCYMLTRPGLVSEWHVAVSCCPWWAQLYGDSFTDCKKGQWSWNEGPHHSTQTPPFSSRLSQPPVHTGLVVSPHHPGAAPPKGLSFT

SEQ ID NO: 932466 - protein, 152 aa, Homo sapiens
MSPLSVWTLPKLRTFQIRTWIQDISLKIICLLSKTTQKMEVRLFQDFLHAETPIPCGCTLKSKEEFLIFTSTYLCFCLNFGMGGYPPAPPGSKNRGWRIQADPAHPNCRKRSLDGRLLAASLALAVLTVAMETMKPQCDGYSLMAAESYFVQ

SEQ ID NO: 932467 - protein, 125 aa, Homo sapiens
MEGHGGLPSYGHPEETKQIMSPLSVWTLPKLRTFQIRTWIQESMMWEEGESKCCNNKIPGRITIWATQTKVRGCRKMSTRSMHSKEKTGEGGNKSEKERRSKNKIIKTKQGKEERSCDWARSPAP

SEQ ID NO: 932468 - protein, 144 aa, Homo sapiens
MPGRIFLFYSLLFLLRPFKRARALVPNRKGPQTGKEWIRDPFVNKPGELTLSVTEEGELLVIANDGGLKSMFEKTSNLHTFLIKVKAKYPEMATKALKTLLPFPTSYLWESGFSSVNADTLGVTVSITPRWDCLVAGKQAQGSR

SEQ ID NO: 932469 - protein, 179 aa, Homo sapiens
MWQTSAAGPVCSVNALTCPDLLRPYTLPWPLFDPSYCFWIFQISSHSLRFYIAGYEYANELPFIFFALLRKETQVSGYLGPDSKEFEWNTIEGVKYSVVSLTVELDCRRATDGKERARFSPILPAVVRKGLDMGIHQDLPSDLPGLLPDLPSSSSHHYHPNLTHLLRPGHFLLPLRIFL

SEQ ID NO: 932470 - protein, 142 aa, Homo sapiens
MGRYRESAHLEQKLLEPQMGRPHTFMDLHLRAQSGSIQKNEGRSPDGFSRRKGKKLKGNGEAQRQQEKQKLKYQTNLKPLTPAEWIKKQNPNNNVYQKPSFNIKIQHPCQKLIHHKSINLFLDFQLYCIDLCVYCYIHTTQY

SEQ ID NO: 932471 - protein, 162 aa, Homo sapiens [sequence omitted]

SEQ ID NO: 932472 - protein, 153 aa, Homo sapiens
MLFFLSTSLLQGLELVTGSAKNGTYFRIHINKYKMVETITCLSREPFPASNYIRLFGQHEQLLNNLCARYDENLITDLYRMMSVAVVRLFSLLCGIPSYNGHDSVMAFPVDCIYTGSSSGPLQSDVVNTVDFYNQLVKIHENPIGFDRKCIKS

SEQ ID NO: 932473 - protein, 164 aa, Homo sapiens
MGTILYVASVIFLLDITGLDRKVKKVSLLTASCEHHFKCKDECAVGPASRGALTARDDGHVKRTTIRRCVQRHGEDLLKHWRRSRCLQGKPGPGKRGGTKQAGPAGNDRWFDCSNVQSDASYLSKRSSTETSLHNHSWRFRMDSDWREEQCLKARGEITFSRIG

SEQ ID NO: 932474 - protein, 142 aa, Homo sapiens
MITCQNSSIQYELKILYNFSKVIVFGPGGWEGTELVFNGDSVSADEDEKVLEMDSEQLAHQIEDEEINPTEKPRQYLKRVFEESIYKTLVERSTLDYLHYNRYHLPMKAYMTFGKEEAVFLFQIADEEHKVTEKLGAQGVHT

SEQ ID NO: 932475 - protein, 145 aa, Homo sapiens
MGLAQGVVNAPISTLSKWTNQFSVKRTNQLSVKWINQLSVKRTNQQDVEEMTQASLPEDRKQLPGSVLSHVIETRIPLFLKWVIETRTPFPQGKPQKLERTLSDTPPLKVGHKTLFQEGSCLDLGGRNAVYTEANNMNKHFKNLK

SEQ ID NO: 932476 - protein, 158 aa, Homo sapiens
MKKAPVKVTPLTTQGWPAAVYNPPALRVTGQGCPRRVVNSQALLVPVPAGKYCSPSNLSYPCGQFRAGEPEVIKLPCGDTKNGGEEGFGLVNPESRACDKDLDAGRSFGRRSQGAGVRDRKMEGKKPIKDVSSLWTTRLSLTWGPQGNCVEHASEMPL

SEQ ID NO: 932477 - protein, 191 aa, Homo sapiens
MKKTENECPQKQKKQENRGCVQLAAGLGRKVQAVSIHSWPFNAAACGSLSHAVSLSVVILIFLPMRRETIVTSAEEFCIRVKMRPSGRSSRELAKAQATAQVTAGSLGQKFSRPLEDVDVPLPPAVGAWDCQVSCSCLCLSISHQSISPRRAHQKLLSEALPPLIPMSSGHEGGFQNMNCATTKLRSGGWD

SEQ ID NO: 932478 - protein, 151 aa, Homo sapiens [sequence omitted]

SEQ ID NO: 932479 - protein, 139 aa, Homo sapiens
MMIHFIKCVRLTFLRITLDQDMSIPVFVLLFIFPGQDQLPLMLLKSGANAGDSCHPGSMRMFEDKMELCIRKSTVTMCQALCCDLHSPSWDKDCHVQAADKAQMPTAHTRIQTNLCFSKGFGLKHYSVLLRSKKRKDHD

SEQ ID NO: 932480 - protein, 181 aa, Homo sapiens
MAGQARPKLGLSPGRFLSLLRKEFKSEPVVEENSCIEMAIFMRVRVKRPPNRLCVSNMAVYFTWVQITTCPLIDPDKSTGSKCYKLVSYNFQTINTHESRRKITSEKSTEMKEEMKVLYTFYDLEQELFPNTVTLRGTGTWALTYEFWENTNQPTTAECLQTTNILTQDVLAGRLTTGLTT

SEQ ID NO: 932481 - protein, 157 aa, Homo sapiens
MTVLPGLQMDLGWPGAAFCLAFHRLLGKFPHPLDSNGPGYTLVDQWPWTLVSLKDLVSNLSQRSWMGPKERNPELKQSLHSRLERFKVEGAQTVPWGKAKKLLCRLNKIVCALILSGSEEILTVTSEHKRWKKLEILPEAQQMLMPCFFYSQQNRVK

SEQ ID NO: 932482 - protein, 151 aa, Homo sapiens
MFPFTQWVFLSSGRRKTYQWFLNMIGKTTCRERVGPLLSASGACFPESKEGYKYSILQVMQQNSSHGRWNSKGAPEVPALLCTHRYEPFPSANMTGYHFCDWVTYQLTLRPNGREPEHRFEGEMSPWPETCVLQPQGNGFHQQLVSLVLRT

SEQ ID NO: 932483 - protein, 164 aa, Homo sapiens
MIMVSLLIFGSKRRWCVPRASRFCFSDGPMVGGDIWECLETWVIKTEKGAFGIEWVEDGDTAQHPTVHRTAPTATSYPAQTVNGAGACCTESQLLRQQVLPRKKALIGCCSQGNLSLKSVSLTNYNWGIYIIGSIPNFNVSDNKQLISSDHYYFVSLTRSPMST

SEQ ID NO: 932484 - protein, 216 aa, Homo sapiens
MPLGLLPPSDQFMELIMVIDSDADGLAWEVMDGTGKVALPGRQPHAPWRCRGRSPSTTLRAACGLQSATGMLPLQQQQLDLLDLSHGHLGIIACCTVEATGAETWNARRWGCWYKLWDCMLLSRACLNGSRTSSPSDRRSPLRPTLLINKMPMLVLCPGPVTLWTISVFICGRVDQANRNHQCGMKFDLNWSHMENAASGLGVDGEALSTMREKPI

SEQ ID NO: 932485 - protein, 135 aa, Homo sapiens
MRVCPAAPLSQTFDVGSAVLDPQFPQLPSTSSFSFSKSWAAWVQLYGICTRYLLSVNCVIKFDGGLWLQILCMAVYFTEANDSPKVLEICELQNSTALPNHFFVFIPPRVFDYFRLAFKCQVLTMFLKNTFECNY

SEQ ID NO: 932486 - protein, 179 aa, Homo sapiens
MAPRGRLFLGDAEAVASQHSQSHMDDPWQLDPRSHASPSGVASMAASSSQWLINNCQKQGSSITVIYFSLSVCSGRKLLAREKSGNGPDASCPFRSAVDSSVVSGKLFSHMCLKCLFGQSRKHKESFWDSDGQTDSLVCCFFGVALSNPIKEIACRQFSGRTWPGAIEEKDFEKTIFGA

SEQ ID NO: 932487 - protein, 150 aa, Homo sapiens
MLEAKGPGNNPVTSWELAALNSLSFLIVRPLQAEKSQTCLSVPQTDERPTWVRWNSIVVVFTHNDKRPEKREAGPCAPPDMSLLCERAGLGDRITREFQVLSLFLTYRNHSIPFGNAKCESCYTAFQKWVSWIKVYQVKSLPICHPHKNA

SEQ ID NO: 932488 - protein, 161 aa, Homo sapiens
MHQTVASAQSRLGGRWLKGYPENSRKQPDLEKAGTEEPSETKADTDFMSVNQDNACKHLRTVPGTQSGLSGCQIIRFREAAVHFHMPQRKIPLPAITTSTVGCCSMSKSMSKPHVTSCLPMAAPKESKSALPVAGPQHSHCPTHLSILRQLGDFPNHAYHR

SEQ ID NO: 932489 - protein, 139 aa, Homo sapiens
MIAYVQYSIQDIQGHLYNTWFFVCYGFTEFRIKGRPRFRGSKSYMIWRRGETKSEADNLQYPSGSFLLPKGKQKCRDSTFHEAFHRKYSSPPSLSRFRGSTIHVAGNPWDDTARVSEVKAERHYSWYQKYFADYLNDLL

SEQ ID NO: 932490 - protein, 136 aa, Homo sapiens
MDCFENKRAAIFAKTFKRLLRSRKRSAQGTDHLLHDANRLVTVRTQVRQSERGQWGMSDCARNRLQKSIFNPTRMLGNSEDRLEVSPLPALENQLGARGPPPCFLWKKHTVRVHRSPGISCHTRAVRSPISKPSDA

SEQ ID NO: 932491 - protein, 136 aa, Homo sapiens
MVLENYKHDSAATVGRNCHCWVEAALLERCWEEEEVLRRNGRAPLPPDLRPHSSVPLPGASGQAQLQFAESQCWHHKAGYRKVGLEPRENHLIMALLPAPAGISPYLIKAITQSSSEINSTRHATFSLDIGISVGQ

SEQ ID NO: 932492 - protein, 228 aa, Homo sapiens
MECTCTNLDGRTCYTPRLCGISLLLLDYTLGQHVAVPNTVGSCNTTVFFEKEFSSQVNLREGGLIEVKHYFTAGLFRAFNLLNACDIPSGAVSEDCLRKFHTRHCKKCWGLGGKTSLGLRGIACCYSFGTQPGPWAVAWASLLEDERPWGAEMSQSSGPPRNVCLGDGTDEEMKASGCRFSGPDRRSRDLCFLLGIRKPHSPCLQRRCRSPLWGRGEEAKKVSFSSSP

SEQ ID NO: 932493 - protein, 163 aa, Homo sapiens
MGLGCGVLTLCVVFFTSSMVVEETCNHESCWDPFATLHDADHTERRREKQNPEALTFLLGPRLVQSWESDSKEEAWGHCPMCRKPPCLPQHATPEERRRTHVERNLIQGTEENPHKNQSFPESSQQSSEFALSHFGQDCVTNHYSPLVWHILSEIKDLPSRPE

SEQ ID NO: 932494 - protein, 178 aa, Homo sapiens
MGPSVISRVCGNIPTQSPQIQTRSALFPWPMLPFFVLPTGVVWTAHKCGGQFWSLYPSTGMRNEGLELFFQSIFSDPLSDFNLTSLTRKFMGDLYDYSHVGRTFRKCVAKSMEAKATKKSLESMAAFAKTVALLSFGHPQAALQHSPEALRSPEYHLISSLGSQTNTAFLVKEIMSPL

SEQ ID NO: 932495 - protein, 175 aa, Homo sapiens
MIIDKVDQTAPLCEYSLDRMSGYLRSEAGSEDRGPFAHLFLAQSLGSFYQQWDEEQATCTVGDAELIGAGVCTSPFSFRMSYKLYLVKPWGPALPTALVDAVNQVPAVQITYVFVTRTLVKIWKVKAILMRTQMELRNKVLETEVKENPCCKVAKALAELYTGPRVLCNAKLKEY

SEQ ID NO: 932496 - protein, 139 aa, Homo sapiens
MIESKVNCSEGGARGAKGECMWGSLSPRSLCPPSQAQWEHRERLPCAGAKIMDEAMRNRKKRLAHPGFSPPPSSQSPASASHWLNLPGSESARPPGKCGASLLLCRLINYTSPLFLVSGASIWESDPLASEDQGERGQT

SEQ ID NO: 932497 - protein, 338 aa, Homo sapiens
MSQNFGVIGLRHHFAIHYLVGGGLLDGLHGAAAVQGITNIEVLAIFQQAAVGGDLSLQLDLDVQQGLLLLGLALSLCPELVIWACRPFISSLWFFFMKSSSSLRALICLQLQPSDIRVINDLAEPMEVALYRLEHGQLCLILDSKVISSKMGIVNLQNDVGIVHSICKDLSPQVLYGLEVMPPVSDLGSLLLQLLTDFALQPLVLGLQAPHSVQVGDQVVIQALPGLLLVLDAFHSCQTLSHPHSQSSGHHAAPEAGGVGHGDQGTRGPSTFIDAGLAADQPGTIAWHLDRAQGPVVGGEGGASGEAHAVRGGEREDRTQALLTILILRLYGKAKDRE

SEQ ID NO: 932498 - protein, 148 aa, Homo sapiens
MALPGKVSRTKASGTAEGRRISRGKSLQGSSSSNSRELASRTLELLSSSLRMASDRDTQVLATACANTREPMCMKVTRSFMFLSNGDPSSSDVGAGFSKEGQRGKEEGQEGAEQEQVRAAVWLYPDPWGSFGTNCTTVSPCEGLAFVP

SEQ ID NO: 932499 - protein, 136 aa, Homo sapiens
MRRLTEHVLGASTSFHSSCDFIPHSETEQESLENSCNLPEAELAREAIIEEAELSTMESPQQQTLPQCCGRFSCDGCQSTCSLPPAVTPETSPDAAQGPLEGKTTLRENCFRLWLSKECTSGENPNCKTHSVISLK

SEQ ID NO: 932500 - protein, 153 aa, Homo sapiens
MEDCACGKPRESGSWNGCSFVVKSLNCGFRFQHKHRHGQLEDSEEAAGGDGKVQGLWGTDDNVALHHQGAGWASSYGKPGQPLDEELTGENERVLTCIPTTDSRIVYTWTMSTLLNVTREETVLRVEMRFLGPLLMNKVSMDLEMMPLSLDYR

SEQ ID NO: 932501 - protein, 141 aa, Homo sapiens
MSRLKAILQSRGMNDLQPTVEISDRMESFYGFLLGLSWQVGGTKKGLTEERDASKVGCRHIELSEDMSLFLQVNLGGCGPGSHGGVRATIHSHIGQGRLEPGLLGSVNKSSFLTGHLEAAFNNSDQMSEHILTHVPYFPSQ

SEQ ID NO: 932502 - protein, 163 aa, Homo sapiens
MRWQRAHWQSDILKVIMQEYLDIRPVTSSSPQQQELNFLRRLTCASHVPSHACSPSPGGQWNPQWDIHRDIARAAALEEVKRPASLVQGKSGIKETEGRGFLRCAGEELSVQLYACELGTVVSTGSSLMGTKMLQKAASGASFCGKHSLRWNCPGTVQGLGTS

SEQ ID NO: 932503 - protein, 171 aa, Homo sapiens
MALILESELDEKRGSDLRSCHSSWEGRAPKCAHRSTNLAPGEQKQKLVLQHYFYETTLNTLPPTKVVGYSILLAAQPASPQTSGVAAHRRPRQIGIMEPLHQDPSAPSLSPSTLRESFTLLECPCIFKGVSMKNKAIDIDKEAVMSTDLMGKAKLSAVFVQKYRNFQEDLL

SEQ ID NO: 932504 - protein, 137 aa, Homo sapiens
MDLKIPVEYLLRSPDKSKTNCLTFHFQAGALSRQVLPVGFPLKLYTVIGACILTGDVLQKNAEVIVGGLHRCLLGVGDASKVVNGLPAQTSSLEPPDGSRGTVSKHCAVQKDSVSSGPQHQFLGLDDPQVWFRVPSS

SEQ ID NO: 932505 - protein, 145 aa, Homo sapiens
MASSPQALGMSRGAIWEPRTRGVLPDYRQCSFKAQGLFSQLVVNAAWPGTHPSGQWASLWPRIGLEMLFTSKVLELGTPKNHLMLHPTVAVLVPNVQDKDLEIGARSLRLAPWIYLPPQVLCSPAPLGVGFLSITLVVYPGQGQP

SEQ ID NO: 932506 - protein, 179 aa, Homo sapiens
MPLVLSLQPWRHRALRGAVEDSLRKEGCLTPREKRGNYKWSLTYNGSISKFLLSDGVQVIHSAKTMLPVPIQPFFYFQWFKGTETGQELIYSSKGGHFPKIACISDITKRNNTDFSMCITSITRANTGTYNCVKFWKGGPDMELKSGPGTELSVHSEYSVGLLRPPVCDNKSIVTPSIH

SEQ ID NO: 932507 - protein, 218 aa, Homo sapiens
MAACAQTPSFIQPDNIIEHLLCAMCLLRAENRKLTRTYPQEAHSLLRKTINTGTKQQLRVTRKTINIGTKQQLRVTRKTVNTGTKQQRRVTRKTVNTGTKQQRRVTRKTINIGTKQQLRVTRKIVNTGTKQQRRVTRKTINIGTKQQLRVTRKTINIGTKQQLRVTRKTINIGTKQQLRVTRKTINTGTKQQLRVTRKTINIGTKQQLRVTRWRNRLG

SEQ ID NO: 932508 - protein, 144 aa, Homo sapiens
MGKSLYLSGPISLSMKIPQDRKPFSQTGECQLISCAETNHRSEGDGAWVIDCIKFSLLEHRAGQREAHMDTGEGKALFHRYSYSYFTDVEIGAEKLENLLKITQVPLRLVAPDNRRVSAAESILAQGFNLPMVARIRRLTDIGA

SEQ ID NO: 932509 - protein, 163 aa, Homo sapiens
MLRFGIQLSPSSRRTCNRNTLSIFDEARRTSLALQHCKGRQKLCWGMVNNLAEWKKVNPAAFEGASIEEHPIHPRMPESLRNWQNQTLRRWRESRMLKTRGLTESLCGGILTLCSHARLSPEATGDLISGKFESGSRFSSHKESIDSGCDIGERWEGAEQHRG

SEQ ID NO: 932510 - protein, 128 aa, Homo sapiens
MAKSQPDLRASGRLCDTWTLWDTSGKMTIQEAVSCREIANRPGHHLYPLPSSGGDVVRLWVPRNRPGRQKAEEKSEAQASENPNQATCSGLNMGQNPTPRGRAGLGLHCLLQCTVGVKNEGSGARTGN

SEQ ID NO: 932511 - protein, 168 aa, Homo sapiens
MSMCRYPFASVSLENIDDYTAGDSPAERGEWWYMGGGVIAIFRKRTATQRGEVLIKPSQRTKSLHHCFRARGKDSSLFLLQQYPDFTSSVLVVVVVSGLLSLPLSVQNFSLMSNMKRGQSGSQYSQTDKSRSYLPFGLSPQMSLIHFGASDRELTYPTGPIYLCYREV

SEQ ID NO: 932512 - protein, 145 aa, Homo sapiens
MPYSASGGESLSEEELAQILEQVEEKKKLIATMRSKPWPMAKKLTELRGLLQRGQHSGSPMRAKAAVLFASTTGPRGGAMEDSEDSRPPNTTDKTTAPIANPGSKGKWGSLDTHLCQAKARCPNTPNQGVPEEAEWEAGIFIPSR

SEQ ID NO: 932513 - protein, 163 aa, Homo sapiens
MWTLQWYLNWTVCFLFAFPESPRMKAPSTESLHLAPGKARGTQQKPMREASGPKPCKATGVALPKALRAHPSYQCALDVGHGVKGDYFGALRFNDCPSGFQTCMGTVAHFFCPISPFWKGIIYPMPVPPQYLGNNTIDFQQGYQDNSMGKKIVCSTNGAETSE

SEQ ID NO: 932514 - protein, 148 aa, Homo sapiens
MITECRGRRHSVKAYSETRNPLQGVYLGAIISVSIFYGWPKTILLPMWPRKAKKSDTPDLHVLLLRCPAKDSPSVGHNDGLTQRKTHDPNIATAFWSIDMDSGKKQSIKDEKNLGPLEGSMRDCSENEANKHSSRQAPNGGSEISPSG

SEQ ID NO: 932515 - protein, 166 aa, Homo sapiens
MVVKAVSSEGFTSSDVGPRAELGLSEDSPQPRTGPSRIAKTPQSSNCCICTRSFLAGHHFDKFCQQQQCHSWHLYGSRLNRHTPCSPAGWTFMSREVSSNKSTDASSTCLFASPPLPATCQATGNRDPVTGGQCGGRTAVSQSPCTKPTAPWQDKEADIQMWRNNA

SEQ ID NO: 932516 - protein, 139 aa, Homo sapiens
MRFGDKRPNYSRDDTFTQITAPLAVRSWSPLCCVGPCLVLEEQEVEWKTMLDVKGGILVHLSWTTDAFLFSTRAMAMATGNPGLQRHWSIDTLGVDMPSVDALQCYPGKQMIWAIWWPHWYCAALCLAGHVLWAGHETK

SEQ ID NO: 932517 - protein, 172 aa, Homo sapiens
MSRLPVGAETWVWGDSSAGPYREGWGSKHPLPVGSLQASPTQQPGVRQPQVALQVTEVESGVGQMLDRAVHGELYGPLNVSVLGPRPGSGIHRNPSTTNRALSTLARAEVVQDRGQFCQWKPPAAVGPRADLLLVLLLVLPRAPPSWFAQRPPGTLGWWERQHKHERLTGRT

SEQ ID NO: 932518 - protein, 144 aa, Homo sapiens
MPDDAGSEASRVKTGLCAGNTEAGPKQEIPTRFAENNTREGAAGSALLFLTSPSPWRSLSACWLHLVLHHGQLWAEENKHTKRATGREQGRMKHVISNGDSVLSSVGKLVLKLGHCGERNEWSRRYSTSQDYHVFTSKERELQG

SEQ ID NO: 932519 - protein, 197 aa, Homo sapiens
MESLLENPVRAVLCLKELTAIVQKQQSLIHTQRERIDELERRLDELSTENRSLWEHQQLLQAQPPPGLVPPSSAPLPAAPATAPAAAARAQEPLQDQGQRSAAAPHPAPDRPPRQHHGQLLEQPQRGPGSRAHTPQSPQKHLGTQGAVTDKEKERPPSCCAAAGALLQHKSPSALGKGSRRGAREHPIKPMEDSGMA

SEQ ID NO: 932520 - protein, 194 aa, Homo sapiens
MVISQVWGLVLLCGPQLLEATGAPISGRCVVQRFQTSLDNIGKLCSIDPILKKIKHDTAVYALIPVTYSFKDKKFAHNPECTWSCTCLRFFERLTLRGQLDGFDSSSAIERGCKPVRRQMESMKCRLDSEGKGCPPAAPWQLQTPAETTVYGGGDFPPLYPTWGGLWVFAGRAVQSILYALPAAASAATLNFPS

SEQ ID NO: 932521 - protein, 144 aa, Homo sapiens
MVGLVLLGLGLALAVIVLAVVLSRHQAPFDPQAFAHAAVAADSKVCSNIVGSWEWKRAWGWPQLLLRNRGHWMLGPWPGWLEASGRGLLQHHPGQDSSLQRTLATLPQGLLGPPEAHVPASISPLSPGFTLGILLQLEPLGASS

SEQ ID NO: 932522 - protein, 168 aa, Homo sapiens
MKGVINLASSSCGPGGLWLGAWMAVSLSCHSGGSAGRASSQEMSLEYGGDSGSGSLKSQTEKHSGCLSEEKSYQCQNSTGFLTFLKLYNNTSINLFAVQGVRKSIAGSILERVEEGAAAGIGHYTVVIERKTKALCTDSHTGSTRPLKNGSGKFTWAAVWKEKQIPVH

SEQ ID NO: 932523 - protein, 142 aa, Homo sapiens
MLAFPNFLIMALLSHPGWSAVKTRERFHLGPSSRDGPAAMRPFIIGSVMRRNNALRAFHKLFFRVVAAEVISQGTLNPDSSNVFASREDCRDSHTGSLWESGGLQVTLTPEQTWNSVECSRRCFHFLVFHLNRCFIYPLLLT

SEQ ID NO: 932524 - protein, 151 aa, Homo sapiens
MSLEYGGDSGSGSLKSQTEKHSGCLSEEKSYQCQNSTGFLTFLKLYNNTSINLFAVQGVRKSIAGSILERVEEGAAAGIGHYTVVIERKTKALCTDSHTEQNIRRNCHDIRFGSYFLDMTPKPRQQRKIDKLDLFKIKDFCASKYTTKKAI

SEQ ID NO: 932525 - protein, 239 aa, Homo sapiens
MCPVCHWEAWVEIRFQAHLWDIPQGQAFAAWAPSTTPFMDVEKCSLSWQLQVVSLPLFIPLPHSPALASLIPALNFPSQFCLRSVFSLGHCGLTMFQDQAQDEIESPLTSAHEHIYTYMSQDKKKSLSQPLNLGIPVAAFDEWTVGDNELGRLLSPSIGYSPHLHSLATLRPQCCGESWISVLEDERLLGHTEPVWPWAGWAGEEALAEVQVITDKGLNWDGGGNGRRGPRRGCVEQDC

SEQ ID NO: 932526 - protein, 155 aa, Homo sapiens
MVISQTGAQDPGTGSFHSLFLGPLALGALNCHVRSLATLLIRPHRETPRQPEEGEEASCVYLPTSPPKCQINWELWDTNGIQGLLHLKQEAEPLCPRISQSWSQEDSGGVRNSRGHFQAQGNAQGQIQKTPSCVWTLASAECVRLLGKLCCFQAV

SEQ ID NO: 932527 - protein, 200 aa, Homo sapiens
MHCCFNKSWYSWTGLTSWHRPSSGDRLCHQQLFGHRLRKAKLSFMELQNALSTIMIFHTTLLLIKELTSQPMKCGQGPTLMEIAILKQLCYRTLKSSFEDWLPCQLGGNTFQGWNKVLQEAVYALNWHSIKGAVSSIAKIHRSRNSGVGVEEVPFTIIPSDPPAKCLLPVPTTLFSAGPGGLVPRRRIFPLGDTMVFPLN

SEQ ID NO: 932528 - protein, 152 aa, Homo sapiens
MSCKGHELILFYGCIVFRGAYVTRDFYFPLQCLLAASSGEKEPCVLREGRRAGKPDTVMVPLPFTREEPSQPCHHLLKALPFNLITWAMKFQHLNFGRNAFKPQQTHYPISKEPGIRQVHRTGMDKRPEPWGQGKSKLCDLEQLPCSSSFMS

SEQ ID NO: 932529 - protein, 137 aa, Homo sapiens
MQSRTELYIFERDPSTFNSWGFLRKARFSQYRSMVLPLFFPRSAKLLEVLLSPLLCASRVARQKQRKIIQSTEKKEKKSFFQKNKIQEEKKTNHKRAFKYRRQRPRENTVTWLQDQVHKDINKMETSSRFFVCFRDL

SEQ ID NO: 932530 - protein, 152 aa, Homo sapiens
MFTKQGDYGIPKAQVCVLQKQRVGRAFLSPVAGLLHPGGHENCEVHKEAAVAKCIIMRGNGLDKGIIESSASPRPRLGEWDGVDCRPEPLHDANIAKVARGQGGQVAHGAGGVAESGGSSALIPDSHDKHRLHRSGKHADPAAPPFKGAQLL

SEQ ID NO: 932531 - protein, 346 aa, Homo sapiens
MSFFTLRYYYAASWKHGPNPEVLMECAVGDPGAWAHAGSLSSVLMKWGWEVPQRLQEMEEKVARAGPTAELGLLVGVEGGFMWLRLRAGWTSTERSHSKGLLSMGSAARPGADLLVSAPTVSTKNCPAETMGVVLSNTNRDRQGRAYSITRWQIHTEVNLSGLRHYRGTAAEPAQMCGVCSSSCGCGQGMWGCDLAVPVCMLGAMDYTAGDGEAQAITRPGSDSLASVACFLAVPLLLGWKATSENLDPGVVPASTMGTKFSVFQPGLLITPITARGDPPPNLLNSEWLWSGHEVRDGDHSSSSVFEKPAQRAPSHLSVSSQHKLVAVEQGCALYTQETWAPVEVS

SEQ ID NO: 932532 - protein, 148 aa, Homo sapiens
MARGTAQALCSPWRICLRAFPALWGRPHKHPLADYKWELEGVQQTPPGESTTGGQALCRTNIGGRGNTTLLVEAPRPLSCPLTSLEPLITPWTQAAWTEGALQQGPWVCCTSILSRCLSPASSSDPQDNTVGPEETPTKNLGKQKEER

SEQ ID NO: 932533 - protein, 136 aa, Homo sapiens
MLGFNCCFQITPMPSAFWRLCFQVRGLSPVSFCCSHTIWLGAPVATLGVESESLDPEFNGALNKRNLGGWGVARAGMGKALSQTVEYALANAPGEEAWREVPGDADFLSPGRGLTSCISNKFSDNVNVSGGLRAMR

SEQ ID NO: 932534 - protein, 143 aa, Homo sapiens
MPFKKTKPVKHYVKLHMAGVSGWRQSRGALLIPRSRQAAATVVRAALPSSSGRPHAPAVSRPSYPDPGGQSGSLGAFLKVQPDLLAVPSAPRHSHASGPLDVRFAWSTLHPVICLANVLGTFSLAHPTLQSLPSPAHTQDPCI

SEQ ID NO: 932535 - protein, 251 aa, Homo sapiens
MRLLAASSLLPSTYACHTSGSLQDLVSTEDMEGQGALEKVLREPVSHLTLSSTVFPSLEPSLTTEASLTAPKPPSEALEPLPVHHVTLPSSAGHYPVPCCTPTPHTVLLQGRGMEGKYPCECGEWIFNGILSSCELPHRRPLQKLGKGIPGFYKEEPGILCLPSLQEASSNTSESHWPAEASALRHRGVRLGCLSGYLAPDQDTFESRNTAISHSAGAAGTNKDCPEKLVLSEPGALEKPSTARKLSPPFL

SEQ ID NO: 932536 - protein, 154 aa, Homo sapiens
MLHLEKLTNSIIYTFYAPKLNNLKFMLVNILKRKAQKNSHVKRAASGTQKPTQQVHVARELETHTLRFSGSRSAAPCFPWLWRGFVEPCLSCLQIGNPWAPRYWHHAGHGTGNKAGNPEQQAFMSDWGCLHGFQPPPCKPTGDPSCNPDQLCSA

SEQ ID NO: 932537 - protein, 129 aa, Homo sapiens
MWAEPNKGIKAGHPSQQCETTNPPEGTNNFGCSTFKSYNTHCEGRECGGTGKSPLFVGHCGNPNRKVISLLFVKEWTIVTSAASLISSCFVPWNMDKGFSAQGCRASLAPCGGSVSFILRLKVQSKDKA

SEQ ID NO: 932538 - protein, 130 aa, Homo sapiens
MTHAQPVPAWSAVHDFSTAVQGPQGVTALPLDQPCSGQSPPQLQYCHCVKADPTAGGPGWPFCCAHSFWPLATAAGNESGAATLEKSLAVPQEVKPIQQSTPTYTSKRIENVHLHKTLYMNVHSSIVHNI

SEQ ID NO: 932539 - protein, 266 aa, Homo sapiens
MVTGKSGHSDQFPYIDTWLQLVLDPPQWLKGQAAAVLVAKGQIAKEGSRSTCQGKSTPEVLFNPTSEDPLQEMAPVIPVVPSPYQRKRLPTLEPTVLAPPQNKHILRPPRVNKRGVEASGETPPLAAHLRPKTGIQMLLREQQYTGIDEDGHVVERHVFAYQPFTSADLLNWKNNTPSYTEKPQALTDLLQTIIQTHNPTWADCHQLLMFLFNTDVRWRVLQAATKWLEERALADYQNPQEYVRTQLPGTEPQWDPNEREDMQRLN

SEQ ID NO: 932540 - protein, 152 aa, Homo sapiens
MELTGSKDAATSLDLSTGKKKRFNWTYRSTWLRRPENHGRRRKALLTWQQQEKIRKMQKQKPLIKPSDLMRLIHYHENSIGETTPVIQIISHQVPPTTHGNYGNTIQDYEVENFQTIERGMRKETTEKNIKHDYRPLQKDRRYRKQVSQESG

SEQ ID NO: 932541 - protein, 285 aa, Homo sapiens
MDRVDREIAKVEQQILKLKKKQLQYMGLLALSTFLLSHDGPQFNETFCGSIMVSRGIIWSMYQRYPKYLYFNMLPPLLFLQDFHNCGCDDDDDGDGESGDNDSDSHVEDDGEDSDSDNVGDGEESDSEGGGDDSDSYAEDDDDDGENVEGEHGDGDDKDGDGDDEVIMMVMRMVMVKVVIMIVIVMLRMMMIMVRMVKVSMVMVMVRMVMVKMVVVIMKMMVMVRMVMVKVVIDTDSYGEDAAADAGENGEGETDDNEDGDGEYGDGDGAPLDLAIRHLRIVHFF

SEQ ID NO: 932542 - protein, 191 aa, Homo sapiens
MSLEKLRALNISPCKQPRGHLVRIMPNLLYPCSINGFTIVDATKNIHDSPEEVKITALIGVWKKFIPTLINDFEGFKTLAEEVTTVVVKIAREVVLQVEPEDDFPRGSGKLSRTVHLKHEPRAFAHLSHTAIDLGKRTTALNPALEKVPLCLGTQAPGQMCLTLHGLFPGSISKCKLCLSKWCPRLCCLKG

SEQ ID NO: 932543 - protein, 188 aa, Homo sapiens
MVSCALCLQEEMHCVLTWQKVEGQNRGSPLHPVLVDLLNDFDKNADSVLNNKVQAEVVSDGDEELVVNWSKEPLYRVLTGELPSGAVRRGPLSSRPQNGRFTDSLHHEPGKAMDTQHQSMKTATRWTIPYKATGAELHKAVGAHLLYQHDHDVKQGVKGDHFGALKFDYLAGFWTCMGPSKCLIFFNG

SEQ ID NO: 932544 - protein, 147 aa, Homo sapiens
MSNCQIKGCTITIPIFTITILIIIISLTLTILTSISSSILTLTISIYHHLHYHHPHHHHHLHYHHHHPDHHHHYHLIITILTITITTLTFTFLTILIIILSITITIIITTFTITFLIITIIITLASPSLSSPSPCSPSPFSPSSSSA

SEQ ID NO: 932545 - protein, 164 aa, Homo sapiens
MADVGIKEPTRMHGQGLVHRAAGINKWKPPSHLICVAPGALLPHIQSALSQQEGFHRSYPEINPPPLQPCPYLRNLAYPCVGDSLGPMQAPSTILTPSDSRALGTIWTSTVFTLKWTQGRGHAGSELCVGRGTVSGGPERHLLKLRIQGGGPLAKIDGYDSFVQ

SEQ ID NO: 932546 - protein, 172 aa, Homo sapiens
MHNCLGMQPKNQACYKQQPSGTELTCYDLLQEPRSSQICELPWLKLVRGVLKGVQFYSQRPLGWVVPSPASRGQHKPVNRQSPLRGRVLAGPEHWDEGHHLDLAHGEAAGHSEAQMQSLTLRPIPATEIWGCSYLRLLANPSQPISPGLFSSFLICLLESPAHCISLLETLR

SEQ ID NO: 932547 - protein, 135 aa, Homo sapiens
MNTFPRGNIVDNWSFLFELKHEWEEGTSHKKIRKNIARKGNSKHKCPEDLILTNNFQKVWIWIWISMIKYIKSWALDLVGCPLPADLNDKGRGVQSECEGCTRGQLRECEPQARHSPSPISSAVASDLQLHFGLP

SEQ ID NO: 932548 - protein, 132 aa, Homo sapiens
MVVATVGEGENGEIFVTGYQVSVMQRKEEEGEGEGRRKKKKEQEGKGRGRGRRREEGEEGQEGEEEGEKEKKERRRREEGEKKESRRRAEGEEEGEKERRRRRRERRRRRERRRREEEGEKKERRRRGGGAG

SEQ ID NO: 932549 - protein, 691 aa, Homo sapiens
MLSKAQFSFLMVVENTSGKSQRPTQGPQHSTWVSLLVIQHPRALQLAGSESFQDWVFSFKAVGSLVAQGVSRNVILELGPEKGASRLSLAPYPAVAELISKMQDKVLPTFPSSLLKEKECVSFRATSCAAWGSGVHVQICHLGEFRVMGVWCTDCFITQISGLKWKWRKDGGPSAHAHRHPDQQAARLACGQKWMKEWQEIIALYEKDNTYLVELSSLLVWNVNYEIPSLKKQIAKCQQLQQEYSCKEEECQAGAAEMGEQFYHSCKQYGIMGENTRGELLALVKDLPSQLAETGAAAQQSLGEAIEVYQASVGFVCDSPTEQVLPMLWFVQKRGNSTVYEWRTGTEPSVVERPHLEELPEQVAEDAIDWGDFGVEAGDDAVALQITVVEAGIQAPEGVARGPDALTLLEYTETQNQFLDELMELEIFLAQRAVELSEKADVLSVSQFQLAPVILQGQTKEKMVIMVSVLEDLIGKLTSLQLQHLFMNLASPRYVDRVTEFLQQNLKQSQLLALKKELMVQKQQEALEEQEALEPKLDLLLEKTKELQKLIEADISKRRMGVPCHAPLQILLHQTLWAPHRLKFCLYHFSKQLSLPAQVSVVVEGSPAGIPEACGERLLAYRSLWIQAQGLPSDRSAPAAPDSRTVPGFRPTLSKIGPHTPRLWAHPGAGLETLASGTRPVNMDTVLRPAE

SEQ ID NO: 932550 - protein, 135 aa, Homo sapiens
MSLSQYTGCVGPSVPWGVGCCVVSDAGSVVVPLGLASTMMLQPFEWVWVDIGKLWLHESLLTLNLSCGLLVVLVALVFDEWHPWSGHVAEACSTVMVASFPKQFSSSASWRKEGCAAASLKGSPVGMTIVNLCGK

SEQ ID NO: 932551 - protein, 154 aa, Homo sapiens
MGTIWKMAALLGSILGVKWCLTPRDPELKELALRMAHYQVGMVQWRLNLRDGGMQMLLTPRVGSTLAVVLASRWHKEFVPFKSIPLQSIPFDSIPFESIPLGCIPFKSIPFESILFESIPLEYIPFQAILLESISFQCIAFNSIPFESIPFHSI

SEQ ID NO: 932552 - protein, 154 aa, Homo sapiens
MLLNGGISGTERSVWSNDRNCPRGYGEDEEGVESLCDACPPWKLDIAVITVVTRNDPHFTDEKTEACSHRDFPIVIHQMLPDFPEQQMNESSQLTNGCRKGGRMKLHSGKLAFACAVTIRSVDQVAALLAELPGDWLCQRRIVLEQAKWENETL

SEQ ID NO: 932553 - protein, 483 aa, Homo sapiens
MHGLHFGPCGTMEASLSLCARARASADRPPYPETSWTSSCTKRNAISSSCSSTGGLPGLKRRRGPASSHSQLTLSSSKTVGEDRLQAVSSGHTQCEKAADIAPGQTLTLRNDSSISEASRPSIHKFPLLPCRRGEPLMLPPPLELGYRVTVEDLDREKEAAFQRINSALQVEDKAISDCRLSRPSHTLSSLATGTSGLPAVSKAPSMDAQQERHKSQDCLGLLAPLAPAAEVPSTAPMSGKKHRPPGPLFSSSDPLPATSSHSQDSAQVTSLIPAPFPAASMDAGMRRTSPGTSAPAAAAAPPPSTLNPTLGSLLEWIEALHISGPQPQLQQVPRGQNQRSQTSRTSSCPKRKAISSSYSSTGGLPERKRRRGPASSHCQLTLSSSNTLGELLKPRREAADNTHGPCGGGGKAGLSSNTKSRTRQKPPKTEGLMPERWPQAFACIAEGEPGPPPGERCVPQPHTGFATTQAFEAGGGDFRTHS

SEQ ID NO: 932554 - protein, 260 aa, Homo sapiens
MASEGASLQPCQLPCGVEPTRAQKSITGFGNLHLDFRGCMEMPGCPSRRLLQGQHLMVNAVQKGNMVSEPPHRVLTGAPPSEAVRRGPPSSRPQNDRSTYSLHHVLGKATDTQHQPVNAAGREAVPCKATGMELPNMMGTHLLCQHDLDVRHGVKGYHFGALRFDCLAGFWTCMGPEAQEERKGSRRGRAAEEESEALPWLPSCLLRLNNGCTSLKPQLLRSSLLPELQPALLFLAFPGPGLTVAPHSVAWKCFITLGSP

SEQ ID NO: 932555 - protein, 135 aa, Homo sapiens
MTNTKGKRRGTRYMFSRPFRKHGVVPLATYMQIYKKGDIVDIKGMGTVRKGMPRKCYHGKTGGVYSVTQHAVGIVSRDSFLKRMKENDQKKKEAKEKGTWVQLKHQPAPPREAHFVRTNGKEPELLEPTPYEFMP

SEQ ID NO: 932556 - protein, 281 aa, Homo sapiens
MNKGGSLDIECGSENSLTLEAVKRLIAEGNKEELRKCFGARMEFGTAGLRAAMGPGISRMNDLTIIQTTQSMQSARMWLSLSAELRKFLHFGLTALLLVDTTFRDMLTLSIKTLSFALADKTKARIVLANDPDADRLAVAEKQDRYGYHITKASYFICHDQETIKKLFENLRNYDGKNNYPKACGKFEISAIRDLTTGYDDSQPDKKAVLPTSKSSQMITFTFANGGVATMRTSGTEPKIKYYAELCAPPGNSDPEQLKKELNELCRNPFLGFLFLLSVFE

SEQ ID NO: 932557 - protein, 138 aa, Homo sapiens
MCQLRVRVIMKTWVPFWENGGRKPGVLKDGKSTLFLLKLKCNGGHDGDEEAIAKAQEKTDDDKAPEVPAQGNHHGHQAQEQEGKDLEKQGPEAQGFSSSSHKQANLAKNTWKEWGSRLFGALKIFYVVAGSEFFRLIS

SEQ ID NO: 932558 - protein, 143 aa, Homo sapiens [sequence omitted]

SEQ ID NO: 932559 - protein, 200 aa, Homo sapiens
MLPALLEESSETHTRLLLDRKLLFLATVLWFRHRHRPFHTVLSRGLLRGGPPRPLPCRDGRADQKLRALCLRALPARFAAATRAAANPLERGGPGRSAGRGGAGAGGAQLLGRGIREPRVDRSRLIAARELPRSRLPGLVPAPVRGCPGVQRRRTACRQVSPAPASAREPTSEARPGEAEAEAGWLQPWYRTAATLGLPS

SEQ ID NO: 932560 - protein, 168 aa, Homo sapiens
MWISQQKKFENSKNQNAAYPTKDRNSSPAREQNWTENKFDELTEVGFRRRVITNSSELKEHVLTQCKEAKNLEKRLDELLTRITSVEKNINDLMELKNTVRELPEAFTSFNSQIDQVEERISVIKDQLNEIKRAGKIREKKNKKEQTKPPRNMGLCEKTKSMFDGRPI

SEQ ID NO: 932561 - protein, 182 aa, Homo sapiens
MQVTEFLLPTSHSPSMPGAYHPSKLFSKSFQLASFITTLAVVSIYVLMYSGPFLEPSSESIGPYNQSVFLVVSHEFQMLARSLNSYFLDTNPVPQNIGENNHSRSILTSKNLICTPDPMKSLEVFKLCFVFLFMTPILRPDLEISAADFVTHKSMNIAGKGAQKAFLGQVLLCCEVGERTAS

SEQ ID NO: 932562 - protein, 290 aa, Homo sapiens
MKHPGLTIPERIHTKERPYKCEECDKSFKQSSRLNKHKKIYTGDTTYKCEEKKPYKCEECGKAFYYSSGLTQHNIVHTGDKPYKCKDCGKIFKWSSNLTIHQRIHSGEKPYKCEECGKAFKQSSKLNEHMRAHTGEKFYKCEECGKAFKHPSGLTLHKRIHTGENPYKFEECDKAFYWVLSFTKHMIIHRGEKPYKYQECGKAFKWSSNLTIHKRIHTGEKPCKCEECGKACKQSLGLTIQKRIHTEEKPYKCEECGKAFYWSLSFTKHDSSYWREALQDMDEIGNHHSR

SEQ ID NO: 932563 - protein, 1698 aa, Homo sapiens
MRHFWVSLLKTDTESIEEKNSSQDKHSDPRSSVPESYVRDKNSEPSSSVLEFCVSDKHSELRSSVLEFYVRDKHSKPSSSVLESNVRYKHSEPSSSVLESYVREKQSELSSRSSVLEPYVRDKHSEPSSSVLESYVMDKHPEPIHCLLESYLRDKHSDTRRSVLESYVRNKHSATRSSALKSFQCSGILCVGHSDPHSSVLETNVSAKHSEPSSSVLEYLVRNKHSDNLPSGSVLESYVRDKHSEQSSSVLESSVKDKHSDPSSSVLIPYVRDKHSEPSHCALKSYLKDKHSEPRRIVLESYVRDKHSETYSSVLGSFVMDKQTEPSSSVLESYLTDKHSELRSSVLESFVRDKHSEPSSSVLELYVRDKHSEPSSSVLESYGQTFRPSKQCSGILCEGQTLRSSSSVLKSFVMDKNSDRRSRFLESKVRDKHSEPSSSVLESYVRDKHSEPSSSVLEYSVREKHSDPRSNVLESYMRGTHSEPRNSVLESFVREKHSDPRSSVLESYVRDKHSEPSSSVLESCVSVKHSEPSSIVLESYLSDKHSELRTCVLECYVRDKHRTEQQCSGILCEGETLGTQQQCSGILWTNIQTLSSVLESYVRGKHSDRRSIVVEFYIWDKHSEPSSSALESYVREKHPEPSRIVLECYVWDKHSEPSSRGLESYVSYTQNTAAVFWNPYEKHSEPCSSFVDSTVRYKHSDPRRSVLESYVREKLSETCSSALESLVRDKQTQLSSSVLESFERQKYSDPRSSVLESYVRDKHSEPSSSILESYVGDKHNPAADSSVLESYVWDKHSEPSSSVLESFVRVKHSDSQSSVLESYVRDKHSDPHSTILECSVRNKYSDPHSSVLESYVRDKHSDNHSSVLETNVRTKHSEPSSSVLEYLVRDEHSDNLSSVLESKVTEKHSETSCSVLEFYVRDKHSEPSSSVLESLVNDKRSEPRSSVLDWFVRYKHSDPQSSVVESYLRDKHSSHSHCVLESYLKDKYSEPLRSVLESYVRDKHSETSSSALESFVRDKQTEPSSCVLESDLMDKHSEPSSSVLESFHSDPDSPVLQCSVRVKHSEPHSSVLKYYVRYKASELSSSVLESYVSDKHSETSSNVLESFVRDKHLDSRSSVLLSYVRDTQIQQHCSRIFCDGQTLRSSSSALESFVRDKQTETSSSVLEVFVREEHSDPRSSVLESYVRDNHSEASSTVLESYVKDKYSEPRINGFLKSHSSTLESYMRYKHEKPSSSVLESYVRDKHSEPSNSDLESYMRDKHSDPRSSVLESFVRDKQSGTSSFVLESYGIDEHSEPSISVLESFVRDKQSGHSSSVLESYVRDKRSDPRISVLESYGRDLQTEPSDSVLQSFVREKHSDPQPSSSVLESFGRDKHSDPLSSVLESYVRDKHSEPSSSVLESYLKENIRNLLEVFWNPMDKHSDPHSSVPESYVRDKLSEPSSSVLESLVRKKLSDPLSSVLESYVWDKHSEPSSCVLQSYVRDKHSEPTSGALDSLDNPSDPSSSFLETYVRNKHSEPSSSVLESNVRDKHSETSSSVLESYLCSGILYVEQTLRAQKQWSGILCEGQTLRPSKQCSGILCEGQTFRSSSIVLESFVMDKPSDAHSSFLESLVRDKHSEPSSSVLESSVSDKHSETSSSVPASFVRDKHSDPRSSVLESYVRDQHSEPSHCVLESYLRDKYSNHRRSVLESYVQNKH

SEQ ID NO: 932564 - protein, 162 aa, Homo sapiens
MVNTLYGHIILNMHNLINDGKYFLPDADVENLMIMLTSLLKVLNVTENNHFTENIPNGAAGEVGCVGKGHILPHLYIDTGAVKCHCSWGITVLQFSEAFPPQQTSCHSASAPCAYQHAAPDLDLLSPTWWPPLVGFIVKDLPFLLCTPEPISCQNCKFYSDT

SEQ ID NO: 932565 - protein, 165 aa, Homo sapiens
MTPHNCPSYLLTSFLTSLLLYLFSLYPGILELDPDSGPLPGTFYSLIALELEYKESICVAMMVTSADATIEHWLYCLNDILKWTNGQKLLHTEQIYLWRSPKCPSGILNLQFNEIIVVSPGSSIPPSEIKRSRPAECNVMVTGSKKFASGPLGVMASDATSTSTP

SEQ ID NO: 932566 - protein, 462 aa, Homo sapiens
MLQISFKYENFSSKIITEKSIGFNLQVLQCLFGKPTTENSQSTKVEEDFNRTTKEAATKTVTGQRERDIGIIERAPQDQTSNDNFIFYTKIIEVATYQKEIKTTNGKIEDSTTLSKILDAVPSCERGRELKKDHCEQITAKMEQTKNKFCVLQKELSEAKEIKSQLENQKAKWEQELCSVSHTHESENDLFHENCMLKKEIAMLKLEVATLKRQHQVKENKYFEDIKILQEKNAELQMTLKLKQKTLTKRASQYREQLKVLTAENTMLTSKLKEKQDKEILETEIESHHPRLASALQDHDQSVTSRKNQELAFHSAGDAHLQGIMNVDVSNTIYNNEVLHQPLYEAQRKSKSPKINLNYAGDDLRENALVSEHAQRDRCETQCQMKKAEHMYQNEQDNVDKHTEQQESLEQKLFKLESKNRWLRQQLVYAHKKVNKSKVTINIQFPETKMQRHLKEKNEENV

SEQ ID NO: 932567 - protein, 254 aa, Homo sapiens
METPLTLPAANSSEDSTAGSLARAGTCRSAYSGQLHRAQRLKPRALGSGQGRDQPCRPLLRTQLQLPPVQRRRSSRATGHFACTTKSQDTRDNAASAPNSGSQPRSCSRAETFALGPVPLAAQFPVPATRNSGSRQRKSGLQAGTVVHSMTLRLSGKPLPAHGARSSLGGNPRPCSYTSQADPRARPRPAANSGGQAPAAGGREQAAQPFPGCCPVPSACTPRYGYYRLLVTDKYGRNCRSSCDRQIDLAEEEE

SEQ ID NO: 932568 - protein, 143 aa, Homo sapiens
MRPPQAKIDLCSTKKDPRTWGAEGSTERVGATGVHRQLEEDADGKLPFVTPGACLGPEDHQIPKASGASEAEERQGQWLPVSRDLAATTEAYLLVPQPTGGHTPGLWALPRTCVWASLPSRNHLRTLCIPWICFVSEGIIKEC

SEQ ID NO: 932569 - protein, 188 aa, Homo sapiens
MRYLVHHHWHWLDSGCSPQRDRSSSPATEQNWTENDFDELTEVGFRRSVITNFSELKEHVLTHWKEAKTLENRPNLHLIGVPESDRENGTKLENILQDIIQENFPNLARQANMQIQEIQRIQQRYSTRRATPRHIIVRFTKVEMKEKMLRAAREKGRVTHKEKTIRLTADVSAETLQARRVGANIQHS

SEQ ID NO: 932570 - protein, 372 aa, Homo sapiens
MEALELLGSTYVDKKRDLLGALKHWRRAMELRHQGGEYLPKLEPPQLVLAYDYSREVNTTEELEALITDADEMRMQALLIRERILSPSHPDTSYCIRYRGAVYADSGNIECYIRLWKYALDMQQSNLEPLSPMSASSFLSFAELFSYVLQDPAAKGSLGTQIGFADLMGVLTKGVREVEWALQLLREPRDSAQFNKALAIILHLLYLLEKVECTPSQEHLKHQTIYRLLKCAPRGKNGFTPLHMAVDKDTTNVGRYPVGRFPSLHVVKVLFDCGADRDSRDFDNNTPLHIAAQNNCPAIVNALTEAGAHMDATNAFKKTAYELLEEKLLARGTMQPFNYVTLQCLAAQALDKNKIPYKGFIPEDLEAFIELH

SEQ ID NO: 932571 - protein, 137 aa, Homo sapiens
MTKMPSVLSTLRKNRLLHPLALEGCPLPGACASYSRYQTNMPIKACVLSPRQTGFRPVWNLGNGALPMATIGNLVLAGALPFIDKNPLELGFPMDENNLQCGLILACFGYHSRSLALLSSSFPLHFPASATTLSPVV

SEQ ID NO: 932572 - protein, 154 aa, Homo sapiens
MYYLLLIYCLLIHQLAQHSQAELPAAIIPSLRGLEAIELLYLTLLLLSQAGELRHLQSLPLGSLKVLPGTKPSGVTPVPPYAPRAQTVAKLAISWILVATPGFTVWDTAEPRNAKIWSDYYTVLLVHKTLRLRPCLHCCSKYLHLESSCCGSCL

SEQ ID NO: 932573 - protein, 190 aa, Homo sapiens
MPYGLFVLLLFFWHAWEKPGVEVSYDHMGLNKRQNKDNSVPQIFLLPLMLLVLNHLGKKLKRDREEKNKNKDILIHREKTLENALLPEDGSFFRPEEFHLGYHITWFSLHHRKLLLDVTALGELPRWWWAASKMVASLVFSDLGFLASRIPRNRILGHADEPGHLAVQEQWQAFSLIRSGNGFLAGSISM

SEQ ID NO: 932574 - protein, 143 aa, Homo sapiens
MLDLRSRLTDQTLYFCRRVQHKSRNGKSRLAESSDLHLSPVLDASCPQTLDSKFFSFWTLGSTPVVRPGRSGFQPQTEACTVGFPTFEVLELRLTSLLLSLQMAYCGTSRSDIEEAEKRRNKCMERDGNQIVSISYYVHVKNL

SEQ ID NO: 932575 - protein, 139 aa, Homo sapiens
MAAATQGGSSLPSELESMQSALWVPGLLTAPQAFLGLQDLMPCVPATPAVTKRGQGTVLAAGSEDGSHKPWQLPHDVEPTEKQMLRKLIATRPALQELLKEALNMERKDHYQPLQKTHLSTQTSDTIKQAHKQVGMTNT

SEQ ID NO: 932576 - protein, 352 aa, Homo sapiens
MTSSVVGPRRSSKALPKAELAPEKGHGHCWVGKCFHNQQDAENAFQEFIKSQSTDFYATGINKLISHWQKWVDCKEFSDSLHNNFDQVWKNKEHNEAGWLLLSSGDKVMKENDQLRDSVSGLQKQILSLKSPKIALSESLIFCREIAEIVEKETQALTTRVADLQQKVHTQPRQVSTVKVRTLIEKERDPATWNGNTWEDPDETRDTEFVNSDEPFLPEGTASPSPVVATSPPQPMVPSPFPPLSEEESAPMPLFASRPITRLKSLWAPRGDFWAFTRVTVHWRKGNDQTFPGLLDTGCKLTLIPRDPKHHCGPPTKLGAYGGQVINGVLAQGHLQWVQWVPRLILWSFPQC

SEQ ID NO: 932577 - protein, 124 aa, Homo sapiens
MVRTVKCKPFWMSVKRNLTQNDCFNKGLRTMVIEQKDFCNRNRGLLQYEDPSVGDNLQLYHMALKRGFLFQGVVNKARNNLVSKSWIRGSTKGPLIRRYFFLRMGKQINRKRIKKINAMVEFLT

SEQ ID NO: 932578 - protein, 151 aa, Homo sapiens
MARTVSGIYSFWWVLGLTDFKNEAPDPREFVKRLQTAVRNQSWRDSDFYVYLNVTVFWLLCKKEKGINSQAAIGSLLEQQLMLQLGDRNPNETEENTGPPVHCGALRKNQRTSPLVSSQQKAKETSYIIAGKRENDSRVKEKTPCKTIGSL

SEQ ID NO: 932579 - protein, 263 aa, Homo sapiens
MAGVLAGMGGIQNAETMQSLNNWLASYLDRVRSLETENWKLESKIREPLEKKGPQVRDWDHYFKTIEDLSAHIFANTVDSSCIVLQIDNARIAANDFRVTYESELAMHQSVESNIHGLHKIADDTNVTQLQLETEMEALKEELLFMKKNHEVEVKGLQAQIASSGLTLGEQPEGGGGPLCPANGAAQGDPDAPGVRVATDLGRGAAPGPGVGGAAEHKVKLEAEIATYHPLLEDGEDFNLAFEGFEKRRYTISSAYERDDPAD

SEQ ID NO: 932580 - protein, 143 aa, Homo sapiens
MRKNLHKKAENSENQNTLSPPKDHNSSPAREQNWTENEFDELTQVGFRRKTHLEKNINDMMELKNTARELREAYMNINSQIDQAEERISQIEEQLNEIKHEDNDREKRMKRNEQSLQEIWDYMKRSTLCLIGVPESEGENGTK

SEQ ID NO: 932581 - protein, 154 aa, Homo sapiens
MASKGGSPKPWQFPHSVESVGAQKSRIDVWEPPPRFERMYGNVWMSRQKSAAEAGSSLRTSAKAVQKENVGLEPSHRVPTGHYLMELRQVNQFGNQKFLIYVPALSAEDMTHGERSTAQFIKRGRLCKQWKYIQIKLSQEQKTKHRIFSLIGGN

SEQ ID NO: 932582 - protein, 148 aa, Homo sapiens
MNKGSSNISDHSNPAQHWITPQACGKYCLATTDIHSRSKSDLVVNDVRPGSFNLMQQPPLWPKVDPEMLMRGQGLKLVSLGEPTRCSITLSSSLYSSCFVLMQLCSMPPSLSPNYNFWALATKCRLSLLQPPPLLLHNLQRVNVDNLH

SEQ ID NO: 932583 - protein, 142 aa, Homo sapiens
MKPAEDTLFHVLSEIYEAAHPELFTPPGGFVVSLISGLNLLRFTVSVTAHKGHSDPKSQQQQDLLRRAKQGGFHSMEADPTRLPLLAWVAPFYSLIWPHPHSADWSILQSTDWSVLQRADCILSSPSGAGALQAVPELYELL

SEQ ID NO: 932584 - protein, 138 aa, Homo sapiens
MRVQQEGLLQTLNARALILDLPDSRTVCDLIKILLKTSLTAVGIREWQEWKQIDLHYCMAPCSNQPEIRSSSMCSFMKGLNGKKYRFTQSLLEQRGAKSSLMFSVCNNNMVALVVLRNYSIHISHYIISITSFLFQSR

SEQ ID NO: 932585 - protein, 176 aa, Homo sapiens
MTKEEIIGEFDFAGLEDGGKGREPRNTDRKNLKLVISSFQIRSQELGKWVHICTRRGKMAMFNRYMTFQRVSLSTSKGKNASSEHVYNSGEHTVHTPLPSASRPSCVQTTHPEGRTRGEGRQDPGSRPTYKNPKSKGQTPRLPTGKTEPEWKGSKKTDTGENFYAEDLALNTIKEK

SEQ ID NO: 932586 - protein, 229 aa, Homo sapiens
MAEVKEEQVTSYMYGGRQNKRACAGELLFVKPSDLIEILEINDTMTELKKPTETFSSRLGQVEERMSGPEDKMFEIIHSDEQKKILKRKRITYIMRVPQLEERTTLGSVISDSNENMRHDSSEKSDHLAKDVQTCPEFLPSDAFIVSLTSEVKLQTFTLTSGVKLQTFAVTVTALKGKKLFRSPQWVHGPAGFRSEAADLYRGKKTQGIAATGSGSLLLFPYLAPPISC

SEQ ID NO: 932587 - protein, 135 aa, Homo sapiens
MQVWKVTGIDKTDIPICFLELVTWVQGMGRYEDTAAVKSNRNRDRRWLGSIFSVGKAQNVAESSTAEPELSQQRISDVSVNPLDKTVLGGHSVSEGGLQHFKRLHCHRQIFVPFGLQKMLPRMGLLPNTWKPILW

SEQ ID NO: 932588 - protein, 148 aa, Homo sapiens
MAWCCLCNSENSGIQKALCPCDKAGSLTELPSTSCLQKAKMKQHIVTHGHWDFSCKRSTPRHCCGVRAPQPAHLHAPARSLSSRALKKQQATLPLHALRREQGNFSSFTIALGCLFTLLTVSFPVQKLFNFNKFHLSFLFLLHLLLRF

SEQ ID NO: 932589 - protein, 140 aa, Homo sapiens
MLFIFFFFLTFSFIAFYGFIFKFMIIFSAVREENLGNTIQNIGMSKDFMTKTTKAMATKANIDKWDLIKLKSFCISKETIIRVNRQPTEWENIFAIYPSDKGEIPNVDNGLVGAANQHGTGVPTKQTCTSCTCILELKVL

SEQ ID NO: 932590 - protein, 129 aa, Homo sapiens
MNADSKEKKLPGFAHTKWHTKKWQSMTFWIHFTRKREKSLRWACVPLPKHTVCAQFPRVRRAPCKWKAHSKGRIMGKEKIAEDAKLVDRRKGLRCSQLQNGRTKNKSMYILKQKAHVYKMLTFGIFAFM

SEQ ID NO: 932591 - protein, 237 aa, Homo sapiens
MLIKSGLSYCLTQDIISEILLAIFSSDLICCTCSFADGNGHGNTKSCSENVDEAGNHHSQRTSTGTENQTLPILTLSLNGFDQNADNDMDNKIQVEVVSDGYKELVGNWKEKFKLAEEIYVSNKEPNVNHQDNGGNILGTHPLYQCDLDIRHGVKEDYFGTLRFDCPAGFWTFMGPVSPSFWPISLIWNGCIYPMPVPQLYLGTMEIKKTNTVCKPAYPREKCDVKLFNMNENQYQY

SEQ ID NO: 932592 - protein, 208 aa, Homo sapiens
MKIPENVEATLELGNGLSLEQFGGIRRRQEDEGKFATSRDLLNGCDQIADSDTNSEVQAEVVSYGNKKLIGNWKFVWKYLNVKAEVCYRRKAIMKNLYLGSKKGKYGTVAPTQSPTRALPSGAVQRGPPYCRLQNGRSTDSLHHTPGKTTDTQCQPLRAAMVAVPYRAAGAGLPKVLGAHLFHPSIIVACIINMSFSNHRFLDTYLIP

SEQ ID NO: 932593 - protein, 170 aa, Homo sapiens
MLRRQWENGHKGTVELTSVTAPITGPECQGLTEGNMSKERFQCSQELGTYCPGPTQVSVPYILVQGSSAAPATSQDCQDQLHAAENQSHPLLQKEEEDEEEEEEEEEEEEEGEEQEEEEEEEEEEKGEEEKEEEGEDEKKKRKKKRRRRRRGGRRRRKRGRRRRRRRRRI

SEQ ID NO: 932594 - protein, 136 aa, Homo sapiens
MVNAGDFIADENPSRQTQVAGHREEHISERRHKWLVNESTPAEEHADRHQQVNESMPAEEHADRRQQASRPPTGGTMWRCRKTDRRQKTVKVKIMNFWQRCCGIRSHSSCEQIVPPDSFANLVANWSFAPLEKQNL

SEQ ID NO: 932595 - protein, 163 aa, Homo sapiens
MGVNFDCSKDSWRLIAKEESEKGRPKTQKTKMGDEKPDQIWRVIRYQRSGILSKLRRTLAKTGLCTSGKDGRLRSRPTLFVVLLASGVKLQTFVGSATAHKGSADPNTEQQQDLLRRGKEQNFHSVEGPICGIHVLRHKPFEKVVKDVGHKNLRDTRVDKLSK

SEQ ID NO: 932596 - protein, 183 aa, Homo sapiens
MGLFFSTAWSGCKFSKLLCCASLLNTSSSFRSFCSCIRKVTFATVSNTFLISKPSSTRTSLSISLAAFSSQQFNKPLGSSKFSLISLSSSDPSKLFQPLPINQVQSCFRIFSPESITIGHYIDDTMLIKPDKPELFVEFQMQELKEASGKQPERHQSSWYHNLQNLELSQQPHELRRGPQGLR

SEQ ID NO: 932597 - protein, 139 aa, Homo sapiens
MTQTNGNTSHAQGSSHFHNLYCENDHTAKGNLQIQCNSHPNTKIIVQRTRKNNPKIHMKPLKSLHSQSKTSKESKSGGVALPDFKLYCKAIVIKAAWYWYKNRHMDQWNRIENPEGAEDCTGSMAACAPGEDIGSCYSW

SEQ ID NO: 932598 - protein, 166 aa, Homo sapiens
MHQDCLVLRQPSSLLLSDVIPGVLCPTSKNIKESRDKSESSPVYVVDIFASMSTKCLSPTSKTPTPYLFGVVVFSNIYFQDWTHSSTWLVKPHSHSRRQRRSKGMFYMVADKRACAGELPFIKPSDLMRLIHYHENSTGKTHPHDSTTSHQVPPMKRGAYGSYNST

SEQ ID NO: 932599 - protein, 147 aa, Homo sapiens
MLFLLMCSHHATPSCRGWKSMEGSEEDRKKRENLELPRELLNFCDQNANSDTNNEVQAEDVSNGNEELIGNWSKGHICYTLAKTLVGLFPCPRDLWNFDLESDDLGKAAFIHDSKHFNLHFLSTASSQDPAKVSNDISIAKPREIFL

SEQ ID NO: 932600 - protein, 166 aa, Homo sapiens
MKYEDAIIIFRNPCSFHGKAICHIIRFIEYLVMDCPGSIEGLTYPLFLTNKQNKIFINHKVGADDHGTRNNNRTKHHQHLMKGITVRSERISDNDDDDDDDNNKNNNDDAYAGIEILKLIKQKEVWSSVAQWFPTLDAEKPQIIIQSVKDNLAKNKTRTRIQSFTH

SEQ ID NO: 932601 - protein, 156 aa, Homo sapiens
MTELYGKSQGNYSKRLFLEIHRNKKELLARFTKGSICLYQLSLFYCSLLSTGIHKALSRQIHKDSNNNDAAVEKAKGKEEVALVIAVKAIPEQHQPGGHKTCEWSQPRSRELKSHLASQRHWVKIQSKNTETMLDVSKRRDLIRDISKIDAGRLEA

SEQ ID NO: 932602 - protein, 157 aa, Homo sapiens
MKLKPGTVVAHLICGSNDNALLCADNFRGCMEMLGCSGRFAAGVRLSWKISARVVQKENVGSEPPHGVPTGALPSGAVRRGPLSSRPQNGRSTNSLHCVPRKAVDTQCWPMKAARREAVHCQAIEWSCPKPWELTSCISMIWIFQVIYSLSPNTHHY

SEQ ID NO: 932603 - protein, 211 aa, Homo sapiens
MSRLPFLPLPTETSTSLRVGVSLSKDLLGEEYEFMLKREADHKSLANLQPIHVVEKKNPLSGEKFNPAAGFSISSKRLSVKSQDNGENVSRASQRSSQQLLPLQAQRRGGKNDCMGQAQGPAALCSLGTCGAITRGPPSSRPQKGRSTDSLLRAPGKATGTQHQPVKAAVGVVSCRATGVELPKVLGAHFLYQHALDLFEKPPYCFPQWLR

SEQ ID NO: 932604 - protein, 162 aa, Homo sapiens
MQVSLASGDKHLNYINLSKNGYLQEEEAGICKALRKQITTQLLEAINTVQYCQDLDSAHHMSEQFSILTHKSKALSNVEEDVIPKITTLTHSDTLTRKGQEKEGKEDGSILEQLEITCLHFKNNLPETLPVTLALPPNGDGSNGGTNQEGEICGLNSLCLIL

SEQ ID NO: 932605 - protein, 161 aa, Homo sapiens
MTALHKQDQSPSWDWIPENNDGIDFNVCGKRLDSRGTVIFLALLDGAAQPTGALAAAYMCKYWKNRITCGLGGWVQGFIEWSVFLSTSRHLCVRPLGSQRFYGHRMEDVMGQSGLGKCNIWVQKQECLSLLRSLGTGLRVKPSPGTLPFSIQHFPISLLYH

SEQ ID NO: 932606 - protein, 228 aa, Homo sapiens
MQGYRKPWESPVGSVGPQGHSCLALPGFFRKVARGAGKMPQGEGNLQLHFEEEKSKSLENIFVGIIKENFSSFARDLDIQIQEAQRTPGKFIAKRSSCRHIVVRLSKVKMKERILRDVRQKHQVTHKGKPIRLTANFSAETLQATGHWDPIFSLFKQNNYQPRILYPVKLSIMYEGKIQSFSNKQMLREFATTKLLLHELLKGALNLETNPGNTSKQNLFNAYISQDL

SEQ ID NO: 932607 - protein, 148 aa, Homo sapiens
MAKSVPALMHRQYSVILKNKSTDIKKYSLTCGRFSDMNPMFDGNSIESINYFGLYGHFYNIDSTHPSNTNIIVIATITIISTMNFTANNIGFIGTTTDNEKLITKSNKYLINIKNEDLHVRCALFYWGIFASGHLRCKGTSLPSHSLI

SEQ ID NO: 932608 - protein, 150 aa, Homo sapiens
MAPWLLTHLIVELLILLQNATQPSCDKMKQLVSLSIEKKRSFFHSRLHSNSWDSVFSVPVETSAPGLRSLFPLGNVAVSPTAQGPLRHCILRGPLSCWEADIQMSSRILSLPSGPSAPYEWCFPLVLDEKHPFPFQRDCFCGPHPEFSPG

SEQ ID NO: 932609 - protein, 295 aa, Homo sapiens
MLQGVDLLLTAVAITMGPKGKTVITEQNWGSPKVTKDGVTVARSIDLKDKYKNIAAKLVQDVANNTNEEAGDGTTTATVAKEVFKKFSKGANPVEIKRSVMLAVDAVIAELKKQSKPVTTPEEIAQVATISANGDKEIGNLISDAMKKKISSVQSIVPDLEIANAHRKLLVIIAENVDGETLSTLILNRRKLGLQVVAVKAPGFGDNRKNHLKGMTIATGGAVFGEEELTSNLEDVQPHDLGEVGEVTVIKDDAMLLKGKEIIEQLDVTTSEYEKEKLNEQLAKLSDGVAVLKSR

SEQ ID NO: 932610 - protein, 316 aa, Homo sapiens
MWQLHTYPLVWVLGLQLGLGLTLVVSQTLKTWPADGELQGTEEFDGSQPVVLQVLGSQLGDLQYLLCAEVRIMHPPKRVTFQYWEICECYVTRQKGTVQKLLVSQSRARWTTRAEHMGQRLATTEQRPQRSEAAGHNVKTLRTIGQATRGLASRSEEVLGLATLGQAELGAIGIGHTVSYGLVTIEQRPQWTTAAGHIPLWSTGYWKAGTGEERSRKKTASLARPGHVVSSGRTARGFKIAGLTVDRLAAGWFTAGLLAVVCDPGFLAVVQELDSAIAVPGLAEDISEGHMKKGAIRGDDSPMAITPEGMTAVVFT

SEQ ID NO: 932611 - protein, 163 aa, Homo sapiens
MPGESPHTLGLMTLPMEMDVQGKDPRERQLLDPKPRDPEAVQKGTVGCELPHRVPTGALSGGAMRRPPSSRPQKCRSTNSLHCVCGKATDTQCQPVKVAMRTITCRATGEKLPKALGAHPLHQRVLDVGHEFKGNYFGALIFNGCATWGLYPFCSGQFLPLGM

SEQ ID NO: 932612 - protein, 193 aa, Homo sapiens
MWHANSESSQCNSAELTSPINMSYNCCSGNFSSRSCGGYLHYPASSCGFSYPSNQVYSTDLCSPSTCQLGSSLYRGCQQTCWEPTSCQTSYVESSPCQTSCYRPRTSLLCSPCQTTYSGSLGFGSSSCRSLGYGSRSCYSVGCGSSGFRSLGYGGCGFPSLGYGVGFCRPTYLASRSCQSSCYRPTCGSGFYY

SEQ ID NO: 932613 - protein, 155 aa, Homo sapiens
MGVQLSVPKKILSFNAVEETLSQSWPSIVFQEFLYPTVLSLCLGAAQRKQAFPKNAVLTFRTQQCDVACGSVIDGSYHFEGVRLQRMLAPWEQRPRWAGPDLAVLPTGPLMTGTSISLEGEFCRQTPNTQRRVRYGGVKAPQSQDLCKDFGPGNF

SEQ ID NO: 932614 - protein, 148 aa, Homo sapiens
MWNCESIKPLSFVNNTVLVDGLCKVNHDLILQEIPRESSGHQNSCLPGQENIDIENVKDEEEEEDKGEGDKEKKIKERKGMEREEEGLRDRKNDEEEEGEEIIHVFYKIYSHKSQHYYSVVVKLLWNNQTIKRKLHEDNYSHVGILVV

SEQ ID NO: 932615 - protein, 136 aa, Homo sapiens
MCGSYYRNYNGGHGYGCCGYGGLGCGYGGCGYGCCGYGGLGFGYGGLDCGYGGLGCGYGSFCGCGYRGLDCGYGCGYGYVSHSFCGCGYSFDNNYHGGQGYAKGGLGCSYGCGLSGYGYACYCPWCYERSWFSGCF

SEQ ID NO: 932616 - protein, 146 aa, Homo sapiens
MGRTVAVAEYGRCRHGCHSSYSARFSIPEEDSHFLEDNKAHPNASIRNKSPNTFAHCILVTELPRETQQHQAQDGAMLLLTSEETSNYYGGLRYGYGVLGGGYGCGCGYGHGYGGLGCGYGRGYGGYGYGCCRPSCYGRYWSCGFY

SEQ ID NO: 932617 - protein, 137 aa, Homo sapiens
MLRCLCPSLRPLDFSISICFTVILKAHLVSQLLVARMLQASCPLKAGLRLLLSAAWKLFLQVSVRSTPFSPSFCSMKLIQRKYFKRNVYGFCDTWVLNDHGIFGDLVVVMPPTVVTVASIFLDKQLRSRVHNHSLPP

SEQ ID NO: 932618 - protein, 286 aa, Homo sapiens
MVDSPSSQSCIYSRRESRIHIQSHIHSHSQRQSHIHSHSHSQFHIQSHIDSRSHIYSQSHIHNHSHSQFHIHSHSQSQSHIHNHSQSQSHIHNHSHSQFHIHSHSQSQSHIHSHSQSQSHIHNHSHSQIHIQSRIDSQSHIHSHSQSQSHIHSHSQSHIHSHSQSQSHIHSHSHSQIHIQSRIDSQSHIQSQSQSHSHSHSQSHSHSQSQSHIHSHSHSQSHIHSHSHSHSHIHNHSQSHIHNHIQNHNHIHRQNPRQSHICICPLRSAFAASQRFVSTSWDPFNN

SEQ ID NO: 932619 - protein, 285 aa, Homo sapiens
MCRFATGVYCVMLRFGKHLLETHLNSLLLTTCVATTTATPVAMAPAVAVAMALALAVAVAMELAMAVGMAVGLAPIMAVVMELAMAVDMALALATVATGHFALEDAILPAKTSLYDGVTKKSSRGKLKSECGKRRLDKCQKLLPKNDRNRAIKDEVDLKYPPTPQLKSNLLKSCVATTTETAVGAVDMALAGVPAVDMVVAMAVDTALAVDMALAMELAVAMAVDTALAVDMAVDTALAAVATDHFATEDAIPLATNHHYSLLQVLKMVRKDQGSFMFPLPTLSV

SEQ ID NO: 932620 - protein, 157 aa, Homo sapiens
MSAQLLLSCYPGHAAYKVALLHKEQYLCFCTETFGRKLSCSKLHGYAAVSETEEMEKQLYLVIHSAEDQLSAFFSLWLVVLPSDKLTKNRACETQRKNNVYMPQNEKFVYSKRETTAATKLQPDPRPTVPRIQDSAAEKNEQLLKKKNSSKALVKAE

SEQ ID NO: 932621 - protein, 129 aa, Homo sapiens
MLEREGNITFLDSIMLLKDKLKSAFKILINSQASVQKLQVVNMPVVCATQCTMQDWALVSFIWSSVQIRTRNYADARLWYYNEVFSFQGLSILAILLTQLECWSISSDHLLLKCQDYQQCLQFYTMDIL

SEQ ID NO: 932622 - protein, 157 aa, Homo sapiens
MLSRSPLDVFSATILVRMEEVVQRDDVFVLTANECVLMYSCVLHFSWFYVYNEKGAPSPSCNLASLFNERVQKSIFYFMEEFLSREVSLQIGSTNVSALFVEEYSSGRKNVFNRISRKQDKNENKKNCCGAMGLFMHWCNERLGPETAEVPSFLSDF

SEQ ID NO: 932623 - protein, 154 aa, Homo sapiens
MNPDGMLALLDYQEDDKVPLGNHEGLLGLRSNAMPSTVENFTLFIKELLVCCCWTTVEMKQLDMGHQVTICTSRAQWLLGSSCRRLAWCHHPYTIMLQCHNHTKLSNSFLSHMDRSRVEMKLRIAIAAHPGGQPSSGTESASTFVLDFSVSIIT

SEQ ID NO: 932624 - protein, 132 aa, Homo sapiens
MITAYFLAARDDFAMPEDVFDYHFQGVGMLLASNRKVFTGLTHTQDWGIGKTHRLEMNINKSSACGVEMKPGQHMTWPKTMGCPCVGNSTLEESFESFGFLLRTITHSKIVIWLLVLESWVSRSPGLKIKNF

SEQ ID NO: 932625 - protein, 173 aa, Homo sapiens
MFKASSLPAPVWRESSKGAEGRSGPPRPKEASAQSTQHWLAPDSSVAALRPALCGKRQPKGPDSRPAWTRELTVPVSQTFYVFDDLDRFEECWSVYAADPPDPEPKMLQLETLALLSLEIRYGCCCPREYSSLCLLRFVTTFQFKVWGGCLALVEPKSYAFALAAGGGWECIC

SEQ ID NO: 932626 - protein, 173 aa, Homo sapiens
MPTYKYSHNRGLASIYKFGEEKQSIIGYFVPKNATATPTPHGMKGSVTNEKKALDREDKERTQLEVMFKIFNHFYGMDLTNQNLTGFKASEKSRIPGDQEKVIRNSAEKAGNTPDTKVMVGVCSGEEKLVFLDAVGSLQPTPTPRPLWLSKVHVSPRPSSLGEDVGILWVQSF

SEQ ID NO: 932627 - protein, 147 aa, Homo sapiens
MDNGPERGCFISLDPKEDNMKQGYTFQANEKFQPTETKQMWLYPHIQSQALGRAGDKEHVIWGNLALSEIITVNSLLAVSEFRLILILVFNEHPEVFLMSPLHSDEIAFSVLGGRVVQSMGVELRDVHSTPGFTLKSSVTWPSRASL

SEQ ID NO: 932628 - protein, 140 aa, Homo sapiens
MSPTSWSHLVAGCTCSLTFLLKAPTCPPTPVLQGKLVNDFISSPLTLLNYLHLPSSSHHYVTCEKVAWVLNQLWLPLEFLPTPLPSQRALKDDQVILPASKLSKASPTLPVKLCLPYAPSLPTFPTALPTPGMGSPWPLP

SEQ ID NO: 932629 - protein, 119 aa, Homo sapiens
MVPGISGVMYQMGPHERGHLNSEFGLEDLVTTVDGGTTGFPGAEGKTRSGQPGKGIGQYQENCRANARLLVLSWGCLWEQRGLHWNSEWGASGHRSLLSPERGYKLNSISTMIDGIRTW

SEQ ID NO: 932630 - protein, 333 aa, Homo sapiens
MVSYSMNPVDLFETNDLFESGNVRQVQVSLLALARKAKTKGLQSEVDIGEEYSEKQEGNFDDATMKAGQCIIRLQITNKRASQSGTTPPDGYKQVCQPGGHGGSWDPVAHLRHEAGNHKYDNSSTTLKMGYTLGTNQSSQVFSLGRQIYDPKYCLGAQWPTGLPQVQATARGQWRPLNISLTTKRRPATEAPSTLSPHMVSLSGCLGLSHRAVGEGIKAISRCVSGEGPRWRVQAVGLAVLGRRDLGMEGTGPRRFPVASPLPPFVSRSVCGFCTRKSFKKLLSGWISLGPSDQQTSDPQTYAGARSTAVSPPTTRPAKYCTGPPTQGPRIMR

SEQ ID NO: 932631 - protein, 137 aa, Homo sapiens
MSKRKVHIGGSFLRATPQPPKLTSKVTTVRWAAEGEQHWCLGVASEPLLPEHQHRHISQRKQFALRQFHCEWKRQGCIVHQTMPELAISWRIYVSVQTEKNCWLEKGRTGLFSIFISVINKFLSKVIASVYTPISKV

SEQ ID NO: 932632 - protein, 142 aa, Homo sapiens
MVKSATKAALALTRFIYPKELRTSTQNDTCAQMFKAELFTRAKSGNNPSVHQRMKKMQYYPTIKKEGNYDTCYNMDESGKHANEKGALKCCPLPWEHLESPVLKAEFTTQAAPSEENHECRKLHRDKDPPCRRPLPARLVPT

SEQ ID NO: 932633 - protein, 134 aa, Homo sapiens
MLLLGAPTLRKVHHSLILKGINNRCPTETGLCRLKLWTVSKCLKDLSFWKLPAPFGLRLSSIFKASHPIISTSVAGVIKYAALPACPPGKLKQPSGESNVPAAGPPRLVRAEGIQGFCGAPTASLHAAHSAHEI

SEQ ID NO: 932634 - protein, 115 aa, Homo sapiens
MFPITSLLNSSILCYVIYLKYDYLLAILVLVCGGSEYQMPLMSHPKAPLLSLKFMVKDVDLMKQICGHGFEKWLSTRGDFALHGSSGNVWAHVLVSMIGGCYWRLVGRGQEIGKL

SEQ ID NO: 932635 - protein, 116 aa, Homo sapiens
MASKLTCLRGAGLGMWIQRTSRWAHPPPGKHTFTAAMSTLYGARDFLNVSFNPHLLLLHIDDMMLLVQGLHFENPNHAWIVVNYESQDFQGFVCCLPCKPCHPLRPNLSHSWHISP

SEQ ID NO: 932636 - protein, 145 aa, Homo sapiens
MARVSSRLEEKLEMEPSPPNPGSEQAEQLLPAEGRESCQGGLWSPDASPVGSIQVPRPLGPAPGFLEADGHHRSSGTRFVSIVPDLACALAAPSCGTQTPGESELAGSLEGHSHSCTRHSFPSQARYFSNPCCLSFPYGSQKSNH

SEQ ID NO: 932637 - protein, 192 aa, Homo sapiens [sequence omitted]

SEQ ID NO: 932638 - protein, 153 aa, Homo sapiens
MLYCTGSSFVRNSTEDTGEKYFQAKNGWMHQGCVPVQGPCSLLLYFSREFFEKVTKMSEEKQIKFKCQLLWGVANLGWRHWLLSRGKVRAFAYESQLKAWETLFWETTEGGMALAFSGVTDGTVLDPRQQAGGKLLAKRENSYSTEGIDLDNS

SEQ ID NO: 932639 - protein, 136 aa, Homo sapiens
MPWMDAHGFCQMPGLQRSQPCFLIYQKQQIGLKTSTDIINMTRNKLCQHETCLRRCLGTFTWAWEPRKEAHPKLLLIQVNSSGQEEEKRNYNIIILLLEAADYGPLTVMCQMHCVTTKTLHIWGALQDSSRRQLLA

SEQ ID NO: 932640 - protein, 134 aa, Homo sapiens
MLHKNDEQVLSVIGDASVLPRGLCLLPWICHVAGKSPTNRRLVFGHVTVLGESAGHQCGPVHAVIQGFRLLKAQPCLLGFQGHPEVSFMPASWKEKVYVLKNLGRLTHGVVLNLDLADWALMLQVNMLLGFLTS

SEQ ID NO: 932641 - protein, 150 aa, Homo sapiens
MYSASSQDSHQPENLRAKPAQANTLCIWPGEAGPVPCPYCLKCGINHTQLCGRRNAQYCSPEPPAATDTCPTSAAAPPAQACLQSCQVKGANFARAVAGGTGLPRPGGPHPGLLWGEAVTTNPLSGSRPVLSSPLIGGDGGWQAKFRNPI

SEQ ID NO: 932642 - protein, 146 aa, Homo sapiens
MDFPKIISPHFCSDGDVYSQHSTVVSEGISVYTRNTFPRSRSCPEQLRSSAKAHKALFGSQSYHHPPTLGKCCLFCSVPCIHVLGLYELTNIIIIMFRNCKFWSLKDHQAGFGVTASGCAPQRTPAQDKVNLQPTREDMPLALFFR

SEQ ID NO: 932643 - protein, 160 aa, Homo sapiens
MSCKSGCFRRDCTAETWALCLDLPLIPRVTLSKPSAFLGSCGLTCEKRQLDLATNESDLSNYNFEASRNESLSLKADGHMHHWWTSLLTFLPAGTATFVQNKSILGCEWETKRWVGGWRGEKQIMDHKWCQHEWPSPLNCQGHRNKETVIANKNLRETGG

SEQ ID NO: 932644 - protein, 214 aa, Homo sapiens
MCASLRWVRTSSLSSEKFVITDRLKPSSLNSSKSFSIQLCSVAGPSAAGLLEFAGGPLQTLFTWVSEAEAAEQRILLNSKCCCLIVPLEVSSQRGTRPSRSCPQRWSLQRQAALLELRWAPPSSSFSAALFTYSNLSKGGHPSSSLAATLHLWKALAGHGGSRQLTQSSAIACAKLCKASTYINWEDNAVIFLLVQSMVVDLTGQSACRCGSYD

SEQ ID NO: 932645 - protein, 403 aa, Homo sapiens
MVLTLTIPKTDEWRLHESSCQEYGRRYSVAEREKLFTDLLLKLSGVWAEDSPPGLVVNQAPVIVELLQGTYLVQISLWKAGYKVSKEKAQICGQGVQYLGFYISQGQHELGWEQKETVCSIPQPDTRRQVREFLGAAGFSRIWIPNYSLLAKPLYEAMKGQGKEPLLWGKEQDMAFKEIKKALIQAPALGLPDMTKAFYLYVHERKEMATVVLVQMLGSWYWPVAYLSKQLDFVAKGWPPCFKELAATALLAEDANKLTFGQKLIIQVPHTVVTLTEQRGHHWLSNPKMLRYQGLLCENTYITLETVNTLNPATLLPIEYVEHGKPPLCAPGYHCCVETVDEVFSSQKDLKDQPLKDPDVEYFTDGSSFISKGVKKARFAIVTLSSVAKARPLAVGTSAQKAE

SEQ ID NO: 932646 - protein, 260 aa, Homo sapiens
MDQKKSSFLMKRVLFMLLKCLHNNLCQKYSAHAFQFSPRNVLWLLVVCLRSDNKRPCLEFSQLSVKDSFRDLFIPRIETILMMYTRNNLNCAEPLFEQNNSLNVNFNTQKKTVWLIHGYRPVGSIPLWLQNFVRILLNEEDMNVIVVDWSRGATTFIYNRAVKNTRKVAVSLSVHIKNLLKHGASLDNFHFIGVSLGAHISGFVGKIFHGQLGRITGLDPAGPRFSRKPPYSRLDYTDAKFVDVIHSDSNEFEIICFDSR

SEQ ID NO: 932647 - protein, 145 aa, Homo sapiens
MFGTVPIYYFGGSNKSTLDPEFADIRNKEVSRSNCQCDLLCYLQKDPLGWFSSAHLLWDPPVGSSTKALELQVDLQEHHPPGAVSQLSSHRIWFKMCGTYPLSLCFSCSGGVRSVCFPFAFLHDSSAFSVSKQNDLSNRHPHSHF

SEQ ID NO: 932648 - protein, 169 aa, Homo sapiens
MSQVLQLLYWSAQGPYHFFKKLLSNMNINSRQGIIQEVDVGPTVDSSGQAYSMLLAPTYIHSLKMEQKKNKTRGNVYRSQSTCSYIQMLFYGMDRQQPKMNAPTFLYLRLSSPSPISFPSITNLHKLEDISTFSEVLTRLPPLLTLLDPALAKGDIRPLGFEKGQTRGD

SEQ ID NO: 932649 - protein, 160 aa, Homo sapiens
MPAPLCLPPGSRCCYASWFTLIQYDCCLHKAGSLDTGMHREDDVKTQKEEPSPTKEKGLKHILPSQLSERNNPGGKHLVWATPLPSLDYLRGKRYFLLHGKGEKEDPSRPHYYHRHQQCSPMDTPAVFTSPEPNTGSCLESMLLHLPMRKSQDCAFCPMS

SEQ ID NO: 932650 - protein, 137 aa, Homo sapiens
MNYKDKRWQSVPVGDLKTGMPYTSQCKPKIKFQAPQPTDWNPLSTKEIPKKPEKLVQAVIGSEVYNCNCPTGSPCPRPRESPFIKTGDLQLRKSNSRRGGCVGDWSFIITQIGLPEKSDTEGFKDNLVSRGSRSGEC

SEQ ID NO: 932651 - protein, 156 aa, Homo sapiens
MENQIIQTAGRTRQESGAAHRRDDATSTLQHLGSPAKGSENCQGEGVSDEALAAMELAVCVQHRSESSRFASVSVDGMAHFILRPFSSVVLPRVFEKPILGSERRISNAIVCVMNPLGNLLSMSFPGTPRSKVAQGWSRASPIGWARTHTNRLNQN

SEQ ID NO: 932652 - protein, 197 aa, Homo sapiens
METEPVPVSTKTQGEAMETWNSSFPPGYFRGGKKVALCKPQRQPSSGTKLADTHALKEEIMDVSFRPRPLRAGASSSGFSPTVTVDAFSPKKGSSRRPEGPQCGRKVTRYIPGPSSVVSRDSILVPSTPKSVQGNSVESFASNGVFLADLFHAAPQPTPHFTRHAEDAASPGQGYICLEAVQVLRTLAVSGKPTTTS

SEQ ID NO: 932653 - protein, 136 aa, Homo sapiens
MTLPTSVFSSTFATFHFQSKKSGEENEESCYPITASSRGAGMSTPLSCEAAHKQCQGLLRTLLCRVPLQLEELAPFEAYLPQRVTKLLSGARIAATLSHHSPPSTICTKSCRSWYHGASYSANSPGPERFCNPRWR

SEQ ID NO: 932654 - protein, 131 aa, Homo sapiens
MLTAGLPRCLAVDPKSSLHNYTRSNFYNKSFFLITLTVTLLPCSRGTWLTQALRLPQPHVPTTSRAQPGALCLQLPPELSSSMPNSFMLLVFLQTTHASKLALFRILKSGDNTFHLRESSPFCNNEKSVCD

SEQ ID NO: 932655 - protein, 148 aa, Homo sapiens
MFANHLQSAYCVSRLLHSHFWRHWVLNINVLERRTCNVQGTMLMGSGKLCPVTALVIRDKRGRMAVQNWKDVLSQHCAKALKQDMEEKKGHRHKGKRTATYVMMQTETRGMSLQAKECKDGWQHQTLKRDKKGSFPTVFRRSKALLTC

SEQ ID NO: 932656 - protein, 148 aa, Homo sapiens
MTHYILICPLKHPKHNPTGKNLLKIIETLPWKRLSLLVICLMPLDLNGSISALTDGTTSTSWQQQFSNELPDNISLDLCDQPMDNVFCSTALRTACVCFYVSCERPLGKFQILYNLSEVRYPHLSCVKSGNVKLSEVLENQVIKHVRG

SEQ ID NO: 932657 - protein, 128 aa, Homo sapiens
MYAIGKAAVMKSQRGDFYQEESCLPGTLIYRTGSDLDLSVGSLASHRAYGWSQFQLHHTLPDEIDNIRPNTNCMWFNLRVFYIEGQSYRFQSKRPKFTSDHLLTGYVILGKFLGFSDHSWSSSVKQFN

SEQ ID NO: 932658 - protein, 154 aa, Homo sapiens
MAVHSQCTTVIHSQCTMAIHSQCTTVIHSQCTMAIHHQCTTVIHSQCTMAIHSQCTTVIHSQCTMAIHRQKPGKGGKKRNTLGQNLSSQVETLSHMHVFVWVEIYFLWVRWIIITPKVFQKTSDKVTTAIKLSAICKRLGLRFTEVKHVLKRKN

SEQ ID NO: 932659 - protein, 202 aa, Homo sapiens
MKPRYCALSSQWRKSGSWEAVPFSSEHHLLPNDCSPMDLNADPFHKTVLKAKKEVPAPPKAKAKAKALKAKKAVLKGVHNHKKKKIHTSPTFRRPKTLQLRRQPKYPWKSTPRRNKLDHYAIIKFPLTTESAMKKTGDNNTRVFMVDVKANKHQIKQAVKRLYDIDMIKVNTLIWPDGEKKAYVPLAPDYDALDVANKIGII

SEQ ID NO: 932660 - protein, 148 aa, Homo sapiens
MPCGLAWWVLLGNANWCFPFCPLTFHLGRVWLSQGRDGTAERESTGVRSRLSISRAVRKNSCAQTLGGEADVRDPLPAHAETVQDCGGLQWGSGGASPGSMAMRSPQRGRHGYQPPRLTSAPPQGKNEASPLNLSCSSASGLSFSLCH

SEQ ID NO: 932661 - protein, 195 aa, Homo sapiens
MLSRLAATWWPKKQVLVINIKAPHLTQWRHPCSEYLQGKTNMCELRVQQWPMAPQKALEVPKLHLPMDPTAGQLWLSPWGLSLTDRAGHAACPFWGPCQAQYLLKLEAFWGQREKSNISRGEPRNQPGLPELPGLPEGRGFSWYNLRVELRAMLYEGSHSVLKLMQQETRSGRRLLNSDKGDECPESQVRSSQKL

SEQ ID NO: 932662 - protein, 143 aa, Homo sapiens
MLIGQGGNHKASELSSGAESVPEWEPQDKVSHPGHTDAKGERCKLPVDLPFQGLEDGGPLLTAPLGSAPVGTLCGGSDPTFLFCTALADVLHEGPAPAANFCLSIQVHSWSSGTWHQIPRLHTAWGPWRQPTKPLFPPGPLGL

SEQ ID NO: 932663 - protein, 131 aa, Homo sapiens
MDCMPTDTHTGLTSACFCHQCLIYGQGSPWKSTVAGWAEGPVTFQVAGTSPLFVVTRRDCRVHLSFGGSRVQTFWSQGHTRPSQLCNRKELRALGFFGETEHYPSSMKKISPTLAGAVTNPAQGESECRPA

SEQ ID NO: 932664 - protein, 333 aa, Homo sapiens
MHVEARYPGRPCWSNKSYRAGASHTTLRKHRLTVDMCNDKPNKVRSFVEGVKTPKCGHGLYWDINQQGLKEQNLHVCIKCPLTYQVQRADLVTLLASWHIFSVASCKDSHLFGSLISFYNSNSNYPTLPMSLSDQMLYQGLYVHSLFAPHLQVLRWIPPRPPAGGAWWFLIASFRIPTVSEYPQYLLHFSFLPKPLGLSTVPSRKHSAGPGGCGADALQFADCNLLCAPRSCRFNRMGLEKNTTAPTGPTYTNDRYHQVGTRTRLQVCSAVYCRRTGFSILLGEDAKRFSSSWIPTILSFFLSQLLMAVDTNYTHMTHTFASPLHFPPGLQTP

SEQ ID NO: 932665 - protein, 170 aa, Homo sapiens
MRLPAQEMGQSLFLPPPGRNGGCISGILYSGFPKECLLNTEVHPAPINTAALVPCWRSSSSQYSPVPGTHWVLVKMHTLGPPPGLLDQNCENSTDMYSIVSKGGCSLISRSLPTTVHLELLVPRVPAPPALLQSTEKSLRCSRWCHDECQVKGLDTKDSTVHLASYQGHS

SEQ ID NO: 932666 - protein, 181 aa, Homo sapiens
MLAVKRHPSLNTHCILSHRWALGRHLLPFILVGQYYPNKTSYQIKNAKDYLDLFIAYPGTRTVNEQSFNLFLCFNVPHHSTFLRLAKHSYVTNGVLNQKLRTWILDVRNHFLYDLGEVVPLLSEVTLPKGTSQQERKEEYGRHTGTAQLNAQACPADEDWLPGLQSLRVTSAAPLFDEKAS

SEQ ID NO: 932667 - protein, 135 aa, Homo sapiens
MEPITHLDPVHRASLTSEASCRYSEMWLDFQRLVKARDMKLEISSTCLSKIMNPEDIPREVGRLKGEFGRPHAVHRPMGRGQQTEEEAPTPESCKQRWTTGILTPAGLQGLVSGYEPAGVMPGGPMVSRHVWRNM

SEQ ID NO: 932668 - protein, 146 aa, Homo sapiens
MSFGADVGLQGQGQSKPEVLRLLNIQRIGLGAEAGTGENNRFPKHLGQVLHKGMIRNPNAYKRSEGVLHSFRSSGTCPALLSIPSPGHWSWQQVFQELLEYSPMAGPCAFLHPGMESGARHMLSVQYTFPIPDSLGSLDKPFLLFL

SEQ ID NO: 932669 - protein, 136 aa, Homo sapiens
MTLPNHLGSPLDHHGRRASAYPSCLRAAAAAALILLEALKITNYAQLTLYSSHNFQNLFSSSYLTHILSASRLLQLYSLFVESPTITIVPGVDFNLASHIIPDTTHDPHDCISLIHLIFTPFPHISFFPVPHPDHA

SEQ ID NO: 932670 - protein, 144 aa, Homo sapiens
MAPAAPHSKQHQVSTPGLRHQATICKHQFQACQVPGQSLQAHAPADPGSKYDPVEPSAGLALMDSSSRTAPVSPSTKFSSVPGWPLQTQAEGLPQSQVSPVDPGSRLVPANNSSRPIILDSINWSTTADLGSRRDSRAPGTRPP

SEQ ID NO: 932671 - protein, 162 aa, Homo sapiens
MTMLCLLCLQAFISRKKPFLRRACALQQSQLQASPDALEPCCHGATGSEMLFLLFEAYCLHVTDNSLQPQGCQGRSHHRFSVDEHVFRFRLLKNSFSVANEYPLAKYEESYDNILSVQKKSLGSLYTLSLKQQLRCQVTGLCFINFHIQQLVRLEERIFLWR

SEQ ID NO: 932672 - protein, 151 aa, Homo sapiens
MLSRDQQGNLPLLAWSRDPEISAAAFRVKFSDKSVVSHLYSLYLNSGICEPREIFAFFLPPSFWSYSQRGKGYNVYCLSDKHKLNHLMGSDLKKRNRLPKRKESYCFSPRTKWLVLYSLGILLHLKRQSAVEICLVIVLKGKLHKERPMHK

SEQ ID NO: 932673 - protein, 128 aa, Homo sapiens
MQSDALAAHSGQPGLQTWPPNSVSVTPGRTRELTLPTPPPASRSQNLATCSSDGYLMSLKDTVIPMFVFLDVILCSHHSLHMAPLANCCLFNYVYSFTEGPANPPIGTACLGENDFRFPWLWRLALYQ

SEQ ID NO: 932674 - protein, 144 aa, Homo sapiens
MSYPWNHIVRGLFDWLLSLNAMHLYCNREGKDEYPEMKKNEHGETPTSWERQWKDPLAPEDKGEGESQRKRSCLLRATFNKTPSSRLEKAKKDDLQKSFPELCALQAAAVKTTMTAVTVRCRYLHSYEGNSVIAFPPSVPMSTQ

SEQ ID NO: 932675 - protein, 136 aa, Homo sapiens
MKFPFARVARAVAERLSVAPEGSVQGVGEFAAGSIALAGGGWRPRPGGPAWEVQSCYQWLARIARQWVLSCEVLSKWGLPGVPTQAPGFSLFPRDYSKIYMEIRGTLNSQNNFENKKESWENPTSHFQILLQGYIH

SEQ ID NO: 932676 - protein, 158 aa, Homo sapiens
MLLSMMVSTECQLDWIEGCKVLILGVSAPGSGSDGDHTPAPNPGELSSLRQQAAEVMATAYAPGSSVILVPNVIMFSLMDHSTNRLFGPVEIRLFGPLPVISWQTIPTSINPLPTQDLLLTPDHWIMPPLFFDEFLLIVPFPLSSEITLCHLQNIRYG

SEQ ID NO: 932677 - protein, 175 aa, Homo sapiens
MVGSFFLFFWKHLLLSLDWLIKLQCLSRLLAATTDYYRQSNLQKLEAYLTHSSGGWKVQDPGATSGKTSYQVVNSPMEEPHNMAVKSGDNLEHLRAAKVTQNYSKWHTVEKGGMHKTGPGVYGLFEWTMVQALDSLTQMPTRTKVVPENTDRIFDVSKKTHPWNKNDLRWCAVKN

SEQ ID NO: 932678 - protein, 153 aa, Homo sapiens
MRVESDDYVSWERFWCLAGIPSQWVLPCEVPWKWALQAVATQPPGFSLYLESMYGGLPSCFGEVATSLAGKHGKPEYLKLLGLFTCLSGCSVETPCSSACFVRLEVTAIEEMLQALVNTTKDNEQKSPFDVKSDFKSIVSKQESRGYREPSGR

SEQ ID NO: 932679 - protein, 256 aa, Homo sapiens
MGSAEDRKMWESLELPRDLLNAFDQNADSDMDNEVQAGVVSDGDEELIGNWSKCHCCCALAKRLVAFCPCPGDLWSFELERTELGYLVEEISKHPGIQDVAWLLLTSYSHMYLQRDYQKLELMFKREAEYKSLENLQPDHAVEKKIQALRPRMKKWFHVHGPGPCCSVQPQDMAPCVPAAPAPTMAKRGQGTAQAIASEGKSSKPWQLPHGVVLASVQKTRTELQCQISVLVTDYGPQSINYVLSVPSQKQIGLPL

SEQ ID NO: 932680 - protein, 148 aa, Homo sapiens
MNVGVEWLPGADGKVEPAHLWPPPLGLHCGRTEASTIMGLAHSLQEPLPGYWLCLVKARGFCNLQVAKPIRLVGFPSRWRVTPSSSRGVSHHGHHCPRAMDKYCLATGNVHSRPKGSSVSFGECFQDWDSPFRTPGSPLAPGRSRNAI

SEQ ID NO: 932681 - protein, 125 aa, Homo sapiens
MGPLSLLNSVDKELRITFLYCMRNFTLSTSDITSENADGFETVCCSIYLLRAQAFWLEPEPDQASSVLECNCCAPKTQTSFIIFSDFHDSEIVKFPEAFPATWNCESIKSLSFINNPVSGHRWIY

SEQ ID NO: 932682 - protein, 214 aa, Homo sapiens [sequence omitted]

SEQ ID NO: 932683 - protein, 170 aa, Homo sapiens
MRGLNPPSSSVTQWPSFVPPKVWLSQTVTTTNLSASFWKLLLLGHGSGYGYGYFDLLGCQSYFFVISVKLSWTVLILGMVKGWSYTVCMSVGRRIHFKLTTIEESYNFLVFNKHERNHWLIEMKYVRSNITFKNKVTRTYSEEWKYQLMDTVICEGRETKPFHITLKKAQ

SEQ ID NO: 932684 - protein, 163 aa, Homo sapiens
MPKALGGHPLHQYNLNLTPVTKQGPQSCRLKALDSTNTGNSQDSSDLQTTELLWMEDQTSHNIPLCQSLIQSKPLTLFNSTKAERDAIRNIRNSQEKGKISTLIEVWKKPIPTIMNDFEGFKNSVEEVTADGVEIARELELEVDPEDVAELLEDATNIVEMTT

SEQ ID NO: 932685 - protein, 141 aa, Homo sapiens
MSTFSTEAGVMEDCISETWPATGPIPGNSGVFLCSSEYSQIGPLVFAYNAVYRSSPLPYLQGAMKIGDKYICLENWSPNSQKDRANIICLSIQSILDGFRFYLGNLIKQPGRINHQRKEETGSHHHVPNRIFIYPSEDSSK

SEQ ID NO: 932686 - protein, 139 aa, Homo sapiens
MAGTRGERGTGHLWALAAGVAEAGSEDALCPCSEPAGSVLAAITRAHRLGAHKQQKPVSHCSGSLLWSWTPAVKAPPDSVSVCFLVHRWHLLAVSTCGRRSKGTLWGPFHKGANPIRKGSTSPEPHLLTPAHWGRDFNI

SEQ ID NO: 932687 - protein, 418 aa, Homo sapiens
MLGDSVDLEASQAGKDSSPLHSDFCEELKAGRDLKPGAMGIGKAAAVALLCRGPGQPCAVRRRPSFYRLGAWLPSHEGSEACSSYVTARVCTRLAVCGRVPGARAQEQGLRAEQELGEEQGAVPLPHSTAHDPALEPGARGESRVLEQEGLLHRRACPATPQPPDSGLLDLFSNLHSRARPGLESSGQRGFGPALQECRGLLTVTHVAVAIPELLWDFLGFRQPPLDPGAAQGHEPGDTCLMFRSDCCMLESDVAGQARRMLGATVSFLSHSALAGRVFGTALQMGVNDKSSIWSGVKSHLLPPWFLPEKALRRLRSMAGVLIKRGQVDRDRHRGAPMRTRGEDGHLKAKGRSSEELALPRLDLGFRPPEQEKIRVCCWSLRLGSFVVATPVNSHRTCELTQDTQKFPQCLLWNFLVF

SEQ ID NO: 932688 - protein, 398 aa, Homo sapiens
MTITITITITTITITTTNTTTNPTTTTITITTTTTITITTIITTTITTISITTITITTITTITTTNTTTITTITTTTITTTTTTTITTTITTTNTATITITTITIMTITITTTITITTTNTTTTITTTTTTITTTTTITITTTITITTIITTTITTIITTIITTITTTITTTTTTITIITITITTITTTITTTTITTTITNTNTTITTTITITISSIITTIITTINITTITISIIITTTTITTTTNTTTITITTITIMTITITTTITITTTNTTTTITTTNTTTTTITITTTTTTTTITITIIITTTITTIITTITTTTTITTNTTITTTITITISSIITTIITTITITTITISSIITTIITTITITTITTTTITITTTTINITTTITTTTITITTTT

SEQ ID NO: 932689 - protein, 149 aa, Homo sapiens
MLLHFEGRDRKAPSGDGVPTRGPSKRRVFLIQPAQADYEFSLCQKCQNPSSWQAVVTLLTRDLEFLDGVCRGGTRTDEALQGQWLPLPKQPGQAGLPSTDAHFKLPLPLGALWNEGMQGEAWQEAAWSLGQVKNMSSAGGGGGGASAGP

SEQ ID NO: 932690 - protein, 180 aa, Homo sapiens
MERKVNFAHQENLVSQQLWSCCDTDCWLPWLQLWADSDVILQHSSPQHSSQSSPSCASGPEIGASSPQLLQQTATNGVIYNSRNVSRLRLEARRLRSRDLTLGHCLVFRSGGEAQLGSPGQQPGAGDFAACRDFWAPKPQANAAWLRQHGVPSRATLIGNSPQDSRVGPENNGLCRRKRL

SEQ ID NO: 932691 - protein, 190 aa, Homo sapiens
MTFSSSRAGGFSRSAGVTARGRGGGATVTEWGSHLPEALGPGQEVFWQLVGTELPPPPNSWWDFLWSLQGPLKWKAVESEASLPLGKKAFSEQRQAMGPGGKSVCPCQPCTSPSGQAIGPGGRQGLERQKSAQKEGDRRMAQEERMVLEKLLCGREEPCGPRPEDDGAPGSWHLTGISPWIHLTGTSDLH

SEQ ID NO: 932692 - protein, 174 aa, Homo sapiens
MLGFQAPIATHQWLFSVRNDKNTLDTPRSAGCDGAHRPRQEPAPDGPIVLLCLEPMPAPGSYPGGAPVSGHRQVHPQQWQVQHLGQSGGIRTGLGANCGKSHDSAYKKGGDVCFPGEMVPVVHQILKGVQHPNKCRGHWGTLVQQKQPWTGSRGPTADQLHPKNSSLTLVFPSR

SEQ ID NO: 932693 - protein, 151 aa, Homo sapiens
MRRAASLSRTRQLRLLLDNEPPLNSEVSNNTCLGGSGSQLVSADGHLARRLNASLNCPLLHFHFFHIFPRDPNRHAGPPVGPGLTLDPNRHAGPPAGPGLTLDPNGHAGHPARSGLTLDPNRHTGPPAGPGLTLDPNGHGPPSWTWSHSRS

SEQ ID NO: 932694 - protein, 179 aa, Homo sapiens
MAGPGTREWTSWSAPGSPRWPAPGLGSGQAGAPLALHDGRPRDSGVDKLERPWLSTMAGPGTREWTSWSAPGSPRWPAPGLGSGQAGAPLALHDGRPRDSGVDKQTPPPPPVLSVFKWGPATGGKGETSADGARDANRCESHVCAFPGGPIIWMSGREEGNLPWQPTCWVHPVLWVWDF

SEQ ID NO: 932695 - protein, 145 aa, Homo sapiens [sequence omitted]

SEQ ID NO: 932696 - protein, 288 aa, Homo sapiens
MVSESPGVGRSSGPRPSHCLKVQGLATHSAHHAVTPGSYSGPLGKPLALTHGPAQTSSPLKGVALAFSWLSAMCGMMLAFSRLSGVFGVSMSSVSVLGTPSPAAMAVGTTGQHTFAACEDRTGGLGSAGHTVCSVRGLDLVLEGSCRPRVKEGVRLCSGETWIVDMGSQRGLQTPGLEPSPRGTLVSEKPEEGVPGTWGMTMDLCCHLVAGLTYLSHVLFSRFRNILVGGAFSSLQQTGSSVGHTIWAVCPAFSRGPQDPAGYSLERTEPQTLKATAVIAHLCLRSAF

SEQ ID NO: 932697 - protein, 187 aa, Homo sapiens
MSSVSVLGTPSPAAMAVGTTGQHTFAACQDRTGGLGSAGHTVCSVRGLDLVLEGSCRPRVKEGVRLCSGETWIVDMGSQRGLQTPGLGGTPSPVQPLPNPGFRRGSKTLRVASDSWVTLAQHTLSSSLMSSPGGTGTGTVILGAIGVLSPHCSLSLSSGRTVHFFSSSFAFSGAFSGVLRSFKCFMD

SEQ ID NO: 932698 - protein, 129 aa, Homo sapiens
MLGSGEEAAGPSQSTSCMGTPPLDSHSTCCALEMDILANHKFRTRHCQEKKLPAGLQALCGIFLRGLLGLALLGVWALDNFHVDPDSWAPWTHNIHAILRGGDKHSTSAVGWNQTVFVNKLPGANVGKF

SEQ ID NO: 932699 - protein, 191 aa, Homo sapiens
MRQHTSAPAAMVSEEAGENEIKEDLDMIITSHHMARFQLQVLTHAKNQEDSSSADKRQSTDTNTNTQMTWAPKLPNRAFKKDIIKMLQALDGPHVVGAFRFSEIQSSLERGHFAGEKTPPEEQSSEGQVAVNAVQLATPEASIMRRAVVSLNVKRRPARLWTAGSLGEQGGVRPLTREPCCGGCVRMLSTA

SEQ ID NO: 932700 - protein, 151 aa, Homo sapiens
MLRLGIQHALSELERGVDEDEGSPGLLQWSSLLSVQAPEPALGLRSQCPCHCVAVGMVQLACGFGAWRAVARAVCAWRVVEAGIAGSQHAPTINLPGWHRVAFLGDTGERGGSSGVMCSPTLPGAIFVGLCLYLWGLWGVCCDFLLPLPPG

SEQ ID NO: 932701 - protein, 190 aa, Homo sapiens
MEASHGPPALLWNSGRNTQPGPGHEKRPHKPNLRCILQNKWLKRLKNVKVRKGQIKGDKEVSAENNDHGGPDASYLGCDPGLGLLAPPAPHSLRARLRLPPSPCSQGKPLPAGLEGSLFQLLPHWPPAGSGQRGGGKSTDPSGSLARVSQAPVDPGIWGQRGGHGKGTVLALGPSGDRPALVPMGSRGRP

SEQ ID NO: 932702 - protein, 152 aa, Homo sapiens
MVDVQTSHQRSCPHSAAAPTCHLAGSVVRRLVTAQLGPVLGSQRHQRAISPALWSDAWSRLSWGLCWGLSGTNVPSRLLCGQTPGHGSAGACAGVSAAPTCHLAGSVVRRLVTAQLGPVLGSQRHQRAISPALCIKNALKRPNIICLKYECV

SEQ ID NO: 932703 - protein, 256 aa, Homo sapiens
MGRQRIHFRRWLNQDIEACEVTACNTVHTGVGDAITPDSPEEGADADDSKLGPTTCSVESSTPPAVDPVLRLDPGPVPQLPHGSSESRHSLSGQPLGTTQPQLCKPPPAGPGPQGNKRGSGSPGSEGGVSGDAEATEFTAGWSRTDGSSQNPTLEGLRALGPVAGFESSSCSRVNAEVLFIFREAGLGDIVTLQVLPIRVLQKGREEAHLPHGRNVRAQLRVALILRHVVFEQSVLFGFCSFQITDEQMEALTAEI

SEQ ID NO: 932704 - protein, 192 aa, Homo sapiens
MGCFCVCFCVSVSSPLLTWTPAIRLGPPNPIELQDTGRPGSWSIDCSALVATSLPADDQEVAVSISRGWRSTFSECQEDVSLDWQLQPGPGPGGTAVSKLTRLTANLFPVPGSFGTVSSGDCGQAQPSPLATVPQPLTGVPRCFQPYNFSSGPTRGPPPELRHRRPALQKTWVSDHYQSLTNSPNSFLINVP

SEQ ID NO: 932705 - protein, 219 aa, Homo sapiens
MGGKRGPSRAGGWRRWRGWGPPCSPGRAPPPAPARCCSDFASRARPPVAPAPFPGRPGWGCVRLRGPGCWGPRPARRADGGPGTRPLVAAALGGAGFPPSAPRPLPYPVSCVRLAQASRERPRVRSSCRNCRSWGLRVGSREGRDSRAWARRLGQSLGMRRATPATPFPLETTELAEGPLLPLEASTSSVLEDAPGASPTRAAGALTGGCSTLSLGCQQ

SEQ ID NO: 932706 - protein, 324 aa, Homo sapiens
MFGAHEDLELPSGRIVTRGRNKQEGGCHFQRLHGRACAIAGHSLDGRRQQGSCERGPATPCLRVCGVCTCFAPTGRFLQDSHEHLQCPRSKEGMLPGAEVATMTLGQQMAAEAWAAGFHGSLGSDPCTEETRAFLAPQFGFLVPLRSADGRAAPGVGLSTPAPEVALPSLPQVQDLVQNCEGSLKLPTAAHMLPDEEAGDQTKDTDHAQAGDQTKDTDHAQARDQTKDTDHAQAVQLVQSQVEITRAGAQRATSQWLQILVSDSWVLGELPFIHRALRLSSELDLDFDGWKEWVMLIFSIISTLGYCHGFYRTEQRGTNAEMKT

SEQ ID NO: 932707 - protein, 204 aa, Homo sapiens
MGSACSHFAIHRDRSPWAGRAPDPGQEEPPTPRRSLCSEGPQEPSTLAAAHGPWHQKGRHRTLGPLLAQPSTCSSSRPQRSLTSQPLIAGLLPGSQSLFPAMEEPSLCPAGLPSGLTPVSLQGPLAIPGSQRTRPSPLGLGAAALPGGSTFPRDLAGFLPASAQGLPWSRSGHTHCMDKRNNMAPSASPPGQRQGEQAPDVLMG

SEQ ID NO: 932708 - protein, 160 aa, Homo sapiens
MSSVKAIFTSFVILQLLPTIWMYTCSLPTPGLEQGFRLREQTCFFSSLESTESSAFWKYTAELFLKCERTAMDATPGPGSDLPQESEPSAAPAGGEVLGVPKFASGMWCGAQSLQGGPGSAPESYQEAEPSHAAQLLQMPEPQKPGDSDVYCPPNPDEIN

SEQ ID NO: 932709 - protein, 147 aa, Homo sapiens
MLGWGRRELGAGGGVRNDRKARKARMTSYQRVCYRHARRSKINIQGTYLNVIKAIYDKPTANITLNGEKLKALPLRTAKIQEKEIKGIQIGTEEVKLSLFADDMIVHLENPKDSYKKLLELIKEFSKVSRCKINVHKSVALLYTNSD

SEQ ID NO: 932710 - protein, 333 aa, Homo sapiens
MGRQRRETQEAVRQQLGWQEEAEAPQEGTGTQQVDLHTGWQRRDTEEEDLQQEAVQQAGWQLDCWQHDVEAPEQTGTQQACWQGEEVQQAGWQLDCWQHEEESSEQVGTQHTGTQQTGTQQACWQGEEVQQVGWQLDCWQHEGVQELVQPDWQGLGSQTAWQQGLDTQLTQLDCWQHEEEIPEQTGLQQTGTQQACWQGEEVQQADWQLDCWQHEESPQQTDTQHTGLQQTVLQQTGTQQACWQGEEAQQASWQLDCWQHEGVQELVQPDWQGLGSQVTGQQGLDTRLTGVQTRLRQGAGAQQGGSQQLSGQSSTCQESEQESQEPGRQTRLP

SEQ ID NO: 932711 - protein, 384 aa, Homo sapiens
MAWEHPLALLGSLPTCCWGSRAGVKNPGVQVAVSTQALDDLKEITQQLDFWVEVGPQQAGREHAGRQRRDTQEAGRQQLAWQEEVGAQQEGTGTQQAGLHTGRQRRDTEEEGLQQEVVQQAGWQLDCWQHEVEAPEQTGTQHTGLQQTGTQQPCWLWEEVQQAGWQHEPESSEQVGTQQTGLQQTGTQQACWQGEEVQQAGLQLDCWQHEGVQELMQPDWQGLGSQTAWQQGLDTQLTQLDCWQHEEEIPEQTGLQQMGTQQACWQGEEVQQADWQLDCWQHEESPLQTGTQYTGLQQTVLQQTGTQQACWQGEEAQQASWQLDCWQHEGVQELVQPDWQGLGSQLRSLEQTDIVDAAMLGIELEEMGNTSSAKSTATLNSTAV

SEQ ID NO: 932712 - protein, 344 aa, Homo sapiens
MAGGDQCQLKTVCPPRRTTGKENQVTKESLLGRPEPAGPGGRAHQQLDSWPEQRPQQARREHAGRQRKDRQEAGWQQLGWQEEAGTQQEGTGTQQAGRHTGRQRRDTEEEGLQQEVVQQAGWQLDFWQHREEAPEQTGTQQMGLQQMGTQQACWHGEKVQQADWQLDCWQHGEEAPEQMDTQHTGLQQLDLQHTGTQQACWQGEEVQQAGWQLDCWQHEGVQESVQPDWQGLGSQLTGAQTRARQGAGAQQLGVQQLEAQERGSQQLSWQLSTCQEEPVQVLGEETRLTRPTSLEQTDMVDAAITYVLVQQASAMVGAGLGGVSAGVRCVDYFGEDVEHYQSPK

SEQ ID NO: 932713 - protein, 287 aa, Homo sapiens
MSIRSSAYSDSWQVDDCPESCCEPPCCATSCCAPAPCLTLVCTPVSRVSSPCCQVTCEPSPCQSGCTSSCTPSCCQQSSCQPAYCTSSPCQQACCVPVCCKPVCCVPVCCGASSCCQQSSYQPACCASSSCQPACCVPVCCKPVCCAPTCSEDSYSCCQQSSCQPACCTSSPCQQSYCVPVCCKPVCCKPICCVPVCSGASSLCCQQSGCQPACCTTSCCRPSSSVSLLCRPVCRPACCVPVSSCCAPTSSRQPSYCRQASCVSLLCRPVCSRPACYSFSSGQKSSC

SEQ ID NO: 932714 - protein, 193 aa, Homo sapiens
MWSLCLALFTQHVFKSLQFSQRMPLPTECDWKAPHQGLQELPFLNPELVSITVSVCTTAPEALGHSPYHSGSLCKMLLTPATALWPPLSLHPSLCGLSLPAQLPGLRSIPTFPFWKRAVPPAVGPVWGSFVPTGYGRGPQTRLCSPKARRVGGIAAPGHQCGGCGNYPQEASFLLSGLDTFPHCPGTPLSSPP

SEQ ID NO: 932715 - protein, 240 aa, Homo sapiens
MRDTVLSAFNKTARRELAGRQRRDTQEAGQQQLDWQEEVGAQQEETGTQQVDLHTGWQRRDTEEEGLQQEEEEVQQAGWQLDCWQHEEESSEQVDTQHTGLQQTGTQQAGWQEEEAQQAGWQLDCRQHEEAAPQQTGTQHTGLQQTVLQQTGTQQACWQGEEVQQAGWQLDCWQHDGVQELVQPDWQALGSQAAWQQGLDTQLTGVQTRLREGAGAQQLGALQGGSQQLSGQSSTCQESE

SEQ ID NO: 932716 - protein, 164 aa, Homo sapiens
MDENISHKKLTSRPKLFMVEHDAGKYTRENKMLGNTVETTTRKTTVVFLCYPDDRTQLLPSLPANLLHTQPLPGILLCARELPVLRVHARELHAHCVRGSLLPALRVRARELQAHHICDSLLPIFGVLPAPLHHCPLQTHLLQHPFLLLTSCSWYTGVHTCIPP

SEQ ID NO: 932717 - protein, 285 aa, Homo sapiens
MLHRLTGSSSSVHCDHAADTLLQAALWLTTGNIAGAGLLFFGGGIGGTILYAKWASHFRERVEKTIPYSDKLFEVVLGSAPYNVPLPKKSTQSGPLKISSVSEVTKEFKQPASQLQKQKGDTPASATAGDTVLVPGVQHEESLKTDHPAIDEGKPTPALSEEASSSSIRERPCEEIAACLAQEEKQEQVKTESLAKSFEDALRQTANVTLQAIAAQNTVVQAVNAHSNILKAAMDNSEIEGKKKSAKCHTVQETKQIMEILTAYASAVGTRTTQVQPEDSNYIHK

SEQ ID NO: 932718 - protein, 189 aa, Homo sapiens
MNSLRGAGGLLLSSPLPMRTPRAGPSGVCALSGSRDVASPGPVSADPKGSREPGRGQTRASPSCFRRWGSTGRAGSPSHAIAPEPGFLLRPDSAGTGRERCARLPSLVLGDSHQTGGVFVPPWLFAPTRAFPCSSEAARREQAHQKASPTERRLPFPNELRKLGRMLAPMQMLVEICMVVSGPGEKQNI

SEQ ID NO: 932719 - protein, 141 aa, Homo sapiens [sequence omitted]

SEQ ID NO: 932720 - protein, 280 aa, Homo sapiens
MVTPQDVHTVTLEPVNVAYLEIGFLQRHLQKPEEAGGPSTGPCDPQTDGPSAGPCDPQTDGPSAGRCDPQTDGHSSGRCDPQTDGPSAGRCDPQTDGHSAGRCDPQTDGPSSGPCDPQTDGPSAGRCDPQTDGHSAGRCDPQTDGHSAGRCDPQTDGPSAGRCDPQTDGHSAGRCDPQTDGPSSGPCDPQTDGPSAGRCDPQTDGHSAGRCDPQTDGRCDPQTDGPSAGRCDPQTDGPSAGPCDPQTDGPSSGPCDPQTDGPSAGRCDPQTDGGKDPPQR

SEQ ID NO: 932721 - protein, 174 aa, Homo sapiens
MPVPDLGLRGPSGALQELPAGATSRCPQERLWEHPSQENPTECPPIIPQEHPPLMAFPVQSPASPRDPPGPQDTAPSTPRATGLLHEVDHPGAQKVPSQSPRPHEPFRGTGTPGGFPQPLITTDPLPTRQILSVFPGELCARVSSLFSWVLALGIWRFPASLTGTSGGLCSKDP

SEQ ID NO: 932722 - protein, 131 aa, Homo sapiens
MSILAIFLTVITFCVKQIPTILRTTLDMFILVTKFKRSFSEFDAVLFSYLLSPIFTQSPTEEYLACFQVLATINKAAINVSVDIRVQLIWVNAKECDCWILCSNDERSCCSTPWPAFGGVGGRVLAILIGV

SEQ ID NO: 932723 - protein, 234 aa, Homo sapiens
MEWNGMEWNGMEWNLPEWNGIEWNLMEWNGMEWNGIKWNAMEWKKNRVEWNGIEWNNRRGMEWNGVEWNGIEWNGMEWNGMEWNGMERNGMETTRVEWNGMEWKGMEWNGMEWNGMEWNGINPSGMEWIGMEWNGMEYNGMQWNHPEWNGMVWNAMEWNGTERNEMQWNRLNASGFEWNGMDWNGMEWIAVEWNRIITNGMERNGMEWNGMEWQGTEWNQPERNGMEWNGMEST

SEQ ID NO: 932724 - protein, 139 aa, Homo sapiens
MKAVWKRAIRSAGALDSHSSANPIVNCACKEFRLCTPYESLILDDVKCNSFIPKPAPQDPPPLHPPARSLEKLSSMKLVPGPKKKVLAHVKVPEEFLDFCMEAIQERLMRGMERSCKGPDVWSLTNFLVAEWTWKERIL

SEQ ID NO: 932725 - protein, 155 aa, Homo sapiens
MGAVREAFHVFLELLGKHTPLHKSAHLNSNAHTVQIQMSFLSFLNAETSLFSHLKEKDEELLLVNEQRKWFLEMESTPGKDAVNTVEMTAKDSKYYINSVEKAVAGFERIDSSFVRSSTVEVVTTTPTFSNHHPDQSAAISIEARPSTSKMTMTH

SEQ ID NO: 932726 - protein, 192 aa, Homo sapiens
MGPQHQPIVTVGSQAHLSRAGKGTRHTPRMSGQVLRKVTMNTVGKGLTLYGNEKDNETAPLIKCCKVMNDSRHTGAVGIMARTPELDWRNGWDPEGLPGGRGMKEQFEFGMWISFVHVELEIPVSLLSSDVQKQLNLWIWSSGAEPKGDEDMGIIRLWLVIEISGMSDAPKKNVCCEKIADLGITLQSTVNV

SEQ ID NO: 932727 - protein, 162 aa, Homo sapiens
MPKRSSLPFIRACPADFRLVQPTPQLCKPVICNKSKGAQKYSVVIEKRNPGFHRSSIYGVGDDLKRANLALKAGPGADKFKSLGVRRAPGFPVPFLEFVSFRTSNQVATITLLNPGESGHLASHTPLSTGSLKDTTSGPMSRAGEDKIYNIVVQRAKINLHQ

SEQ ID NO: 932728 - protein, 221 aa, Homo sapiens
MTGQRKMARGFVTVPATPAVAERLQRTAQTVASEGGSSKPWQLPRGVEPIGAQKSRIEVWEPPPRFQKMYGNAWMPRQKFAAGTGPSWRTSARAVQKGNVGSEPPHRVHTGSLPSGAVRRLLPSSRPQNGRSTDSLHCAPGKAADTQYQPVKAAGREAVPCKATGMQLPKTMGTHLLHQSDLDMRPGVKGDNSGALKFDCPTRIQTCMGPVTPLFWPISPI

SEQ ID NO: 932729 - protein, 153 aa, Homo sapiens
MTLWKPTHHVSASEGRQGGVCLSGTSVCSQQQRATVQKALLHYPLASRISVEKPNAIKISSHGETSFNILPEQGQGMGINLTISVLEANRQMKNKWSVLSSFNIQIFTSFSFFHRGISRCASNLILGFSDFRDVRNKFLSFKPPNLWQFVTTA

SEQ ID NO: 932730 - protein, 147 aa, Homo sapiens
MAHVYICSEAMMTSLELTGHIAHGRMVSSKESVEIRGWSCSKVIAHRSLSELPGCESPEDIKRNKTPKSDSLVVDFQNLLLEDKAKLLRAVEDSTQGRVQTIDTAGVEEENNECWCAMEKLEPLCTVGRNVRWCSCYGKQYGGSSKN

SEQ ID NO: 932731 - protein, 138 aa, Homo sapiens
MASADPHPVYPRCSLTSMASAAPPPESHRCSLTSTASADPPPESPGCSLTSVASADPPPEPSRCFLTSTASADPHPEIPGVSSPPQPLQILIQSHQGHPLHSWKCNMWKEQGLIKCAGQEHGLYSLTELDSNPTSFTY

SEQ ID NO: 932732 - protein, 169 aa, Homo sapiens
MEPLGIGEEQVLRLRWTAVFFLIARSTPLEELLLTPFSYNCLNTYFSVFTADQPASGDPDMIAFKLNAWSRMTHQSSGNTGNSEDLQGKETQEPEQQGGAPPPTLFPSVQHKEETFSRNDEDGPEPFPPPREKPLPSFPPPLRRPSFIGPESKKSICENGVHSSFTRDG

SEQ ID NO: 932733 - protein, 133 aa, Homo sapiens
MRTPGCPGRGGLQWQSPHGKPLLGQCRSLQATQKQMADQIWFPDHGLPTCACDLLSSKGESSRLREALKRIQFPAIVGLKFLFPSWPMAWDYSLLLNAASFLDLWTFAFKASGDIGAKEDFKDPESNGKNHAT

SEQ ID NO: 932734 - protein, 158 aa, Homo sapiens
MALQARLWYWCGSYRGMTQATDSPRQADSPPRYPGPPQWKEGFELGAGVPGENVAPETETSVQTNGVPRENADSGNVLAVWGGPEPTPRPHSFFSSSDTFWGSVLLRPLWHLAGSGWTMSELGGRTAHLYNGFPGERTRDPLLQASAPLWNEFNSKVR

SEQ ID NO: 932735 - protein, 217 aa, Homo sapiens
MGGGHPCPGLTVRKRFIDHSSRPTRATPPPPDACRAPQHLLEAAQGPLRPLGPPSHWPRVGGGVRISTKAPKPAASAGKELCWGLRCWRGAPVPMCPMRAPVPGECGVTREFTAWARTRERTQGIPVPSAGRDGATLKGIYTHQPQFRSQPHSCPCCGVLGQPLNLSKPAIGCLKKKSDSNADQHRRLLWGGLSGGWGGPKPSQQPAVPTQHPYLDS

SEQ ID NO: 932736 - protein, 187 aa, Homo sapiens
MFFMCFSLFFSACFGSAVTKLLPSGNSAYLTVLSLLNNSHPIQVCTPSGYLWSCGHLFNQHINSLSLIWDHELNGYQHIDNIWFRGQCTTPYNVQLYTITYLRAKWAIRLILAGVEAAIGLPTPWGKFAYYEATLQNFTSSFYALSHKTGDTLETLKLSLDSFADIIIDDRLAREYYTYWLNKEYAL

SEQ ID NO: 932737 - protein, 147 aa, Homo sapiens
MWNSHFFMENFLLQHLWPLKAPSALFYPGSQGSLSSQGWLPALEDLRTKPGPKLDMRSFTTQVPRGAQALTRRTGIPGWAQEWGLDKQEKPPPEAAPGAVLWGSRWSRKQEEGTGPHTQVSEDPKNILDWQLSLWVFMGSAAAWVGR

SEQ ID NO: 932738 - protein, 140 aa, Homo sapiens
MTSGPKRQILCGDVQTLLAGPPECLLAPPPPCKTLAMGSGTSMLTACKAAPATEWAQTPTRQGGTTPFLREERLSLSTLFEIASSPPSWNPKLFSSCFIFLQSIYHHLARRGTLICEAEDCANDSCTGLDDSLQEDMFMS

SEQ ID NO: 932739 - protein, 125 aa, Homo sapiens
MNWGRTKVSKAWAVPGPWEALGVTVLLLELLPDKSSGGTLVHWDTTDAGWKAELPAVGEGWQGAMVRVSEADSKPEGWEKNISLETCSQTFLETRRIQDPVQIVGWDFQFLDEEKLRDWASLLCS

SEQ ID NO: 932740 - protein, 283 aa, Homo sapiens
MAYQGSNLPSLELLICRCLFHLPIALLLKLRGDPLLGPPDIRGWACFCALLNVLSIGCAYSAVQVVPAGNAATVRKGSSTVCSAVLTLCLESQGLGGYEWCGLLGSILGLIIILGPGLWTLQEGTTGVYTTLGYVQAFLGGLALSLGLLVYRSLHFPSCLPTVAFLSGLVGLLGCVPGLFVLQTPVLPSDLLSWSCVGAEGILALVSFTCVGYAVTKAHPALVCAVLHSEVVVALILQYYMLHETVALSDIMGAGVVLGSIAIITARNLSCERTGKVEELWTY

SEQ ID NO: 932741 - protein, 134 aa, Homo sapiens
MYVAESTRKTLLYHMEFSELTSRYIKIINGQVTQGEIDPGLVRLSIILPDMLRQKAGFNLWWDFKFRDTFAVMCHYYCHIPCRNSSPFGECPTLSWAARVSQQLQVILAPCPTEERALLKTVSALPPENVIESE

SEQ ID NO: 932742 - protein, 148 aa, Homo sapiens
MHHAYAVLKGKSPQEAYAATSSHNAGKPGKNVYVYKSMDQGVGNGEDLQVNGQDQLCISSRCFFHVLFHETLTKHPASTIGMPLSSISVSLGSPLLFAYDVTYWPPSGRGAHSSGPDMGIFLHLDPAITKNSPSYFNYSLNVTLELAS

SEQ ID NO: 932743 - protein, 153 aa, Homo sapiens
MLDPILGARRYWGACGPAEGIHGQAYTLQVEGVGPLGPRKAPRHQERKKQNPPELGVLRLKERVEELRLGAVCVLMHHAYAVLKGKSPQEAYAATSSHNAGKPGKNVYVYKSMDQGVGNGEDLQVNGQDQLCISSRCFFHVLFHETLTKHPAR

SEQ ID NO: 932744 - protein, 214 aa, Homo sapiens
MFILELSTAHPWFLLLTILRLQQEATGKAPDSPSLHVSGADMHAREYMGNSSSVKKAEVVEGLSDENPFSGDLKAVRKCTKRLHDNLCMQRVSGYPVTSGLDPMPNTRCIRKVNDTFALKKFTIERELQKRLGTNVREMVIDSQGEIRCKVLFESWRSTDFLSFFLPGLIFIFFFISTVVIWNLPFCVRLRLESGMTASCAYDAIVNGHDERES

SEQ ID NO: 932745 - protein, 151 aa, Homo sapiens
MSVYLRSKVEFGPMDYLATWPAQFQIWQLNYLHSHFQVWVSRASHICVFYPGKIGHGVDTRLVIDPHVGAKDASTILFQEVLAALKRVLGFRCDTATVKAKGCVFEWAVCQISEKTCQTTVNYKLDEVGELVQKSLNQTETKHSPNDMSFL

SEQ ID NO: 932746 - protein, 138 aa, Homo sapiens
MASRPKKDPWENLELTLLSAGNLAPCTALVCIWAPRTQIGLRGIPSPVPERQFSALSSAPNCQMDAQSWAWGSDVAKCLRSRFLPSWPKAELLASQQLQKAQVSCCCLTGKFQLSDSGSDVRSDFCWKQSPPLDSLQN

SEQ ID NO: 932747 - protein, 233 aa, Homo sapiens
MPSSIAANHLALKNSRIVNRRAQEPGLNAASPLGGGTRVPERGVGNSGDSVRGGRSEQPKARQRRKPRVLFSQAQVLALERRFKQQRYLSAPEREHLASALQLTSTQVKIWFQNRRYKCKRQRQDKSLELAGHPLTPRRVAVPVLVRDGKPCLGPGPGAPAFPSPYSAAVSPYSCYGGYSGAPYGAGYGTCYAGAPSGPAPHTPLASAGFGHGGQNATPQGHLAATLQGVRAW

SEQ ID NO: 932748 - protein, 154 aa, Homo sapiens
MGIGRNLQMEAKEATVLRKFLSRKVQWAQLWPILSVIIPSLRAAPFLMAVWPKHWVMLSGMPPSRSMPSLEVWELDRLLPCDIRDGAFITMPFHCYAQNRGEGFRHRSTLPNWLPKGLATSAMASKARNQKATYKVTVRGSGGCHLSLLHPLIP

SEQ ID NO: 932749 - protein, 157 aa, Homo sapiens
MHSKHFYGVVLGTSDTSRRRKTQSMPTEVADQCGKKQATKSSPGKDENISEREMSPCKALRKELAECIQERADSKEGKATFRKEDEDAGDWDEFQRAQWMDFRSWGGVRDDVKLKEVWSHMEMRVQARRNDLGPSLPEVTDINRDFVFDDLRSFKKY

SEQ ID NO: 932750 - protein, 168 aa, Homo sapiens
MSASGHSQEPCWSSLGFWKPLEMPLFCLSLETWAIMDEDADRGQRGWAWVSDCCVALGKFPNLSEVRCSAFDIQNQLRKKPRHQIGIKILPQLLVKLNWRKLFGLESRLIFKYFPLNHMDLPTQLQGGEALLSGYFHLHIRAERRIQMFCGQVDPKEERPHGNKSFGP

SEQ ID NO: 932751 - protein, 168 aa, Homo sapiens
MWAADKENLLGGYKSIKWRLIRTSEQRYFGFMAEESLFHIELWSWGPGEARLRLWEDRLSWFFWAVERLPARGEETDMFRQLENLVNTEEEANCFLSSCTVTLLHIQRFFMELFYSESGGHGHSSGSCGALTESQAGLGVNSGLATCKLCGLVPSRTPNQAQVIWSST

SEQ ID NO: 932752 - protein, 219 aa, Homo sapiens
MGIIYSEESPLETSTEDTSCCGNCTCGKTTFLEMFSDGITSIHILIPLELLLHLIQVEIRIFDAFPLREGMRRFCSRSLPVALSLGTMFTRDVVAGYNGSQKILFNWSSTSLPGKRGHPALASSAKMQPADHKSMDVEYSLAPKKTSGGWYHSVLVTEFENQSQLLVAVQEVMKPDDVLVLQLLECGSISEFSVLFHYSMCVSLYQYHTVWITIALYKS

SEQ ID NO: 932753 - protein, 137 aa, Homo sapiens [sequence omitted]

SEQ ID NO: 932754 - protein, 136 aa, Homo sapiens
MGMWSLGARALGAAALALLLANTDMFLSKPQKAALEYLEDIDLKMLEKEPRTLKAKQLWEKKMDLGSCGSVLPKTHVDELGVPLYAVVKEHIRNEVKDFQPYFKRETFLDEKKKFYGPQRQKMMFMGFICLGVWYF

SEQ ID NO: 932755 - protein, 191 aa, Homo sapiens
MVRVPAGHTNSSSPMMPHLGLRLTSLDRRSNQLQHSLKPKPNPEQGPTLFNSMRAERGEETAEEKCEASRGCLFMKFKERNHLHSIKVQGEAASDDGEVAAGYPEDLAKIIDEGGYTKQQIFSVDETTICCEKMPSRTFIATNEKVMSEMEQQSLDDSACLLHGLVNILSSLLRPTPQEKNRDFFQNITAY

SEQ ID NO: 932756 - protein, 167 aa, Homo sapiens
MAGIFTKHVLAQAIARTHIHPPAPCLPPVEFLEMSTLKAHQFKHQDVFSVCPGAPEAFGEGREADIYEEEMLNINITNHQENRNQNHNESISHLLRWLLSERQEITSVGKNVEEGEPCRPLVEVQIGTAIMKTLQIELQIELPYDPAIPLPGSYALLRILSGSRMMH

SEQ ID NO: 932757 - protein, 138 aa, Homo sapiens
MVGLVLWPCGPETDLSRLNRLLDLELVFHQKFSFLSSLSGFAKTVLPEDEEAELISRAVGLQEGFPVSQTISADDAHQEDGVMRSSGNWPDGSGQPTPGGRLGKQGAEDELTEALSAAGSISLSLHIHAKLISYRKLQ

SEQ ID NO: 932758 - protein, 139 aa, Homo sapiens
MAQPFICVSHVACQKSEILDPLDSSVRREWETSHFLSEEAQKGDDFHEVRRQRWIQSLNLRLLPQSPSRVYHMLPETRNSMKSVRDRKRRHNFLENYWLRNVGLAHSCSALLFITKICLSICSSGYPTGISNPSCPNLF

SEQ ID NO: 932759 - protein, 260 aa, Homo sapiens
MPFPNSSSLLLTAHARAKADAADQAALAARQECDIARAVARELSPDFYQPGPDYVKQRFQEGVDAKENPEEKVPEKPPTPKESPHFYRKGTTPPRSPEASPKHSHSPASSPKPLKKQNPSSGARLNQDKRSVADEQVTAIVNKPLINGELHSQYHGYYVKLNAPQHPPVEVEDGDGSSHSSSALVHKPSANKWSPSKSVTKPVAKESKAEPKAKKSELAIPKNPASNDSCPALEKEANSGTPLHPKGEGKPQQLRSYPEL

SEQ ID NO: 932760 - protein, 142 aa, Homo sapiens
MKAARREAVPCKATGVELSKTMGTYLLQLDMRPGVKGDHFGALRFDCPTGFQTGMEFPRVVGGIQRELNHEGRGGFFLTRRNLGLAIRPEGTRGAAADHYCTGPFLHEGTQASFSSFLLFQLPVQLSLLLNSEINLKTNHKV

SEQ ID NO: 932761 - protein, 302 aa, Homo sapiens
MKQIKELQRLLGKKTMENELLKEAVEYGRAKKWIAHAPLLPGDGDRHTDDTDVLLRIHHVIGELPTYGYRRVWALLPRQAELDGMPAINAKRVYRIMRQNALLLERKPAVPPSKRAHTGRVAVKESNQRWCSDGFEFCCDNGERLRVTFALDCCDREALHWAVTTGGFNSETVQDVMLGAVERRFGNDLPSSPVEWLTDNGSCYRANETRQFARMLGLEPKNTAVRSPESNGIAESFVKTIKRDYISIMPKPDGLTAAKNLAEAFEHYNEWHPHSALGYRSPREYLRQRACNGLSDNRCLEI

SEQ ID NO: 932762 - protein, 442 aa, Homo sapiens
MTLIVSREEEWRLFFIELDQEIRPALAKRWPRVRAEDNPPGLAVNQAPVLIEVKPGAQPVSRVRQGNRCPTPAPGGLWVEGVQEESSDLPTAVQEAHKLTLGQNLNIKASRVVVTLMNTKGRHWVTNARLTKYQTLLRENLRITIEVCNTLNPATLLPVSESPVDGSSFFNPQRERGAGYAVVTLDTVVKARSLPQGTSAQKAELIVLIWALELSEALVKTVPQWCVTCRQHNARQGPAVPSGIQAYGAAPFEDLQVDFTEVPKCGDLIPTFGLPLRIGSDNGPAFVADLVQKTAKVLGITRKLHAASWPQSSGKVEQCVYVCRDIQWNVILCLPGYDEQYHGGCTTSEILGVISISPFWKLGTTSQGNNITGLHKPPSILEVISSSFPVDIRKSITGLCKPPAVLGVILSSLPLDIREIFTRNYFDIGSNIILYFPGYWAQ

SEQ ID NO: 932763 - protein, 187 aa, Homo sapiens
MKYSGPCAAGLLEFAGGPLQTLFAWVSPVEAAKQQRLMPVPSSESFVPDSHSPDDSQSSPGCCLSFGDALPREEESREAVWLQQLCQAVVGSTQFKLPCSFVYTVRGKQSIQASVVVDAPPTTKLDSPRSSSGCCAGSENGKPVDLSLLGSVGMGSAELDHLTPWLQPPFQGSEWFCLTGIPRATRV

SEQ ID NO: 932764 - protein, 142 aa, Homo sapiens
MFGAIPDGVPSGFFCLDRNLSQFWSLAAGTHSAFLVYILRCTKNSQVMCHGLVFQEAGSGMKFREQRVYWEVPWRIAPVEENRLGQKEKMSCNACLPASADLTRALTLEWPIRVALCWAQMAWPLFSFPASLVTGCGLPGRV

SEQ ID NO: 932765 - protein, 129 aa, Homo sapiens [sequence omitted]

SEQ ID NO: 932766 - protein, 158 aa, Homo sapiens
MTGHVEKGLCSMCSSAQSFQGLHILTNIYFPFFDTSLPNECEKKESADLQLPGASLLIRKRRGEMNEALSLSQMGSWNQGAYIKSALSKYCSLLRAKTRNKSTPTERQQRDRASRKLLCGFLKHHYPVLFEYGVLSSRKSNNLQGTFREIVGYPPSEQ

SEQ ID NO: 932767 - protein, 147 aa, Homo sapiens
MFNHAVNLRQPPTLKEPYVASMDLSTFSKTLPLKLTRFPDLPAGLVLGSTLEERMTELLLQKINCEASNLFCSALSLASPLVKVDKPLRFLDTDTKLWHRRKGRNLSLDVNFLTYPSTNPLVIQQIIYTPWESWQNVSNYLKETVSG

SEQ ID NO: 932768 - protein, 134 aa, Homo sapiens
MDGDLPMGAWEQVISAFPPWRSAAAVLCLQIPILCPGLMTTLVACVEMHHGILSHPGEHVSKIQRSISLIDVCATCTAKSDLLTCVLFSPLPGDKSHYLMGTTCVPSNDCATAGNKAFPACAAILRSKVNAMKY

SEQ ID NO: 932769 - protein, 338 aa, Homo sapiens
MLVDLAAMSRTLKKEVSKEISKGPQNPPGYRLCPLQAVGGGEFRLTPVHVPFSLSDLKQMKADLGKFSVDLDRYIDVLQGLGQTFNIIWRDVMLLLGQTLAFNEKNEALAAAREFGDTWYLSQVNDRMTAEERDKFPTGQQAIPIMDPHWDLDSDHGDWSCKHLLTCVLEGLRRIRKKTMNYSMMSTITQGKEENPSAFLEQLLEALRKYTPLSHDSLKGQLILKDKFITQSAADNRRKLQKRALGPEQNLEALLNQATSVFYNRDQQEQAQKEKQDQRKATALVMALRQTNLGGSEGTENGAGQSPSKACYQCGLQGHLKKDCLMRNKLPPLPCPLC

SEQ ID NO: 932770 - protein, 139 aa, Homo sapiens
MGEERDKLKELLHKQKLELEDLKNSRAVHVAIDEKLHSGKKNQECCCLIKRLQVCDLWIQSAISAEARNRDGVVPAKMLFWTEGNEDETVKEDYLTSGILQNDPVEIFGSEHVFDNFTYFILKLADFFFCLLNFATEHL

SEQ ID NO: 932771 - protein, 139 aa, Homo sapiens
MREFSTYQFCDLGQLTQPFSVLQFPLLKKGDRDTSYFRDVMRCEFIHTQGLGHRLTHERDPCTCMKKVNCETASGRSSRQYPEEGIAITEMTAPCLLLPLKTFQWDRMWWWKTVILMILTLCWPMIMDLNMLAKLVSKS

SEQ ID NO: 932772 - protein, 135 aa, Homo sapiens
MVPNSGGKLEGMLPRYLNLELWASESSMGPGPPGSWRPVCRSRCQDHRALSHTALLLLPIFSGLAPGPALVRYPPKRPSLEATTWEPQLPPALRKQGTVGPCDSSSLTSLDVPHHLCSPLPPGALGLLALPEQRS

SEQ ID NO: 932773 - protein, 137 aa, Homo sapiens
MVNSTVLSNILGHAFFELFADRVPKTAENFHALSTGEKGFGYKGSCFYRIIPGFMCQGGDFTCHNGTGGKSIYREKFDDKNYILKHAGPVLFMANAEPNTNGFQFFICTAKADSGDNVSKKALSPGPVEFPLRQEKA

SEQ ID NO: 932774 - protein, 138 aa, Homo sapiens
MGNEAFSGQRLTKPSLSSCHQGSTHALGRICSQPVQVHKGSCLKLQACRQPKYTCELDWACWPHVWDSRRLVGTHHHQFPSPLSYRIRHGLHPQTQGAQTEKQGRHQILKFVLIGEFLLCSIPTNIIIVIIFIFNFIL

SEQ ID NO: 932775 - protein, 144 aa, Homo sapiens
MARLAEGSDYSHSCNTTTYSGNGGSDGGGYYLLNTWTLAFGARGQSIMMMTIVVPIIIATIENISKVLAVKDALVTTYARPQFISECPPTQACVREDLLSTYSLPGTGGSHASSEQRSYVCVQPTKITQHTQLRATFELHTRHM

SEQ ID NO: 932776 - protein, 328 aa, Homo sapiens
MHVSYQGMSSMQWTSEKHYGNEALMEKCELEPSEAASCRKERQRILGSGYGHAAPGTDAGKAFCMFYAVLGIPLTLVMFQSLGERMNTFVRYLLKRIKKCCGMRNTDVSMENMVTVGFFSCMGTLCIGAAAFSQCEEWSFFHAYYYCFITLTTIGFGDYVALQTKGALQKKPLYVAFSFMYILVGLTVIGAFLNLVVLRFLTMNSEDERRDAEERASLAGNRNSMVIHIPEEPRPSRPRYKADVPDLQSVCSCTCYRSQDYGGRSVAPQNSFSAKLAPHYFHSISYKIEEISPSTLKNSLFPSPISSISPGLHSFTDHQRLMKRRKSV

SEQ ID NO: 932777 - protein, 141 aa, Homo sapiens
MAANRPFVGSLPMSGPLKAGSLGWVNTQCLSPHLGVSGILPGHTIFPLASITYSSLVGPPGLLSLKGLVVHMHLVILSPLRAVPWLVLIAPAEAALGTPVPHGFIWYLCSCSLFLSAPLVELLNFNWASSNTCYLSLLGVS

SEQ ID NO: 932778 - protein, 140 aa, Homo sapiens
MKDEEETEKEGAFLRGEILIFMQGLWLHLTPFPPSWTGNEIGTDTELKECFPSTVVQRKGTPGGAALRTQCGESVCGCQHSAQCFSESPRKRVPCGRVHTPPQVQLTAHDSSTRGPNPVTLLDVTYEVETVTTLFFLLSL

SEQ ID NO: 932779 - protein, 133 aa, Homo sapiens
MVNVEQQLFRRELFVAFANVYKANVPTMDKFKLLKAVVTEYGSLEEMHPMALSETVSPARRGFHSSIPLILHSLNVFKSLSFSWQRCTYWPLDSNPIMGTDMEKAHSSLLIELYQRRHSGGKSLVEVEAVFTL

SEQ ID NO: 932780 - protein, 157 aa, Homo sapiens
MQILVLEMRFWRGQGSVSLTSPKWCPHLSVPQPGFVLGISSSDCMKDQDGGFYCSRELLRDCGLPEASPEAEAYVIIFDSRRTVHKGLDDTPLLPMFQGYLLYSVHQNKWESLPETPSQTYPEIMFNQISGHPVTQSSLSIKLTIIDANPVFLPNIQ

SEQ ID NO: 932781 - protein, 220 aa, Homo sapiens
MEQMCWGSKLGGRGGMGPDDKQKMRAPSTAQVPYGKGARLFSKKVPAPATPPWLQSIDLGSQPPHPHLITWAGRSSVLPEMELPEVGGRTTIFAAPQPQPLLPSDSGGSKDIKNEHGPQAQCSCLMEEQPECFPHESLPLLLLTGQSLLTWANTTTLPPPYTFASGSSAIFWEGNPRDNPQPLFHGNCGGTALTAFELGKEYRAWLHYWHLQRAAATIWR

SEQ ID NO: 932782 - protein, 135 aa, Homo sapiens
MPVICPRLLGLRQQTEGCAVGFPTFEILGLGLAFLLLSLQTAYFGTSLVIVENITVCLQGASFKGNDHKNFLKDILMNIIKTTISIKNVIQLESYKMQPIQTNFFQGEIIEFSTMFLEFPESIVWCPEINSGTFL

SEQ ID NO: 932783 - protein, 244 aa, Homo sapiens
MHFLPSEAHKNPRLSQTGADEGMTCLQRGAVHCGSLFAERWADNGTTCLWRGATHCRSLLSCSTAQESTSSPSSTSTCLCTSFFLDAGQQLGTHRMMGSPDLGAPQARVVTPSLGISGSGDSKLPVPPCSLMPVMEAACSMPGPAAALQGASACAGTWSCLPHHSQQAWLCAVAGPHTCSLTYSSLLCAWLALGRHGTQVSSTSQVQPARPSGQNELSGPDRNLGKGTTSHRGFQPENNTPTIL

SEQ ID NO: 932784 - protein, 150 aa, Homo sapiens
MTVCSREKAVGTAWSEARSYVCFRVFLLLLLSFKKSKDTWYDFNLKFVRLVLKPILRSIMENVLCAIEKIVYSPAIGWNVPCMLARPIWSICFSSPLFPYQSSIWMFYLWGISDGGYPVSNGVLKSLSIIVLLFNSSFRFASVCFISLAD

SEQ ID NO: 932785 - protein, 205 aa, Homo sapiens
MATVPGSEDRYAGSCEIEIVHPCKKRNKNYKQTILKSYNVSIAIVFRVCSFRWVRGLADFKNEAADPPNRIKATWLFMETELRTEVICLTCPGRPTPDGKYKNGKELSELYQTSYKQNNQVTDVTDSFVFFNINCLDYTHYWGNINETSFQNVHLFSAQDFFVNTITLSLASKIEEEGGEEEEEKGERGDEEEDRVLDLLYIIVC

SEQ ID NO: 932786 - protein, 149 aa, Homo sapiens
MGRNQSRKAENSKNQSASSPKECSSLPATEQRWMENDFDKSREEGFRQSVITNFSKLKEDVRTHRKDAKNLEKRVDEWLTGITSVEKSLNDLMELKTMARELLDACTSFSSPFDQMEERVSVMDDQMNEMKKYRERQKDTPREEQLQDT

SEQ ID NO: 932787 - protein, 139 aa, Homo sapiens
MHPVKTLNRWMLFNSDFQLISVIKASRMKRTKCNEKDEEVLAQGKVVEAKVTDMEAENMSGIGRPLSSLVQLLEAGRDIPAPDLNKELLLQERSEEEHSFFLDGSNSGGSCMAKFLEVNNPLDFKTHNMYDVCNHHLPT

SEQ ID NO: 932788 - protein, 155 aa, Homo sapiens
MASASLPSSKFLRGSTFSQLNMDEVGNHHSQQANTGTEKQTPYVLTHKWELNNENTWTQEGEHHIPGPFVKALKILRWKVRAKVRVSNFYVISYELLEEDGQWLWEFSLIEKTEPSIEFGNLDHDSPLQLQKKPQKSSILRRRVRWKDKNKKLIN

SEQ ID NO: 932789 - protein, 721 aa, Homo sapiens
MLRATAPCWFPPGYPEAKKVAEEAALEASRHLGGEQSQAGAPEGSKMLRATAPCWFPPGYPEAKKVAKEAAPEASRHLGAEQSPAGAPEGSKMLRATAPCWFPPGYPEAKKVVEEAALEAPEFPLPSHQPAQSFGLWVPQMHKQASAFVDIQAEPQNRGPAVPPAWPKMVTESCYFPAQRGSACRLPAAPRLTERPSGVRISAPRKRKTIAHSSSPCLVTGYTDAKRTRVASSSQRSRGSKVGRQPGKTRNRSGMACKTTATTSSKRIVRQCLKFCASKQEAEEKALNEEKVAYDCSPNKNRYLNVVLNTLKRLKGLTPSSMPGLSRAALYSRLQEFLLTQDQLKENGYPFPHPERPGGAVLFTGQGKGPGDSSCRVCCRCGTEYLVSSSGRCVRDQLCYYHWGRLRSSQVAGGRVSQYTCCAAAPGSVGCQVAKQHVRDGRKESLDGFVETFKKELSRDAYPGIYALDCEMCYTTHGLELTRVTVVDADMRVVYDTFVKPDNEIVDYNTRFSGVTEADVAKTSITLPQVQAILLSFFSAQTILIGHSLESDLLALKLIHSTVVDTAVLFPHYLGFPYKRSLRNLAADYLAQIIQDSQDGHNSSEDANACLQLVMWKPQASSKTAISPESSPCPPRRKAKETGAAGGRRGQKAKSNPNPPLPVPRNPCRGPSGLSTSLCPSQTSVLPPIASRSPEPPLPVPRVPAARPRAYNVFALLPFGL

SEQ ID NO: 932790 - protein, 176 aa, Homo sapiens
MTGSRQDCEEAMASANLQGPSRTTELFHPTLASISSPMLEGAELYFNVDHGYLEGLVRGCKASLLTQQDYINLVQCETLEGQDRTGQDWHHKTSARQTPPFQKKEEEEEEEEEEEEEKEKEGKGEGEGEGGKKKEYTNGGKVDMAGERQTAERTENTGPTTTVVGLLMPHVSKISV

SEQ ID NO: 932791 - protein, 156 aa, Homo sapiens
MGSGTNHCTYTFKDECGFFKHTCTVHIKLRSMSERSFDKNPTGQDESADEWTERIVQRSHNDKAAIPKDRQMKTLSLLTLGNATLFGKLKKKMLKVKIISLRHVSQEIQSENWVFDISEIQTEIEKLPMVDHSVIIIGQRRNFQPPPCEDDKDEDL

SEQ ID NO: 932792 - protein, 125 aa, Homo sapiens
MLNFRTEQSFALPGLTYISMMISDVEYLHGIAGQNYNERSPCTCRPLLKKERERRREITSVAVWTSSSSQYSWKDSQGQSGLRLKCGFDISSTPLHRPQCRPDRAPESCPLSLFRFILRDNAGDL

SEQ ID NO: 932793 - protein, 140 aa, Homo sapiens
MTRSTRPDPTFPMSSPQPAGEATVIATWSQGRGWLRAHPREERRFQDFRSYKDRRRQMGALPMSSCCSSFYPAISFLKYLGVIPNAAVKCLRMEQEDPDLLPDKECSNSHSAPRSSCYKKEAANMRKTDKVIENLKVISV

SEQ ID NO: 932794 - protein, 138 aa, Homo sapiens
MGHEEGTQFEISSEVIGEATLVKEFCRSVGVCWRSTPDPVCLGISSGGCRTANIGEQQMFLPDPSSGSFISEGYPAMRGVSLPLLGGASQLGYSGVRDPLEEAVCLFSDLKLRAGRTTTLFQAVRQGHLSLQRFLLPF

SEQ ID NO: 932795 - protein, 161 aa, Homo sapiens
MKERTILENQCRSHYSEVHTSVESSRKHIESLREIYDKLLSVKVHTRCSIFFGNRSREHQSAYLISNSVDLLSVATVTRVGKHFLTTLFFGHPGVGMQKIKHQRQKHSMKGGIQTQMRLPPVQRGASILSKAFSSREYRAFDPDPDAFQWLEMTILPPPQP

SEQ ID NO: 932796 - protein, 135 aa, Homo sapiens
MCTPHGAVTVPKISPDFALTSEQVLTAGRSQAVGTGISEPARAGGPSRAPKTGGLGLQLRFGQLQQSCQLYGVGGLGQQLCLERLRLHLGSSCSTNLEGVGLPLVASSTECAAPAVPPCYSWHDGKERMPDVAHL

SEQ ID NO: 932797 - protein, 154 aa, Homo sapiens
MFVDTIWNQQLGFQALNCLWLEVNCFKSALQGIISEHESVDKYEIWIQIPLESQWFYVSTLASLSSNLLTNKLILIPSSQSILEILEYIKASLWSCSILSPKHCVSEPGGEPPLPASFSSDPSSAGHSALHLFATCLPLMKGRNFSRKCEEYNQ

SEQ ID NO: 932798 - protein, 124 aa, Homo sapiens
MPAGEEALLTPTQPCMKLHMHQLRPPPSPAGLPVLQGSWAAEPSPNGPAGTQNPSADAPFCEDTHRKSVLCLPPSLGALQSCLSFTNHSWSPCQVPGTNWALSLLSHSTATASGSQEARCRAQS

SEQ ID NO: 932799 - protein, 127 aa, Homo sapiens
MKLPEEGSDSNICCSTIFAVLQPLLVMPRQTVSGVDLQQIPTDLQLREGKLTNRKDIHTKTPSVRHHHQRPKVDKTTKMGRNQSRKAEHSKIQSASSPPKEHSSSPAMEQSWMENDFDELREKGFRQ

SEQ ID NO: 932800 - protein, 196 aa, Homo sapiens
MFSILHSLKASSEEKEPKTDSLPQFWITLNLYPIPRHVERKEDQPNEKNKDNLFFTCCSKGVSYLHLHLGRLIAGRGVEKLHSGKREGSSPDHFGSTATEVIVEFPELSLERAVWPPASLIYGRLAAWVVIDQKVGFLEVAADCGSQFCFICNMTIVHLYLQSLTTNRNSNFPKGNNTQNDDKSNIVIEMDKKRIL

SEQ ID NO: 932801 - protein, 159 aa, Homo sapiens
MYLYSTYLKITHTKTLGKADHFLLAMTRCPRKDPGGSGAHEDVNGQPSNLNGPGETTRKNYTGGHAGSWSFKNISVGRGCSTESNEESGNVKWLYFRQLVSRTENLPWAISLPGEKASKLTASWLSHGACSSNPPPSKHLWILLFFLLCSYGSSWSKSL

SEQ ID NO: 932802 - protein, 198 aa, Homo sapiens
MELHGTLKHCLEKSHTREPLELHLPVMQARKALLQQWVPRLGLFVAAGSSCVFQSPVAKVLHTDETTDSADVTEPTDASWSHKELTHQRMRSLSAPISKDAGKVHSLHLFSLVVLSHRPFYTTVSMLSALHSSTSAEKFPLPPPPPASPRAAADHWVTCHPKGLGGIVPAGHSTYSPPPANTQGMQDPLCQGCHIPSL

SEQ ID NO: 932803 - protein, 137 aa, Homo sapiens
MHEAVKDNRPVLKPTNEWRHSLACRRALIVLCGPFSTRTMCSQLAVLSLLGTLVNMHVPNHRHSLRARNSRPYPPPAQPHPDSIQPPLEDEKHLPNQSRLRLLLIASLAWWEDREKGEQEFSRALKRGDGNGRRTGL

SEQ ID NO: 932804 - protein, 125 aa, Homo sapiens
MPSVTQAEGKDFPAASMLEEWGALWTAQGEGAGGMLDGGRWLFSRSSQQQMKEVCGDHSPQRPFISLQLKEQWVLEGEEKERKCSAPSQHWEEHRAAHEWARGHAGAICEDFDLELDSSDGFTVS

SEQ ID NO: 932805 - protein, 140 aa, Homo sapiens
MVTNKPGPEEAPADSKNMAADSKDKKIHQRSWLSVLQAEPQLENLCKFFVHRVLVECARAEKGFESCRNGFPDTPGHSSLIGCLGFYKEEREARNTTTTRVSFAAEEKLLQPQQPVSPASPCDFRRTPSDRDQRSCEHSG

SEQ ID NO: 932806 - protein, 195 aa, Homo sapiens
MSMSPNGKDKKANGHNDPEVLEIPNLPVAIARLRPKVFLVPKSMEEADPNYLIHSESCVLSSVTAATGQILDFWKSFTILNTRGRKESCHKDWCWPPGPGTKRPAEKYPQKGHSGSSLQPLEAGQKDEKPVFAFGGKMKKGRGEDWLLTVSQAECGSFIRQSHIIGKNFLTYALSPLFDEWNFTESGGKSDSKEL

SEQ ID NO: 932807 - protein, 164 aa, Homo sapiens
MELNFLNFLLAVAAKPTICYSLLSTCNNQAHAPLHIPGAHAPLHIPWSPCTTAHPWSPCTAANPWSPCTSAHSWSPCTSAHHWSPCISELHLSPCTSELHLSPCTAWLRSNFTVESSDSLPLQLELLFPSLCFYSGLFILIFAMLRHFVSPLLDSRLPQYKDAS

SEQ ID NO: 932808 - protein, 162 aa, Homo sapiens
MFLSFASFLNESCHKDWCWPPGPGTKRPAEKYPQKGHSGSSLQPLEAGQKDEKPVFAFGGKMKKGRGEDWLLTVSQAECGSFIRQSHIIGKNFLTYALSPLFDEWNFTESGGRDNFPKHIIIHVDMEPFGTLSKVFTSSCNCTFQAEHQYKLNWSGMMWLGS

SEQ ID NO: 932809 - protein, 141 aa, Homo sapiens
MGITSTSWSLWRPLLAEPNGASGKAETTWSAEFQSCSPSIFNIDMKMYSPKMTQLADRDLIYKLLSPEPGLVMTVPHGISGEKTMMNTYLNQGKSFTKIVIKNLKCVLIKCARMNISSKLSINSLSATTGTLSAMSVLIPC

SEQ ID NO: 932810 - protein, 165 aa, Homo sapiens
MDNFPYIPPNSSLGCILNNWNQFNPDNLRRKHLIFYCDDASPGPQEVTLSPVERVPLSPINVIGEETIPNSLFIDIWRSGKCPGGNLNFQFNGIIVSPGGSIPPSGTNTSRPAETNAMGTGIKNFASGNCRGEYVVLDICVFLEKYKNMCTRILEEIKCNKYTLF

SEQ ID NO: 932811 - protein, 139 aa, Homo sapiens
MDLEEEDHRGSLTSRNTFSEDQLVLLISSNGVRYKMPSGRGIKPLSSHFFNRNPKLQILTSKLMTTSRCSPAQYRHLLSHTAKALLPWAASSCPNLPEGNYNLRPSTSFLFIPLTPVENTYAEYFESFNKHSAYEFLHM

SEQ ID NO: 932812 - protein, 145 aa, Homo sapiens
MQHHLLPKAPSPLPSDLNSDWICNCASFELCQVFRSTSLSWVPLGFRDGNLKHAIIVIGGPLSPVREMKKYIGGPQVQVINWVNGGAIHGAREYVKRIRFGGKDELNFEHNGLRCLGNIKWRCLTAPTTKNYLVPNVNGAEVEKP

SEQ ID NO: 932813 - protein, 141 aa, Homo sapiens
MNQGKLSRLQAPVCIGEKATACGRKKVVEAQPGAKALSLGVQPGGSETCSRALQPLRQCFSSVPVTIWKSHGYPGAVVGQLWEENEIFFACDRASVSACGVPSVVPGSTEHLLLSCLHRPRQEPAQGQWGAGSKREKRRDH

SEQ ID NO: 932814 - protein, 163 aa, Homo sapiens
MAPRRLHSAHGVVTFAAVMGMAGPGAKSLTLRSMLLSTASCPNSHTNATWNFGERKGKFEIHIPVWQPVLALAARGTRADGAAGRAAATICASPDLLCGCSQEMWCPRLHHGCRKERRKARAFQEEEPHVHLHRAGKQYDQAVMSRFNAFNDLEKVAAYPCQR

SEQ ID NO: 932815 - protein, 140 aa, Homo sapiens
MTLGVTSTHYKACKNLCLFPTPLKSSVICQASPLPACLHHPLELLCSFLHFMFTLHPRFCSGKFMLSCNYYQVQLGASFTLWPLPNSASCLPFPKDLCELPKSHPSTNQAGSCLAFEIKQDQALSGWYGYRLSSLNPFQV

SEQ ID NO: 932816 - protein, 206 aa, Homo sapiens [sequence omitted]

SEQ ID NO: 932817 - protein, 137 aa, Homo sapiens
MWVEPDKGIKAGCLSQQKNEQAQTGGSSNSRHVALRAVTLTAKVCNFTLEASETTNPPEGRNSEHVRTSEGTNSGHTTFKTCNTHREGSLALSPRLKCSGDLSLLQAPPPGFTPFSCLSLPSSWDYRRRPPRPANFV

SEQ ID NO: 932818 - protein, 149 aa, Homo sapiens
MDGSPGSPYDPKFLHAIIWHDDPLVSYLAFSDSSLKVSLGASVYPGESESHLLTWPLLVLLEEGILHLEMLLPLGWKIEKLWRTDTAEPQRASNTKPLYKTPVKEKTLITTTRITKLSSSVMALIQSCKCLFTGSCTETVTENLEELSY

SEQ ID NO: 932819 - protein, 125 aa, Homo sapiens
MLSNLSSLLILYACLNKLPQIEWLKKYIFSYFWRPEVQNQGVGKAMLPLKALGRNFHEDGFETELASSLLQHQIKAFSLGNTCHLSDWLSVRKRIIISDFSIFMRSKTECAIKSLNAACVAAAKF

SEQ ID NO: 932820 - protein, 135 aa, Homo sapiens
MFGALEVLPAQWPSPHWTKVQCHLPINSACQVKMALRERSVPQGPRRGPLLHLKLCYAQASQLVIFHVALWDEDVEEPQRFQMTTRDSKAEYDPDHKKTQGTFYIRCFSEVSYGAFSLHGLLPCGDLLVSPGGLC

SEQ ID NO: 932821 - protein, 137 aa, Homo sapiens
MQPVGLQSVCSVLEPNMLLHSFCDGEEGSGLVLGPFSGRGTLLSPLKPLFVFWQPTQAYPVEAWHRLSTGHQKGHSSSGHLSESNKTPSVNRPQSDPTWVRLNPLSFTCKDRSQGQILILSTYLWLPTFGCLWLRSC

SEQ ID NO: 932822 - protein, 139 aa, Homo sapiens
MRTSSRCFCTHKSLTLSFLLLCLARGLPSSFPLHLTQLSIGVSRDLGTMFLPLESSDPQKDRAVHFLGPDLQLPGHGAGAHAVGPPHTLRPPLCEGVSRDDTKNRSSDAGPVLIHLLTNPATTVALCYLICRMGITSAT

SEQ ID NO: 932823 - protein, 135 aa, Homo sapiens
MNLLTEACFLLHQKDVPGTSLRTLRRLAAPLASHPLDASSTSPASGDHQKLSPDIVKCFLRPNVLEVSRKASSRTQALRGPGMNEANLIMVGKFFNLLLDSVCQYFFEHFHIDVHQGYWPEVFFLLLCLLPVLVS

SEQ ID NO: 932824 - protein, 156 aa, Homo sapiens
MWKNMVGLTMADSLGLLVVAAAAAKPRVTFSIMFWICKYRNNVHNMVCYMGVMCDVDVWSMNDPVTHIVNIIPNVSSGFCCRHELPIRSSPLGAAHEEIMMPIMSVPISAGSRESEVTKDWSSPPAQHRSSMEKQSDCFFTQVLDPVSIHWVESPD

SEQ ID NO: 932825 - protein, 215 aa, Homo sapiens
MVLDNHLALEYLLAAQGGVCSLQGTSCMWINTGQVQQLLKEIKIDLTAMHNVIQVFKNIHTNSPGNCRSVLYRANDSAQDSKPQYHPHTDTLLPSLCLGVTCEGAFLTQCHVLYHGPLTQMPSRPPGPRHCTGCCPCPLPVGCTPTSLEFQHLQDASALHADSHTVLHCSTFCSSHLGPDALLSMDTLLTLLGSSTWCLATVACFLLHPLLVPTL

SEQ ID NO: 932826 - protein, 141 aa, Homo sapiens [sequence omitted]

SEQ ID NO: 932827 - protein, 141 aa, Homo sapiens
MKKLLSYEAGTPEEMEDALSEVDFQLKVDLHFTDSEQQLRDVAGAPMVSSRTLGLHFHPRNGLHHQVPVMFDYFHLSVISVTVHAALVALQQPLISVPVGTLCGGSDPIFPFCTALAEILHEGSAPAANFCLDIQEFPYSL

SEQ ID NO: 932828 - protein, 134 aa, Homo sapiens
MNYDGAFRNPGCRDVLDTAESCASGRTAVLPDDDKGVLAAPNPSRDDEPGLASRDHKLDMRNSDGGAVPTAGWTGWGRNGSSSSLYLWWNLAVNPSGPGLFLVGEWHVQRCGNVEGHDAFAHQQHSIPGTKADA

SEQ ID NO: 932829 - protein, 153 aa, Homo sapiens
MAGLAQTQVPLTGMDDLPPTRTGLNVLSATNRVLHCIAFHCYTIAELRGNIINQPLCEHRCEGGNIQSRNDRRCEGGNIQSRNEHRCEGGNIQSRNEHRCEGGNIQSRNEHRCEGGNIQSRNEHRCEGGNIQSREGAPFRSLLPHYASQDHLR

SEQ ID NO: 932830 - protein, 147 aa, Homo sapiens
MGTCFGPEIYGKHRLAEEAIRHVFVSGEQWDDLLSCEDKLSVYIARVKFHRTVFGVKILRLTRNSLWANCEGGLNSFYTQYRLKNEWIFRRHLKAHLTLNFIVKYQPGEIFTATSYENTDTTNSSLVSMWRVYMVVTDGTKVDWGVR

SEQ ID NO: 932831 - protein, 161 aa, Homo sapiens
MGFRDPLEETVCPLAEFECCARRSTALFRAGRQERLSLLKLRPQPPLPPGALSQGDGSFICKPLTGTAAFLSEMPCPERRNLERESGYSSFAELQWALPIVHSQQFYLHCEGKTTYSSLSNGGRPSFHQAGASTSDCCAGSKNFKPVDLSLLGCVQGDPLS

SEQ ID NO: 932832 - protein, 151 aa, Homo sapiens
MYVFGYWYIFSLVPYVFYEEWDLVCYVYCCHKIDIRTSSLNRKVNKVLVSWAPNISFLILFLVLGRGLEQSSHSFPMQLLDDFPQISSYSLLRLCLIISIQIEWTIHEVSGGLQLMSCSLKRALRHGDLYERSLVGHSLQSNRSEEMKETC

SEQ ID NO: 932833 - protein, 132 aa, Homo sapiens
MENDFDKLTEVGFRRSVITNFSELKEDIRTYRKEAKNFEKRLAEWITRINSVEKTINDLMELKTMAQELRNSGTSFNSQFNQMEEMISVIENQINEIKQEDKKPYKPEESGGQYSTFLKKRIFNPEFHIQPN

SEQ ID NO: 932834 - protein, 149 aa, Homo sapiens
MSKIFISVHVLSGIFHVGSLQTCRIHSTEDRFCIRLNSKKFELPVFISKHWEFEMTGLFANLLMSDFEKVKGSKYKIKPGELDCVFKLPTFCPFVTFNCKVYSQLIKHIKIFTATGSAMYSIKIPKKTTVFTGKNKVLVTQPGRDTKTL

SEQ ID NO: 932835 - protein, 171 aa, Homo sapiens
MRTESFPGYNEDSGPFAAGLLQFAGGPLQNLFTWVSLVEAAEQQRLLPAPSSESFIPEGTSLMPARALLYEVSVDPCCEVSSSQEPQGSIIPGPLQTAVLAARISNQCFLACWAAWEWDPLSEATWLPGFSPLSRGVNSSVSLGFQVPLGYEEKTPAASLVSAQTAAQFCA

SEQ ID NO: 932836 - protein, 136 aa, Homo sapiens
MIDLTFCLPLYPLCRAFSAFVLTLRHIRLRTSLTKIKSSRLKRGGSRRNVGPDKGDKGRYSKRASGLSQRALAEAGRGFVEVDSEGLRSRKLEHNYSHECSFLYVVLKSTLFFFLYMTLSFKFNYGYSEIPADNML

SEQ ID NO: 932837 - protein, 155 aa, Homo sapiens
MHWLTFSFSQTYQRKVGIEESCAMTGEGNAGVKVYNTWVTGGAGGIAVRDNTYMKGNFKFFRFQTVMVNIECQLDRIEGCKVLFQDASTLPALKHHTPTSSAFGLLDLHQWFATGLLGLWPQTESCAGGFPTSEVLGLGLITTGFLAPQLADSLL

SEQ ID NO: 932838 - protein, 190 aa, Homo sapiens
MGKKQSRKTGNSKKQSASPPPKERMMEDEMNEMKREEKFREKRIKRNEQSLQEIWDYVKRPNLHLIGVPESDGENGTKLENTLQDIIQENFPHPARQANIQIQEIQRTPQRYSLRRATPRHIIVRFTKVEMKEKMLRATREKGRVTHKGKPIRLRADLSAETLQDRREWGPYSTFLKKRIFNPEFHIQAN

SEQ ID NO: 932839 - protein, 247 aa, Homo sapiens
MRNCAFHPSSYTFPKVFSTRRPGDSLGCLYHQGPGFQAQNWAAIWADTELAAGPLRVRQTASGVDLQQIPPDLQQRGLTVRRKTNKQKGIASTSTKRMSTQKPHSKVTNIKDQSTDSYSLEAECLTANVVTLAELERCAGRSAVVFRAGRQECLSLLKLRPQPPQQPPPQPPLPPASSSAPGRLQTAVLAARISTQSILACWAPSGWDLLSWTTWLPGFSPLSRAVNGSVSLAFQEPLGIEYVTSPT

SEQ ID NO: 932840 - protein, 159 aa, Homo sapiens
MRDMSFLHRMGRSQFKQSTSRKTLDIVNQDPEEERKMWESLELHRDLLNGFDQNADSDMDNEIQPEVVSDRDEELVENWSKGHFSCALAKRLEAFCPCPGDLAVWKGNVLSEPPHRVPTKALAGGAVRRGPPTLSPRMVDSLPAYTVHLKKLQTVNGSP

SEQ ID NO: 932841 - protein, 117 aa, Homo sapiens
MIGKLPETPSVNILIMTTANRTEACLTCKQWRCSAPSGAPSLGDQSATWWQVDYTGPSKHGRGRTYAITGIDTYPGYRIASPVLNDSANNTIHAFRNASFTIKEFHMKLLLMKSFVP

SEQ ID NO: 932842 - protein, 142 aa, Homo sapiens
MSSSLKWEWSYLTLEVVVTVTDVVTIITTTTTTTITITTNTTTTITTTTTATITITTTTTITTTTTTTITTTTTTTITITTTATTITITTTIITTTTTTIITITTITTTTTTIITTIIITTTTTTIITTIIITTTTTIIIVN

SEQ ID NO: 932843 - protein, 141 aa, Homo sapiens
MIVSFLRSPQKLSRSTHASFMLTSLVLMLLLRPLSGPLSPGTTTGLAPHILKVTPQPSLHLEKTFLTTLHTAISPTVTFPFGFPLLHGSHGQAVSPHTMYLQYIYLLSAPRWESMSHGSRRKNKNLSKRTQAKLEKLQASW

SEQ ID NO: 932844 - protein, 158 aa, Homo sapiens
MLGFEQVQTESFIPQGKTLSHVMPLPTPHIKKEAFHECWQHQRPTISKMTKPVGIYGSVQQNPSFQHLKSIAEIVIMLKSITEIVIMPEQYKGITIYIAGLLGMNEINRNVPAPLLPGRMKFNDTYSTDELKSCTFQRNIWSLTSSWGIPCKSLEYPA

SEQ ID NO: 932845 - protein, 140 aa, Homo sapiens
MPLLDITGLDLEPTGERLLVLPLSVLSEHRPSAPFCRLSGTDQGRPSAGTPGDRSAAGSVGWTDQGRPSAGTPGDRCAGIKAGAWLSSHRRECEPGSQAQSLSSKPYHCSIPETAITHAFKTPDAVLAPAEIELLERKCA

SEQ ID NO: 932846 - protein, 143 aa, Homo sapiens
MRKSSPARSSLGWSISRLFLSLIRLPELPGPLLLSFDQNCFSVSVYLPKIDKDGHLQWPEIQLSHRELPGYSRAADHWGARSHEGKRAVELMGHKDSQLILQVQKFENIKDISADGFLVRKEGEEKMKKCGRGGRDSCFWGLD

SEQ ID NO: 932847 - protein, 193 aa, Homo sapiens
MVERAGWMVENAGQMVERAGWMVESAGRMVERAGRMVERAGQMVERAGQMVESAGPMVESTGWMVENTGQMVERAGQMVERAGQMLESAGRMVGKAGRMVGKAGRMVESAGPLVESTGRMVESTGQMVESTGQMVESTGQMVESAGGMVESAGGMVEKAGQMVERAGQVAESAGILESRQWRTCMLHPSANTE

SEQ ID NO: 932848 - protein, 145 aa, Homo sapiens
MRFLTVWIPCHCSHLSSKYKQILDLQESFGYSFQKAPIIDPTLYTTGERTASPFTVIPEAKPRTLGLELILFSHPCESFLNRPTIPWRHPDTPGDMVWLCPHPNLIWNCSSHNPHVSWEGPGERYEISRRSLTVSLYISNLELKV

SEQ ID NO: 932849 - protein, 441 aa, Homo sapiens
MLGRRVSGSLTDYLMSQGTGCVPEDGLTTQQLFARADSLTYNEFLILPGFIDFIADEADLTSALTWKITLKTPLISSSMDTVTEGNMAITMALVGGIGFIHHNCTPEFQAKEVRKVKKFEHGFITDPMVLSPSHPVGDVLEATMRHGFSGIPITETGTMGSKPVGIVTSRDIDFLAEKDHTTLLSEVMMPRIELVVAPAGVMLKEANEILQQSKKVKLPIVNDDDELVAIIALTDLKNRDYPVASKDSHEQLLCGAAVGTCEDDKYRLDLLTQAGVDVIVIGGNVVTAAQAKNLIDAGVDGLCVGIGCGSLCITQEVMACGCPQGTVCTRWLNGVRLKKYWGTGLLDAMEKSSSSQARYFSEEDKIPFLGIHEAKNPRSENRRLATILEAACHHLGNFVNKDPWKFQLHNPYYAPIQQEAVRAVVGEPPQQHLGFPDERAD

SEQ ID NO: 932850 - protein, 143 aa, Homo sapiens
MPSLHPFPILATPHIPRGINSGAPPNPRRPPPTSKAHDDKVHRVEQVISGNCMSARADIECWVPAGEWDTVGLRTGQFFAVWDCPMQCRIFLIPRLGSSSHSTTHYGHSNTPTHITSCPIGGQHHDFENQNPRDVKSRCSPVD

SEQ ID NO: 932851 - protein, 152 aa, Homo sapiens
MSRFVILVNCVSWGFGVQIICHTVAQGRLWWEEGASGLMLMGRGPSAGALRQEQSASEGAMMRARGSTLFRQAPGPAAGAPGDRVALRLDWLHLTGKTALLCTDPTRPIEDIRHDKCQKTVKLLGQIHNSQMFYSPSAYFKEIKDYVSRTPA

SEQ ID NO: 932852 - protein, 142 aa, Homo sapiens
MMLLPISQGYKYTMCSIYFLYSSLPQNNATCINYIYIISLSRSTSVSISVSVFICICIYIGTCPLQYKVKFLKHFTFDHPLLSSRIFEYHILCIPCIYSLQIKHLITFLYSEYYYRFTLKLYLLLVQTSFWNLPQKFLFEDY

SEQ ID NO: 932853 - protein, 135 aa, Homo sapiens
MPEPLHILGCRVARASPTGATPFSAVSSLIHCPRAEECEHTAQDWQAALPASPVQDPLGSAASLLKPARPQTHQKEETPNTSERQKEQTPDTPPLRTVTPRVSTASFLKSVRPRTHKFGTQKHKNNCYMSQVEDH

SEQ ID NO: 932854 - protein, 130 aa, Homo sapiens
MEFGLSWVFLVAILKGDSWINRDVECVQCEVQLVESGGVVVQPGGSLRLSCAASGFTFDDYAMHWVRQAPGKGLEWVSLISWDGGSTYYADSVKGRFTISRDNSKNSLYLQMNSLRAEDTALYYCAKDTQ

SEQ ID NO: 932855 - protein, 141 aa, Homo sapiens
MQPLLPAPVEPSPQMGAGLRVLLDGHMDRGPGKPPAPTCILPVTLVTQTLFTQALQQALGWMASGLFGALVACLPNSAASPRQEHFLPRLLKLVRGFPTSQKSFIGPPLETSDRSHRRLASGICPHPRGQVRDQRPAKPSP

SEQ ID NO: 932856 - protein, 342 aa, Homo sapiens
MASRGQPPQTQLEPLSLWKLQYRFGETGFEQNIASKELSKLSCLHFTPSSCFSFSHLKTETGRVTLLGQALHEPLPRSHSGSSLWLLAALRKPPAFHAQRPIPMRLPQAQYAPAGLLTCPPGKRLGPPTATRATGSMRLVPGDVDMTGPRRLLTGPPYLAPLPFCVLRERTSREAGGGDLPEHVRAARSRSSRTTRICQPPGKGDKAGPPQRQPRPPPAPAPPRPQRQPRPAPSGQPRPRARPPPQRRSSQGWAYTLRCSGEGTSQAQMAPYLIPYKQQHFQDTETGRSTCCPAHSSPSEVVPLDKGHRKSCEIIPANQPLTPKETRDQAQLEPPSCAQSPA

SEQ ID NO: 932857 - protein, 147 aa, Homo sapiens
MDLELERDNAPSGRQKLADEGRVAAHRCQDCLLCSAGIYPVSKVVSDGHTLQKSFLRADHGHCATPDCAELFSGLAACLGSKLELKPLSKPLSIMLGGMFSQESVSSHSYTLDSINAFRGGAVLLYSPQPLALLGPEKSFNKSVLMD

SEQ ID NO: 932858 - protein, 139 aa, Homo sapiens
MDEAGNHHSQQTITRTGNHTLHVLPHRTPNSPALDSGTWTSKHLDFQLLGLGLSHTISFPDSQDFRLGLSSTSFPGSPACRCHTEQSHLNPYRRRETFPTLQGSNLLQEAPSYNPIQFVFNFSVSQKYLLFFIGGFIVF

SEQ ID NO: 932859 - protein, 226 aa, Homo sapiens
MLKFYNGLSEVEAVGLPAGTEPLDPTDLNGVHFDPEVYLDKLPRECPLAQLMDSETDMVQQIRALDSNMQTLTSQCQVYKCVQNWWVLGLTDFKNEAVDPPGGARGLAGSGVKLQIFTWVHGLAGFRREAADLLGRQLRPSEKSSTAAAGPGAKPLTARAGKASRQLLVQGRQAHAHPELQPAGKQHTRGLKGSSSAAKVGAQAEEVPRVNEGCEGCQHAVTSHKE

SEQ ID NO: 932860 - protein, 272 aa, Homo sapiens
MGTKLHCALFRALFKEKVTFEDVAIDFTQEEWDMMDTSKRKLYRDVMLENISHLVSLDRESALKKKHMISMHPIIRKDTSTSMTMDPFEYNDSGEDCTHSSTITQCLLTHSGKKPCVSKQCGKSLRNLLSPKPRKQIHTKGKSYQCNLCEKAYTNCFYLRRHKMTHTGERPYACHLCGKAFTQCSHLRRHEKTHTGERPYKCHQCGKAFIQSFNLRRHERTHLGQKCYECDKSGKAFSQSSGFRGNKIIHIGEKPHACLLCGKAFSLSSDLR

SEQ ID NO: 932861 - protein, 140 aa, Homo sapiens
MAALPGTSWEPLNLLWFLEWGSLGLHLEIYSVKAKKSGSTENYSEPHESMGKSGDTCAMWKYITNGLWQREIPLPARCLHELLKAAECLAAVPVSVLCAVGPGCFIHCTLNVSNTFRPKLKLRVVRPLNLNVDLVPCGTD

SEQ ID NO: 932862 - protein, 136 aa, Homo sapiens
MFESAPGTACSWQGAVCMSDTAGKRSRSRYFPYSGAQPPPQQVSCYSEEASPWEQAVLPQAPNHRRSRRGSQLRVVTSQGEKSAGFQQRLHLAEKIESSNDELSGRISPYITHPHQRRTPHPLISDGKRRSRKCAF

SEQ ID NO: 932863 - protein, 165 aa, Homo sapiens
MWNFTGSIAAWVHKQLQSLPPRRKNSTEGHTVEKETERTGRRGKFSWKRPEQMPEGPRKKREEPLTLILRWVFLFPVIRPLGRKKVTFEDVAIDFTQEEWAMMDTSKRKLYRDVMLENISHLVSLRYQISKAYIILQLEQGKELWREGRVFLQDQNPSKQQGPVL

SEQ ID NO: 932864 - protein, 142 aa, Homo sapiens
MEQAHEQSGYEGGQGGQAQAQGHEGHMLELAALSTGALERPRHISTGKEDGNGPGWEVAAAAAGVLSPGVKGGSLCGRSTDTSVPVHSQSALHFHFALSLGNFAAGPAVAIFIQVISFNPQKQTCQGVITQVYRGRSWGLER

SEQ ID NO: 932865 - protein, 514 aa, Homo sapiens
MEDDSLYLGDAAFAEIQRTSLPEKSPLSSEARVDLCDDLAPVARQLAPRKKLPLSSRRPAAVGAGLQNMGNTCYENASLQCLTYTPPLANYMLSREHSQTCQRPKCCMLCTMQAHITWALHSPGHVIQPSQALAAGFHRGKQEDAHEFLMFTVDAMKKACLPGHKQVDHHSKDTTLIHQIFGGCWRSQIKCLHCHGISDTFDPYLDIALDIQAAQSVKQALEQLVKPEELNGENAYHCGLCLQRAPASKTLTLHTSAKVLILVLKRFSDVTGNKLAKNVQYPECLDMQPYMSQQNTGPLVYVLYAVLVHAGWSCHDGHYFSYVKAQEGQWYKMDDAKVTACSITSVLSQQAYVLFYIQKSEWERHSESVSRGREPRALGAEDTDRRATQGELKRDHPCLQAPELDERLVERATQESTLDHWRFPQEQNKTKPEFNVRKVEGTLPPNVLVIHQSKYKCGMKNHHPEQQSSLLNLSSTTRTDQESVNTGTLASLQGRTRRSKGKNKHSKRALLVCQ

SEQ ID NO: 932866 - protein, 136 aa, Homo sapiens
MALQTPRASQILSLSASLLFGRTSKERNSASHTFSETSAEQQDKAYSEAPTDQEGPLCAENGPPKEPLPSARLGRTPGKQKVVVGTFSMFMEWKQPETLTDADAQTWTFSDTSIVSQINMFLYLNYPVSGLPSEQY

SEQ ID NO: 932867 - protein, 149 aa, Homo sapiens
MGGRGPSLGSHLLSALFEDCSPDIQVKYLRMAVMATVPLLPFWVTHDSGGEVYVQTSEEIQKPAGGRRSGAEPSQPTGPSQVPRFERELNQDHQNHLDCHHQPQMRKCALLSPVQINTSRAVSKNPCLLHYTSEEELTDQAHGSQLLFQ

SEQ ID NO: 932868 - protein, 163 aa, Homo sapiens
MPLQNSSIPVSASREMQCLFKTLIHSSVCIQKNAMPLQNSSIPVSASREMQCLFKTLIHSSVCIQKLPLVTPLTLHMPILLVVLPQGRVACFCSLPSPWSPSSPTLFLLQCHGLQLQLRSVGSQIYSFIPELSAEFSIHVSKQQMEQLHMGKFKDPQTHFAQN

SEQ ID NO: 932869 - protein, 419 aa, Homo sapiens
MAALKIPSRLHRFLELFTSKSDNRLSRLHDLWCGTTLFLLFLGVGYPIKEAVLMLLEGSEEDKKMWESLELTRDLLNGFAHNADSDMDIKVRAEVVSDGDEKLVGNWSKGDSSMAERGQCTAWDVASEGGSPSPWQLPHSIEPAGAQKSRIEVWEPLPRFQKMYGNTWMSRQKFAAGAGPSWRTSAKAVRKGNVGSEPPHRVPTGALPSGAMRRGPPSSRPQNGRSTDSLHCDPGKAADTQCQSMKAARKKAVPCKATGAELPNTMGTHLLHQRDVDLRPGVKGEHFGALKFDYPAGFWTCMGPGPGEELYGLATSPPKSQLELYPPEFPLVVGRTQEEVFPVTFLWNSSVLSCMIYLKGDYSLFQFFFIEEVIGVQVVFGYVRLPVPLLLVTAHGRWGGLADGKNEKGSLARRESDQP

SEQ ID NO: 932870 - protein, 136 aa, Homo sapiens
MGSTPTEEWLWQKETHRLQELRRLLKLPPGGGLREVEADVPREELSVDFVQVPQEESQEAWQCHRRQGADIREVSPGLLAKISLQLPNNGPQLGPCASLQAPWQAQTTTWYRKGQMAPERNPLETITPPYGSLMEC

SEQ ID NO: 932871 - protein, 169 aa, Homo sapiens
MWCCLAQSFLAPPISPFAILALLAEMRLQRGRNFSERYKIGPGQMDLGVVNIWISNIKIKYTEASKEAENQCGRKEQEPEHNGCKGKINAGQTKGTIVYEIQSLSSTFPRYISKAVVLNVQSLSQQHMLLPERWLECLFSNPTLDPLNQKHLQNFSRIRKCCWHELHCQ

SEQ ID NO: 932872 - protein, 137 aa, Homo sapiens
MLQFSGGLLQALLASDFLVPGSITSEGCKTAKMAACPFSWKLPPREKQSGHIVVEQLCHARVSLPPGQLGLSKAHRLEQLNCTNSPKSNNGGPFHPRYFSTFYLTLTLPITYSSDAVVYYKYALRSSERCGNSALIY

SEQ ID NO: 932873 - protein, 271 aa, Homo sapiens
MDQCDILWKQKAIKVSLNKIMTQSWRVDIPLRQDSKGILLALPAEGKLLLVGLMDRNGEKGICQVSGCISEDYNDILGPLESTSAQSQCPVVPKKPNYFPFQNAQKEKDGLVKDKLRLANGDPKKPKGKMSAYAFYVQTCREEHRKKNPEVPVNFAEFSKKCSERWKTMSGKDKSKFDEITKADKMRYDQEMKDYGPAKGAKKKKDPNASKRPLSGFFLFCSELGPKIKSTNPTISIRDMAKKLGEMWNNLNDSEKQPYITKAAKLKEKGR

SEQ ID NO: 932874 - protein, 142 aa, Homo sapiens
MIYIPLGIYPSGPSAAGLLEFAGGPLQTLFAWVSAAAEAAEQRILLNSKCCCLIIPLEVSSQRGIQPCEVSVPSATALLGYEGEFPDPLHFLDEVMPGPASAHAQCAAPTVLNPLSNKPQEEVEQDGGIKGSTDHLLHKNTN

SEQ ID NO: 932875 - protein, 138 aa, Homo sapiens
MENLYLRVVWRGNVGLEPSHRVPTGALPSGTVRIGSPSSRPWNGRAANSLHYAPGKAAGTECQAMRVAIGAEPCKVKGAELSKALAAHPLPQHPLDEIIERNVFVKYQRVQQKGRSASVTHRGARLCLFSINLISYCG

SEQ ID NO: 932876 - protein, 291 aa, Homo sapiens
MREQEPKRKKFCKGEKSLEDKEHSCRPLEVDNDQLRAIIEVDPLTAMREVAEELNVNRSTVFQHLKQIGKVKKLNRSVPQELSKNFKNCRFKVSSSLILHDNKKSFLDWIPNLHQKKVMVTVWWSAAGLIHYSFLIPSETSPSEKYAQQINEMHQKLQHLQLALINRKGPILHNTRPHMAQPMLQKWNKLGYKVLPHPPYSPDLSPTDYHFFQHLDNSCRENTSTTSRMQKMLSKSLVGGRKGGKGCGTQTFRPWHFAPGPRKSISFSHVKYMHSIPVTNVLVCSSINSKV

SEQ ID NO: 932877 - protein, 126 aa, Homo sapiens
MLGAVDWSCSYSAVLAPSPKFLHILANNCHSLFFSIVAILMVARYYLIVVLIFISLKIIDVKHLFMHLLAICMATNRAGVCRRGPLRFREGKLTLKSQRPVQRRTIGRGMGLKAKANFDGQQRLGT

SEQ ID NO: 932878 - protein, 134 aa, Homo sapiens
MKSPHSFFLFETLVVPLGIPHPQGLLLMMNNQSERDLNPKADTEEDLGHEIGAAGWRTSQARASVTHPTHFLKRQSRERVRHRGPLLHIESEKKCLCECLGRELETATCGSLHLQPGAGIRRMYLFCATRAMPL

SEQ ID NO: 932879 - protein, 356 aa, Homo sapiens
MLPTFLLMNLLSLAGDVALQQLVHLEQAVSGELCQRRVLREEQEHKTKDPKEKNTSFETTMEEELGLVGAADDTEAELIRGFCKMELLDGKQTLAAFVPLLLKVYNNSGLYSNPDLSAAASPTLGKFCMISTTFCNSQPHLLFTMLEKSPLPIVRSNLIVATGDLAIHFPNLVDPWTPHLYAHLQDPAQPVWKTVGLVMTPPDPQGHGEDIISHLSDPELGVEEVPFHTIMKQFFSYIITKDKQTKPVMGKLQHGAKPEGKAIIDEFEQKLQACHARGLDGIEELEINQAGSQRAPTAKKPSTVCRHQPLASAASDNDFVTPEPRRTTHRHPNTQQRASEKKPKVVFSSDDLTELH

SEQ ID NO: 932880 - protein, 178 aa, Homo sapiens
MESAIEKDHCGAATLDLKEPPRASVSFSVNRDTVSPYIVNVKITKGSLNRSQHIAWPKPQANFMMQVLHQPPGLGPQRQPASLQHSQDSMKGERLRIVSTSSLDEGHGHMGTDIWGGVVEGLRRCFPKGPAGYRLGAVFLLLVLGLHCESPTLLGCDAAATAGRLMAFQAAEPICHEE

SEQ ID NO: 932881 - protein, 140 aa, Homo sapiens
MADMWTGHRRQLWLGFWFQFQEIKMYLCRNDAYNQIFFPPCLSSFSLYLLFFSLPLFLPLFLFLLSSLLLFLHPSISLSSSLPPFLPPSFPLPPFHSFSPSFLLSPFLPPCLHFFFLLTYQHLMMFTMYKTLGEVLGIQR

SEQ ID NO: 932882 - protein, 158 aa, Homo sapiens
MESLKYNIIMGVTSFYLCYILLVGSKSQVRPTHRCSSRGEGYTGMNTGGGGPGATLHPVHHCDLHISNFPTGVLVAKNSQKLPPQSVCCKASPFDLESSSVLSTFLPDLNPSPTAHVSTFEKGEVGRDSVLMEDRSRARRFSIYFAQTHQRNHNLRQL

SEQ ID NO: 932883 - protein, 181 aa, Homo sapiens
MNISSNEHLGKRHREATDCGERENPILSTVPIPNTTLTNPECEWGQSLPCPSRSSKSLCMFQPQEQHVPERRPFVQPGSQNEDTRENAARKKGSAGPGLGEGNELNAFQAYKQFPRIYRQKSFSPSPPPPRVTNFSALMHLMAPSLSGLREDMEHGQLSMVEYVPSADENVYSVVVGWRIL

SEQ ID NO: 932884 - protein, 134 aa, Homo sapiens
MASIECGAPTPQPPKSSVGRGNRTCKGTEAGENTEKSANKSQWLEYGVQSTDGSRDSTRSKDQFARGKGPEKHSEKFGFDSGSKKEVARILHSERFREKRWHNKVCNFFLHRHKPPGVPQSHVLTVRPPPQGLP

SEQ ID NO: 932885 - protein, 146 aa, Homo sapiens
MLNNLSCFYQRAVKDVEDQYNFFFIMSVIFQLSQDSWIGHLLLLLYHLPTIPSIGLHGPAMLLTRTTSTHPYSSHWGGHVTRAGQVQLSHPLDPMIGSETGAGLTQANQNHSVDFRASQFPLGYRGCKSRPGFKFQSSPISWGQLV

SEQ ID NO: 932886 - protein, 181 aa, Homo sapiens
MPISIPLFLIVLATQLCVWHKCTVLIKSAVVHSNVLGCTFTHHSFTDSPGANSSSATSIHHKCPLQVCNFFLSFMPCFYCTFSMFRCTHTYHCVTIGYSIQYSNVVQVCSLGAIGYTIQPRCVVGSTIQVSVNALYDVHSMMKSSYDTFLRTFYLAVSVLPLIWLHKNAGIQGFSVDSSAR

SEQ ID NO: 932887 - protein, 160 aa, Homo sapiens
MVSGKKKYGFRRGLGNRNWHLNTNCVSDTKLGMFTFLSFLLTAALKERCHSHFIADKEEKLGEAGRPATVTQVASHRTGGGASEPGPSHDDHQALPGGSQAALTTATGSMVSAPVAQGMTGGLSCSGSCVPFLDPLSLPGLVIQCERCWVQFRLEMKRWI

SEQ ID NO: 932888 - protein, 137 aa, Homo sapiens
MSVHVHNMQLLIETNSCCLFMTEHTQDLKDVTNNVHYENYGIRKLAAVTYHGVDNKKNKGQFAKHLMITLNIRDRSPLAQMEEERREQVAKIKKMEMEMEQVFEMKVKEKVQKLKDSEAEVISPIFQLLADIVFLFK

SEQ ID NO: 932889 - protein, 136 aa, Homo sapiens
MSCLLLNCQGQLNDLTGVMQMEGTGFEPIANPAGPVRHSWSRTTDGINSLMATEGEDTGLSSEHQPGHWKWSTGLRVPSDLIMSLMDVGPLWRKAVWESWGHNSQWAPGGSAAPASGPSHRGALASAAAEAVNSWG

SEQ ID NO: 932890 - protein, 138 aa, Homo sapiens
MFACQREKTQRVLGLCACSSRSSFNSSEMPKLLLAGTNYFLPGLKFVSVPVPPAQFALTQSDSAFRPHPWVFSWNQTLAGHLLDHPLPWHSLLCWNTLRSGLAPPERPPSHCPVQCLCSRRVQAKRQWDHLARCFLYY

SEQ ID NO: 932891 - protein, 150 aa, Homo sapiens [sequence omitted]

SEQ ID NO: 932892 - protein, 153 aa, Homo sapiens
MPKRLELGLELTPSALLILRPLDSVWNSTISSPDSQAFGLISSSSKSSSSSSSSAASFTFFCGTLLPPPGANHFPYILKSFTSSCSSSSASESSSTVTKCCPLICTGPEPHFNHQVSGSLMLRAGKKPLLPDIPPVGRQPSGLPPGVALFIAV

SEQ ID NO: 932893 - protein, 155 aa, Homo sapiens
MTRRAALATGDPGEEEMDCQVDMPVVYLQCVVALPLQEMRGYLEPLHFNPNLAFNADEMQGSGVFYGSSPTGNLTNQQVILLHLYGRKHSPSVQGESRQEKQSHPHVVMGEQLSIRLCDPEYASLARKTPAGLVEAPIVVLSSYSFFLSRNSALN

SEQ ID NO: 932894 - protein, 143 aa, Homo sapiens
MNRKSHCEVKNRYTAHCLCPQDLSWVGAKTDMGKNSFNAGPMETNPAESLSQVEFASGELCLPFTMEFHTGKFFLPLLHVDRINTTSLLCLTQLYCSVQRHVVVMRSIINSQIRLSVWDFLSRKVVYVLINCSMQLLPTYVSL

SEQ ID NO: 932895 - protein, 181 aa, Homo sapiens
MQNYSSYRGKPHFLLGALGEVHLTGCPALNSGGFIRVRGQPCQFAGGRDNCFQYPCPSSSLSRTASSTPVPPVVYSVSRCQSQDTSLGSLNPETEHGATKLCTGRIQVGENDCYFQSVVSLLPTTNAIVSPPELKGPPSRVRLLERLSFCHPAMCRLVQTHTDSPPLTYFGAACSDTFPKR

SEQ ID NO: 932896 - protein, 147 aa, Homo sapiens
MNMSQFYVLGFVSRIGEFLGLADFMNKAADPHGVKLQTFAVSVTTLKAAHLELFIPPVGFVVSPASGVKLQTFAVSITTHKGNADPKSEQQQDLLQRAKEQSFHSVEVEVGCCYWLGWPASIPLFGHTHILLIGPFYRALIGPFTEC

SEQ ID NO: 932897 - protein, 180 aa, Homo sapiens
MELNGGKEKPHPPEPDQSRLATRSALSCLLLGYTAPKTGCHCWKHLPSPPGLLSCFGLGLSKVEQFQLSISTEVKKSIDIPCKISSTRFETDVIHWYRQKPNQALEHLIYIVSTKSAARRSMGKTSNKVEARKNSQTLTSILTIKSVEKEDMAREIIIPLPLNAGEKCEGSNGRKRLEQC

SEQ ID NO: 932898 - protein, 175 aa, Homo sapiens
MLLALALLLAFLPPASQKSSNLEGRTKSVTRPTGSSAVITCDLPVENAVYTHWYLHQEGKAPQRLLYYDSYNSRVVLESGISREKYHTYASTGKSLKFILENLIERDSGVYYCATWDRHSDSDLRIHSMSPLDIRLIIWIRSQHGPLRNTTALLRDKKDYPLKEFTPPGRHGERA

SEQ ID NO: 932899 - protein, 412 aa, Homo sapiens
MSIRVTQKSYKVSTSGLRAFSSCSHMSGPGAHLSSLSFSRVGSTSFRAGLGRGYGGASSMGGITAVMVNQNLLSPLNLEVDPNIQAMRTQEKEQIKTLNKKFPSFIDKIRFLEQQNKMLETKGSLLQQQKMAWSNVDMFESYINNFMQRLETLSQEKPKLEAELGNMQRLAENFKKKYEDEINKHVGEAYMNKISDTSVVLSMDNSCSLDMDSIIAEVKAQYKVIANRSLTEAESTDQMKYEELQMLAGKRWDDLGRTKAEISEMNRNISWLQAEIEGLKGQRASLEAAVTDAEQPGELAMKGAKAKLSELETALQLAKQDMAQQLRRGELAGVWDAEHEYPYEDHLWLCRWSELSYGRLTSPGLSYGLGSSFGSGAGSSSFSHTSSTRAVAVKIKTRDGKLASESSDILPK

SEQ ID NO: 932900 - protein, 151 aa, Homo sapiens
MPEQEEEGIGGNEQEGRLSEAHQECRKVTLGDGGVVLRAESCFSPPNQTAMQKLGLLSKETLTDLCKQREGCSSSKTAQVLHPRRLCIGGADDSPSKDPSRQPASTTTHESDSQNHQQGAGRSGVQIQTLCSAQVWPAAVVMEGADPEAFR

SEQ ID NO: 932901 - protein, 132 aa, Homo sapiens
MRRLVGLRSGWAWVLEKWPMARSSRPFFGHCKDVEFNSNHERKPLEGFGQGMTRSDVPSKRLLCGEAKAEVWRQKQKCGGRCLGPLIREFSPASATPETAKLASTLPPPPQPTQSEEDKDEYVYDNPPVLNK

SEQ ID NO: 932902 - protein, 144 aa, Homo sapiens
MGRSVERFPQDPMIAGQVSKPLLSVRSEMNAELRGEDKAATSDSELNEPLLAPVESNDSEDTPSKLFVFPYTWARIQVPVSSSMLLFTEHGRQEDSSGFAQFNSENGFLLGNLKVSNSKDVSSSPKLHKNRNSAYLVHYCILIA

SEQ ID NO: 932903 - protein, 197 aa, Homo sapiens
MKENLNLSISDLPTGICLICASGDLNTKYLDLSTVLFLPQNKTSLPLHLAHPQQSLLAWKECLRRKKSYAAETAFSSQVPSQDIFFYSFPEIKPAAASCPLLSCTWGLMVLLFFDRLEEGGLQPQNNPAFPITGPEGVELLLNACSEFSLAECYSRYRLPAHTSGISDPAVLEKVLIIYIAYKFPDDADAAGPGTRI

SEQ ID NO: 932904 - protein, 147 aa, Homo sapiens
MSVQSTAKIFIFIACLKGGEQGGFSMGTPLKMAGVRMTFDVDGWQTPSKRPLLAPRDFPMELHLPAEESPRYFTKADIQMANKHMKRCSTSYVIREMQIKAMKYHYVPRRVAKIQNTHNTKCWWSLKLNHHAAHLTVIQTEHRNPDF

SEQ ID NO: 932905 - protein, 142 aa, Homo sapiens
MLKTLNKLGIDGSSLKIIRAIYDKPTANIILNGQKLEEFPLKTGTKQGCPQGLTTPIQHTIGSSGQGNQARETRIKLTRDVKDLFKDNYKPLVKEIGEDTNKWKNIPCSWIGRINIVKMAILHKLIYRFNAILIKLPLTFFT

SEQ ID NO: 932906 - protein, 158 aa, Homo sapiens
MVNHTMFFDVAVDSEPLDHVSFELFAEKFPKTAENVRALSTEEKGFGYKGPCFHRIIPAFMCQGGDFTHHNGTGGKSIYGEKFEDEKFILKRTGPGILSMANSGPNTNCSVFHLHCQDGVVGWQACSLWQGERRHEYFGGHRAIWVQEWQDQQEDHHC

SEQ ID NO: 932907 - protein, 194 aa, Homo sapiens
MPHNTVEQPCRRGGCLLSKALDQGLCQQTWFFHQRVGVAEPQGMVSLGKVLDANYLPPTDFCETSKGRERRIPRLPTPSSSLPTHARTLLRPEALAVNPASVWGHLLTLAINSFLYGCQRLRKVESLLPVPTTPSLAIEITPPQSSLASVPPCLLTPDSFFPECLSSFTGSTQYHYTKNMEDLTTKVILLLFIG

SEQ ID NO: 932908 - protein, 135 aa, Homo sapiens
MTKELVTMILTLAEASHEAGCALEKWCGHTIRLNNEDGSKSPGGHGGDSGPDNFHHQSVRLSGRKQPFKQSPTLAHGTYRIKMIFHLDSSHIRTLQYLNSPLVPTPLLQTGRRESIISLHYHLARCLPICNPLIG

SEQ ID NO: 932909 - protein, 171 aa, Homo sapiens
MDEESSLGVQDKVWIQVLLSTYQVGKLEVLYFLLGTSFFFLIFSVEQSSEIKWEKTLKMLNNRMEIAAVIPTFSNQHSDQSATIRIKARPSTSKDYNLQKAQMIIGIFKQLRNFKLRSATTGHSPKAGDLWDPAGRVAVSKSDGLKTREADGVTLSLRLTASRPAGTADQK

SEQ ID NO: 932910 - protein, 156 aa, Homo sapiens
MSAQLVDAFPSSEGVVQSSALQLFSVLTGISYAFYQGVGPELKVKCQWPWRWGPFESLPLKARCGLLSSLGLASLDCDTAPCFETPFFHTGLIQRACWEKRGGRKPCQHVTRCLATGENKQEGKMSLRLPGRSEEGGDFGPCLIWLGLCRDGHALI

SEQ ID NO: 932911 - protein, 142 aa, Homo sapiens
MLSDPWGLRKGLGREMFSCKTTEGNQLEAGAAEQSKSSWEITGSAYEDGMRPSTDWIRYSHIMDGNLLYSESHPKNTCVETPVMFDQRSRSLCPSQTFRPSDLAWCFSLSILAHILVRPLLGLPLLAQMGGAHSTSLNQALC

SEQ ID NO: 932912 - protein, 154 aa, Homo sapiens
MQQGNCVVNCGVQVPRSNVQSISHYDDDDDDDDDDDDLMLLKIVCLKCSVFHKVFKEFTKIANNIKLIDNETEPTSEWVVTACSLLARDAGEGVPTSGWRRWDSQCGKFLQHRATRPGKGKGGSGTWGRLVLRAGAVFGPRVEVSVSSVSLTTL

SEQ ID NO: 932913 - protein, 143 aa, Homo sapiens
MGDPNQWSLICLCRQGAEREDPEHWFEVWDKRSAGPGDIPCREDQRPSEGQGCPVLSGDKQGEKRPNTHKREVDQQGCSIRGSLLPDKGVSGSRGLLGDSQEASVKRAEISSSQGLEVSTSMEGSRSGKSGLVTKGLMHREGI

SEQ ID NO: 932914 - protein, 138 aa, Homo sapiens
MWKLPKPGLPPSEATARALHWPLSATAAVAGTQGTKSLGYTQHGDPGPSPRNHFFLLGLLAWDGRGCREGLCHDQETFSPWSWGLTLGSLLLMQISAAGLNFSSENGFLLHCQVANFLNFYAVSLLKQNAFNSTQVTF

SEQ ID NO: 932915 - protein, 179 aa, Homo sapiens
MSFTMSTGSQDSSQRDWNPQCLAQSWPSRNLCRMNECMGHGEMKGSVTLSLGGHGKAASLSDQCTLIHVLSGRCWKSEHLKCKLLCPFPGPQVSNIGACDDHPESVISQLESHEADTALDYSSGKARTCAVSPPAFQPKVEAVPGTRALSGHWCSFSKAACLCTISGKIPKLPHSSGVA

SEQ ID NO: 932916 - protein, 143 aa, Homo sapiens [sequence omitted]

SEQ ID NO: 932917 - protein, 141 aa, Homo sapiens
MCPRWSEHSLVLYILGTRETSIDICKMNIGSVWKGRTTQARMSSRSQDSELYLPCQRWQPEKDLPEKDSADIAGFEDGEMRLSQGMQVASGAAKDKEMDSPTDPPEGMQTCQHYDFSPKFNYDVTWCEFLHVRGSLHFLNL

SEQ ID NO: 932918 - protein, 161 aa, Homo sapiens
MGPSFSSLLLFLTEEPEHNRREVRVSSFSLGNSPLRTRGEAGWKEDTGVVGGCPDQQPLLHQPLRLAELQSGRRGPASISSVSSGRQHRRPSQGSWLQLDCHLVARMIIALLSLARCFPSSVPVVEAGVLREEELASQRICPGICIVGPVCESLSWERQEK

SEQ ID NO: 932919 - protein, 179 aa, Homo sapiens
MTDTCFYCVIFRNPALLPDVTSIVKIWNCNEASTVHVQGSSYRYGHLEHPEGREVANVPSSVLLSCNAIHWVTHHHGPFALSLWDLGDVGEPKQSYAALASAFAGMLKKVTKVVSKTLAWNIPTALLCELFSSTAPASSEQTTAEHVTAGNAQMAPVTGSLHVRARMASTAVPFPVLSF

SEQ ID NO: 932920 - protein, 141 aa, Homo sapiens
MLKLNRRWMVLGGGAFGRQLDHEGGDLINRISAIIREIRKSSLPPSCHEVDACTYISHHLNAAVASADSCRCASDSKTTVVTDMITQKYQHILGKFLTRESLILPRLAKQTLESCAGYGTVLSSVTCPEYCRTSTIPDPAG

SEQ ID NO: 932921 - protein, 151 aa, Homo sapiens
MCLEFVSSGGFVVSLPSGVKLQTFPVSLTAHKSGADPKSELQQQLLQGTKKQSFHAVEGHPSRLQPLAWVACRCHLGAKAWNQGPQEPAWCSTPLWPSWYLRTSHKALDIVPGYCCWFFNAQGLFSQQMMNHPGLSPSLQGNGFPSGLGCI

SEQ ID NO: 932922 - protein, 194 aa, Homo sapiens
MYTYKWVSSTSKSISANPGLRAEVKMWCCLAQSFLAPPISPFAILALLAEMRLQRGRNFSERYKIGPGQMDLGVVNIWISNIKIKYTEASKEAENQCGRKEQEPEHNGCKGKINAGQTKGTIVYEIQSLSSTFPRYISKAVVLNVQSLSQQHMLLPERWLECLFSNPTLDPLNQKHLQNFSRIRKCCWHELHCQ

SEQ ID NO: 932923 - protein, 150 aa, Homo sapiens
MLKHCPALILSPSMPLSPQLQLRSLFNFRHRQLPFNRLVHNSVRTFHKRLSLDKFKTEGLIAVPPQPARSRSHRTFHKGLSLNKFKTEGLITVPPRPARSRSHMCVFFSLSSLPQFPDSGSAYSRFSLLITPEASPLLSNSLPSFTGAIS

SEQ ID NO: 932924 - protein, 144 aa, Homo sapiens
MRHGVFTIGEKIHVPGTQLQGKQRAVEAHGYDIVEAEGPDTNPRSISPIPRGRLQVHDLKPCVDLNSCSSIPVVISWDKPTDVERGAEEVWKGRGRVQRCKTWQGLVTEWLEEEREQLRMPRGPGDLRQKCEEHGDSNHMISLY

SEQ ID NO: 932925 - protein, 270 aa, Homo sapiens
MKPQTLVLSVTVLKNGISSNKIYCKERKKPPFPENKANLADFRFWFGWPAFIPLCGPTHILLIGPFCRELIGPFYRELIGPFYTALISPFYRELIGLFWQSADWCVYKPLARRKSSPSPHPPRNPAGFTSHQQWLRDFPAPSLGIPTAQRELVPDNQEEKKGNKKEMETHHCGQRPHEEGIAVHARDPASDQAQQAPGAPVLGGRAHAHPEPRRPARSVRSPGCRLRFSLHTSPLAEGAGSGLSQPQRQAPTAQRRAEGLLERGQSRRRG

SEQ ID NO: 932926 - protein, 309 aa, Homo sapiens
MRARFCDQLVLPGFITTVTLIPEWLEFWEIDPVEILLDLGFGADEPDICMQIPARFLGCGSAARGINIRVFLEAQKQRMDIENPNLYGRFRQLEILDHVTNAFSSLLSDVSILPNRAEEKAGGESVQRTSVSAAKEHRRRMGKLLRRASKQNIRRDCNPEVSESFKVKDEVFVPFTKPWDCGAELAATSINHKQNHLSLSVEHQSLQACDDLLPYPPHGLLSKQWPCSSMPAKQAPPSCVSEGSVKGRTQKENLFQTNKLKSLSHLAGKGPDSFEMEEVSAAPTYQPPKGNNLHYDTLVFQPSFHHFIF

SEQ ID NO: 932927 - protein, 137 aa, Homo sapiens
MCLAVLMGVHLPTDSTINQPFVFVGTTALCSLNYGLRIFGEKKSTKKFAHSNALLNPRECVGIVLAGTTTRREQMNGRKDWKKEELSQGMSQENEVLKPLLPHLASGLCGAAQPAGISEWVWEHLRAGVLWEAIHLG

SEQ ID NO: 932928 - protein, 161 aa, Homo sapiens
MNYKAAAACVTLKRASIAQLPTWPLPEDLITTAAHSAGKSILRDLEGLEDPAKEAVQGESVRNPEITVPRKPGEEGKSGSLYVLFSLPGTQPHPPPPIPTPPLACLTTILPSGLNLQVTSSEERPHLYINVAIVYWAPIMEAIDPVYSSTETTSELPLNCR

SEQ ID NO: 932929 - protein, 288 aa, Homo sapiens
MTDAAVSFTKDFLAGGVAAAISKMGVAPIERVKLLLEVQHASKQITADMQYKGIIDCVVHILKEQGVLSFWHRNLVNVLRYFPTQALNLAFKDKHKQIFLGGVDKRTQFGSYFAGNPASGGAAGATSLCFVYPLDFAHTCLAADVGLGNCLVKIYETDGIKGLYQGFNVSVQGIIIYRAAYFGIYDTAKGMLPDPRNTHIIISWMITQTVTAIAGLTSHPFDTVRCRMMMQSGRKGIDVMYTGTLDCWRKIVGDEGGKDFFKGAWSSVLRGMDGAFVLVLYGEIKKYT

SEQ ID NO: 932930 - protein, 179 aa, Homo sapiens
MGSAPVGLGACGGLYVQLPQGGECTCGLGDYAHRGLKALGRVWGAVRGAALTGSCTLREARRRGSCECWGARGGTRRDCPRKWLRTHAPHPTFHSRHDDQEVRKGCGDNRYNLPALEPEVEKSALCGGNLPRGAPRCSTRRIRNLKAQKGLELQLGAKTLLLGPFQAVSSIGKGLDKHG

SEQ ID NO: 932931 - protein, 190 aa, Homo sapiens
MAKAGLSLKGLINGMMPGYFPGLPHAISISTITSQAPEHPGSTRKAGHTLDCLHRPRAVQWLTTSSLNSQLQQLQLQLQQQQQQQQQQPPPSTNQHPQPAPQAPSQSQQQPLQPTPPQQPPPASQQPPAPTSQLQQAPQPQQQRENLEQPREDAEIKSFSAYTSVLLPPRKVRNAQAQAPCVSLCRLIIL

SEQ ID NO: 932932 - protein, 138 aa, Homo sapiens
MGSFQQEEEIRGSTGGDHQISRYSENDQGIALETHLCLTSYHTLGKLAWLDHLGTIRNNRKRQGLSAASAYRSQRQSHSPCEQPCLTVALTNNSIKPKSQVGWLHPTIELREQAHITLEPRQPAPPTCEALPDNHAQK

SEQ ID NO: 932933 - protein, 138 aa, Homo sapiens
MYLNSFLSSVRDIPLVSISFSTGILSKLTISESFNNCTIIAWQELSILQLLSSLPACQEKGLLPNLLYEASIDLIPKSGRDTMKKRKLQANIPDEHRCKNLQQNIGKLNPSAHKKVRGPHQIPNLLAPGSWISQLPEL

SEQ ID NO: 932934 - protein, 135 aa, Homo sapiens
MEGVSDAEIRLRRAGRQECLSQLKLCPQPPLPPGPLSQADGSFIYKLLTGAAAFFSEMPCPERRNLERLSGYSGALVVSAPKGISWSVGYEDHGKSVVSGPDSSIPHGTVPHGFPWLGEGVPLPLVLPRLIANLK

SEQ ID NO: 932935 - protein, 151 aa, Homo sapiens
MNKDSLEVRRKMEKLTVIETKSWRAAITKLEGSSMEWEILHTVTTGMILSHNAGQCQKAEVPSQPHHSDGFNILYFSLIFENLISGEIHPLDQNMVEKAKGEADMCKAAKPNGHPALSIENPEEKLAIKNPNKRMLDNNTFFSINHFILNL

SEQ ID NO: 932936 - protein, 152 aa, Homo sapiens
MTFCTGSCFQFLIHVRLRKNRKEIFLPVNEQYLHNAYLAYFCRLWLTMALGKTLTDMLKASEQLVPILAFKDPPMREYHPINWRKECECHEASIKTQEDRVQGASGADHVEVPRGWHSQGGHESSVPLSQYLALCISSSVSIAVTFLINWCA

SEQ ID NO: 932937 - protein, 214 aa, Homo sapiens
MGSPWHWGRSGGHSTGTCLESGVMGVCLMMGFSVAGLVLGSKKKSSAYLPLLPPSRQHISKCGATCGEVKPAAEICISNEKLNVNHQNNGKMSPGNVRDLDGSPSHQRPRGLGQKNVFMVQAQGPATLCSLGTWCPVCHLLQLQPWLKGAKLAPCTGKAANTQCQPVKAATEAVPCRATEVELPKAVGAHPFHQCALDTPVSPYIVGQLVALQT

SEQ ID NO: 932938 - protein, 211 aa, Homo sapiens
MGSPWHWGRSGGHSTGTCLESGVMGVCLMMGFSVAGLVLGSKKKSSAYLPLLPPSRQHISKCGATCGEVKPAAEICISNEKLNVNHQNNGKMSPGNVRDLDGSPSHQRPRGLGQKNVFMVQAQGPATLCSLGTWCPVCHLLQLQPWLKGAKLAPCTGKAANTQCQPVKAATEAVPCRATEVELPKAVGAHPFHQCALDEITSLAKKIIVLV

SEQ ID NO: 932939 - protein, 196 aa, Homo sapiens
MGENDSRACQRFSWQPLPSQAERPRRKKWFHGPGPGFPGCVQPRDLVSCVPAARGMAERSQHRALVVASEGASPKPWQLPRGVEPVSAQKSRTEVWKLLPRFQNMYGNAWMPRQKFATGTEPSWRTSARAMQKENMGSEPPHRVPTGTPPSGALRRGPPSSISQNGRSIDSLHHFLGKATETQCQPVKAARKEVVL

SEQ ID NO: 932940 - protein, 159 aa, Homo sapiens
MGRNQCNKAENSKNQNASSPSKDHNSSPAKEQDWMENEFDELTEVGFRRWVITNSSELEEHVLTQCKEAKNLEKREKRMKRNEQRLQETWDYVKRQNVRLIDVPESDGENGTKLENTLQDIIQENFHSLARQANIQIQEIQRTRQRYSLRRANPKTHNH

SEQ ID NO: 932941 - protein, 140 aa, Homo sapiens
MTTRTCLRGKFDFYLPHTLSLDPMSSSFTIPSSPTIAAIMVTTTTDDDDDDDDDDDDDNSGATVTVLKLGLPKNVILLTVNPLSFNSSYLCSNQAELPYGWEKIDDPIYGTYYVEQLLELDVSCVSSAVPPAGRGDPCPR

SEQ ID NO: 932942 - protein, 133 aa, Homo sapiens
MYNKENNENDFKGASSTAVTHSKGLQTFAKCKKLVTFQEGMRCPEQSYPKVQQVLENGVSKRVDSEAFFNKEFRMKYMLFCMTVCCFQENNNKLSLKRMAGDGISSREFKVVFAKKEGQSDIVSNISFINLNK

SEQ ID NO: 932943 - protein, 237 aa, Homo sapiens
MLVQEYNYSCLKISMHVVQCDVIVYINEVCVLGHTHADVVKLFQSVPIGQSVNLVLCRGYPLPFDPEDPANSMVPPLAIMERPPPVMVNGRHNYETYLEYISRTSQSVPDITDRPPHSLHSMPTDGQLDGTYPPPVHDDNVSMASSGATQAELMTLTIVKGAQGFGFTIADSPTGQRVKQILDIQGCPGLCEGDLIVEINQQNVQNLSHTEVVDILKDCPIGSETSLIIHRGAILTH

SEQ ID NO: 932944 - protein, 134 aa, Homo sapiens
MGMNPSSVIYMSLDKLFSLCESQFSYVIEKYLLHLKIIHQSCLSCPEPCQCHPSLPLVTSASYSGRHLQRRKQVAPIQTSVIIDVLGFPGTCEEFRRKSSQLQVLSLQKGKRDARGEHGYNGQPLTEPFHYENN

SEQ ID NO: 932945 - protein, 141 aa, Homo sapiens
MLIGPPLTFCCANWFLTSHRLILVPGLGPVPKSPGGLSKTQIAGPQSQNFFFSWAGGKGSEFAFLTSFQVMLKAAEDRRGFPVSILQWLGYLVQVTFRLKTSLFPTHIMTDSFVVQDIWKHEGLIFVCMCVVCKWGQGCCY

SEQ ID NO: 932946 - protein, 261 aa, Homo sapiens
MNKFVVITTEGTLNELENIISQMMHVAEYLEWDVTELNPILHEMMEEIDYDHDGTVSLEEWIQGGMTTIPLLVLLGLENVSISTEEGGLVNVKDDGQHVWRLKHFNKPAYCNLCLNMLIGVGKQGLCCSFCKYTVHERCVARAPPSCIKTYVKSKRNTDVMHHYWVEGNCPTKCDKCHKTVKCYQGLTGLHCVWCQITLHNKCASHLKPECDCGPLKDHILPPTTICPVVLTMELKIQIRAVVFFPAIQSKLDEASKEVKY

SEQ ID NO: 932947 - protein, 136 aa, Homo sapiens
MSWGCSSRGVSLCFPSNSQDPLPQVCWSLLEVHSRPRLPGYQQRSLQNSKDCCLLIPLEVSSQRGTHHMPARALLYEVSVDPCLEVCPSQETRGVGRQEYLSLLKLHPQPPLPPGPLSQGDGSFIYKLVTGAAAFF

SEQ ID NO: 932948 - protein, 146 aa, Homo sapiens
MVKMTSYWSRLQYYPLMAHRSMPQDMWEDFLCNLLEEMSENKIRKIIPLKSDRLFYKKNCSKAKRGKETAEEEFEASRAWFMKFKEGSHLHNLRVQGKEASALGEAEESYLEDLAKIIDDATTTLIIQLPSTSMQDPPAAEKIITR

SEQ ID NO: 932949 - protein, 162 aa, Homo sapiens
MVIETVVHPYYGILISNKKKCVLDISGAEGVYDYGFAIGRLVCFHTDKPYGQEAIVYCLLKDDSLVRLVCHMSGAGMDFPETDDTSGPPSPRLLIFKTSVNNIYIIRLKKVFSRVVGGDSSLCPKLGKNILLSEYAGLILLSQHTCTKSDTTGRVIGPQDSH

SEQ ID NO: 932950 - protein, 145 aa, Homo sapiens
MQESSTINASLIKTLLKTALLPKEAGVVHCKGHQKASGHMAQGNVYADKLNSTLRHDQGQNNNQKLAQLAKAACLLRRKKRRCQYCQSCCIFKEDKNPRNIRWIQQNELTEKASTGNTLEEVWQSWQWKAQSQNTGIRFDLGPDI

SEQ ID NO: 932951 - protein, 144 aa, Homo sapiens
MRTRGHRKGNITLRGLLWGGGIIYVKKSVCIKGFASSAETSLRNGWRVGWISRCPQRQVRGQMCVNGLVQGSWERNVMKFSMPLQTDTHTALSGYNIGEWKMEQNLATTLTKIPLDIHETEDGALEWSTATENLLFHSLFCMDT

SEQ ID NO: 932952 - protein, 331 aa, Homo sapiens
MANMSLNPNLWMYEYLYAYVYAEEDRKMWESLELQRDLLNGFDQNADNDMDNEIQAEVVSDGAEELVGNWSKGDSCYVLAKRLVAFFPCPRDLWNFELERDDLGYLVEEISKLQSIQEVTWRMYGNTWMPRQKFAAGAGPPWRTSAVAVQKGNVGSEPQQRVPTGALPSGAVRRGPLSSRPQNRRSTNSLHCAPGKARSSMTAHESRQVMWLYPAKPRPREPTFCISMTWIYPMSLLLNLAFPKDLEHGNNAAKFFAMASSAWATLSIFLLAFWSQPFNQSLRTSNFSSSSCLLLSPPNSSNLCPLPSFKAPFKYSDIFNNPPTPRYRFLV

SEQ ID NO: 932953 - protein, 268 aa, Homo sapiens
MVLSALMVVSMLMVVSTLMVVSTPMVVKHADSGKLMVRSDGGKRSDGGKRSDGKRADGGRCSDGGKRSDGGKCDGGGCCDGSKCSDGGKRTDGMCNDVGRRSGGDGALMVVGPLMVVGALMMCDGGCSDGGGCSDGGKCDGGGCSDGGRRSVGSKYSDDSKHAVAGKHCDGDVVASQDLINTMTLEETPGETEASYADKWRKSVLEREVRTCTDPEALRAQQVRGTHESQRSSQVESLEKAMYPSQVITHCMLHVQIQRTGLSEHLLQ

SEQ ID NO: 932954 - protein, 208 aa, Homo sapiens
MVRPILCRCSRKNWFFAKLTIRNTGMDGKHSADGRFFKSVQLCEQSTRKQSHAPGVTHGWHSQAALGGPMLMAEASYHRVFIEGRVGIALRVSVGCVHGGATCYQEVRGPGCGEPGARKPMVPQEPGRDEDLNPGIWMDTGIQSSSSRLDEGMEAEATGCNFKCIMMVMVMMMVVIVTVMVMMMVMFDSYNDNGDNSIIMMVMMTRLW

SEQ ID NO: 932955 - protein, 195 aa, Homo sapiens
MLNNLLFYERISELNSLNPGILNQLLLSSIFLLLSLTLFSNMIRDQSIDETKGYTCQQFCHDSTPNKGDRVIYNLTRPPYCCVPFPLAGTGPQILYLSRLASSLELLKRGKGRGEQRKEEVTCGMVRKHLSEDQEKMDRYIQSYESKELPTKNAILRETVLHKWRDTDFPASTRAEKFHHHQIYPARNAKGSPSN

SEQ ID NO: 932956 - protein, 224 aa, Homo sapiens
MGPGSQSKLADSFPQEPLMILVASDGAVNCTSRARRSSDGAVKCSSRAPGRSGRLSIATLEHTADLMGLSIAVLEHTAHLTGLSIATLEHIADLMGLSIAALEHRADLMGLSIAALEHTADLMGLSIAALEHTTDLTGLSIATLEHIADLMGLSIAALEHTADLMGLSIAALEHIAENSGQEPLRLRLHPATCTVKPSCKASGKLNFKCHIDVPNKMSHTHRVY

SEQ ID NO: 932957 - protein, 160 aa, Homo sapiens
MCTAYVRVHSWRVCSIQVPALIHRPLNIDSPLSGCPTVYSLTSYRAPWSLPNFSNYGQSTYKHSVSTSATYNQAMQEAANVANVISEAGVSSPSVNASEVRSLLPHVCPHMCDTRLSSDLHKHSTVLHYYFHVGITPDLQTVNLSRLRGQLVQPSSHPGA

SEQ ID NO: 932958 - protein, 137 aa, Homo sapiens
MADRCNPVEECMSKNDLRRLVNYYKLGGNEATTVQRSMLMKLVCSKNTKKLKKDLAKQRKHSDTYHLDSISRFNTAFVYNMPFGLHNNPESYSLHFHTCTNKGVKKLLQTCTERVTVLRNGVVTIPPLYFHPNSQVF

SEQ ID NO: 932959 - protein, 140 aa, Homo sapiens
MIQSLMLPLACVLGKMAHATHPRGAGEYARNDTYGYKDRVSKFDSVHLRALLTSDIAPFCELDCVSFYILEATVFPSLIHAVACAPHLADEPVDKVLQLCFPVFLTFLLTIVELQSTSWSLVSSGLHAIMGNAAFRHRVP

SEQ ID NO: 932960 - protein, 160 aa, Homo sapiens
MHLQSNSIQNAPAIPQHPECTRSPTASGIHPQSHSIWNAPAIPHPEHPECTRNPTASGMHPQSHSIRNAPAIPQHPECTRNPTASGMHPQSHSVRNARAIPHRQPMERNDNDYAVVSSDIDEIHLLINTGSHTFNDQSRPASSNKQQIFKDQPGHRQPRI

SEQ ID NO: 932961 - protein, 234 aa, Homo sapiens
MALLYPQFLCTTISKDECLLGCYNFMYQMNVTVGLVELLLYQWVWSAAMGQIQLVPSDSCLVFVHTVGLGGAATGSFPQGVCLLLRYQQSSADAEPNKVDIIAFPLYRLEDGGLQDQIVGNRSAICLEDPFQRDNINVPGKDGARTYNWQAAFKKHYIALHHKQEESEKLPQPRGAYEAHFLLTLAFQLKTPTEEEGSLANSHVELWLWDGRGWWKDKGGMPTEYCDSNRRPTN

SEQ ID NO: 932962 - protein, 142 aa, Homo sapiens
MRAFCARQALMVHHGPTLALNFYHFEKKSCTAFSHSGREILHPHSQSLRKRNPASPFTLTPEKKSCTSIQSLRKRNPAPPFSHSGREILHPHSVTPEEKSCTVIHSHSGKEILHPYSQSLREFLLPRSQATTHLLSASKDFL

SEQ ID NO: 932963 - protein, 145 aa, Homo sapiens
MNPHRCGQAIFHKEATKAKIDKSDYIKLKSFCTAKEMINRVKRQPTERENIFVNHMSDQEVITKTCTEPERLNIKKTRKCNLNHNEVSSHICQNNYYQKGNSSSIKLLFDALNYSIKLLRVQNVNENLVLGPPNDVFYFIIIIFT

SEQ ID NO: 932964 - protein, 135 aa, Homo sapiens
MTGDVLDPIVIWDEPLLNHHVFKFIHVELGEAPLLRDMDLLVARELELGPAGKSSVLTDKEGTMDEQAKPTAVRCSVTYVSQNESTENSSLRSHEDIRLENGNISDIKRDLAKILRDSVFSEKKKKHVIINLIAP

SEQ ID NO: 932965 - protein, 152 aa, Homo sapiens
MSAVTSCTSLESKSSTEIKLSSPGNRAPGGRGSCERSFSQLKCSCLPALKRAADLPAQHLSSAKGQTASSGGSRTPVPPDRETSPSRGQQTPHTGELQLASDRCPSGTKLPEEGAGNNLCCSAASTGDTQANRVWSGPPANSSRPAAEGPDC

SEQ ID NO: 932966 - protein, 237 aa, Homo sapiens
MPWCSFTGYFINNANIFLMALEVGKSMIKVKTNSVPKAALRFQDGALNAVDSHGRRETKGNADSDMDDEVQAKEVSDGDEELIGKWSKGHSCYVLAKNLAALCSCSRDLRNFELESDDLGYLAEENSKPQSIHSDLAASNHLCFPQNGRSTGSLHCVPGKPMGTQFQPLRAAMTTGAKLSKALEIHPLHQCTLNVGHGVKGDYFGNPVLHLLVAPLKPLQPHQGFFYNTVFTHAEML

SEQ ID NO: 932967 - protein, 134 aa, Homo sapiens
MKEHYSPSEGDEPCSLNFQCGKSHESECQNCHRDSWLIPQPSINLSLELAAQMVLLWLGLPVLCEEEWSCVIYALKRFCFDAFPGFVSRFRAPFSNSYSGGLVLANSLSICLSEKDGMFPLYMMLSFAGYKILE

SEQ ID NO: 932968 - protein, 147 aa, Homo sapiens
MCGFFSDIHCEDLVELLVVKLTKILVHTEPPYFINYSLDFPTLVLVPVEVSTAQPLTVITLLIDLCKQGKYFKTIVYRDFQNTILTVKTEVYLSSCNNLYRQIMLTLALVREGRMRPPMHLFSQLDLGAPSVLISAFTGEALLRLDK

SEQ ID NO: 932969 - protein, 136 aa, Homo sapiens
MKLKPSTVFQAAGLPRAEEDRPQPFQSHSVEEGMICSCTSLQNHTSHPSQCSESDPRLQVCWSLLKVHSRPCLSGYQQRRRGTANIAEQQMLLPDCSSGSFVSEGYPALWGVSLPLLAVPPSAVCHSFPWLGKGIP

SEQ ID NO: 932970 - protein, 201 aa, Homo sapiens [sequence omitted]

SEQ ID NO: 932971 - protein, 164 aa, Homo sapiens
MGAWRDHDDSAFTEPRYHVRREDLGKLHRAAWWGEVPRADLIVMLRGPGINKRDKKKRTALHLACANGNSEVVSLLLDRQCQLHVFDSKKRTALIKEDECALMLLQHGTDPNLPDMYGNTALHYAVYNEDKLMAKTLLLYGADIESKNKKLNERFVECTQNCMG

SEQ ID NO: 932972 - protein, 206 aa, Homo sapiens
MQKHGSNNVGLSENLTDGAAAGNGDGGLVPQRKSRKHENQQFPNTEIEEYHSEEQNDTRKQLSKEQNARILQDEILTTKQKQIEISLSHKEEKELLHENSMMQEEIAMLRIELDTIKHQNQLREKKYLEYIKSVKEKNDNLLKAIQLNEEALTKAVVQYSGQLSILTTENKMLSFELQNVRHNNETLEMEIQSCHFRLATALHDCD

SEQ ID NO: 932973 - protein, 135 aa, Homo sapiens
MTAFLLKRKNRTKLLRPECEMGIGCKQNHDTDLGMFTKWHLTPNQKGSWVRMSYPGSIYNPGRGQHEGGETNGEILHGLNQRKNKDGHSLPRTKRSSAFLTGSNEHIGLNGLLPKNLLFTMEEEETNGVEKLDED

SEQ ID NO: 932974 - protein, 182 aa, Homo sapiens
MNKKTEVQREEGTLPRSRFYALWHVVLATDYVMIPQAVTPVAVFKVTSSTMATTVQLQGHVPIAGTYWTDLLKQLFALDPGVEGAAPTTAPAPPAPPPRPLRNLITQYAFQGGGGNIPQVVTGAQKTMEDVAIFVSQTLKDRFLDVPGRSKWVMVMDGEGEVLSFYCFNYRGIATEFRETRN

SEQ ID NO: 932975 - protein, 251 aa, Homo sapiens
MGNTCYVNASLQCLTYTPPLANYMLSREHSQTCHRHKCCMLCTMQAHITWPLHSPGHVIQPSQVLAAGFHRGEQEDAHEFLMFTVDAMKKAFLPGHKHLDNHSKDTTLIHQIFGGYWRSHINCFHCHGISDTFDPYLDIALDIQAAQSKAPTSRTLTLHTSAKVLILVLKRFSDVTGNKLAKNVQYPECLDMQPYMSQQNTGPLVYVLYAVLVHAGWSCHNGHYLSYVKLKKAIGIKWMMPRSLPPVSLLS

SEQ ID NO: 932976 - protein, 273 aa, Homo sapiens
MAALSLEAKLRDSSDSELLRDILQKTVRHPVCVKHPPSVKYAWCFLSELIKKSSGGSVTLSKSTAIISHGTTGLVTWDAALYLAEWAIENPAAFINRTVLELGSGAGLTGLAICKMCRPRAYIFSDPHSRILEQLRGNVLLNGLSLEADITGNLDSPRVTVAQLDWDVAMVHQLSAFQPDVVIAAEAIVSLVGVLQRLAACREHKRAPEVYVAFTVRNPETCQLFTTELGLDTAVDCRTLEHRLYRRIHHATVLSTQLMEDEQGDYREGKLAP

SEQ ID NO: 932977 - protein, 141 aa, Homo sapiens
MFPVRHVCQQRTLTTPSCVFSSRRRLETTVNWTALGNTDEQSQHRFVLQCLAPFSARLATPGLVDLGVSLDTSSSGLDLPMKLVDMFSCSGLGFVRNRVCPGMWQLQRAWLCEEPSVSRDVAAAAGLAFVRFSIAISKCSP

SEQ ID NO: 932978 - protein, 226 aa, Homo sapiens
MLKFYNGLSEVEAVGLPAGTDPLDPTDMNGVHFDPEVYLDKLPRECPLAQLMDSETDMVQQIRALDSNMQTLTSQCQVYKCVQNWWVLGLTDFKNEAVDPPGGARGLAGSGVKLQIFTWVHGLAGFRREAADLLGRQLRPGEKSSTAAAGPGAKPLTAPAGKASRQLLVQGHQAHAHPELQPAGKQHTRGLKGSSSAAKVGAQAEEVPRVNEGCEGCQHAVTSHKE

SEQ ID NO: 932979 - protein, 151 aa, Homo sapiens
MGAHLLHRSDLDVRHGVKGDYFGALRFDCPATCQTCMGPVFKFTNSLFFLIHFAETDHIRNMDVKGVAFQESMMFRQYHYIEGIPQLGTEQGRGRTGVKPEDLGPVEKLLTEEAWLRLNGLHLGSWMKEELQRVEEWQAMTSNRSCGEFLW

SEQ ID NO: 932980 - protein, 161 aa, Homo sapiens
MFYLLKRANCASSIIGRLTKGSDSPIVISCPSYSLMPTSSYKMSTSLEFLMGLTSSQDSGLCYPWSTDSNVNLFQKHPRRHTQKYILSALQASFSPVKLTQTFNHPRGIWDIGPITSSLELMAVEDCCGTTRDLGLFKRKHSLSTVSVLSLECANVVQMTT

SEQ ID NO: 932981 - protein, 156 aa, Homo sapiens
MHEKSTTVIQSLPTRLHLRDWGLRFNMRFGTEDPDRISGIEARSNWYVSAYFTKGVSKHKKYKRKQKPKVEITDQLTCLDKNSCTCLARLCRFCTNNSAIIMGSFLALECRATPPPSGSFAKLYTVCQIISAHPECTHLYTCILACYLYCNYDLSV

SEQ ID NO: 932982 - protein, 139 aa, Homo sapiens
MGVAAAEPGTGENHLVCWLLRPLEKHSNWAGLSRFSRKPIDGCASRRNITEFFSQPGMTLGKECIPGDQPTLTENRTYVEILGAGFLYTRGVMNIYERRNRTCTEAVLAQRKHVGNEGLSGRYKIYTLFSNIKMKTAVN

SEQ ID NO: 932983 - protein, 142 aa, Homo sapiens
MQRRRRERARAEASHYPASNYTYKAIVAKTAWYWYNNGHIDQWNRIENPEIKPNTHSQLIFNKAYKNIKWGKDTLFNKCHWDNWQATCRRMKLDPHFLPYTKINSKWPIFKSCSLFTILLKQLLLYYAYYSLNSTTIYRYIV

SEQ ID NO: 932984 - protein, 145 aa, Homo sapiens
MREKDFQEPISTVDRAPYRLEQIQDQTQWHTRTIPALSEAEVGDHLIETSLGNMKTSIGSFATRKRGTGIIYHCPNPHNTLCSNLVLRVTSLHETGTQVTGYASEQHGCPAGLLLLESKEKESTVLNDKNGESKEDAIRKYEVNV

SEQ ID NO: 932985 - protein, 145 aa, Homo sapiens
MKAAEKAAEEKLEASRGWFTRFKERSHNHAIKMQGDAASADPTKITDEDGSTKQQIFDVDETALCWKKMLSRTSYREVNACLQNFKIQKCNSRHMTIKAVWPPRRENSPLFTSNVVIKDNEQEGPSRGKCRDLWTMWKRVFLSHY

SEQ ID NO: 932986 - protein, 181 aa, Homo sapiens
MWICEIIKSLSFINYSVLAAGSWGRGDTTLLWPPSLGPYWVRPEARTALGLIQGPWQTLPHYCQCSLKAQWLFYQHMVNLARLVSFLEGKKLPLAQCLSRDAVWEPGPKVRNLEILLVLYSTVTELAPMLQDKVLPTLLFPFLRQKKSLPMATATTGLHKLVANTSMPVLSSIPGWAQKSP

SEQ ID NO: 932987 - protein, 136 aa, Homo sapiens
MVSSGFRVLAEMSAVSLMSFPLASKANLLMQTCTGKVMWGVAMGSGEATVWGGNMWVWCAAIGATLLLLVQKLPYGLLSHHFSKHLSLPPQMSIVVKGFPPAGGPESCGESGLLLVSSTHPYSLSCCGSKMSPNAQ

SEQ ID NO: 932988 - protein, 143 aa, Homo sapiens
MCSFSFAVCRRLVLTCSVRSSTLSQGQRAFLEVAQRKSEVGRVGGLSSGAGPLGGLGFPRTAPAKLCIVLLLLVGGLLAPAGAWPRVFMKDIHKDHASDGASRSAACKLKHRKENLSGWESECEMDWKPNYKLISTLGLQALK

SEQ ID NO: 932989 - protein, 135 aa, Homo sapiens
MTSFFLDAGQELRTHQAGVPSRAGDMPGLAAGPAWSLLLCQHSKQPTGPCTCLLTCSLPPGAEHVGQVDEAPPAANLPLLKSMPSYCFESHTIRLCHPLPLVAEVINLGQVYCKPPPHLHILLFIRLICENHKSG

SEQ ID NO: 932990 - protein, 252 aa, Homo sapiens
MVALCQELFVLNLPPVMESLLPARWQVTQFPSLVLHFHLPNFISWSLQEADPETVEPADCLLGNAPWSTPVEGQGEMPNWAVGEVKLQPPQATAEGVLELKSLVATVCLHDPESEGLLKCEAPGTSLTHPGPDASEHTLSTLIIASEIVPLHVGTNLWSHQQCHPSLAFIIAFPGQFSVSYNVSYCLSHPVTACYSRVGSTKWLLPGSAPSVSAFPLHLCSSTALPGDPQAWQRKNRADRDRERERNRNVLG

SEQ ID NO: 932991 - protein, 169 aa, Homo sapiens
MESSYILELISTHKHLSLEAEASLFEPQMMLQPKGTPLFQPWRRPRFLTHGNCESGPSAAGLLEFAGGPLQTLFAWVSPVEAVEQQILHNSKYCCLIFPLEASSQRGTHLYEVSVSPYWEPQQWQMPLTLPGFCLAGQSQTAALAVSKAPWVWDLPSQAQDIISWGAIC

SEQ ID NO: 932992 - protein, 167 aa, Homo sapiens [sequence omitted]

SEQ ID NO: 932993 - protein, 171 aa, Homo sapiens
MQPWINSSTPLNFDLVTSKVIQIASLAARGQQSEALSQKRKEEEEEEEEEEEEEEEEEEEEEEEEEEEEEEEEKLHRCYPPEVNMTIYIHEESILLSLLEEHRTQGCQPCSSLVVSDLDVIVCESSTLHKVVTDLKLREMRHKTKSILIDFPFESTSHVPPQSLPSETGNA

SEQ ID NO: 932994 - protein, 155 aa, Homo sapiens
MDEAGNHHSQQTITRSENQTLHVLTHKWELNNENMWTQGGEHHILGPVGGRGSTGGITLGEISNVDDGWMGSAKHQGSCIPAIYEQSRGISNNKESVSKMMKTTDSNTYINNYQTLPLSLISSATLYNNCNFSIISIPCIPCGNHHCGLSIPLSV

SEQ ID NO: 932995 - protein, 142 aa, Homo sapiens
MCLLSACFNSSGDPKLSVPQLQCKFTVFVASTWVIHHHFYGTCGCDLHFGVCLGGISHWNSAEWLEFAAVTNSVAADAASQHPASAALLMFCFFLLASPFRPCELGPMGWEPSGLPDESDRSLNFKAPEKMDMDEIGKHHSQ

SEQ ID NO: 932996 - protein, 146 aa, Homo sapiens
MLRCSQDVYQRCFSPQMTNQKKTPVQQGEYEFSFGPTGFEVRIQCPYKASQSQINKEQSECDLSIPILHVDHLKKTDCVHEEGRIMLRKEGEDIIDYTDEYDLWGPHQKLGQEVSYFNMLLDTVISKELDVSLAKVLHSFCQDLSL

SEQ ID NO: 932997 - protein, 149 aa, Homo sapiens
MNQLIPPSLATVLENKSELTPFFSRMICSRTKFNSLCMKTHNCFYHPAYIFLTSKDWYQFFFVQLVEIDYEFTGPRLLGVDSEFYVCHFRDFRLVKKSLLGASRLIWRSVVLNLFGARTGFMEDNFSTDQGVRKGWFWDETVPSQIIRH

SEQ ID NO: 932998 - protein, 144 aa, Homo sapiens
MCTLVTYVYIYHAGVLHPLTRHLALDVLGYGTPLDRGQAWKIGRTSSGLALQRDGFPAPLLAHKPMFLNPVSILRVRAPFLLKCQAQILAQYSGAVHCNPEAQEPAHSYFFLAPWDKAGALGRAVWQEGLRNRCTLVIWKKGYH

SEQ ID NO: 932999 - protein, 142 aa, Homo sapiens
MKPLCINTMFFSVIQDTTGNKNPAIQSGAVDHFVKPCHRIVKPTMPLLAHHVSIDKIIPTLLNGVFSKKTGGMITSIHVTRTLDHPEASIHVMRTFEHPVEWFMWQRAKAYQQAILMEADSFMSIENRHKPRGSEIKGIITH

SEQ ID NO: 933000 - protein, 142 aa, Homo sapiens
MCGVISEASVLMVLSCIGGHLMVATVWKHNGTVIDDEIIKKLIGQRLVKAQEESCPEIDKRSSRKAFPDLVCDIVFLQCFQSKGTVSQNNNSNNDKTEPTIGKNVEQTEFSYTVMKNANWYHRFKKLLAVSPEAENLNICIT

SEQ ID NO: 933001 - protein, 157 aa, Homo sapiens
MYIMTKEHNKSNFIFLHVVDNYSTRQRRSKHLLHKAAGKRERKEVPHFKTIRSPENSITTRRTAWGRLPPDPITSNQVLPLTLLQCAFPMSARGYCLKVSDRNQCAQNAARPQAGKVHTSVYPVEHPELPGTNEYERKMLVTEGQPPLHFSQKDLSA

SEQ ID NO: 933002 - protein, 182 aa, Homo sapiens
MGEKTYGSWRMTVDYCNFNQGVTPIAAAVPDVVSLLEQINTSPGTWYVAIDLANAFFSIPAHKAHQKQFASAGKASNIPLLSYLEAIKCVMHSSIPPSNGSVIYVIRLEQVLKAQDILEGEWGRDIFPVGRASSSALVVHFAWKKKCPDELLYTDSWAVAGGLAGWSATWKKHDWKIGDKEI

SEQ ID NO: 933003 - protein, 166 aa, Homo sapiens
MVNTEWQLDWIEGCKVLILSVSLKDKLLHLVPPKSKKEARHLAGLFGFLKQHIPHLVMLLQRIYQVIQKTASFEWGPEQEKALQQVQAAVQAALPLEPYDPAVPMVLEVSVTDRDAVWSLLQAPIGESQQRPLGFWSKALPSSADNYSHFERQLLFCYWVLVETEC

SEQ ID NO: 933004 - protein, 243 aa, Homo sapiens
MTTTTTTITTTTTTTTMTITTTTTTITNTTTNTTTTTITTTTTTTNTTTTTITITTTTTTTTTIITTTMTITTTITNTTTTNTTTTTITITTTTTTTTIITTTMTITTTITNTTTTTITTTTITTITTITTMTITTITTTTTTMTITTTNTTTITMTTTTTTTTTITTTTTTTTITTTTTTIAMTTTTTTTTTMTITTTTTMTITTTTMTTTTTTTMTTTTITSITNTTTTTTMTPPPPTPPP

SEQ ID NO: 933005 - protein, 174 aa, Homo sapiens
MPQEALDAMEAQGPRRDLQNESPRPKYRVPGGHRGETRWKVDFTTVGVGAFLDTGGNQLTEQPGVFLEEAILAQILKEDWKPQGAEINRGNTRTLPSRRQCSGWSGGEETSKNQHRNPTVATRDNQAWRRSRATKAPIDKASFLKMAVLRFTKALDQKRDKAHGTDEPRFGCPT

SEQ ID NO: 933006 - protein, 142 aa, Homo sapiens
MRTNRGESNDQIYSYHNSAVRLYFLGIFLISSSSSSPPSPPPPPPPPPPPPPPPPPPPPPPPPPPPPPPPPPPLSPPPPPPPFLVDSALSGSYTGAIESCLQERFQALERNLQTFSQLVLNLTTGPGLEMDQVPSQLSYVVT

SEQ ID NO: 933007 - protein, 173 aa, Homo sapiens
MPSTMIMRPLQPCGAVSPLNPFFCITYPVLEEDRTMWESLELPRDLLNGFAQNADSDMNNKAQTEVVSDGNEELVGKVPTGAMPTGAVRRGPLSSRPQNGRSTNSLHHVPVKVADTQHQTMKAAWRKEVARKATGSEVPKTVGTHLLISVTQIMLFSLKKKGNLKTCDNKDES

SEQ ID NO: 933008 - protein, 191 aa, Homo sapiens
MESIFFAAVCICSLARNGIEKGIGGSDSGWTYYWRKGFGDLLVLVFPIVGVLDKKIFLGVSPQAAMAELGSREQVLKAAVEPSSWALDYTTTVVPKGHSNSYSPEGWGVVVIQTTGSRVLCHGTGEEGVLWRLCTWGTRHSCNSRPGTNRSQWQLGLWGIRYHAVVTLDPGIMVHKNSTGFVGPGTTTGCK

SEQ ID NO: 933009 - protein, 207 aa, Homo sapiens
MFSGQETQRAEDCGQVARGDVNGTPTASASFGRWELGPLHAKGQHEQNEGEDGLSEELAKLCSRGREYLKLGLSAKITKYMKGSKETLRGENGQHTGLGRQLDNGDRMSGQSWFHSMLVNELSPGSLQSSGPQLTVELEVPQHPPLPPSRAPLLLLNGERMEPTLETRDLAKWVGQEVPGKRQTELQNAVRERKVMRPAQEHLADGG

SEQ ID NO: 933010 - protein, 139 aa, Homo sapiens
MNFKVVFSNSVKKVNGSAPLLQVCWSFLEVHSRPHLPGYYQQKLQNSKDCCLFFPLEASSWRGICQMPARAFLYDVSVSPYWEVSSSQGYRGIRAIRQGHLSLLKRAHGCRFPQVFCPREKGVLIYRLTGAAAFFSKMP

SEQ ID NO: 933011 - protein, 151 aa, Homo sapiens
MLSQLHRTVFANVISCKNNNYPVCCQRVLAFTKCLNTPRLRNDYLCDNGWRNGDFVRPNNLLKVTRYEAECKPSPARLFKAMQSSLYCGNLTINPTIPPLRTEWILNINLGDCDSAGSLFPWDLPFKRCSIENICNVQPTKGKYPRCVSNS

SEQ ID NO: 933012 - protein, 144 aa, Homo sapiens
MVFPPPHLPALHQFPWMQQNSHEPESQAASLASRYSVAIAYHSTTPPGLQPPTVILQDFLSGTQIILVLTNFQDKVPYGGRKCEKVAMKQSTVAPKVMYHARMQIFSHPYKLRGTRGEVGKEQRIHKVTIGLVDCWWTARDHPR

SEQ ID NO: 933013 - protein, 138 aa, Homo sapiens
MKKSSESRTGGDERILELTAKAVGLNLLNISESDSPSWYIPNSTTTTTKYPSKLGNSLWAKLSAEIRIYSSISPDELPQYLKGRRKMVLRTSDARGPPQPHGSGVSPPTSKTQRFQGNERQARICANVVVFNMVRFPG

SEQ ID NO: 933014 - protein, 138 aa, Homo sapiens
MFRLWAPGLSHPSSRSPGVSVESCMLELTRGTMQAKCGGEERSGDCHPGQDPFGCCPKEAAFPGPPPLDLQFVKLSMETGSKCDTQDVRECDSSTGDMNHIMPHISIASRARITWQWARKHRLGQKVLRRAGVLSLAK

SEQ ID NO: 933015 - protein, 161 aa, Homo sapiens
MVKLCLHQKIRKPVRRGGTHLQSQALGRLRQENQLPLASCQQHMPGSQLLSVLLEPAVWCPPFKSLSFQQLCNAPPLRNLSTGESNQKSNHLPFELLSCASKMQMLTIKTNMTTVLEQGPAGVGSVGGISLDSGRSSGCPSGSWDGHVGIQELGLVTFDVK

SEQ ID NO: 933016 - protein, 148 aa, Homo sapiens
MLGVCQSSSFLRGSSYTWLCPECSLWFLLLGTTLSLTVQLLWRPACHQVLLGEVLRVGGLPEDSSASAAMSLPSVVSLCSQERRHVAAYPAHRRANCDKCQGELDSEMQHCRKYVNVLNQYSTLFAKRGSSAKLAITPASYPVLFEVR

SEQ ID NO: 933017 - protein, 137 aa, Homo sapiens
MGRPQVGFLVKSISIGLADSQHSPPDKGVVIPCSTLCVFQLRPQALLRDAIIMKGLIPAGFLCTAKPNDADRSYKLALMGSCFIYSGADLTLPSPSESMDLEITGFSLHTVMLSPKMKEMRNRKGLGFPADSSHSLQ

SEQ ID NO: 933018 - protein, 138 aa, Homo sapiens
MECGIPGCPQIGRGENEGLKKFNDLSRAPGLVGAWSWDLYPGSPNGIVTLIISAPHCQGYADPCQPRLTFRAFESEEVCSESYLFSCCQPCEGSWQPWAVCPHLPQAPSPWQLNETFIEAVGPQHFPACKQIPIIQRR

SEQ ID NO: 933019 - protein, 135 aa, Homo sapiens
MYRTKKIRPMVNLSISSFNGVKGEKADFNEMKNDWKEKIKQGDEIWRTGGGEGDVNIREQVNSCNKNRKTRVKMDADAISWQMILGSMDLALGDRKAEEQRPTADKLTDVHKGCHRTKLAHVLVEENNASQKAME

SEQ ID NO: 933020 - protein, 286 aa, Homo sapiens
MSSFTVTSQCARHTVKNATFRATAFIGNFQVFQAERSCSVKDRKAFQSCRNDNSQGLNELCWLTLCSAIANTFTTHSYKTFKMVLSVWKSQSLSSQYCIPEENGLKGGGPAGESSEQWCTKECGVDVIEGEVPLLVGLWPVDINCCQGSNKGQVNMGWNNRERFHGSWRSKYDSTHRKAPPAFFLLLLSKCKVHASEGDKHCEDDDDDDDDDNDNYYIIFYMEPYAYISTAPTENGLMDRLIPLAPIHHQKNPLEPAMMDELGEQSSRTKAEELMGIYELDLSLRA

SEQ ID NO: 933021 - protein, 174 aa, Homo sapiens
MNSLVAQISSGMTGSQWEMLARAPGEESWVLEPGLVLPTPSVTCATSPWCLVSSSVKSESDNMISPASSYSKICVFVYEIIQGFCVRLKSCYVPIRSNPTLPIQILNFASTDDRGGSFDPPKPHPIPLQNIPPQSHPQRKVLFAEGSLRQLFPSQTQGEGWCLPQSLVMGGPRL

SEQ ID NO: 933022 - protein, 156 aa, Homo sapiens
MRKNQRKTAENPKGQSASFPPNDRNVSPSRVQNWTEDQMDELTEVGFRRWVEHVLTQCKEAKNLDKRLEELLTKITSLERNINNLMELKNTALELCEVYTSINSRIDQAEERISEFEDHLTEIRHADKNREKRMKRNEQSLQEIWDFIKRPNLQLI

SEQ ID NO: 933023 - protein, 139 aa, Homo sapiens
MSSPQLGLYGGVNRIANGKLTHRDINLQETKWNPVMSIVRGPAIFEGRRKIYGNINFGTGLLQCTGKSIWSWSHDTRVEIIIRTLLSRMTVLVCFYTADKDIPETRQFIQDKDLMDLQFHVAGEASQSWHKATGSKVIS

SEQ ID NO: 933024 - protein, 152 aa, Homo sapiens
MEPSAGRLHYTIPHLIFSLCHFNISGYAIALQWAIKRGRPFPGEKSCDLYHRQFPTFKVEVRFPKGWANSSCRVRQKESVGVVCKATEDLIPGSWICYHWYLELIRTMETMERSVKRGPGAAEISSDSGGRAPDRALIPNRLDTFLSQKRLN

SEQ ID NO: 933025 - protein, 183 aa, Homo sapiens
MEIYAYGIDRTREEGHASHVTGSVARRDADLLERRASMGCGNHVGQQEVPAAQLWEEDTGEHNDMSDCPAWLGKGNVKLWNSVDDGCESGEALRDDVEDFHIPGEELPLGSEFLGGEREKLGDPPRAGDELLGDGSKNMWYIIDERGDSEESSEEDTAEPNGFIDFPSRVRQTLRPLIRSAKI

SEQ ID NO: 933026 - protein, 165 aa, Homo sapiens
MEIYAYGIDRTRKEGHASHVTGSVARRDADLLERRASMGCGNHVGQQEVPAAQLWEEDTGEHNDMSDCPAWLGKGNVKLWNSVDDGCESGEALRDDVEDFHIPGEELPLGSEFLGGEREKLGEAGMNLEESGLGDRSYSPETCESLGDSWVHGADSRRNLGMAGE

SEQ ID NO: 933027 - protein, 136 aa, Homo sapiens
MGCGNHVGQQEVPAAQLWEEDTGEHNDMSDCPAWLGKGNVKLWNSVDDGCESGEALRDDVEDFHIPGDPPRAGGELLGDGSKNMWYIIDERGDSEESSEEDTAEPNGFIDCPSRGEREKLGEARMDLGVSVLGDRS

SEQ ID NO: 933028 - protein, 188 aa, Homo sapiens
MFWNPISALESYVRNKLSDHSRSIVESYLWDKHSDHSRNVLESYVRENHADHSRIVVESHVRHKHPDHNRSVLESYVRVNLSEHSSSVLESYRRDKHSDHSKRVLESYVRNKHSGHSSSVLEFYVRDNHSEHSWGVLESYVWDKHSDPRIIVPESYVRKNIQNTEGVFWSPMCMTNTHTLMVVFWNPM

SEQ ID NO: 933029 - protein, 763 aa, Homo sapiens
MRAKQSNPHSCVPESYVRGKHSDNRSSFLESFVRDKHSFPRSGVREPCMRDKHSDHTVLESPLWEKHSDPRGSVLESYVTDKDLDHSSSVLKSYVRDIQTLLAVFWNLIVLEFYVMEKHSESSSSVLESYMTEIHVHPSSSVLESYVRDKLSDPRSRVLESYMRDKHSDPLSSFLNHYVRDKDSDLSTIVLESYMRLKHSDPRCSLLESCVRDNHSDNSRSLLEFPVRNKHSDPPSNTGSSVLESNVRDKHSDNSRIVLESYVRDKHSDNRSSVLESHVRDKHSDLHSSVLEWYVMDKHSDNHSIVLESYVRDKHSDNHSRSIVLEYYVRDKHSDNCSSVPESYVRDKHSNNSGIVQESYVMDKHSDPRSGVLEFYVREKHSEPNISVLESYATDIPVDPSSSILESYVRDKHYDPSNSVLESYVKESHSDTQHSRRVLESYVRDKHSDTHSRVLESYVSDKHSDNLSSVLEYYVRDKHSDTRNSVLEYYVADNHSYARSSVLESCVKDKHSDHSRIVLESPVRNKRSDLHSSVLEFYVTDKHLDPSSGVLKSYTIIAVYWNPVGGTNIQTIEAVFWNPKRETNIQNTEGLFWNPISVLESYVRDKHADNCSSVLESYVIDKPSNNSGSVLESYVMDTHSEPCGSVLEFYLREKHSEPSSSFLESYVMNIHADHSSSVLESYVRDKHSDNCSSVLESSVKDKHSEPSSSVLESNVRDKHINHGGGVFWNPMLRTNIQNLVAVFWNSMSGRNSQNTVAGFWNPM

SEQ ID NO: 933030 - protein, 2259 aa, Homo sapiens
MESFVRDRHLEPSDSILEHYVNPRSSVLESYVRDEPLDPSSSALESYVRKKHSDTRSFVLESHVRDKHSDNLSHVLESYVRDKYSDPSSVLESYVRNKHSNNSGSVVESYVTDRLSEPRRSVLEFCVREKHSETNRSVLESYVMDIHVDASSSVLESYVKTNIQISKAVFWNPLSSVLEPYVTDIHVDPSSSVLESYVRDKYSDSSRSILESYVKDSHSDPHSSVLEFSVWDKHSDPHSSVLESPTLVAVFWNPMWETNIHTILAVYGNSLRGTNIQTPAAVFQNPIALEFYLREKQSEPSSSVLESYMRDIHSDHSSSVLEPYVRDKHSDRRSSVLEFCVKDKDSDHQSSVLESFVRDKHSDHSKSLLESTVRNKHSEPHSSVLESYVMDKHLDLRSNNRSSVLESYVRGKHTDTCSSVLESYYVRDKHSDPLSSVLESYVTDIHVEPSSSVLKAYVRDKHSDPRNSLRESYVRVNHSERRSSVLEFCVRDKHSDHSSSILESYVREKHSNNCRCVLESYVREKHSNNCRCVLESYDKEKHSDPPRSVLEFYVREKHSDSCSSVLEPYVTDLLVDSSSSVLEPYVRDNHSDPRGSVLEFCVRDKHSDPSASVLESHTLVAVFWNPMWGQTFNHSSVQESYVRDKHLDCRSSVLESYCSGIPCEGQKLGTQRQCSGIPCEGQKLGTQRQCSGILCEGQTFRLQQQCSGIPYPDSSVLESYVRDKHSDHSRTVLEFPLRNKLLDPHSCVLQSCVWDKISKPRSSVLESYVRYKHSDNRSSVLESHVRDKHADPRKSVLESYVRDKHSDNRSSVLESNVSDKVSDPSSSVLESYLRDNHSDTFSSVPESCVRDKHFDHCRTLLESLVGNKHSDPRSSSIIESHVRDNISERHSSVLEYYMSEKYSNILGSVLESYVTDKHSDPRRSVLEFYVREKHSEPSSSVLESYVKDIHVDHSSSALESFVTDKHSDPSSSVLESCVRDKHSDPSCSVLVSYVMDSHKDPRSSVLEFFVRDKHSDIHSSDVESHVSDKHSDHSRSVLESPVRNKHSDSRSSVLESYLKDKHLGPSSRVLESYVRDKYSDPDNRSSVLESYVRGKHSNNSGSALESYVMDKHSDPRSSVLESYERDKHSDPPDPHSSVLESYMSDKHTETSSSVLEPYVRDKHSDHARIVLETYVRDQHSEPSRKVLKSCVRDKRLDSRSSVLESYVRDKYTDHSRSVLESYVRDKHSDPHSSDLEFYVRDKHSDIGSIVLESNVRDKHSDPHSSVPESCVRNEHSDHSISVLESPVRNKHTDPRSSVLESYVTAKYLYPRSSVLESSVRKTIQNLVAVLWNPIVLEFCVRDKHSERRSSVLESYVKDNHSDHRKSALESPVRNKHSDTSKSVLESYVTDKHSDPSSSVLEFYVREKRSDNHSRILESYVRDKHSDLSCCVLESYVRDKHSYNSGSVLESYVTGKYSDPRPSVLEFYVREKHSEPTSIVLESYVTDRHADPSSIVLESYVTVRHVDPSSIVLDSYVRDDHSDPRCSVLEFCVTPINLHPSSSVVESYMMDKHPEPSSSVLESYVRYKHSDPSSSVLESYERDNHSDPCSSIVEFCVRDKHPETHSSVLECSVSSVLESYGTNKHLDGSSSVLESYVRYKHSEHCRSVLESPVRKKLLDPHKSGLDSDVMDKHLDPSSSVLESYVRDKHSEPRSSVLESYVRDKPSELSNCILESYGETNIETTARFRVLESYVRGKHSYTHSSVLQSYVRDKYSDHPSSVLESYVRDKYSDHPSSVLEYYVRDKNADSRSSVLESYVRDKNADNHNRRVFWNPMGGINIQKTARASDILRFGQTCIPSSQCSGIYVRERHTEPSSSVLDSYVTDIHVDPSSSVLESYVREKHSGTSSRVLESYMKDNHSDPRNSVLEFCVRDKHSDHSRTILESPVRKKHSDPRSTVLESCVMDKHLDPSSGVLESYVWDRHSEPRSVFWNLVDKHSDNHRSVLESDVRDKHSDSCISVLKSYVKDKHSNNRSSVLESYVRDKYSDPDPHSCVLESNVTDKDLDPSSSVLESYVMDRHSDNRSSVLESYVRDKHSEPSSSVLESYVRNKHSNKQQRDFPEFYVTEKDSELRSSVLVFYAMDIHADLSSSVLDSYVRDKHSDPSSSLLKSYMRDNHSVPRCIVLEFCVREKLSDNHGSVPESYVRVKLSEHRSSDLESPVRNKHSEPCSSNLESDVTDKPLDPSSIDLESYLRDNHSDPLSSILSSYVREKHSDQSGGVL

SEQ ID NO: 933031 - protein, 140 aa, Homo sapiens [sequence omitted]

SEQ ID NO: 933032 - protein, 192 aa, Homo sapiens
MVPFINDRFETGVHINSVTARKEGHASHVTGSVARRDADLLERRASMGCGNHVGQQEVPAAQLWEEDTGEHTDMSDCPAWVGKGNVKLWNSVDDGCERGETLRDDVEDFHIPGEELPLGSEFLGGEREKLGEPPRAGGELLGDGSKNMWYIIDERGDSEESSEEDTAEPNGFIDCPSRVRQTLRPLIRSAKI

SEQ ID NO: 933033 - protein, 183 aa, Homo sapiens
MEIYAYGIDRTRKEGHASHVTGSVARRDADLLERRASMGCGNHVGQQEVPAAQLWEEDTGEHNDMSDCPAWLGKGNVKLWNSVDDGCESGEALRDDVEDFHIPGEELPLGSEFLGGEREKLGEPPRAGGELLGDGSKNMWYIIDERGDSEESSEEDTAEPNGFIDCPSRVRQTLRPLIRSAKI

SEQ ID NO: 933034 - protein, 137 aa, Homo sapiens
MLKFVRLLSILLNLTVLVHESSVKAHTPCLGDADGESATEKIFGEAHGPVSFWGGVTNHIIREILGSASLQASEWWSPCHIIILSKAFLSKMPFSISMLDPNLKLGEEIIAMKLVFIHFSLQICILIWYLFEEYQIY

SEQ ID NO: 933035 - protein, 219 aa, Homo sapiens
MNIKQHVLLLPNSKFPVATHSKREENDADLEPALIFSSKVELEAHVSGAVDCFPQIVKDQRVLGLWTGLTVHLLEFKMGCKAAETTHNINNAFGPGTANECTLQWWSKKFCKEDKSLEDEELSGWPWEVYNDQLRAITKADPLTTTGEVAEKLHIHHSPVIQHLKKIRKVKKLSSRSRASGIAGLTLKRYIQLSNPGTLTMEGMASTTENGPFHLGYNC

SEQ ID NO: 933036 - protein, 134 aa, Homo sapiens
MTNTCTSEPLPPCSQANRYHMTGINLRVKLQTFLVSVTAHKGSADPKSEQQQDLLQSAKEQSFHSVEGDPSGLPCLLGWPAFIPLFGPAHTLLIDPFYSTLIHIKAKIESDKDKQAKKILFKAIAVEERDRNTV

SEQ ID NO: 933037 - protein, 139 aa, Homo sapiens
MGELVSMPNCSSNVSGKFYFCVLPWLLHKYLCLANYCQHSNKGVYTLAPMPLLAQVPKLQSLHIGPCFRPLLCGRSMGTYNLREFAVKGVSLPIGSGLWSCSQWWLYQCLVSDAHEVATEQRPETWAQVEGLKIGDLVQ

SEQ ID NO: 933038 - protein, 141 aa, Homo sapiens
MCMCSHAVGLLGSRLMLGNVCKESSDVIHLQVSQPWIPAPTLVEVAGEGSGLCVGPWLCFVDCTGFVLVGLPPGGGTFKRHLKKVCLGFNNHFKMTVAQSIIWKIYNLGSNGHTGALESRDDGYYGYFTHLEKKDQQTTCF

SEQ ID NO: 933039 - protein, 139 aa, Homo sapiens
MIHFLKPAQVVIGTKTVPVIPGFRLAPADPDSMPAPETGPLQAPSWFQLYQAPVDSGSRPALAKPGFRLIQVDPSARPASAEGGSRNTPPDLGFRTALVDPGPRFSPMDLDLRPILEDIGSRSILLPGWLLKTRVQGLF

SEQ ID NO: 933040 - protein, 155 aa, Homo sapiens
MNFGTFVDGFIQKASSGRFHGGGVWLSSTLRLFTLTLGGWCQAHGFVLWTLKIKHLLHWRGKVFFLSIQGILEMETGHSAGTKLASALIDIWCVSSQNKINNVEYQKLNTYSKVKYIKKKDNTQISSLPNCFTKFTISYGLEFMFTYYICMVKIL

SEQ ID NO: 933041 - protein, 196 aa, Homo sapiens
MARCGGERKPGWTHVAYCEISQYGLRWGEDQKADTKDSAGPPMASYAPALPCLNPGPFLCPAAILAGDRERPPTQSRVFVKGTRTSWDRARDRGQQPWGRGASCRLKRVLRDQPSQQCRPLCKEQLMHSAQSDDFPPVLTWPRFSSLGDKGGMRDVENPRYQPFRFQPCPGNIKGIEHSTLSCLGGTTRRLDKRGP

SEQ ID NO: 933042 - protein, 177 aa, Homo sapiens
MPHPALAHARCTASTCPISNRQGSDLPQVGPCHPLKVRWNELPTRNFNMWTLGKMKEQTVALSNRKARKGKREKYCLWRGGEGKELREAREGPTHCSNSELKFRGLLISREGIFFRSTISSRFPISGEKQFPMSHDPLHAESCHPQPSAECKADLISLISLLSCLFFCKVFKILKYF

SEQ ID NO: 933043 - protein, 166 aa, Homo sapiens
MPAPTTAHAKDETAQLYGGDNSWTQEMVMNCCVNLSHGSRPLVFSYLTPRAAAVNAEKGAESNWEDGRNVSNSVACVGRNGEFREYRDQRACWATFPTTASIRVNVIPSLSLYGGRTSCRGPSSDTLSRATQHLNQRVGVSSPVTKSTLLSCIPTFTITHLYFYDS

SEQ ID NO: 933044 - protein, 155 aa, Homo sapiens
MASLSSRPNSVHLPGPQSLYNLSLAHITKIVFTQSRCIKCYVPGTLLSELQVLAHLIFMSALRAGHRYLRHIFTDKDTEAIRMQKPFTEISSLELEAEKVWKHSTLPEMPEDCTAHCIMSWFSTRIPRTRNSQFCLHRQIVIPPVMTEWTLVSPC

SEQ ID NO: 933045 - protein, 238 aa, Homo sapiens
MQGRTFVLWGSAPSSDCLSIVDMDEGVAHFSLDKLFLSVLVNHTNNKPYRVIGLLHYLSSLNNQDHKEDREKPDLVALTNTFKNLKNWKSTRDREWFLETGLALEKRGVKLQTFTVSVTVYKGGASGVVHSSWCVHGLTDFRSEAADLHTVIAYKGGVGPKSEQQQDLFQRVKEQSFHRVKGDPSRLPVLAQLACFYSLIWPTHILLIGPFYRELIGPFYRKLIGPFYRALIGVFTNL

SEQ ID NO: 933046 - protein, 795 aa, Homo sapiens
MEWNGMERNGMEWNGMEWNGTERKGREWNGIEWNGMESTRVQGNGIEWNAMEWNLPEWNGMEWNGMEWNQPECNGMEWNGMEWNGTTRMEWNVMEMQSNGIEWNGMQWNGFNLNGMERMESTRVEWQGLEWNGMESTRVQGNGMEWNAMEWNHPMEWNGMERNGMEWNGMEWNGTERKGREWNGIEWNGMESTRVQGNGIEWNAMEWNLPEWNGMEWNGMEWNQPECNGMEWNGMEWNGTTRMEWNNQFERNGMEWNGMELNGMEWNAMEWNQPECNGMERNGMEWNGNYPNGMECNGVAIEWNRMEWNAMEWIQIEWYGKNGINTSGRAWIGMQWNGINPSTGEWNGMECNGMESSVMEWTGMEWNGMEWNGMEWNGMESTRLQSNGMEWNAMEWNLPEWNGMEWNGMNAMDSTRLQWNGIEWNGMEWNGMELTRIESNGMEWNGMERNGMEWNGMEWNGMKWNGMVRNRMEWNEFAGECNGTECNGMESSGIEWNGMEWNGINPSAMEWSRMEWNGMEKPEWNGIGKEWNGMERNGMKSTRVEWNGMEWIGMDFNGMKWNGMEWNQSFRVEWKGMYWSGKKGMESTRVECKTMEWNGKEWNGINSIAMEWNGMEWNGMEWNGINRNRMEWNGMERNGMEWKGMESTRNGMQRNRMEWNGMEWNQPEYRGMEWNGKQWNGVIRNGMERNGMEWNGMEWIQLDDNRMEWNGINPNRMEWNGMERNGMEWNGMEWNGTERNGMEWNGMESTRVQGNGMEWNVMEWNLPEWNGMEWNGMKGNGFNSIAMEWNRMEWN

SEQ ID NO: 933047 - protein, 167 aa, Homo sapiens
MERNGTEWNGMEWNGMEWNGIEWNQLDCRGLEWNAMHWNQPEYTGMEWNGMQWNIIIRNGMERNGMEWNGMEWNGMEWNQLDCNRMEWNGINANRMEWNGMERNGMDWNGMEWNGTESNGMEWNGINASAGEWNGMECNGMESSGIEWNGMEWNEMQWIQLDCNGME

SEQ ID NO: 933048 - protein, 169 aa, Homo sapiens
MSLPRWALRHPLGVETSSLDDRGYHHCQMNPMQERVSESELPNWLLTFFPYWVQLIYEQSESTGGLFPSLLQQSWLGTPAVWPPDFLPGPWETYIEPHPHINSSHHQRLSTRVVGCRVLWAGHSEAQVCSMVPGVPWTCLWSPHLLSGWLRLKASVTMCGFCLHFLPQS

SEQ ID NO: 933049 - protein, 227 aa, Homo sapiens
MLMTEVTFLPVPSSTHARHLLRLYSWRRCVGGQSTQILPSHSVESRSPKSPSWPPPSVPPLGYSRYFYASSNERGNSLQQSRRAPALSRSCPSICLVVAHAPRAVKYCDHHPCFSVIRKRSHVHVQENGANSQHQRCESRDWDVAASKDCCQPPKVGRRQEEFSSKASERVWPCQDLEFSSVKLISDFWPSEHPDHSLYSEDSQVLPPQLFQENGTTVNHKNKEDKP

SEQ ID NO: 933050 - protein, 176 aa, Homo sapiens
MRIHWKFAPRKSGLCSKPLGYTLDTLYLPKRKRVAQFICCMSEQGLHPLKLDVIGAGGSAGKVNHLDESLKCQAIGASTWWEASVPLHVDSFLLLCKRLHDIVGRLPSKQEERNTESQREALYMCSELHFYDLALEVSYYHSADQYQVSKLELYSRGGTSAPPFEVGSIKNFQIYF

SEQ ID NO: 933051 - protein, 146 aa, Homo sapiens
MATTPILVMTFLGNSSEFLTLIQSALLPFPLVSSESPASHKEIYHSVICENSSHFASCLCGEVDGVLLMLRYCCGILRTRERPWGVNRRIHLLLNALRPSRLNVQRLGPEQRQHLTFIHTSQKRWASLKQAYGYGHVKARIQRQNN

SEQ ID NO: 933052 - protein, 163 aa, Homo sapiens
MQKGSGETNSPSPSLPFCQSLVIPPCGCAHLKAKGKRLRYVALKGQLPGTENRSDFQNSATASAHLGSCRCCHSPEAGKSGSRHGKWYIQEYNVPAVIHGLGEGHGSYCLQKSAAPARSTFAEHRPPTMKSATGHWDLCHCYCRKTQGPREPAGQQQHWTDPS

SEQ ID NO: 933053 - protein, 159 aa, Homo sapiens
MYGIISEGSSGPSAAGLLEFTGGPLQTLFSWVSAAVAAEQQILVNHKCCCLIVPLEVLSQRSTRPCEVSQAACWENHYSLQSCQIGTFKSAEVIAVFCFSVPCPQRWSLQRQADLLKLWWAPPSLSFQATLFTYSSLGNGGHRSPSLTATLQFDLRLLC

SEQ ID NO: 933054 - protein, 153 aa, Homo sapiens
MVIRLMDLDPFSWGYVFIERGMQSILLKLLLDLFLPSGINTISPPRLQNSTGPQSKKIILAYEDVHSHIPGPRTLGIRQCSSASYWDKKKVRLYGKNHITTLAAGGRFPPLLCQIPQKSEKSIQGEPSFILPHVECEHTLMKASPSCLCLLLF

SEQ ID NO: 933055 - protein, 167 aa, Homo sapiens
MDFVRDSSSPATTTTISLSPDQTLKRKKEHKNKKPPSNDSNFKKIKKHQPSQIRNQCKTSSNSKSQSVSISPNDQTKSPAIYPNHIEISETTDLEFRIWIAKKLNKIQQTVETQSKEARKTIQELKDNIASFQNNQTELLELKNSLYEFQYISGSLNNSLNQAEERI

SEQ ID NO: 933056 - protein, 135 aa, Homo sapiens
MLIECVEAATKIHALILMEPYPPSVAPTDPRWSSPAGTPNISHMMRQEQVSSKGSQNGTDAECSPPIHPSHCRSCGPRRIFCMWCHASLEKGDCSQRKLILLPFTHGIFRFCGPKKCISLTPEFWDIQDGILACA

SEQ ID NO: 933057 - protein, 187 aa, Homo sapiens
MALEGLCSALKDGQNVGIKHIPAIQYDIWIQTSNEVILLHQIILSHIHQTRSVSTFWTLLHVKESSFDEHYYIEPSFEYYPMEHSNESKRDIVAVYDESSSIENLKAKFRSTVANDGMLKTGIGVIQMWADEVQVKQPQEKVMACKTAFHKTGFQEMFDPPYYELFSLRDKDISADLADLSEELNNH

SEQ ID NO: 933058 - protein, 145 aa, Homo sapiens
MVTIEIPTTHLSMGHPVFHSLVLVPVLPRLLGAGLGAHGHLTLPQADNPTCPPAVASSGDAGPHCPLVSMRPKWALHPQHSHLLRHTSEVSGASMAVGHDATSKQGSECNGKSRDFASKLSSIWVLVLLLCLGVNFESLSSSSDS

SEQ ID NO: 933059 - protein, 158 aa, Homo sapiens
MGGWKWTGVPALFLAASALLAFPKAQRTVPCLWQELRDLGSTPNTAGESASPLEGIDDKRLAVVTTEGNEEVPPRQRCVCWSCPTLCTLTSREQIQMGQGGSIYTVEIGKHCHQNQLFPHSPAHPCSQELGNEAAVRVKAEIPPPGHVIGLWWGKPGG

SEQ ID NO: 933060 - protein, 167 aa, Homo sapiens
MGVTSPLDKGPMQRYLKTGPSAAGLLEFARGPLQTLFAWVSAVVAAEQRILVTRKCCCLIVPLEVLSQRSTWPCEVSKIKKGNRNTDTFLNSMVAYTIKSYSPQRRIAVPRAQVQGCLWPSKSWPAMACHLIMLTAEGSWDRCILHPPGTPRTYPVTGFWTSSAPSF

SEQ ID NO: 933061 - protein, 208 aa, Homo sapiens
MPQYQHWENKNTHPLKVHQQHLKPSRNASFETSPRNSKVSIPESAQPSMMQQAFQVTLMQHKCLWKAASLPQGWRNKASVWEALMGPCMGLGASLKKEDPTEQSENLRRGMLHLLGDAGGNSSLILTLDQSQSSCTFSHGTVEPFHPGVILTELLVSPAGPQALLRAGTASDFKTWRKINANQCFLSSCTRVLAQKAIINVCWMCQAL

SEQ ID NO: 933062 - protein, 141 aa, Homo sapiens
MASSWRVWHLLALCLFLSSYVVSHLLGPLYIAWASHSMVVSKIGFQDIGTGSCSPGKGCLGQCLFLLLRLLVGGVTESPCLRVEKQTRLLIGVVTDTSRDSLHFDAQLNQTHQWAPLLTSCEGITRPFSGAPSHAEDMSVP

SEQ ID NO: 933063 - protein, 166 aa, Homo sapiens
MAHCSLELPVGLFGFWGQHIHHFSVLLQPINQVTRKAASFEWGPEQEKALQQVQAVEFWSNALPSSADNISAFERQLLASYWTLVETACLALGHQVTMRPELPIMNWVLSDPSSHKVVQAQQHSIIKCKWNTCDQAQACPEGTNKLHEEVAQMRMVSTPATLPSLP

SEQ ID NO: 933064 - protein, 177 aa, Homo sapiens
MVGKAKWKPLELPLPRKIVNQKQYCIPGGTEEISATIKELKDAGEVIPIPTTFPLNSPIWPVRKTDGCWRMTVDYCELNQVVTPTAATVPDVVSLLEQINTSPGTWYADIDLANAVFSIPVHKAHQKQFAFSWQGQQYTFTVLPQEYINSLGLCHNLILVMVNTEYQLDWIEVKREP

SEQ ID NO: 933065 - protein, 144 aa, Homo sapiens
MLFYKALSPCSFFQYFSVFFRLDNFYGSIFKFTDFFISHLYSPVETIQLCESDHPQVKEKKSRKLTSIPVTLTLFWVATNGHCKLESVVMDNRPPLFSRPLLGGGSEFRRDAAQYLAEKSINHLSQVERPESMGTLSFDELGAH

SEQ ID NO: 933066 - protein, 392 aa, Homo sapiens
MTAELREAMALGPCRPVKVKKEEEEEENFPDQASSQQVHSENIKVWAPGEFRQTGLDGSEEEEKVLKPRTFSYWFQKLRYSANLVVHQRIHTGEKPFECHECGKAFIQSAKLDVHQRIHTGQKPYVCSKCGKAFNQSSNLTVYQKNLSLEKTFRRSKCEKAFSYSSQLARHQKLHITEKCCKCNECRKTFTGSSNHIVHQRIHTGEKPSACNDSGKAFMQIANLIVHQRSHTGEKPYECEFGKTFSCFSHLIMYQIIHTAEKPYDCSECGQAFSQLSCLFVHQRIHSGDLPFVCNECGKAFTCSSYLLIHQRIHNGEKPYMCNECGKAFRQRLSLTVHQRTHTGEKPYEYKKCGAAFISNSHLMRHHRTHLVEQQVRKRKTSSIGHNLLPPK

SEQ ID NO: 933067 - protein, 136 aa, Homo sapiens [sequence omitted]

SEQ ID NO: 933068 - protein, 162 aa, Homo sapiens
MSFFFPGCRGTELNRTGAPGLPTKTPIVSADINSDESGWEAFLVKCTDGASWCQLPPLGGHKQKKAKPSKLVHLADSASTKTSHIQSSSLMRSRHENRIHTSEKGQRLLLRAPGNSGALQDHGEPYGDFNLERERKETPFSKIAYFVCVDKQEVNEVRRLIS

SEQ ID NO: 933069 - protein, 163 aa, Homo sapiens
MPECLIYREGQLDCSSGTLLSNLSCLIISHLWIQPPLSSEVAPSNLAFTFLCHDLEIIPREKAWDVGCFFWMYLVMTGCCQRRLTFDSVDWERRTHPQEGPLTMWVGTIQSAARGTRKSRQEKVEEADLLGHPAFIFLLCWVLPALEHRTSSSLAFGPLDLHQ

SEQ ID NO: 933070 - protein, 151 aa, Homo sapiens
MGSRVSVCLYQQHENRLIHSSFYFTKKGVEALRKEVKRVRSHDYYFTARDDHRKEFTIYFLQFLWAYVHFMFVSLQYILLPCARIPCWISEYGKNKTDKASDRLHLRMKEADKRQTNESTTTSHKKRRQGDREKNYSRKRISLSNKGPNHT

SEQ ID NO: 933071 - protein, 140 aa, Homo sapiens
MFSSGFITIYCQVTLMEIPTMVPDTGQGHCLAKRLCSIPIHSHPHHRCPHGQDTVIPIRSSSPSILINITIVILTIASSSSHHLHHRHQHHHHPYYRIIQLPSPSSSRSTPSTCVIIPIPNIIIITVNITTVIIYRPRAS

SEQ ID NO: 933072 - protein, 145 aa, Homo sapiens
MEWKERRQGEQLQGHVNNLGGVFDLDGRSNQLQGLIQSKSLNLLNSLKAERENETSEETSKSNRGWFMTFKGKKLTLFNTKVQGEVASADGEAAASYPEDLAKIIDESSYFKQHIFNADETPFCWKKMLSRTFIVRGEKSMPGFK

SEQ ID NO: 933073 - protein, 128 aa, Homo sapiens
MHSVNSPARENKTKQLAQVLHTSQEDGTRSIHLAVPHWLEPRLLCLGTPAILSHTIAIPTVLDVVVAVGLKQTSICIFDGEFLEESDVTTDLTGGVAQAVMQVIGSDCKQMKLCSLTRCSPRAVWPGS

SEQ ID NO: 933074 - protein, 135 aa, Homo sapiens [sequence omitted]

SEQ ID NO: 933075 - protein, 149 aa, Homo sapiens
MKAKRRLTFESVDWERKARPQGCGHHSIGCQCGYNKAGRRSILLMLTLGVQSQLGMEHSKWLRSHVCGLNKEEWKAGFSRDNGTLGFSLHVVSGLLLLYRLSTWSLLVVFPVESLGFLHDGSGLQSAQKQKSPGLLKTATVTLLLHSLG

SEQ ID NO: 933076 - protein, 169 aa, Homo sapiens
MSLAAPFMKEHLVYRAILLDCSKTHTSGSKKCHLSVVLAYNFKHPSWLESSDHLQRCGRGGFLKESESVGNMGNEAFSWLRRESWTWHRMDNGKSWGPLKAGSVLVGQPEAPPGPPVFPMAPRMTLEEEPGKPKVTYNTFLVLCDPHHCPPLKLRHPCRNSVSLNSSPR

SEQ ID NO: 933077 - protein, 175 aa, Homo sapiens
MPLGQARLPAGEASAGRGTAGSGEGARRRGLRRERERYRWIRRGCAQGRPPQGEVPLDQARVRAGEASAGRGTAGSGEGARRGGLRRERYRWIRRGCPQERPPQGEVPLDQARVRAGEASAGRGTAGSGEGARRGGLRRERCRWARHGCPQERPPQGEVPLGQARVPAGEASADL

SEQ ID NO: 933078 - protein, 189 aa, Homo sapiens
MRSLRCDEALEKSFPHGKCSHRTVYSHGHFQHECLCFLLIHVLPAGVYGQERSLCSPLNTGTKAECELQEYGVEQWDLHVQQNEPRTRPYTLYKINTKCKTIKVLGDNVGEPWRIAELLTCLLRLRNENSPGLQKHFQGSPLSIALAFLSQWNEFHCPGPNDFAGAVENGKGMLLGDGDTAEDMGYLNI

SEQ ID NO: 933079 - protein, 343 aa, Homo sapiens
MSSAWCSRQPGQSSDLCSLQKKGPHLVDKEPFGLYVSPHSGFCKRIYTVHTCMSPYTLDCVSASTRCTPARLPTLWILRARPHGARLHVSPHSGFCERVHTVHACTSPHTLDSASASTRCTPARLPTLWILRARPHGARLHVSPHSGFCERVHTVHACTSPHTLDSASVSTRCTPARLPTLWILRARLHGARLHVSLHSGFCERVHMVHACTFPHTLDSGSASTRYMPARLPTLWILRARPHGARLHVSPHSGFCERVHTVHACTSPHTLDSAIASTRCTPACLPTLWILRARPHGAHLYVSLHSGFCECIYTVHACTFPHTLDSASASTRYMPARLPTLSIL

SEQ ID NO: 933080 - protein, 161 aa, Homo sapiens
MNINSHYLDTDGEGGGAFEWMIKEKNKSGEATGNKRSFHPGPFATHKYGEVASRVHPGNTQRTVKPQTACTHSQTTDGLYAQPNRRRPVPTVRPQTACMNSQTTDGLYPQSNRRRPVPTVKPQTACTHSQTADGLYEQTNHKWPVFTMQRKEKQKQKLIFT

SEQ ID NO: 933081 - protein, 139 aa, Homo sapiens
MVHNRIEINVHRMQEGQPSGLNATAPNDEPGSHSTLRGKATRGSNVATKGPPHTKGPPHTKGPLHVNGPPYAGPPDLGPMALSLPGQSSEAPHLHHNGVVPSRARGSLQTHVWSPGPLKSLCTSFLPETTNVLSKRHSD

SEQ ID NO: 933082 - protein, 227 aa, Homo sapiens
MKTCPTSTALPSRQQGRRCRVWRPRTKTGQSWWSCPPHSDLTMVGNCPHSDLPMVGNCPHSDLTVVGSCPHSDLTMVGSCPHSDLTVVGNCPHSDLTVVGNYLPKVGSCPHSDLTVVGNCPHSDLIVVGNCPHSDLTVVRSCPRSDLPMVGSCPRSDLTVVGSCPRSDLTVVGSCPHSDLTVVGNCPRSDLPHKPASGPSPSNCTAGTPPRRGHAQAGQCPARQCLL

SEQ ID NO: 933083 - protein, 204 aa, Homo sapiens
MERNGMEWNGMEWNAMEWNQPEYNGMEWNGMEWNGMEWNGMECNGMESSGIEWNGMEWNGMQWIQLDCNRMESNGMEWNGMEWNGIKPNRMEWNGMEWNRTERNGTEWNGMEWNCMEWNGMVRNRMEWKELEWNGKEWNGMEWNGINPSAGECNGTECNGMESSGMEWNGMEWNGMESTRAQWNGLEWNGMEWNNPNGMECNGE

SEQ ID NO: 933084 - protein, 1015 aa, Homo sapiens
MAWIGMEWNGNNPSTGEWNGMECNGMESSVMEWKGMEWNGMEWNGINSTAIEWNGMELTRIEWNGMEWNATERNGMELNGMEWNGTERNGWNGMEWNGMESTRVQGNGMEWNAMEWNLPEWNGMEWNGMKCNGFNSNAMECNRMEWNGMEWNGMELTRIEWNGMEWNGMEWNGMEFLQTEWNGKEWNQHEWNGMEWNGMEWNGMEWKGMIRNRMEWNEMEWNGMEWNGMEWNGMESFRWNGKEWNQPEWNGREWNGMETNRMESTLVEWNGKDWNGKEWNGMEWNGMEWNGINASAGEWNGIEWNGMECNGINPSAGECNGTQCKGKESSGMEWNGMEWNQPECNGMEWNGMEWNGTTRMEWNVMESKGVEKNQSELQWNGMEWNGMERNAMEWNAMERNLPEWKGMEWNGMEWNAMDSTRLQWNGIERNGMEWNGIKPNRMEWNGMERNGTELNGTEWSGMEWNGFVWNGMECAGEWNGMECNGTESSGMEWNGMEWNGINPSTMEWNGMEWNGMEWNGMPSNLMEWKGMESTRVEWNGMEWNGMEWNGMIRNRMEWNEMEWNGMEWNAMEWNGIVPSGIGGNVFEWNGKEWNQQSGMEGNVMEWKLIEWNQPEWNGMERTGMEWNGMEWNQLDCNGMEWNGMDWNGMELTRIQWNGMEWNGMEGMEWNGMQWNGIIRNGMEWNGMQSNGINSIAMEWNGMERNTLESTRVEWNGKDWNGVEWNGMEWDRINSIGMEWNGVELTRIELNGMEWNGTERNGMKWNGMEWNGMESTRLQGNGMEWKAMEWIQLEWNGKNGINTSGMAWIGMEWNGINPSTGERNGMECNGMESSVMEWKGMEWNGMEWNGINSIAIECNGMELTRIEWNGMEWNGTERNGMEWNGMEWNGKEGNGMEWNGMEWNGMESTRVQGNGMEWNALEWNLPEWNGMEWNEMESTRVHGNGMEWNALEWNRPEWNGMEWNGMKCTGFNSIAMEWNIMEWNGMEWNGMELTPIEWNGMEWNGMELTRIEWNGM

SEQ ID NO: 933085 - protein, 187 aa, Homo sapiens
MEWNHPQWNGMEWNGMESTPVHWNGVEWNGMEWNNPNGMEWNGINPNTMEWNGMQRNGVEWNGINPSAGECTGMVCTGMESSGMEWNGMEWNGMEWNGINSIGMEWNGMEWNGMGLTPIEWNGMEWNATQCNGMEWNGMVSTPLHGNGMEWNGMESSGTECNGMEWNQLYCNGMEGNGMESNVMEWN

SEQ ID NO: 933086 - protein, 2744 aa, Homo sapiens
MEWNAMDSTRLQWNAIEWNGMEWNGINPNRMEWNGMERKGTERNGTERNGMEWNAINTSAGEWNGMECNGMESSGMEWNGMESTPLQWNGMEWNGIEWNGINPNRMECNRMECNGTEWSGMEWNGINPSTGEWNGMECNGMESSVMEWKGMEWNGMEWNGMEWNQLDGNRMEWNGINPNRTEWNGMERNGMEWNGMELNGMECLQTKWNGKEWNQHEWKGMEWKGMEWNGMVRNRMEWNELEWNGMEWNGMEWNRSDGMEKNGINQSEMEGNGMEWKLIEWNKPEWNGMERTGMGWNGMEWNGMESTLNGINPSVMEWKGLEWSGMEWNGMEWNQLDWKGMEWNGMEWNGINPNRMEWNGMERNGMEWNGMEWNQPDCRGMEWNGMKWNHPEWNGMECNGMEWNGINPSAMEWNRMEWNAMEWIQLEWNGKNGINTSGMAWIGMEWNGINPSIGEWNGMECNGMESSGMEWKGMEWNGMEWNGINSIAIEWNGMELTRIEWNGMEWNGTEWNGMEWNGTERNGMEWNGMEWNGINASAGEWNGMECNGMDAGECNGTECNGMESSGMEWNGMQWNGIFRNRMECNAMDSTRLQWNAIEWNGMEWNGINPNRMEWNGMERNGTERNGMEWNGIVWNGMEWYGIEWNGKNWNGMESNGMEWNGMEWNQPECRGIGIGENVFEWNGKEWNQPEWNGREWNGMETNRLDWNQPEWNGMERTEMEWNGMEWNQLDLEWNGFNPSAGEWNGMECNGMESSGMEWNGMECKAMESTRLQWKGMEWKGIEWNQPDWDGMERTGMEWNGMEWNGMECNGMVWNGMEWYGIEWNGTNCNGMEFNGMEWNGIESTRVQGNVMERNAMEWNHPEWNGMEWNGMESTRVQWNGVEWNGMEWNNPNGMELQWNGMEWNGMECLQTEWNGKEWNQHEWNGMEWNGMEWNGMIRNTMEWNEMEWNGMDWNGMEWNGIVPSGIGGNVFEWNGKEWNQPEWNGREWNGMETNRMESTRVEWNGKDWNGKEWNGMEWNGMESTRVQENGMEWNGMEWNGINPSAGECNGTECNGKESSGMEWNGMEWNQPECNGMEWNGMEWNGTTRMEWNIMESKGVEKNQSECNGMEWNGMEWTGLEWNGMECNGMESTRVQWNGMDWNGTEWNGMEWNLPEWNGMEWNGMECNGFNSIAMEWNKWNGMNWNGMESNGMEWNGMESNRVQWNGVEWNGMEWKNPNGMESNGEERNGMEWNGMEWNGMESTRLQVNGMEWNAMEWIQLEWNGKNGIKHEWNGMDWNGMEWINPSTGEWNGMECNGMESSVMEWKGMEWNGMEWNGMEWNQLDCNRMEWNGINPNRMEWNGMEQNGTEWNNGMEWNGTERNGMEWNGMEWNGMERNEMEWNGMEWYGMEWNVQGNVMERNAMEWNHPEWNGMEWNGMEWNQPECNGMEWNGMEWNGTTQMEWNVMEIMEWNATEWNGMEWNAMAWNQPEYNGMEWNGMEWNAFKPNGMERNGMNTSGMEWNGMEWNGTIRNRMEWNEMEWNRMEWNGMEWNGMEWNGMESGMERNGINQSGMEGNGMEWKLIEWNQPEWNGMEKTGMERNGMERNGMEWNGKEWNGMEWNGMEWNQRECRGMEWNGMQWNGIFRNGMEWNGMEWNGMESTRVQWNGVEWNGMEWNNPNGMELQSNGIEWNGMQWNGFNLNGMERMESTRVQGHGLEWNGMESTRVQGNGMEWNAMEWNHPEWNGMVWNGMEWYGIEWNGTNCNGMELNGMEWNGMESTRVQGNVMERNAMEWNHPEWNGMEWHGVESTRVQWNGVEWNGMEWNNPNGMECNGEMEWNAMERNGTEWNGMEWNGMVWNGMEWNGIEWNGTNCNGMELNGMERNQRECRGMELNRIYPNVMEWNATEWNGMEWNGMQWHGINPSTMEWNGMEWNGMEWNGMPSNRMEWKGMESTRVEWNGMEWNGMEWNGMEWNQRECRGMEWNGMQWNGIFRNGMEWNGMEWNGKEWNGMEWNGMERNQRECRGMGWNGMQWNGIFRNGMEWNGMEWNGINPRAMEWSGMEWKQPEWNGMELNRINPNVMEWNGTEWIGMEWNGMEWNGMQWNGINPSAIEWNRMEWKAMEWIQLEWNGKNGINTSARAWIGMQWNGINPSTGEWNGMECNGMESSNGMEWNGTERNGMEWNGMEWNGMEWNGMEFTRIEWNGMEWKGMEGKEMECNQPECRGMEWNGMQWNGIIRNGMEWNGMESAREWNGKECNGMESSGMEWNGMECKEMESTRLQWNGMEWKGIEWNQPECNGMETTGMEWNGMEWNGMESTRLEWNGMEWNGMELTRIEWNGMEWNGMEWEWNGMEWNGMEWNGIIRNGMESTRLQWNGMEWNGIERNGMELTRIEWNGMEWNGMEWNGMEWNGMESTRVQGNGMEWNAMEWNHPEWNGMEWKGMEWNGINPSAGECNGTECNGMESSGMEWNGMEWNGMESTRVQWNGVEWNGMEWKNPNGMECNGENGMEWNGMEWNGMEWNGINESAGEWNGMECNGMESSGMEWNGMEWNEMQWIQLDCNGMEWNGMEWNRSEWNRRECIRVEWKGMESTRVEWEWNGMEWNGMEWNGINPSAGECNGTECNGMESSGMEWNGMEWNGMEWNQPECNGMEWNGMEWNGATRMEWNVMESKGVEKNQSECNGMEWNGMEWNGMECNGMESTGVQWNGMEWNGMEWNGMEWNGIECNIMESSGMQWNGMECNRMECNGFNSIAMEWNRMEWNGMEWN

SEQ ID NO: 933087 - protein, 469 aa, Homo sapiens
MEWNATEWNGMEWNGMEWNGMEWNQLEWKGMEWNGKEWNEINSSGMEWNGMDWNGLQWNEMEWNGMESIIPSGMEGHVMEWKEGNGINPIGMQGNGMEWKGMEWNQLDCNGMEWNGMEWNEMEWNGINQRNGINTRAGEWNGMECNGMESSGMEWNGMKSTPLQCNGMEWNGIEWNGINPNRMECNRMEWNGTECSGMEWNGINLSAGEWNGMECNGMESSGMEWNGMEWNQTECNGMQELNRINLNVMKCNGKEWNGMEWNRMEWNGMESTREQWNGFEWNGMQWNGFNPNGMERNGINPKWIGTKWNGMEWNGMEWNGMEWSGIKSIAMEWNGMEWNGLEWNGMEWNGMEWNGIKWNGMEWNGINPSAGEWNGMECNGMEWNRMEWNGMEWNGMESTRVEWHGMERNGMEWNGINSSGKEWNGMEKNGMKSTRVEWNGIEWSGMDCNGMKWNGMEWNQSFRVEWKGM

SEQ ID NO: 933088 - protein, 145 aa, Homo sapiens
MNKDSHSKTCKETILVIQARDDGSLDQGSSSGIDEKWLKSGYILKMEPVGFPNTLDMEYVRQKGHDSGNLVFGLCYLPSSIETIGGGAVKEWAKCTYTNALNRILHCSEDWKPRRVLIKSATRPYIPIFKVSPPENSSSSLMTPI

SEQ ID NO: 933089 - protein, 140 aa, Homo sapiens
MICYGQRSQCLRFPEAAADMVLTRAPAQGSLELELWAWRHEKTSVLGTVEHHTECEVAFFHQVFAGLTVHWERSLPKEREGLASDKPLTAHTLLTRFGREGPLLPLLVLVLFEFCACTDYCFIPTSCCPHESTHTEKPRN

SEQ ID NO: 933090 - protein, 188 aa, Homo sapiens
MKESLELLRDWLNDCDQNADSGMDSEVQAAKVSDGNEELIGNWSKGHTCYVLAKSMAALCPCPKDLWKFELKGDDLGYLAEESSKHQSIQDVTRLLLTIHWQLAGCAWKSHRHSTPTRESSCGGCTLQSQMGGVAQGPGNPSLHQCTLDAAYGVRGDYFGVLRCNDYLADFELFMGPVTPVFWLISPF

SEQ ID NO: 933091 - protein, 136 aa, Homo sapiens
MGFPLWSGPSAAGLLEFAGGPLQTLFVWVSPVEAIGQQRLLPIPSPGSFVQEGHPPDASQSSPQSSSAVLEIHCSHQSQQTGTFKSAEAAPTAARCKDCGKSIVSGPECTTPHGTVLHSFPCLEEGVPRPFAIPRH

SEQ ID NO: 933092 - protein, 166 aa, Homo sapiens
MPRGIHLPDLNTSQQVLPPALEMTIQHEIWTHDRDKLLLVSLHSTPCRREHISKCVWDLASHSRIQQEQASCGADGQIRHELVSAGSSWQLWAPAGARSVWNPWLEPEGVFHYSPNSTVCRLTAQLTPCHITWGGCPLPVTMNSWCDSIFGYPQSMCPELLFDVQG

SEQ ID NO: 933093 - protein, 148 aa, Homo sapiens
MIPASLELLVNFLGTNILNYFPLTTAPKGEIHCHDLITFRQEPSPTLESTIQDEILMTREQYILATQQNNLPRTENAQLYPVGIYGWRKRCLYFFVLLLLVTMIVNLAMTIWILKVMNFTVKYNYMVHPNMYLFSSINVPAFPCPFEV

SEQ ID NO: 933094 - protein, 186 aa, Homo sapiens
MLSPLAFNTTQCWKLWPVHTARQGNPRVQHNTVLEALAGAHRETKKPSRSTQHSAGSSGRCTKRDKETLAFNTTQCWKLWPVHTERQGNPRVQHNTVLEALAGAQSKTKKPSRSTQHSAGSSGRCTQQDKETLAFNTVLEALAGAQQDKETLAFNTTQCWKLWPVHTERQGNQRHTHQKGRHALVP

SEQ ID NO: 933095 - protein, 165 aa, Homo sapiens
MQSHSRVISHAGCLTQMYFLVLFACIEGMLLTVMAYDGFVAICRPLHYPVIVNPHLCVFFVLVSFFLSLLDSQLHSWIVLQFTIIKNVEFSHFVCDPSQLLKLACSDSVINSIFIYFDSTTFGFLPISGIFLSYYKIVPSILRISSSDGKYKGFSIRGSHLAVVC

SEQ ID NO: 933096 - protein, 194 aa, Homo sapiens
MALLTVPFPLGVPCRPQLDKDVFGFHHGGAGNWIIHPKKSGQRKTRFSEEGDIEPRELTKRQILELWRRQLSLGLARSVDLGTPQKGPRGRLTERRRKAHRMLKLYNGLSKGEAVGLPAGTDPLDPTDLNGAHFDPEVYLDKLPRECPLAQLIDSETDMAQQIRALDSDMQTLVYENYDKFIPATEIDKQHKTV

SEQ ID NO: 933097 - protein, 232 aa, Homo sapiens
MRWAALKRDTTLGLGFAFTSLCLLLLGSVSRPGNGPDGSSGSVFQTAALGIPAQPLHPDLRGGTVNFNLIVSGNELSGKGSISQLALLTSGCRTLVAMLCGSGQLKRDGEAPSKGSGGWRHVLFPFLPALPPGMGEWRGSALMARWGRLVHEDESGYQGDGTGDRGAWDALTLRAGAAACRLAVVCEDPLFGLSGPSIAESNPQWNCLHLFHTTQLLHNPSRIPPLIPSHSC

SEQ ID NO: 933098 - protein, 169 aa, Homo sapiens
MRARTSKFFSSCRLAVRSSLLMIIDGLLPSVLPFLGQLHPQGCGLGYTCEQKSWWFRTRRHQMDPPSPIRYANLGETDQKPTVNELEMITLSWLNAEEGIQSLGEVGMQERIRLSRHPHSPWEGPELTPFPTIMGNACERGAPEPLMSCDCSSLWATPYSGETSTQWEY

SEQ ID NO: 933099 - protein, 143 aa, Homo sapiens
MSANADSFYFFFSILYIFDEFLSCSTIHCSKSPNLGSAHKFWTVFVDCGSDGSLIFGVFAVLFGLLGFSGSLGAPTGPCWCGLWIGKGFTGPAARRLLVEEGCGGTHVPVSWAAQAPLVRAGEPQAMDNRVSLSSCLQWQAPL

SEQ ID NO: 933100 - protein, 146 aa, Homo sapiens
MVVLLQGKGQHNMRQGPRTAELCTVFRRGCELLLCRVGRCFRALQAPCRPLLTVHGLHLPYLLSCPISCSWLWFPEGSRLHRLPCVLTLCPDLLTSTGVLLALWVVRGQESHAVHGEEGGSASSHLAGGSGPGVGKPIPPGCCSVL

SEQ ID NO: 933101 - protein, 159 aa, Homo sapiens
MLVLYLSLAISYQPAVPGKLFPWEDGCGQGFLGKAYVLFPHAPLQGVFSRCDSETAHFNGGHSTTPTCLLPLDSEVSQAQVAHGGRLPEVDVMLGVQGGSVCVPCKQSLVAVNRVAFCGAATPVSGCRLSVCEGNSCSWPKPTGLAREGLSHTLFFLLG

SEQ ID NO: 933102 - protein, 148 aa, Homo sapiens
MLNQPCIPKLLVMMSYPVYIFLDSICCISSNDCHTYLQEYWSVILFPCNIAGLGFRKVVTSLSKFGSVASSFIYYQYSAKNQGDPSVMLFPTSSHLTLHELPSESQPSEKLSLFMHFGLGTVSKGKKPLTRCQADAGTMPWTFQPPEP

SEQ ID NO: 933103 - protein, 147 aa, Homo sapiens
MHTIILQPDNEHRTAIQKSAWLRRLRTCPDGTCRFSFPGAAGTGGAAPAAGQRPACQPHTWALVQALACSTSCPAAGQGRFSAALPLSGMGSAGAGCRGCTHHAHIPRRNRQGPWKYGRCTHFLIHTIPIKNTASGPRHEFGLLELT

SEQ ID NO: 933104 - protein, 135 aa, Homo sapiens
MRWEMSTVYLKSSRNRASHLNSPYTTIKPSMSSGQKPQRLKGDKPTKMRKNQCKNPENSKSWNALFPSNDHITSAASILNWAEMAEMTEIEFRIWIGRKIIELEEYIETQFKKPRNHDKTKQELTDKIASIEKRI

SEQ ID NO: 933105 - protein, 145 aa, Homo sapiens
MAAGLSHAVLVIVNKSHCCAAGVGPTEPGKGENFLVCRLLRRWEKLSISAGVSHFSRYPVKWPCIGGNVFEKVLQSLHIGFAGNILGPCGSRYETLVYGAVLEHMFTEVVPEPWSAGSGMALGSTGVCLDPRFCGACVHRGLPRT

SEQ ID NO: 933106 - protein, 181 aa, Homo sapiens
MKVHQDSARRDRWSHPTTILLHKSQSSQATLMLQEHRMFMGEAYSAATGFKMLQDMNSADPFHLKYIIKKIKNMAHGSPKLVMETIHDYFIDNPEISSRHKFRLFQTLEMVIGASDVLEETWEKTFTRLALENMTKATVGLPSHSKWANPPRVLGMPAAAPGTQVMLGMPSLVGYQAISIQ

SEQ ID NO: 933107 - protein, 148 aa, Homo sapiens
MAARTTENTAEVCLTCQINIRAMTEMEMYLCLRRREKAVSSFPQGHQYKAERSPARALAQSAVTQRLTKFLSNFAGMVWVFRKKKSSKLNVLLLRETHAERKETHKALMTSFTKKVLRNCQRCQWTQLRSLQLFVNNSLSPYLAQRLH

SEQ ID NO: 933108 - protein, 150 aa, Homo sapiens
MINVKLFNFLKTGHLNIQSVETKEKILKNEAHVQDLENSLKKANLRFIGHKVVMKEIGEESLSKGIISDNYPNLEKEMSIQVQEGYKPPDKFNPKKTISRHLKVKPPKIKGKEIILKNSNKKKQITYNEAPVHLAENLLVKTLQTRRELG

SEQ ID NO: 933109 - protein, 141 aa, Homo sapiens
MDLPFWGLEDGGPLLTAPLGSAPLGTLCGSSNLTFPFHTALAEVLCDADTGLEVGMRIETAPMEKLSHPGNMKMKEGAIELSPCLPALWLDQPSTGANFTWHKDGVLITTARKTYKNKVSQNVISNVISSILPVPRFWQKL

SEQ ID NO: 933110 - protein, 194 aa, Homo sapiens [sequence omitted]

SEQ ID NO: 933111 - protein, 152 aa, Homo sapiens
MTAQISMVVKRAVVNAKMSDDDQDEFDWLQRQVVEIFLDIFLEVANPICGKLLMLRSLEEEEESEKQPKKKCPVRSKRSGHWSVISQGQPTGRGWMQDHLGIPGQEANASQGQFFREEFQCEPWAVEEIDKFLDTWTLPRLKPEEIENLRTM

SEQ ID NO: 933112 - protein, 160 aa, Homo sapiens
MITEYVSAWRCSSPTCCEPKLWKRLWNWVTGRGWNSLEGSVKDRKMWKSLEFARDLLNGFDQNADNDMDNEIKAEAISDGDEELVGNWSKGDSHYVLAKRLVAFCPCPRNLWNFELERDDLGYWVDKISKQQSIQEVTCVLLKAFSFKRERAQKLGKFAA

SEQ ID NO: 933113 - protein, 163 aa, Homo sapiens
MARVGQRKGNVGLEPQHRVPTGAQSSGAVRRGPSSCRPQKGRSTNILHCVSGKAADTQCQPVKAAKRGLIPCKAIGTELLKAVGAHLLHQCDLYSPTRTFENPVLTRSLLTARTIGKEQGMNLVTHRSRISKKTFRIKHPGNNQLRASHPFKSYKKQFTTCCL

SEQ ID NO: 933114 - protein, 154 aa, Homo sapiens
MGGTGGHYPKRNNSETENQMLHVSTYKRSKGILWELFYQGTNAVDEDSTVMTQSPPKGPVSKYHYNGDSISADEFGKCETGVEQMSRGIALERKFHRLHQPKFPFQPGQEIALDYGAKFSTDARTWKQGKRARAAAEMNGNMDPAVPCSYWLRR

SEQ ID NO: 933115 - protein, 149 aa, Homo sapiens
MWMCMACDGYVAHFFSILLLKPLGEHTDGQAVGLRSHGNVKLYIVPPVDGLLAYRHLPVCSPHPLDVQQLVCSSVDVFLLTSFELCPLGYDLHKRFSVPLLLCDTGSLEEAKIGYFPSLMSVRLWIQPPKNSRSFFNVSPLFMFSGKES

SEQ ID NO: 933116 - protein, 136 aa, Homo sapiens
MGGAAMKTSDMPWRHFPHADKKFSYHTGKILWRYNRIFKRRGLESCEKGRREETGRKKRGERKKERKQRGEERRGKEKRGKNRRKEKRRGEKMTEEKRGHDRYLAISASQPSLLRHLTSRHVNEPSRVFQSRRALK

SEQ ID NO: 933117 - protein, 142 aa, Homo sapiens
MGRAAVKVSGIPWRHFPHLYLRPPKPDFTVHITISILGTILRQHVSVGPDRRCPVQPNDCSQLCIELTPFRTSYKASLLVRNSISICFPEKGVMSPSLMKLSLVGYEILGWNFFSLTMLSTSPQSLLACQMSAEWSTGSLMG

SEQ ID NO: 933118 - protein, 214 aa, Homo sapiens
MDTQWDLNSDHGDWSHKRLLTCVLEGLRRIRKKPMNYTMMSTIIQGKEENPTFLERLQEALRKYSSLSPHSLKGQLILKYKFITQSATDIRRKLQKQALGPEQNVEVLLNLATLVFYNRDQEEQAIKEKQDQRKVAALVMALRQTNLGGSERTENGAGQSPSKAYQCGLQGHFKKDCPTRNKLPPHPRPLCRGNHWKVHCPRGQRLSGPEAPNR

SEQ ID NO: 933119 - protein, 224 aa, Homo sapiens
MVERTPDHRLDHSHSYKGQKLYKSRTGTVIWWGLNRTENNPFNKFPKLQTVWAHPESHRHWTAPTGLYWICGHRAYTKLPDQWEIEKIMSGPPKGSYSTIGLPHGHKTAQGIPNPHLHAQLDHTVKAVLEIITSETGRALTHLARQETQMRNAIDQKRLALDYLLAAEGRVCEKFNLTNCCLQIDDQGQVVKYIVRDMTKLAHVPIRFAIGLILDPCLENGFQL

SEQ ID NO: 933120 - protein, 165 aa, Homo sapiens
MPLHSSLPNKSETLSKEEEEEEEEEEEEEEEEEEEEEEEEEEEEEEGGGGGSSGGGGGGGGGGKKEEEEGEGEGEERRRKKKKKDYAPRENDLGLLFIKQKSLTEDAHTLTICLSDFFLTPVAVENGNICWSRQNWEEGMVRHPSWQSEECRNRNSQGLEVGIEQ

SEQ ID NO: 933121 - protein, 150 aa, Homo sapiens
MWASNYDILYSTWSIWLLMLVYVSRSSHALFFSSIRAQAQGDPNSVPEPLAGVIGDPARKPDSLKKDRQLPVPVLAADPPPRSSNGLHSRQLSPLPLVSLSRFPLRGCKNAGSMVGSLDPGGLGFATVMIESAKCPETESQMLFLIEWLA

SEQ ID NO: 933122 - protein, 160 aa, Homo sapiens
MNYCQGRSALAPTLTVFSCDSPKQVSLNLLQDITGLKTRCWSGLWFSSDARDLLSGSQGVGRIHFLRVGAKFLVFLLAFGKELPSSPRGCLQFFAPQGQKGGTDPDPKGGFLDLMQEGIQAETRCSVDISSDLEAWNQFFVTGLVSFLRMTELLPMTMHR

SEQ ID NO: 933123 - protein, 142 aa, Homo sapiens
MIGPRFLFQVFLFTPGDSTVSTMSDTVSHTCASDMILVTASATHFTWLQMTSLACTHQLPSAQVWGSKYYLRGDLAMVSLAKPRLYIYQKSKEHLKIKEASNAEETYNLLLDDVVLRTWKPIPIECQIGISLDVYKATSLTN

SEQ ID NO: 933124 - protein, 148 aa, Homo sapiens
MCLFAVAQGRRISRVPLTILSPVLCTQQMTNKCGYEEGMEDKDNSGNREDGSTDSVTWGFEKGDRYWLPLRSCGIMMLEQVSTFIHMQEVPFKYLISISNAFWHSVKCNVILVTCYFIMLQMYIEITIQLDYLRWSLDISRNVAEWVA

SEQ ID NO: 933125 - protein, 175 aa, Homo sapiens
MASSRVPYDQLTEEEKARFTDGSARYAGTTRKWTAAALQPLSRISLKDSGEEVLVTEGRMLLPRDTTIIALNWKLRLPPGHFELLLPLSQQAKKGTTVLAVVIDPDYQDEISLLLHNGGRTTNGPDPSGMKVLVTLTGKNPRLAEMLAEGNGNTEWIVEEGSHQYQLPLCDQVQR

SEQ ID NO: 933126 - protein, 168 aa, Homo sapiens
MTIPAYRGCAQTVFVSYSSPFDIKSHIPPHFNAKTLTQAKENANRMKRQPMEWEKISAYYSSNRGLISRIYKEIKHCNSTKNPNPIKNGKNDLNRHFSTEGIQMANKYIRKCSTSLIIRKMQIKTTMRKCFQFLPVQYDVVCGFVIDDISQKKTYKWPTNIQKNAKNH

SEQ ID NO: 933127 - protein, 180 aa, Homo sapiens
MYKAKANFIVNCHLSGPCGKEGESPGADAEFAFHPCRQGPTHTDPRGSEFQPRGNWESISPDEKKEEQHRPECKGTQRNESAKDRRIGQWRRRRTGRQAKGVRGLDGHGYKMPGQGQGRCSSTKSRIGVAARRSRGPFARAVSVECRERRSQTAVCLKKENWEVDRWKTSQEARICRLGW

SEQ ID NO: 933128 - protein, 351 aa, Homo sapiens
MYKEMNAVFLPANKESIQQPLDQGVILTFESYYLINIFCKSISALGIDSSDGPGQSELKILWKGFTIIDAKKNTHGAGQREVKPELQPLFMPVERPYYAPPLTPAPATQMPSTPGFVRYNPYSHLTYNNYRLEGNPGTNSQVTASYAITIPKPPKPPDKLLMPYPPEDPDDYDDGFSMKHTATAHFQRNHCLISEILSESVVPDVRGNDNQEKRRKYLESTDSFNDELKSLCGLKVEVDMKKIAAQSSIVPKEKQAASKGEEKKDDKNIPMEMEEARFEEMTESQQNSEEGTFNPEDKESGQEWVDSMAEEGTSDSNIGSDSNSTIVQEPPKDPIPEDEKKRVNLALFYVL

SEQ ID NO: 933129 - protein, 118 aa, Homo sapiens
MPNLLLVSHLVTIESNRAKANPYEILKQTFRKLIRHLPPLDFRYVRKNKYFFVTEGRCKVLVTIVCTKHTQLEPLQGTWGMGVWQGCEDGPWKWRSLHGIFSVSWEPGYSSPHASRYC

SEQ ID NO: 933130 - protein, 152 aa, Homo sapiens
MPGAISISPARLHSQPEEGPGLIFLFWTLIGPINSATTWALTSLGQAWVEFYIEGKKRDGSRCFPEGSVDSGGDLWTAAAAHYLAVWLCDTCQPYKEIPLTLESTLGEQNLSLRQIRDEGETLLFPPVAGSSGLGKCLFEHKVPVAFIHRKM

SEQ ID NO: 933131 - protein, 126 aa, Homo sapiens
MWNSCSEFDLQLSVPAWRCRKKLKTHNPCKDGNEYFSAKEEIEGPTHCLMISEKDDIWTHKHYNLWKMVSNFSTMMSEPWWEPQRESRGEKFLPFVSTGFYMPDTWELQRPLWVYLASRMKVDLCV

SEQ ID NO: 933132 - protein, 140 aa, Homo sapiens
MKKLMGSELVSVVWCDDAGIGTQMVESEFGSDIISTAWAAVVWCDDAGIGTQMVESEFGSDIISTAWAAVVWCDDAGIGTQMVESEFGSDIISTAWAAVVWCDDAGIGTQMVESEFGSDIISTASFWGRHNFSEFYLVVK

SEQ ID NO: 933133 - protein, 141 aa, Homo sapiens
MPVLIFEAWSWLPLLLLLLLLEPQLPEEPAVTAFPNKALAHETTKKETTPVNPWPVLVTIGNGGTGTPCLASMLFIFPGGHPPGQFLEDKTLHCLWWTSGWLGTTVSSPRTVLILREMLGLLRAWPERLLQNMFTWELHTA

SEQ ID NO: 933134 - protein, 151 aa, Homo sapiens
MQSGNPVSRGCLENDSLTLSIPLSSKVAREVWEFPLVLDHLYLALLFDEGRASKKGGQMTMAGHGGGEPGGQLRWCGCAMLERKAPRPGERARALEQKRGFLPSFLPSFLPSFLPSFLPSFLPPSLPPSLPPSLPLSLPPSLPPSLHSFNR

SEQ ID NO: 933135 - protein, 270 aa, Homo sapiens
MGFSFCLMKLPQTPGEVSLTGTLTCDQIVEGVVDGELLLFGKYGGQEKSSCFENSRIFRSPVPGTEDKDHTNNYYTIKGSVGTSEEPKKAPGERDPFFKLLPVPECEKAAVNENESYVGCKGCKDWALQNRERRMNGRGTAERSKSRASKNEMQSQSKSRPTPESQPSHFTCEPHYYRPGGGPEASNRSHSLRPCLTSWSIQIPSLTPREVTEQKAALLPAQVHTKHNLSGKLWRKWQKRYCRKLVVKREPQCYGNPETEAALFSEEGRA

SEQ ID NO: 933136 - protein, 201 aa, Homo sapiens
MCHGGLLHPINLSSRFEASHALGIYPNALPSLSPNPHNRPRCVVFPSLCPNVLIVQLPLMKMPCPVKRNLVRQSGYSCVEFYPVLSTVRGNPPAQASVMVDTPAHTKLNCPRLTSDCCAGSKNFKPVVLSLLDSLGVGPAERDHLDPWLQPPFQECEQFLSRWGSRCHSVGNAEITCLLCWSHWELQTGAVYIRPSCQILP

SEQ ID NO: 933137 - protein, 143 aa, Homo sapiens
MFKDPVWGSSLLGKTCHWLDYRVNRTQKESGGPGGPNTGLLPSLFILIHPRKAFFQYSQEYWKFSGNIGIFPEIFLIIQKPQPESEVSCARSSTASQQPVNGQSTQQSVNGRQTQKGTNNYFPVTLYTRPVLNSSDRYFLRRR

SEQ ID NO: 933138 - protein, 136 aa, Homo sapiens
MDFKPDALFRWELGVLDAGGIVLHVGETFHGGLKMDCGRLKEFKGKLEVEGNNFTEAALLQLLQRRTTPSVESGSSGQTYTKQGKIGPHKNRNRIGADAWFVLATSYIHSWIHDLIETTVSFVIGLCFVCFIIFKC

SEQ ID NO: 933139 - protein, 165 aa, Homo sapiens
MAERSTVCLHIHFVYSFPRSFLCSLLPVQPGFPYGLQNSTQDLETTLQVASPFWIKPMHISHLLIDVSCLPKMYETKLCSDHLGHMSSGPPEAVSFISKVERPEWNPGLFDSTFQGLLMSLSSSQYSVQHSQLEALSPGAFFTLVLKMDEHSLLFPVFLITYRTL

SEQ ID NO: 933140 - protein, 268 aa, Homo sapiens
MSKTSEEAEIDENVMNSEMQMKIETLIPAPPHVGRAASIAQKSKDSSKQAHSDRNSPQRIRSWRKSKRACLAITENWTSWGHIFHPQLDGNFQTGFMISHSGIKLSSGRCRILYPVFRGLVGAQDGHTVENKVCPESIQNTHCVGCCCLLAGEGPPGMATEDDLSSSRWGPLVLMLQILSTSPALGPNALIALIDSTGLRDGCYADVPSAIPGKNTSDGFMVEEARGNECGFGCERQKGTSHPENDMNECGRHGIEQLICKDGPELER

SEQ ID NO: 933141 - protein, 170 aa, Homo sapiens
MRGSKRRASGLYYSIACLCWCVAIRPGGTAINKPSVFRVRNREEGNTGKWDECQVDQRDTVMGVRCGIRNNMGARIEVWARNNGNCGRLNKETAAAAARRHDGWPKTVRSSCMDKKATGHNPGPCVRIPTAQPALWLWVMKKVGMSQRELGWGQFLNLSSRNGNRSGERI

SEQ ID NO: 933142 - protein, 159 aa, Homo sapiens
MMLSEILSYTLWKLTPTPLDLANSPQYNGAVSLFPGRGSAGREIIDTHKIVKAGSRGITAFSSYGATNALDIPAFIIKFSEVRVRPSHSLIDSPRATSSPASSIHDHKGLVPVKIAFLLIQPGGFSSDHHVHTGSQCSGLERLLHEKTEYMGFSIIHGY

SEQ ID NO: 933143 - protein, 373 aa, Homo sapiens
MEVRRGFHAILSPASLLDAGHPASSRSLGSTFQPVEQLPFHSRILCREDLKVARRPCSQHVLWAIVHEREKQCESQRSHRRRKRSTPWLSLWCPARNDACKCDCAFLGQFPEKVQVEWWAEVTHILSLGNEESVTSWLSTLEFSCQCQQEEPMQSQEDSYNRPPRLTGRLHCACSSIGQTDVAACTPREQFTWSLLEIQIVSPLPGFTESGTQFDRPCSKSIPPPHPSPGEDPCTPLPSLRARCPSTAISCALHSQPETVEMELKPSDHVKLIHYYEKNMRKSNPLDSITFHPVPPPMTYGNYYNSRKKCNKNSYYKKVTSGPSYIVNLLTLGKAAPWCDPVHRLAAVGQERRDDEKEGMEIAQCIMCQENLQ

SEQ ID NO: 933144 - protein, 137 aa, Homo sapiens
MARAHLDRGGEGVLVPDTEGIDAGQVSPKTGAFPGRVLSFTQERIPGQAGGVKQQLELKRLCTEAAERFLLAEQGYPIGNVPDSVSHFIQLPKMKTFMKMSTFAANWPEVKVGLETPEIAAGVRILGIFGSSDDCEF

SEQ ID NO: 933145 - protein, 157 aa, Homo sapiens
MTVTAYEHGLDNVTEEAISALVYAVENHPKDILTSVVSRRKAYRLRDDHFKYAFGTFTAPCAGQNPASHPPPDEAEQQAAFLLACSGDTLSASLSAANMYELFEALRVHREVIPTHTVYAVNIERIIMKVWHPNHEELKTKFTTSAWQPRRGFCCAK

SEQ ID NO: 933146 - protein, 151 aa, Homo sapiens
MESYSHYDPHLTPPGPTCSSGPSAPVCMVDSNFPGGSMGCTRGLSFFTLLFLSGILTGNILDQESPVGHRPLPVCSLLGTRPHNRRWRPSVKEAVSVRQGKKPSPGTSAGTLMSDFKPPKLERMGIYEHGPSPDTKSATNWTLDLQLPKRA

SEQ ID NO: 933147 - protein, 139 aa, Homo sapiens
MEKLLIPRLHKICAEEGDWVLSSHGATVTTASSSDSSPASPAPLPKHHCNRPGSRCPPAGDMQMMPLVNGIDVERLNAEGDTSFPARGHQAAVCVWENVYVIVTLNPLPTAQFQSFAYIPYLYEYPNSLKPSRVFQGEV

SEQ ID NO: 933148 - protein, 143 aa, Homo sapiens
MHLLEKDTPFQRGQSVPGREVDQRLGEAHNYLLQNAAGILSSCLKREGVATAQSPHTCEHRPSVSKAFSYDLKMSIAAEQPLIKPSDLMRIHSLTREQHGGNHPPDSIASTWSLPWHVGIMGITIQDEIFGGDTAKNITASFS

SEQ ID NO: 933149 - protein, 138 aa, Homo sapiens
MSREELWPFREPRPPGSLSQGCDMLDGCSRSHLQYIWSSHSLVQSWHQCLAHHSSQHAGPHASLLTLPLPLCTWLVLGRHGIQAGSTSEAQSTGTTAGQNEPSECEQNSSRGAAIHGSFWLAKQHMEDSVTLALDPQW

SEQ ID NO: 933150 - protein, 140 aa, Homo sapiens
MGLNWEGPLIHRLFAINAVGPRYWHVPHLQPNLRLEDSTFTGFKTCLYRGLAVPFLSSSSEGPTVTLEYACTVVCAGGPKTNPPRILRDDYTSFVMMHNSLCAGDMEGGQGSRGKGRAWSPVRAPPRPVPMDLEAMLFSL

SEQ ID NO: 933151 - protein, 216 aa, Homo sapiens
MIVRLPQKLTLLCNRTPELIPPVCNFVPPDQSLPIPFTPYPPPVSVCTLGIFVENQLAISEWIYSCVVSFVPLGLQGGGSRRRQCGLKATPALQRTNIYQVTSSNHHKGHSDYAHLPPSWPDFVHLSILISHPSLQSSHMSTNHKQLRDSPDPLHALSPGMLSMSFCLPGRLFLPSIWQACTLPEDSAPMSLLQEVIPAILGCDQEGFGHWDDFEA

SEQ ID NO: 933152 - protein, 174 aa, Homo sapiens
MLPVKWNITGIPYYTVGQLLRACLGPERVLTRADGFYKGHSLPSAPAPPPSLCVIFLPSCEEGHIYFPFCHDCKFPEACPDMRNCESIKHLSFINYPVSSSSLLHCENGLIQVGWDFPLLVRIIGKFLITKRLNYDVICGLGTDYLGLALFPLTAVSLTLWKMLRQLPILLGPF

SEQ ID NO: 933153 - protein, 140 aa, Homo sapiens
MTSRQNTAESTSNSFSPFPRRDMRTQALRCTGVRGVQTDSAYSEGDGMRNNTPKRRWLHFHREADKFQADTTMNIHQEKPDLTQQWMPWHCDNYSCFCKLFICLPPWLHFWNLGNRDNAFVMVLSPMLAESGAHEAVNSA

SEQ ID NO: 933154 - protein, 188 aa, Homo sapiens
MEIKLIPLFQSRYLSLLLLPEAPQPTGQLEENGNRKNKSSGFQNFIPEDGGLLCSADEVPGAFNELKRHLSEEASEVTDWFENNYVHSRIRRHLHNSDRHTQMKDPVETRRRWPFISQENKEASEETSPVDTLILGFLSPEFCEDGSDNFQAVHMSDQKLKLHQCVHYSTFKAPERVNRLEHSDISCF

SEQ ID NO: 933155 - protein, 2908 aa, Homo sapiens
MELTRMEWTGMERTRMEWTGMEWIERNGLERNGLEWKGNEWNGMEWNGLKWIRNEKNVMESDGMELNVLESSRTELNGMASNGMETKGMELNGLKLECNGMEWNGIEMNGMESNGMDWNGMDSNGIEWNNMEWYRMEWNTNGIESNGMASNGMDSNGMCSNGMESNGLISNGMEWKGMEWNGIEPNVMDFNGMETYRMDSKAMNGMDRYGKTSNGMELTRMEWTGMERTRMEWTGMEWIERNGLERNGLEWKGNEWNGMEWNGLKWIRNEKNVMESDGMELNVLESSRTELNGMASNGMETKGMELNGLKLEWNGMEWNGIEMNGMESNGMDWNGMDSNGIEWNNMEWYRMEWNVMERNGMEQNGMELNGMEWNGMEMECNEMERSGIEWNGIEWSEMEWNGRERMDWNKMKSNVEWNGMEWNGIEMNGMESNGMDWNGMDSNGIEWNNMEWYRMEWNVMERNGMEQNGMELNGMEWNGVDSNGMKPSGMESNGMELNGNEMEWNAVDTNGMDWNGMDTNGMDWSGMDTNGMEWNGMEWNGMEWNEMEWKGIEWNGIKSNEMASNGMDSNGMCSNGMESNGLISTGMEWKGMEWNGIEPNGMEFNQIMECNEMERSGIEWNGIEWSEMEWNGRERMDWNKMKSNVECNGMEWNGIEMNGMESNGMDWNGMDSNGIEWNNMEWYRMEWNVMERNGMEQNGMELNGMEWNGVDSNGMKPSGMESNGMELNGNEKSNGMASNGMDSNGMCSNGMELNGLISTGMEWKGMEWNGIEPNGMELNQIMEWKAIELNRMECNEMERSGIEWNGIKWSEMEWNGRERMDWNKMKSNEWNGLEWNGFEWNRMEQYGMVPNGMECNGTEWNGTEWNGTEWNGMEWNGVDSNGMKPSGMESNGMELNGNEKSNGMASNGMDSNGMCSNGMESNGLISNGMEWKGMEWNGIEPNVMDLNGMESYRMDSKAMNGMDRYGKTSNGMELTRMEWTGMERTRMEWTGMEWIERNGLERNGLEWKGNEWNGMEWNGLKWIRNEKNVMESDGMELNVLESSRTELNGMASNGMETKGMELNGLKLECNGMEWNGIEMNGMESNGMDWNGMDSNGIEWNNMEWYRMEWNNQMEWHRMEWTQMECARMEWIEWIDIKWNGMEGNGMEWNGIEPNVMDLNGMESYRMDSKAMNGMDRYGKTSNGMELTRMEWTGMERTRMEWTGMEWIERNGLERNGLEWKGNEWNGMEWNGLKWIRNEKNYGMESNGMESKGLERNRMERNRIDSNVMDCYVIDSNGMQSNGMHSNGMECNAMEWNRMECSGREWSGIKWNGMEWNGIERNGMESNGMDWNGMDSNGIEWNNMEWYRMEWNAMERNGMEQNGMELNGMEWNGVDSNGMKPSGVESNGMELNGNESNRMEWSNGMDRYGKTSNGMELIRMEWTGMERTRMEWTGMEWIERNGLERNGLEWKGNEWNGMEWNGLKWIRNEKNVMESDGMELKGNESNRTEWSNGMDRYGKTSNGMELTRMEWTGMERTRMEWTGMEWIERNGLERNGLEWKGNEWNGMEWNGLKWIRNEKNVMESDGMELNVLEIDSNVMDCYVIDSNGMESNGMQSNGMECNAMEWNRMECSGREWSGIKWNGMEWNGIERNGMESNGMDWNGMDSNGIEWNNMEWYRMEWNAMERNGMEQNGMELNGMEWNGMEWSGLKWNETEWMEWNAVDTNGMDWNGMDTNGMDWSGMDTNGMEANGMEWNEMKWNESNGMESNGMDSNGMCSNGMESNGLISTGMEWKGMEWNGIEPNVMDLNGMESYRMDSKAMNGMDRYGKTSNGMELTRMEWTGMERTRMEWTGMEWIERNGLERNALEWKGNEWNGMEWNGLKWIRNEKNVMESDGMELNVLEIDSNVMDCYVIDSNGMESNGMQSNGMECNAMEWNRMECSGREWSGIKWNGMEWNGMERNGMESNGMDWNGMDSNGIEWNNMEWYRMEWNAMERNGMEQNRMELNGMEWNGMEMECNEMERSGIEWNGIEWSEMEWNGRERNGLEQNEIERIDSNVMDCYVIDSNGMESNGMQSNGMECNAMECSGREWSGIKWNGMEWNGIERNGMESNGMDWNGMDSNGIEWNNMEWYRMEWNAMERNGMEQNGMEQNGMEWNGMEIKWNGIEWNGLEWNVLEWNGIEWIDINWNGMEGNGMEWNGIEPNVMDLNGMESYRMDSKAMNGMDRYGKTSNGMELTRMEWTGMERTRMEWTGMEWIERNGLERNGLEWKGNEWNGMEWNGLKWIRNEKNYGMESNGMESNGLERNRMERNRIDSNVMDCYVIDSNGMELNGMQSNGMECNAMEWNRMECSGREWSGIKWNGMEWNGIERNGMESNGMDWNGMDSNGIEWNNMEWYRMEWNAMERNGMEQNGMELNGMEWNGMEWKSNGMASNGMDSNGMCSNGMESNGLISNGMEWKGMEWNGIEPNVMDLNGMESYRMDSKAMNGMDRYGKTSNGMELTRMEWTGMERTRMEWTGMEWIERNGLERNGLEWKGNEWNGMEWNGLKWIRNEKKVMESDGMELNVLESSRTELNGMASNGMETKGMELNGLKWNGEESSGMEWNGIEMNGMESNGMDWNGMDSNGIEWNNMEWYRMEWNAMERNGMEQNGMELNGMEWNGVDSNGMKPSGMESKGMELNGNEKSNGMASNGMDSNGMCSNGMESNGLISTGMEWKGMEWNGIEPNVMDLNGMESYGMDSKAMNGMDRYGKTSNGMELTRMEWTGMERTRMEWTGMEWIERNGLERNGLEWKYGMESNGMESNGLERNRMERNRIDSNVMDCYVIDSNGMESNGMQSNGMECNAMEWNRMECSGREWSGIKWNGMEWNGMERNGMESNGMDWNGMDSNGIEWNNMEWNRMEWNAMERNGMEQNGMEQNGMEWNGMEWTQME

SEQ ID NO: 933156 - protein, 1256 aa, Homo sapiens
MESNGMESNGLERNRMERNRIDSNVMDCYVIDSNGMESNGMQSNGMECNAMEWNRMECSGREWSGIKWNGMEWNGIERNGMESNGMDWNGMDSNGIEWNNMEWYRMEWNAMERNGMEQNEMELNGMEWNGMEIKWNGIEWNGLKWNVLEWNGIEWIDINWNGMEGNGMEWNGVDSNGMKPSGMESNGMELNGNEKSNGMASNGMDSNGMCSNGMESNGMISTGMEWKGMEWNGIEPNVMDLNGMESYRMDSKAMNGMDRYGKTSNGMELTRMEWTGMEWTRMEWTGMEWIERNGLERNGLEWKGNEWKGMEWNGLKWIRNEKNVMESDGMELNVLENGIEWNGFEWNRMEQYGMVPNGMECNGTEWNGTEWNGTEWNGMEWNGVDSNGMKPSGMESNGMELNGNEKSNGMASNGMDSNGMCSNGMESNGLISTGMESKGMEWNGIEPNVMDLNGMESYRMDSKAMNGMDRYVKTSNGMELTRMEWTGMERTRMEWTGMEWIERNGLERNGLEWKYGMESNGMESNGLERNRMERNRIDSNVMDCYVIDSNGMESNGMQSNGMECNAMEWNRMECSGREWSGIKWNGMEWNGIERNGMESNGMDWNGMDSNGIEWNNMEWYRMEWNAMERNGMEQNGMELNGMEWNGMEIDSNVMDCYVIDSNGMESNGMQSNGMECNAMEWNRMECSGREWSGIKWNGMEWNGIERNGMESNGMDWNGMDSNGIEWKNMEWYRMEWNAMERNEMEQNGMELNGMEWNGMETERNGTEWNALEWKGVQWKGIEWNEIEWNGIERNRMEWIVMERHRMEWNGMERTRMEWTGMEWIERNGLERNGLEWKGNEWNGMEWNGLKWIRNEKNVMESDGMELNYGMESNGMESNGLERNRMERNRIDSNVMDCYVIDSNGMESNGMQSNGMECNAMEWNRMECSGREWSGIKWNGMEWNGMERNGMESDGMEWTGMEWIRMESNGTIWNESNGMASNGMDSNGMCSNGMESNGLISTGMEEWNAMKWNEVESSGMESNGVKWNGMDAKGMDWNKMKSNGRNRTERKEMERNGMHSNGKEIDSNVMDCYVIDSNGMESNGMQSNGMECNAMECSGREWSGIKWNGMEWNGMEWKGMEWNRMEWTGMEWIRMESNGTIWNEWNAMKWNEVESSGMESNGVKWNGMDAKGMDWNKMKSNGRNRTERKEMERNGMHSNGKESNGRESNGMKSNGMESKGIEWNGWLWKDIEWNGIDSNGMDWNGTDSNGMDWNGMD

SEQ ID NO: 933157 - protein, 1334 aa, Homo sapiens
MERKWNGSLWKDIEWNGMELTRMEWTGMERTRMEWTGMEWIERNGLERNGLEWKGNEWNGMEWNGLKWIRNEKNVMESDGMELNVLESSRTELNGMASNGMETKGMELNGLKLEWNGMEWNGIEMNGMEWNGMEWNGMDSNGMEWNNMEWYRMEWNVMERNGMEQNGMELNGMEWNGVDSNGMKPSGMESNGMELNGNESNRMEWSTNGIESNGMASNGMDSNGMCSNGMESNGLISNGMEWKGMEWNGIEPNNGMDGYGKTSNGMELTRMEWTGMERTRMEWTGMEWIERNGLERNGLEWKGNEWNGMEWNGLKWIRNEKNYGMESNGMESNGLERNRMERNRIDSNVMDCYVIDSNGMESNGMQSNGMECNAMEWNRMECSGREWSGIKWNGMEWNGIERNGLEWNGFEWNRMEQYGMVPNGMECNGTEWNGTEWNGTEWNGMEWNGMEMECNEMERSGIEWNGIEWSEMEWNGRERNGLEQNEIERIDSNVMDCYVIDSNGMESNGMQSNGMECNAMEWNRIECSGREWSGIKWNGMEWNGIERNGMESNGMDWNGMDSNGIEWNNMEWYRMEWNAMERNGMEQNGMELNGMEWNGMEIKWNGIEWNGLEWNGLKLNVLEWNGIEWIDINWNGMEGNGMEWNGVDSNGMKPSGMESNGMELNGNEKSNGMASNGMDSNGMCSNGMESNGLISTGMESKGMEWNGIEPNVMDLNGMESYRMDSKAMNGMDRYGKTSNGMELTRMEWTGMERTRMECTGMEWIERNGLERNGLEWKGNEWKGMEWNGLKWIRNEKNYGMESNGMESNGLERNRMERNRIDSNVMDCYVIDSNGMESNGMQSNGMECNAMEWNRMECSGREWSGIKWNGMEWNGIERNGMESNGMDWNGMDSNGIEWNNMEWYRMEWNAMERNGMEQNGMELNGMEWNGMEYRMESNGMQLYGMELNGMESNGMDQNAVDWNKMDSIVMDCNVIDSISNGIAWNNGMDRYGKTSNGMELTRMDWTGMERTRMEWTGMEWIERNGLERNGLEWKGNEWNGMEWNGLKWIRNEKNGMEGMEWNGIERNGTESNGMDSNGIEWNNMEWYRMEWNAMERNGMEQNGMELNGMEWNGMEWSGLKWNETDGMESNGMELNGNESNRMEWSTNGIESNGMASNGMDSNGMCSNGMESNGLISTGMEWNGMEWNGKWNGIEPNYGMESNGMESNGLERNRMERNRIDSNVMDCYVIDSNGMESNGMQSNGMECNAMEWNRMECSGREWSGIKWNGMEWNGIERNGMESNGMDWNGMDSNGIEWNNMEWYRMEWNAMERNGMEQNGMELNGMEWNGMEWTQME

SEQ ID NO: 933158 - protein, 1010 aa, Homo sapiens
MELTRMEWTGMERTRMEWTGMEWIERNGLERNGLEWKGNEWNGMEWNGLKWIRNEKNEWNGIEWNGLEWNGFEWNRMEQYGMVPNGIECNGTEWNGTEWNGTEWNGMKWNGVDSNGMKPSGMESNGMELNGNEKSNGMASNGMDSNGMCSNGMESNGLISTGMEWKGMEWNGIEPNVMDLNGMETYRMDSKAMNGMDRYGKTSNGMELTRMEWTGMERTRMEWTGMEWIERNGLERNGLEWKGNEWNGMEWNGLKWIRNEKNYGMESNGMESNGLERNRMERNRIDSNVMDCYVIDSNGMESNGMQSNGMECNAMEWNRMECSGREWSGIKWNGMEWNGMERNGMESNGMDWNGMDSNGIEWNNMEWYRMEWNAMERNGMEQNRMELNGMEWNGMEWNGVDSNGMKPSGMEPNGMELNGNEKSNGMASNGMDSNGMCSNGMESNGLISTGMEWKGMEWNGIEPNNGMDRYGKTSNGMELTRMEWTGMERTRMEWTGMEWIERNGLERNALERKGNEWNGMEWNGLKWIRNEKNVMESDAMELNYGMESNGMESNGLERNRMERNRIDSNVMDCYVIDSNGMESNGMQSNGMERNAMEWNRMECSGREWSGIKWNGMEWNGIERNGMESNGMDWNGMDSNGIEWNNMEWYRMEWNAMERNGMEQNGMELNGMEWNGMEMECNEMERSGIEWNGIEWSEMEWNGRERNGLEQNEIERIDSNVMDCYVIDSNGMESNGMQSNGMECNAMEWNRMECSGREWSGIKWNGMEWNGIERNGLEWNGFEWNRMEQYGMVPNGMECNGTEWNGTEWNGTEWNGMEWNGVDSNGMKPSGMESNGMELNGNEKWNAMKWNEVESSGMESMDEMEWNGRERMDWNKMKSNGRIVQNGKNGTEWNALEWKGNGMDRYGKTSNGMELTRMEWTGMERTRMEWTGMEWIERNGLERNGLEWKGNEWNGMEWNGLKWIRNEKNVMESDGMELNVLESSRTELNGMASNGMETKGMELNGLKCYGI

SEQ ID NO: 933159 - protein, 143 aa, Homo sapiens
MRDTDDPAPTEASLLLPFAYLNLPLSFCLPAQTDLWPFRHPCGPSTRDTGTIGWIPKDLPAAPMLCVGAFPKSHKHPGLEPVALALTLGVPCGLLGRETPPWDYPAPTQSSLLLLSACLNIPLSFCLHVLALLHPHCLPMEPS

SEQ ID NO: 933160 - protein, 146 aa, Homo sapiens
MPNRSPWVSAWALGVAALWSTSQDGARQPSTTVANISKADPDGVAACDRNTQTVSRSLLEAENAAPPRQLHRNRSPKVSLHRLRQNQKTTNGVWVFEDASQKEKEETGLGRGSPTFLGFYVGLSQMLNVTNYTASITSFDQPPVDF

SEQ ID NO: 933161 - protein, 138 aa, Homo sapiens
MHGKITPSYPTSAREKNEGKNGERRFTNAMKSGTATQWSYWAPGWLGSVCKESYDVICVQVSQLWILASALVEAYLSSDTPWVRLAVAAVGDGNVVPRPMELCSQGVMAVPEASLRSPVKWRRAGSHRPHPAPTQLTP

SEQ ID NO: 933162 - protein, 143 aa, Homo sapiens
MRQLLQEPADTLKKNLSEPSLEATPHCHINLEETQDSKKELATALSSCIISFMQFDDLTAELEAVSLQCVYLAENNQVTQQELSMKKVQQECEKLEENKKMLEEGIVNLMTHMEKYGRTCLKGCVEDRKKKPHLQCLGHNVRG

SEQ ID NO: 933163 - protein, 170 aa, Homo sapiens
MHHLEICPFIPRSLSRTAYSQCEITPGTGRPDHFCPIWDSSNECLPVGLADTVQPASHLKLCCSILFHPSSSFIDSGYSRPWVRLSTLLASDLTQQSPSGSGHRSAYVTPPPIPVSIEQRDRLCLGESKGREQESWPGNSENSSKSYLRPSRQYVYKFARTTVFLALGAL

SEQ ID NO: 933164 - protein, 136 aa, Homo sapiens
MHHDQVEFIPGMQGWINIHNSINVIHHINRIKDKKHRIISIDAEKLHLIKCNIYSQQKTVNKLEKPKDHQNTVRSDKQIHNDIIPEFCIQFWTDDYTRELANLCLSFLEWIDESSKNYHLKKDDEIDDADIIAHFS

SEQ ID NO: 933165 - protein, 129 aa, Homo sapiens
MPGFINTLVFTGSEVCPALEWKHNAWCKQSREDYQLCEFAANVWMELGLLSHSGVDVNKESQNLCFCSTLPSPRMSFTINVFCCILNLMKSFIVSHLYPTQHKAGICGKYRKITRNTIALVIQALFDSI

SEQ ID NO: 933166 - protein, 157 aa, Homo sapiens
MVGIWTVENTSLTSPLSICTRDYSSFSFYSRSRGTCTFVTQSIKETSFADTTTATKTPGVFSGSFYSLHRKPITETMSITKEEGSNWKRQRRRKGASYVASGKIACAGKFPSIKPSGLVKPIHYHKNSTGKTQCHDSITSFQIPPTIHGNYGSYNSR

SEQ ID NO: 933167 - protein, 159 aa, Homo sapiens
MSMPTRRALFQVWKVIEIDKQISLCAHWVATWVHEMRGHEGTAAVQRWAESKYVSIAPSQAHNANKNCSVCQQERQKLQMAMGQIPWWEGPKHSWQVRLMLVALGGYKWVLTGIDADSGLAFAYPVEDANAQSAVKESEQNILHTFAQAAVISSDQGTH

SEQ ID NO: 933168 - protein, 282 aa, Homo sapiens
MLLLLPLLWGREGVEGQGQQENGYTLQVQREVRVQEGLCVHVPSSFSHPQVALTNSPQVHGYWFQEGADTAQDAPMATNNPKRKVKKETQGRFRLSGNLQMNDCSLSIGDARRKDQGPNISSLGTMESGRPGNLTCSVSWALLTLIPKPQDHGTNLTCQVTLPEAGVTLTRTVQFNASFLEGQSLRLVCAVDSNPPARLSWTQGSLTLSPSQSSNHGLLKLPRVHARDEGEFTCRAQNPRGSQHISLSLSLQNEGTGVMLGVVGGAGATALVFLSFCVIFIV

SEQ ID NO: 933169 - protein, 157 aa, Homo sapiens
MILRVTLRILISLPRGTPGDLQLEGRAWADLVPSARPQTSTWRLQTHNPHCCPSLPAFGSTQREQLGQTRHPDLPTASLPAVPWDMCGCVFKGKDNCRGSEVGPLPAEGRFRTAPGCPSELCELGKYQYTYQTNLPDHGHKPVCKEELTPHYSENHR

SEQ ID NO: 933170 - protein, 178 aa, Homo sapiens
MQALLSLQLTLSWHWSYAVLCYLADGVRCAWCAHPAGHDGTHRTLPQYLSPADSRFIFPEGQRGGVQPALSMNDCLLGFLAGDIPSASPHPHEVTTPQGPGLDPPGPKPENCKQLTRELGEPGLPGEVGMRGPQGPPGLPGPPGRVGAPVSEGTCLGRGSTPSPGIKNQVLASSSTCI

SEQ ID NO: 933171 - protein, 156 aa, Homo sapiens
MFPGSGRLHAEFDLGSCIVSRMGPVLTHVSTEDWPRAMLQVPAHAGKTQSPALLRGSSSNPTLRYTGIEIRPLLPPAPELHSNSRSCVPRASVTPNATFMSSPCEGRSRGPTERADQQTNLQKHVKALGRGNAHMAESNRRTLPLLPGSSHEGAST

SEQ ID NO: 933172 - protein, 144 aa, Homo sapiens
MKEAAAAGVQGERGLDGFPGKPGDTGQQALISLRKGSFVFSECVIHAAEPAQLQMRKHGDRELRLVEEELSSNKHSPESQGRPGPSGVAGPQGEKNQNPENALEGGTSNYAEMFVVSVQGDVGPAGPPGVPGSVVTAETEKPQP

SEQ ID NO: 933173 - protein, 316 aa, Homo sapiens
MHLVNVSQCLGDWPRPTWDLSGTPQDSLSGRKIKSCQTVTHVKSRCKANIRLQEGKPVKEILGKRENGAQSSYVRMGSFPVVQSTEDVFPQGLPDEYAFVTTFRFRKTSRKEDWYIWQVIDQYSIPQVSIRLDGENKAVEYNAVGAMKDAVRVVFRGSRVNDLFDRDWHKMALSIQAQNVSLHIDCALVQTLPIEERENIDIQGKTVIGKRLYDSVPIDPRFQATGEKPWELSALSVLHTCMNQFDLQRIVIYCDSRHAELETCCDIPSGPCQVTVVTEPPPPPPPQRPPTPGSEQIGFLKTINCSCPAGEKKARP

SEQ ID NO: 933174 - protein, 143 aa, Homo sapiens
MRAPPLWMRLGAFRKGLDGGAKKFIASGSSGKACIQIAGKGTWLTINVFHIVFIASHLHLAFIDVVCAKPIEKPAGQQQASTILCSIICQANLHTIFWQFVCVCCADYHIPLYTGISNLTNDISVDNSNIGFFLVSASIDFLI

SEQ ID NO: 933175 - protein, 139 aa, Homo sapiens
MKGTWRFKSMTAPGPLAKVLTAHTPGRSNRTVSSDVTDTGRSDLWKQAWTGEQFWIFHGENKELEEGGSAEALRRGRTWDPHKDRLCFFHVLLGAKLTFSCVADSLGYMMENRISGLKCDTDVFATFEGDDVVMLQWLY

SEQ ID NO: 933176 - protein, 144 aa, Homo sapiens
MISFDSLSHVQITLMQEVGSHGLGQLCSPGFAGYSPLPQLLSQAGSECSFSRCMVQAVSGSDIIGSGGHSSTRQYPDGDSPSKLFQPLPITQFQSHWICLQQHNTLLGPIYSISPFHAADKDIPKARYWVNGDCPREQVNPVER

SEQ ID NO: 933177 - protein, 143 aa, Homo sapiens
MIPKAKISWTSLKLKTSVLPRMSSSRKLKKIIKKVKRQSTEWEKIFANHISHHGMISGIYKELIQLTNKKINNKILNMDKESEQTFLQRRSIFTLAKKWKQPNVHQLMNGLIKCGIGIQRNTIWNIKRNEIPIHAVTHLNLEN

SEQ ID NO: 933178 - protein, 159 aa, Homo sapiens
MCLTCSRSPRHELESLSPKLLVSALKIWIEFWPERKALGYPRHSIFCTKIHRGELSTHTDLFPKTSKQVGDSKQCLSPGQAQSGHSEKVQMTKVMHRHPSLLLQLRWSLFLGLYTGLENGYSRLGAVAHACNPVIPALWEAKANGSLEVGSSRPAWPTW

SEQ ID NO: 933179 - protein, 138 aa, Homo sapiens
MSPKHKSRDAGNWDMPKRSHKVFPLGKKVKVLDFIRKEKQSYAAVAKIYRKKESSTCEIVKKEKEICASFAVTPQIVKDKPIRPFLRPSKARSIGVTVIGEQVSWEVRVGNRGSFLLPETDVELSGSSASRLSFPFSR

SEQ ID NO: 933180 - protein, 235 aa, Homo sapiens
MSKSESPKEPEQLRRLFIGGFQHQAFRREFWVCHYAAAEEVDAATNARPHKVDGRAVEPKRAVSREDSQRSVAHLAVKKIFVGGIKEDTEEHHLRDYFEQFGKIEVTEITTGRGSGKKRGFAFVTLDDHDSVDKLVIQKYPTVNGHSCEVRKVLSKQEMASASSSQRGRSGSGNFGGGGGGDFGWNDNFGHGENFSGYGGFGGSHGGGGYGGSGDGYNGFGNDGSHFGGYNDFGN

SEQ ID NO: 933181 - protein, 133 aa, Homo sapiens
MDSTKMKDQDFGELKTRTATVRKSQILVHRHLIIYAIVIEKLIFEGLNASPNGESLELTEGNSAWGNTLISHLRKGVPCPKTVAKKEKAGGMLKEGIVVIGEDSSMRVIAPENLPVGQDVEVEDSDIDDPDPV

SEQ ID NO: 933182 - protein, 136 aa, Homo sapiens
MWLPAEEADILRFHTHSCTELEGERGETQLGGQGLISVLQGVCSELLGHQYQPVPPSEEKEKEDNGTQKNKNDKKRSVSSMRLKNPIQIWQSMVISENDTHFEGCSFSQTSVRLRTSPTADMIDQRKHLALSEVHD

SEQ ID NO: 933183 - protein, 284 aa, Homo sapiens
MWIFLTEQRAGGRGIDLPREVPRSEAVTLTVKVCGFTPKVSKTMNPPEGRSSGHIWTSEGTNSRHTIFKNCNTHSEGQSNFSPKWSPSSCATATVSRMPTLGSPPSFTPPPAPGMPPVNPLAPDMVGPGVIVDKKIQKKMKKFPKKYLGLQMCATDGSSGPSGAATAITPAAAGKAREGGGQPTILETTMMGPATTECWGHRRSLWQHRPCPECQRRPSEGLEPLSQETREHDWVPGSMEPVGIGDKWELCPFQVGRAGAPQVQLQIPKPWLKLRHPCSLGSWE

SEQ ID NO: 933184 - protein, 143 aa, Homo sapiens
MLGASQQCLSHPRSPQGCPRRAVKNQTLEKSACVSHGRPPQVKTNCRVVGVGHRNFKVCPGWAITPQALEHDDYVSQKAPKAKTGQQNGVVRPQGPMGTLRQAEGRCGQTTRNAGSPPRRPLPSQKPPGLSWAGCKPPDFGEG

SEQ ID NO: 933185 - protein, 140 aa, Homo sapiens
MGARALGSIPGCLFLSKQDTKGSGKAAESRGAHPGLDLQPGIWPRVTVWGRAPMGGGGATDMPMRDGRNSGAFEADRGEKYQGLSGVNESLTQGPHGPWWGHKRGCVGRGPPRVTVWPQCGLYGWGETQGYVEAGRGEKR

SEQ ID NO: 933186 - protein, 167 aa, Homo sapiens
MNGLLLLAFRHDYEAYTATWNYPKVHYIILMPLHPRSLAPIYKKERGLMDSQSYMAGEASQAMGRRQRRSKITSYMASATDICIFTICYICQMYHHHLIHFIHHHQIHHHLIQSNDAIIITVSLQHFLSAFRFQGTPLTGTPDVYKKLLGSKHIKDWINMNSIFYNT

SEQ ID NO: 933187 - protein, 129 aa, Homo sapiens
MLSGKCHLLAGGQPAQKQSIKPPKLGTFTESIVPTPPPPLEQALVSMAETHRQFTSQDSVQTTLSISPKLGRLAGWLDLEEATSTGKGGEYYIKGIPHGTKESEQQPSALDLPSDRAYPNEKETENQPW

SEQ ID NO: 933188 - protein, 145 aa, Homo sapiens
MGCRFHSEQIRKLKDMTQKVGGQRDFLSPDLGKMFDGVHTQHSSHWLHHSHTKGNDRTWIEVSEKVPIRIKSTSMKSVFTCGSECGLELPEVYGLTIIGTEHTHRTLLLFNLQAVGGKEHRKFNSKLQLLLIRLDMYAWTIRFVT

SEQ ID NO: 933189 - protein, 163 aa, Homo sapiens
MPPLRAVTLTARVCGFIPGVGKTTNPLEGTKSGHTIFKSCNTHREEEEVSQGLNYERRGVQETVKLEYEENHLNGYLMSRDVILKEHRWRSAYSQELAAGCRCNLCPTPHGSQMSEVGSEVSLVGGTCFFKLSAWEKSHFMSDNFLEVSICLFNQIGGKDRLV

SEQ ID NO: 933190 - protein, 145 aa, Homo sapiens [sequence omitted]

SEQ ID NO: 933191 - protein, 146 aa, Homo sapiens
MVKKDNNLISYHFYPNALTALWQTISTCHSGQRVLYGVLVHDHLSQLSKEFEHYSPTTKDPRTKKEWIRAPSVNKPGESILSVLEKDQLFEIAHDSGLKMTTTKMRLQSTLDISKTLRCYCLPSPPNGTVLLQEKKLRAPTVSTLW

SEQ ID NO: 933192 - protein, 135 aa, Homo sapiens
MHTQKAERTNARTLVTQMASVKNPPNDGTKVWDYMKRQCLRIFGIPEREGKKVNNVENIFQNIIHKNFSNLAREANIQIQEIQTTLTRFYTRRSFPRHIIIRFSKVKMKERMLRKIERAGYLQKDPHQTNSGPLN

SEQ ID NO: 933193 - protein, 160 aa, Homo sapiens
MCCMVLRNLLSLEFYFYCAAIQQYVWYNFSYLDLMKIILCLIMWSALESSAERLSVAPGVSVLEVAELLPTQLPQQGVPVFKLTNSFTCLINSAGEEPHLIDIIVPHPQIGPKDSLVSCPNWVVSFKSSGYFLAKGVSRSFIQELAWNGDLRTLPTALGY

SEQ ID NO: 933194 - protein, 153 aa, Homo sapiens
MKTDNDIKMTPYGTLKKDRISLCYRGWKYSSVITARYNLALLGSKKPITHSEGFPQYQKCNYYQILDNIIRIQGSNAPAATNCYGDRWLQAGLTVPDPSSEKVGRLKPSSLKSSKSFSVQLCSVAGPSAAGLLEFTGGPLQTLFVWVSAAEAA

SEQ ID NO: 933195 - protein, 150 aa, Homo sapiens
MPETYQKLRKWQSYTDLVQLLFSPHMWGTEVITVMVALREAEDHPQDRRVHAIKKGKVHPLQVTTPQDKKGPQQVTCMQRSIDLIAGGVAQEKIGSPPMECCWLYGSNCPRATIPENAQEGTKQCCLTQPRLDAAAQLFADRRRDWALPV

SEQ ID NO: 933196 - protein, 160 aa, Homo sapiens
MTSLCVHMLRVALTPAPCCVCPLQTLDANDHEKEAKGELRAAWCRPSDTPWHEQPGNCRQDVDDSRRQTGSWAKRGSQELSRCQNDLPAEKSYPLSISSQLRSEQKSGQPAYSEELPTVGLLSAESCILIGMTCLQQPCHKKPQGLAKLNLDFWTSAFPR

SEQ ID NO: 933197 - protein, 140 aa, Homo sapiens
MSLGKPNTMLDLEGMLIKFNLIDTNTEERQFYNQYRILFLKKVKKHKHSLLGAAAGREVVMGEAVLLRAHAQEAMASLQSSSNNRRWRPGQKTWKISLFRGNSWSPSETIGTIQPSPGDDERPLEPEVATPGEAPLSNQP

SEQ ID NO: 933198 - protein, 155 aa, Homo sapiens
MYAKFWCLLLAFCPHSITMRTKAQGRKIGDCGSENPWVNCEGRPEKLHGRGTEYMLNTDLGPRIQSTKFFDAVRSFLVDTEFDSSCQIVPCDWSTHNSDGGNSGRGLGVNCCECEKVLPAHAKALVKASCKCHTLEIVTVLSVLFAAFLGWNAVE

SEQ ID NO: 933199 - protein, 141 aa, Homo sapiens
MAHGSGDVEALGCGPGMRIKVRPDPELSLAFQTNTFSAFWMIPCGCLMNTSNTTNTTCPLTLQTHTSVKRCSDFSVALAQDLGVTPEMFYHDPYLTHQQNISGTTVVTLVLETNACCVGTKKKKYHLNINLIFSASQSLLL

SEQ ID NO: 933200 - protein, 138 aa, Homo sapiens
MSPGEGAQLLSGCASLTEPVAACCCGTAVSVRLPSSTVTEVQSDSFYGKDMCISLSGVLPLKKDFQKSLPPGLRFSSRQCEEHLGAKETIHRVNRKPTEQEKIFANCTFKDDLISRVYNKLKQTNRQKTTPFKSGQRT

SEQ ID NO: 933201 - protein, 145 aa, Homo sapiens
MMTHQRCQISHPCHLWVKGIDDMNDIKADDHLILIWVDYFGLPGKKQHKKELTGIAGLEGGGTGHEPTNALVSHTSLIYSGPLIGNDFTKTEPWDCVLPLCYKGNMNKKGYDRGPYNVIAFFLRLKQALVGKENMNSRSCHLLIL

SEQ ID NO: 933202 - protein, 142 aa, Homo sapiens
MFEKLKLTYLKLLTYGDLVYQLVQAFYTTCVTLPYLRCQRRGREQEPGFLEAAAALSDQLTGCCDVSLLIGDLSNLLMNVFSTISFPLKTSWLYPIGFGDEINRDLQQIGEQQLKNRGYTAKDINAHSISDHYLLHTMFAKY

SEQ ID NO: 933203 - protein, 145 aa, Homo sapiens
MNEHYKDSLKVVSANTHAFEEISRHSVWCYLAPEDSRLTLAVSVSAGARNRAFLPVSSPVRDPAEKRTPIVSGRCASVPLSLSSAGLVLHATGLAVPHGALFHSPHDSSLSGEKQNGKEREELLKLERQCNFNASTDGLFYMFPI

SEQ ID NO: 933204 - protein, 135 aa, Homo sapiens
MSTDFNVKSATALVPNKKVIISFQVLKSGIDFSFLAMDVLFGIFFQQKAVLFTPKICLKPKCLIVKVDDHCPCSMPMFFKFKGIVKYFLNVAQWSQGFHTRYGYSESIRTENGSRKRKKRVEDEREGSEIKAFSM

SEQ ID NO: 933205 - protein, 146 aa, Homo sapiens
MTSSHLLPTLLLCFVHRVSQWTDCQRLGCQEFGVSRKWTKLYDQNKHFGEFKFAFPDTTPLSSLPLNLRGIQTSVSAGVSYRAQPKVYVFKRNVLKHWARVTVWWFILKGLSCVCKSVCECVCMSAYVCEYVCVCVNVYVCVCVCV

SEQ ID NO: 933206 - protein, 301 aa, Homo sapiens
MAFGIFSLFAPVSSIFMDFSTFVLLVFVSLDTVFRHRHIEHCHAFVENWPLYHYVMSFCVLEEISCLKGALSGVNAVTAACFGLVLAWFTLLYELHCAPGETAEQYSEYPGKECIERRCRDMRQQDFSLRGVRLAGHRQEKEGQVQLIKEVEGREQLLRVVTCGPPPRTGPPSLTGHFPRLVYLLDWSTFSNWSLPQTGLPPGLVHLPGLVHLLGLVTSPDWSTFSNWSLPQTGLPPGLVPSLDWSPPRTGPPPRPVTSLDGLACTASWQLQAHWGLEPTCPPGVSSPSPHPTLSHWSQDP

SEQ ID NO: 933207 - protein, 154 aa, Homo sapiens
MYTSVFPVGVPQSKELPGLRVWHFVEPQPLQLVELHADVLNGELQHVPVAGQVLRRVAPLIQWGFKRVRGGSGGSTFNWICLWFQQCTLSMLSEEHAERTALRFLTQSQDLGPPAALRAAEPGRARLCLMVWGKRNGFSSLARSWVVLVTSPGG

SEQ ID NO: 933208 - protein, 367 aa, Homo sapiens
MLNLAAAVFRAHVWSGAPEDCEHLHHGPDARPPYLLSPADSCPGGRHRCSPRSSVHSECVMMPVVLGDHVSSSTFPRMHYSSHYDTRDDCAVAHAGAKINRIPANLLDQFEKQLPLHRDGFHTLQYQRTSAAAEQRSESPGRIRHLVHSVQKLFTKSHSLEGSSKSNANGTKADGRADNHHHAHHAKHSKRSKSKERKPEGKPRPGMSSWWSSDDNLDSDSTYRTPSVLNRHHLGPVAHCYPDALQSPFGDLSLKTSKSNNDVKCSACEGLALTPDAKYLKRSSWSTLTVSQAKEAYRKSSLNLDKPLLHQDAKPALRPCHYLQLFQMPPVRGTMWPLSVCAGLILLCSFFQLTCVVENGRSPSFKD

SEQ ID NO: 933209 - protein, 199 aa, Homo sapiens [sequence omitted]

SEQ ID NO: 933210 - protein, 392 aa, Homo sapiens
MFLFPIPKQILGFTFAHVTYCLTLNSPYIYGRWSSTDCPTLDRPYVHGRWSSIDCLTLDSTYVHGRWSSIDCPTLDSPYVHGRWSSTDCPTLDRPYVHGRWSSIDCLTLDSTYVHGRWSSIDCLTLDSTYAHGRWSFIDCPTVDSPYVHGRWSSTDCPTLDSPYVHGRWSFTDCPTLDSPYVHGRWSFTDCPTLDSPYVHGRWSSTDCPTLDSPYVHGRWSFIDCLTLDSTYVHGRWSFIDCPTLDSPYIHGRWSPTREIYFRFHSVVKMTMLFPHLQNENARPVTFMFAVALSILTKAPERREPTQSDRWEAVPFLVPPSSCSTLGPATKLDLPILDSTFTEWPRHHKLMTFLSSSEDATIRSSRTAEFLWKPDIWGNEAGKVPTADLHFL

SEQ ID NO: 933211 - protein, 172 aa, Homo sapiens
MKSQQPTVVEETVREDASSPGAYGFLLTEELQVAGDVTPGSLPRGGNQSWAWKDDRQQGGDGEQPTSSQRSEEEENCQGNKAFRGQITKDLHWDQANPCNQRVEGLKQKAETSGSDAEWVSASHFLHGCKNFRKCTVMQPPPKPRHAALPLTAVLSSCCPLLSEPCLKNFLS

SEQ ID NO: 933212 - protein, 223 aa, Homo sapiens
MVPATVIGGAGQQCHGVKIYLPSTEQCHGVKIYPALRRTVPQVDNGMGAIGRVDLCLLSGQWHGGHGQSGFVSVDNGIGATGRVDLCVLSGQWHGGHGQSGFVSAEWTVAWRPQAKTDLCLLSGQWHGGHGQSGFVSTEWTVAWGPQAETDLCLLSGQWHGGHGQSGFVSAEWTVAWGPQAETDLCLLSGQWHGGHGQSGFVFAEWTVAWGSTGRVDLCLEQE

SEQ ID NO: 933213 - protein, 167 aa, Homo sapiens
MAPLRSRKTPTEQQSLAHPLRQSPVPSTHGASCRRLTDSEEDMLPSELTVPFFPRTPTPRIRSTLVAFSSSSNFSMECCFPGFYSPQPLLFWHQNLSLEKRPAKLTKTEYEWIPVASMEEPPRCVLLLGVEDCVEDSVGRTVWKKDSQPPTWLFNGGSALSGLVKKS

SEQ ID NO: 933214 - protein, 162 aa, Homo sapiens
MSTPAVGLTDPEAELLDTSKEKGKLETFWLRPATGRLCPRAVPADPGSSMVCDVLITTAEAFGESPEQPSRHSKEVHADSESSGTTLGTNSMMTILQIRKPRLSLLAPDHKSQSLDLSKSSLHITADGKLCSLRVQRAFAKGSQDRLSAEHIPIKGGISRFP

SEQ ID NO: 933215 - protein, 160 aa, Homo sapiens
MPFPGSDCGTVVQFSGVRYTHCRATTTTVLLQNLLSSANCPSAPVHQTANLNAVMCVSRGRAQAGVTVHQVLRGRAQAGVTVHQVLRGRAQAAVTVHQVLRGRAQAGVTVHQVLRGRAQAGVTEHQVLRGRAQAGVTVHQVLRGRAQAGVTVHQVLRGRA

SEQ ID NO: 933216 - protein, 768 aa, Homo sapiens
MPANVVLGALSWVHVFGALSWVRVLGALSWVFVLGALSWVRVLGALSWGLCRVESVAAHFAQSPLELRAQALWVAGGSVQTTAFRVPPALPSHLAHGRDTAVNPPERSSVTFSEQLLSRLGGHVGKRRNKNIPDYFMLLWRGKAARVLSVRGKAVRVLSVRGKAVRVLSMCGTAVRVLSVRGKAVRVLSVRGKAVRVLTVCGKAAWVLTVRGKAARVLTVRGKAARVLSVRGKAVRVLTVRGKAARVLTVRGKAVRVLTVRGKAVRVLSVRGKAARVLTVRGKAARVLTVRGKAVRVLTVRGKAVRVLSVRGKAVRVLSVRGKAVRVLSVCGKAARVLSVRGKAVRVLSVRGKAMRVLSVRGKAVRVLTVCGKAARVLTVRGKAVRVLTVCGKAVRVLSVCGKAVRVLSVRGKAVRVLTVCGTAVRVLTVCGKAVQILSVCGNTVRVLTVCGKAVQILSVCGNTVRVLTVCGKAVQILSVCGNTVRVLTVCGKAVRVLTVCGTAVRVLTVCGKAVRVLSVCGKAVRVLSVERPTCASCVWRGKAVRVLSVRGKAVRVLTVCGTAVWVLTVRGKAMRVLSVCGKAVRVLTMCGKAVRVLTVCGKDVRVLRVAWKGHAGPECAWKGRAGPDCVWKGRAGPDCGKAVRVLTVCGKAVRVLSVCGNAVRVLTVCGKAVRILTVCGKAVRVLSVCGTAVRVLTVCGKAVRVLSVCGTAVRVLTVCGKAAVRVLTVCGKAVRVLTVFGKAVWVLIVCGKDVRVLSVCVERPCGS

SEQ ID NO: 933217 - protein, 196 aa, Homo sapiens
MIIIIIITIISITIIILITTIIPIPIILTILTIITIIIITITIILTITIITIILTITIIITVILTPIILTITIITIILTITSSSSSPSPPPPSSSSSPPSSPSFSPPPSSSSSSPSSPSFSPPPSSSSPPSSPSFSPPLSSSSSSLSISSSPPPPLYLLIMSHTVITGYYVLITNDYSRDSLPLLLTPIWSIISSF

SEQ ID NO: 933218 - protein, 142 aa, Homo sapiens
MFCASLGRICVLLLLDEVAYRCQIQLIDGITQFNPVIAEFLNFCLLDLSITESRYSKSPALMVDSSIPPGSSTMSSVPYLTVDTFLYLLKSAAEPLERSVLRHFFHTYPGLQRAQGPLEVKAAGLPRPFLNTHIDLVYAQLC

SEQ ID NO: 933219 - protein, 146 aa, Homo sapiens
MGGPWTHYIAMLGSHSPVTAAPSPNLNTALLPPPGHRISDCTQSCDSSTFSQPKCRPSPSSWPRNQRLHPAHVTAAPSPNPNATLLPPPGHRISDCTQSCDSSTFSQPKCRPSPSSWPRNQRLHPAHVTAAPSPNPNAALLSPPGH

SEQ ID NO: 933220 - protein, 196 aa, Homo sapiens
MVWLRTHPNFILNCSSHNPHMLWEGPSESKETGGILPCPRDLWNFELERDNLGYLAEEISKWEIIQEEAEHKSLENLQPDEAIEKKSPVFREKFKPTAETCIKDVWKCLDVQVEVCAEVEPSWSISARSIQIGKVGSEAPHWVPTEALCNEAMRRGPPCSRPQNGRSTNSLHCAPVKATDSMPACDTSQERIGPTW

SEQ ID NO: 933221 - protein, 158 aa, Homo sapiens
MQIFRYFSHPMGSLQYCCIEFPHEEPAIYTEGECTCLLAQRSKSPMYGTPSGHTLRNRQSYMQFRGIPEEGIVITGDDGSVCVVAPEDLPVGQDMEVEDGDVDEPDPVMYSHHQGTLDCICIATEVVTRTTCPIIHLLWETLPLIEKSLWLLFSFATP

SEQ ID NO: 933222 - protein, 145 aa, Homo sapiens
MTTASASQVRQNSHQDSEAAINRQINLELYASYVYLSMSYYFDRDDDIKKPDCDDWESRLNATECALHLEKNVNQSLLELHKLATDKNDPHLCDFIETHYLNEQVKAIKELGDQVTNLRKMGAPESGLAEYLFDKHILGDSDNES

SEQ ID NO: 933223 - protein, 259 aa, Homo sapiens
MGKKQNRKTGNSKKQSTSPPPKERSSSPATEQSWMENAFDELREEGFRQSNYYELQEEIQTNGKEVKNFEKKLDEWIPRITNTEKSLKDLTELKAKAQELREEPRSLRSQCDQLEERIQEIQRPPQRYSSRRATPRHIIDRFTKVEMKEKMLRAAREKGQVTHKGKPIRLTADLSAETLQARREWGLIFNILKEKNFQPRISYPANLSFISEGDIKYFTDKRMLRDFFTTRPALKELLKEALNMERNNWYQPLQKHAKL

SEQ ID NO: 933224 - protein, 169 aa, Homo sapiens
MYTDWETPPSRFRQTFHTGKLWLASVVDLQKTPADLQQRGLTVRRKTNKKGNSTNVNKKDVHSETPSKGHHIKDQSLAFKWQTVEPRFSVKIPGIQCGRCVLGGPVCLVSNGWSNRPWKCARTYLFTLPDRMTTTHDILLLCMASAACSAQLVQGKAASEELTASKTGY

SEQ ID NO: 933225 - protein, 144 aa, Homo sapiens
MLSQYYCCEGFTSGITDEIGGGYQTLPKAYHQRWRMRKTDCMQSSKSERWRLHVYPTRQEGWGSSVAGRAQSSMEFWGLEAVLQEYSTDVVPRMSLEWGRGLLMCQGGAGHQVRPTFCRLGAAGERSQDTGRMQVRGLREKGWR

SEQ ID NO: 933226 - protein, 175 aa, Homo sapiens
MLLVCRLKFQPPPSVGSCAARASPTSTFPCSTVPSPIDHPRAEECGRTERDWQAAPPVAPVWDPLGEASCAPESDGDFSGIVNAPVSTLSKQTTQALCKMDQSAGCGWGQKEVTANTSEHQKEQTPDTPPLRTVTLTRRVRGFILEVSETKNPPIPDTLTHLALGELKDGNLQNL

SEQ ID NO: 933227 - protein, 209 aa, Homo sapiens
MSSSPNLDVSNEITEGLYTPCDIGSNMILSPPGYWERYHSAEDPELQSVLALLSLSLSLNLVTVLRNLLSILAVSSDSPLHTPMYFFLSNLCWADIGLTSATVPKVILDMQSHSRVISHVGCLTQMSFLVLFACIEGMLLTVMAYGCFVAICRPLHYPVIVNPHLCVFFVLVSFFLNLLDSQLHSWIVLQFTIIKNGSFCLTIKLSPPF

SEQ ID NO: 933228 - protein, 677 aa, Homo sapiens
MESKRITEWSRMESSNGMEWNNPRTRMQSSSYRIEWNHRMDSNGIIIERNRMESSSNGNEWNHHRMEMKWNRMELSSNGINIKRKKTELSNGIKENLRLDPNGIIWNHRMDWNGIIEWTRKGSLLNGIEWNHRMVSIGIIIKWNRMESPNRIEWNNHRMESNGIILKWNRMELSNAIEWNYRMQSNRIIEWTRMESSNGMEWNKSNGINIEWTRMESTSNGIKRNYRMESNRIIEWTRMESSNGMEWNNPRTRMKSSSYRIEWNHRMDSNGIIIERNRMESSSNGNEWNHHRMEMKGMEMNGIVIEWNRMDSLNGIRWNHRMDWNGIIEWTRKGSLLNGIEWNHRMVSIGIIIKWNRMESPNRIEWNNHRMDSNGIILKWNRMELSNAIEWNYRMQSNRIIEWNGMEQSMNSNGIIIEWNRMESSSGIEWNYDQMESNCDHHRMDPNGIIIQRKLMESTSNESNGNTIELKRRIIEWTRMESSKGMKWNNPWTRIQSSSNGIEWNHRMDSNGIIIERNRMESSSDGNEWNHHRMEMKGQHQTEKNGIIEWNRRESSNGPEWNHLMEWNGIIYGLECNHHRMESNGIIEWNRMESTSNGKKRNYRMESKRIIEWTRMQSSNGMVWNNPWTRMQSSSNGIEWNHRMDSNGIIIARNRMESSWDENEWNHHRMESNRFME

SEQ ID NO: 933229 - protein, 773 aa, Homo sapiens
MKLKWMDSSSIGFEWNHRIKLIEIIIKWNRIVSLNGIEWNHHQMEMNGIVIEWNRMDSLNGIRWNHRMDWNGIIEWTRKGSLLNGIEWNHRMVSIGIIIKWNRMGSPNKIEWNNHRMDSNGIILKWNGMELSNAIEWNYRMQSNGIIECNRIESSNGLEWNHRMEWNGTEWNHRLESNGINIEWTRMESTSNGIKRNYRMESKRIIEWTRMESSNGMEWNNPRTRMQSSSCRIEWNHRMDSNGIIIERNRMESSSDGNEWNHHGMEMKGMEMNGIVIEWNRMDSLNGIRWNHRMDWNGIIEWTRKGSLLNGIEWNHRMVSIGIIIKWNRMESPNRIEWNNHRMDSNGIILKWNRMELSNAIEWNYRMQSNRIIEWTRMESSNGMEWNKSNGIIIEWNSMVSTPNGKKRNYRMESKRIFERTRMESSNGMEWNNPWTRMQLSSNGIEWNHRMDSNGIIIERNRMESSSDGNEWNHHRMEMKGSSSNGFEWNHRIKLIEIIIKWNRMVSLNGIEWNHHQMEMNGIVIEWNRMDSLNGIRWNHRMDWNGIIEWTRKGSLLNGIEWNHRMVSIVIIIKWNRMESPNKIEWNNHHMDSNGIILKWNRMELSNAIEWNYRMQSNRIIEWTRMESLNGMEWNKSNGINIEWTRMESTSNGMKRNYQMESKRIIEWTRMESSNGMLWNNPRPECNHHRIESNGIIEWTRMEKSLNGIEWNHHRMEMNGIIIEWNGIELWNEIQCDHHRMDPNGIIIQRKLMESTSNESNGNTIELKRMELP

SEQ ID NO: 933230 - protein, 188 aa, Homo sapiens
MESKRIIEWTRMESSNGMEWKNPWTRMQSSSNGIEWNHRMDSNGIIIERNRMESSSDGNEWNHQMESDGIIIKWNRIELWNEIHCDHHRMDSNGIIIQWKLMESTSNGIEWKHHRIETNGIIMQLKWMDSSSNGFEWNHRMKLIEIIIKWNRMESLNGIEWNHHQMEMNGIIIEWNRMDSLNGIRWNH

SEQ ID NO: 933231 - protein, 174 aa, Homo sapiens
MESSNRLNEWSRMEPPPNGMEWNHRIESNGIIIEWTRMESTSNGIKRNYRMESKRIIEWTRMESSNGMEWKNPWTRMQSSANGIEWNHRMDSNGIIIERNRMESSSDGNEWNHQMESDGIIIKWNRIELWNEIHCDHHRMDSNGIIIQWKLMESTSNGIEWKHHRIETNGIIMK

SEQ ID NO: 933232 - protein, 203 aa, Homo sapiens
MTWLMDPNLDALRHTQKEKAHVKKETEIGIIELQARKPKDCGKPSAASEKPTAEGAKGKILRDYSENRELHEWILWALFGNKTFPAIMTNYCIQHKLSPYLKQLFSPPGSPENKITLLPFKILLLLLNAFSPTKELIALSLLSAYKQPSPPAPPLLDAQVHRVLHCNPFHSALALCSITHAPSSEAAKNQRLGVSVYAKKNCL

SEQ ID NO: 933233 - protein, 211 aa, Homo sapiens
MLLRAALSSWAQTIPPCQPPELLGEPGCWWPHPYGFARCIPYHSLLGLELLVCGSPILELQAPSIVGGGLWFHPTVHPASITQTGSTDGADHTRGLLNSAHSFRCSVGLQHSTASFYFQISSLRYGRFEHCPFSLSLLQHCDHIPPWFLTSQTSDSAPHPPKLASKTFARVLLLTRPLRSQMKQQRGAVAGQLSLTQASVTTVSALTEWLS

SEQ ID NO: 933234 - protein, 135 aa, Homo sapiens
MGPAVGPVDPNEVNPVSKEENSFPKDGNTLNVEKNDPIPRRLLLQGPLQFPKKSLEPVCSGGILVLTLSHTDLGKSPNLLHLISSSSVNNISSCTSGYPQRSESRGWKGCLPTCVHSSTIQNRQNVEATQVPVKG

SEQ ID NO: 933235 - protein, 179 aa, Homo sapiens
MLVFLQEMNKPCGCPQDVCNHGDWRDPWIPNIGLVTPVRAMSQLNLNVKTERGQTGVMLTSTPITWGQIKKTTQEAEQLLECQAVAYFINEIGIESPFLFQKGEKGKKKGGNRHQEFEESLFQPSRITEKFKTSVEEVNAYVVDIPKQLELKVDPKDVTELLQFHDKNLMDEELLLVDE

SEQ ID NO: 933236 - protein, 208 aa, Homo sapiens
MRHACFPFTFHYAFHFKNYAKTHTLVFRLYDYFAFKGSQSESQNLTSREDDSVVLSLWLKAGEPLANRWYSCDGIGGPSGVAAAKTPLRTSRKWEEVEAPPPMELAGWEPMLLDAAAAPQLWFQIQASLCSQGFRKPLPLQASKCLLLLPDLSLIPVPPEQSCGRAQAVSQTARCVRTQDSADTPVPCRLSFLQTLSTEEEWRVGGWG

SEQ ID NO: 933237 - protein, 141 aa, Homo sapiens
MQLRATCMCWASSLPPHSHLPRRVPHVEPREVPSHGGSWEPALSIGPCLLTYKSTLFSGSVERCSSPPVGSPHSLLAGFRAPCQSSRFGETAAQGSAGVGASKGRTAHSSPQWDPVNKPSLISCLSASPTCWVSCLLPCPG

SEQ ID NO: 933238 - protein, 160 aa, Homo sapiens
MMAQNLIKTTKVKGIVDNKKQTNTKNKGGASSLSRLLAVCATFMPLVAVWRTREVLCEVVQARLPVPSPPPFPPASSTGFCVDRSWGDFEGSLAGPFGSITELEESKGRNHKKVHLTAPELKGSQCWKNDGGEPGLFSDLLFSTGTISPMRLTYPHFVSL

SEQ ID NO: 933239 - protein, 149 aa, Homo sapiens
MRNYPLSHYVGTVLRGGTSQSLHNMQNFLLVHLIMRSFLWPCSSLCTLSVVGWRQLAPACPKDHRILLRDFPGEDGHSLADGLAGDNEDEGRLETSYIFSGHMQNPALGTVDPQEYVSTFQRILWTSHFLNIPFKFSARLLFSPTCIAP

SEQ ID NO: 933240 - protein, 147 aa, Homo sapiens
MLHFPKPPWPATPPSCSYKTPQDSSRQTYKRLDVVRSRSVEEDTRTWTLRGHREQHAGGRTHQQAQRQAINTAERHGVPQRRSLGNPGFTVDGKTPTAFQAETLHEKERRIPPEAGRPAENTCNSSGGELVHLKQTDDIGKKRKGST

SEQ ID NO: 933241 - protein, 159 aa, Homo sapiens
MNLAVHMDVILRVASGDSQGEPGTLNKGSVSRQWRNLNEEALSLTRYGWIWIADLIVAFGPTAKEVGSALFFLACYLGTEQGEVAAAIGTVQVENDFPDQKALFPWAYRICLVFKASLHPTPPCWLQWLPSPSPLYPSTSCSHSLLTAAFFPLKLLHKL

SEQ ID NO: 933242 - protein, 136 aa, Homo sapiens
MESYNVDMGNWRLKYILHINLHDPCQGLPLLKDLSSKQAANLFPWQRMEAVACDILLIMQPGHGQPAFLQGDRKLRHRRAKGLYGQTSGMHGGRSLEHGALEPLLPSSDTEVLPPGGHLCDSSGNLKYRLEKSDIF

SEQ ID NO: 933243 - protein, 142 aa, Homo sapiens
MRDFCCLNLEAMKTYISLMSVLPFDNHLPGTGRKRVDEQIEIGTSMADPSDELLCGLQYGKHSFGNSKMMAVEKQWVYRQMIGCFSLQQCGSGHLPVSCMITQLPVGGTTATEAGASLEEMRVTQAERLGAHRVEISVVENE

SEQ ID NO: 933244 - protein, 232 aa, Homo sapiens
MLPSKTHTQAPHWLWEGKSPASESPSSCVDAAAGRQLRSGRLAFPCPLVIGGDAPGEQSSEGEAQGDPAEQPSPVMSQSALHKAKEAAIQLAPHVWCKSCFGTRLQAPFLQTSSRASPMRRSRSVQGPISQDMEVQRSCDPGELAAPASVAVPTAGVLSWQLPGWQPRGTMLKAERQTEERTRGREVLPEGSLPWSLPDSSPGHGEALSDGWGTEATLPAVLFLSRPGRGYQ

SEQ ID NO: 933245 - protein, 497 aa, Homo sapiens
MKHGAFVRLQVFSMQREDPITTTAIITVISIATTANITTVTWSSSPSAPPSLPHHHLLHHRHHQHPHRYIITISITIVTHRYIIITTTTSITTVTISTPIVTSSSSPSPPSLIVTSSPPPPPPSPPSPSAPPSLRHHHHHHHHHHQHPNHYIISNTSITTGTISTPIITSLSPSPPSPPSPSAPPSLHHYHHHLHHHRHHQHPHRYIITSTSITTITISTPIITSLSPPPPSPPSPSVPPSLRHHHHHHHHHHQHPHRYIITNTSITTGTISTPIITSLSPSPPSPPSPSAPPSLHHYHHHLHHHRHHQHPNHYIISNTSITTITISTPIITSSPPPSPPSPSAPPSLHHHQHLHHHRHHQHPHHYVIITITSITTVTISTPIVTSLSPPPPSSPSPSAPPSLHHHQHLHHHHHHQHPHHYIIITITFIITITISTPSLHHHHHLHHHRHHQHPHRYIIITTTITVVTPPPSPPQMSSLSSSSMAVPSDLCFYKNGS

SEQ ID NO: 933246 - protein, 359 aa, Homo sapiens
MGMFFRVFVVMEMFCGVFMVMGMFCGVFVVMEMSCGVFVVMGMFCGVFMVMEMLCGVFTVMEMFCGVFMSGNGEEHTAGWEPLRARLSQGHRKSTVEQGQDTRMWSPFLAGLEFAITQLWSEVYCAHCLEEPRVSAWVLGIWILESVVNAAGYLLIQPQCSLETATVPPGGRWSLRSAQEQPGFREGSLTPTALPVCRACPGENPFSGSGGALTLPPVSLWRPLACLHLAGLARHLPAPGPCACSESLLPHGTRAGLGSPEGQLCQARMPPWFQGAAVPSEKALQAVGPPGHSSLFWQPLLPRGPCSPPWLLAYPQAMPRAGGDGPGAGSLRQLPFKPWQSESPSMPKARGEGGGSEDA

SEQ ID NO: 933247 - protein, 153 aa, Homo sapiens
MVRVGPPGHCLSSVLVCLQSEALWWEAGKEGRLQEVFQDCSSARSGEASLLGHAPTLRVSDVPPSSCLILDNSSTVTPAGYGPQWCLPQRGNLRVKNMVLGKLCQWCLAQSKLQQRGWHHQAQPATGHDTRASWIPAPRWLLQATPLQGHCSP

SEQ ID NO: 933248 - protein, 142 aa, Homo sapiens
MLDTRSAGSASLTPPGPLRHESEDGLESRKKGDQVYGGSGHGASAVDPTLQRLPRGPELAWKGQKPPGHHLENESEQDRLAALEAATEARRGEWKTAVVAHDSRKGAPPRAQGSVVKGSVYLSKQEDCHKLSGIPGTPRVKF

SEQ ID NO: 933249 - protein, 164 aa, Homo sapiens
MTVIMNMPCWTQPLCALINTVPEKKEQAIGRSKGGLSTKIHARTDALGNPTGFYLTAGQAHDLNGADVLLDLSLSQTWLMDKAYNSRDRVIDPIHKINGQVVMPSKSNAIDQRDYDQHLYKARHLIENFFAKLKQYPGIATRYDKLAQNFLSAIYLASIMIWLN

SEQ ID NO: 933250 - protein, 554 aa, Homo sapiens
MCEMYHIITLIAPVDKIDSYSQTAINIWSSNKFNIIVLDFLQLAALYGGGPMTLNKSTRDDLKKLKVMTTKTTINAIDMSPLIGEWQGVGDPVVMLFGRKGTPCFIDFYANTDGNYNLYVCGVSGAGKSVLLLEILAAYRAVGAKLFILDVGRSFKNFVDLAKGTTFDFNSGRSLCMNPWSWIQVAEEEEEGGLNTFQQELRMLLPIYSKMASPKNSLNQFQEALLEEALSATWREYGNENNVDNVQAYLLQIKDQGGQQVDRVAFEFANSYKHSQLMACMARILTDAPALRSVVMFCVTSRIMKEMYLTRDRKKLCFIDEAWQLLGDDAETAKFIEEGYRRARKYNGIFGIGTQGIDDAFKNEASRAAYTNADWKIFLRQDEKNFQELIDSKKKIDEIINEDNQKKEKVEPELKTEKVSSQKVSKIDKWINGLKFVIATALISLLVTFPGLYLVKKSQVKVGVVDVQALLVEHEKKVTQQLYANQGLYQNSDAASLNSGAVEEQTKQFLLKLEGSIDDINNNCGCVLINKAALLTQSGNVVDYTQKVREALEK

SEQ ID NO: 933251 - protein, 354 aa, Homo sapiens
MNHEYLARQTYKLLDVEHIDGGTHGWLDVKRNVPTVTNRTMRSFAGAVRGEPRLLSSPTPGENLPTISPSDFPQVTSTQETEHKSSENLQPDNVIEKKSPFSGEKCKLAAEICISSKEPNVNTQDHGENVSRSCQRPSRQRPPSQAQKPRRKKWFPGPGPGSPCCVQPRDLVPYVLAPPAMAERGQHTAWAGASEGGSPKPWQLPSGVEPVGAQKLRIEVWEPLPRFQKMHGNDQMPRQKFAAGAGPSWRTSARAVWKGNVGLEPPHRVPTGALPSGAVRRGPPSSRPQNGRSTDSFHCVPRKATDTQHQPVKAARREAVPCRATGAELPKTMGTHLVHQCDLDGITKFRFNGK

SEQ ID NO: 933252 - protein, 238 aa, Homo sapiens
MNPFHGRHFQGEIILWAVRWYCKYGISYRELQEMLAERGVNVDHTTIYRWVQRYAPEIEKRLRWYWRNPTDLSSWHIDETYVKVNGRWSYLYRAVDQRGDTIDFYLSSRRNTKSAYCFLGKILNNVKKWQIPQVINTDKAPTYGRALSRLKREGKCPPDLEHRQIKYKNNVIECDHGKLKRIIRATLGFKSMKTAYATIKGIEVMRALRKGQASSFYYGQPQGEDCNSDHMRFSHLDV

SEQ ID NO: 933253 - protein, 148 aa, Homo sapiens
MYSAILYLLSGAFRPSAFNVSIEMKLIWEFCLMTEESLYHCAYIFMPEYGWVHMYREAKKFVSENEGALGKGKGKRWFAFKMMMAKKWAKFLRDFENFKAACVPWENKIKAIESTIATAKDSRDSTLIDLTSKCVNVCMLGWGRQNII

SEQ ID NO: 933254 - protein, 137 aa, Homo sapiens
MSQKLLQEILIAPTQTNRTACGDSHCELLLQEILQEHTRKAKKIHTLFGGSSFPLQALRDSQKTVSAQSKSSEIQGVEEAVGRALWALLVPREAISDFVLQGLLGRTASKIEERPQGKGNSQLHFVTILTEHKVPRT

SEQ ID NO: 933255 - protein, 153 aa, Homo sapiens
MGFFFYCISEATCGNNPELGYSEDHPFMLLEKVTFPSLSLLGHDSQLGLLPTQLLSAYAWLLALFSMAVICPANTLLNLGPTERQSWRLSVLEAGSSRSGLDPPEGCEGELVPGPLLASGGSLASFCVPWLVEASSQSLPSSKATVILDWGLP

SEQ ID NO: 933256 - protein, 139 aa, Homo sapiens
MDIRKTTFSNLIRRKRKKEEEEEEEEEEQEEKRQEEEAEAGEEEKEGDKEEEEEQEGRRRGRKEGKKKRRYTTSREHHGFSQKERSCVMLSVFEESKNYTFSNSRFGQSLFPSFKDYQEHICDQQRYYYYDANVTKEAI

SEQ ID NO: 933257 - protein, 446 aa, Homo sapiens
MSKLLNCLEQKSLLNKLQNEKGADFYITNKLQSDVELLIVEPSFEQKSHSNVPGLPPIEVASLSRIPEVRCLMTKEIKNVNTQGRVLEDNSFWLLPAGEIRHVGNSSKGSSWGQSKGPVKVLHGSICNTIWSSIASSQTSNGGGSLSDYSSSIPSTPSISQEELRIDVPPTSNTPTPVRKQSKRWSNLFTSQKGSNPDKEKKGLENRADSIRRGRAIPIKQGMLFKLSGKGLKKWKKKYVTPCDNGVLTYHPNLHDYMKNIHGKEIDLGRTTVKVPGKRPLLATSACARISSSKTNGLTKDMSSLHISPNSDTGLDDSLCSSPSISSTTSPKLHTPHSPQANRKKHQRKKSTNNLKDHGLSGTAEGQEENFIIVPLTGQMWHFEATMYEERDAWVQAMESQILASLQSCESSKSKSGLRSQSEAMALQLIGNMRELQLCGLRDPES

SEQ ID NO: 933258 - protein, 568 aa, Homo sapiens
MAIARLSVKVGKAGKAAPHAEYIDRDEEKKLKQEQAETDLEHSTYGNMPKWAEHNPITFWQAADLYERKNGSTYREYEIALPREMNAEQRLELVEDFIQSEIGSKYPYQFAIHNPKAMDGKDQPHVHLMFNERLQDGIERDPEQYFKRYNAKNPERGGAKKDNTGKGYQERKTDIKDLRQRWADLCNSHLEKHQIDSRIDMRSYKEQGIEKEPEKKLLPSQAKDPEIREALQQSRIAYKELEQLDLGDPKKDLKDLKNSPISDKEIKQGIESFKADFDSFKQLALEQYKQQQKLEREQQKTMNLERTEFKEEELAPIKKLDLNDLKVPMPKNLDQLLIWTSELAQYNYAQFLNQSEQLKLVDEDNLEEQAEISQKLRFYRGNALIENQIKDFYLKKLLDQGEATVKGYIKSPTKKNTRYAVISYHDYDFVSFATPEILNKFPADLINFVQKETPKTLADIYPEEAVFLSAIKKFIKPFKEQYKKLADKNREIKEHNTVAHKIYIKIKNKEATLQKPTESKPKESNPKTTENSAVPVEMKQGTIQKNMAPQEKPLTVIKKRKFALNKNK

SEQ ID NO: 933259 - protein, 189 aa, Homo sapiens
MFSELSNPESLPAQGQAQNSAQSPASLVLVDAGQQLPPRPPQSSSVSLVSSGSGQAAVPSEQPWPQPVPALAPGPPPQDLAAYYYYRPLYDAYQPQYSLPYPPEPGAASLYYQDVYSLYEPRYRPYDGAASAYAQNYRYPEPERPSSRASHSSERPPPREVRRALRGVGVVLATALGCAFQGLSCTCSL

SEQ ID NO: 933260 - protein, 139 aa, Homo sapiens
MAVLTSKDVGVQDVMPGAATVPRPPAQVNEKNQGFRGVGHFLLHVSAPDPAAFMSFVQLAHVGFHAHGCQGWLLCLMLGPSALEPTGRAGTSLASSSSSLGLWDVPCLLVPSLVTRVDMRLREAHGGTTPIAHLVQSDS

SEQ ID NO: 933261 - protein, 151 aa, Homo sapiens
MRLAPSNLKEHHLGDNGFYHWGMPVQVHCVVSAFVRSAESQPHSHSHKDIPPISSLLGASNNFYECPQVPRIKLFLSRHTNPFTITPNIQNVGSRVLPGPENLDSNSVLSRSGVHMGDKETLTPQPAAHPGVRKQQQMQGLGTLPWALHGR

SEQ ID NO: 933262 - protein, 155 aa, Homo sapiens
MGCPLRDEVAAPPRCKPREFPVAPPTSPSAHVGHRSAAGALARLTSQKPSSLSEQFLSLLRAYNSKGSQLSGLEKYLVTGCPRTPQIVTVLEDRCPGQQSKTEKAMPVSRRQLTSWPSMVKHTWGSVRVTAWADTCPGHPQSCCWIICKVVATTD

SEQ ID NO: 933263 - protein, 160 aa, Homo sapiens
MKPWFLVSVSSDKWKRGTRKGLYQPNQKQKLRTHDCVLSLGHPGREWKLLNTKSCMPTGKGAPSPHSLHSAQRAEVEEANISAAAPSFYRGSNPSPDQAAFCFHQRKPESRGNSFPSNSQDPQLQVCWNLLVVHPRPCLPGYQQRRLQNSKYCRTANVAA

SEQ ID NO: 933264 - protein, 156 aa, Homo sapiens
MEKCVVWADPEAPVHRQDTTNRAQYQSKPKTCGPQTASECPCQSIQASGWLPPKFSILPKFTKYLYELHVLTPWTRETSSPLFGHSQGWHWGSSAGPGTCGFQFQGTSEHFLATHKNNGGSETVGIQMAPQEVAAQSCHNRGAKRAPASSLLLPGW

SEQ ID NO: 933265 - protein, 193 aa, Homo sapiens
MDSPYIISLHILKLWSQPSPQPKGEPFVLRYSSFHVLASEYSGLNIQPLSTRVWTPAWIPTCFVHPLNSQLPKSAYGSYHTYHTVVHMSVLSYPLSPGYILDSWSVLRKRPTGSGSNPPNRAMCELLEAVEQSWRTASQDQEGFQEGPETMKFGDEFQKSSFSDEVKTKQNFYQYSYPKSMGCFPVTYLCFLI

SEQ ID NO: 933266 - protein, 152 aa, Homo sapiens
MVPALEQCRQQLSLKGEGWTGSRSRAFQVGIPLGPGISGVLGCARVPGVPEGSDVPRVPVVPGDQVCQEQGVPGTRYAREPSVPCVPGASRDQVCHRTKCAMGTRCAQGLFTSGVPDVQGTRCARGPGVAGIPGVPEVPKFCYFKNVIQEKP

SEQ ID NO: 933267 - protein, 161 aa, Homo sapiens
MLGAACYDLHSEDNTQDVASQVLFDQQPSSSGLPKPPVSQAAYSKDSPNNAETAGACGGGLLLADRTCNLVPCAYTWRQRPVFSGNIVLQAPLAVEIHSKRNPFKKKSTQHLAINHLDSAARSKGVCYCQYSRRKARLRNDGGWILHSGNPVRLWTRDSSS

SEQ ID NO: 933268 - protein, 133 aa, Homo sapiens
MCEPRGTQPWPFAQLFPDSLFFFRRMKLDVNFNGCRNEAKRLKGTSPALWSWSPPELEPSGAGALRKQEFRHAEKLGVLCGKAADAASSPPPPLPNNCVVRVPERQVRVCKLAGMALPSGVAEGLRTCTMVNE

SEQ ID NO: 933269 - protein, 131 aa, Homo sapiens
MHPFIHPSVHPSIHPFIHPLIHPTTHPPIHLPIHLSIHPSTHHPPILPPIHSSIHPSIHPSIHPSTYPSTRPSIHSSIHPFIHPLIHPPINPPIHASIRLPIHTNVQSKNGSLNNLQFPVTEQKRVKAVSG

SEQ ID NO: 933270 - protein, 174 aa, Homo sapiens
MRSLSSHTLPLCIAPDNHGPGGTAINKSSVIRVRNRKEGNLGKWGECQVDQRDTVMGVRCGIRNNVGGRIEVWARNNGNCGRLNKEGLPRPLGSVSLQPLSREDLGRSQRASGQSSRGSGSGYQKSGFTWGVEGNRHEKCEKCFPPVHTLIGSQCKELLLHLRQCTGRLLVDGR

SEQ ID NO: 933271 - protein, 125 aa, Homo sapiens
MEQYILKYTVNYCLIGGFIKETVTQTNDPLKNKCEVALLWLLWILQVLGRNICSKPIICQLPYTTKLSWIPCLTRITNDSNYQGIWQEFQEEQTGSGGPYKENTVWSTRCSCSQEGFNGMQSPFR

SEQ ID NO: 933272 - protein, 157 aa, Homo sapiens
MTTSIYILRNSVKSFQFLYFLANTCALLIIAILSAKGSHERLYREEWCTLAQILCISHRLHNRQTRTFPPVPMPPGPWVSSTKQGSHLGRHKASCRSFVFFSYPNGTWNTSEKELFTPLDRGLKPGSQVVWLSSFLPHRAQQAKIHWLEILTASTAV

SEQ ID NO: 933273 - protein, 156 aa, Homo sapiens
MFYDTKIQALSCRSVGVYQRSTPDPVCLGISSGVCRTADIGEQQMLLPDHSSGTFVSEEYPAINERGSVGVGPSEPGTGYNLLACHLLRPSEKRSIRVGVTRFSRCHLSPLSLARKGNSLTPCASRVRRCLALHWLRLGALHPLSCPQSNTPQHSL

SEQ ID NO: 933274 - protein, 514 aa, Homo sapiens
MVGSAGLGREHSRLYLSGKAEDSRAFSQQTCSPEPEKREVSVRLNQHRYSLLAITAPDIATGTSTQCSPPISAWPSPCSPRGSRDASTSPPGQPLPLLAGHHGVDTLNPASSSQADGEPGSRLYWLPLKNEWSRLCLLLCCWLPWTLASETSSIMASGLAKQLPSCSLAVTLPADLSSQHDSNRDMGCSLSPDQGPGATLRTPGGFLYSQPGLPSSEGSTGAGGGCSYILSQGCHHLKARLGLEEAAVTLSARAAIIQRLDWGWKRLQVSEKATGRQTMHPAGVFAEAWMLPVGLSDTEPLLEPAPGSSQCALIICFLSASTDNENLSKAGPCLHCPVVSRRKMFGDRQGPTHWANADVGPAGFWGWSRSRELLLPVLLQLLLPPLLLWLSLPPLPPQLSLHHRYRGCHCHHCYCSCHYHHCHHSCHSTTATAATAAVTTTTATAAVTATTATTAVTATTATAAVTTTTAPMASTTTTTATEAITTTTATAVTAAITLAVAMVTVVLGRGVLGI

SEQ ID NO: 933275 - protein, 179 aa, Homo sapiens
MHRVHPPTPVETHGPPAPGGSMVPSLDNITLASLISSKFQSWDGALAMCFSSFFGPGFLDGQQLARSLAAAVWETRPGGWRGWQGTKFNSQGLCAGGSGNGMEAQGGDTKKESEKEHSAVEGGCPDLPRMPAGALGAELGGLASVLWGPLQALRKEWHCPLPYSCLNYQAPVLEFPAEA

SEQ ID NO: 933276 - protein, 154 aa, Homo sapiens
MGEYGAVSKYEVEANKMEMKETAKQDTLWQMSSTSKPVLNTREVNPLKKFTIPKIRRTAEKEGKEKQVTSYMDGSRQRERAYAEKLLFLKPSDLMRPIHYHENSTGKTCPHSSVISHWIPPTKHGNYGRYKVRFGWGHRAKSYQTTMELIKMIK

SEQ ID NO: 933277 - protein, 2457 aa, Homo sapiens
MINWFLGKQVVFGYMKRTCSLNNCTVAKRFGKGKDATVTFVHFKKPVDPFVQENCLCNALNSEINPFISNISNSYGNVQNGNISIPETYSGQTEHSLAEIRDTSQVLAHDSDISLMPSDAKDSVNGDLLLNWTSLKNILSGLNASFPLHNNTGSSTVTTSKSIKDPRLMRREESMGEQSSTAGLNEVLQFEKSSDNVNSEIKSTPSNSASSSEVVPGDCAVLTNGLDTPCFKTSVNDSQSWAHNMGSEDYDCIPPNKVTMAGQCKDQGNFSFPISVSNVVSEVENQNHSEEKAQRAQQESGNAYTKEYSSHIFQDSQSSDLKTIYQTGCQTSTVFPLKKKVSIDEYLQNTGKMKNFADLEDSSKHEEKQTSWKEIDNDFTNETKISPIDNYIVLHQEYKESESHNSFGKSCDKILITQELEITKSSTSTIKDKDELDHLALEWQITPSFESLSQKHPQHSVEYEGNIHTSLAIAQKLMELKLGKINQNYASIITEAFPKPKDIPQAKEMFIDTVISSYNIETAHDSSNCSITREHICVHRKNENEPVSLENIQRDYKETAYVEDRGQDHNLFCNSQLSNDIWLNVNFKKQTDRENQNEAKENSASCVENNIENIYGDKKQDSHTNENFSNIDEKEDKNYHNIEILSSEEFSTKFNLICREDNAVSAATALLESEEDTISAVKQKDTENTGRSVEHLASTTFPKTASSSVCVASNAAIQIASATMPALSLNNDDHQIYQFKETCSSESPDFGLLVKHRVSDCEIDTDKNKSQESFHQSINENLVLQSIELESEIEIELEDCDDAFIFQQDTHSHENMLCEEFVTSYKALKSRISWEGLLALDNGEMEVLESTTGRENSDQHYSKESNYFYSSTQNNETELTSPILLPDLQIKITNIFRPGFSPTADSLALKDSFCTHVTEATKPEINKEDGEILGFDIYSQPFGENADYPCEDKVDNIRQESGPVSNSEISLSFDLSRNTDVNHTSENQNSESLFTEPSNVTTIDDGSRCFFTKSKTDYNDTKNKKEVESRISKRKLHISSRDQNIPHKDLRRHKIYGRKRRLTSQDSSECFSSLSQGRIKTFSQSEKHIKSVLNILSDEASLCKSKCLSRKLDKAVVHLKKAHRRVHTSLQLITKVGEERKGPLPKSYAIICNNFWESCDLQGYSSVSQRKYYSTKHFSSKRKYDKRRKKRAPKADISKSLTHVSKHKSYKTSGEKKCLSRKSMASSVSKSHPTTSHMGEFCNQEHPESQLPVSSTSQSTSQSVYYNSSVSNPSLSEEHQPFSGKTAYLFSPDHSDEKLIEKENQIDTAFLSSTSKYEKLEKHSANHNVKDATKENSCDANEVINESNSVSLSCIKENINSSTGNDCDATCIGHTKAKTDVLISVLDSNVKHFLNDLYQQGNLILSDCKRNLEVKWTDPIERPKQNIITGNFLMGPLNLTLIASKKYSIPQLSAAAVTDSEGESSKSYLDKQRILTVDSFAASSTVPHCEQSCREKELLKTEQCSSGNCLHTDGNETNVTENYELDVASGTEEDKSYGENIVELSSSDSSLLLKDNVKGSSSETCIVKKDTEDRITWKVKQAEKAKDSVYKRSMTEGSTVNTEYKNQKNQISEESCLNEKIITTNLIDSHLSTKNTTTESVPLKNTVSNPLNKREKKGEIKVSKDSQSDLTLHSEIAYISKPGILGVNHTPILPAHSETCKVPTLLKKPASYVSDFKEKHCSANHTALIANLSQILQRADEASSLQILQEETKVCLNILPLFVEAFERKQECSVEQILISRELLVDQNLWNNCKHTLKPCAVDTLVELQMMMETIQFIENKKRHLEGEPTLRSLLWYDETLYAELLGKPRGFQQQSNFYPGFQGRLKYNAFCELQTYHDQLVELLEETKREKNSYYVFLKYKRQVNECEAIMEHCSDCFDFSLSVPFTCGVNFGDSLEDLEILRKSTLKLINVCGDSPKVHSYPGKQDHLWIIIEMISSKVNFIKNNEAVRVKISLYGLEHIFFDAAKNLVWKERTQSFSKKYSQKKDEERLLRVNKCAFSKLQKIYDTLSKDLNNEPISPIGLEEDTIIASRKSDHPINEATISIENSKFNSNLLAHPDICCISEILDQAEFADLKKLQDLTLRCTDHLEILKKYFQMLQDNNMDNIFITEENVLDVVINHSHEAIILKPEAIEMYIEIVMVSETIHFLKNSIAKKLDKQRFRGMLWFDLSLLPELVQCQEKMASFSFLKDNSTDVCLWKVIETAVSELKKDLDIICKYNEAVNCSYAIHLLSRELQELSEIKKLLKKSKYFISTYIDFVPYIASINYGSTVTELEYNYNQFSTLLKNVMSAPRKDLGKMAHIRKVMKTIEHMKMICTKNAELTISFFLCQMLYNRRKILQLKRKEKMNIHIVKPGENNNKFSISTMLPPVSECINKNISNSSKKRPSTVDKCEDSQEQQQDTTVSSCKKLKVCMF

SEQ ID NO: 933278 - protein, 146 aa, Homo sapiens
MLPLQGDEKWVMSLISDCFLYLFSVSFGNMKLKPDEGDFSPVQCSATDPPWGSQSALLSRSWIQCLMTGWDPPTGTARHLIQEHFHQHQVSAPLGQSSQRKEQAVIFAILQPPLVTPPSARGTQMNRVWSGPSENHRNPMEEGLTC

SEQ ID NO: 933279 - protein, 166 aa, Homo sapiens
MGHLTLPSLASANCQHSGRQASLNLKDGEGAALLHTKFPARSRWSTSGLPPGSPQNWQCMNGIDDVTSKKDICKVPRLPRQLVLRKAAWGVAAVLAGRPPAFSVAEGTAPTPQPGHLAMPSDCGRWLSGKPVLAADFWGFARTYPLLLSCPQNASSQKESESVSRH

SEQ ID NO: 933280 - protein, 138 aa, Homo sapiens
MDGFETLEKMTRKNTFYRPRRPQEPRGPSRRRRRRLDPRTRPAEKTFKQRRTFQQRVDVRLIQEQHPAKSPVITERYQGEKQLPVLDKTKFLVPDVRDVNMSELIKIIRRRLQLNANQAFLLVVNGHSMVHRTQRLFG

SEQ ID NO: 933281 - protein, 242 aa, Homo sapiens
MSTRFVTAITLTWVLGWKPSSWFRSSSIVLCTSRSPDFSLSKCLVPMASSSSVKMMEGAFSLARAKASRTSLAPSPVNICTSWGPVNIWTILLLIIGINIQELDDVGDKVHQGFVHIDFLTVLFDLVLHGLELMGDSQQLTLHDLDLTVQKPCALDDLLRGRGAQALEERVCWGLVRLPLLQGRAVRETRKTSCLPEYLSLQEIVPEACWRQIAEGLLHVSECELASKEPWMDFELEKMPNI

SEQ ID NO: 933282 - protein, 199 aa, Homo sapiens
MFNSLETFPSEFSSLPFPSCTDIHPTPILTQRFGWRGLIDLEGLACSIQSFRYSRHPRIILSYWHGMMSFMTWCLAILGSFPSPRWGMHYLHCFPPLNSSCDRSQALNYWEKGKMGCKSFKSLNFGFEIGFGERGYDGEVDPGYKMIGGSLSKAVITERVLQAKAGVPERAYTNGRPDYIKLPSLAQTGADLQAGSFES

SEQ ID NO: 933283 - protein, 142 aa, Homo sapiens
MHLLPYRRDFGPHKVAPVKVHQYDQFVPSEENMDLLTTYKKDYNPYPVCRVDPIKPRDSKYPCSDKMECLPTYKGAGRGLRVKNAPCLSWGYISGCPLQTTEEWCLVAVSSCGESQKEKRALASSLQSLYSSANPFMKVEPA

SEQ ID NO: 933284 - protein, 675 aa, Homo sapiens
MVAEFGEVRMWEIGKWSPCSLTCGVGLQTRDVFCSHLLSREMNETVILADELCRQPKPSTVQACNRFNCPPAWYPAQWQPCSRTCGGGVQKREVLCKQRMADGSFLELPETFCSASKPACQQACKKDDCPSEWLLSDWTECSTSCGEGTQTRSAICRKMLKTGLSTVVNSTLCPPLPFSSSIRPCMLATCARPGRPSTKHSPHIAAARKVYIQTRRQRKLHFVVGGFAYLLPKTAVVLRCPARRVRKPLITWEKDGQHLISSTHVTVAPFGYLKIHRLKPSDAGVYTCSAGPAREHFVIKLIGGNRKLVARPLSPRSEEEVLAGRKGGPKEALQTHKHQNGIFSNGSKAEKRGLAANPGSRYDDLVSRLLEQGGWPGELLASWEAQDSAERNTTSEEDPGAEQVLLHLPFTMVTEQRRLDDILGNLSQQPEELRDLYSKHLVAQLAQEIFRSHLEHQDTLLKPSERRTSPVTLSPHKHVSGFSSSLRTSSTGDAGGGSRRPHRKPTILRKISAAQQLSASEVVTHLGQTVALASGTLSVLLHCEAIGHPRPTISWARNGEEVQFSDRSLSGSSSVWTQGDEGWPDTQSYRCTCCTYYTTMMPSPLPASQFIKCRILLQPDDSLQILAPVEADVGFYTCNATNALGYDSVSIAVTLAGLCCHTVLQSHMLPPCISV

SEQ ID NO: 933285 - protein, 142 aa, Homo sapiens
MSSRRAGHSLLFRGLRWRAALPALCVPLGRGVHTQDPSPCRSATRLQESWRILPRAQEGMSQPFCGLRALRTSPCPPLPWEPHAPQGEAAGLSHRHLPASMPNGHARSSVLESNHIFKNQAPASLSPGTLGKSPIPAPRFFI

SEQ ID NO: 933286 - protein, 135 aa, Homo sapiens
MRKPRLSGAAESLGFAKRLLWAGHLPSCKRKHRPGEPGDPGPPHRRGAGTRPLEELLAFTVSAWSLVNGRLPSGKLLLRDSDPGWSEASTEAVGPAFRPPSHDRTARRRFCEPGGGPHHAETVGAFILDFQPPEL

SEQ ID NO: 933287 - protein, 177 aa, Homo sapiens
MNLGVAFLSLAHWKSCGVVSQGYERPKTEAQRGQENCPKSHRRQWEADAPAGSADSKAWVWVHLQEETQLSQKPSDSVAAHVFQEQNKHKPISAGEPCLGLHSAGGRVRRPRPLKTRTQSRGPSLPRNRILAGPRACWAWSGMLQLLGFGAGRKGRWNKVEGLRSPWSAWRLPPSPL

SEQ ID NO: 933288 - protein, 145 aa, Homo sapiens
MTVAGVQKLIKRRGPYEMSPSLLDYLTMDIYAFPAGHASRAAMVSKFFLSHLVLAVPLRVLLVLWALCVGLSRVMIGRHHVTDVLSGFVIGYLQFRLVELVWMPSSTCQMLISACTTPAKMPPTYCLMQRQPVLAQDNASTSCRC

SEQ ID NO: 933289 - protein, 125 aa, Homo sapiens
MCTCIPDGHWQPLPPPPPRHVLGTRDRGEPFWDGWRPWTPRHMAVPEGWCCLVAAEGRNPHTAQAGQRWQWCLHQPLPLEPILPSQPHGLRAGSSGLQRFWESQCPWNEFIFCLNQLETISVAYK

SEQ ID NO: 933290 - protein, 270 aa, Homo sapiens
MFSLQVERLSGEELTQEQSRGADPHLDEIPDSEQRLRWVETFGVVWEGERGYFAREEMQDSVARGRRKRSRVTVDTRDQAIEGTVAGRRPSLGFLTCREAGKGEEMESPAAPPEGSTALLSLVSAVRPAADFQPLGLWNTFVCVNHAAVVNYYSSHGEGTHCPWATGKERTARGHHCCCAELTARSAWSRQAQRLSPQRPERPVQASPASLARAAVVRSCVCCSSSSERAWCWAQCTERGCGNLPISGERGLLYNNISLVTAEDQQDECV

SEQ ID NO: 933291 - protein, 174 aa, Homo sapiens
MTPSEMSKRTSGSSLASGTTSLPPATPGRKEPENGEGFVLRALGQCLPTWHPTCSTATMRSQAEGFTQQHTEGLAARLATAELWGSSAARDWPCRARVCRIERGLSQNPQPELDPSVLSMLPMATRGRDAVTPRCLLAGLPRLANASRGHQRPGRHYPTLSAGRVTVNPPGAQK

SEQ ID NO: 933292 - protein, 182 aa, Homo sapiens
MKTVGLQPGEPLQKVPTGICGPLPAETIGLLLRRSSLSLKGVQIHTGIIDSDYNGEIQIVISTSVLWKAEPGDSIAQLLIVPYVEMGKVKLNEQEDLEAQINKAKQIIGHLKPYHEPDVKEEILGGSQGPPGCSHVETDTEEDPNCHKQHPLNTATHLATDQEAVTDGGRKPEESRTTSHNE

SEQ ID NO: 933293 - protein, 144 aa, Homo sapiens
MHMVDQPTWGLAGWGWGYEAITLARSMGAQLVDHSGGISASSGPWKWSSNSGYECKPVLLASECVFQGSSAFTWKIWESWELPRDLLNGFAQNADSDMDNKVQAEVVPDGDEELVGNWSKGDSCYVLAERLAAFCPSPRDLWNF

SEQ ID NO: 933294 - protein, 144 aa, Homo sapiens
MCLVAPYVCPWLYPQADLTICSSRAGSSQIGATFSKFQSVLILLKEMLVISRRMHGLTSEICATSCDFHVRTCQRCHVACLFTLKISSFTRFLGLLEFGFTTESYLEHAGILQLRLPSQKLWELNNEDTWTQEGERHTPGPAVV

SEQ ID NO: 933295 - protein, 150 aa, Homo sapiens
MLGYEKKEISCYRKSYWKLAVKCEQCEQRQKVFQPHQSCLQRVKDIGCKVPQFHPGLKAGFLPACPGHETPPVSAIIEVIAVPKDYSLVWRNCVETCMNAGLSNEGPHANSAVDRCADNQNQLPNIYHGADISHTCCTFSELVAHRKYEA

SEQ ID NO: 933296 - protein, 147 aa, Homo sapiens
MAQPLNRGPLKEKKEPGIREVGRVFQAEEEARHEPGMGTGISDSGVPPEHQICLGSRNNGVFFIFCGRKRITRLLYWKQGDEKTSFKAQIAVKKFVQTTQIREEGTLDHGEMSGGGIEAALIEAYPDWDPRDAEKEQLLRAEFLEKQ

SEQ ID NO: 933297 - protein, 145 aa, Homo sapiens
MSEVLTQLCPLWLPRDKLNCNIIYNSDNLSNHDMNTFIKSERCVSTGSGINVKNRCEAGSLETFSDHTGIAKKTLLKYKCLGSIGRHSDSVGLRKGPRICISNKVLMLLIWGTHFKNNWHGEFSEVTSSMVAYYFTKFCHPYSQG

SEQ ID NO: 933298 - protein, 148 aa, Homo sapiens
MLFTNNSSSPVQPASAGFLFQTLLSMDSRSADKLFQQIANQKIFESIYDLENRGPQPLGHGPVPYSSRQAVGRQALPPELCRLLDRRWHWILTGVYKIYKRKKIDSQFHMAGEASQSWQKASVWAPVSESQDSPTALTCSFIENCERL

SEQ ID NO: 933299 - protein, 244 aa, Homo sapiens
MSDFSYVITLQRQFQWEIERKDAVAVRHSQRMPEIASKPPKLEEAKKHSPAGFRGTVTLRHLGLRVFSLHNYLHKDDSSITLDSQFLEFFSFKSPLPFYLTSISKMHLLPIIKTPSHLISRFTEKLSRIYSSHTPPPRPQAQTPPSPTSHQSGAFAGTGRSAIVAMIHSFSLPLMASESRGPDELALSFLVKMRTLSPDDFKEAYENQCSGSHLTDCTAGTHFAQGISSMSAYGAHLVENSKQL

SEQ ID NO: 933300 - protein, 343 aa, Homo sapiens
MIVLRCGVFRAQLFTERGKYISSLEIISCVCEACASKTPNALHKHQLNITALAFFSPCHGKEVAERLQCRWDGDTSVGNSDNRKHLCLPVAQKVKLLEKLEVVCEVSFRRDGVRMDTIYDLRKQKDKLLEFYAESDENKLMIKRKTMLKAKNEDLDYTALKFLKMCGDRASDDHKAAEKFIDEFAKVIADESLMPEQVCNADETSLFWHNYPRKRLTKADETAPKSMKNKYNNTSLNSMLAAVTRGVDPFHKLEEVDIEGVFNINNEASITHSLTNGEIVEMVLNPGDRGNSDEEDDIVNTAEKVPVDEMMKTCTGLIKGLEQCRFITEQEIIMQFIKSKGDI

SEQ ID NO: 933301 - protein, 156 aa, Homo sapiens
MQNKINIILLPNSINVNKGRLRAPWSSSNASVWEDTRYLADRKRHSPFLGGVREHSATSFLWKARYYPGLPAVINRPKPLPVVLCFNGRVPCPLSCSSRTPGSSLKFVVHSDRRNTESLKVFYLSYKCIEENADVCCLLSLCFGYLKGKGPRPLIT

SEQ ID NO: 933302 - protein, 126 aa, Homo sapiens
MSTLSRETKALSYPSPTLKRDYGDQIIHGILVKVWFTVDLWVLCVNEVAVSLIHVCNWSEHVVSLVEYNCFLSYTKGGVEKSPKKDCGTGEYVFLLLRRGYIKIKYTVFVKFSSTTIRRANKSSVA

SEQ ID NO: 933303 - protein, 175 aa, Homo sapiens
MWGWSSHTESPLGHCSSVRRRPQSSRPQNGRSTDNLHHVSGKATDTQHQSMKAALGTVPHSGTGVEVPKALRAHPLHQCGLATWQCGEKSNPGKEDNEEDRLMKRNSSSLMEKVEGQAEQRERRVSSSHKFFLWQQGTLDWRKEWRDKSWQGLPDHWENGTNDLLHAGFPEIFRL

SEQ ID NO: 933304 - protein, 230 aa, Homo sapiens
MTERSSAGKLGTQKNQDSECEGQDPEEIKEKKGKLKKVYFTSQSVPPAELSEWPPPPSPPNGYSRKRRLWEEPKLLIRVIPQTNISETKEKTENSRQANSPTWGQIKKLVQMAKDNLKAQNKLKTTSNLMVAMLAVLTMAASLLTIGATQNFTYWAYVSFPPLIRSPSLEGINCLVMRILTQSYGEVKEPRSPANSWVSEPSWMKILQPQSSLQMTAALAEKLNATYERP

SEQ ID NO: 933305 - protein, 143 aa, Homo sapiens
MRLWRNMKQQQCIEEGICLWHRKGRGLQISIRWSRIWFTAEETFEQHPEGGEGVHAAKHQRTDKLRLDISFQVNKFRGQIPIRIIGKLPGKSTEVLFDQGTEGKSLFVKVQDDPQTLTRNWKSKDLIKASNAKKQLKQKKEEK

SEQ ID NO: 933306 - protein, 157 aa, Homo sapiens
MFQFGLAMFQISRKDMWLLVTVLLDSTDLGPWSSNLASPELLIPWVWNGAQEFAFLTTSQVMPVLLVQGPQLENPCLLSNGCLSRHWHYRLTMEPSRSPYAGVTEGSPLAFLVTSHNVPSAPDPIPAGKRYDVNSTIDIKDEQWRMECGRTRPGESG

SEQ ID NO: 933307 - protein, 137 aa, Homo sapiens
MPLPYGQVGIMNPSQSRTMAHGRAGVNSTQVTASLLHLKGEEPQPQVLSSCQPVRDHTLTLEEEEQPRLLVAGGAFLAVAGRVSRLYGRVPVPGLGVGVHSVLTPPGSEFQRSRAFGGELGGCAFDLALQEHKPWST

SEQ ID NO: 933308 - protein, 168 aa, Homo sapiens
MEGRAPGTPTGSIQGHDLPVVGCRLCSRTATTGRLQQATLLVWVHGRGPAAVLTSWSFELRQSRGHYNQACRQRQSVFKMAHTFLKCLAAAPPGFEQSPAGSGKCATPLMSCCGTAKHPRDGYNLSQRVPWLKETGTLRGRWLQRGPENRKDILKADRFDLAKDKLAA

SEQ ID NO: 933309 - protein, 118 aa, Homo sapiens
MGNAPASGTHLPWGGCHAAYGISPVAGCSCRVLLKRLHVAWDSIPVMPELTSEYSYDDFHSVTGADRRQMARGGVQESKVTVSGAKPHRRLASGSVTIWSKIALHNNLQSSQVEDVWY

SEQ ID NO: 933310 - protein, 144 aa, Homo sapiens
MARIQRAAVARVIVKSKRIKLPQHGAGPEQVAAAGWEVASFYSLICPRPCSVSVLSECPFSILPFREATFRILLIGAFYRVLIAAFYRVLIGTFYNPLASYRALIGAFLQSADWCILQSSCKTEKFSKSPLDPGSPAGFTSHHL

SEQ ID NO: 933311 - protein, 217 aa, Homo sapiens
MYVSHVIKHDERIVEMMIPRGHCDGLNYVPKIHMYWEFKLEPPVPQNVTAFGGRAFKESVVLHDGSWSWLIQPPVIFTSANPELAVPMGSVQQWSAQALALDHLETESFHCGLEASEPSPYTNGFGKWWGTEGRHKGWTASGSVLNECARPPAQVSALLEPAPCAQLQLAPPSPYSTMRTKGGCAAVIRALQVLLRVHLHGRLFANVNTILNSQAIG

SEQ ID NO: 933312 - protein, 176 aa, Homo sapiens
MENEYRGQLQAKCHLTHRWVQQGDCGGPGKGCQPQAREHLCRQEPLNLLCDSGATKFFPMGEAASYTLCCQGPRSGWETSHEQLLLLSGHGSLVHGLLWPLLLPLEESPITITSLAIHIVGGGDWAVSGCHVALSATSSLETDRSPGLVLRPDHAQVVFDRKSELPADRCDGRSAF

SEQ ID NO: 933313 - protein, 127 aa, Homo sapiens
MSSRFIHVAKMTGLTSTVDGDIQLMHCSEGQMAVTGNDELCRHRAEQKKQNTDMKNSQAQNNMCSRNKFQTKGNTKRIGMGASWGGIWKQGNKERGALKLLEPTLRLHLKDGEHLRIQTSGLRGLCS

SEQ ID NO: 933314 - protein, 192 aa, Homo sapiens
MDGCNCQSYGHQMTSELTALCPAGAQSFRSALVILAKQDGFAFPLGSSQRPLYCSHREDSPISSSTSALRMNKGFMIKHSDLIFSACPPCPISSFWVSCPLSTPPNTPGKCSRRLPVNSGDVLTRMQMLHLVSLARSCQASSLSLGVISFSFPGVQTLLPKAHHHQNRLWSCSASECGPADTLIPDLQAPEL

SEQ ID NO: 933315 - protein, 142 aa, Homo sapiens
MHIYSFHSSPCLAVHMCVCMYMYAYIFVHVYVCVHVLVCMSYSVQAAVTKYHRLEGLSNRKFISYSSGGWKSKIKVLADSVCVKKKRTWHKHGPGQAPDVKPVQNGSQLFIKELRSRTFPRGQNSWPQEGHSRERLLPCEWV

SEQ ID NO: 933316 - protein, 143 aa, Homo sapiens
MELALVQMPLTEWLDHIREIQRRKTEGGEDDVKMEAEIGMMGLQAKKYQGTSEANRSRKRQRTDCSLELSQVLQPYRHLDVRQTSGLQHSVANLYRSAATSFLASSEELVVPRPYSPFQQQVVLGKLDIHMQNNVVGPLPNVM

SEQ ID NO: 933317 - protein, 173 aa, Homo sapiens
MDSLWQKETQKMLKPDSTALARQEVSDPSTLPYLANCRKIFFPVIKQKPVPEKQCLEDFPTNLDRPLDIVADLPSLIMVLPLQLTSLTKHSFLVDDHQPEPGSDQSTEAVHGMPLYLEAGCPRSRCQQAWCLVRVAVAASKNDQSSALLEATVKGIQDLSSWQRSKNFLPARL

SEQ ID NO: 933318 - protein, 178 aa, Homo sapiens
MVDSLPCASGKAADTQCLPMKAARRETVPCKATGAELPKTMGSHLLHQRDLDVRPGVKGDHFGALKFDCPTGFWTCMGPVAPLFWPIFPIWNGCIYPIPVPPLYLGNKGGKADGSMSWGGDVATTGDGEAISSGKKVSSEFTNSVSPASSGSSHMSPFQVAGSHSFPINALTLTGDTW

SEQ ID NO: 933319 - protein, 148 aa, Homo sapiens
MTSAKDIEPVGAPVRQEVLCPLPSPSPAITVRWQTGPVSGRHLSVPESSQQAWWPWCSALEAPCCLVPSLGLSLALFVELAGLWLRICTSSVLQPAATVVSRGRSALCAAQEVLASLCPGMKLPSLRPTLQAKLSCLCLAFHFLSLWV

SEQ ID NO: 933320 - protein, 126 aa, Homo sapiens
MALRVREWSNPNPPPTLLPIPSPAELSFHCAEHEEMETQRGEEAHLRPPAVEDLILLAGLKSRPEQLHSPVRKPNTNFPDKGSLWSAGNSCCTNLVSTRSRNAQALKMVGSLGRLDKNEELSSYEP

SEQ ID NO: 933321 - protein, 147 aa, Homo sapiens
MSSSTSYWPQGCFQGSQHSPLQPGKEHNHWQAGLTHPQRGHGNRPETHTAETASPMAAPTHFVPDSQLDDVAMRVKKRPYFHKVVPPQPLTSSKISSSPQGKTLYPFISSYSPLPFSLLQPPICSLSMDLPILDISYKWDHIIHDLS

SEQ ID NO: 933322 - protein, 178 aa, Homo sapiens
MPPELEAGRAGQLPALTEKGVPMLLCILSPETEESSGTPEFMAVSSDGSCLWGFQTRDRLPAWLSAAPWSVEEVGFLLTAATPRQGAEQLCLEEPGLFWAKLCCFPLPVMLLELGKETFPWELTDWRDPSQASGGRNFADKGTVAHCVSTAQGQGDKEFVEESKSWPGISEQSERGEG

SEQ ID NO: 933323 - protein, 162 aa, Homo sapiens
MTLRGRGCCLTWGPAEMVESGDPSGHRLFPFSPTTQGFRSRPEPGGNGESRPKDSSGGPWLYKTHGTGICSASATSQGAPQTASNHQQPGERPGMSPPSEPQKEPLLLTPSFQTSGFRSGEISAAFSHQGGGDLLQQPQETDTEAMVWGQECMIRSSQPLVL

SEQ ID NO: 933324 - protein, 295 aa, Homo sapiens
MPPAIELTQAAGGRPRARDPTVLSCLSLTPPRFVNKDDHGTKFWPMRTFRKAIVLLTEKEGGKGSEGHMGTTLPNLGCEREGHVGTTLPNLGCEREGHVGTTLPNLGCEREGHVGTTLPNLGCEREGHVGTTLPNLGCEREGHVGTTLPNLGCEREGHMGTTLPNLGCTTTLGDNRRHLVKCSCVPWERASHETPQVRYGVRQRHQRSSFSLQILRPPDSCLPRADGPRHHFEKQFPRMKLQARRGMEPRDSPGVPAGVPGLTRRYLLYFPGVFQGLSERRIEIDVLVVYSMCPP

SEQ ID NO: 933325 - protein, 179 aa, Homo sapiens
MRWPHLGPPYPRIPLFLLTLSARPAASRAEESAPAGLMWKSKPVAVDLGPCGVDNPRAQMLPSAACISIRELDPQATSGATQGPTNTSVALEPNFVPMKRRKPWLGGKMSRPKAGCKWNAERRAEFGPLVLIVTVLVLLKVRWQQAAPELDWLDANPSSTTCELYGHGQVTSSSCALVF

SEQ ID NO: 933326 - protein, 142 aa, Homo sapiens
MRCLPAWIEQPRPLKGAISQRARAMQLHLATPVTSLITTSLESRNKVGVTRVQLHKLLSNSSPLEVPGHWAPMWLDACTEGFHGAVKEKKSYCPLTYVQSNHRTNAPFTPRVLLLGPVGSGKSLQAALLAQKYRLVNALAPA

SEQ ID NO: 933327 - protein, 149 aa, Homo sapiens
MSSRQLLGWQHQCWPWHFLFGQLCTVAELWALSSWQGPVSPDQTSTGRTCGPAGPAQNLGSKVRAFGNEITTTFIVCLPRTLSHSQRSQESAVIVPQTCQREENCLGRHPEEECPPAWPMVLLHTDGWQPAPCDKLIRPNLSMPGSALH

SEQ ID NO: 933328 - protein, 181 aa, Homo sapiens
MEEKLLASLSGCLTQSSPTDSSALTLKPQQRACWVALLAEGRLILRANTVLTKLVLSTASHLKGPVPFASLKRDLPESGQESMIHMPPHGVESARFLYVLPMCTKFDLGHLYSSSFLRPSVFLTRQNIPSRSLWWQSLEFPGREPLQKMVPDMPSVTTVQRMKQIHVQGMFSLCAAFIKSN

SEQ ID NO: 933329 - protein, 136 aa, Homo sapiens
MRCLELWSPNTLGTDDVQSPVLGTSLPHTCPPETGAQSEVCPNNKASPLDGFCRPPPGAERAGPAPARGVAQGGGLRSSVLTPCDASLVVPCAFCSEAAAKEMACLRLYSTLWKDGKQTVIDKSSHECNKFNSKVS

SEQ ID NO: 933330 - protein, 154 aa, Homo sapiens
MGAGSLQGCSQTGTGEHVGAWKLGDNRDRRAPKRESQPWLGKLLAGCPNVCCSQQREGHGVDSFPLPLVVLTSAQLWLSLGLLWASEGKKYTLVGPWVAMGGPEKAPQIPTLVHGTGSPVPNLQALPGLKVGPHQGPTPFCREACLLPAAVHGA

SEQ ID NO: 933331 - protein, 161 aa, Homo sapiens
MTEAEQVGDRHRGGSKVKTEAKIGGMRPQAQECHAGRQKLRNVSITRGHWLKTPQIWKSMSYKLKHTYLYWVLCPCVDHPVFFGVPLFAQAPQLEKHRRTDTSWILRLFLPPGTGRQSAWLCEWRSCSLAQRDSFQGAPLRGGRDRKVVLGGTSWDMGQAS

SEQ ID NO: 933332 - protein, 638 aa, Homo sapiens
MCPPPLLHGSCSWGDRYLCPGGWGLPRTCQRGWSHGLPLPPPPPAAQVAPIVSPGNARPWPQGAHGEGSLAPSQAKARPDDSCKPKSVYENFRLWQHYKPLARRHLPQSPDTEALSCFLIPVLRSLARRKPTMTLEEGLWQAMREWQHTSNFDRMIFYEMAEKFLEFEAEEEMQIQKSQWMKGPQSLPPPAPPRLEPRGPPAPEVVKQPVYLPSKDGPKAPTACLPPPRPQRPAETKAHLPPPRPQRPAETNAHLPPPRPQRPAETKVPEEIPPEVVQEYVDIMEELLGSHPGDTGEPEGQREKGKVEQPQEEDGITSDPGLLSYIDKLCSQEDFVTKVEAVIHPRFLEELLSPDPQMDFLALSQELEQEEGLTLAQLVEKRLLSLKEKGCGRAAPRHGTARLDSSPSEFAAGQEAAREVPDPQQRVSVETSPPQTAAQDPQGQGRVRTGMARSEDPAVLLGCQDSPRLKAVRPTSPPQDHRPTCPGLGTKDALGLPGESPVKESHGLAKGSSEETELPGMVYVVGSHHRLRPWRLSQSPVPSSGLLSPGGRGPQGALQSPSAQKRGLSPSPSPASKSKKRPLFGSPSPAEKTPHPGPGLRVSGEQSLAWGLGGPSQSQKRKGDPLASRRKKKRHCSQ

SEQ ID NO: 933333 - protein, 165 aa, Homo sapiens
MVYGTSEVIGQRQSLAAKPRRSQSESLGPEFQGLWEWLPGIPWPGGQISGTCSKLLGEEVLEERLAAAVQAKAGLAAKGEGEGVEGYLPLPQKSREGVETRREGVGGLAAKGEGPRQVSLHVMAPNFMRVRVKRPPKRLCVSNMAVYFTWVQYLLLIGKENGVFG

SEQ ID NO: 933334 - protein, 168 aa, Homo sapiens
MAEGTGDLARLGVGWFCLCSLGQHLRVPTTRSQPASSARVLYSLSTPSTGMLELCQSPLGQCKRPVEVTSQDGRPGGSHSCLIPVVFTPREVGPSSAAPTPESPGGTLRRKQFRMHEVNGTNEHRGYLRWLNTRRFLVGNTWKRRGNSAPLPPYLGLRVSSTGSFIIT

SEQ ID NO: 933335 - protein, 321 aa, Homo sapiens
MVQEKNTAGALGLLTELQNVLELLRSTGTGMLLNVSLKQSADEEVTSLAKSLVKSWKKLPDKPSNTCFICSLARSTSDSVRMKYREMLPAALRTGDDCIEMGTDEEELGSRTEEAIDPERGNTGMKYKNRVQSKISNLTDAKNPDLRKNAPCGNIPPDLLARMTAEEMASDELKEMHKNLTKEAIREHQMAKTGGTQPDSLTCAKCKKKNCTSTQVQACSAGEPMTTFVDCNECGNQQKNTSLKHSSAHMSAPTHCTELRGSMCLTGRAPRAASCQETVETEALSPSARGTEILPTTDSFLVQLIRHLDYSLRGAPEQRTC

SEQ ID NO: 933336 - protein, 338 aa, Homo sapiens
MDLLVLSQGHQANIPDIIHIHKEALTKVTESRQHVAEGKTEVQRLMMGEIQERLECLHKKEPSANSQDNGEKALKAFQRSFQQPLLSQALGMRREWFPGPAPWPGCCVHPQDTAACIPAAPAPAMAERCTVWERYRHSTPASSMRAAAGTYHCKPTGGDLPKALGAQPSHPCAVDVGQGFQKDDFGAVGLNDGPAGFWTFMYPAVMKIGENVKAGSQVANSQRDVCSSPCCHRPWDLGEKSGFLGQPHGPAAVCSLRIQLPASLQLQLLHQPCLKDAQIHRPTKSFVPSMGKNYRHSTPAQPMKAAAWAEHCKATGAELPKAFGAQPSHPCALDVGQG

SEQ ID NO: 933337 - protein, 141 aa, Homo sapiens
MIKHQGKAAFLVHDRRWSFGFTDKTCLFCLYQKMKGIEIKRRERLKCGAKIERRKRLRDSEGGPEVVGGSFSWSKEQEDRGLICQGRSPDPSHGTKFHVCPCEETTKQALCEQHGCLFHLGAGGLSPKRESAKGDKGGAVL

SEQ ID NO: 933338 - protein, 153 aa, Homo sapiens
MGKGNFPDPHRSINRQITNADLWKHQKDVFLSAISSGADSPNSKNGNMPMSGNTGENFRKNLTDVIKKSMVDHTSAFSTEELPPPVHLSKPGEHMDVYVPVACHPGYFVIQPWQEIHKLEVLMEEMILYYSVSEERHIAVEKDQVYAAKVENK

SEQ ID NO: 933339 - protein, 138 aa, Homo sapiens
MNFSKVLTMRTLFSRAITNSAAANIPCQNPPVHAHSLLLEVLGDRESLTSTSAEISLNSSKVIVPLYSAVSHLQQHLKLQKLKHFRNSDISSLRTGHDDDGGFVEWKRGKCGERKEKSDCCCVCVERSRHGRLHFVLY

SEQ ID NO: 933340 - protein, 251 aa, Homo sapiens
MSATSLQIPKPRRLAQAIILAHDEVHRGGAWGSEARVELDRRHSPQQVAKRDGSAGLPIPSGDGRRLFPEEWGGVRNGNRWRRSPGPWPALAPAHAWPLRRESRRPGPPPARLAQPAQVSAASLGNYRPPAAGAGRAQGPRPRHSQPPKESCTVYDGRQRARFHKARERGRGGAAGAVTSRAATPRGCPAPALGRAWGGSDARPPVHLRRFVLPPPPPSLSGLCLDWASGPVSKATVEDSHDDADGGDNLD

SEQ ID NO: 933341 - protein, 152 aa, Homo sapiens
MLNRIALNELIEQSVKWAWLPITSQCLTTKGRNSAGRTEGEQGRLPVGGIFACGVIMCKSLILSEAQSPHLENADQNHIYFIGLFCTLSEEVNAKPFMQCLLHEKLNSDAPKQVKNELHLGKNSSMPWNVIKILKLGDEFTFFVWVRICKWK

SEQ ID NO: 933342 - protein, 160 aa, Homo sapiens
MPHTAGYPSVTKLPEERSGSNIGCSAIFAVLQLPLLISRHTGSGVDLQQTPTDLQLRVLLEGELTNRKDIHTKTPSVCHHHQRPKLKEDVRAHCEEAKNVEKRLDEWLTRINSVEKSLNNLTELKTMARELRDACTRFSSRFEQVKERVSVIEDQMNEMK

SEQ ID NO: 933343 - protein, 144 aa, Homo sapiens
MWFLQYKQAFHPAQIHNASTPAFCVKKKSPLVSLPCVYRPQEAKREKENRTVLKRTSSTWPIEGAQQVIVGLPHLSQQKLFIFKVECSISEGVPASKGFTTRGIPQTSTVTGNFSPALPPYCLLRTLGPLKCDSIRGGFPDTGM

SEQ ID NO: 933344 - protein, 189 aa, Homo sapiens
MPPKELFTPEARETPNPPRGTNNSRCAALRAVTLTTVCSFTTEPARPRTRQKEETPNTSEHQKEQTTDTPPLRTVTLTVRVRGFILEVSETRSPPIPDTISSRKAKYIELTQVVLGEAFLYINSQTETQMRKTIPFATATKRIKYLGIWLTKEGKDIFNENYKTLLKEIREDKDTEKLSMLLDRKNQYH

SEQ ID NO: 933345 - protein, 139 aa, Homo sapiens
MAAGTEVLRDPRPVGPYMGLSSASAQTPGGSLCCSGGSWWPWEAVPLWLHWVQALQLLSQAGIKYLQLFQAHDASCQWICLSDGGPILTGPLGSVSMGTLCGASNPTFPFHIALVEVLHEGSIPAADLCLDIQVFPYIL

SEQ ID NO: 933346 - protein, 138 aa, Homo sapiens
MGATIQDEIWLVTKGIVLNKKTVMQGGLSSKECYRFKFFSRLREQTIIYTGTGRQGFMEGSNAPVCTLEAYFPGLYCIAAATWVTCDPDRSESRKGTDRRETGGQVVNVAMGRKRNNSSSNYTLSTYANTLSPSFTLC

SEQ ID NO: 933347 - protein, 125 aa, Homo sapiens
MNRVWVTEITCFTRHGEQQVRNPWVENDSGMLDEKQEAYVADGVSEVDPSSSGPREVVTHQSVPSWWALYFTCCSLSPLKAKHDLSAASSQSDFAEGSNDFVCSRRIEQGLANDSPWTKSSPMFL

SEQ ID NO: 933348 - protein, 212 aa, Homo sapiens
MSLPDSPEESSGSLSTAFEGQTASSSGSLAPMYPDWETPHSRVRQTLHKKELQLASGRCPSGVKLPEEGTGRNLCCSAASASDTQAKRVWSGPPANSSRPAAEECLFSSKGSQLLTSKGTKLWLIKNSSELKEHVLTQRKKAKNLEKRLDELLTRITSLEKNINDLMELRNAQYENFVMHTQVSIAESTKRKKGYQRSKINSMKVRRLEKKE

SEQ ID NO: 933349 - protein, 178 aa, Homo sapiens
MVSSIWYVFAAAGTDCSFPCLVLPSGAFVGEVLLDTILKSVFQPGSILPFTIRYTNQTDALPREEESGEAVWLWRLCEATLDSTQFKLLSCFVYTVRGKLPTQASVMADNPPPTKLQCPRSTSDCCAGSENFKPGDLSLLDSMGVGSTELDHLAPWLQPPFQGSEWFGLTGIPGATGV

SEQ ID NO: 933350 - protein, 163 aa, Homo sapiens
MILAHHNLCLPGVNEVLAACLCRLLNKADNLQKEDTRCQVHPAIIGVYIDFGEIEFNKCTLRMIADTNSMSRRLNPIIIPEKCALLKKNQKYIDSGRFMDRKEEIDVQKIEVRDIPFTNLAKTKNTEHPGSKRIRDAKNYPLTIRLEEGAWFLFEYAKKIQSN

SEQ ID NO: 933351 - protein, 137 aa, Homo sapiens
MADAPPPARLQPRKLISDYCASSEQGSVGMGPDEPGMGENLLVCWLLRPWEKHSIWAEVSHFSRMVRSPRPQGGPEVPSRSRGLESKTLELYLVFCYTATELTLKLKDDSTEFMASQFLCSLHHTAAAGVGEGWQFR

SEQ ID NO: 933352 - protein, 158 aa, Homo sapiens
MCLELVPSGGFLVLLTSRMKPRTLMAIAAIDSDSSDGSGQSKLKTCWKGFIILDSIKNICVRNVASHLLLPVSFKAMKGLILKNLRNVRNVVKPSVVPVPFESMKFLICGFKKPYECKKCVKAFRCSNFTRTHEKTHTGEKPNKYKEYENVCNFPSSL

SEQ ID NO: 933353 - protein, 141 aa, Homo sapiens
MFYSSIKQFVVKAKKRIILFSVDVAPCYNLTNSVQGFRLPYISANTGYFLFLNCSHPNGYEEIPHCGLICISLMISDVEHLFLLAICTSSLEKCLLKSFAHFYFLFLNFISILSGVQEVFGYMDYIKIIDKNLEIKIHKEK

SEQ ID NO: 933354 - protein, 141 aa, Homo sapiens
MSFNQEEEGKLLKSDPTAKGQLLPFNTPATLHSPQPMTDEPWMQKGSLSGDELTEGCGTRGRWTGLLFLGLLQLVGGVDKAFRVFGPSFVQGWQEKLHCRGSGQEAFSCLWRLCPGSCQVGTGLIALVGGGWRPKPGGPAW

SEQ ID NO: 933355 - protein, 151 aa, Homo sapiens
MWKGNTGLEPLHRVPTGAVPSGVVRRGPPSSRSQNGRSINSLHNVPGKAAGTQRQFMKAAARAVPLKAIGVELPKDLGAHPLHPCVLNVSHRVKGDYLGALRFNDRVLDFHGACSPFVSVNGAPFGTGALIQCLYFHCILEKQKPVQPVEL

SEQ ID NO: 933356 - protein, 168 aa, Homo sapiens
MGVGLGKWANSRGILRHNRNASQPIGCGGCMRGEAKIIYTLLTTGPPKNPPTTSVRHEQVTDPQCRVWTSADLDSDGHPVIWTWLSITTIPGLFTVRPIYRLKGLTFLSTQVEISEYSRQAGIEAYHRSQKLFFHLECTSIFPHGLLPDFLTTATKDIDSYIQTDIQN

SEQ ID NO: 933357 - protein, 145 aa, Homo sapiens
MVWDAQFITDTVGCKAASKLILIDCSCPGTDQNSFDSNVVSVAAEQSIQNAQWEGSSAMLARPDAKIISPTCQLAKAPERTCASDSGNPTCYKQPCFTAEDDSCPRLNGYNLMEMSVPLTRRHLKARKMAIYPEIHCPKHSKRPQ

SEQ ID NO: 933358 - protein, 145 aa, Homo sapiens
MKRGNWYKSITSFFLLHWLIYEEKRFDWLIVLQAVQEPCLGSPQETYNHGNRQRGSQHLVSYDPLHRAMLSRLQEPFLTLALSGLAVTVPFPARILTITVSRSSMERSIGIQGNEALSLITYKELRLDSNHSVAKAQERIRNKMP

SEQ ID NO: 933359 - protein, 141 aa, Homo sapiens
MAAVIPGELYYARRDKDYLQHIHWGTDVTDQMSLYYLPPQEGFGHKEYQDQEKGTQVTMHTVRLIMCIETKSLMFQRAVPAPFLLLPPGAPVCPLSSCRSLPLSPLPNHQPQTGAVHLLLIPWSVGGPLRLGIVSPMVVWP

SEQ ID NO: 933360 - protein, 148 aa, Homo sapiens
MMPTSGHSTAWLLPFAGGLLQSPVASVSPIPGERDQSSVCRILAGLAEAPAGRSCQVRRNGSGSSLKRQSGDDLARQLCCVVREPSSSRPSVLSTASRLEQKLVEFQNSQYHRPTKEHYVDCLSYKVTITTAIIAWYRSAEPKEKKNG

SEQ ID NO: 933361 - protein, 154 aa, Homo sapiens
MCGTWNFELERDDLGYQRSCEKRATILQSPECRSTNSLHCVTEKASGTQCQPMIVAVGPESCKATGMELLKAVGAHSLRQHALDVRHGVKEDYFGALRFNDYPAGFWTCMGLVASLFRPTSLIRNGNICLMPTHTHPEKSNGKKYTEEVVSGYH

SEQ ID NO: 933362 - protein, 125 aa, Homo sapiens
MGGLKFKLHQLLAFVMAKDLNYSEPCFLYLQNLHITHFTREEEDITTDTTEIQRIIRYYYQQLYDNKLKNLEEMDTFLDISNLPRLNHEEIQNLNRQIETNKIEAVIKSLQSKKSQGPDGTTAEK

SEQ ID NO: 933363 - protein, 169 aa, Homo sapiens
MKAAYFLPNLPVPCVFLISVKELFSSSCSGEKTWRHLQLIRSCQTLPISISSGFKTQQMLTMLCAHGGDALVEEKTKYALLQSVVCVASMSSLSLCIHPTGPHSLHTIRLKRDGKIIPGSGLVLPVTSVVAFQQEVTEGSAPRPAMVLGYCPALLASYSQRAVMCLLRI

SEQ ID NO: 933364 - protein, 260 aa, Homo sapiens
MEKYCLKNNITFKILLTADNALAHAPLIGDLYSNIKGDVTKEYINGTWKKTFKSFNHDVKGFVKDEEVTKINKAVVEMTNNLNLGVCEDDIEELLEMIHEELTNKKLLELQEEQIAEEEARGKIITGEAAAAILDPDPDPSPAHIMPPPYNPDSWEPSHEPVTSQPQYPSLKGLQHDIEQWRNAIQNFPFPSTSKESAPTLFPLKEVPQEWGAIGFVNAPLTSLEIQTLTKELKPLFDDPYGWQIKLINSWDLNYTLALS

SEQ ID NO: 933365 - protein, 167 aa, Homo sapiens
MGANLAGTDLIGTFEMHFINPSSSSPPFLSSPSKPSSNQTAIPSIPNDKTKVDIVEVNDLRQTLAIETGYQDANSWLEWIKYSVHMLNKSNCYACVHGQPEAQIVLFPLGWILQLGTINNAKLSFCSILKSNTLRVSPRRPSSFHLPTSISPCVSHNKGKTWHSLEA

SEQ ID NO: 933366 - protein, 152 aa, Homo sapiens
MAEGKEEQVTSYVDGGRQRQRACAGKLHLTITIRYMRCIHYHENSTENTCPRGGTDPILPLGPSHNTCEFKMRFDWGNSQTLSPPNYKGKFSNCGIRKDDRKKGVLRKIDFLVALCQTCFYLIQFSIARQTVLSWILRRGIVNTQRSKTACP

SEQ ID NO: 933367 - protein, 138 aa, Homo sapiens
MQSTLKMSLESGPEDPDLRDNCRIRVAHLTSRHKEATPDIPDNALPVTPLRRPVPPPQCRASSAGLCPIDDILLFHIYLLSLDDIIITHSYYIHTDDHQIQISSPTCKRIPRVMRSRRELGYDSLLCHEQESRYVFRG

SEQ ID NO: 933368 - protein, 148 aa, Homo sapiens
MIQTIGHKIMQGMTAARTPDSYQVTANSSRRSQSVEMQPGSAVQQSKGISLGGHCPKHLASPGDTLSSLSAMADEVKECNQTIVKVDVDGILALRRLDQMIPKVPPNEFLMNFHISFTLHPTARKFGNPSILNAKQIVIPSIKILGVM

SEQ ID NO: 933369 - protein, 151 aa, Homo sapiens
MYPRQSQETEPCQRPTSSSSFSCPWHGSTPQLDATTILIFAIIFSLMIIFKLYMNGLILCMCTLFSFTKNFFLFIILDYHCLLTQCCCQEVSYQFNLLSLALFDFFFLLAFYSFGMMFFSLSALNKILIYFPTFLVVLSKKVGPAMIRNGI

SEQ ID NO: 933370 - protein, 157 aa, Homo sapiens
MTENSSVDQGIQQATSPLGSGIVTKVFLSQFECGVLFLMPKHGNLCCAISITDLYPRTSLFDDNKNNIVFLIFNFSVHCCYKIIYHFSMTRYCGRLWMKDSYPGEVNSTIGIANVKFAHAIRGEEKEFPGQNIKNCFPPIYIFMEDKDQNYNDQKRW

SEQ ID NO: 933371 - protein, 141 aa, Homo sapiens
MMTMAVFSDFHKPELCNWTNMYGCPPALQSLSWEAMEERPCIPSWGEHEVWGRRQLAESGGLAEGLVGWQDTRRDELSFPGRFGRCRLLAGLRVFLYLDHHLLSSSVMSAAVDSLPAVPRLLPCVLSTQPTEAVCASLLVV

SEQ ID NO: 933372 - protein, 126 aa, Homo sapiens
MLLLRGPRVVFFSPLTCRLGSLPPLLTGLLFVPLTSPGSAPACVVPLYESMYSNRLAPTYKDRLSELVTLRPESLQMRSRKPRKALSILDKRISKSKNPEARKKWSVHGAVTEITESETAVIKGLL

SEQ ID NO: 933373 - protein, 138 aa, Homo sapiens
MPSVSGVCQRRHNKCSNNCSFNEEHFTSVSAVPWACSTPGVVKVGLDSVICGGWLNLPFFIFPLRYERQDSRITPTRGITLHRTETVLPCLQGGGGLLAPKCGATSGFLEHFQVISPALLQFLGLLKKLLGKPVMVKI

SEQ ID NO: 933374 - protein, 117 aa, Homo sapiens
MLPNSYPKVCSNLYFYQQCMKVSDVLHPCQQLVLSVFYVLAILGRCSLAWKHGNLLSPWVAQLEAFDPSPQQKLLTCFLTTAKQWVEVLVWFRLASGSVAFGENKSPITSLKKQVGN

SEQ ID NO: 933375 - protein, 151 aa, Homo sapiens
MREVGVFPPSVSRSRLRECSSRLCCPLEASGGKCVKSAFSLLPFPGAACVNVLPGSAAPWRLVEEEEEERKKGEVKTETLFGQSGAFSTFGGTALTLANHGTDLCHHMGVDRGGWWHLGSLLGFPVERNILCSSTGEQGGQGSVSSNQQKH

SEQ ID NO: 933376 - protein, 144 aa, Homo sapiens
MPTSQNQLYSLPFCWSREDLQLVPKAGGAPVCPGPLPAYVILPAVLASHHIQSLPIPQGHSLLGEALPPAVHSEGAADPSRTWQQRAETHNDDEIRKEDKNNKVVEFRSHRDKRKLFSGVSDHFQRKDIKMLMSRMTQLNGPAT

SEQ ID NO: 933377 - protein, 224 aa, Homo sapiens
MGLPSAAPPGRSCCGSGAGGNPQPAGGLRQPGCAPGLRLAPGPLSSRDCFCLAARFSPAHLLRCQTARAALSFSPSGTHCRGVPQARSQSLLARPRRRLHPRSPPSGAHPPPENSRRAARLRAECGLLSGARPNKDGEGFARGLKPFAISEQPQPKTTLERRAKNGYLLPALKSEAGRCGITTVRLQSNRTHSSHPHLPQPPPKQHTFRLKKRRMVFTQFPFYR

SEQ ID NO: 933378 - protein, 163 aa, Homo sapiens
MAVASTWVCAPSGGLGEVALLPAKARPYGVGRSAGSNRMPWLGPPWAVIGRLIIGQNGVLSTPAVSCIIRKIKAAGGIILTASHCPGGPGGEFGVKFNVANGGQGGMHRSRGATCDVCGRRSLPPHSHNLLHAPGEPCCGMCRKLSMLADFLEEVKFELRCEE

SEQ ID NO: 933379 - protein, 140 aa, Homo sapiens
MGSKSHLLSPPELLRSTVDSQPVYYIGGNISPSGNYVLFDRWVYTLGVQVVHPSVLRVISSSSTLNIKNRITGAISPGGCTLIAMLGVMSCSIPWILGSVSQGECTPTEILKLISCSPSLDIRNNITGRCTPPTVLGEII

SEQ ID NO: 933380 - protein, 124 aa, Homo sapiens
MTAVRSMLLGVTEQPWRPSALTLAGGGQKEAGRGSFSNKLGKKFPHITHVTLATRRTISTTEWKKMTMLWERMDASRRARYPDANQSHTRMQAFASLPTFSLTGVLWSSCISMWTSLARLRTVS

SEQ ID NO: 933381 - protein, 152 aa, Homo sapiens
MGFPGSSCSSHNSSGSEPCTIRGGLHGADGAARSSNNGSSEDTDNEFQYFSRNGRLAMMLRAKVFRVCSIKSQGFAEELSMTELGKGLGGTISEKRGKEKLALQRCYEESVIIIITIIIIIIIMDMDEAGNHHSQQTNTGTGNQTLHVLTHK

SEQ ID NO: 933382 - protein, 146 aa, Homo sapiens
MVGPSAAGLLEFAGGPFQTLFAWVSAVEAAEQRILLNRKCCCLIVPLEASSQRSTQPLNSIVTDKSNSNCCSPIIYRPSPAPHLWKIVPEDIHSLVLLACLDYGLSLFLNQKLPCKEAQKHMLKCHWHEWEASTKLQVIAGHSVED

SEQ ID NO: 933383 - protein, 143 aa, Homo sapiens
MFHLKLHRYPPSQPTFFKWMIICVYSDVHSFTEGARGNLYVCTLKVITHWLALSCSVLCLGIRHKEASRFSQTVPESEYRQTPQSAIEPTLLVQTLPFLMVNFSVENSLAFPVKGICPPSCSKSLWNPPVILKCASKILTTDT

SEQ ID NO: 933384 - protein, 137 aa, Homo sapiens
MPGYAQRPDPMLAHTPLATPHLACPWHPGIQAGSTPEASPNNPLDVTLKLGHHDGLQSMRWRFQNFCCIEEGVRRLRDMEILDGLTMEYLRTFNLTIFSEHRKLSFYKHLEEPYTMGNLAHEERAFMVEKYKQRTHP

SEQ ID NO: 933385 - protein, 168 aa, Homo sapiens
MPAEHKRQEKEEVDKMTEQKMKEEQERRKKKEMEERMSLEETKEQILKLQEKLLALQEEKHQLFLQLKEVLHEEEKRRRKEQSDLTTLTSAAYQQSLTVHTGTLLLSTQGSPGGHNRPGTLMAADRAKQMFGPKLLTIRHYVGPATAFAETPEHGQFQGSPGGAYGTA

SEQ ID NO: 933386 - protein, 170 aa, Homo sapiens
MAQSAPATAGATTPESTSYFRCIKVWVPRQKPATVVEPCKEPLLGQCQGERWGWSPHTESPPGYCLVELWKQVSHSPDTRMVEPLAACTLSMERLQEHRSFSDRGSGKSYQNTQFQQLLFRPHPVFLIRLQIFALFLACQREKWPSLLTCHWLYLSPYVAVANLPPKKIK

SEQ ID NO: 933387 - protein, 146 aa, Homo sapiens
MIQCEHTEPWPYSQAVPHTPSPFSHTRISRSHPDLLDLGLIALASENSHTFPLDLANGDALSLLILDFPLLAAIGSSYVLLFFPLCKTAPPGSSAFGFKNDLDYKCLLRQAQPPRQKTCRGLGGIFSGTSSSAGEARNLLQLLFLD

SEQ ID NO: 933388 - protein, 146 aa, Homo sapiens
MYITITKDQRNIASCQQQSWTGNDFDELRQEGFRRSVITNFSELKEDVQTHHKEAKNLEKRLHEWITRINNLEKSLNDLIELKTMARGLHDACTSLSSRFDQVEERVSVIADQMNEMKKKSKKKRTKPPRNMGLCENTKSASDRCT

SEQ ID NO: 933389 - protein, 606 aa, Homo sapiens
MAAATAIIPPSEEGPQYKGANVRVSIFMTIWSIGRSTAETLGPPGSLEMGVLTFRDVAIEFSLEEWHCLDTAQQNLYRNVMLENYRNLVFLGIAASKPDLITCLEQGKEPWNVKRHEMVAEPPVVCSYFAQDLWPNQGIKNCFQKVILRRYKKCGHENLQLGKYRKSMDECKVHEECCNGFNQCSRTTQSKILQCDKYVKVFHKFSNSNRYKIRHTGKKPFKCKECEKSFFMLSHSAQHKRIHSGEKPYKCKECGKAYNEASNLSTHKRIHTGKKPYKCEDCGKAFNWLSHLTTQKIIHTGKKPYKCEDCGKAFNQSANLTTHKRIHTGEKPYKCEECGKAFSQSSTLTTHKIIHAGEKPYKCEECGKSFNQSSIIHTGEKFYKCEERGKAFSQFSHLTTRKRIHSGEKPYKCEECGKAFKQSSTLTTHKRIHSGEKFYKCEVCSKAFSRFSHLTTHKRIHTGEKPYKCEECGKAFNLSSHLTTHKIIHTGEKPYKCEECGKAFNQSSTLSKHKVIHTGEKPYKCGECGKAFNQSSHLTTHKIIHTGEKPYKCEECGKAFNNSSILNRHKMIHTGEKLYKLESCNNACDNISNISKHKRNCAGEKT

SEQ ID NO: 933390 - protein, 156 aa, Homo sapiens
MVSQAKSLRPLRERESRSLACRQKGKKVVTAALCSSVVKILHFHMWRSGFDSPPRKPPTEKRWKIRDPWRKEVPDFSNRPISLGYKVPKPVPSTNRQAATGRVTFTQDPSVATRCQSRIMQGPAKMVNSQEESSSFSILEFTKGSMMTLDFPFNVR

SEQ ID NO: 933391 - protein, 434 aa, Homo sapiens
MSRQTTSVGSSCLDLWREKNDRLVRQAKTNIVAPGLPAAVPVLPLELTVTCNFIILRASLAQGFTEDQAQDIQRSLERVLETQEQQGPRLEQGLRELWDSVLRASCLLPELLSALHRLVGLQAALWLSADRLGDLALLLETLNGSQSGASKDLLLLLKTWSPPAEELDAPLTLQDAQGLKDVLLTAFAYRQGLQELITGNPDKALSSLHEAASGLCPRPVLVQVYTALGSCHRKMGNPQRALLYLVAALKEGSAWGPPLLEASRLYQQLGDTTAELESLELLVEALNVPCSSKAPQFLIEFSPPPSPPGPCMPEVFLEAAVALIQAGRAQDALTLCEELLSRTSSLLPKMSRLWEDARKGTKELPYCPLWVSATHLLQGQAWVQLGAQKVAISEFSRCLELLFRATPEEKEQGDLNFQFSSYLLEVVVVEVGSL

SEQ ID NO: 933392 - protein, 137 aa, Homo sapiens
MALPVMMNSDLTLYHQTEILEGPVCSRLVEFPGQEMLPAWQGVHESLNTQGLMNTQIQVHESKNTQVMSKEDIIYPSQLNLSRQHPACYVSHIFQKPSLNPMFSFCYFLIFLHLSGTNLLEYVIILAITNCSPSVVS

SEQ ID NO: 933393 - protein, 138 aa, Homo sapiens
MSPPDSGARLSSPSGFRTGAAGGAVCQSPAVRPHSSALGQEIERSAGGRALLGDPVHPPQPLAWVLSPSLPGAGRASRLLRVQGPPSPRPPGTPAGPQAPRAAPVPAGASPSTPPCKLRELSPALVSPERGSHSAVVG

SEQ ID NO: 933394 - protein, 271 aa, Homo sapiens
MRDRRGPLGTCLAQVQWAGGGDSDKLSYSLKKRMPTEGPWPADAPSWMNKPAVDGNSQSEALSLEMAGLSLPSGGPVLPYVKESARRNPASAATPSAAVGLFPAPTEYFARVSCSGVEALGRDWLGGGPRATHGHRGQCPKGEPRVSRLTRHQKLPEMGSFWDDPPSAFPSGLGSELEPSCLHSILSATLHACPEVLLKDETKRIFLDLLNPMFSKQTIEFKKMFKSTSDGLQITLGLLALQHFELANSLCHSLKYKQNNASRLILRVVLE

SEQ ID NO: 933395 - protein, 242 aa, Homo sapiens
MKVAALSRATKKRSASHPVGLEGHTSGYADSLMGSHRRASRATVGGGTNQDRCEDPAGAQSRLSRRALHRPVTQAEWLVYLLALRNLSASVSSSEKWGSAIKKRHSSSNGISNSNEVVRAECVVILSPFYRLRRAAYLGDPAAKPRKPDPPQQAAPQNRRPSFVGPELMAQAQRGCRAAQGARPSPQQGGACKPQLDLSGRCGLLTAGRDDNDIEGLTSGSPVIRADSILNCWGTLRPTKEL

SEQ ID NO: 933396 - protein, 143 aa, Homo sapiens
MKYREMLAAALRTGDDCIEMGADEEELGSRIEEAVDPERGNTGMKYKNRVQSKISNLTDAKNPNLRKNASCGNIPPDLLARMSAEEMASDELKEMHKNLTKEAIREHQMAKTGGTQPDSLTCGKCKKNCTSTQKNTCRLEGFS

SEQ ID NO: 933397 - protein, 330 aa, Homo sapiens
MKGLKCLAKEFGSCTCVQQFLSSCLTSKKNEDMLTVEGKKGRRQSSENEEDSPHQKLTLLDLNVSIQVPHNHLDGLCDQQHMVDVAVVCPELVGSLLTDFKNEAVDPHESRLVHFTESCLVRFDRVLIGAFTISELDTKVLHLPTRLARYRVSTRRFSKSPPESPVGFTQWIPLILVPQVELPASPSRAPALLSPWVVDGTGRCGAGGVARQGGSGCAGAHGGVEEAHAWWAAGPQPCPEGRQLRPGEKSSAAAGPGAKPLTARGLRATGPPSAGPAEPTPTRNSRWPASAQHAAPVLTRASSSTPPCKLREPALALASPEGGSHGAAAG

SEQ ID NO: 933398 - protein, 123 aa, Homo sapiens
MPKYGINLSVHQWIKKMWYIYTIEYYLAFKKKEILSFVMTWMDLVGFVLSEISQAQKDKYHVISLTWGNLQQVELIDAESRIMVTSVQGYGWGNAEMLMKTQNISVRMNKFRRSILQQCDYIY

SEQ ID NO: 933399 - protein, 136 aa, Homo sapiens
MASPGCLQQVPLPCALAGSYADPVMTFITLHYKGYINSVIAHCYSNNNGFWKKEENTPDNRNSRKKGLVVPGGIECLENIISGNKQLKQQRGRGQDTEGLVCYALGMGNHGRVSNGAVRSDLNFMKDSGLGHWKPI

SEQ ID NO: 933400 - protein, 137 aa, Homo sapiens
MTKYHRLGGLNNRHLLLTVLDAGKSKIKVLADSIPGEGPLPGLQMAAFLINSIKSRVWFYGKDNDAGLTPVEGEWEGKIVRKEEYQIPCNSRKVLARESYQRQKKNCKDTAEWRRKPSLRDSGCLCVSAGHDSPRSL

SEQ ID NO: 933401 - protein, 190 aa, Homo sapiens
MGQKKGIFLHLCQSPFDQRLLPCERLTPLYFKVCTFVRMPYVATAEKPQKPKTRGLRREQGRLSELLSDTKVICKTESSQVLQWKSFPLIPFPNKYAWMLWGVLHITPFMQPYPLHTDRAIHTFCQRLVNQSNSILNRSWTGYYERIFWLMVLEAGKSKIKGPHLEKAFLLRHPMAEGKVKSPHGLSTSH

SEQ ID NO: 933402 - protein, 139 aa, Homo sapiens
MNTRHEDACLLWGSFLMMKKKADLYDYQHRLPGPWVFNWVPSGSCERRPKGEKQWLLRKDPPPDYLVGVGQDRASTYEPLGKDVPPSRQHPKYETVSLNFPAQGSETVLFKILTVPPPTHTKHRGRTVCPHPLNSGVAM

SEQ ID NO: 933403 - protein, 139 aa, Homo sapiens
MNTRHEDACLLWGSFLMMKKARMYRPVDNIPNMKPFPSISPHRAVRESLDLASGRGFTLTPCVTTAWSLYSWFLSVCTVEICPPAPRLLDCWKDWLIPGNDASAFTFSQLAKCTTQASSAAGRQGRKGPCSGASCPSEN

SEQ ID NO: 933404 - protein, 128 aa, Homo sapiens
MLSCVSHSARREYSENLIVHAARRDTLDQCGFIFPKSSCPFAPPIQSINDQHLMDATSPEGLGLQQTTNSKTLSAPMAHERGPEFLSPLEGYRGEQMGILATSSGVHCISSVKAGPSQLGVDVSGATG

SEQ ID NO: 933405 - protein, 274 aa, Homo sapiens
MVSANQTASVTEFILLGLSAHPKLEKTFFVLILLMYLVILLGNGVLILMTVSNSHLHMPMYFFLGNLSFLDICYTTSSVPLILDSFLTPRKTISFSACAVQMFLSFAMGATECVLLSMMAFDRYVAICNPLRLPFCGDNIINHFTCEILAVLKLACADISVNVISMGVTNVIFLGVPVLFISFSYVFIIATILRIPSAEGRKKAFSTCSAHLTVVVIFYGTILFMYGKPKSKDPLGADKQDLADKLISLFYGVVTPMLNPIIYSLRNKDVKAAT

SEQ ID NO: 933406 - protein, 212 aa, Homo sapiens
MGATECVLLSMMAFDRYVAICNPLWYPEVMNKATYVPMAAGSWVAGSLTAMVQTPLALRLPFCGDNIINHFTCEILAVLKLACADISVNVISMGVANVIFLGVPVLFISFSYVFIIATILRIPSAEGRKKAFSTCSAHLTVVIVFYGTILFMYGKPKSKDPLGADKQDLADKLISLFYGVVTPMLNPIIYSLRNKEVKAAVRNLVFQKRFLQ

SEQ ID NO: 933407 - protein, 303 aa, Homo sapiens
MVSANQTASVTEFILLGLSAHPKLEKTFFVLILLMYLVILLGNGVLILMTVSNSHLHMPMYFFLGNLSFLDICYTTSSVPLILDSFLTPRKTISFSACAVQMFLSFAMGATECVLLSMMAFDRYVAICNPLRYPVVMSKAAYMPIRLPAPGLPFCGDNIINHFTCEILAVLKLACADISVNVISMGVTNVIFLGVPVLFISFSYVFIIATILRIPSAEGRKKAFSTCSAHLTVVVIFYGTILFMYGKPKSKDPLGADKQDLADKLISLFYGVVTPMLNPIIYSLRNKDVKAAVRDLIFQKCFA

SEQ ID NO: 933408 - protein, 294 aa, Homo sapiens
MVSSNQTSPVLGFLLLGLSAHPKLEKTFFVLILLMYLVILLGNGVLILVTILDSRLDTPIFLTPRKTISFSACAVQMFLSLAMGATECVLLSMMAFDRYVAICNPLWYPEVMNKATYVPMAAGSWVAGSLTAMVQTPLALRLPFCGDNIINHFTCEILAVLKLACADISVNVISMGVANVIFLGVPVLFISFSYVFIIATILRIPSAEGRKKAFSTCSAHLTVVIVFYGTILFMYGKPKSKDPLGADKQDLADKLISLFYGVVTPMLNPIIYSLRNKEVKAAVRNLVFQKRFLQ

SEQ ID NO: 933409 - protein, 209 aa, Homo sapiens
MERLWSLMLLKEKRVRRQQMLQGLVVFQFKAVHMQQTGPPRNYQQNYQNSESGEKNEGSESAPAGQAQQRRPYRRRRFPPYYMRRPYGRRPQYSNPPVQGEVMEGADNQGAGEQGRPVRQNTYRGYRPRFRRGPPRQRQPREDGNDEDKENQGDETQGQQPPQRRYRRNFNCRRRHPENPKPQDGKETKAADPPAENSSTPEAERGRTE

SEQ ID NO: 933410 - protein, 221 aa, Homo sapiens
MVTYKLVLIRCGESTWNLENHFSSWYNANLILVGHKEAKRGRQALRDAGYDAEESDRILWTVLDAIDQMRLPVVRTWCLKEWHYGSLAGLNKAETSAKHGEAQIKEGKWVLTAAHGNSLRGIVKHLEGLSEEAIMELNLPTGIPIVYELDKNLKPIKPMQFLGDEVTLCKAMEAVAAQSKAKKRRPAGMLLSPGTPSLAIPSSAPAPCTCHTDHICRHLML

SEQ ID NO: 933411 - protein, 149 aa, Homo sapiens
MLNDVEHLIICCLISLFACTGKFLKKLLLPVLPHGQKNLKASLLFLFIILLCLCPDFPLLWILGDMTSLSHQRASFLSEASYSVTSLSLAQYCSGLESSFRFTGNLSGGYRDFPYESPLRYYQRSTTQRYICCNLLYVDTSSPKGHRSR

SEQ ID NO: 933412 - protein, 214 aa, Homo sapiens [sequence omitted]

SEQ ID NO: 933413 - protein, 140 aa, Homo sapiens
MRLEKTTYGMNSRKKQGEKACKEDGAISVTSAHETKKEPKGGEFTIGIWQCEGCPIQPLMGDRQEHMSEQVQEPATLALAGANSLWALQQHLGGVPAIPRPQRVCYNVVLALSSTDSSSVGPLPHCMEQLPSASEGKGPV

SEQ ID NO: 933414 - protein, 148 aa, Homo sapiens
MRTTILMAPRQTLCLSLVEIDINPERQYPLKLEVRKGLEAIIDNLRFQDLLKLCNSPCNTPILEIQEPNREWRLVQDLCLVNETVVPVHPETPLKNTDWILFMDTSSSTEQGIHKAGYAIVTLNDIAESASLLGHKCSTSQEIEWATS

SEQ ID NO: 933415 - protein, 182 aa, Homo sapiens
MSLPILGIISFTNFSHSGGVWSNSSFSKTSRGGVSPPPPTGNGCGLLLGEKPQLTPPQNSRCGCSTQGCLSLRLPCSCDPFVQCLSLATSEQTSAALNLKIKSHMTQTFKGIPAPCDQSLMKTLEISKSSYTGSSGGAERQPCAEQAPFLPRPPAAAGATESSVSACLLPSVVFSSLHRVGE

SEQ ID NO: 933416 - protein, 144 aa, Homo sapiens
MSNTSSASILGAIFSTKQEFFASLLDENVQVILCPYRAVEKLLSIEGQTQHCMMEYTASSFAYFQKYVQTKPSRFQIPVDVMSSAVGLGSVQCCDLTCWEYGCLHCPTKPLANCQQVQREIPSSSCSGNAICGMPTEQTLILSG

SEQ ID NO: 933417 - protein, 148 aa, Homo sapiens
MGKKQSRKTGNSKNQSTSPPPKECSSSPAMEQSWTENDFDELREEGFRQSNYSELKEEGQTHGKEVKNLEKKLHEWLTTITNAEKSLKDLMQLKTKARELHDKCTSLRSRLDQVEERQKLYKPEESGGQYSTFLKKRIFNPEFHIQPN

SEQ ID NO: 933418 - protein, 172 aa, Homo sapiens
MTKLDEQVKLSKPHFTDGDTNSKRENELCSRFWEKLFGTCMEQLALPGLDFPLHVSDLTTISLTIKIWTLTPVQSHVSAPVHFFALDILITTQDGEFPQQAFGQNTVGKCSIESGPGAWGDSGRPGQLSVALMASRQPDLRLCHFYIYCDGERQYFPRERLCCSHGAPSHLT

SEQ ID NO: 933419 - protein, 142 aa, Homo sapiens
MQTSKFCQRVKEKVAYTVSVWWKDIVAQCLRRWAPPLLPPRCDLGRVPSWETLLQREASNIRRRQARSFLRSSVAAKPFHFMTSAESWRKTTPNTAQTGSAHRKAIALVGGNLPWFPHTGSQIIPFAPKSKRLSFVVSTYHM

SEQ ID NO: 933420 - protein, 190 aa, Homo sapiens
MESKRIFERTRMESSNGMEWNNPWTRMQSSSNGIEWNHRMDSNGIIIERNRMESSSDGNEWNHHRMEMKGIVMIGIVIEWNRMDSLNGIRWNHRMDWNGIIEWTQKGSLLNGIEWNHRMVSIGIIIKWNRMESPNRIEWSNHRMDSNGIILKWNRMELSNAIEWNYRMQSNRIIEWTRMESSNGMEWNSQ

SEQ ID NO: 933421 - protein, 154 aa, Homo sapiens
MLQPQRQKPPPIPIPDLDDLASEVTHVPEASPTVLTFPPVVLTGTSTDGIPFALSLQGISFVLPSPEEELNGGFQRLLRTERPGPKSCKLEYNIHFKSFILGMYAEHQLVLDSGPKEEWAELTRWACNREAADRKTLQIGALQHELPGVGSNVA

SEQ ID NO: 933422 - protein, 131 aa, Homo sapiens
MGSTFGVASALTLTATSTLGSDPSPHHRSNRLFTQQPAGPFINGRAGHSSAQTIWWGLQGSGPTLHSQQLLSGKPQPARKQGAQFYWCKELNSADQCKTLEDDLSSERRCSPADTLTAFQQLIHVHAKLAQ

SEQ ID NO: 933423 - protein, 137 aa, Homo sapiens
MRAVNQGERAEKPGADGPVLSLNKLVKEVHEEQALSWAPKPTVSPLTSCSSSSSSSSFGPLLCPAGTPPSSSRLISAISKPYNRHREARSTCMGTGNSQSEPSCRILEAMVRQVQQDPVVQTELPGILRAPLAPGGR

SEQ ID NO: 933424 - protein, 160 aa, Homo sapiens
MEDNAAMALLLKRSFLLDDLFLLGLEVLFTELACFLGLRPAGLSLVSQGLLAGFVCLQLVAVFRENPLVFEHIPLQLQPAQNPQSPHPRDLLWHSGIGCTPPLTYAQVPALPAGQGAFPALSPGMDRHRLAVTQDQPIFDQLPDLLTEVGIGDFIVSEFS

SEQ ID NO: 933425 - protein, 138 aa, Homo sapiens
MILIRPAGLSGVHILLSRAYEDHSLVKLHSRDLERDCCAVGDRWNSSRAGAGGAHCEQSERRHRTTLVTATAGGRFLVSDVDGHPALPALSAETACPESAPAREANWSHWASVEEDASHLPNGDLSWVSPELIELSLV

SEQ ID NO: 933426 - protein, 199 aa, Homo sapiens
MMHTLCGHCGSKACHLPKSTCGKCGYPAKRKRKYDWCAKAKRLKATGTGRMKRLFSDGAVSLHTRSLKYGKLGQGVLVQVSPSLVKRQKTHFHDLPCGASVILGNNGFIWIYPTPEHKEEEAGGFIANLEPVSLADREVISRLRNCIISLVTQRMMLYDTSILYCYEASLPHQIKDILKPEIMEEIVMETRQRLLEQEG

SEQ ID NO: 933427 - protein, 158 aa, Homo sapiens
MRKLFSFGRRLGQALLDSMDQEYAGRGYHIRDWELRKIHRAAIKGDAAEVEHCLTRRFRDLDARDRKDRYRGLSLRWEGAPGPASLQPLGRGPWRAPGTLGAAEPNGASDCFPSLAIPHLHKPNKNIKVLSFLHDTVYLTIVMIFKNVHNGVKKDLLL

SEQ ID NO: 933428 - protein, 149 aa, Homo sapiens
MGASRTLSYHQLPQEHLPLPRIQAPLSSQFWQDIQGELWAQPVPGGGCIMTPQPIPSGTHPKTPYFLGLSRQGQRRLALKLKHYVHAGSAWHWAGMVQAPPPFPSGPPSRARLKQSWFPRGTWWSLQQLAATRGQAAPCPQHHSHRYYG

SEQ ID NO: 933429 - protein, 250 aa, Homo sapiens
MAEPRAKAARPGPQRFLRRSVVESDQEERRAWRQPRRRARSPRSPCSAGCFCLKTRRLSRSAPADARRPRARSAAPADAGPEPVGTQEPGPDPIAAAVETAPAPDGGPREEAAATVRKEDEGAAEAKPEPGRTRRDEPEEEEDDEDDLKAVATSLDGRFLKFDIELGRGSFKTVYKGLDTETWVEVAWCELQQAVAAPAGIPAETSSDPGPVTQRWCLVELWGQLGKAWKCAAGSPASASAELARHPVQI

SEQ ID NO: 933430 - protein, 145 aa, Homo sapiens
MTEYDDYVLDSPYKVISIFPDLKYFPSLDGCLDPASHWEASAVMEIPAHDTRVSFGLARHSQMTAELVCHHISVISRYKFAVVSYVWLVLQKKHQVLVDGFNCSHYVSDMVKKQCAEHVLTEVYAHRASPNFHVINFPVMCLPGI

SEQ ID NO: 933431 - protein, 148 aa, Homo sapiens
MTNTKGKGRGTRYVFSRPFGKHGVVPLATYMHIYKEGDNVDTKGMGTAQKGMAHKCYLDKTGRVYNITQHALGTVVNKQVKGKILAQRINVCIEYIKHSKSRDSFLKHWMPERPETSNRHRQTIRQTNKSLAGELGKGEAQQRPNGEL

SEQ ID NO: 933432 - protein, 439 aa, Homo sapiens
MYGTSHKFMEKKNRPSGDLLNIYELFQKVNASNRPSSLRLLNEPQKWDYGSTGVATNSDPNIYFLIQKIFYMFNTLKSNRSQLHSTMDILSLKVNPTEMVAKFQLPPPPHSSSWAAELKQMVDQSLSGGVLAGCPLVQLFPKLFSCSRAVDPGHFLDHKDEEDGLSLDRSSTMASDHVVDMQDLTEFLDEASSPSEYAVFLLHWLFPELFDHCKLGEYYSCYGDGSKQELEPQRLQIICNYTEVYFSHMQEEEAWLQQCAQRINDKLQGLRLDAGSEDEPPTVEDSSKGEQRRSKKIWLVLINLDKLEIPQPNLEVPGTDCLLSKEHLHSIYESSLSIGNFALHLLVPLFPKLFTHENLHKQYSSSGSLGKKQLDLSCIKLIRQYVCLLYLHAKNDRFWTLEFMGNLRRDTSRGAPTSSSARSTCWPPVQRHEELCNQP

SEQ ID NO: 933433 - protein, 337 aa, Homo sapiens
MAEGEGEASTSSHGDGREKAKREDMGYCQGVSQVAVVLLMFPKEKEAFLALAQLLTSKNLPDTVDGQLPMGPHSRARAQPGPLLWSLLPLLLLSPEAAPAPQSRAASPSQAPGEARESLGAQQGREPAARAQVCGKPKVVGKIYGGRDAAAGQWPWQASLLYWGSHLCGAVLIDSCWLVSTTHCFLKTSSSFILSSGREFPGPCVCLLNPDMRESIGSVCAGHLQGFSSVCTMLLKSQAPKNYQVLLGNIQLYHQTQHTQKMSVHRIITHPDFEKLHPFGSDIAMLQLHLPMNFTSYIVPVCLPSRDMQLPSNVSCWITGWGMLTEDHKRGVGEAGG

SEQ ID NO: 933434 - protein, 137 aa, Homo sapiens
MLFNFVANPDNATEALLRLSAKAVQFHGSEPMCRVSHPPLQQQKEQFLHPQGLPCIPFGANLSPLHQLLATTDLFSIPMVQHCPKCSMNGIISPQRQLQVSGRSDTLVRLKGVCVEASNHHCPFSDRSSLYILDTSP

SEQ ID NO: 933435 - protein, 204 aa, Homo sapiens
MVPCLPDASAPATVKRGQGTAQAIASEGPSSKPWRLPCGVEPVGSQKSRIEVWEPSPGFQRMYGNAWIPRQKFAAGAKPSWRTSARTVQNGNVGLEPPHRVLTGVLPSGAVRRGSLSSRPQHGRSTDNFHCAPGKATDTQCQPMKAARRGLYPAKPQGWSCPWPWELTSCISVTWILPLPWQHSGITTPFSGNDLMTQKLPPFS

SEQ ID NO: 933436 - protein, 186 aa, Homo sapiens
MSAVSNCTVAKKAVVKGIFDKGTIGKSVEFKEIVVMGYFLRVIVLKGLDSKSVENKTDFATSDVDKGAAAMSTMLMFLLKVIVTKAVVTNDVAAMEHVPKDDISIGIDSKVTVAKEVISKCIVPGAIDWGTCSSKFFMTPSSLSPEGNGEREKWLWFALFVYLPNANVTASIDYVTDMLLVIFDMM

SEQ ID NO: 933437 - protein, 196 aa, Homo sapiens
MGIQDEISVGTQPNHIKSLEPRFPRSFSRENCADTPFLAANCGDVWQASPPQKNPEFLKAADHTATQPAKLQMPNRHQPSFYLIAIPIQKEENKRPCSSTSAQKRRPLFLVMTDYENEKGMKAESSGEMLLNASNQVGLTIRVWSAYSISRNDVALISKGRCTCFWEYGLYQLNGQWDKNGYQVLGKGLEECGVIV

SEQ ID NO: 933438 - protein, 135 aa, Homo sapiens
MAKGPHILGTGGAHRQLGDGNATTSLIIQESLNIGVEFQKQHKGSNTRTSHVSLLSYLLFSHWPKQVTRAWPAGMEGDNQRGRHREGYCFTSAVPKMEQGTLLGPAPPPFHHPAPPSMEIKENIEFLQGKFQAPS

SEQ ID NO: 933439 - protein, 477 aa, Homo sapiens
MTAKEMKATESAAQPAPLPKKEVDVSPKQDEGVLKVIKREGTGTEMPMTGDLVFVHYTGWLLEGTKFDSSVDRKDKFSFDLGKGEVIKAWDIAVATMKVGEEEDLTEEEDGGIIRRIGTRGEGYVKPDEGAMVEVALEGCCKDQLFDQRALHFEVSEGENLDLPYDLERAIQHLEKGEHSTVYLKPSYAFGSVGKEKFQIPPNAELKYELHLKSFEKAKESWEMISEEKLEQNTIVKEQGSVYFKEGKYKQALLQCKKIVSWLEYESSFSNEEAQKAQALRLASHLDLVMCQLKLQAFSAAIESCNNALELGSNNEKGPFRRGEAHLAVNDFELAWADFQKVLQLYPNDKAARAQLAVGQQRIHRQLAWEKFYAKMFERLAEEENKAKAEACSGDHPTDTEMKAECKSNTAGARNRYYGLHCRNNQEANFYNVTQADKPSCLRMLAKEHMHGAVGILGIRAQHLLRTLCSVKYELRI

SEQ ID NO: 933440 - protein, 165 aa, Homo sapiens
MFPTHTATKDIVVTATVAKCMADIAIIALVTITVATLAEGAIPMTTVAKDIVIKMHLLNQGWMVTTATKTVAKGNIARGKGAKEIFAMKCAVTKNIVAMATIAEATVAKIIGAKGAVPKERVLNLKKLLLWAIFLESLFLKALIVRVLKIKQILLRVMLIRELLL

SEQ ID NO: 933441 - protein, 158 aa, Homo sapiens
MQKWTEASRNTIFVLHVLTQVDAKEVLTHVDAKDAHGGDEGTSKDSLLLTVEGVVTHSYGWGSGVEELHATQGHLGKHQMTWGRGILIGCLRVIKERVEGSGLWVVWFAYERRASGPCLLFLGVSFTLYSQYQCNIGFSLHNPFIHLFTLTDYSFFSP

SEQ ID NO: 933442 - protein, 298 aa, Homo sapiens
MVPCALCLQEERHCVLTWQKAEGQNRGSPLPPVLVDLLNDFDKNADSVLNNKVQAEVVSDGDEELVVNWSKEPLYRVLTGALPSGAVRRGPLSSRPQNCRFTDSLHHEPGKAVDTQRQPMKTATRWAIPCKATEAELPKAVGAHLLDQHDLDVKHGVKGDHFGTLKFDYLAGFWTCMGPAVTATGHDSFDGSGQSQFETFWKGFIMIDATKNIHDSPEEVKIAALIGVWKKLILTLINDFEGFKTLAEEVTTVVVKIARKLELQVEPEDDLPRGSGKLSRNVHLKHEPGAFVHLSHTG

SEQ ID NO: 933443 - protein, 161 aa, Homo sapiens
MVLISVQIGVLKVACKWVVASSGRRQWEVPLGCERLVELGPPDLEILGTEAYYCQTLRRCHGIQGRFGSAQSLSQIIVSVTGELLSSARLYEGLMFSQIPKPVTLSIGVFLAMFQSEVIGESAELEPDGRLVGRGLDLGKGGDGETNVIQMGALVHVTNLQ

SEQ ID NO: 933444 - protein, 195 aa, Homo sapiens
MENIEKPHLNIRRRRKRKKKSKTKTTQILERTQFTLRCGKGKEAEEERPQVPLIPTDLPAGFILRLSTCGHDDRANLLTRAVSTSPAAQSPCSKPLSSSSVPPANISLPSVNPGPEPDHKGQPRNPESDKSARPKLSPLLCPAFTGKPTQAVAWPFPSSFLPPGLPAASPCRPAGPATSLISSECFKSDVRLSFQ

SEQ ID NO: 933445 - protein, 227 aa, Homo sapiens
MRWHFKFIKIYFKRKQHKTLENLQPNDVIEKKSQFSEEKFKPAAEICISNKDPNVHHQDNGENISRTCQRPLQQSLPLQAKRPKRKKWFPGLDSGAPCCLPPSDLMPCIPATLAMAKRVQGTAWAVDSGGASPKPWQFHMVLSLTVQKGNMGLKPPHRVPTEVLPTGAVRRRPLSSGPQNGTATKSLIMHTGRLQTMPVHESNQEGGYVLQSHRGGAAQGHGSPLLA

SEQ ID NO: 933446 - protein, 203 aa, Homo sapiens
MLQPEEPTSVGTDLPCSPQPRHAAAVQMMPTVNPRKLQNNAAPGTVGDPEKMWRELRGCPGGDVETVQRLSRRRRGKSSEAVPEKTWRAQRMSQTRESSEAVPEKTWREFRGCPGEDVERAQRLRDCPGEDMETAQRLSARRRAESSEAVPEKTWRELKGCPQEDVERVQRLCSSEGRSPVHAFPFAVRMEIGDAASYTADRC

SEQ ID NO: 933447 - protein, 166 aa, Homo sapiens
MPELNLIGSWILPYCVCFLSQSLLLGLLLDVELKVNKSETNVNVFLNTSVNTITDSKCASKPEQSTTLPSSGEDNKYTRIVIPQGLTKAPSYFPQVLNQDLKVLNFTCDSVLMQYMQDQMISTAFFRERGSWIQIGHYKISVGQPQFPNGSLEIPPQTGASKCGHP

SEQ ID NO: 933448 - protein, 398 aa, Homo sapiens
MTAKEMKATESAAQPVPLPKKEVDVSPKQDEGVLKVIKTEGTGTEMPMTGDLVFVHYTGWLLEGTKFDSSVDRKDKFSFDLGKGEVIKAWDIAVATMKSSNDLPITPRLCLKDGGIIRRIGTRGEGYVKPDEGAMVEVALEGCCKDQLFDQRALRFEVSEGENLDLPYDLERAIQHLEKGEHSTVYLKPSYAFGSVGKEKFQIPPNAELKYELYLKSFEKAKESWEMISEEKLEQNTVVKEQGSVFSNEEAQKAQAPPLASHLDLAMCQLKLQAFSAAIESCNKALELDSNNEKGPFRRGEAHLAVNDFELAWADFQKVLQLYPNNKAARAQLAVCQQRIHRQLARKKFYAKMFERLAEEENKAKAEACSGDHPTDTEMKAEWKSNTAGSQSQVETEA

SEQ ID NO: 933449 - protein, 282 aa, Homo sapiens
MANIFFLIYTYCQSLWYAFISSMQTDEYSKLVLVEWGAAVKLSKNVEPTSELGNRQGFKRKQHKTLENLQPNDVIEKKNEFSEEKFKPAAEICISNKDPNVHHQDNGENISRTCQRPLQQSLPLQAKRPKRKKWFPGLVSGAPCCLPPSDLMPCIPATVAMAKRVQGTAWTVDSGGASPKPWQFHMVLSLWVHRSQELRTVQKGNMGLKPPHRVPTEVLPTGAVRRRPLSSGPQNGTATKSLIMHTGRLQTMPVHESNQEGGYVLQSHRGGAAQGHGSPPLA

SEQ ID NO: 933450 - protein, 176 aa, Homo sapiens
MVIFTFESWHKAGPIVPGYRPTFMVSGTRPVPMESGSPQHQFSFQVRPSTRSTFASPSCRPIPAPGNRPIQSHAGTHTFKLQDGPCSSRLQHKVNPYGPNSRPVFMVLGSGPTQYQNSPYELRLKDLPSARLASWTQAPGLSLKTKSTLMGSGTRPVTSDPGASPHPQTQDPDLPM

SEQ ID NO: 933451 - protein, 163 aa, Homo sapiens
MLNIKNLASLKVSGRLLARKAKMKLPSAKKRVTWIRKQMKITVLNTPSPQNHFGFLSDAVALQAISTVIVLANAVETTTVKMIPNVVCQRIQVTVFVQPVKSKEQKKTDREMSLRVLTMSVWWGHSETIPMAVRTEKQRAMLASAVPSASSKSRKVTTLTKQC

SEQ ID NO: 933452 - protein, 144 aa, Homo sapiens
MPIVDWSLCHTRGTEINNMESPSLRKSVYRENKCANNPLQWAYIKWVEPSCYGVIEGGAELANALDASENLEVQAMVKGGPKQVQGKASLMEHLPAANCTGFKMVQLTHPKFLCEIQEPSLGVWIQTSFCNTSSGKNPNLTLSW

SEQ ID NO: 933453 - protein, 132 aa, Homo sapiens
MDEGGNHHSQQTNTRTENRTLNVLTHKWELNKWTQGGEYHTLGPVRGWGDSRHGLFGYERQEWVELPILPSECFPAQRKAVPDNNQYSDSKGVLEVGKPKTKMLADLVSYSIDTGRAGEYCVAPVMKMFLGP

SEQ ID NO: 933454 - protein, 148 aa, Homo sapiens
MEIVTKCHRCKTVVLNKSTYMEVHKDFLRAWIMLRMFSQPHVSCEFFPKKRSVVTKKPCFSSTWNLNMKHCLGGKNTSAGVGVEEGEFHVWYKACILLSFYHTCGEYYNCHISFSYITNVNENEQTEVQGASMVLYKGLSFGVKQNQA

SEQ ID NO: 933455 - protein, 277 aa, Homo sapiens
MVAGMEVIHGQQGLPLTKADLATATAECPICQQQRPTLSPQYGTVPHGDKPATWWQVDYIEPLPSWKRQRFVLTGIDTYSGYGFAYLVHNASAKTTIHGLTECLIHCRGIPHSIASEQDTYFMAKEVWQWAHAHGIHWSYHVPHHLEAAGLIEQWNGLLMSQLQHQLGDNTLQGWGKVLQKVVYALNQCSIYGTVSPIARIHGSRNQGVEVEVALLTGISVLPYPVVKVDGKLQQPNPSRTINGPDPSEMKVWVTPPGKKNHDLLSCLMKAKGIQNG

SEQ ID NO: 933456 - protein, 148 aa, Homo sapiens
MPVVPATKEAEGQENCLSPGIQGPCGQYREAGQAVGTKSAMSSTVAEEATTAVKADGSRPSLIERPAHSEDPYHRPGQIVQSSKQKYFTQLFCNGLSYKLYWFLCSPLFFMSYVFLFSHFSSSFTFFGDVFEYLFQKVFLGGPDIKPQ

SEQ ID NO: 933457 - protein, 198 aa, Homo sapiens
MRVNCKALTKFHFPALAKLQTSLIPLEENPSTPCSITHPPGPACCTNTCKDSSENEKNLKAEGMPAGPNLTYQGRIPEGDSRGNSQIPTTRRRAMRLDRGIMSVFIGEDSNECEVDPKYLNDYHIDRAITLPNSRDTVYTVVYVKSSRRPQLSNVQSVQLKALVLHMASATEINGIDQFLPDDGHSKALGQPDLDPHL

SEQ ID NO: 933458 - protein, 234 aa, Homo sapiens
MLIAKTMGKMLPGHFRDLRGSPFHQRPGGLGDKKWFHRPGPGSHCSVQHQDMEPCIVATPAPATAITGEDFRECMEMPGCQGRSLLQEHSLCGEPLLRQCRGITWGWSPLHSGAVRRWPPSSIPQNGRSTNSLCHAPGKVTGTQQALRAAMGIVPCRVTGAEVPKTLEAHPLHQHALDVRHGVKDYYGAIRFNDCPTRFWTCMGPVAPLSWSISPPWNGSIYPVSVPLFYLGSN

SEQ ID NO: 933459 - protein, 245 aa, Homo sapiens
MMATLSCKTGKFLLGILKGEGVYEQGAVPGLKAGFHWGPTPFRPGAYLLPTAINLPSTAPTVPRMFMQWDVCRPTLSCPKFSLSLPPMGAQSLEGVKAAGGWHVSIASTCTRGQFATVPGLGLNFAPKSEQALGAQRGQAAEAGTSEPVGTGGFLDPQSAGMPWSTVGLGGGRGTWEGATNSEGGGAPACSQYLCLLPASSTEDAAPTAPPSAAARRLHSGRSGWAAAAITYKRAYEAMHSGSHV

SEQ ID NO: 933460 - protein, 213 aa, Homo sapiens
MGLWSRDSAEEAENCDPGPPGTAALSLVFKDLLNGFDQNADSDMDNKVQAVVVLDGQEELSGNWNKGLSCYAKRVVAFCPYPRDLWKFELERHDLGYLAEEISKWQSVQEEAEHKSLKNLSQNGKATDNLHPAPGKATDTQCQPVKAARTGAVPCKATGVEMIKTMRTHLFHQRDMDVSRKVKSETVSRSFYTQLCEQPIGLFCTLNGPFIHS

SEQ ID NO: 933461 - protein, 138 aa, Homo sapiens
MEPMLNLEINVTNLTTRFKFKIPHKKITPKSGHQPLDLGPALNQDDLILRSLIIPAKSLFPNKVISTDGISGDFLMKELCTQTTMKGTQRKLAAPFDLKVRRKEISDSGCELLLWIMDCPTGTEQQQFSLPGLCTTLS

SEQ ID NO: 933462 - protein, 148 aa, Homo sapiens
MIVRTPQSCGTAQVLYNQQVANSAEHVSFPSSWQVLPCPGGPEMPSGSQSLDTGKELLLELQAALPVVGEVCPTHERSCEHICVHSSYNGCSLDNPQPKDMTARGTVHSRVEGLRKGPVAELKFWGPSYLKYGLKEGSQFLELRGMKV

SEQ ID NO: 933463 - protein, 285 aa, Homo sapiens
MYVVILLGNGTLILISILDPHLHTPMYFFLGNLSFLDICYTTTSIPSTLVSFLSERKTISLSGCAVQMFLSLAMGTTECVLLGVMAFDRYVAICNPLRYPIIMSKDAYVPMAAGSWIIGAVNSAVQTVFVVQLPFCRNNIINHFTCEILAVMKLACADISGNEFILLVTTTLFLLTPLLLIIVSYTLIILSIFKISSSEGRSKPSSTCSARLTVVITFCGTIFLMYMKPKSQETLNSDDLDATDKLIFIFYRVMTPMMNPLIYSLRNKDVKEAVKHLLRRKNFNK

SEQ ID NO: 933464 - protein, 159 aa, Homo sapiens
MTMAVLSNRKGGNVGKRKRNQIVDDYAGHLQAALNVAKGYRYELVFAKILDFEIHRVPFEDLWTVEFGKFLVTYFQIQILSLSILSLMMSLLGAEPIEKWLQVEPIDIESHSYSQRHGKETEKEQIRKPIFSGFLPLDCLPACASSVQTNWKILVREAW

SEQ ID NO: 933465 - protein, 127 aa, Homo sapiens
MALSLSCQPCEDVSASPLSSAPIRIHSNAGKGGQEEKEKIGLKLCFPVLHDLTSSALAYQRLPCTDVRLHNLLKMNFPNNSGPTHLGINHPIHDSQLTRVAGKKGFRIATLRYHTCASVWGILFLLL

SEQ ID NO: 933466 - protein, 189 aa, Homo sapiens
MPSPALAHAQWVALTVLHPLSEKPLREKVKMESSLAISKARESYENDLRGLCAAGCDRKCFFSFPVEASVISMLLTVISAGNEISSKSWLQECIKLRNRDLNNSSINLTKVKILVNNRPPTGVSENCYRAVPSVCLKQQSLIALNLPQDFSRFSSLSLPRHNFRTKMGMDHKDTEVFHNFTQLNSKKCT

SEQ ID NO: 933467 - protein, 147 aa, Homo sapiens
MKPQTLAVSVTVLKDGVSGVSSFRCSHVSGVSSFRWVRGLADFRNEATDPREDTEKPHENSAEDMLDALIYLKLSYGNGLINQTKMGVLQYQRLPPRISRYDRFHSTDPMLCSSWPHFLCPPEHLSCTDPNMSNSAASFNHVKSFYP

SEQ ID NO: 933468 - protein, 144 aa, Homo sapiens
MNVVNAQGLNLGGTSPVELYSPWIVPERLSIGESMLHSCGRSPSYVYGGLPGVYKDPFSKALYGYRGCLPNVVPGDQSLPSPGVNSCWFEHFSVVLESCNQKDSEICSALCGQLSLVWYKSCIQSLCQNNDSCEKEPIKLFIKL

SEQ ID NO: 933469 - protein, 159 aa, Homo sapiens
MMMMMMMMMMMITMMIDESRFLKNTFRTACACPHAPPSPPPQEDLLVLIPEGKVEDLSGKVANGIGQIAHPEEQHTLLLGYTDHAVHDAIDPLVRHDLLTGTLHLQQQLDPLAGGHGIMEMAAMLYGSESDTRELYTKTQRKSKKCLLVHFPPEKRNPK

SEQ ID NO: 933470 - protein, 266 aa, Homo sapiens [sequence omitted]

SEQ ID NO: 933471 - protein, 277 aa, Homo sapiens
MGGGEQCPEGVYNPCDIKSNIILFHPGIWNNITGGVYTPCDIERNVTPNLNIRKNIRKEYKITKWVYTPCDIGSNVMLYPLNIRNNTTGGVYTTCNIGSNVNLVPPGYYKQYHTGGEQYYIDVHILCDIESNIILSAPWILRRRSQEQHHKGGVHPLRYWEEYHPFLPWILGQYNRVKEQYYKGVYAPCDIRRNIILYLLGYLEQYHKRVYTQCDISSSIILSPLNIRSNIPKGMHNPCNIGSNVILYPLDIRSNITGVVYPTFNIGSNVNLSPPGY

SEQ ID NO: 933472 - protein, 151 aa, Homo sapiens
MGLLDEDLDALWAADKSAAYLQKVNSLNTPHKVNTVRLISCPHFPLCSLGTRLEIKGPSSRRLESVSETYTVADADWFNKIQPVTGSPPTHCPCALCWDYRLAQASSASGPCLSCLIQAAESVWVETRKSEDKMALFLLWSRKPLESQAFS

SEQ ID NO: 933473 - protein, 134 aa, Homo sapiens
MEQALSILQQPYGKVAILIWVSVPILPYWEGPPGLGLQPPCHQSYRVNGSSATPWTEPSGATESSLPPPCLIHTSSKLQLTQGEEVNRCPTGTPPPPICSSLDREPLSHSIDSPSWSDCIERLLTCITLGWSPQ

SEQ ID NO: 933474 - protein, 162 aa, Homo sapiens
MDVFGRLKAMFSLEPLGSQVAMEATVLLPALAPPLPAYPPSQCMMGHHFTWATSTRPEASSRCHRLNSSVAFDHICSVSQSCEQKQREDAVHQALVGSGLPWQSGHGSGVQMMEGRPLCCCSRAKQERAKLLPFPQLNVHLPHFPLISSSLQYPFYPFALAG

SEQ ID NO: 933475 - protein, 179 aa, Homo sapiens [sequence omitted]

SEQ ID NO: 933476 - protein, 142 aa, Homo sapiens
MDHPRAEECGGMARDWQAVPPASPVRHPLGEASWAPESGGDVENLYLKVCKHTNQHPVSSLGFVNAPIDTLYLATLVGPWRTFVSTLCIYFTPEASETTSPPEGANNSRRSALRAVTLTARVCGFILGVSETKNPSSPDTAI

SEQ ID NO: 933477 - protein, 147 aa, Homo sapiens
MLPLHLQNLLARHLGNNLYAKLQPVWPYLPGTFTPGNLPVSSGFMFSLTSRMKLRTFSSQGTRPLVPAACFSKMVEAGRELARRHIPPGNGESPSVYHVAVTGEVVGEINTLVKTRSPVKNTSSDVSRRRVQVESEFSGNYHMGVTA

SEQ ID NO: 933478 - protein, 146 aa, Homo sapiens
MSPGLGTMGKVLQRRGRELGLEGLGNGAGWRGASNADSGWFQSQDAIPETSYLHCLSHPVVAVFAPHILPLLTSPFILPQPDMLSVQPTGSGSQEFPRTSSIDCAPLRSRKEFPSALTWQIRWTGTISKEIRKYQGMGSIQSFGYL

SEQ ID NO: 933479 - protein, 204 aa, Homo sapiens
MTCLSFDYMFLPPQPIDRRERDDLYSFTGELAFSVNAPCSFTQGISSGSSSVTLAGVQHSKPSETCPTVCLSPTEDGSSLISWVAYCLKHQECSLTAEEQARQHSELSEHKPESASQPKSSDSTPFCPLTLHTALEGWCHVVAERNQNQTRPQTPLVDVVKRSLEPSFTVWLMVEMLAKQVFGMSCVVTVVTSGSRIKSVPPGR

SEQ ID NO: 933480 - protein, 136 aa, Homo sapiens
MIESRLLPLLLAKDGRSPGESRAGYDTLKRCIGETALDKSLASRSLPSRGRKGKKILVLLIKGYVRRTIHYVNIIEMSLLLVCGPFTQSQQTMAHFQQFGASVVCSSARCRHWHNAPWCAMFVGLMHILRSLIYFD

SEQ ID NO: 933481 - protein, 201 aa, Homo sapiens
MHSPFFPVLTLGCCFQSASHMFCGLFQLSSYLFPATPGIVFATLRDLKFPQLVCILQVFTPRLLWPWLPKPLSRCPPLTPILLLDIAQREEAAHWSNFPAIPSNTIHSFHGLKILDTNWGNCLVYQDFLNPLCGRQATQVPRQETEGTSSVAKSVKEQHPLLSRPGKGVSLSPGEFREDSAPPPFVEGLTLVRLARSYPEA

SEQ ID NO: 933482 - protein, 151 aa, Homo sapiens
MSSAFSDGPELFNDSDSNCKVLVHAKDPHRRIDITGTLTQGAESVLESGRVPPGKKKWFHAFKRFQVGTGTYSLGQALPRHVAVAPPLVVAGNLVETKVHFQETSGAVQYALVASLVSTRFRRRCWCLKQINGTGATVGYRVRSKCSILNS

SEQ ID NO: 933483 - protein, 134 aa, Homo sapiens
MQPGLPVGQLARRGPPPALASRGTRHKPYLDNVSSNTSLGQLVSVVNQARTTSQCGHPCGRSYGEFGYYGELGHQGAQCLLPILLDKPERKEGSALGSCKNQSSNVLTSANAFRAKELQITAISLGVWLHVGLA

SEQ ID NO: 933484 - protein, 202 aa, Homo sapiens
MGCREWSNKRDNGNISLPWNGQQAGLTDAGLPVVGNPALVHPQEAHEAEGPRSFIQPFKDLAFSLYEDPSRLPLLALGEGMGEWPAFIPLFVPAHVLLIGPFYRVLIGPFYRALIGAFYKPLASYRVLIGAFYRVLIGAFYKPLASYRALIGAFLQSTDWCILQTSCKTEKFSKSTLNPGSPAGFTKGAEGHMNFIQPRNNI

SEQ ID NO: 933485 - protein, 148 aa, Homo sapiens
MATAGNRVLMLGRKVCLQEPNPNEQSRTVRPLGRGESPTADVWVCECQLSGASRTRHTQRGFEEGSAFQKWSKQDGEWKARSMKSEADLCKGSFQYDFTGELGSIGDISRVISARDKGAGLSYTYLVFHGLRAAEEDVSVQTRLALHI

SEQ ID NO: 933486 - protein, 168 aa, Homo sapiens
MSSSRILKVCECTNRHSVSSCSGGALENPCVETLYLTNLMGTWRTFVSSSGIVNTPISALTKQATRLYQSAGCGETTSPPGETNKSRCTALRAVTLTAKVCSFTPEPSETTSPPGGTNNSRCATLRAVTLTANVYSFTPEPARPRTHQKEETPNTSEHQKGQTPDAPP

SEQ ID NO: 933487 - protein, 149 aa, Homo sapiens
MVATGDAPRDPQWSELFSTSCPQAPRAALPQGPLCVYTAAPDSEEVECVAGLGAALPVPLSTTRLGSRVKLVHGFWGPVILGCGEWDVCFLGKVLRRCGIWPYSTPVQPCGSHQAIGSSLSHCSHCQLRHMPPSPFLFSLDLCCARKVV

SEQ ID NO: 933488 - protein, 144 aa, Homo sapiens
MPPWLTLPTSSKALPFTAVMRPDWKKDPMKLMFLCPVGAIYCLRRASNSSAQSLNTGNTPGGGDRGTGICGYSVCQGFYKTDLQIKAAETPARANAQCMTQGEATHFSQSRGPRPFGWTNVNISITFKSFYVNLQNRALAFDLA

SEQ ID NO: 933489 - protein, 332 aa, Homo sapiens
MELNGIISWTRMDSSNVLEGTRQMDSNGIIIEWNRMGSSKGLESNLQKDSKGIINAIIIKWNRMESSNGIEWSHCLMQSNEIIVWNPMKSTSNGIDWNHYQIELNGITEWNHHQMDSNGIIELTLMESSLNGTERNNQMETNGIIIEWNRMWNLKESPNGLQWNNHRMESSGIIECTRMESSNVLEWNHRMESNGIMVERKRMESSSGHEWNQHLMEWNGIIKWNGMESSSNGIKWNHQMESNGIINEWNRMGIEWNHHRMESNGIINKWKRMKSSNGIEWCHRMDTKGIIEWNQMESPSNGIQWNHHRMECYEIISWTRRESSSNGIEWNH

SEQ ID NO: 933490 - protein, 187 aa, Homo sapiens
MESKGIIKWNRMQSSNGIEWNHRMESNGITIEWTRMESSLNGIEWNHRMDSNGIIIDWNQMESSNGIERNHHQLTKTLNGHEWNHHRMESNGVIKWTRMESSSNGIIIKWNRMEIEWNHRKELNGIIEWTRIESSNGHEWNNHKMESNGIIKWTRMNGIIEWTRMESPNGLKWNHHQMESNGIIEWK

SEQ ID NO: 933491 - protein, 218 aa, Homo sapiens
MESNVIIEWNRMQSSLNGIDWNHHRIELNGIIKWNRMESSPNVIEWNHRMESNGIIEWNCMESASKDIEWNHHRIESNGIIEWNHPQMENNHQMESLNGIEWNHHRMELNGIIKWTRMESSSYGIEWNHRMESNGIIIEWHQMESSSNGIENNQHQMESKEIIIEWNPKESSSNGTKWNHHRVEPKGVIIEWNRMESSSNGIEWNHHQMESNGIIEWN

SEQ ID NO: 933492 - protein, 483 aa, Homo sapiens
MKSIGIIEFGRMESSSNGLKCNHHRMETKKSSNGIERNHRMDLNGIIIEWNRMESSWNGIEWNHRMDSNGIMLERDRMESSNGLEWNHHRMKSSHQIDSNGIIDWPRIESSSNAIEWNHRMDSNGNHRMDSKGIVIEWNQVKSSNGLECNHRMASNGIIIELNRMESLNGPEWNHHQVELNHVESNGIIEWTPIESLNELEWNHRQMESNGIIEWNRMDGIERKHRMDLNGIIEWTRMQSSSNGNKWNHRMESNGIIIEWNRMESSMNVIEWSHRMDSVRIIIERNRMQSSSNGIRCNYRMESSSNGIEWNHRIDSKAINQWTRMESSSNRIKKCNQMESSNGIDQNQHRMESSNGIEQNHHRMESNGIIKWNRRQSSSNGIKGNHRMESHEIIEWHQTESSLIRIKWNHLMDKNRITIEWDRMESSNTIEWNHHRMEENVIIIEWNQKESLNALERKHQMDSKGTIIMWNRMESSNGLELNL

SEQ ID NO: 933493 - protein, 232 aa, Homo sapiens
MKRVMEMDGELPRLVVLHVYCCTTMTAAREFDTGHEVGRKVEDTLERKEWNGKQWNRMEWNAMEWNGVEWRGVEWSGMEWNGNIIKWNRTELSSNGIKRNNQRLESNGVIIEWNRKASSSNGLEWNHHRMYSKGIIIEWNQMESSLYGSEWNHHRMELNGIIIDWNGMVSASKGIEWNYHRIESNGIIIEWNQMESSLEGIERQHHPMDLNGIIIEWIRKESSSNGIKWNHH

SEQ ID NO: 933494 - protein, 275 aa, Homo sapiens
MEWTRMESLNEIGLNYHQMKSNGIIECGIERKHRMDLNGIIEWNRVESSSNGIEWNHQMYTNVIIVEWIRKKSSNDIEWNHLPMESNEIIEWTRKESSNGLEWNHHRMESNGIIEWTRMESSSNGIEYNHNQMESNGIFIYRIRLEQSLNRIEWNHRIESNGRIMKWNSNGIIIEWNRMQSLNGLEWNHHRMELNGIIEWTRMQSSLNGLEWNHQMESNVIIIEWNRMESSNRIEWNHHRMESNGIIEWTQMESSWNVIEWNLRMESNGIPIECN

SEQ ID NO: 933495 - protein, 263 aa, Homo sapiens
MHLSSSYGKIIPVPPQASKPSKYPLADSRKRVFQSFSLKRKVQLCELKANITKKFLSMLLFNFSVKIIPFPTKSSKRPKHPLADATKRVFGNCCLKRNLQLCELNAVITNKFLTMLLSSFYVTIIRFPTQARKLSKCPLADPTKSMFLICSMKSNVKLSELNTNITEKFMRMLLFSFYVKIFPFPKTSSKRTTYPLADSTKREIQNCSIHRRVQRFQLNAIVTEKFLRRLLSRFYLKMYPFRTKAKEWSKYPPAEPTKRVFQS

SEQ ID NO: 933496 - protein, 138 aa, Homo sapiens [sequence omitted]

SEQ ID NO: 933497 - protein, 482 aa, Homo sapiens
MESMESSSNGIEWKHHGIESNGIIMELIRMPDHRMELNGNVIEWNQMESSNIIEWNHHRMESNVSNERNRMEYNHHRMESDGIIEWNEMESSSSGIKWNHRMESNGIIRMESNGIIQWTRMESSSNGIKWNHRMESNGIIIKYKQKPSSRIIIEWNQMESSWNGIKKNHHKMEYNGIIIEWNQIESRMPWNGIIIKWNQMETSNGLVWNLHRMESNGLIEWTSMESLNGLKWNLRMDSIGIIIEWNGIIIEWNGMIHRMESDGIIIEWNRIESSNEIEWNHHQMDSNGTIIEWTQMESSSNGIKWNQHLMELNGNIEWNRMKSSPNGIEWNHRMDPNGIIIEWNQMESSNGLEWSHQMDSNGIIIEWNRMESLEASNRIECNHHQMESNGIFIKWDRMESSWIIIRWDHLMKEEGIIIKKNQNKTKNGIHRNHRMESYGTIIEWIRMESLPNGIKWNHLMDLKGIFGLEWDHRMESNGIIIE

SEQ ID NO: 933498 - protein, 184 aa, Homo sapiens
MQSSSNGIEWNLGMESNEIIEWNRIESSLNRIELDHHRMESNDIIIKWNLVESSSNGIEWIQQGMESNGEIKWNPLESSSNGTKCSHHRMELNGINEGTRIVSSFNGIGWNHRMDSNGNIINGIEWNPQMESNVIIEWTLMESSSNGIEWNHQMDSNGIIEWTRMESSLKGIEWNPRMESNGII

SEQ ID NO: 933499 - protein, 277 aa, Homo sapiens
MDSNGIIIEWNRMESSNAVEWNHHRVYSNGIIEWTQMESASNGIERNHQGDFNGIIQWTRMESSSNGIIEWSRMEESSNGIEWNHGMESNGIIIELNLMESSSYGIKWNHQRMELNGEIEWNLIEWNHQMEWNGIIIERIRRESSNGIKWNHQMELNGIIIESTRMALSSNGMQWNHPMDSNGIIECIPMESSNGIEWNHRMDSNGIIIKWKWMESTKGPKWNDQMDSNGIISNGIIIKWNRMESSNGLKWNHRMDSNDINEWTRMESSSNGIEWNP

SEQ ID NO: 933500 - protein, 160 aa, Homo sapiens
MTSNGIIIQWNRMESSNGLECNHQQDHRMKSNGIIFKWNQMESSSKGIVIEWNRTESSSNGIEWNHQRMESNGIIERTLEWNRHRMESSSNGIERNLHRMVSNGIINEWNRMESLNVIEWNHQRMESNGIIEWNQMESSSNGTEWNHHQMEPNGVIMEWN

SEQ ID NO: 933501 - protein, 186 aa, Homo sapiens
MESNGIIIEWNRMESSNGLEWYHHGMELSGIIIEWTRVESSSNRTEWNHRMDSTRIIIEWNRMESFNGLDWNNHRMDTNGIIIEWTLVESSSNGIEWRNIIESNRMKSSNGLEYNHRMHFNGIILEWNRIESSSNGIEWNHHGVDSIGISIKWKAMESLNGLEWNHHGMESNGIFEWNQKDSSNGH

SEQ ID NO: 933502 - protein, 182 aa, Homo sapiens
MNEIRDEDARGMPAMPTSKPLLSTYYMPHTGDTEALNTGSRTPYGAAVLCTKQMKKQDVGFKLRPPECVEAVSSQLLPHGHKMAAAPPGLTSMFQARGRRRSKRPKSKDPDSLEKGLQPLSFLDCTPPALAACPLVGTQQQATDGFWLSHGVASGHAADSDSHWHLFCLENALHIHHLWFFC

SEQ ID NO: 933503 - protein, 172 aa, Homo sapiens
MRALRAGLTLALGAGLGAVVEGWRRRREDARAAPGLLGRLPVLPVAAAAELPPVPGGPRGPGELAKYGLPGLAQLKSRESYVLCYDPRTRGALWVVEQLRPERLRGDGDRRECDFREDDSVHAYHRATNADYRGSGFDRGHLAAAANHRWSQKAMDDTFYLSNRPRPGPVAE

SEQ ID NO: 933504 - protein, 133 aa, Homo sapiens
MRVAVVPRPHQYLMCVLGRQASAEQGACPAPAYYFIASSQERLPTLFSGIIFRKEPLVGHFPVNSFPKNLRWLISGKFCDIITKTPGVLSRSCCWLHRKPVTETTSTARKESFNQVLQPWRWEISFKSISVTN

SEQ ID NO: 933505 - protein, 189 aa, Homo sapiens
MSRPSIFLRTMATPHTAGAQEGSRECPTCPQSTGPPLHLPLELWGAEVAAASPSSLHTGFHGSPSPFALAPFGASGEAPGSWAFLCPLHMLPPGQDPALSLKQPLYALTPPLDSRCVVSGSYWKIPPGFMHLHEFRVAKTDLLTPPGSSLPPCSPPGCSAYNFSSAKWLEKGLASEGDGGGADRMGRRR

SEQ ID NO: 933506 - protein, 332 aa, Homo sapiens
MPVPALPNTVEERHVCAPVDACVLLTGYAKAWKAMGILGVEVDTRARWPKAGLAKDMDTSLRGIGTPVGRTDGNFHLASIPSSRRASWNSFLTVQAMNSLNVPGAGGPYSRVTCWRVNSVLAETGLEEDELVVRGSADVPLESSWAVHGALGSAAPPHTVEPPLTAGKGAGRGPELWVLGSLLLLMASDATAESLCVAASYNVGINKGVNDKPLERRMEKKPWFPLGCRSPGGKPRPQLNSGKDSSQLTLALGAVGTASLLLDFGNQPLVRSSLAFNASSFSGLDQGVDVLIECLRNSFYAWTVPGTDALTCSVAPTVTVNHARRRTSPADT

SEQ ID NO: 933507 - protein, 138 aa, Homo sapiens
MASGRHVLAQGWPERLAGELDVRFKRKRVARHSSWNLGLGNRKGGTAVPWTGKVGQELAGSGVGYKEPCCRLARCTSTLDTKGHCQVVQYELGIQRRGYAEIQMKAGIATVAFDDEEVAGSFLILQTGTPWDEEKTSI

SEQ ID NO: 933508 - protein, 218 aa, Homo sapiens
MVGEKVGGSPRPQCCPGSAFWGVKRMSAAKILPILEDSSGPCILRLPPPGPVLRHQALDSKDFPRPSSNLEICSMPSGPGTTWAFGKAHSEVLDFKEWVGECRLVPWEAARAEMLAHEQDVGPPGMLQERAPAPQQPGDRQDEQNLPACASGASSVRPGVQAEALVLPLTLLFLHLVHEQALRASFHYQWFHAFCPAAAHTAGLASRPETWAAGLTLT

SEQ ID NO: 933509 - protein, 148 aa, Homo sapiens
MEPTLTLGVFQQRFWPPGVRAPNARFWKLPTPHKENGDKRMWRCGMTCSRDSPALLTLLQTTSSSQGSSGAVRSLLSAGVSGLWQLLPLNGHQAGSQCSRNIIVRNKLTSSNPKNGLRDTENSGRETCKIGCLMGRHTQHSFNKQFIP

SEQ ID NO: 933510 - protein, 169 aa, Homo sapiens
MSSSGIINTPIGTLCLAQEGRNSKHIRTSEGANSRRTTLRAVTLTARVRGFILEVSETKNPPIPNTASQRSLDFIKLEIPAREQETGDFALQTCLYTRHWDVEINVASLHRCPQGICRSSPRCAQAHPTLPAQFRFPAPPAKHSTVHLPTRGVDSGHLVLGLASPSAPS

SEQ ID NO: 933511 - protein, 206 aa, Homo sapiens
MGVPVAGASGDSLVPNEPAGAAWAVGAQVGHSECQMALFPGPHRPPPASPEGMAVSPMTFAVGQGWSWTNVDWRHVAQAPTLVVLAPAMKKGAPSTPLIQPPSAKGRGLFQEQHSMQTSNRQTDITKACLRKVSKWLLRYVSTFHLLVEDTHSPSQGRTARRFWTLRDCSVISGTLRSPGQHMVSSTGVIECMTVAGALGESVSQP

SEQ ID NO: 933512 - protein, 147 aa, Homo sapiens
MFLQLLLQGCPSAGPAFPAGSPCFPVCQRCVLFKPKLYPMAQLDRLLIHPSAGGHLGCFHLLAAVNDAAVTAPIPITDLTPIPITDQTPIPITDQAPIPVTDQALIPVTDQALIPITDQALIPITDQALIPLLRTASCGRPPHRNLF

SEQ ID NO: 933513 - protein, 176 aa, Homo sapiens
MRGHPGLAQSCVSSRVSGLQDDSLWLQLLFRLWELLATPLLSGPTVVPVASSPQCPPGAQGGSPHSPQAEPRKCLPRESCEPSPPKPAVAMPALELQWEPQEALAGQGGPPVTSELIVNSKAGEAAPGPVLNAQPGDTLSACEALPNRAAWADTWDVLSQLLSTCLAGMAQQGCRR

SEQ ID NO: 933514 - protein, 133 aa, Homo sapiens
MSRPGTPEGVAREAARADGVPGALRSSGRPRPRRPAQYPARPRRPASTAGSAPFPEGWMMGCFALQTVDTELTADSVEWCPLQGCRHLLACGTYQLRRPEDRPAGPQNKRAPATFSELRLCSSALTSSLPVLL

SEQ ID NO: 933515 - protein, 169 aa, Homo sapiens
MHHLLECRKDFELGKGAKPARVSWLGMAAHPANSGSLLPDNAAGGIASASGKWPTTVIVVTLLHERDEATPDAVPGKSPILAVGKSVCHLLRALTVRNIICNFKVISIPPVPFKEEDRGPQVIRGCPGWFKNFHNGNLGLERVDGESCRETEASDEGGCPGSSDLENVS

SEQ ID NO: 933516 - protein, 226 aa, Homo sapiens
MALPRQWVPKVECRRFRDRAPPSFLLQNSEMVLSISLNTVLFGQLRPGLSSASLSSTLREAQALLLIFSPYWALLLRPSSWYTEHLPTHTLNLSLSPSSPLNPALPPYHLAAPPRLNPVLTQHSEGPSGMQMTTWQCWASYSSIVSTPSAPAWEVSLDLVPGLLASWSPAHSFPTRSSGAPISPASSSCWGRLSPNLRGSVAVRKARNCQAVFWSGCTFYILTSNV

SEQ ID NO: 933517 - protein, 175 aa, Homo sapiens
MLFFLSVHPLNFVLCAIPSQKCLIRGFCCGSIIECVYTNLDGLAYYTPRIYGLFLGYKPVQHVTVLNTVGNWNTMLSTWVSKHRKASAVVLGETNRTLFGFGEVSRCAPVRPGRPPATAAPTCAQPPPLPPQPAGFTLGENLTEVVTTRQINPMQIGLRFHNHPSQTAPGVQGDC

SEQ ID NO: 933518 - protein, 163 aa, Homo sapiens
MCVCICVYECACVSIWVSDWVRVHTCEPSQWHQIAITGHLEKNGGRRKGDHGSHAPGVEHLFSVPSSSCTDQHRQRAAGSTEKRQPPGHVAHAWPKFCWQVPPPSKISLPPVEEPLGGTQEGVKTFFNYHSTRCPIKNMAQLQASTWLLPPETMPPAEVTGWL

SEQ ID NO: 933519 - protein, 146 aa, Homo sapiens
MGTSKTMGLNKQAHSFPFRGTKIEKLKADSGDMPAAAERCKGTDTQLSLPDKHNKETQKQSQNPPPTTGNGYSLPNPCSPLPLSLSFSLSLFLTWLQSGRPFANSNWNIQYRTRTQPAGKICLLLASSWYQRKSGLPSRSLEDQWD

SEQ ID NO: 933520 - protein, 138 aa, Homo sapiens [sequence omitted]

SEQ ID NO: 933521 - protein, 135 aa, Homo sapiens
MRKLRLGVECEQFRVKQLIRKTYEWRNLINIRGHAKKPGKPRKPCRCSREWSIACSWKLSGKSGKRRYCLCFNFLSDIFLQDAFSREPGRIRRRWENFLPAGHLGARMTFVTWTFPFLLLIIVPSPLRPSLFWKY

SEQ ID NO: 933522 - protein, 138 aa, Homo sapiens
MFLSEDTWQSKCWQPCVHCQSMPTLTFSWFFEIPESENLCSSRKWGQGDGAVKNEELLVKLQVEVEQKSPTSICYNSFRRTETKVCHCANSEAAVFDEDHSALADRPCSDLPNLLEVNEGLLTVVRKVPIMNDSLTKC

SEQ ID NO: 933523 - protein, 155 aa, Homo sapiens
MRFGQDIYPNYINCPFVWVLRVHSPLIQKRTMHTNTQEANIVRKINQKETLLSSPKGNLLPYPGFVTLMATNQWSISGSAIEAIRRKYFHNRLIIFKVSPPLGSQISHYYALSHIRFQIMLPQACQPKKGPVPEPAVSQTVAYLPRLEDYLCTGN

SEQ ID NO: 933524 - protein, 134 aa, Homo sapiens
MEPKAKECWQLPYVEGVTIFPHNLEEVAPCQHLDFRLLASRTVGGYLSVILRHTISHQECGKVELLPSGIVALWNPSSLFLLGATEFSGKAYTKSSNFRAICDTLWTPHEGFPPNSYAREVDHAPKPHRPDESP

SEQ ID NO: 933525 - protein, 149 aa, Homo sapiens
MHTETWFLYLFTRVLRPTSQLGKVDDVSQFLATQCGPRTGSIGVIWKPEGSAGQNELPKHVGRNQGSHSGLGTWACEHERSIGSGSLYISGLELADPFLLEPLCPPAAEKAEASSNLGMALAEQGLRAHLKKNRPLINLMVITLYAYLF

SEQ ID NO: 933526 - protein, 174 aa, Homo sapiens
MTDCPSVHIPHYPQIAKISQHPGIHFRRVEGKFCKRIAGLRRAYASMPVRRQHRSVSLICHLAASSGHPITARILETEKYKFKTPASGEGSSLLLRWHLECRVLQRGEMLHLHMAEFKRPKLGQIIPFIRPFYKGTQSHSRGRSPHGLITSYRPHSLIRSHWQNLNFGRDTFKP

SEQ ID NO: 933527 - protein, 136 aa, Homo sapiens
MLTYLGIELGPPPKEGPEIGPSSNIEPAGTLIWTSKIPELDLVQTVCDFHVGLSLETLPVEEDATFEDIWAAYGKARVKLGVGFAGGMIYRMPRKVIGKTRRKACDLTVTSCRPLGTLAVSPEGGDAGGLPFRGSL

SEQ ID NO: 933528 - protein, 133 aa, Homo sapiens
MSSDFLLANSSIAQVQDRHDIGMDEQLIWIMPDVFCSLFICWLRRSKLPWTQLKGVKCLQQSHKQGSGHFPGGASGENPALADALIAACETFSRSPPDPQKLPWYGAGGLGEVLGAVSQSPSEKHGIWSPDDM

SEQ ID NO: 933529 - protein, 168 aa, Homo sapiens
MKARRLSKSASSTFFCLLFLASLAADWMVPTHIMKEDRKMWKSLQLHRDLLNGFDQVDNELQAEVVSDGDKKLMGNWSKVDSHYALAKRGDCTLQSPGAELPKAVGTHFLHQHALDVRHGVKGDHFVALIFDCPSGFWTCIGPVASLFWPIYPIWSGCIYQCLYPHCI

SEQ ID NO: 933530 - protein, 234 aa, Homo sapiens
MKLSISFPATDSRKLIEEELKLRTFYEKPMATEVAADSLGEEWKDYVAQISGENYKQGFPMKKGVMTHGRVRLLLSKVLLQTKENWRKKERKSVCDCIVDANLSILNLVIVKKGEKDIPGQTDTTVPHCLGLQRASRILKLFNLSKENDVHQYVVRKPLNKEGKKPRTKAPKIQHLVTPHVLQHNRRCIALKKQRTKKNKEEAAEYTKLLAKSMKEAKEKPQKQIAKRCRLSSL

SEQ ID NO: 933531 - protein, 335 aa, Homo sapiens [sequence omitted]

SEQ ID NO: 933532 - protein, 136 aa, Homo sapiens
MTWLLRYTVFIFLHKKMQAVRLQMLAAQNIPFVCEETDWMAQFQSNYEMQAGMPGEKDHNRAPGTQAVAGQKEDGIGDFQHVVVATICPAQGKHKRIESKSLIVADGKTETYAGHMPLKLTQCLWQSKGLNLVVSY

SEQ ID NO: 933533 - protein, 221 aa, Homo sapiens
MCSAEAESALLLWILAVPALGKGPLATSGPSPSKCFCTGCLLLPLPPMSCWGLWHHFSWLCNSPWQVSKSRPRWFWRTTAAKESTWAWRTDKVCDMSVMLAEKSLDRLQNVVTEVEMPAIPVLRAIVEAESPKPTIKGIKGVKSGSLGIAPRAISCDGLKKQCKPAVNKSEFKGSGGEYLRLPGGRGGIRLAVRWPQLYSGKVNPVGRILQADSSWGTIDK

SEQ ID NO: 933534 - protein, 149 aa, Homo sapiens
MVTGMLQRVVVKVTEGEGTCPKLGLVDTGSWHIGPEVKEAKMKGIVESFKCENTFQLQDQRTFPTAHKCLQLYRICKSTKESTSYCSREGGKNKGAAISKEIVTDAVTAELRLKGGEGVPKEPVPRKPGGGAVQAGARAALKAETVLSS

SEQ ID NO: 933535 - protein, 157 aa, Homo sapiens
MERAEVVYTLNQRPIYGTESAIGRIHRSRNQGVEVEVAPLTNTPSDSLAKFLLPVPSTLRSAGLKVLVLEGGMLPPGDMTMPLNWKLRLPPGHCGLLLHLSQQAKKGVTALAVVIDLDCEDEISLLFHNGGKEEDMDEAVSHHPRKLTQEQKTKHCL

SEQ ID NO: 933536 - protein, 225 aa, Homo sapiens [sequence omitted]

SEQ ID NO: 933537 - protein, 148 aa, Homo sapiens
MKAFDNLGENFKGHDEDEIQAVVGGSREIRSTPWWASLPPGRGKQRAYSRCFGAERQVQNLSSPLAPQGEGKQSGQLALLSLSSFSPTDFREKWSFCSLQDMVMGWGWEKGRLSPWSVLQIPPGRGIGACHPALVEVKKLQKCQPNLS

SEQ ID NO: 933538 - protein, 142 aa, Homo sapiens
MTYHFFVEAFDSLISLTGKIQLTAADGKARYHVDHPDSLILLVLHSTQEDFRWTSNTKAHWETDLVFYLASWGKASLGQPLVLQMEGALSIPSTTENKFGEFYLQIVDKEGIIIQGSSPPSPGLAINPGMMRMMSQEEREHI

SEQ ID NO: 933539 - protein, 297 aa, Homo sapiens
MALLSLWVQVGCGHKQAICTASARAVQRGNAELEARHRVPIGSLSSGAVRRGPLSSRPQNGRSTNNLYYVPGKPSGTQCQLVKAAKGAVPGRATGVELAKALGAHSLHQCGLDVRYEIRGDYFRALRFTDCPARFQTCMRPPFDVRQSLLVMELMVVATGNYPIWASESAEQVGSARQSLREAGRKGSADIRLALCHGQDSPIMSRSGSQQRQEPPIGVWQALGYGHPWLYSPAAIPVPNPLGLYRVKSCLCELSEQLSQTAQMSLGVMGSPAAKILECSDLEKQHPKHNNDTRISR

SEQ ID NO: 933540 - protein, 147 aa, Homo sapiens
MVVVIEMECVAVKGQWRNPLAYVNVNILIVIYIHEALQDSLPRLLCKHLFGMQAQMKLLKMVGAPVMLGMPDAFEFSSLEQYYVKMPRKFQKRICLRGMKKYKTLEVRAPGSHYSHLSALTTAEMFLAPAHMASSVLASPVLFMSCL

SEQ ID NO: 933541 - protein, 142 aa, Homo sapiens
MLPNNEDEAEFKGDTKGPLTISLSWENSVVLRGISKNLADTCPNSMGQRNKGKGPSSAVLLEFAGGPLQTLFAWVSPAEAAEQQRLLPALSSGSFVPEGEPPDASWSSPRLIFIDSMKGPTCPLGSIWIWLLRSTYKYLENG

SEQ ID NO: 933542 - protein, 154 aa, Homo sapiens
MWLATCLDSYLNSLGPRFVLPQKDVKKIEKSLPDQHLLFLDTLPLKSQISAKSFPNGEIAQLKPYGSNGKDGERGGYIMSQKTVKGSNILCWIPGRVSEETLLLSSVLRSRMMPLRKSHLLKGTQIHKEFCCCLLDKNPLVDFSSYCKLEKSIQ

SEQ ID NO: 933543 - protein, 206 aa, Homo sapiens
MGLPSMAPPGRSCCGSRSRRESAACRGPPPAWLRAGTPPRARAPSPADRPSCPQFLPKLDSLSGCPKSLIPGPASPTPVTPPPAPGPSLHPRSPPSGAHPPPENSRRAARLWAESGFLSGARPVSLSPWDEQPQPKITLERRAKNGYLLPALKSEAGRCTSIQQDPLEPSTLSPASSKTAHFPAEEKKNGIHAVPILQMKTRGLFL

SEQ ID NO: 933544 - protein, 162 aa, Homo sapiens
MERNGMEWKGMESTPVEWNGKEWNGMEWNGMEWNVSEWNRLECNGMESNLVKWTGIEWNGMEWNQPEWNGMEWNGMEWNGMEWNGMEWNAMEWNLPDWNGREWNGMEWNGSKWNGMESTRLEWNGMEWNGMEWNRVEWIEREWNGIKPIGMEWNGMEWNGME

SEQ ID NO: 933545 - protein, 187 aa, Homo sapiens
MEGNGINPSGMERKGMEWNGMEWNISEWNRLECNGMESNLVKWTGIEWNGMEWNQPEWNGMEWNGMEWNGMEWNGMECNGMESTRLEWKGMEWNGMEWNGKDRNGMEWNQPDWNGMEWNGMEWNGMEWNGIEWNGSKGNGMESNRLEWNGMEWNGMEWNGIEWNGSKGNGMESTRLEWNGMEWNGIE

SEQ ID NO: 933546 - protein, 1641 aa, Homo sapiens
MDWNGINPSGTAWTGMEWNGIEWNGTKWKGMDSTRLEWNGMEWYGIECNGTKWNEMDRNGIILSGIEGNVFEWNGKECNQPDGMEGNEIERNGKEWNQPEWNGRECNGMEWNGIILNGMEWNGMEWNEMNGTKWNRMHSTHLEWNGMEWNCVEWNGMEWSVKELNRINPNGMEWNGMEWNGMEWNGMDSTRMQWNGMEWNGMVWIHPERNGMEWNQPDWNGMEWNRMERNGMEWYVIEWNGTKWNEIDSTQLEWNGKEWNGMEWNGMESTRMEWHRMEWNGMNQPEWNEKEWNAMEWNGMEWNQHEWNEMEWNGLEWNAMEWNGMEWNGIIPSGMEGNVFEWNGKEWNQPEWNGREWNRMERNRMESTGVEWNGKNGMEWNEWNVINPSAMERNGIEWNAKEYNGMEQNGTEWIHPNWNGMEWNGIVWNGMEFGMEGNAMEWKGIEWNQPECYGMEWNGKEWKGMVQNRMEWNEMSGMEWNGMDWNGMQLKGMDGNGMESNHSEWNGRECNRVEWKGIESTRVEWKGMEWNGKEWNGINTSGMEWKGMERNGMEWNRMEWNEINPGIEGNVFEWNGKEWNQPECNGMEWNGMEWNGMESTRIELNEMESTRVEWHGMERNGMELNGMERNGMEWNGMEWNGMVWNGINSSGMEWNGMDWNGMQWKGMEGNGTEWNHSEWNGREWNQVEWKGMESTRVERKGMEWKGMEWNQPEWNGMEMNGKERNGVESTRVEWNGNEWKGKECNGMEWNGMEWNQPESNGMEWNGMERNGMEGNGINPNGMEWKGINPSGMEWNGLEWNGMEWNGILSFRWNGMESTRVQWNGMERNGMEYNQPEWNGMERNQPEWNGMEGNGMEWNGMEWKRIEWNGTKWNGMDSTLLEWNGMEWIGMECNGMEWNGMVSFRVEWKGIGMEGKVIEWNGKEWNQPECNGMEWNGIYQNGMEWNGMEANGTEWVVPEWNNGMESNRVEWNGMELSQTEWNGMEWNGMEWNGMESPQMEWSGMEWNRLEWNAMEWNGMEWNGMEWNGINTSAIEWNRKNGMEWNGFNPNANGMERNGMEWIQPNLNGMEWNGMELCGMEWNAMECKELNRINPNGMEWNGMEWNGMECNGMEWNGISSSGMACYGMDWNGMQWNGMESFRVEWKGIVDWNGMEWNAMERNGMESSRMEWSGMEWNGMECSGMEWNQPECNGMEWNGMEWNIINPNGMEWKGINPSGMAWNGMEWNGMEKNRMEWNKIEWNGFNPIGMEWNGMEWIGMECNGMEWNGMVSFRVEWMGIGMEKNRINPSGMEVNGMERKVIEWNETEWNGMEWNGMELNGTESTRNGMEWNGMEWNEIVWNGMEWNGVKRIESNQPEYNGMERNAMEWNGMEWNGMEWNGINQPEWNGMEWNGMEWNAMEWNGMESARVEWHGMEWIGMECNGMEWNHSEWNGRELQWNGMERNGMEYNQPEWNGMERNQPEWNGMEWNGMEWNGMEKNRMEWNEIEWNGFNPIGMEWNGMEWIGMECNGMEWNGMVSFRVEWKGIGMEGNVIEWNGKEWNQPECNGKEWNGMEWNGIYQNGMEWNGMEWKRIERNGFGMAWNGKEWNGMECYVIEWNGTKWNGMDSTQLEWNGMEWNHSEWNRREYIRVEWKRIESTRVEWK

SEQ ID NO: 933547 - protein, 2483 aa, Homo sapiens
MKWHQPDCNGIKSRGMEWNGTESNRVEWNGMEWNGMEWNGMEWNHPEWNGVEWNGMEWNEMEWNGMESTRVQLNGIEWNAMESNGFNPNGVERNGINPSGMAWNGMECNGLECNGMVRNRVEWNEMEWNGMEWNGMELCGMEWNGMEWNGMEWSWNGMEWNGLEWNAMELNGIIPSGMEGNVIQWNGKEWNQPEWNGVEWNQPEWNGMEWNGMERSGMVRIRMEWNEMDWNGFNTIGMCNGSQCNRVEWKGIESTRVQWNGMEWNGMKWNGVYQKRMEWNGMERNGMECTRMERNGMESVEWNGMEWNGMEWNGVIPNGMESNGMEWNGINTCAMEWNRMEWNGMEWFQPECNGKEWNQPKWKGMEWNGMEWNGMECGIKGNVFEWNGKEWNHPEWNGREWNGMEKNRMESTRVEWNGKEWNGMEWNGMEWNGINSSAIEWNGMEWNGMEWNGMESTRIEWNEIESTRNQPERNGKEWNGTEWNGMEWKGMEWNGMEWNQLEWNGMEWNGLEWKAMEGNGREWNGMESFRVEWKGMESSGMERNGINPSGTEGNGMEWKGMEWNQPEWNGMEMNGKERNAMERNGMEWNGINPRAMVWNGMEWNGMEWNGMEWNQPEWNGMERNQPEWNGMEWNGMEWNGMIRNRMEWNEMEWNGFNPIGSGMEWKGNEWNGMEWNGMEWNGMKWNQLECNGMEWKRNGMEWNGMEWNGMEWIVSERNGMEWNGMEWNCMAWNGMKRNRMEWNQITWNGMELNQTEWTGMEWNGMQWNGMESSRMEWSGMEWNGMECSGMEWNQPECNGMEWNGMEWNIINPNGMEWKGINPSGMAWNGMEWNGMEKNRMEWNEMEWNAMNPIGMEWNAMEWNGMEWYHSEWNGRECNRVERKGMESTRVQCNVIEMERNGINPSAMEWNGLEWNGMEWNGIYQNGMEWNGMEWNGMESNGTEWVVPEWNNGMESNRVEWNGMELKQTEWNGMEWNQPECNGVEWNGMEWNGINSSAMEWNGIVKELKRINPNGMEWNGMQWNVMEWIGKEWYGIEWNRTKWNGMDSTQLVWNGMESNGMEWNGMECTELNSINLNAMEWNGMEWNGMEWNQLEWNGMVWNGLEWNAMESFRVEWKGIGMEGNVIECNGKEWNQPECNGMECNAMEWNRNYQNGMEWNGMEWNGMECTRMELNGMESYGNGMESNRVEWNQMELNQTEWNGMEWNGMERNGMEWNGMEWNNPEWNGAEWNGMEWNGMEWNGMESTRVQWNGIEWIGMEWNGFNPNGMERNGINPSGMAWNGIEWKGMEWNGMEYNGMERNGMEWNGMEWSGIIPSGIEGNVFEWNGKEWNQPKWNGRERNGMEKNRMESTRVEWNGMEWNGNNSSAMEWNGMQWNGMEWNGINSKWNGTKWNGMDSTQLEFNGMEWNCVEWNGMEWNVKDLNRINPNGMEWNAMQWNGIMERNGMEWIQPNWNGMEWNGIELCGMEWNGMQWNGTQLNGMEWNQLEWNGMVWNGLEWNAIEWNGIIPSGMEGNVIEWNGKEWNQREWNGREWNGMERNGMELTRVEWNGMEWNGMEWNEMESTRELNRINPSGMGWNGTERMGVEWNENEWNGMEWNGMEWNGINSSGMEWIGMECNGMECNGMESFRVEWKGMKSSGIKMNGINPSAMEWNAMEWNGMESTRMEWNGMEWNGIEWNGMEWNSGMEWNGMESSRMERSGMEWNGMEWNEMEWNEMESTRMQWNGMEWNGMECNGMESNRIESIRVEWNGMEWIGMEYNGMEWNHSEWNGRECNRVEWKGMESTESNERESNGMERNGLESTRVGMEWNGMEWNGMECSRMEWNQPEYNGMELNGMEWNGMNGMESTLVQWKRMEWNGIESTRVEWNGMEWIRMECRGLEWNHSEWNGRECNRVEWKAVELTRVEWKGLEWKGKEWNGINPSGTEWNGMEWNRMEWNGINPSRMAWKRMQCNGLECRGEWYGMEWNGMEWNGKEWNGMEWNQPENNGMEWNGMEWNGMESTRMEWSGLKSVRLERHGMEWNGKEWNVQWNGMEWNGLESTRMEWNGMEWNGVEWNGIKWNAFNPIGMEWNGMEWNGIAIEWSVKKLNRINPNGMEWNGMERNGMEWNGMESTRVEWNGMEWIGMECNGREWKGMEWNGIIPSGMERNVIEWNGNGINTSGMEGMEWNGKEWNGIYTSGMEWNGLEWNGMEWNQPESNGMEWIGMEWNGKKSSRVQWNGMEWNGMESTRIEWNEMESTREEWHGMEWNAMEWNESTRKEWNGTELNQTEWNGMEQNGMEYNHPEWNGVEWNGMEWKGMEWNGMEWNGINSNGMECNGMHWNGMQWKGMEGNGMEWNHSEWNGRECNRVEWKWNQHEWNGREWNGMERNRTESARVEWNGNEWNGMERNGMERNGINPRTMEWNGMEWNGMEWNGMEWNHPESYGVDWNQPEWNGMEWNGVEKSGMVRIRMEWNEIDWNGLNPIGMVWYGMDWNCVEWNGMEWNGV

SEQ ID NO: 933548 - protein, 152 aa, Homo sapiens
MLLCASTVSFYFFGWPERASGACRPMGHDQTYHVVTSPELLSKKGEGLGHGHTLSPSPRSSHSHVYLKPGHCQGIRPSCLGRGEHHPGTPRGPRLLGAVYVDGEGEKRQWRSNTNQLDIIVEKNFVSGIILYHGHYGIKKDNDPHTINTVDH

SEQ ID NO: 933549 - protein, 139 aa, Homo sapiens
MHANHSSHQNGYWYSHTVRTTVEVSSSNNISCGLNSTVELLLAGSDPGKEGPEALSTDTDVPECLRFLEQPRTARHKREKPRAGPVTTMASPVPLAASLHVLGISAALTPAVPHHEVRRAPRLSYPCVISLRRTLEAQT

SEQ ID NO: 933550 - protein, 204 aa, Homo sapiens
MKPFPPLTSSAVLMRKMRNLSAFDSCRNKNQGSEGAHPVSQEQSGVEPACGHKASSSCPLFLCCLSAPHRSQEPRRLSVVLLRTSCQDLTTAPTIASTEKISPLYQGRWSGTATKHSPTRAANTNSAHHAEIALACGSLVISFDAAGPRAELTLESATLALKVLGPFSKGSSRIFQTVVSTSVCGFKDKENKVNALKLCHCSIH

SEQ ID NO: 933551 - protein, 139 aa, Homo sapiens
MLPLLIPESSPAGREKLSAEEPVIKTVEAQTRGIQKVEALRRFSLTEQAHAAGPGGTLCQSHPSPSSHSNGESPLLLFGDEGFGLGGPQSGGPKIKVHVCLIVQTLRSSDYRKSQVVSLPMAKEGSFQYIPLLPQLQGE

SEQ ID NO: 933552 - protein, 193 aa, Homo sapiens
MRIPPEKCIVRQFCYRVNMVESMYTDLDGMVQAPLGCMARRQERSTGALEIHISNGKEERMLQAVSEAGMIRCQGHRNVLYFPLENVESMLPLNAHYFPKIWEVINGFDIGDWQDVFPGHSPADPSRVRSRQDKVKKAMGTSRCCSKQSLAALTAGWHKDASTSAMTVYQCHGNSPEVITAFSGNNLEGAALS

SEQ ID NO: 933553 - protein, 186 aa, Homo sapiens
MCRVPALCLLATAGPSAGGAVVFAESKQNYFNESCVKKIKINLCDVICVCQPALPKRRKMEAFSACPDHPATAAHKGNLSQEASDSICVLFCMLSPTKEACVAQSPQCHISEAVEGIALGDAGGRNCSPLTLAMDAEPGASENKVPRDQPEGMGNKLLSLQGGQSPIRLPCRVGLCVGEYLFSFAL

SEQ ID NO: 933554 - protein, 153 aa, Homo sapiens
MSHCLHLGVGTSVGEKGSYDEDQLLVDLQVSDHSTEFLKGYLPIAILVQDDDGFVDQLLELPVRQVVAHHHLQHLEELPVGNVAIFIHVVNAERKPQLLLLVALDAELGGPQDEFLEVHFSITVGVEDVDHSPHQRVVAQLRQGHELLHAQRP

SEQ ID NO: 933555 - protein, 162 aa, Homo sapiens
MTMVCGYAGSTVVVPGGCQHTAVIDIVQTSGVNGGMDETLVQSKFLRLLPFDKYGPRHSFPNPKPAKPRSLHRGPAQPPRSARSLSSSAAALGDTLNGSQVPGHSALAGQELLLCSETDPDSSVWCDCVWPWASYLSKFQSLPVSNVVDCSCVHHRDFVKIK

SEQ ID NO: 933556 - protein, 146 aa, Homo sapiens
MIPCIVATGPQSLLACKFSAEKSAVSVMGFLLVHVHNVQSNPSSPNLLQFAEVHSRHCSPGYHQCRLQNSQDCCLLLPLGDSSQRGTGLMPARAPLCEMSWAWCTVLGESPLPGSVALFRACKQERLSLLKLQLQPPLPRCSVPRR

SEQ ID NO: 933557 - protein, 144 aa, Homo sapiens
MVLGLTFKTLSCRSVGVCRWSTPDSFCLGISSRGCRTADIGEQQMLLPDRSSGSFVSEEYLAGEMNPVPPLEMRKSPTVCVTHAGSCRLELFLFGHLGSTPENWSFKLSPEVWEGSVGWVTSCPLSPGLRIFEQTKWNIYMQVW

SEQ ID NO: 933558 - protein, 134 aa, Homo sapiens
MLSQPSSPNPQQSMVCDVPFLCPCVLIVQFPPMRPSAAGLLEFTRGPFQTLFACISAVVTAEQWILVNRRCCCLIVPLEVLFQKSTRLFLSLLSCDTNLPHVQCPSEPFEIPLKNVVWTRRTNTNMRLLPPGRQ

SEQ ID NO: 933559 - protein, 469 aa, Homo sapiens
MERNGKEWNGIKWNGECNGMISNGMEFNGMDSKGMDWGGMDWNGMDSNGMDSNGMDWSGMDSNGMQTNGMECNGMEWKGIEWNGIGWNRMEWNGVKWNRIERNGIKWNGQEWNGIEWNGMDSNGIYGMESNGMESKGMDRKGVDWNRTDTNVMHCNVYDSNGMESNGITECNGMESSGIKWKGIEWNGLECNGLELNAVEWNGVDHNGIEWIGIQWNGMDSNGMESNGMESNGMEFNRIELNEMELNGIKRNKMEWSVTERYRMKWNGMEWTRMEWTGMQWTRKEWNGMERKRWNGIGWNGIEWNGEQNGIQWIGIEWNGMEWNGMHWNGMEWNGVERNGVEWNGIKWNGVEWNGMGLNGIERNTMEWSCNGKILNGMDSNGLDSNGMDWSGMDSNGMDRSGMESNRMETNGVEYNGMEWNGMERKGIEWNGFVWKVMEGNGVEWNRIERNGIKWNGLEWNGLEGNIIE

SEQ ID NO: 933560 - protein, 572 aa, Homo sapiens
MELSSNEIEWNHHRMESNGITIKWNGIESSSIGIEWNHRMESNEIIIEWNRMKMEWNRIIVEWNRVESTVNGIEWNPHQMELNGIMECNRMELSLVRIECNLESSGIIEWNRMESSLNGIKWNHRMESNEIMIGWTQMESSSNGQKCNHHQMDSKNGIEWNHPRMESNGIIKWNRMESSSNGIKWNHHRMESKESSNGIEWHHWMDTNGIIIGLTQMESRMESSNGIKWKHHQMESNGVIKWYQIESSSNGIPWNHQMESNGIIKWNQMETSSNGIKWKHHQMESNGVEWNHRMESNGNIIKWNRMDPMESSTGIEWNHRMDSNGIIEWNPMGSSLNGIKWNHHQMESNGIIEWNRMESSSDGHEWNYHQIDLNGINLLPMHMNGIIIGWTHMESASNGLKCNHHQMDSKVIIIGWNRMESSSNGIEWNHQRMELNGIIIRWNQRESSNGIIIEWTRMESSSDGPKWNHHWMDSNGIIIGWTRMESSSDGLKWNHHWMDSNGIIIGWTQMESPLDGHEWNHHWMKKNGIIIGWTQMESSSDGIEWNQHQMESNGIIKWNRMESSSNGNECNH

SEQ ID NO: 933561 - protein, 202 aa, Homo sapiens
MKLNGIIKWNLMESLSSGIKWNHRIESKGIIIKWTLMEPSSNGIKWNHHRMDPNGTIIEWTRMESPSNGVEWNQRNQMEISSNGIQRNHRMESNGITEWNRMKSSLNGIEWNHQMQSNEIIIKWNRMETSSNGIKWNYHRMELNGNIIELNRMESSSNGIERNHHILEPYKIIEWNRMELSSNGIKRDHHRMESNGIIIEWN

SEQ ID NO: 933562 - protein, 640 aa, Homo sapiens
MESSSNGLEWNHRQMDSDGIIFEWTRMESSSNGLEWSHHGMDSNGIIIKWTRMESSSNGLKWSHRGMDLNGNNHRMDSDGIVIQWTRMESSSNGLEWNHHQMDSNGVIIEWNRVESSSNGLEWNHHRMDLNRIIIEWTQMESSSNGLEWNHHRMESNGIIEWTRMESSSNGLEWNHHQMDSNGVIIEWNRVESSSNGLEWNHHRMGSNRIIIKWLEWNRHPMNSNGIIIEWNRMESSSNGPKRNHHGMDSNGIIIKWTRMESSSNGLKWSHHGMDLNGEWNGMHWNGMHWNGMEWNGVDWSEVEWSEVEWSGEEWNVVEWNWIKWNGMEWTRMEWTRMEWKGLEWNHHRTDSNRIIIEWTRMESSSNGLEWNHHRMDSNGIIFKWNRMESSSNGIEWNHQMELNGIIIEWNRMESSSNGVEWRMECNGVKWNGMEWSGVEWSGVEWNGMEWNGMEWNGMEWNGIEMNRIKSNRMESNQMELHGMERNGMGAEIVPLHSSLGDRVRNSRKKVMEWNGVEWNGTEWSEPEWSGVEWSGVEWSGMESDVMESSGMEWNRMDWNGLEWNGIEWNGLEWIGMDSNGMKWTRMESSSNRLKWKHHQMDSNGIIIKCTPKKSSSNELEWKCHQMDSNGIIIEWIRME

SEQ ID NO: 933563 - protein, 231 aa, Homo sapiens
MHTYVTNLQVQHMEAQHKGLENLQPDNAAEKKTPFSEEKFKLATDICVTNNEPKFNPQDNGKMFPRHITGLHGSPSHHRSRGLGGKIGFVGRVQGPLCVFSLVTWCPISQLPHPWLQRVQASRFGSFHVVLSLQVHKSQELRFGNLHLDFRRCMEIPRQKFAIGAGPSWRTSARAVQKSNMGWEPSRRVPTGAPPSGSVRRVPPSSRPQNDSSTNSLHRVLEKPQTLNASL

SEQ ID NO: 933564 - protein, 302 aa, Homo sapiens
MRKFELEGDDLGYLAEEIPQQQSIQKVTWVLLNAFHFKRETERKSSENLQPDDAVEKKNLFFEEKFKLAAEISISNKEPNVNPQDNGENVSRACHRSSWQPFPSQTQNPRRKYGFVGGTQGPHAVCLGTWCPASQLLQPLLKGVKVQLGSWFQGFQAPDLGSFNVVLILWVHRSQELRLGSLHPDFRRCMEMPGCPGDSFLQGQGPLGESLLGQCGREMWGQSPHRVSTGALPSGAVRKGPVSSRPHNGRFSDSLHCAPGKAADAQRHPMKAARGRLYPAKPQGRSCPRPWEPISYISITWM

SEQ ID NO: 933565 - protein, 154 aa, Homo sapiens
MFYKSPPDSGAQLASSSGSRTGAAGGAACQSLSMRPHSSALGSPRRVEAKEWRAAGPEPCPTGRQLRPGEKSSTAAAGPGVKPLTARACKAGRQLLVRGHQAHAHPELQPAGKQHACGLKGSSSAAKVGAQAKEALKVSEGCEGCQHAVTSHKE

SEQ ID NO: 933566 - protein, 172 aa, Homo sapiens
MGGGSRDVFGFHHGGASAWIIHPNKSGQRKTRFSEEGDIEPKELTKRLIVILSSRRVDLGTHQKGPMWSLTERRRKAHRMLKLYNGLWEGEAVGLPTGPDPLDPTDLNGAHFDPEVYLDKLPRECPLAQLMDSETDMVQQIRAIDSDVQTLVYENYDKFIPATEIDKQHKTV

SEQ ID NO: 933567 - protein, 181 aa, Homo sapiens
MMRGKVQPFRPAYELMEQPPLKVSRWTSQRCQSVEVTKDPELQPVLALLSLSLSMYLVTVMRNLLSILTVSSVSPLHTPMYFFLSNLCWADIGFTSATVPTMIVDMQSHSRVIPHAGCLTQMYFLVFFACIEGMLLTVMAYDCFVAICRPLHYPVIVNPHLCVFFVLVSFFLSLLDSQLHS

SEQ ID NO: 933568 - protein, 139 aa, Homo sapiens
MLMAIGGIEAWSQRRWLLALAGALYMDLRAAQVKDSVEIAEASQVEEVADVLEETWVEKVAEVPRPRVETIEVPEETHVKVVGEGPEATQLQEVDEVSEDRQLQEVDEVPEDRQLQEVDEVSEDKELREVVEVPEDREL

SEQ ID NO: 933569 - protein, 138 aa, Homo sapiens
MGVRDSQASDLARVFFRVGLALSPFQRTAVCIQSEETGAAAGPPYGKRRCPGPTFSLYFVSETLHKSLVPPEEKRPQNGFTTLKDSPLARCQLIDSVWIVFLGVRVLSWCPFMVLLKDVAGKEGPDTDHKVGFLDLVQ

SEQ ID NO: 933570 - protein, 168 aa, Homo sapiens
MWQALMTTLCDSQRPRFLQCLGWGPQISMAKQCSQKPADAINQFYILQALRISGHQKCPLLPELNSQVKTPEGPEMWAGSHYCLSGHKDTDSFHGCLLCYNCISGRQWIREAPAVEDRVENHCWPSIPNLTAEQEYSSAEVNLTENFETMKATNTSNSSQPASPIDLL

SEQ ID NO: 933571 - protein, 122 aa, Homo sapiens
MHLEPPGQVAAWILSMEAMAKVKCKKIILEAVPSGSCLSSQHLGRPSVGGEARWKCLGIMLKSRPSVGGEAGCMEVFESHAEIWSPVLVCWRWVWVRVFGPHAEIWSPVLVVKLDGGVRVSC

SEQ ID NO: 933572 - protein, 212 aa, Homo sapiens
MEISKSYKSRSSFSFIKHLPANHGLRYIKVYGNWASRLLNAKAGSPSCQHELGQKAEWCLENGDNRNQENDILKYVFRFDSILPISFSQEEQDQGPLKEAVWLLFDRAGVLHWDWGALPRLDHLDSPKLAGCVCITLAGAGVPETPTERSHPEPGPVSGRLQPVAVGWLEFQASMRCRGSGTCRMTLLGFLDSAPFLGVRTGHLLKVTEPSS

SEQ ID NO: 933573 - protein, 144 aa, Homo sapiens
MGRNQHKKAENSKNQNASSPPKDHNSSPARKQNWTENEFDKSTEVGFRRWIINSSKLKECVLTQCKEAKNLEKSLEKNLNDLMELQNTAPELREAYTSINSQIDQEEERISEIEDQLNEIKREDKIREKRMKGVNKASKKYGTM

SEQ ID NO: 933574 - protein, 217 aa, Homo sapiens
MSEIVDQMINGRKWVLEERKNMYEGPPGWKELCMFKEHTEEGPTYRDKGQVVLDEAGQVNKHSHTQLRRCWDRSVIHINSLALQFIVVSSHVMAPVTQWPDFLVVLVPMATVDSKAVVLKQECASESPCYNRVLDPITSVSDAAGLGWSLRSFISISSQDKKKGRRDDKNIENKKADRQLFQLASVDLGILSCKQQKLESEGICTPEPQKSSGFWNF

SEQ ID NO: 933575 - protein, 141 aa, Homo sapiens
MGAAPPAITIIFRCKEGQDQKPEGTFRFREVNHDLYSLNITYNSPGRTGSYNYFYFQGCWRVHVHVLSKELKPLLPLPRCLQSEVPSLPLSTQLFTQSSTWCSGRLAFPFSVVAYESVPPSHPHLVDYSHLLLTEIVSGAT

SEQ ID NO: 933576 - protein, 162 aa, Homo sapiens
MPCPTLTDDIPPQKKCKWPVLALSDDITLDWEKQNALPQPGLLISPVERIYGKLGMAPTLIGSEVKHGPIISTERSDELCAAGLKPKRASQARAVPTTLALEQDQCMNILPSLPLGANVSNEIGRPGPVYWRNGSQAFKLAAELTLHISDFPDLLEPADPGR

SEQ ID NO: 933577 - protein, 179 aa, Homo sapiens
MVHRLIGARGHEEASPSHIHTRAGLRCSKGPEYPLPPIDAAQGESNETGGKNLPKESLAAGSGGGCWRSTSCHDGGRHVCPLGPGKAAAIRHLERDCAQNCLRVRKPNGDSPCEVEGWIVGLRCGHKYTARGVLESEVIKLGGPAMMGLESQIPNNPRGTSQRKETVFEHLPHSLQCQL

SEQ ID NO: 933578 - protein, 172 aa, Homo sapiens
MLLTQSLFGGLFTRTHMKLTMPKGKLLNVNPDWMMANSVFFNSLQLETEAEKYCVSMRRQHFRCILKARYGLRVGIIEERAEAEEIPLIHASTVGPDSPQLTDYSSPTNLPTGFHSEMGFKPKPKAVNSQYRYRFNDWFRDYQLSSSWSPIMMEHRYRCPGACLGEEDFCIG

SEQ ID NO: 933579 - protein, 147 aa, Homo sapiens
MGKKQSRKSGNSKNQNASPPPKECSSSPAMEQSWMENDFDKMREEGFRQSNYSELQEEIRTNVKEVKSFEIKLDEWITRITKAEKSLKDLTELKTKAREPRDECRSLSSRCNQLEERKLYKPEESGGQYSTFLKKRIFNPEFHIQPN

SEQ ID NO: 933580 - protein, 635 aa, Homo sapiens
MSNIQRIIQVRVIKNIPLRLKVLPILSSQRYVEQSNLMMEKRNNSLQTATENTQARVLHAEQEKAKVTEELAAATAQVSHLQLKMTAHQKKETELQMQLTESLKETDLLRGQLTKVQAKLSELQETSEQAQSKFKSEKQNRKQLELKVTSLEEELTDLRVEKESLEKNLSERKKKSAQERSQAEEEIDEIRKSYQEELDKLRQLLKKTRVSTDQAAAEQLSLVQAELQTQWEAKCEHLLASAKDEHLQQYQEVCAQRDAYQQKLVQLQEKAQITALTKQNEQHIKELEKNKSQMSGVEAAASDPSEKVKKIMNQVFQSLRREFELEESYNGRTILGTIMNTIKLLNQQEQEKEESSSEEEEEKAEERPRRPSQEQSASASSGQPQAPLNRERPESPMVPSEQVVEEAVPLPPQALTTSQDGHRRKGDSEAEALSEIKDGSLPPELSCIPSHRVLGPPTSIPPEPLGPVSMDSECEESLAASPMAAKPDNPSGKVCVREVAPDGPLQESSTRLSLTSDPEEGDPLALGPESPGEPQPPQLKKDDVTSSTGPHKELSSTEAGSTVAGAALRPSHHSQRSSLSGDEEDELFKGATLKALRPKAQPEEEDEDEVSMKGRPPPTPLFGDDDDDDDIDWLG

SEQ ID NO: 933581 - protein, 153 aa, Homo sapiens
MAGGPSGATSLTQTFPDGLSGLAAIGLAASDSSHSESMDTGPRGSGGIEVGGPRTLWDGMQDRPEEATGQLPRPPALRAPWGTLASPYSGVLEAAQNWLRLTAPGKVFVAALLLFLLLLHCCSLPSLAPVGLTAEESPSIQKPRKRWSLKGTQ

SEQ ID NO: 933582 - protein, 147 aa, Homo sapiens
MCRSGVHNPRDLDWNWSVAYLELGHTAGSEQWATPYENLMPDDLRWNNFIPKSSPQPPVHGKIIFHKTGSWSQKGWGPLFYTVHSHVPNTSMTFHEEGNGRPFQTGRRTWVKVWISSTFLAICPSLTSPSPLLEWLRQDKVQILSLP

SEQ ID NO: 933583 - protein, 135 aa, Homo sapiens
MKQGLTPLYMSPETYILVPLYLINEMHGPETHKRGHVIPNNVVRFTQRRGRIPTWTTPPVSPASIASLTLSSTIFPVTCFPSATLTSLLFLGHCRHVLAVPSAWIVPTPIPCVHMTHLLPSFKSLLEGHLQQCLP

SEQ ID NO: 933584 - protein, 167 aa, Homo sapiens
MREVLFLLSQDIKACESCFLGPQCERFLEDLVAKAVPGKVQPLPNSLVQLSVSGANGPPCIFECQLCLWDQWSQGWAEQECNALVRQLEFHEPDFVAKFDQAVAATADYPTLVTGGSCVPLTYPIIGGHCFIVFIFVFQYLQDAPGHSRKVSSVSQKMGPDQTLNLP

SEQ ID NO: 933585 - protein, 142 aa, Homo sapiens
MAGAFCWAILCSFLFLLHDDHVTIRTHIQGQRGGTTLLSCKGILLSLCSELIPPSLPHPRDELKVIRTGFLSHETQRILMYTASKGQSVSFKSGLCDSKVVLTPRSLHDPFLVLALAGWMFERLQGISEACSRKIAAKPHGA

SEQ ID NO: 933586 - protein, 125 aa, Homo sapiens
MKITPEVVEKEDYSEIIGSMGEALEEELDSMAKHESREDKIFQKFKTQIALEPEQILRYGREKDIPENILCDAKKMFEFQVMPQLLNYLKADRLSESIDWGILAVFTWAESCIPAIQNNLCGSRM

SEQ ID NO: 933587 - protein, 157 aa, Homo sapiens
MPVKRLFLPILAKLKYIYVFLNKSLKNWSYSKTRGVKGVVSASLDTKSKWSAYHPLSAASTDWSLCAQSKLRIENGGEVGKELGSTSSNVLPQGGTLQVMVKSPEKQQMRGVRHRKVKWNVSFTSNWTNCQHVTLDGMHRQPTVLTQNSCQKCITQI

SEQ ID NO: 933588 - protein, 130 aa, Homo sapiens
MFTTLCGPDICLGSPGGLEKASGLRLTESPEQYVLNPSAQPLPCAGHRLQVIVRRSLSAGFLLVAGLPAFGSCRWTFYVSTTDGKLPGEGEMNFAMRTSTTMLVIQHPHASWVGWELKVGQRQDFNALNF

SEQ ID NO: 933589 - protein, 135 aa, Homo sapiens
MPQFIPGLRDGFLAGTWQSRDSRFPATVLSSSRKQPCPENCAGPPTSVVQEGNATGKDWQSGGSMSFPQIFCCCRKTSEGSSTTVGFHNPRMFEQHHPRSFNLNTNSLHSAVPKRHPRLPYDNRMMLKACILRRP

SEQ ID NO: 933590 - protein, 125 aa, Homo sapiens
MRVVGGQEGRRMIRLQSILRPRDCQEPYAINDSKVPSQTQEHKPSTQNLLLQKDELDRQNPKRINAVSHLPSRTPLIQTKKSTSSSSSEFEDLNAYASQRNFYKRNLNRYCQEHWPFQPCLTGRP

SEQ ID NO: 933591 - protein, 137 aa, Homo sapiens
MLPYPEAGITSFFLSTSSSVLSFFSRRLDDLFNLESGSSAIKTSQKRKKIISFSLSGQERSAFKLHNTVGAKIVAASLWEGGGLLAKEDIKVLPSEEILISKTFTLRSNGGRSTKRYLERNEDRIPRRLLGIHERQT

SEQ ID NO: 933592 - protein, 731 aa, Homo sapiens
MVVEHPEFLKAGKEPGLQIWRVEKFDLVPVPTNLYGDFFTGDAYVILKTVQLRNGNLQYDLHYWLGNECSQDESGAAAIFTVQLDDYLNGRAVQHREVQGFESATFLGYFKSGLKYKKGGVASGFKHVVPNEVVVQRLFQVKGRRVVRATEVPVSWESFNNGDCFILDLGNNIHQWCGSNSNRYERLKATQVSKGIRDNERSGRARVHVSEEGTEPEAMLQVLGPKPALPAGTEDTAKEDAANRKLAKLYKVSNGAGTMSVSLVADENPFAQGALKSEDCFILDHGKDGKIFVWKGKQANTEERKAALKTASDFITKMDYPKQTQVSVLPEGGETPLFKQFFKNWRDPDQTDGLGLSYLSSHIANVERVPFDAATLHTSTAMAAQHGMDDDGTGQKQIWRIEGSNKVPVDPATYGQFYGGDSYIILYNYRHGGRQGQIIYNWQGAQSTQDEVAASAILTAQLDEELGGTPVQSRVVQGKEPAHLMSLFGGKPMIIYKGGTSREGGQTAPASTRLFQVRANSAGATRAVEVLPKAGALNSNDAFVLKTPSAAYLWVGTGASEAEKTGAQELLRVLRAQPVQVAEGSEPDGFWEALGGKAAYRTSPRLKDKKMDAHPPRLFACSNKIGRFVIEEVPGELMQEDLATDDVMLLDTWDQVFVWVGKDSQEEEKTEALTSAKRYIETDPANRDRRTPITVVKQGFEPPSFVGWFLGWDDDYWSVDPLDRAMAELAA

SEQ ID NO: 933593 - protein, 155 aa, Homo sapiens
MQGFCWGENGISCFLPHGQGMHSAWISVLVRDTRRLPPPLPPYTKKRSHEHAGRLWPPTSQGQKPQNEIYLAGTLILDVQPLELWEIHCGVYATQSMVFCAGSLSLLTHCMSKHTSPLGVCSTSDNCKNLDSPCSNDLLSLDLPSSDDLLCAWPC

SEQ ID NO: 933594 - protein, 142 aa, Homo sapiens [sequence omitted]

SEQ ID NO: 933595 - protein, 139 aa, Homo sapiens
MIVLNADFITVHLSRLEEESHSQQLTELDLQVAASRHCALDPLAHWWKFNDLLSKQKRPGLKHLPNPVIQILQATNMTSLSRVREELDCACESESLAVEMEPLPKRHFDPALNVPPTLFWSGPSQDSWCSLHPGKLLCC

SEQ ID NO: 933596 - protein, 140 aa, Homo sapiens
MLLRAFEYLKGTSRLEEKEGGYGHITEFTCGKRKGAGRGIVHDILILGSVSGMLHHVDDRVQTGSAEAASHCPTSSSQSMGPSASLLWKSLAECSRPHENQAAAAIQKEEVVEFLNLLSQMPCSRGLEQSFTLVAQSGVQ

SEQ ID NO: 933597 - protein, 136 aa, Homo sapiens
MVLSHSFLRQKVSNLYRPTKSNRCLCIPPPGTSEDPERQLVLAGLFLSMCLVTVLGNLLIILAVSPDSHLHTPMYFFLSNLSLPDIGFTSTTVPKLIVDIQSYSRVISYAGCLTQTSLFAIFGGMEERHAPECDGL

SEQ ID NO: 933598 - protein, 140 aa, Homo sapiens
MKDESHSSNAFSFQNSCRLNLTFISIVLEMKHSFSNTAHNSFLIAPSKAILENIPTAKTKSLFFSFSEDGEGRSPLAEGTHSVSHVINQRVTHVVKIMLDWDSSYREHLNHMKRVSELIGSPVVWDLYQYPLQRYRILSR

SEQ ID NO: 933599 - protein, 159 aa, Homo sapiens
MNVVYKYPFESLFSDLLVILLGKELGRGDLLSEQATFSNSRSKTRMSCDLHEVAGKARDSDPITTAFSAVSPPIYLAACCLHGLLLLIVGNIGDLHLQEDRKRQRRHQERGAEWLGQCTADAWTKARSDTGMGCLIRDECEQQNEEHAFPEEERKPLER

SEQ ID NO: 933600 - protein, 143 aa, Homo sapiens
MPLFSSSWSKPSSESESGTPARSQRDPPPPPRACLWPVRNRAAQQEKTCGIISSQCALSGGGVIKMPSSLLAKGWVRPSDAEWIDTRTRGQCCVCISVMEVRGLFFKEATKPPMHSTPFQGLFFANGLCKAPNITTYTEKAQL

SEQ ID NO: 933601 - protein, 143 aa, Homo sapiens
MNDHTDCQQTAELLNQEIARLKQRLQSKKEKAERPEQGKAGIKQATNVAGSRDHVEDEDLAVEGNRKAEHTGSPASQPQVPLKSMDDNGDLGPSFKCPEGEIGTADVQLWEELTRSKERVTQDQSLTRAGLSAGQGHSHGGSS

SEQ ID NO: 933602 - protein, 145 aa, Homo sapiens
MLMLLRAGIQMSYATQVMQTPAANGSGLFNPQVEEVAVKRASSAEFLLCSHSLGLCKLTLGPCANEKMSPLLVDTTLPSAQTVRGLRGRRPFVQRTSWTGADTLDTQLALLPYQASMVCVMAHSSIYDLSPQSARHCQQRGRAKF

SEQ ID NO: 933603 - protein, 146 aa, Homo sapiens
MQSFATVTEARRLQGERGPLLEETVLWRTLVGVARDPDWKAPPSEKTLSALSTPPTSCSQPKERSLDSPKPEGCNSQVAKQQKWHPFHPSLEELHPREAKCCYRLLAEIPSHSYNGDIAEPRICNILQVQESLLIVFWLQIKKNFG

SEQ ID NO: 933604 - protein, 153 aa, Homo sapiens
MGLSQGLQIKSFSILTWGGPTAQEGGPPAVSVPAEAFLSLSNVPLVAFLSFLWPCHSYSVNLVGGARSSTERNCRLPPNPFCSAETAAVHHFLVCHSWRKPNCPKGHREPPAGFGILWGAQSTPVGFAHVSYREAWQGTCPPSSTGPWPAPHP

SEQ ID NO: 933605 - protein, 176 aa, Homo sapiens
MSSSPSLDIRNNITGYGKYKAFSTCGSHLAVVCLFYGTGIGMYLTSAVAPPPRNGVVASVMYAVVTPMLNPFIYSLRNRDIQSALWRLRSRTVESHDLFHPFSCVADVPAVALVGTCQKELEARSGREIRTPKFIAAVFTTAKMWKQPKASNVHHAGRTVDLFSVVMAQQRGRAVQ

SEQ ID NO: 933606 - protein, 200 aa, Homo sapiens
MRKNITGVLYNYFDIGSNIILYFPGYWAQKHRRDITISITGCAATVILGATSFYDITDNITGWILLSYYKIVPSILRISSSDGKYKAFSTCGSHLAVVCLFYGTGIGMYLTSAVAPPPRNGVVASVMYAVVTPMLNPFIYSLRNRDIQSALWRLRSRTVESQPSFYIHEVRTSFWNSLKIDFMEAMYSRSSNTIGAFKDV

SEQ ID NO: 933607 - protein, 624 aa, Homo sapiens
MGQASTKYSAYLNFIKTLLKEGGVKVSTDKLIAVFEVIDLLCPWFPTDGTLELKDWDEIGQQFKIAHKGGNIPPTIWSIWALVHSVLESLQTQENNMETDPCFLSSEEVEEVLSSLSPEETAQIEAVILQMNLHSDIPLTLPPTPEPTAPPLSLYDELLHDLNNLISPNQRNPTEIHSQQLPAVGPPTFHLRSPNLALNYLSMEPGNEALNSVPVQPCCRALNFPSIRPGNEALKPVPLQPDYPSLTFVSPSANQAPLKPQGPLKPVPQLPLQPGPQAPEGPAQQVISPQPGLQVLNSSSVQNPNFVSPSGLVTTAAHKQQVTYIPQDDTPLMRAITQAREYGAPEAWQFPVILQPPIPAVPAAQNQPQPADPAQQEADPAAPQDLQPENQVPQPENQAPQANNQPPQLPAAVAQPVPDFKASVKQYGTNSPFVHSTLKALAEDAWDNIQNDGKICPSFTAVTQGQQEPYPDFIAHLQDATEKTIPDSHGQRLVVELKAYEQTNADCQVAIRPIKGKIPPGGDILFYIKACEGVGELYIQQWSWHKPWPLLECLDDSLANAFNAANQGIVEKIVLGFQAAILFNANNKTLYSNKSCPPVCAHDAVREITGLLSAAQNLTLMVTL

SEQ ID NO: 933608 - protein, 144 aa, Homo sapiens
MWKVSLESPVGKVDLVSPVGEVDLVSPVGEVDLVSPVGKVDLDGEVGEVDLVSPVGEVDLVSPVGEVAWCLQWGRWTWMGKVSLESLVGKVDLVSPVRKMSLVSLVGKMNLVPLVRNVNLESPVGEVKVESLGFLLALVIRVRG

SEQ ID NO: 933609 - protein, 136 aa, Homo sapiens
MPAPIWPCDSLAVSPASVPYPRLYSCQWDISISLQDSTPITLQGNLTLIYITLIALLLCTHSWQGREEHPKVSPNVLTIHFLFSLDQTSTTFSPPSPTKIAVVGNVDGTVSNPVLGMAPGFIHSCTLGPISKEHQE

SEQ ID NO: 933610 - protein, 334 aa, Homo sapiens
MHPLCLLKADRALRIIPGCLVTRADHLQWRFCGQKSSSRGQGKAVICAPCRLGAAEILSGCPVCGPGPRWCAGCSTRWPCLLYTQCCHRASWNHQIREPFSAERKLEQRTELCGVSDDCPPVSWYERGVQRGVQDAAVAAGGEPWGGGNCVNRGYRRVVFSEAKRPSGSSGALPGVSCLHCPPWYKRCRVACVLWAPGYPNGGRGVHAASWCRVLPRGSCVWKDKCLTFAGSRGRPLAHIAHVYKPLKGLFPGDFPSAGHSQVSGAVSRTWLQASQLRKQADLHFLGCPAEPEAAIHLLQRVCGFSRLFWYVSAVVLGAKVYNVGLHTLPCPAK

SEQ ID NO: 933611 - protein, 127 aa, Homo sapiens
MVPQDYPSEGQSSPSHFKIHFASIHQLSERPLEVLHDLDQPFQRVEGAVWGWGMAVQELEAEIAQIASADSTVWCITGEHKNSCYLDEPKNSPITWENSGRLSVGIPGGPPGPCLSAHSSDLDQAVR

SEQ ID NO: 933612 - protein, 160 aa, Homo sapiens
MICEWGSFQNHSGFRDSRDASWSEHIYRQKKGSDIQKLQGCESMLYDITMVDTQHYTFVKHHTIYNTKREHQCKLQALGDYDVSNGLFLVLHLKGYLMHLQTFLPPYLIPTFFVDELDGLCEDVIPHTASINALHFQDVILLLLYCSDIKLFSLGYSIGS

SEQ ID NO: 933613 - protein, 225 aa, Homo sapiens
MASSGMADSANHLPFFFGNITREEAEDYLVQGGMSDGLYLLRQSRNYLGGFALSVAHGRKAHHYTIERELNGTYAIAGGRTHASPADLCHYHSQESDGLVCLLKKPFNRPQGVQPKTGPFEDLKENLIREYVKQTWNLQALEQAIISQKPQLEKLIATTAHEKMPWFHGKISREESEQIVLIGSKTNGKFLESLPAYWIQSKSTMLPARGRVCIPEYNVSQVQVA

SEQ ID NO: 933614 - protein, 161 aa, Homo sapiens
MLMLLVWGYVIFLSLCLIDINLRWLVKMPTKHPHPHSKLGGRAVHLGSNPNAGPGEERIRARDNNGSYALCLLHEGKVLHYRIDKDKTGKLSIPEGKKFDTLWQLVEHYSYKADGLLRVLTVPCQKIGTQGNVNFGGRPQLPGSHPAPSSPNDYKKLDILE

SEQ ID NO: 933615 - protein, 138 aa, Homo sapiens
MQKLPHCEFIFNSKFLHLYHNDLNSTLLTLLQEGKPCKGSCRLDQRTLSRLWQCQLYLKANLIPQSIKSMARICDVLLITNHIDFQLCGLCVHSSVPGSWRWRLGVTVLCTHKQAAEPGKTVLLIFSGNAFSFLAELP

SEQ ID NO: 933616 - protein, 648 aa, Homo sapiens
MGQASTKYSAYLNFIKTLLKEGGVKVSTDKLIAVFEVIDLLCPWFPTDGTLELKDWDEIGQQFKIAHKGGNIPPTIWSIWALVHSVLESLQTQENNMETDPCFLSSEEVEEVLSSLSPEETAQIEAVILQMNLHSDIPLTLPPTPEPTAPPLSLYDELLHDLNNLISPNQRNPTEIHSQQLPAVGPPTFHLRSPKMALNYLSMEPGNEALNSVPVQPCCRALKLPPVQPGNEALNSVPVQPCCRALNFPSIRPGNEALKPVPLQPDYPSLTFVSPSANQAPLKPQGPLKPVPQLPLQPGPQAPEGPAQQVISPQPGLQVLNSSSVQNPNFVSPSGLVTTAAHKQQVTYIPQDDTPLMRAITQAREYGAPEAWQFPVILQPPIPAVPAAQNQPQPADPAQQEADPAAPQDLQPENQVPQPENQAPQANNQPPQLPAAVAQPVPDFKASVKQYGTNSPFVHSTLKALAEDAWDNIQNDGKICPSFTAVTQGQQEPYPDFIAHLQDATEKTIPDSHGQRLVVELKAYEQTNADCQVAIRPIKGKIPPGGDILFYIKACEGVGELYIQQWSWHKPWPLLECLDDSLANAFNAANQGIVEKIVLGFQAAILFNANNKTLYSNKSCPPVCAHDAVREITGLLSAAQNLTLMVTL

SEQ ID NO: 933617 - protein, 245 aa, Homo sapiens
MLAMPPPPRAPEFCHDVDITGDAGAEVRATVVKGEMHRISAARKPACAHFSRHVLHVFDSSQGGCTGTFPCQASLLAWHGLPLSPCCSSESFLGPETLAHGSFPTYAQTRSTQSWPCPSTDTGNLSLESSPWRTSVLVHSPSSASWFFHGAQLWSSRAQGHCVPPVLTCCSPPPCQAVSGHVSGTWLGSSTGPASSVQTSSQETPWDFTMSLVCPVYPCPPAAVRCTFLWFPDQVKTWDEPAQKG

SEQ ID NO: 933618 - protein, 146 aa, Homo sapiens
MNVFVASPKPYSQKLLSPLADLKALHKEEVKAKAELPIACQCIEGMPQHREPFSKSWRFTGSRHLRKSESSQELNTKITKQRLQEPHTTKHTELVQEMIAIQVCYVNSFLQTTYQNLQDAAKAVLRGKCIAANVYIKRNKDLKSIT

SEQ ID NO: 933619 - protein, 142 aa, Homo sapiens
MTGYRVIFYIMVDAFFKLPDIEPSPLRTFKAFKVGTERWWLDGPLVHVKSLGEHIASHIQDEVDFLFSMAANQVFQNEFGVETLGPLVAQLHAWWYFRNTKNFPYERRPTSAACIPFGQGDFYYGNLMIQYVKVAHDSQRKL

SEQ ID NO: 933620 - protein, 191 aa, Homo sapiens
MSVTEPWGPATLSPFKVSPALAPKVSTLSFYTGADAACLVVALQGPGILSAFGIPSKGPCSSSEEPPAQAGPIRRGTMRVGPPRWSLHHLLTVWALPASSEQCPGVASCDTWLPGEGQGPRPPGNGSGGLDHQRPRPACPKGWAARSLLPCTWLRSQTPLGTSERLSVHFRRSILPATRTREPEAPMAFQT

SEQ ID NO: 933621 - protein, 178 aa, Homo sapiens
MGHGVGEEHTFKSIGSVQLSGPSAAGLLEFAGGPLQTLFAWVSPVEATEQQRLLPTPSSRSFVPEGHPQDASQSSPEAVYTLAELKCCAGRSTALFRASRQECLSLLKLHPHPPLPPGALSQGDEGFICKSLTGSAAFLSEMPCPERRNLDRRSGYSGFAELQWAPPSPNFRVALFTL

SEQ ID NO: 933622 - protein, 151 aa, Homo sapiens
MSYLLPTWKHAFPQESAGFHQWHCSLCLPPPYGPENLPSQPSPTEKGVSSGYSWSKGVTEDLERDKVYAGHNFGEDHPGQGRLNELKDSVQKINQEMAAVSQGEGVEPLQPKWYQNDERNVITYTFLQRGHPVLGQQNCLAEELHIRRYLA

SEQ ID NO: 933623 - protein, 158 aa, Homo sapiens
MMMLVTDSLRISETTGNGGDWGEMESSLFWTPEFIRVTFQSGPKYQNMWYSCLLDRFDFIVPETRGMPGSDHLRTCEILVTYPSLAQDLDLTASMPETGWENNPESASKQANWCLQGRNPDYRPQPNPANSQMEIRCRPQAPCSCIGTGLFKLHCFQS

SEQ ID NO: 933624 - protein, 266 aa, Homo sapiens
MVVVPRASCFLFISLNESLLQQVSFSSCTLSSFHRGSYAEDDICERCSSPCRTCEGNATNCHSCEGGHVLHHGVCQENCPERHVAVEGELPTGEQGSAEPPVGGRLSEGGWQRAVGTSLPTIPERYVSVPVIRETEECMPEFFLHDDMCHQSCPRGFYADSHHCVPCHKDCLECSGPKADDCELCLESSWVLYDGLCLEECPAGTYYEKQTKECRETQGLWIHSNHPDYPVIDSTDTSKSPIPFLKHWSRSSKAVAKVLGSTPDTN

SEQ ID NO: 933625 - protein, 174 aa, Homo sapiens
MLFWLLCARLGAAWEPRVGEIKLKEDFVASEVIGQCQSSAAKPRRSGKESVREPWARVPGVLGVAAGRVGQSDFQWGPAQMGHGLGGIPGCGHSLVWWPDFWHLWQAPGGGGPGGTPGHCSLGIWKFLCAGDVAGVSLTVEARNCNSEICCYLAASTLLLYTLKARLIKSCYGV

SEQ ID NO: 933626 - protein, 185 aa, Homo sapiens
MRSAYKSLEFKTQDMCFINGPKISKRKMRSRHGKGSLKESTCFPCQPMWLSEAECPLQLQERAWDPGLVSERNSWNFDWSDQEEALSSRLAKLEEFKLGAAGGHLVITNGEIIGGKEGGVKEDTEISGLGTFGQGPKVVLSRNHKRRKFSKEDEFSIGEFVFETFGIFEGKYGIGCGYSGLRSGK

SEQ ID NO: 933627 - protein, 313 aa, Homo sapiens
MASAGDHTNSPQSSSPSAGDHANSPQSSSPSAGDHANSPQSSSPSAGDHANSPQSSSPSAGDHANSPQSPSPSAGDHANSPQSPSPSAGDHANSPQSSSPSAGDHANSPQSSSPSAGDHANSPQSSSPSAGDHANSPQSSSPSAGDHANSPQPSTPSAGDHANSPQSSSPGAGDHANSPQSSSPSTGVHINSPQLSSLSAGVHTISPQSSNPSVGVTAHSHPDLVWVFTLTAHSRPVLVWVFTLTAHSRPVLVWVFTLKAHSCPVLVWVFTLKAHNAQNPRMYKNPSGHVIFTILDTEEKEVLSSQGLPRVNK

SEQ ID NO: 933628 - protein, 383 aa, Homo sapiens
MASAGDHTNSPQSSSPSAGDHANSPQSSSPSAGDHANSPQSSSPSAGDHANSPQSSSPSAGDHANSPQSSSPSAGDHANSPQSPSPSAGDHANSPQSSSPSAGDHANSPQSSSPSAGDHANSPQSSSPSAGDHANSPQSPSPSAGDHANSPQSSSPSAGDHANSPQSSSPSAGDHANSPQSSSPSAGDHANSPQSSSPSAGDHANSPQSSSPSAGDHANSPQPSTPSAGDHANSPQSSSPGAGDHANSPQSSSPSTGVHINSPQLSSLSAGVHTISPQSSNPSVGVTAHSHPDLVWVFTLTAHSRPVLVWVFTLTAHSRPVLVWVFTLKAHSCPVLVWVFTLKAHNAQNPRMYKNPSGHVIFTILDTEEKEVLSSQGLPRVNK

SEQ ID NO: 933629 - protein, 152 aa, Homo sapiens
MWLATCLDSYLNSLGPRFVLPQKDVKKIEKSLPDQHLLFLDTLPLKIQISAKSFANGEIAQLKPYGSNGKDGERGGYIMGTLGEQQITLNPQMEMMADAFLRARESPGEARVYQLLLFHAKDPQSLEAQRRLKGYSRLSGLPFIVTHATEKL

SEQ ID NO: 933630 - protein, 143 aa, Homo sapiens
MFWASLLLSAGACAFAGRRLIDIRATGRPRRTPALALLGAGFGAHATRHRGPHGASLLFSRQLGPSLAPTSAELSTCRLSPGKATKCHQLKAPTEGHQLKAGCRANLIVSCLGRTNQALSSLHALPFHLCFQKKTLPRSKVTL

SEQ ID NO: 933631 - protein, 249 aa, Homo sapiens
MGTEHQMPHVVTFSIFLGFGHCKQPGMPAVEAQSAPGAGMVASSLHGTATGVCGSIGSGHCAQPGMLAVEGRAVPGAGMGASSLQGCGWTRHTISSFHGWHLGMQWCLEAWRHQELQSPKEGVTALAQRAPRSGILKGPQLLLSFLLPAMWRARGSFSFICVTALSALPFGGFQVLVLPFRKNEPHSHAHRCPKSRRGQDGRRLACQHCSECVNTRPGCNSIQVWPQPHTKSGAGAESGERPGSRSRHL

SEQ ID NO: 933632 - protein, 172 aa, Homo sapiens
MAHVYICNNPACCAQHPVMIKTLSKISIQETYLNVIKATYDKPTANLIVNGERLKAFPLRTGTRQGCPFSPLLFNIVLEVLATAIRQEKEIKGIQIGQEEIKLSLFADNMIVCLENPKDSSRNLLELIKEFSKVSGYKINVNKSLALLYTNSDQEENQIKNSTPFIIAAKNK

SEQ ID NO: 933633 - protein, 143 aa, Homo sapiens
MVLDIRKYEKADLKGSMARKRVRPAHCDDRTVQQRSYYNDNISPRTAENWKQYHPGVASAKAHHKDSEYKYHYIHVIAENAKTWRYQVICTRLQTSGSLNLTMGTSALQPAVLLTVHCNKRSSQTPVLIFKLHNLRDSILLKS

SEQ ID NO: 933634 - protein, 188 aa, Homo sapiens
MTKKRRNNGRAKKGRGHVQPIRCTNCARCVPKDKAIKKLVIRNIVEATAVRDISEASVFDAYVLPKLYVKLHYCVSCAIHSKVVRNRSHEARKDRTPPPRFRPAGAAPRPPPKPLSHIQVTLMQEVGSHGLGQVQSCGSAGYSLPPGCFHGLALSVCGFSRHTVQAVSGSTIVGWNHPPLYEISYNEG

SEQ ID NO: 933635 - protein, 179 aa, Homo sapiens
MDNAHIVLQVDNAGLAADDFRVKYETGTVMRRSVEREIHGLHKIIDDTNVTWLQLKTQIEAFKEELLFMKKNHEEETSGPNNEELAQKNREDLEKYWSQQIEESTTVVTMQSAEVGAAEVTLMELTHTVQSLEIDLDLMRNNKANWENSPREKEQLNRILLHLESELAGTDPRRGRLSS

SEQ ID NO: 933636 - protein, 178 aa, Homo sapiens
MGLPPLPGPHRLEVERSPGCTSSAAAIVFAAASPDESSLPSLGHQTPVPKEETQKCRGFLNSCSNAVPKGKGEGLEWRLSKGDCFGGNGKGAHAQAHTNTYIHKHTRITMHLDFTPKAASSWFANCSLEYSVFPPNYFSENFCSPCDETSTRKNQGNKCIKGLLDRMFQSGGTPKIPN

SEQ ID NO: 933637 - protein, 141 aa, Homo sapiens
MMLASQNESGPSAATLLEFAGGPLQTLFAWVSPAEAAERQRFLPVPHCGSFIPEGHPPDASQSSPVPLGYGKQFLQLALCLPKWPPSFVLETQAPGGVGTRGNLLVCGLQRPWETCISGPGCTVPHSTVPQGFPWLEEGVP

SEQ ID NO: 933638 - protein, 137 aa, Homo sapiens
MAVKFRKPNLIQFVQRNTKLSTVGNQLPRPELKHRTLRKLHMCWFWSSLEHLFHLVHHLTGSKVDTADNKTVLNDVTKVPQRSPKELILYLRSFSIQCSDPANAYSTEFQNVKIKLPLYEEKSTPSSWQVTPYTKVC

SEQ ID NO: 933639 - protein, 116 aa, Homo sapiens
MAWPTVGPHSIGICPPPNPTISTALLGIMESEGPNWRAAGTASANVLSPVPAQHIQGRRHWSRARSDTSAGQVTHGFADGHGTSTLSALGQKVMAIRTRVEGKCQGVGHALQLEVL

SEQ ID NO: 933640 - protein, 203 aa, Homo sapiens
MGPLLGAVAATASPQSLMEYSSDADFIESLPLVVKYRVYTLKKLQAKCAVLEAKYLREFHSVEDYEYNEVAGDSNAQMYGAEENPEYEDLVEDREEDFEDVGEVFGEYEGIEGHNSPFFNALQWGLDANEDEEDFFIAHTLHTFVIPRAVLHFTGEALEAEQDTMIRECNNPVYDRMTQENWVTAVYGAKGQNRNSQAEVNDC

SEQ ID NO: 933641 - protein, 329 aa, Homo sapiens
MLRAVEVGRSVFRYAIAESNVPTSVILLLLERVSEVRNLKKELKPLLDDPYGVADQIDQFLRPDIGTWAELMSIRGILFSGEERSMIRRAAVAVWEREHPPGQNVPPVDHEFPAHDPQWDNNNANHWENMQDLREACPLAEDSRDTFAFESEDPYSGQRQQYRWTVLPQGFTDSPNLFGQILEQVLEKVTVPKQIRLLQCMDDLLISGKDIKGVGDFSTHILNHLQCESLRVSKGKLQYVEPEVKYLGHLISAEGHLVIDVTQASHPLTLQFDVCSATPCGDEQAQKKLFHVDKYRCPYHEESSRCPGTPQDQVLSVPAHILFLIWKED

SEQ ID NO: 933642 - protein, 158 aa, Homo sapiens
MCVQGWTIPLSLFHTLGTHRFLAVLQCLQEQSAFFKGFVDSLSFPGQLQFAGIVDNALNVFVPSSVREWQGQYHCSGSGRGLSVISGSSILEKNRDTATGNVQPPSGADSLVAQAGDQSRQEQNFGYGSGWWEWGALSVASGIPTSGKHRATTSGYAQ

SEQ ID NO: 933643 - protein, 188 aa, Homo sapiens
MGRNQYKKAENFKCQNISSPPKDHNSSATREQNWMENEFDELTEVGFRRWVITNSSELKEHVLTQCKEAKNFEKMLEELLIKVTSVKKNINDLMELKNTSQELPIGDQLNEIKREDKIREKRIRRNEQSLQEIWDYVKRPNLHLIGVPESDEKNGTKLENTLQDIIQENFPNLARWPIFKFRKYREHH

SEQ ID NO: 933644 - protein, 141 aa, Homo sapiens
MASNSIHVPAKDMIFFPSNSQTPKLQVYWSLLEVHSRISLPGYHHQRPQNSKDCCLLFPLEASSQRGTYQMPARALLYEVSVSFCCDLSQGDGGFIYKPLNGAAAFFQRCPAHRGGIRRGSLATLALLSCGGLHPVATSPQ

SEQ ID NO: 933645 - protein, 137 aa, Homo sapiens
MISSPNQPISSKHAFPTYHHPITQTAFEKPPTKRVFDEIDLNNNSISYMTWQYEVQRIWSSNVQEQEKKVVSTPEESEQICLSSVFLFYPGSQQIRCSCSHWMTVDSISSVYRFKYQSLLGTPSQTLPEIMLHQLSR

SEQ ID NO: 933646 - protein, 135 aa, Homo sapiens
MHDHTTLMVIREAGVRNHCAGTGRGTHGLDHVRTKQLGRWTRQFPGSSLMLASLRTCIYQGTLGLNPGRRFSQHIPELLTDKVQEVVALGLNPLPLIVAVLHPAAKPIKLEPLGKWGEFAGRSIFKPPKSPIQRI

SEQ ID NO: 933647 - protein, 172 aa, Homo sapiens
MITLTQKCGAVWGFCLGGGNKPAGFPDSIKELKLARSPQLDNEMPDPSGIDFAYTVTIRLSSHHHTHSDPSRGVYGKKTFILQLYKNLCQKTNPYMTVVFADTHIRKTCFHGVCEQIVPVVIAGGIEVAKMQSLPLGIPLSDKNTPQRLTSGQAASSLNGEREAVELCLHCL

SEQ ID NO: 933648 - protein, 142 aa, Homo sapiens
MMKFRYNRDSNWKESENLAPTHVGFSQNTLQEKKQNHQINTTQVPRNNGFNSGNSEEFHRQTVPHLPQVDKNMKMDLLLTSLELLCPSTTALMMFPGVIFQTTSKRDALTQDSFLGKLNYDFSTKFLLFYITIDENKHLSLI

SEQ ID NO: 933649 - protein, 155 aa, Homo sapiens
MPAFNCWVQLTSDDDGDNGDDGYDEDDDNGSDDDDEYDNDVGDEGVDHDDGEVMKIMMVMKKMMMIILHRTAHELQDLNRENCAEKEDGQRGEGAPGNTSEFVVMMYIAKCAMDVLSHNYVTRKGSWSRPQERVVECHARKNSGRVHSAKQKQVY

SEQ ID NO: 933650 - protein, 139 aa, Homo sapiens
MNCISHEEHLDKGKTHGPWHELSTMKVLPNNEITVYRFDFAKEKQTQRQRVVCRKLSGECFWEIQVQLKKKESQIGLKEKLSCNMVATETSAYLETWAVAFPLPDGLEQEVQQRKGVAIYFKIQNYNKLSITKWAGKTD

SEQ ID NO: 933651 - protein, 356 aa, Homo sapiens
MLEENRVSPNMQRHCRNKEKKGSSKLINEIQVLSDPGFFHFELCVERDGQKGVGNLGLFISDPNQPVPQDTKFIHTKPNRFEEVAWSKYNPKDQLYLHIGLKPRVRDHYRATKVAFWLELVPHLHNLNEIFQYVSTTTKVPPPDMTSFPYGTRRSPAKIWPTTKRPAITPANNPKHSKDPHKTGPEDTTVLIETKRDYSTELSVTIAVGASLLFLNILAFAALYYKKDKRRHETHRRPSPQRNTTNDIAHIQNEEIMSLQMKQLEHDHECESLQAHDTLRLTCPPDYTLTLRRSPDDIPLMTPNTITMIPNTLTGMQPLHTFNTFSGGQNMKKESMRFCPAHGAVIQREGNVEIYY

SEQ ID NO: 933652 - protein, 305 aa, Homo sapiens
MLPQPDVHLNKAIIQSGTALSSWAVNYQPAKYTRILADKVGCNMLDTTDMVECLRNKNYKELIQQTITPATYHIAFGPVIDGDVIPDDPQILMEQGEFLNYDIMLGVNQGEGLKFVDGIVDNEDGVTPNDFDFSVSNFVDNLYGYPEGKDTLRETIKFMYTDWADKENPETRRKTLVALFTDHQWVAPAVATADLHAQYGSPTYFYAFYHHCQSEMKPSWADSAHGDEVPYVFGIPMIGPTELFSCNFSKNDVMLSAVVMTYWTNFAKTGRLRQRDHLSSGGQGCSGPCLHHCTPTWVTDRNLYL

SEQ ID NO: 933653 - protein, 192 aa, Homo sapiens
MLEDTRVESQLAATPHSSLHWSWHLSSPVFSDKKCGPSAAWQRVCLDYIQHLISCPSICACHLEVETEEKLKPGVAYLLRCHGHLKLNIVYSKANLSSSSSYLSLLCVSVSTAKFWAPSGRSPRHLPQSYKNPGSNMSLWSGKTNPGEQDRFHTNPNHHQCPSQLPITLRNRTEAQDGIFSITELCWKEDSR

SEQ ID NO: 933654 - protein, 184 aa, Homo sapiens
MAPPWAQLHLLPVPSLQQQWARVVTQDKVLEQQRLQTWKQVLPGHMRVGVVQSMLPSAFPPLSEEINPALPEATVMASSEAVARQDNVDSPQEPPPTALFASRPIARLKSLWTPRAIKWVMHSSIPSSNGSGVFINQDRMGPDGTNVQLYTDSWAVASGLAGWSGTCKKHDWKISDKEIRGRGA

SEQ ID NO: 933655 - protein, 139 aa, Homo sapiens
MFGCPEQATESLWTSAVTCSVGHQRISFSTAAAASCYPKAEHSEKSGTNVNAKPRQLFWALISPGVRSRETLAPTSGPDLPELFAPKLDTVLSLAITPPHPPAAGSLQSLKKAKIIVPNTFSRPRIFSSCGAPEFQSKS

SEQ ID NO: 933656 - protein, 157 aa, Homo sapiens
MQEVMNPGQVANTPNDVHAALAPTALFLLAQCSRRDSGSASGGIRDPHPKSTPSLRTSPGTDVSSHPCGRNCPSTAKLLGTKRELQGLCLKLSFEGGSRIGLSPVWQQACGFTRSCQACKRHPAAAPNPKHPRKRPGFKPQRAARFLTQQGNSARFP

SEQ ID NO: 933657 - protein, 158 aa, Homo sapiens
MESLRLFLLSFLSLLVVWDELSAAGVPGLGAAKLPAMAYGPKKHLKQEMKKSCMQQFIKIDGKVRTDKTYPAGFMDVISIDKMGENFCLIYDTKGHFALHCITPEEAKYKLCKVRKIFVGTKGIPHVVTHDAHTICYPDPLIKVNDTIRIDLETGKIT

SEQ ID NO: 933658 - protein, 133 aa, Homo sapiens
MKKSHSILPHGGSRCVAAGTGHSHCILPEFSPHRIHEHSRRVLLRGTKTGVACYVAIDNRAENLCNVCMCMHLGMHWNVGCEREIKEDSKIPGLRNGKERVMISQNGEGYGRIRFGIGIDQEIEEILVKRGDI

SEQ ID NO: 933659 - protein, 190 aa, Homo sapiens
MLFSLAKDVFSLKIWAPILAPSLICESSHRIHLAGLVREQCEMEARVGASGYPFPLLPQKPQPSAVPPLPRGSDGLHLVREVSSSCPSVPSLAPCCILLAFPRDLHSPGARLCAGTGALGWVQTVISALRSSQSSQSDGRSSHEGPASPCRGEAMLGRHTGSSRHPILSGGSDPQACLPTLTLSLARPHF

SEQ ID NO: 933660 - protein, 139 aa, Homo sapiens
MPDCSESPQNSRGAGIALTTKTPRLREGRQRGGQCGHPVEVTTQGGDTGRNEMPEASVKEPAPRTRGRWDAVDGMERAQGNTRDSAPSPGEDGGEQEEQAYGKTGGMDFGEDRRAKPPFRPIISWPHAVPVKAMPWAKA

SEQ ID NO: 933661 - protein, 134 aa, Homo sapiens
MGSRNWKAFRTGSCPAVCPSPTTTLLLPSRHGSFFFLSTYCSIILKETFTLNHFYCKPRKETGPGDEPSVDKKLDIKLNVNRPFLQGAQYIGYIHGSSIKRRSFTLVAQGAKKGFLKETLEQGENLYGGKGQKY

SEQ ID NO: 933662 - protein, 214 aa, Homo sapiens
MYMPEKGRKILPGSLPITQRTEGIGAGPCMLICSGLIYAPWPPQPLSTCQEEAILGSTLEANGPDAQLRANLHSWRRRSPLGAGGPAGTPAHRLLFLLSSTSCRQANTSSSSSGRAFSSRAAALLNERSPSPAGPVQSQGSGRRALELPLAPALSLEGALPLVLALAQQLALEIAVFLHLKQELQKERGHQYHSLSTGISKHENNLTEFKGISA

SEQ ID NO: 933663 - protein, 152 aa, Homo sapiens
MAELKEHCNMPTGASGITGTPPNPRGCYGAHMEFAPANTPKLSSWLLYLLTCMLSPARGGTQQCACPAGQRKAIPDPTSQGTSQKSASVDCLEPSCCEWEAAGARLALPSVWELSGANCCLLLPIPHTDASLQKRQLWYSLQHYSYSQRTTI

SEQ ID NO: 933664 - protein, 125 aa, Homo sapiens
MATIVKWQRPKESIINWLQGQAPKDIKQDEELQQGLLLTSLPGWLDQQTFGVLGLHSILSLRDAYKGSVLWYSDTRTHPQREDRGGKRRKEMFFQKSPSDSGGNQEKYGLQMIGYSPKKRGARHP

SEQ ID NO: 933665 - protein, 149 aa, Homo sapiens
MRRPEDSLAYEQMLWASSSSFPTPQRSPPEPSLGSFPCPWIDFLELHLLCLLAAFTCGHGGLPGPGLALGLTCPWRFILKLHQIQRLLDPSRLPHVLLQLSPEFRTDWKVLRQNGCQAFLGKVRSGDTKDVLRFLDPRGCFLNKGHSGC

SEQ ID NO: 933666 - protein, 172 aa, Homo sapiens
MLGIPMTYRNAATVCTEVEGPCLLYNLGPSGDIASKDAVILNSPGMAVYRCSLGMLHSAFSLEQHALRVRPSALLGPAGPMWVPQSQWVLRDVCRGFGDVETQELRFPGQDRVPKWVHTQCGARYHSSNLGVADSPVQCPQEIPKLPPTPMHKLVRAEELFNSLETSNLSQG

SEQ ID NO: 933667 - protein, 140 aa, Homo sapiens
MARSSTGSVEKFLCKNVSKDVETENKSSTPSTAVERGIPHKLTPPSHLIYPCFPFDQILRYSLTTFYTSQGCSFAPGVSFTNVHVSPIFTSLISQRKIYDHKQNTSDVVPMSVDWSELHLILVKDSSFCDSVRVEFEANN

SEQ ID NO: 933668 - protein, 163 aa, Homo sapiens
MCYKATAMYAGTCVGSYGQIDSWAFRWFSQMLVVTSVDQAGGKVPGPLGSQCGMGNGISVATAQVSVMPLFRHYWDPGQHAVCQRLGLKMVTCCRHLGLRKGVGPSASPIPGALLSHGSFLCYYEAKSTIHKRKKIDKWNFIKIKNFCSKKDYCRENFKKKLH

SEQ ID NO: 933669 - protein, 157 aa, Homo sapiens
MVNAVHLKRKKMTGACPVLFQTQKQVTPWNQIKEGSKCMLHRAGSDPGRFDVPGNIPTLSWTDLEAHLRQHLHVHVSLTCLSSCLFGKKDNQFPAGATVSVEFARSVHAFSRDSDKHLICKMCPEGKCSKYFDRRITNLPVGSRNRIIYYKVGNIGL

SEQ ID NO: 933670 - protein, 142 aa, Homo sapiens
MISLGIHMKETVGSRQWGANRRDASKGFKCAYALILCHGNSLSHVAATLLPGTQNELCMEYIFAICPTSLSRTQLTRADHQPICSQEAGSLRQVLIPVHRCLEMNSVLLAGAQWEWDSPFGLHGTWVRPVTAGFPPLPWQPS

SEQ ID NO: 933671 - protein, 136 aa, Homo sapiens
MASDKRKACAGKFPFIKSSDLIRLIHYHENSMVGLDVSSRSQELEPKTLEVCLVFYCTVHQLAVKPQDAVFSTLPSPFQRQRSLTLKPPPPQAMMSTARLPPITWVSLLLIWGPRALQLADNECCQDWVLSFKVAE

SEQ ID NO: 933672 - protein, 160 aa, Homo sapiens
MHHPSQHSPTWLPLAGKGVLRPLLLLSSPSVGCTHCLPSPSEMSRVPQLEMQKSPAFCVDFLGSCRPELFLFGHLDSHQRPLPPQDHGEYCQAFANVPLRPSPLQSACDEYFLLWDSQLREVGSLVVWGRSRNAIQEPKPGNGDPRSSLGALPNCGQAGN

SEQ ID NO: 933673 - protein, 332 aa, Homo sapiens [sequence omitted]

SEQ ID NO: 933674 - protein, 140 aa, Homo sapiens
MLPTFMPSCDSKREPGAFQRDDQGYRSQICMEGIFRHTNPGMTVAEKEQGGRKQLELHLSSILPLVHFTWVTNEYLKTAKEHQSSPEATGKPWKKFSSKSSGGTNPADTLKIIIATQCEDPMDFFIRGKLLCLATWGFWP

SEQ ID NO: 933675 - protein, 173 aa, Homo sapiens
MQTSLLRLWLWFLRNGKAQYSHKTEVWSLGTCGTAMAHWAGGAAAKIVGVKMGDMNNTGSHFILYRVTKFLRNSVDMDEAGNHHSQQTNTGTENQTLHVLTHKWELDNENTWTQGGEHHTQGLVGGPSSGQYVEVDMKGSDIDNPGLCRQAQRSFSKLCTAKTRFLHLFVLEL

SEQ ID NO: 933676 - protein, 146 aa, Homo sapiens
MDREFFSPGQLKHGLEVRGEPCHPLKGRFQGKGHSCQVLSAVLPEFKTVKSYDKPYLKSEVWPPHCAVEELDLWTVYLSYFQDGVTDVPRESPGLEGDGEITHKLPYQDFGLASNLEMLLGIDCGSGFRHFSLTKVEPCSPVQQRG

SEQ ID NO: 933677 - protein, 146 aa, Homo sapiens
MPHTLLLQSIRWSGKHIDQTLVAVEAPAVSWSDGFGEKHLGGDFGYSHRLSVEAESLDKLPTPQDRLSFGVDLTAAASDHGEDMGLSPGARQITSLSQAVSVRSWLRYRPLSPDTLQLPRRADFHDFLSLVRVESNISQVLEHLPG

SEQ ID NO: 933678 - protein, 168 aa, Homo sapiens
MPQVVTHPIPLPNFLSHLGGLLPPVEECDTLRGYGVFQESHLGIEFRQVPGLLTCWPTHFLPLLPALGVLRNEPLANHCCKPKSPKAEELGVRCSRAGSIQHGRKMKARRLSQSASSTFFCLLFLATLAVDWMVPTQIEDVNSPKIDLQIQYDSNKNNSRLCVCKLTS

SEQ ID NO: 933679 - protein, 168 aa, Homo sapiens
MAPASASHKGFRKFPLMVGWEREQASQSERKEAAHVWAKERKRDRKKKKEEEEEEEGEEEEEKEEKEEEEEEEEEMEEDSGQSDRRAPHFPEGAEAGQRRSLLSRQLGGQAEELSEDPVCVMYQMASLFKRVRMTTLFVRVQIGGHCLSARESENGLVFLEVKMRVLL

SEQ ID NO: 933680 - protein, 139 aa, Homo sapiens
MQCHWVNIPYPKGRNWSKERGYRLHAHLKLSREVIKSKNSKIISFDSMSHIQGILVQGVDSQSLGQFYPWSFPGFSPHSCFHRLVLSAYGITRLYRKHGCICFWEGLKEPFTHGERKSGSRHLIWQEQDQEREGRCYTL

SEQ ID NO: 933681 - protein, 163 aa, Homo sapiens
MQESFSCVGTQVFQTSNPGSYSHVIRSGLSSVLSYSCLKKTITINITIKMINNSDVTSELKVPFPPQNNDQQDSCKTHSGPLSPCSDSIPVNTQSNLLYVSLFSNLSKNRKHQKLPRAILLIFLKKYCCNLYAHNQMKKTSFAQLPNFTFCDAHTHKVHEILL

SEQ ID NO: 933682 - protein, 190 aa, Homo sapiens
MRKNQCKKAENAKNQKASSPPEDNSLPAREKNWTENEFDKLTEVGFRSWVITNSSKLKEHVLTQCKEAKNLDKRVEELLTRITSLEKNINDLMELKNTARELREGHTSINNQIDQVEERISEIEDQLNEIKCEDKIREKRMKRNKQSLQEIWDYVNRQNLCLIGVPESDGENGTKLEKMLRILSKRTSPT

SEQ ID NO: 933683 - protein, 141 aa, Homo sapiens
MSMMSGNDCGSLLYLIPAQPLSRFRRVLNLLQYWIPNLPWAHQLPQNLGSDWALKFIYQTLIADSPPSLTVVSGPPERAYWIQNPEFNDIVAYKLQIDGRFGSKSFSSFFTVIVFNIGYIQNFVKHVHCSNVKDTVLVSGI

SEQ ID NO: 933684 - protein, 947 aa, Homo sapiens
MPHMYSSPHYSSPLARVATAHAKYARGQRWVLRNAPVSRPHSWHVAKLLEGCPEAATTMHFPSEAFSLSWHSGCNTSDVCVQWCPLSRHCSTEKSSSIGSMESLEQPGQATYESHLLPIDQNMYPNQRDSAYSSFSASSNASDCALSLRPEEPASTDCIMQGPGPTKAPSGRPNVAETSGGSRRTNGGHLTPSSQMSSRPQEGYQSGPAKAVRGPPQPPVRRDSLQASRAQLLNGEQRRASEPVVPLPQKEKLSLEPVLPARNPNRFCCLSGHDQVTSEGHQNCEFSQPPESSQQGSEHLLMQASTKAVGSPKACDRASSVDSNPLNEASAELAKASFGRPPHLIGPTGHRHSAPEQLLASHLQHVHLDTRGSKGMELPPVQDGHQWTLSPLHSSHKGKKSPCPPTGGTHDQSSKERKTRQVDDRSLVLGHQSQSSPPHGEADGHPSEKGFLDPNRTSRAASELANQQPSASGSLVQQATDCSSTTKAASGTEAGEEGDSEPKECSRMGGRRSGGTRGRSIQNRRKSERFATNLRNEIQRRKAQLQKSKGPLSQLCDTKEPVEETQEPPESPPLTASNTSLLSSCKKPPSPRDKLFNKSMMLRARSSECLSQAPESHESRTGLEGRISPGQRPGQSSLGLNTWWKAPDPSSSDPEKAHAHCGVRGGHWRWSPEHNSQPLVAAAMEGPSNPGDNKELKASTAQAGEDAILLPFADRRKFFEESSKSLSTSHLPGLTTHSNKTFTQRPKPIDQNFQPMSSSCRELRRHPMDQSYHSADQPYHATDQSYHSMSPLQSETPTYSECFASKGLENSMCCKPLHCGDFDYHRTCSYSCSVQGALVHDPCIYCSGEICPALLKRNMMPNCYNCRCHHHQCIRCSVCYHNPQHSALEDSSLAPGNTWKPRKLTVQWGGGSEEMTAAAVSAQDQQLYKRWRYDLQVAAIGSSNACG

SEQ ID NO: 933685 - protein, 267 aa, Homo sapiens [sequence omitted]

SEQ ID NO: 933686 - protein, 168 aa, Homo sapiens
MGCLGTQRAPGAFLLLPLPLYVTRFSKLTQLQRVCGSFRHCWFVLAVDLEKASSDHSAGEGWCRLITSKESGTPCYFWVESWRGCDLNFHWPLILPGIGLPPWKSWQDWSYHLTVNTMKLLSHNTEMCGKSRLFFSPATLSESSLQSGNWGWKTGGSGLLPQLYIGFT

SEQ ID NO: 933687 - protein, 139 aa, Homo sapiens
MAAATAISSYTRTCDIQVQSFRNGAVPITSKVRDVVTVEAEKRRSSQLNKARNYCECDKTRDCVLVTVVSPVSCTMPDTEQDLSTSGFLDMGMGDCIWLGCLFVPILLSPGPTQMAPANNCLGMSKSSELTVLYHFHWE

SEQ ID NO: 933688 - protein, 165 aa, Homo sapiens
MLKLVPDLVPPDWERPPNGSPVTSYRHVQAGKSAPVPPNDHNTSPARAQNWAEADIAEMTEVGFRRWVIMKFAELKEHVVTQCQEAKNHDKTIQELTAKIASLERKITDMLDLKNIQELHNRITSINGKVDQTKERMSQLEDYLSEISQADNNTDKRMKRNEQNL

SEQ ID NO: 933689 - protein, 269 aa, Homo sapiens
MGRIACANVLSDLYAMGVTECDNMLMLLGVSNKMTDRERDKVMPLIIQSFKDAAEEAGMSVMVSQTVLNPWIVLGGVTTTVFQPNEFIMPDNAVPGDKWNKIKLVVTEDVELANQEAMMNMVRLNRTAAGLMHTFNAHMATDITGFGILGHVQNLAKQQRNEVSFVIHNLLVLAKMAAVSKACGNMFSLMHGTCPETSGGLLICLPCQQAARFCAEIKSPKYSEGHQAWIIGIVEKGNHTARIIDKPQIIKVAPQVATQNVNLTPGATS

SEQ ID NO: 933690 - protein, 150 aa, Homo sapiens
MGLNLADLLLRGPYPGPRLAGLLPKTWCRHDSSWVSWHMDWVADPRLNRTVAESTGGNNVSRSVARTVVPIVGEGETSHSNSDTDNVKVTICSIKKCFSVFMRVTLNLLKKARGHPKRRKTVQKEFELPVCYLCLKCYPWYQMERNIGRQ

SEQ ID NO: 933691 - protein, 153 aa, Homo sapiens
MGQFYRIWVGSGKLQSKGVVLWQAGVVVTRCSVGELLSQEKEFHKVMSSVKAGIGHFHFFCDSSVASGHLDVYVQAWAQRPDTQQLLPPLAPLAPLPPPHCTPVASLSITEAFSATANICTLTKPSDFPNHKAFTTIFSSFTSVTYSPSPRCQ

SEQ ID NO: 933692 - protein, 160 aa, Homo sapiens
MVPIVSLVNFSMLSYMIHSKLNMKNAEAHIYLSGYPLVKDTQSHILDDIVLAQNLTYGDDIASEDIAPTQNFTAGSGLHCCQSQTLAVCHIYIAEDPNSPHNLCETPTALDTKDHAVANVVGMPELTRLGPYLPPHHQTQSHTMPLHLVSYGLDPVPQCT

SEQ ID NO: 933693 - protein, 176 aa, Homo sapiens
MIVSFLRPSAGANDDTMLYVQPAELTAKQTSFLYKLPSFRAGRQERLSLLKLLPQLLLPTGALSQGDGSFIYKPLTEAAVFLSEMPCPERRHLERQSGYSGFAELWWAPPSLNFLVALFTPGVNGSVSLAFQMPLGYEKNLLKLARCLLKRPPSFVLETQDPGGIGTGGNLLVSGL

SEQ ID NO: 933694 - protein, 366 aa, Homo sapiens
MALMGDTGFIHHNCTPELQAKELRKVKKFEQGFITDPTVLSPSHTVGDVLEAKMRHGFSGIPITETGTMGSKLVGIVTSRDINFLAEKDHTTLLSEVMTPRLELVVAPACVTLKEANEILQRSKKGKLPIINDRNELVAIITGSDLKKNQDYPLASKDSQQAAAVGVDIIVLDSSQGNLVYQIAMVHYIKQKYPHLQVIGRNVVTAAQAKNLIDAGVDGLCVGMGCGSICVTREVMACGQPQGTAVYKEAKYARRFGVPIIANGSIQTMGHIVKALALGVSTVMMGSLLAITMEAPGEYFSDEVRLKKYWGMGSLDAMEKSSSSQKRYFSKGDKVKIVQGVLGSIQDKGSIQKFVPYLIVGIQHGC

SEQ ID NO: 933695 - protein, 165 aa, Homo sapiens
MACPEKPVPQVISRWQAQGNYVCRPQLLGANPTLPQPGLTADVSSVQAVRSSGAKPGPAPCFSGKLEMLRGGSSIRARVSWDPGLHHSVPPSPGEQAPSCACSSLVTHNTTDLQDLNLIVPGSEEGGQTVVCFDVSYADVLRLFGMLVPGLGCSRQHQRRGGRGH

SEQ ID NO: 933696 - protein, 466 aa, Homo sapiens
MAIPKSQQGACVVEAWVQGPRDGAAAKPPCSPWLYGTQKIVQAGDKDLDGQLDFEEFVHYLQDHEKKLRLVFKSLDKKNDGRIDAQEIMQSLRDLGVKISEQQAEKILKRIRTGHFWGPVTYMDKNGTMTIDWNEWRDYHLLHPVENIPEIILYWKHSTIFDVGENLTVPDEFTVEERQTGMWWRHLVAGGGAGAVSRTCTAPLDRLKVLMQVHASRSNNMGIVGGFTQMIREGGARSLWRGNGINVLKIAPESAIKFMAYEQIKRLVGSDQETLRIHERLVAGSLAGAIAQSSIYPMEVLKTRMALRKTGQYSGMLDCARRILAREGVAAFYKGYVPNMLGIIPYAGIDLAVYETLKNAWLQHYAVNSADPGVFVLLACGTMSSTCGQLASYPLALVRTRMQAQASIEGAPEVTMSSLFKHILRTEGAFGLYRGLAPNFMKVIPAVSISYVVYENLKITLGVQSR

SEQ ID NO: 933697 - protein, 129 aa, Homo sapiens
METAWDLHLTSSSCVNLISHQAPDTIWHHEGQIEGFCSCSCTSVFQAFVRLAALPTLTMISWLFSIWSSTHSSLDASVFLKSRLSETELFDISCQMFECGEKGQRDVTELKKEVPRCSLHVDVWYDKDM

SEQ ID NO: 933698 - protein, 155 aa, Homo sapiens
MWVSFLQRVCFLFAFCHDCKFPEASLVMLPVQPSELAGEHMENFLNEQCIKGWEGFWSKALPSSADNYCPFERYLLACYWALVETERLTMGTTRKWIAAAPQPLSRKFLKDGGEKESFQWAELQEVHLVVHFAWKEKWTDVRLYTDSWAVANNHQ

SEQ ID NO: 933699 - protein, 170 aa, Homo sapiens
MICQEKQRKVSKGLKELTISNPATAFPQRCTEKMSYSFYFCPVLDTSCPETSDSNFFSFWTLGPAQVVRQGVSGLRPQTEGCTVGFPTYEVLGLGLASLLLCLQMAYCFARGYPLVPAPFVKKTSFSSLYCLWPFVKYQLTMQAYLRDIVGLVLEHSNKVNTAINYCKRG

SEQ ID NO: 933700 - protein, 192 aa, Homo sapiens
MNNRHYIITCNGGKIYDINCQSVFVARKFGVNEGERKKRHKGNKHFFPVPFLTLKFYHKNTMSNSSYTFVRFCEVRCNGSKDPGMASCHCGLGPRGRKQHSADSTTWRGKMYQHLRLHRTSPIPGRWNTVAVRPGGQSSQGSDLLGHEELHLIDPRKCAYTEISWFPSDPENKLQVSLGMYCGKGRSWWDKR

SEQ ID NO: 933701 - protein, 155 aa, Homo sapiens
MCLSLNHRHGLQVKGKHHEPIFQEKKPGSPGRWISQREIQVEETDPCGTTLDTKFRSVACPLNLARARGPRELVEKLQQEPNPFGASSLNYKEKTSLCLKIQQLQLKIVELGCSNELLPDLQCNRHSQSGLRTGVYTAVNHWSCQMKVDDVVIPL

SEQ ID NO: 933702 - protein, 150 aa, Homo sapiens
MSHQRHSGLITSRHRGTTCQMFSSSKVNIITIISLCMLETQASFLIFFSSFSNLLHPNHNQYNRYIRYVSSLPKYIFFPLLSIVTASTLSGLPSSLARLTIVTPDSLEKFSPRNSDLTQKNLKRQDTLDPKACLQECNWKSYTVERPPIK

SEQ ID NO: 933703 - protein, 147 aa, Homo sapiens
MKPRTLAAARLELFVLSSGFVVLLASGVKLQTFTDPFSRRCTVGAPLWAGRGQIWLPLLAGRCGGRGAGRNWGCTQQLRPARVPGGRGLSGPRTQSLWPVPPAPGSEGLSTRPAAAEGAPGPPALLACPHPTRILTGPQPPPRGAGL

SEQ ID NO: 933704 - protein, 170 aa, Homo sapiens
MLVQCGLAPVSSDWTGKRHLTQAGQLDHLSQEFFTGEKGCKSHDSSLSQEQPRGDSAKAFRGRIPNGADTRWCNPYQPVSMNVCVEPNAHSPTLAMIRKLNWIKCYHLGGAKANKEKEVIEEHFRKLGTFKSAGLDYSHPRTLKELANIIARPPAFILENEGWTEEGPDK

SEQ ID NO: 933705 - protein, 130 aa, Homo sapiens
MWVHVLLCYMGILLDAEVWGINDPVTQRVNIVTNRKFFSPFPIPSTLLVESPVSIAPILMSMSTQCSAPSYREMMYELLKKKQKCNGLNSERRQCMQKMQRGNVKRFEEHDIGWNSKSLGATMTQCVEWV

SEQ ID NO: 933706 - protein, 149 aa, Homo sapiens
MSVLLLEDFQEQASKKAILFTDVCYQKENKKAEYSNQKDICLYTKKHFSEKAKDFNDLRRNVKSFIKEVLITKPNPKSQITTLLNTNKKYLPKRERLSLREDSPGQKNEPWKQRGQSVQVFTAYQFQVLGAGPPKSSHKLAINKISAAL

SEQ ID NO: 933707 - protein, 203 aa, Homo sapiens
MPKRGQHTALAVASETGSPIPWHLPRGVEHGGIQKSRIEVWEPPPRFQKTYENTWMPRQKFAAVMGPSWRTSAKAVSKGNVGSEPSHRVPTGEPPSGTMRRGPWSFRPQNGRPTDSLHHVPGKAADTQCQPMKAARREAVHCKAATAELPKTMGNHLLHQHILDVRHGVKGDYFGALKFDCPTGFQTCMGPVDDTPCSYPSCF

SEQ ID NO: 933708 - protein, 144 aa, Homo sapiens
MHLTSLLLCLTPSGASNSEFFLLSSAQMLCSPQISTFGAIIEKFLFFHNKSDKEKKDANIHGETIVHNSRVGFIIINSPKQTVKVHFCDPENCYMIKTVKQKENSDILVMALLGKLDIASVTPITGCIMKAGTTPCEKRLKEER

SEQ ID NO: 933709 - protein, 138 aa, Homo sapiens
MQRRNVVLEAPHRIPTGAWPSGAVRRGPLCCRPCNSRSIDSLHCALGKVAGIQCHHIKAAAGAVPCRAIGLELTKALGVHILHQCALDQAASFAVDQIFLLEALEGAAKPQISIMPSLILPNTSFYYLGIWEDRLTWL

SEQ ID NO: 933710 - protein, 135 aa, Homo sapiens
MKVALSRMGSCKGNGAVRAYLADNHDIRAAQSKAIPKGNVELESLHKVPICALPRGAMGRQLPPYRHQKGRFSSSLFPASDKAAGTQLKLVTAAMGAVPCKSTEAELLKILGAHPLHQCALDEGHNEYFGAFIFN

SEQ ID NO: 933711 - protein, 138 aa, Homo sapiens
MPRYSSETKLPEERSGSNICCSPISAVLQPLLLIPRQTGSGVDLQQTPTDLQLRVLTVRRKTNKEKGHPHQNPIYEWLTRITNAEKSFKDLMELKTMARGLRDECTSLSSQKKKRKLMAVQPLRIAMTSGIFIRGFFG

SEQ ID NO: 933712 - protein, 142 aa, Homo sapiens
MVIDRKGGIYYRKVGDPVADTHWGAGRDEKWPDVRERQDFRRERKRGSLTSGESDLPFSSPFQLPYPLRETFITNKILCIHHPSIHPCDLIPLGHQTRIQDAQCTSNQKGCHPGPLPLLVEVVEDLHFRGVGKIFSTESHRK

SEQ ID NO: 933713 - protein, 192 aa, Homo sapiens
MEGQDILTKLSTSLTIPGMQPHLIATPLSNSNPPLQPPLSSPHLNPKVWDTFTPSLATDHSPLIIPLKHNHPYPAQRQYPIPQQALRGLKPVITHLVQHGLLVSTNSLYNSPILPVQKPDKSYRLVQDLHLINQIVLPIHPVVPSPCTLLSSILPSTTHYSVIDLKDAFFTIPLHPSQTTSLLPRKIQQKLP

SEQ ID NO: 933714 - protein, 125 aa, Homo sapiens
MGECSLKSLLVPRRKRKRVGMLKAVNSQTSKMNSGYLLHLLGQLGMSHFCVLGAIRNSLAGCRLHTSIEHHFHRAPFSQLQHGGPVCASPTFPMCNYNKCLILKIWVCGLHFQNFANVYEFKPFR

SEQ ID NO: 933715 - protein, 187 aa, Homo sapiens
MHIRVTWGVGKKLHGQVAPIKSESQQLIFKALQVITIWFETLRGREPLRDSKDIMVDGRGKVGKDQLMEGYRHNQRSFDLSMSEISGFWQSFSLVGMGILKPFHYWLFPLPHKSLGSIRQPYVSLDDSLADNNFMSFRLKNRSFGDQGIFDSTRKSLKCSLEAGPITGFLANDLLRKESWETGLQQH

SEQ ID NO: 933716 - protein, 340 aa, Homo sapiens
MGGWSSSGKCQCKVGVIGSICDRCQDGYYGFSKNGCLPCQCNNRSASCDALTGACLNCQENSKGNHCEECKEGFYQSPDATKECLRCPCSAVTSTGSCSIKSSELEPECDQCKDGYIGPNCNKCENGYYNFDSICRKCQCHGHVDPVKTPKICKPESGECINCLHNTTGFWCENCLEGYVHDLEGNCIKKEVILPTPEGSTILVSNASLTTSVPTPVINSTFTPTTLQTIFSVSTSENSTSALADVSWTQFNIIILTVIIIVVVLLMGFVGAVYMYREYQNRKLNAPFWTIELKEDNISFSSYHDSIPNADVSGLLEDDGNEVAPNGQLTLTTPIHNYKA

SEQ ID NO: 933717 - protein, 220 aa, Homo sapiens
MNHLDDHGSKSMRRGGRGRGRGGGGGGGGGGGGEEEGEEGEEGEEGGGEEERRKKKEKKKKKKKKKKKKKKQKKKQKQQKKQQKKKQQKKQQKKQQQKKQQQKKKEEEGRRRKKKEEKKKKKQKQKQQKKQQKQQKKQQKQQQQKKQQQKKEEDGRRRKKKEEEKKEKEKRRRRRRRRRRRRRRRRRRRRRRRRRRISLVGSPWWWGRQLASDCQCGNPD

SEQ ID NO: 933718 - protein, 275 aa, Homo sapiens
MSLFCRAAVVCWEFTSGPIHLFCSQAWRCHSRRLENSKDECLLLLLGSLTSRGTNFMLVGSVLSRASYNPVGGSHPVWWQGNRTCLIKHFDCLFVEGVCFTQGEPTSLGCLAFSELPGEKAKSASQQRLWPPLPLGDQAQGDQGPVPEPLAGVVGVPAGRPCLAVMCSSAGCCSSRKELKWLRQQAESVENLRGSRVGNLGPGGMEADFSWASGTRSICLLLMLVTKSTAIRVHRHFGNKRSPSRSDQDTFEMSLSCALENQRQQPQIYLSVLRC

SEQ ID NO: 933719 - protein, 152 aa, Homo sapiens
MTVLKTFYTYCQITFQEYCLFISGIFDPPITGRISALGTCYYWSIHSFPTDLKCHFYRLVFITLRSGCCHSYTTNLFTTVFYKVVSELEQWPLTHGQVKERADNCRGGWHGASGIPMTAREVNCSDCTSKETKKQNLAVRSTINWQLFQGSP

SEQ ID NO: 933720 - protein, 136 aa, Homo sapiens
MEAETKVLQLQATERQGSLEKHQKLERDEEEFSQISEGIQPYQHLDFEFQATRNVKMGQSEEQLPESPGEKPPFRSNDPVSSALPNSKRNKFPNFTLLPQTYLLQRCPRKPIAVVLQISLLGANFWVKKETKIILG

SEQ ID NO: 933721 - protein, 171 aa, Homo sapiens
MAGPHDIGPVTLTADPTVFQRELRELYVQGGGDCPEMSVGAIKAAVEVANPGSFIYVFSDARAKDYHKKEELLRLLQLKQSQGLEDLSDPLLLAFAVVFVLTGDCGDRTHPGYLAYEEIAATSSGQVFHLDKQQVTENILEQACNSSYDTVAGVTPLGNCRLVLCSVMLPS

SEQ ID NO: 933722 - protein, 188 aa, Homo sapiens
MSSECLQLHGWLTACNWGFYEQMHVKCLEQNLVLSKHQNNGNITITTIIITTTTIIITTTTTIIITTTTIIIITTTIIITTTIIITTTTIIIITTTIIIITTTTTIIIITTTIIITTTIIITTTTIIIITTTIIIITTTTTIIITTTTIITTTTIIITTTTIITTTIIITTTTTTIIIITTTTIIIAV

SEQ ID NO: 933723 - protein, 164 aa, Homo sapiens
MVEMTRLGRPAGGPAARPYPSRTGRGPTEQGTACSRRVHRGGRLAPTCASTAAPAARAALGMMPGAPLLRLLTAVSAAVAVAVAGAPGTVMPPTTGDATLAFVFDVTGSMWDELMQVIDGASRILERSLSRRSQAIANYALVPFHDPGSAPAPPPAGRPLRGSS

SEQ ID NO: 933724 - protein, 139 aa, Homo sapiens
MVLLHSPGMRDPMGHMPCVAEKQWSPLKERDMKTVQTGGCEDALQSASRSLRSRPSAGAAGADFKARRPQPDPPGADLGEARRVPAGQVPAGQRPGTEGWGRHEAAPQGGGGLNPDWGLRTRLRWEVSPGWEFGKQTLT

SEQ ID NO: 933725 - protein, 175 aa, Homo sapiens
MPGPPSSSDRLPRSWQPRAASRRRRGPRRGYICTKCLGAAGPEGSDVGFGWGKIGGPGGGARAAGEPGGEREERLRRRRGPGPGNIPPRGAPARASGNEPAWSGRVGSDTGRRAATCAHPLLPSRSAGSAQLSWDWAGVFCTQSGGVGTALRHSPAPGPSAAPYYHLYILVYSLE

SEQ ID NO: 933726 - protein, 131 aa, Homo sapiens
MADVSFQFFVQFPGGPGMGKGRQHSPRTCRATAERRCFTSPWASVALALHTARLPPPSDLFPVTWLQSTGYPDGLGQVEGTAIASNQPPEPCCLRPQLAQPARVPAAWCPPHPPGSSDFQLGAFYALSLKG

SEQ ID NO: 933727 - protein, 179 aa, Homo sapiens
MTTFTINEQTKCAMGQAQAEPVSLAASFLHIPSLSTPTSQREGDFQAGDKVQGAQLALVRLSGEEETHNTGPSPLFWPPPHSSLGAFPPQQTGRRLRAVGVISWYKGTQLARSQTLALPLCPADPQGWLRFTETLLSTTYAGKGIPQGLGHLDKHQALGAKSQHVEPLSCGRRSCVCPL

SEQ ID NO: 933728 - protein, 145 aa, Homo sapiens
MLKTMDIDKITKEEYTELEWKSKEPYLDALEMPIYRFRGQVVKAKRKSLKEIQSVTLGNTEMIRKQNSLNADMEKFSVVWGEDQTSHNIPSGSNLIKNKVLTLFNSVKAEKVQGEATNSDVEAAANYPEDLVKIIAKECREVKST

SEQ ID NO: 933729 - protein, 148 aa, Homo sapiens
MPAGTPVWTAGLVVSLPLYTCPGHPRTRYWTTKDNPYVPEFTKIIQINQPMKNLQNLASPTPLAIHKWLITVSACCFPALRCNTAQLCLTYFSGLELKVTKNSTFNTSECDCIVSHHQNTFKSYKIIDDILIPSCHTTLVNQVHLYAF

SEQ ID NO: 933730 - protein, 156 aa, Homo sapiens
MSYPDIIHLQEAAVCTPKTGGREGEGNDYTRVQKPGSPGGTKTPVKEIPRRPPDEPHRRDHQELCGTQSKLHLWNSVITWTPSSFLYQFQKTQGLRGPPMAIIAGVHGYKPHVSPKPNRALITSQSFKVISFDSMSHIQATLMQGVGFQGLGQVCP

SEQ ID NO: 933731 - protein, 166 aa, Homo sapiens
MADRAEKQLHAAQLWMKKRRFPVCNVLYVNKTLERALSLHATQTAACNGPSWALLRKQRRLHAHRDSRERTSRRLSLHPSLGLEPRKGSQDGGLLSQAWLPVDNSGALPSTCLAWGRVASGAGLEGGLGGVLGLKGRTLVRRSPASIDITAGEVSPNSQTSQHQKG

SEQ ID NO: 933732 - protein, 141 aa, Homo sapiens
MMFDQMPGHTVTHSGCHPGPPVAEPLLDQCAWEMLSQFQPSTQSTDGPLCSSDSGRELLEPGTPGGPGGRPWVQGAMPGPPVSGGDREINAEGEEVSPREDFSQFYREEMEARERGHFPRLYGQEGAKRGSHWGQGVGGLP

SEQ ID NO: 933733 - protein, 537 aa, Homo sapiens
MDHKRRTALGEMAGSEGTGLVPHSEGDCHEGDDDGDDDHGGDDGGDDGAGKEDGGNDVDGGDHHVGGDDDVDGDDSGDDVDGSDDGDDGGNDVDGGGDDGGNDVYGGDDGGNDVDGGDGDGGGNDVDGGGDDGGGNDVDGGDGGDGDGDDDRCDDGGNDVDAGGGDGDDVDGSDDGDDGDDVNGGGDDDGDDGDDVNGGGDDDVNGSGDDDVDGDDVNGGGDDDGDDGDDVNGGGDDDVNGSGDDDVDGDDVNGGDDDDDVDGDDDGAPAPRMAAPRHLHHRDTCHRSRHHKSRHHRSRHHGNPHHGSRYRGNPHHGNRHHGSPHHGTDTTGANAMGADTTGAHTMEQTPWEPMPREQTPQEPTPWEQTPREPTPWNRHHWNQCHGSRHHGSPHHGSRHHGSPHHGTDTMGANATGEDTTGAHTMGADTTGANATGADTIVGTHTMGADTMGAETKGADTTGADTMGTHTMGADTTGADTMGTHTMGADTMGADTTGADTKGADTTGADTMGAETMSAHTSGVQCGSPLPILGAAAH

SEQ ID NO: 933734 - protein, 134 aa, Homo sapiens
MLKLVKAGAWPRASLPFAQLLDSLLSMTTGHGAEMAGGTWGMLASFPERVQPSAVPTALSFSIAGQRHGAGALGLLPGLGGLCHSRAGGDSDDGKESSGSKTPADDGGSGWPSEDLTFLFPCTALGLGCAGPAS

SEQ ID NO: 933735 - protein, 151 aa, Homo sapiens
MSLRPKKHPPQVDLGEPSALKEPLWSSGSIPHNRGWQQLQNIAPPEVGSAELRLMANSDRADHRDSTTSSSWWNKSWYPDVGSERSSTVFIFTTNTVAVGEDGPRHHTFSWRQRLNYKFFHLDFQLWELQVSEVTSKTHERELMHFLGTTG

SEQ ID NO: 933736 - protein, 488 aa, Homo sapiens
MDPHWDLDSDHGDWSRKHLLTCVLEELRRIRKKSMNYSMMRKLQKQALGPEQNLEALLNLATLVFYNTDEEEQAQKEKQDQRKAAALLMALRQTNLGSSERTENGAGQSPGRACYQCGLQGHFKKDCPMRNKLPPRSWQVPGHVITLTEPQVRLTIEGQEIDFLLDTGVAFSVLISCPGRLSSRSVTIREILGQPVTRCFSHLLSCNCETLLFSRAFLVMPESPTPLLGRDVLAKTGAIIYMNMGNKLPICCPLLEEGINPEVWALEGQFGRAKNACPVQIRLKDPTTFPYQRQYLLRPEAHKGLQDIVKHLKVQGLVRKCSSPCNTPILEVQKLNGHWSLVQDLRLINEAIIPLYPVVPNPYTLLSQLPEEAEWFTLLDLKDASFCIPLHSDSQFLFAFEDPRDHTSQLTWMVLPQAFRDSPHLFGQALARDLGHFSCPGTLVLQYVDDLLLATSLEASYQPATLDLLSFLANQRYKVSRWKAQLCL

SEQ ID NO: 933737 - protein, 154 aa, Homo sapiens
MVLAVGWCLGCVSEAVLQVDVARQEPWEKSADRGDAQIGLVPPHRQDSFVLPGYNCQQRPKLPRGVLTWKCRTRNKNQQKKGKGECRNPCFLIVENSFSNQDLGSSICRVGPGGLGEGNHSCEALLLLLAQMPKQMEGQGSSAERLQISNMSKE

SEQ ID NO: 933738 - protein, 152 aa, Homo sapiens
MRGLASFGFPPCGNIREKQPSANQEASLHQTLDLLTPSSWTSQPPELCGHISYPMYGVSVLAAQSNTHGGKRTGHKPSHISFYKGMNLIPRVPPSCPNYLPKAPPINTIILMIKLQHTNLIWGVLLTCENNEKFEKARLDGIYGKEYEVIQK

SEQ ID NO: 933739 - protein, 159 aa, Homo sapiens
MVHICLNMRGLASFGFPPCGNIREKQPSANQEASLHQTLDLLTPSSWTSQPPELCGHISYPMYGVSVLAAQSNTHGGKRTGHKPSHISFYKGMNLIPRVPPSCPNYLPKAPPINTIILMIKLQHTNLIWGVLLTCENNEKFEKARLDGIYGKEYEVIQK

SEQ ID NO: 933740 - protein, 203 aa, Homo sapiens
MVFDQNDDSDMGNTINAEMVSDGDENLVSCVPASPAIAKKGPRYSSCHGFRGVSPKPLQLPCDIETSGALKSRIEVWEPLPRFQRLYGNPWISKQKFAAGVGPSWRTSARAVKKENVGLEPTHRVPNEALPSGAVRRGPFSSRPQNGRSTNSLYCAPKKAADNQCQLMKATRRGGLYPAKTQGQSCLWPWELTSGISEIEDTN

SEQ ID NO: 933741 - protein, 149 aa, Homo sapiens
MVLDWKSVPPAAPVCKHTNQHPVSSSRFVNAPISTLYLANPVGTWRTFVSSSGIVNTPISTLSKRTNQLSVKQTNQLSVKWTNQQDVGDIPAEGIIIIEGESSMHGFAPEELLVGQDVDVEDSDTDDPDPLTVTFSRSLHGVRKPQQQV

SEQ ID NO: 933742 - protein, 150 aa, Homo sapiens
MLSLPLPPPHDGPWCVMFPFLCPNVLILQFPPMRPSAAGLLEFAGGPLQTLFAWVSAAEAAEQRILLNSKCCCLIVPLEASSQSSTRPCGASNLQIYPKKSSISSHWPMNQSTTSSFLAIYQKYRNSLESDTSKSKSTYSPSLNSIAYGK

SEQ ID NO: 933743 - protein, 137 aa, Homo sapiens
MFGMFYIPFGHLFQMYGKAWMPRQKPAVGVKPSQKTSIKAVQRENLGLEAPRRVPTGVLPSGVLRRGPPFSRPQNGRATSSLHPESAKAASTQHKPTRAVTGVELCKATGAELPEPIACTHVPWMGDMDSSEIILER

SEQ ID NO: 933744 - protein, 137 aa, Homo sapiens
MPFIYFSYLFALARISNALPNRSTKNRHSFLSFRSFTIENYVNYGVFIYGFYYVEVVSSIPSLLSIFYLKECRILLKAVSASIEQIMWLFPFILLIYLFKVMNHKEQNIKSDTLRSLCPVFTQSINRVVISAKVKAN

SEQ ID NO: 933745 - protein, 135 aa, Homo sapiens
MSFFTTKHCEWSPGLSLVKEEKVLLSINDHSGKFTISPPPWEGKHHFIDIYQGTSTGDKEDGHHYARYGHSRKVATEGTCKAQAALQRFLPRVQILTNILLKQLSIKPALRVFLPPLAFLLSSACLPFISDLELH

SEQ ID NO: 933746 - protein, 135 aa, Homo sapiens
MELASERTLMVAVGKHLGWSAEPVLQVGGTRQGLEMGWQTGGYSHQTGCIPQAKMALFCPGFQRVTVRVSHFTRFIYTFVRAAWGQKCALVLGNPMLPSLATPCFLPFQSSFCTLPLSILNDFFPKDMFIMCQFT

SEQ ID NO: 933747 - protein, 147 aa, Homo sapiens
MGKPSGSCFIRGKVFFNIYSDYETTLVPSYPGLQLESQAQLLSLVSLRLSFLSAVSCTQGTHKFVVAPMLGAAGLLPVVGTSALVLAASSGKGFYNCSLQLSPYQKEETPIFSKYIHVDWYLVVIVNHNRRCYIMLRVTKARDLERV

SEQ ID NO: 933748 - protein, 139 aa, Homo sapiens
MPHPALPHPPVGFTHSPTSPNEINQVAAIGFWDERNLVSNQSYKERQLMARDQLQTRTKLSMEIFNKWDQDPEVFLQGIVTGDETWLYQYNPEGKAQSNTPSALTCVLFFTPFPQPPYSVPLKPKNPSEKMMILTEGQG

SEQ ID NO: 933749 - protein, 278 aa, Homo sapiens
MVRGQGDHTLIEWLIAAIRTVWNDAKKIPETVSKRQSYTDLVQILQEMGMWQAMFDLNTRRPNDERFTSHMRDLVLGSVPQRAFGSLAAVLTPYVRRHIHEVTNAMAALGETERHWQDLGTHAIKKGKVPPLWVTTPQDEKEPQQRRVPDNWRLYVELAIHWSPTNVQQVLALVDTGADCSIVYGNPDKFLGKAAFIDGYGGQSVKVKPVSLHLGVGHLAPCLYTVYVSPIPEYILGVDILHSLDLHTAVGEFRLRIHVLKLVLCGHSHHQSQVLPQP

SEQ ID NO: 933750 - protein, 142 aa, Homo sapiens
MSLKNMYPTYMTAHPYSPTQTQICWAKCRLWPQTRGFAVVYMTGPCGIKLAKIIAFFCKAWCHQETSPKSFGWWNSSTEAHEDMLWKRLYGALQESVFPSVKKFSIVHIHCPTTFLIVCDFSKMTNSGPTITLDNSFTPYRG

SEQ ID NO: 933751 - protein, 173 aa, Homo sapiens
MVFPHLPGFIYLWSLMLVTFRWGSRVDVLFVDVDAIPFCLLVFLLTVRPLCYRAGRQEHLSLLKLHPQLPLPPDALSQGDGSFIYKLLTGAAAFLSVMPCPERRNLEMQSGYSSFAELREAGGWYGKKYVVGRSVVVLEPKNNVTNMGRDNSSTVFNVKDGKVTPEDFSVTHV

SEQ ID NO: 933752 - protein, 139 aa, Homo sapiens
MMCEVTTLTHKTWNNFVKAGTLISKSFLSSAQSMKVSCCLWKLVCKQLQGDAVQGPAIHGDVEEHGGMPFIYLTCLMAVARTSSTLLNVKGVKIIPSTFLDHSAIQIEINTEISQNYTTARKLNNLSLNNSWVNIKVKE

SEQ ID NO: 933753 - protein, 144 aa, Homo sapiens
MGFYFARGEKILARRQVRQLKFSERSRPIGKSSEQPLGSHTPALSCGCSSIECGGLLFHRDSQMQEGGRPPIALPHPGDQQSRAATQRSPCVSDADERPVTRERKHWKGIRSCPQLLPYLVLLLCSSDGAHCSMKCKDQKKSSV

SEQ ID NO: 933754 - protein, 149 aa, Homo sapiens
MGPAEPGTRGNLLVCPLQRPWEKSNIWAAVYCSSRNSEPVNQAQRPHSQEVNPDAGSLTGILLLLLLKAQLLPAILSGKVDAECDLLRHGAHLTGGNWITCLALVFRLAWNLGTKVQISKRKNHQNISWEPKRRRVSMIMTNDHCTSAD

SEQ ID NO: 933755 - protein, 139 aa, Homo sapiens
MTSARSTQSGYQTKLLVTVICFCLYFLPAHFLLNSLRLCFSSYYSIQTTLVKSSMPNLDQHSPLDGTNFVHILLSSSPSSECETRGAKFKQTGHPQTLPVYKELDSKPFRLCRPTVSVQAVQLCHFCTKAAIDSTFTYC

SEQ ID NO: 933756 - protein, 147 aa, Homo sapiens
MAVQWGEGEAGCTHSGSTGMVGGMCMCVLVEKGRLGPLVHTYTGKVMGGEGMVVGKYLRARQMAEAAVRGGPKWAAVCLWAALLEHSASQDWSASAEATIQTSRGTWGLPCKQAQPGWSPRRGQQSKSCPGPTDLISWVRPPFRVQV

SEQ ID NO: 933757 - protein, 144 aa, Homo sapiens
MVSASICLASVEGLMLPPFLMEGGGQDGLENCPNAIHLPAEKEKGFSSSPVCEVCTLDSCPPLSSGQEASHPIQIVIKATRQNPSSLPGVCSLAWETKSLIWFPLCVYITLAAYLLDISPKNTSRDGWIWEVKTKLFGYILFKK

SEQ ID NO: 933758 - protein, 152 aa, Homo sapiens
MGRNQSRKAENSKNQSASSLPKERSSLPGMEQSWIENDFDELREEGFRRSVITNFSELKEDVRTHRKEAKNLEKRLDEWLTRINSIENTLNDLVELKTMARELCDTCTSFSSRFDQLEERVSVIEDQMNEMKQEEKFREKRNFISCQTKLHK

SEQ ID NO: 933759 - protein, 169 aa, Homo sapiens
MAAAVLAPVITSKQEEGKIVSDEKSDDILIEDLLEYVSSGQLSSCFCYPAHAHCWCKWPCALALSLRRKELFISLSFQVPGRIFHWELRLLNCDESFLPMKEASSPPEDVASPTPVVSAFPPIFPPPSKGINPAFPEKIVMACPEAVAMQDNTVSPQNPPHHPSLLLEL

SEQ ID NO: 933760 - protein, 135 aa, Homo sapiens
MPLTQIMFQKNLKPPYYTTVGEFGHISHVGPRLEISAVQPTEKCWEDSELTWMIQAQGVEIYKKTESSKVPGHNSNILGVPLHKLSLPCLHVRCDLLLLVFPHDCEAFATCRTVSQLNLFSKINYLILDMSLLAP

SEQ ID NO: 933761 - protein, 144 aa, Homo sapiens
MVGLVTSMSMRPLLHFFSQKVSALVRGNAMWNTMMVDKAFHESTDGSLSRSIACKIGNPISRFLTTQRGPSTYLFPRCLRHQFSNHAASKSLTIQPNHWLWSMNQYIITYLAISSSMQSAKPGALLEILPTGKISLHCCPSEMS

SEQ ID NO: 933762 - protein, 166 aa, Homo sapiens
MAPPATRLPWTKCLPIALLRIQTAPWRDIGLSPYEMLYGLPYLHSAADIPTFETKDHFLKIYTLCLSSIFSCLKTKGLLAQAPPLEFPAHQHQPGDYVLIKGWKEGKLEPAWEGPYLVLLITETTVRTAERGWTYHTQVKKTLPPSESCTVTPGLTPTKLTLKRDY

SEQ ID NO: 933763 - protein, 152 aa, Homo sapiens
MRALSIFFIVVLNSWPHNVLNSWPDNVPGPLPEGHVTSSNCEARFSATIFPPDWLVAFGTKQVTFLSRELVCSPKRLRSATVTRWQNCKVSDAHLPYPLAAQGRPLGSLLYNSTSSQPCKDGRGLPLPPRPTKTRQWLWASPPSWPHLLKKK

SEQ ID NO: 933764 - protein, 176 aa, Homo sapiens
MALQNTAPEAAFMGWCWVPAAFPGLWCKLLMDLPFWHLEKGGPLLTAALDSVLVGILCGGFNPTSQYQLLLDIEDPPLSFPAEDLKATHNCGAAPPSYVFGTAVIAPFLAGRFSGGLRTAPQTPLGPVLMPASRGPECGLTWPTSTSFALPTSEAECRPLRVPQPIPSPRTPTCFS

SEQ ID NO: 933765 - protein, 146 aa, Homo sapiens
MFEVYKELSSKPNVVQWSLTRYKTKKGGEKGTKSLSDYIWQEKPFTCPSIQRFWAGHLMKSMGMLLAGVCMWADLILGDYFITIIPFELYLESWGLSTKASKLSGPIVLNGSYCNTLRAGLHGPLICGLSLLLVAGEFCQKLPSIL

SEQ ID NO: 933766 - protein, 265 aa, Homo sapiens
MPSKHFHKTQCPILEHLTNSMKMHGHNNGKKPMTMHIVKHAFEIIHLLMNENTLRVLVNAIINSGPWEDSTCIGGTCEASFQNIKTIAECLEDELINATRGSSNSYVIKKDELEHVAKTLPQAEALDRAYQIDTVINLNVPFEVIKQRLTARWIHPASGRVYNIEFNPPKTVGIDDLTGEPLIQREDDKPETVIKRLKAYEDQTKPVLEYYHSPSAFQFTSYQPETPAAKSLFCQQKSWGRHRLALIMSILEDGEWGQSLLNLVD

SEQ ID NO: 933767 - protein, 138 aa, Homo sapiens
MSNILTNSDGQRGVLGVGNCLSRDRGQKKAPLHVWETENKQFNVAECEIKEERRVGKYHRCASVEACLVFTFALGLQATLLGSPEQVVLEARKAEAKYDLVHNSEHLLAGKPNVKCVVMSIWKNNVEVPDVFTLPGLR

SEQ ID NO: 933768 - protein, 170 aa, Homo sapiens
MNTESSESHQLATEINFCPSVKRCQAKDKGTPGGKARSVKKRVYSKGPNIRDPGRKTCILPNYFGSFCGKSIESRGERKVVCVFPSHNSYEFQSETAAGRHPVKFSTWVFAYFSGLCFQGQWFSKPLLFLVGSVYWMLLGLPLVPAGTARGGKRASQSGRQMTFSGGGLW

SEQ ID NO: 933769 - protein, 156 aa, Homo sapiens
MGPPNLTPTPLPAPTHMHYLGAWGLSCPAHRAITNTNIHFSGPRGSSATTNCHHTHHTFFPGTEEPAHMPNPLPPILASEQATLEAQESACLDLLTLVTVDTILGETTLQYAPKIKAKGPYLTNTINASSEKFLSCESKYKKLEEVTIIANMKVSM

SEQ ID NO: 933770 - protein, 172 aa, Homo sapiens
MMLASQNDFPSNSQAPVPQVCKSLLEVHSRPCLPGYYQQRLQNSKSCCLLLPLEVSSQRDTCQMPAGTLLYEVRARELCWDIRCSLQSQQAGTFKFAEAAPTAAPSPRCSVQGDGFIYKPLTAAAASLSEMPCLLPLAGGERSLDACSPPLRGHPTLLLLALHGLHALSNHS

SEQ ID NO: 933771 - protein, 142 aa, Homo sapiens
MVYHLQTSLALPIFSIFDKMVEILGRSKSQGAKQIDEMHQKLQCLQLALVNRKGLILLHTSAQPHLAQPTLQKVNELGYKVLLHSTYSPDLSPTDYHFFKHLDNFLQGKCFHNEQNAENAFQECNVLSSTMNVASNSHGCTL

SEQ ID NO: 933772 - protein, 138 aa, Homo sapiens
METSKCPHMAEGVNTLPENSFIKVAGHREEHISGGTHGLLDMERNAPTGTGSGEATDRQNNAEFGWGNWRRAWNTEWPNSRGKPVSLLASSSTESYFYSIKPCTHSPSPRVIRFFQYTKARTPGYRKPPVLVISQGSN

SEQ ID NO: 933773 - protein, 135 aa, Homo sapiens
MSPPAGTNNSRHAALRAVTLTAKVCSFTPEPARPRTHQKEETPNTSEHQKGQTPDLLQLEGASGIYCIEARDAAKHPTMYRIAHDNNDLAENICSQQARDPGELVACPSLTASRLKTQEVLMVQFESKGMGKMMS

SEQ ID NO: 933774 - protein, 155 aa, Homo sapiens
MLMQEVGSHGLVQLHPCDFSGYSPPPGCFHGLVLSVAFPGAQCKLSMDLPLWVLEDGGPLLTAPLGSAPVGSLCGGSNPTFRFCTPLAEVLHEGSTPAANFSLDIQNIDRGHAKPLRQPDQEDADSATSACSQVAAVRFSPFLKIPFLVQLNQIM

SEQ ID NO: 933775 - protein, 146 aa, Homo sapiens
MHDTCYHLPLTGWCGGQDGENDITTSFNLHFQIDCDKIRAKPGLHKLSVASVECVTTIPLMDSSYRRRKRRRRGRRRRRRRGGGGGGEGKGKEKEKEKKKKRKKERKKKRERKKKEKERKRERKKKERKERKRKEEIRNEENRTYG

SEQ ID NO: 933776 - protein, 133 aa, Homo sapiens
MNITVHVSNNIHRLKFSPNPAGIFIYLSFTKNCECLFCLRHCSRSSGYYKTVVPNLFGTRDQFHGRRFFHGPGNIVNECGCVFLHTHAYTEMDEKKTGHSNIENSCGKTFCFRYKIHMSDFGACKNGLIIDMF

SEQ ID NO: 933777 - protein, 133 aa, Homo sapiens
MGELQGKIIFLLNYPSSSFSRVGARGCHADSPLSYLTLKPSTDSKAKGAHCNTCSLGLQGSRRTPRCCHGAANASCNQLFNQSIDQSIISQSYDANIGNPIYRSFVDADGFDVFSDQELLYLVNGNTITTNEC

SEQ ID NO: 933778 - protein, 134 aa, Homo sapiens
MYPQCSQRLTGLRLEACQGPRSHPASALAACCLGTGDHTGGGDETGQAQPWDTPVPTAPVTGCFPQPCRAACPTADSAGPGRSSQDNQSCDAGDDQKLSEICKAGRLEIQKEWGSANTDQPSDTDFGLLASRTV

SEQ ID NO: 933779 - protein, 144 aa, Homo sapiens
MVSEGAPIPMVRDSTSLVEVHPANWLLGPVAVREVLATAPPKTPAVTPQSDMVASEWGWGGTARTWPVAEESLIVRKSSWENVLRWSYFCMLEPHKVCTFCPMKAPQRVKGEAVCFHNHLYFKHFPFPVNPIVTQRIPLLIFST

SEQ ID NO: 933780 - protein, 142 aa, Homo sapiens
MAMTLKSLPPPASTFKEPCNDIGFTSIIQMISSYKVAEEEESFLLCKANPPLCPWALPHSEALFNQRLEDVLLLALEMEEEAMASRNAGGHEKLEKARRRILPLSYQKEHSLANILILTEIGPQVSAGADENPGFHTSHPGF

SEQ ID NO: 933781 - protein, 167 aa, Homo sapiens
MLNACRLYGTQPLPGPGLRMPRPLPSFPSTMKIPVDTTRGPSSRVPALLSRKWALKQTKRQVVQVTCSTQIALVEVVNAEELLDLALPPPEGPLAASSWPLPVSSPQADKSLLWDPFTTRHGSQPSDGKKNKGLVPRIHKGLLQLNNKITNNPVQKQAKNLNGQFSK

SEQ ID NO: 933782 - protein, 151 aa, Homo sapiens
MATAGHGLHTDTIGIASEADEQEVEGEGTPKGWTATGYPVGVQKVEELVGVGKIPTYSASEVLLISSSDLGTHSQRIYDLNSCSIVSGRERKETVTELETKLRQAVINFEVTDLLPSQYILTWQKEDYSQDVNGICHPLKACLELKDILPR

SEQ ID NO: 933783 - protein, 142 aa, Homo sapiens
MPVSTFGHLNPRLINPIAVEKLYLVKVMEKQRNQDHEETGVDMDRQKNTQTERDRTALIPDEETEDPQKSAIQQNMVSNEVCLMEAVQHWATSRTSSDLCLKMPEPDICIPASLANRLQAYDLEPTEPNRDLEENSIWKSMP

SEQ ID NO: 933784 - protein, 137 aa, Homo sapiens
MACHSFCLHSSGRLLGGDISQPQKHFWNWHPLGPQLCSGWGKPAWKRGRIREEDQSCKRGYKACTLRPLCQAQEYTRAEGQPYLRTINKLTPHPIIPPHSLQPVSFPNLPHSLSPGALVHQMTLLAPWYTGMINREG

SEQ ID NO: 933785 - protein, 138 aa, Homo sapiens
MCRVWASMYAWSIPGLTPREANCPNTSSSGYLYPLQFPLSLRLMRRQGHHISIPGTWMKLEAVILSRLTREQKIKHRMFSLNVRSLNSGESQLMFESKVSGDMCSECEASELFEGVSQGSEISEVFEGLFPTARVYCF

SEQ ID NO: 933786 - protein, 168 aa, Homo sapiens
MLKKNDESGHPYLVPVLREQLSTFLSSSPLQYQPPHGASLYHLLQEVCPDWSLREQTLCTKERPEKHLNKYMNLFIIEHPQCAGIIPGAEDTKMNKARPHLLRNRVWYQGSLKHIFMTVVLLWDCKGGADQQFPGKVLKGHSRREKSEILGSPEQESLLFCTRSHGLT

SEQ ID NO: 933787 - protein, 147 aa, Homo sapiens
MAAAAHLEWLLQSYGLQWGGTPQHEQPGHHEQQQKADRFQGGKARVPSEAPTSSRTGGWDASPVDQSGILWCFFCAHPWPPMDQSACTSSPLKPKKPCAQQDSRRQQGDQLWGVAAHSRVSSLLRAEHSTRPPAHGEELPSPWSSLC

SEQ ID NO: 933788 - protein, 178 aa, Homo sapiens
MFCLDDLSNIDSVVLKDPLTEAVWLLLAEKVCCTGGDPSLSRAPILSRASRLEELSPLTTVTAAAPPPGCSIPGRGQSSVHIGMAGVTKGLLSKEEEWKEVLLKEQAQSVAVGWLEFQASRSCEVLWKWDAQNDAFWPSLNSAPFFGESMDGSATLLGILGPENKTFSKQAITKGICY

SEQ ID NO: 933789 - protein, 197 aa, Homo sapiens
MGETRWVLIESGGQLPLCVSPVNEREENVGRFGTSRDLEGSDDRKMWESLELPRNLLNGFDQNANSDMHNGVQVEVVSDGDEELLGNWRTESSWRNSVRAVWKGNVRLEPPHRVPPTGTLPSGAVRRGPPSSRPQNGRSTNCLHYVPGKTTDTQCQPVKAARSGAVPCKATGAELPKAMGAHHFYQHALDGCETNGK

SEQ ID NO: 933790 - protein, 413 aa, Homo sapiens [sequence omitted]

SEQ ID NO: 933791 - protein, 141 aa, Homo sapiens
MVLHLWVQRSQELRFGNIRLDFRGCMEMPGCPGRSLLQGQSPQAEPLLGQCGRKMWSWSPHTDFPLPSGAVRRGPPSSRPQNGRSTDSLHHASGTATDTQCQPVKAARRRDVPCKATEVELTKAVGTHLLHQHALDMRKII

SEQ ID NO: 933792 - protein, 136 aa, Homo sapiens
MARKGNSLTPCASQNGRSTNSLHHLPGKAAGSQHQSVKASRRESVPCKATGAGPPKTMGTRLLHQHDLDVRPGIKGDHFAALKFDCPAIFWTCMGPVTFLFWPMSLIWNGCIYPIPGPPMYLGMFFSSPCRPVSTL

SEQ ID NO: 933793 - protein, 164 aa, Homo sapiens
MGFSFLSYCPPEAIFLQLAKPQYTFTVLLQGYIHYPALCHNRIQRDLDRFSLLQDITLAHYIDYITLLRSSEQKVANTLDLLLICFCARGWEINLTKIQGPSTSVKFVGVQWCQTCQDIPSMVKEKLLHLALPTIKKEAPCLVGLFGFWRQHITHLGVLLWPID

SEQ ID NO: 933794 - protein, 135 aa, Homo sapiens
MSLGKGTLQMELRKQGPHSYIHKKLSSTNYLSEQGNGFFLRVSRKVYGPENPLEFSLKEWYQFLLVPLVEFGCESIWSWTLFGCSSKSFSVQLCSVAARLRGRRTLRARKGNSLTPCASRVRQCLTLLPHGARTH

SEQ ID NO: 933795 - protein, 150 aa, Homo sapiens
MDGIGGHYAVQKGNVGSEPLHRVPTRAPTSGAVRRRPPPSRPQNGSSTNSLHSEPGKATDTQCQPMKAPRRGAISCKATGAELPKTMGTYLLHQRDLDQKKYLLMVTTAENALSHTKASTVLGLAQGWQQVSFRHRSFLEILSKIWSLES

SEQ ID NO: 933796 - protein, 140 aa, Homo sapiens
MLIAKKIEKLFPGHVRDLHGSFHHRPRGLGGKNGFVVCGPGPHSLVQPQDFVPTPAMAKMGQGTAQAIVSERVSPKPWQLPCGVGPAGTQKSKIEKSCCEAEQREEELARCVVKGKLILGCEIPGHADMKRLVMHDRNDN

SEQ ID NO: 933797 - protein, 146 aa, Homo sapiens
MEHEGSSCFNASQLLCSPPQSTGMPTVACHCCQRMGRSGVLFKSVSSILYRAFFSDKKLNPAMAKMGQGTAQAIVSERVSPKPWQLPCGVGPAGTQKSKIEKSCCEAEQREEELARCVVKGKLILGCEIPGHADMKRLVMHDRNDN

SEQ ID NO: 933798 - protein, 151 aa, Homo sapiens
MSSLKTKHWSRDLNEEQAMQRPERNVFEAEMWTPSQLAVSLAAAGKPRTPRKCELSGVISIEIKYRAAAGTELGTFQHESAPADPGHQCLPSRAAHLPLRGSAPSYLLRRKQGLLLPQDWSTYVLQVCLPASPSQDPCLVTSYYLIGLSIQ

SEQ ID NO: 933799 - protein, 163 aa, Homo sapiens
MFLGSPHTVKGIMYRVTKLLASHKWLTRIYLYIYIYIFIYLSIYLSIYLSIYLSIYIWHWRNDHRMSPGTHWAPCKSDLRAVHSSLSQGRSRNDIQEPSPGLGDPRTLLNSLPQCGPAGTQAARQSPVTFPSVFLKQKESLYSFCTKSSVSSSEYVGLHLKPA

SEQ ID NO: 933800 - protein, 170 aa, Homo sapiens
MSLLLGFNLILCLDGACILYRILLIACFLMYFLHTNLQLLEGLKEEEAGNPARGCQAPRLVPGPNQLLGKGPKIADGELLQAGSCQCAPAQTPSPTRVHLPTASPYCFTGKCTCVGPSTALLLPCQSVNAGTPYQEYCCKQTKNTLAPPGQQVLNLKQSQEKAMGLVPCP

SEQ ID NO: 933801 - protein, 137 aa, Homo sapiens
MVRAANEEKPSIQLHTSRPKVQAHSTDPGTESSPMNPGSRPTPTDCSTKLAPMDPGSRSRLQDKVDLGSGKLWNLGNFNKQVLGTCCTGWPEVFLVHWPQHFNGGFWPNLFFGEQLTASSGVHEVRGVYCCSDSEDT

SEQ ID NO: 933802 - protein, 145 aa, Homo sapiens
MVLAGAIDPDCFRPVRKVSISKNEMWLKQKGYLQVHLCSALMGEAPAGSVVVDEGQRKSLSKSLHKLQDCLTAEVMLHTYLTEHSFAPVPLLKKISQKKKFGGLKACHLNFLAHGKRYFSSTFVVIDTVSELFLNLCSIKEDSYI

SEQ ID NO: 933803 - protein, 145 aa, Homo sapiens
MPVSPVSGPSSAGLLKFAGGPLQPLFTWILPVEAEEQQRLLPACSSGSFIPEGHRDALPSDEESREAVWPQMLCHAVVNSAQSKPSSLLSTVRGKLPTNVSVMGDAPPPTKLNHFRSTSDCCAGSENLKPVVLSLLGSVGVGPAE

SEQ ID NO: 933804 - protein, 166 aa, Homo sapiens
MLGNCLYGDYYHSIRQKWKGQYHYEWGQCYYWEIERLLPPAKQQNKTKQQQKNTSLKFKSSMSLASEQFDLLKPSSLNSSKSFTIQPCSVAVRTLSCKSFEFCWRSNPDPVCLGISSGGCRTVDIGELQIFPLKVLSPRSTWSCEVSVHPYWGVPPSLATRGQGPT

SEQ ID NO: 933805 - protein, 220 aa, Homo sapiens
MVPTVAQFIDAMPTEMEFKGAVGLAELCWAPPSSNFLAAARLLEFAGGLLQTLFAWLSPAEPAEQQILQNSKYCCLILPVEALSQNGTRMYGVAEIPCWENHCSLQSCQTGMFKSAEVSAALCSAMPYPPEVESTEAADLAELCRAVRISPSSGTQNKRFNNSLHHAAGKAMDAYRQFINATAKAIPCRARKAELSKALGAHFLHQCGVDEQKSAQLAEL

SEQ ID NO: 933806 - protein, 161 aa, Homo sapiens [sequence omitted]

SEQ ID NO: 933807 - protein, 156 aa, Homo sapiens
MKLQEERTGSNLCCSALLLVIPRKTGSGVDLQQTPADLQQRGKTVRRKTNTQKGIARPLKDPIQRSPTSKTKAKEQNWMENEFDELTEVRFRRWVITNSSELKENVLTQWKEAKNLEKRLDELLTRITSLEKNLNDLMELKNTAQELHEVYTSINS

SEQ ID NO: 933808 - protein, 145 aa, Homo sapiens
MAPSFTARIQLFLLRALGFLIGLVGRAALVLGGPKFASKTPRPVTEPLLLLSGMQLAKLIRQRKVKCIDVVQAYINRIKDVNPMINGIVKYRGSVVAELVFVYEDIDKDLRENQNFDLVENNEFGLLLGDWRGCLWVNGGSMAGQ

SEQ ID NO: 933809 - protein, 148 aa, Homo sapiens
MLKVDPQYLLIVKVSAERSTACLMEYSLNGKTWGLVPMATLSWSCPEHQKLPGSKPSEGPSLPALHQIFLPAHTPTGDKGSPIARIPKIPGEGPSAAGLLEFAGGPLQTLFAWVSAAEAAKQRILVNSKCCCLIVPPEVLSQRSTWPC

SEQ ID NO: 933810 - protein, 169 aa, Homo sapiens
MLRGPLLSSELSDKDVWGKVTEAPLWSPLLEMHWVSPETSKTLSFNQCPQRLLPGYHLWFTPAPQNSTTSMWQIQLDCVIPPSPGWGHRCCQGPGPRFGNLRNLPGAFRSAFLHGHQCPRPVVVIACDHHQHLLKSQELLSQLVANAASHESSSGQWTPLWPMNVVYDN

SEQ ID NO: 933811 - protein, 164 aa, Homo sapiens
MNVCESFSPFLLARISQLSTQYASQNQKTLRMSAKGFSPLATGQTILQIRGGFNYKGGRTIKKSKCPTLTSFQSQGPEKENGSIWLNLKPKNFVLADFPEPSRLGEIAHLLLGKTRCLSFPGEQAKISPELHVLQDYACHLQILLTSFIASRLVTKFGSNYSWS

SEQ ID NO: 933812 - protein, 150 aa, Homo sapiens
MNTSTYSGEEEMTPDRKFMEKVCNYKCGLRRLSHKKEQNNDLHNNLDEIADHYFELSNSGMENQTLYVLTHNSLFGATPSYKFHLPQQSYTLFIPSHIIRSLKPKHALLKFHQRQKSTSYELNVCIHLKVHMLKVLPLKVMVLGGTTFER

SEQ ID NO: 933813 - protein, 212 aa, Homo sapiens
MGFAGYSPPGIQASPDLLEIRRSLALKRQFVTYSSQEVGACHTMQKGHMEKYQSWGRKQEEYEKNEGPVGPAKKTGLLGFYPSFNQSTNTCFHFTCWNQGFLSEVILGLWIEEEKITRAGADGQSKGDLAVTLSSFVYNSCSPWSQRSLIVDFDHIHTSSSQDTILQSSLELQMATEPNDDDNYLSDDSVNDDNDDTVADGDYDDDSKTCQL

SEQ ID NO: 933814 - protein, 160 aa, Homo sapiens
MPLSPIPSSEEAGIEIAVGLLQICTDWTPVTPGKEGRGEEGMSANGYEVSFKSDENHLKLHITDVCTTIDHGPTDVAKHLIMHKTVPIAKSYQALNINTAMAERHCLSLGYRENISGRGKTLYRELTLLENPKQIIETEVWTIGVKQSFENTSSLLTPPL

SEQ ID NO: 933815 - protein, 168 aa, Homo sapiens
MKWNTLHNHYLLMAERLSQIQLQVQDPFPSYVGVAFESLRTYGLQGGEKVTILVKDINKTFSDKMSNYWKPTVQHEDKREVHKSQCDTTQAKCEMLTKMIKESELGLELLGHNSETKSINTILLSENEIPFVKETIFVEEITGNTTSSRSDSFLEYVMALKEREKRTY

SEQ ID NO: 933816 - protein, 181 aa, Homo sapiens
MKKETQELKKNLKERLKKKEQVKSQWCQVPDTRRINGIASVKGFRLLTGSSPASLKDFSSEASDNGPFTSLVMWLLELLTYSHWQLCGLPCGEIKAEGEQKKIVVRSKHRENLADMHGPKSSRLQGSVGVLNMDPGDRKILALQKRDVEDLYGQKCVCISHIKQEVDRSLGRHLEVEEEYI

SEQ ID NO: 933817 - protein, 148 aa, Homo sapiens
MEKPQTSDSNPQELMCWLSPGKPWEWHFSRLWGPNPHTSVPKITTLLFDSSSAYLSSFPIFSDTHYPCKHAQVTKRRPVWLEYNGNGEKIRSDESSSKKLRSSSIFIPVQVGAKTIQEAEQERKNTQGERIASASLCLHVSHLFEDLF

SEQ ID NO: 933818 - protein, 241 aa, Homo sapiens
MGRAQGTIHSEIFFSSCKPGKSNYVLPKFDGGTGITLAFLFQKGEIGKKEGTSLITLLQRESVSCIPPQPATGCASFPAEAQLLGYFSGAAVRQSGGQGSDALPWGRAAYGGRKQRQWRHSEVLDGGSSEEYQGGKRHDQKSPSLVPPPLEVSKVKALVICPGLEAPESVRVTDEKVETPGHWDHPCESCLPQEEMSHDLTAWPTFVLLKYIPLLTPRMILRSRGEIKVKEFKAVKQSVWK

SEQ ID NO: 933819 - protein, 134 aa, Homo sapiens
MFLLYSNTITINTDFSVTKYAEKFSPRSKQQTPDYLFPTSCKSEPMNGISALANQAPESCLALFSCKTSEKVSSMSQKMDPHQIPNLPMTWCLTSQPQNNKKVSKIYSVLECNDLKKALNFAATRFSKVLKKDI

SEQ ID NO: 933820 - protein, 136 aa, Homo sapiens
MCPTSAFRLGSKLRDVAWKRIWWSVENQCIWFTWNLELHIFSIRKACIASITGEKADNPTTSSSQGGGQRAQRSRRLKFIFCIQIILAFDHLNSPEDGANNILPITNPSATITAITATSRIFFYMWTLNKSNLWKQ

SEQ ID NO: 933821 - protein, 184 aa, Homo sapiens
MQCIEKPGSGLLDTKIFPLSCYRYCLHFAETQGRSKIWKPTNECCWSRRGWVRVKAEGHDAGDGVILDLYAKQYCAYSSYWCMLYLTHQIKTYYCASSFRFSEKVPSMKNRLSPDTESMDTLILDFSVSELKQENGHTLACKLYSFIASDKEQTLEEVKPVIDRALPLTVPMSPKECSTSLKAY

SEQ ID NO: 933822 - protein, 153 aa, Homo sapiens
MEYHAAIKRNKTMSFSGTWMEPEVIILSKLTQEQKTKHHMFSLINGSQPLEGKIQWRESHESDIQGPKCHAEGSEFIQWTKRNGEVLSKTGTDCALSVREHYAGYWQCYRELVGRTVTEARRPWRETSVVSREIETTATDSEDHLVLETSGLE

SEQ ID NO: 933823 - protein, 148 aa, Homo sapiens
MGLCSGSDSFLCPERPFSLSFTTCLYCPDLYPIPYSWLMVWFSRTVVLSHSYFCPHPRGLWQCLETFLVVTTKVMVLLAFNRWRLQMLLNILQCVGQSRQQRVIWVKMSIVQKSRNPALPLLLLVCSADQQHLHHLFVKDQIVVDICN

SEQ ID NO: 933824 - protein, 160 aa, Homo sapiens
MEMSTGNSPGYSSAGGKNWMDPGYIWDLGFTGDFVDSIKSNTSKWAATSFEELLLGFLALSHIQQVLADPTNIHEHQPCAGLKVGTRGMGAVLHGDCHPGSRGGNAGRKGDILHACPQNTSWSKCCDNSTTKANRKLKGAIEFLRRIETDLGRLPGGGGI

SEQ ID NO: 933825 - protein, 135 aa, Homo sapiens
MRFVGTCCEQRSRRGLRALELFHLQNGAEAAGDCPGGRDPALGTLPHDAGNICERVQRSWPAAASISETYSKAQAPPLDFTKKSGRWRSVGSQMQSRQYSKYTVRCSAFVSGLCEIVRRSSISAKCQHVLNTEAR

SEQ ID NO: 933826 - protein, 192 aa, Homo sapiens
MWEKILETMAGYSSYPEEPNGYEEGVGEEGVANQKCFSKIPEQEQKLWVSCTELLVNRISESQIIHIFDLIDILKSFYNVSNLQSDYSCMRGPDFKGLFVELPSSSLLFIELPSSSLVPSNSLLYIAQVTTKIHSRSNHILALNLSMDFHCDFQQDRNDSLGPEFAPEPQLLLSLHLTRPTLNITTNASESS

SEQ ID NO: 933827 - protein, 275 aa, Homo sapiens
MTWQLAVRGEWLQQRRKMGWFSSEEKLNLKNVQRNLILLHPQLLLLVDQIHLGEESPLETAASFFHNVDVPFEETVVDGVHGAFIRVTIDVQSFTIHRDSQQLDVFIATREHAYAMYLWTGEAAGQSAFAQVIADHHKILFDQNSAIKSSIVPEVKDYAAIVEQNLQHFKPVKTADRLLRFSDKRQAEEAIDRIFAVTQQQQQQSKSKKNRRAGECYKSVDAVPDIFAQIEVNEKKIRQKAQIQAQKELPINEDEEMKNLLDFADITYEKHKNGA

SEQ ID NO: 933828 - protein, 151 aa, Homo sapiens
MLNAAGKRKHGKSLNHRQSFCLKVTQATPFHVQLPKPCDMGTHNFKGSGSISMREFLPGSFLDLNVILFEYNPVMLTGVFQFLNIPSRLQFFVNILTEEMQGADDMNVVEDSDRKSETVQKPELAKAISISMAKSKPELADKKSKYFYFHY

SEQ ID NO: 933829 - protein, 159 aa, Homo sapiens
MACFSDLIFLAFLPVVNHFLLLSPQCSAAVHYHISFSFLAFRVQEPLYPHPHPAQYKVNMVDEAKLLSPIHSTFEALVVGHAVTCCREELGPFCRPMRAAGIAVFGHEDVSSFQCSETDQQIKKRKPDCGNMEDYGTVGECHDPCEPTAGPEVEPQSLH

SEQ ID NO: 933830 - protein, 129 aa, Homo sapiens
MWAFHRGEEQFPDQYKARKFTHATFIQCSTRSPTREIRSKKKEEEEEEEEEEEEEEEEEEEEEEEEEEEEEEEEKEEEEEEEEDEDEDEEEEEEEEEEEEEEEEEEEEEEEEEIKGIQRGKEEVISNCR

SEQ ID NO: 933831 - protein, 155 aa, Homo sapiens
MGMGSRKSHHSWSRGWLSDLIILGFRVKKDITKSQEFIYRKEYEGPPVTHAVGLRQITAQRQMDLQLSTIIAISKLKGKSIGDVSDATGLAERPSGSIHLAQRFLLLFSPDFNRSSSLSAGADMQGGISTKCLIQSSNGILCTEEIKDLLQHLKE

SEQ ID NO: 933832 - protein, 189 aa, Homo sapiens
MALPFVLLMALVVLNCKSICSLGCDLPQTHSLSNRRTLMIMAQMGRISPFSCLKDRHDFGFPQEEFDGNQFQKAQAISVLHEMIQQTFNLFSTKDSSATWDETLLDKFYTELYQQLNDLEACMMQEVGVEDTPLMNVDSILTVRKYFQRITLYLTEKKYSPCAWEVVRAEIMRSFSLSANLQERLRRKE

SEQ ID NO: 933833 - protein, 189 aa, Homo sapiens
MALPFALLMALVVLSCKSSCSLDCDLPQTHSLGHRRTMMLLAQMRRISLFSCLKDRHDFRFPQEEFDGNQFQKAEAISVLHEVIQQTFNLFSTKDSSVAWDERLLDKLYTELYQQLNDLEACVMQEVWVGGTPLMNEDSILAVRKYFQRITLYLTEKKYSPCAWEVVRAEIMRSFSSSRNLQERLRRKE

SEQ ID NO: 933834 - protein, 189 aa, Homo sapiens
MASPFALLMALVVLSCKSSCSLGCDLPETHSLDNRRTLMLLAQMSRISPSSCLMDRHDFGFPQEEFDGNQFQKAPAISVLHELIQQIFNLFTTKDSSAAWDEDLLDKFCTELYQQLNDLEACVMQEERVGETPLMNADSILAVKKYFRRITLYLTEKKYSPCAWEVVRAEIMRSLSLSTNLQERLRRKE

SEQ ID NO: 933835 - protein, 188 aa, Homo sapiens; identical to SEQ ID NO: 881233

SEQ ID NO: 933836 - protein, 269 aa, Homo sapiens
MLMLCPLRDIWTNQPYRLMPSDSYVTEDFGEVTITSLHSIYLHPCRQTGLTIFLALCLLDTYYQQNVCKLHPELSHDDLANVTHALVTTRPDNCNFLCFSSELFCCLQQAQHARVQLLPDAQDTCPPSFTTNDIIGPYPDSPNDSLEVSPCAFILSELMGIPFKERCVASSAKRRHTCGLVQGELSQESGEQSFIPIIATRDLGSTMAHALLSCFPPCFSAAYSSKKTKPLPESGYLLHIFWTSSPNWLGIGNSGEVVETLRYVQILIH

SEQ ID NO: 933837 - protein, 236 aa, Homo sapiens
MFSRLLPIVACFSASSLFMRIFLDNEGKGVLAKYAQILMIIPNPAEYDALAPPQPRRVATLEEPYSPLLHCGSPSLGWLRPEMAPFVGRCGGRGTGGNRGCALYSRASVSSGWVRAPQALCPALLALGSEGLSTWASSCRGYAGSPSTGDPPTPRLNSHRASAASPTGQGSGHAACHAQTPTTPPHPHCGISCGWSLPAAHYSARLGPIDHPRAGECRRAAQDWRAALPTARCGIH

SEQ ID NO: 933838 - protein, 140 aa, Homo sapiens
MMFLAAQSVVHRPVALAASGCLLEKLVLDPTPGLLYQKLHFSKVPRHGNHPISQSFPHLSRLSIPQNRHCHHSRFSMSCWAHLPDGVVAGQRGSSHPSRGGRAEAPLTSRTGRLAGRGADPPTSLSDGAAGRAEGLLTSQ

SEQ ID NO: 933839 - protein, 150 aa, Homo sapiens
MGEGIGMVYKSRTRLGICVGAFFTHTDENYTHLNAKKPLRISCAIGHILLLLKCFIQLIHFDHNTTLKDFQLPDLEDGMGGMWPNKEELPVIVFEGMVNRRIDDVFWSLPYASLALTLFRIPRADSFWMSKLCVLSSINSNLGLEELELI

SEQ ID NO: 933840 - protein, 138 aa, Homo sapiens
MRRINFPNFKLVGLGLGSGEGNPEAQHTSKRATSRVIIRGSTSIIALNWLLSTSNGSHYTPHLQGSRLPWASHFAQHSFAFLPSCEEETFAIIVSSLRPLQPRRTFHSIVIPCKTVVQYHNLDIDLDTVKTQNISINM

SEQ ID NO: 933841 - protein, 149 aa, Homo sapiens
MQRWPLFPQCSRHLHSGYARWAATAIKRTYNITKAPALYSQNLGSTIIDLLNGFGQNADSDMDSEIQVEVFSVGDKELVWNWSKGDPSTPAAAKRDQGAAQAVASMGAILKHCQLPHGVGLFAFSGMSHNWHHGERDFSDLLLSLRNMR

SEQ ID NO: 933842 - protein, 153 aa, Homo sapiens
MSALMVTPPNLEAQPATLSNCRTQKAVPHGLEIYSVAWPEQRQSQCPASSLARLQNTSSILIRQWKPANNAIQTQSQGSGPVIQRIRKQTLLAWDWYQLVHLEPQARLCKRRSNPAQEQEKVEKVAVCSNVWRATKRHKDYEESGNNDTSKRN

SEQ ID NO: 933843 - protein, 151 aa, Homo sapiens
MFPSLCPRVLIVRLILCPHKVANPPGTRSIPSGLWTPFLPRMGLETPSRGKNLESGSSGICLLLYFTVAEHVPKLQDKILCTSLFLTSKRSLPLRCTAWRAEDSCLAQAVLKAPSMGISRIVSCVVFGCDSTALSSNTRFHACFSLPPPST

SEQ ID NO: 933844 - protein, 148 aa, Homo sapiens
MVNKLFDVLLDLVCQCFIEDFHIDAPFLQVCCSSLEVHPRPCLAWVSPAEAAEQQRQLPAPSPGSFVPEVHWPDASHRSPMRCLDALPNEEKCREAVWPQPLSRTLLISTQSQLPGLFSMNKCIDTPDSPLMRGKEFSDSTHSTFNHM

SEQ ID NO: 933845 - protein, 184 aa, Homo sapiens
MVELVYSPTNSVPAQRFWADCLEESVGRLAAEVLGQCGLVPEYTRMDVHPGSAKAGGRGNYLGGRGWCGNGMGLEPGSVRASRKPESKCQHSWCFSASADLEVCHPAELPGFGLVLESVCKESCDVIHLQILQPWLPAPAPVEGACWDDPGPSKGLWMILASWYVPVVVLEAKIHDDFQYHAEQ

SEQ ID NO: 933846 - protein, 206 aa, Homo sapiens
MRAFGGPSAAGLLDFAGGPLQIVFAWVSAAEAAEQRILLNSKCCCLIVMPMQEVDSHSLGQLHPCDFAGYSPLTAVFMGWCLVFAAFPGAQCKLSVDLEFWVLEDGGLLLTAPLGSSPVGTLCGGSNPTFPFHTALAEEVPNFPTSSCLPRPPSLYGKLQIFSHFPVFWALQIVPTSASHPVPKLLPHFQNSAVNPSGPGLFLVGS

SEQ ID NO: 933847 - protein, 150 aa, Homo sapiens
MSLVVSLISPNASTWIFQLKVLYGGLPLVRVSQPLCLPTQASVMAVAPLPARLLSHISISDCCASSVQGSMGMGATKPGTGENHLVYWFIRPWEKHSIWAAVPVFPGSLSLFPLARKGKSPTPCTSKLPPTPKQKYEVCVLGEHVRYQTC

SEQ ID NO: 933848 - protein, 130 aa, Homo sapiens
MEIILDYPVGTNLILFIFKSREPFQAVIREGTTEEGSGRWRLLALKTKEREVNNRAKDYTDPLEVEKGGNEFTFRAYRKECRSADILILAQHNIKVKDNRNNEVEISMKSQFKSESDRMDKAPKDSKKFK

SEQ ID NO: 933849 - protein, 159 aa, Homo sapiens
MGVVMYQGGFGKGNICAGKQECMFSLRAMGPGINKILKDKDIGLELVQQHDESMDSSVDKVGVIMPSLVTQGLGLIQQTQRPAPPQSITVDPSTRPILVPVQSQKTHAQGSPQSQASLCEPGSKPATRDTGSGSVHLLTQGLLKDISSKHSLGWCQMAC

SEQ ID NO: 933850 - protein, 165 aa, Homo sapiens
MLFYVCSTIVFSEQVSCFISQVPKASLTPNLDDIDNEFWNCCLDDLVLHQVDAVIGGEFQEPRVEIDCKNKLPILRGPTGPLKEADCSCRTQETPQIPGEAESVRLQETFPTLPGAESRWRAELSKIQGVEEAAGRPWKLAESPGSPFLPGTTGIHQEGGQRSIR

SEQ ID NO: 933851 - protein, 183 aa, Homo sapiens
MMIKGVGCGLENSHVKTHHLKVLSAQSQGSRPFASAAKASKIAEAGREPAGKHIPWLEDIPLKFEKEAVRVRHSSHVRLQHFLFTEDYKTPVPSSVGADAILGFSRPAPRRSLKRHVAPHCLVLSLGVLPGFKLIKEPFTSYMYCFMYQRVTSFSLKCIKSSCNPTTSGTCSQSLWRLCFWPW

SEQ ID NO: 933852 - protein, 152 aa, Homo sapiens
MIPISFLYTLLRFQDQLNHTSISDPIHISPFPPPPEQAWCEIGRQGWEGRLGLILLLMLSLRSSSSTILWWVLAYQASSYVGKPEGGSDNAISMSLAIAQAKQVVQQIGHNVGVRKDSAKTKTKTKTTQPPENIVYKAIYRQSTINRQIDNR

SEQ ID NO: 933853 - protein, 182 aa, Homo sapiens
MMKAFKKKSNQTDQIDSRENIAFSDTEEFKKFNCQVIGASVDSHFCQLAWIHTPKKQGGLGPRNIPLASDPKCTIAQDYGILKAEEGISFRGLFIVDDMGILRQITVNDLPVDCSVDETLRLVQAFQFTDKHREVCPAGWKPGSDTIKTDVQKSKEYLSKQDQNSCLGHVVTSQVYINSYQM

SEQ ID NO: 933854 - protein, 147 aa, Homo sapiens
MQKSAVLCVTHAGSSRLELFLFGHLGSTPIRIAPIITTKIIYGRIQSIQGKIPKEIAIRCSPKPKPKPTKKEEKVIAEAGEISSSVLKGELDSTCQITPHVNPTLVHVHKFPIGYLVSVSGRKGYAAVKNAMFWLSQFQFETKASWQ

SEQ ID NO: 933855 - protein, 185 aa, Homo sapiens
MRCYQKIEESGRISHTRERTFQKWKKEQFEQRLEDRIVPKVPPVRLCPQETVEGDSKNEGERRDLFLPVCFLWASAAIKLHSLPLPAAVCIQDWLADLYLRERKEREGKIETEGYQGQEFYTGLNNWPPHGFHLANTCSVALMPTTGPYGSIQWPKKSLYRSATEDGGFEMASEWLSDNFSSTDQ

SEQ ID NO: 933856 - protein, 140 aa, Homo sapiens
MDNEEIGHHGGPFDALSKDLGAEADAPGFGRKAALIGVQPSSRQSTALERDKQKRVSYSSAPAPAFIFGFLALMFTETSAGSGKPLKAPLQCSSANASHLSTGACQLNPCYIEETQEARAGARAGGNCYKHFTSNAKSSK

SEQ ID NO: 933857 - protein, 147 aa, Homo sapiens
MGFSSGDDRDWFATCVHSFLQGILMRKVKASCLEAANFQRSLRSLESEKSSLTIPFKFFITFTAMIPVLIAGPKYLLLVSGMHIWRQISSQIVFIKLYGKNPGMEISDCVPLTQNGTKFNIGLTGHLLFNDVKVPVKIMAHETLKYT

SEQ ID NO: 933858 - protein, 146 aa, Homo sapiens
MSVGSPVSCQVSAGGCERGDDPCRRCSSNTEAMQEMGSGRIAAAAELPPTGKISTTQGSTWQREHSCDSAGYGSPRWHFLPIEGCFIYIKNLLSVTSFINNVSKIFWITCCSFYTSTCCFTLYFYVMKIASFLKPASFVKPHEPIC

SEQ ID NO: 933859 - protein, 144 aa, Homo sapiens
MGVGMAKDSMSPLVDCVLDPEHMVFICPLDTNKHRAPYQEDRHNSRISRAAPLKETERGRGVIFWEEKIVKCCDQNTDRNADSEVQANEISDGIEEVIGSWSKGHPCYALAKNLATFCPHPTTLWKAELKNDDLGYLVGEISKQ

SEQ ID NO: 933860 - protein, 158 aa, Homo sapiens
MLKSEGPEKVEGRKMLPRARSIKQWENVFAFYSMETENLVTQRKEMVRTKAEELKTVRATGPPLPGRFACQPPDVTSLGYILHTITQGIGEKVFLPRPHDWHSLPWPFYLSPVLALPHPALALSRAEVCLRALLFLLLCEGISGYKLYTDEVNIVLLL

SEQ ID NO: 933861 - protein, 133 aa, Homo sapiens
MSMQRHKNDIMDFGDSVERTGWGQKAYKLEAPDTIGIMYGSSSKFKNMEAVGRRGKKDPRTDQSPHAIASLHLVLRLSSITTMPKRKPEGDATGDKAKLQRRSARLSAKPAPSKPERKPKKPSLPLQRREKRC

SEQ ID NO: 933862 - protein, 152 aa, Homo sapiens [sequence omitted]

SEQ ID NO: 933863 - protein, 170 aa, Homo sapiens
MQNLAPPHRTPSIPPPPATSVAKECSKIIEFGSPIAGPLGDSQVGGMVRRAQVHSAACGACPPCRWLFLHISSRGSQMTVIENPRGSQEISLHFSCSVVSLVIRVFFCISVAFSLALSKLAISSRSSLCAIFLPTFPFALRILSSGACGCSHSYMGCEHRSQTVVARRLI

SEQ ID NO: 933864 - protein, 337 aa, Homo sapiens
MELNLAQARTIEGVEEKQQQLPAAKRKLIYEKVKHYHKEYRQMYRTEIRMVRMARKAGNVYVPAEPKLVFVIRFRGIKGVSTKVRKVLQLLCLHQIFNGTFVKLNRASTNMLWIVEPYIAWRYPNLKSVNELIYQRGYGKISKKQIALIENALIAQSLGKYGTICLEDLIHETYTVGKCFKEANSFLWPFKLSSPRSGMKKLTIYFVENVQMCPEFLPSGGFVVSLTSGVKLQTFAVSVTALKGSASGVVFSFPWVHGLASLRSEAADLRGSCWFLPSGVVRPSQWVRGLAGFKSKAADLHRKVLHLIKAAWTQRVSSSKIYCERPKNKPSTAWEKT

SEQ ID NO: 933865 - protein, 136 aa, Homo sapiens
MPLHSSLGDRAFTELGEAHSHWGDQSSLLRLQIQLLIFIRKHSHRHIQRNYDKYLDLTKLDGPGAFSWESNLSVEGVILTKEQGRSVWASHTQRLQGGWQVMLRESRRCTCRCTEWGLAGLRGGAGSHHPGACRPH

SEQ ID NO: 933866 - protein, 157 aa, Homo sapiens
MGVGCYLSSSRLYPQHPEQCLAHLSQQRDLSGNTFKSWKVDTRLMGLTCGLRVSDLAQQLLLGSEECHFCMDDLFYYFLSTFTTILDTDNKVQAEVVSDGDEELFGKWSKGHSCYAKRLAAFCPYPRDLWNFELGRDNLGYLAEEMFKQQTPTGSRA

SEQ ID NO: 933867 - protein, 159 aa, Homo sapiens
MRGEGGKCEKTVDVKKSKFCEADVSSDLRKEVENHYTLSLPEDFYHFWKFCEELDSEKPAGKWMPYPLPLSPCNAKNQVLGSQLQLLQNYQMPLQQCSLMEIVEAQPPPGISSASEISNYCSCLEEARSHVEPGLKSSMGNAANFHGVRGVFCKGANTS

SEQ ID NO: 933868 - protein, 380 aa, Homo sapiens
MCTPRFHLGCQCILPGFIWAVSVYSLVSFGLTMCTPWFHWAKRRTLHKKSRDMEIKNYSSSTSGFILLGLSSNPQLQKPLFAIFLIMYLLAAVGNVLIIPAIYSDPRLHTPMYFFLSNLSFMDICFTTVIVPKMLVNFLSETKVISYVGCLAQMYFFMAFGNTDSYLLASMAIDRLVAICNPLHYDVVMKPRHCLLMLLGSCSISHLHSLFRVLLMSRLSFCASHIIKHFFCDTQPVLKLSCSDTSSSQMVVMTETLAVIVTPFLCIIFSYLRIMVTVLRIPSAAGKWKAFSTCGSHLTAVALFYGSIIYVYFRPLSMYSVVRDRVATVMYTVVTPMLNPFIYSLRNKDMKRGLKKLQDRIYRNGILKDGLNFERGSFKR

SEQ ID NO: 933869 - protein, 135 aa, Homo sapiens
MAMYRWGLGHRKIDQKVQGVPIPLAPTHAVSPTINARHQSDAFVTIDELILTHHYHRSLHQDLLLNVNKVATWRRLPDRSCGLHQMDTGVKYSILKNIGFYPTRQLENVHILTNLNKLQETYLWDHLAGKNFLEM

SEQ ID NO: 933870 - protein, 514 aa, Homo sapiens
MIGLLLGRSSLNLKGVQVQTGVIDSDYNAEIQIVLSTSLPWKAEPGEHIGQLLIVPYVEMGKSEIKQEDLEAQIKQSSLLGHQHQRPKVDKTTKLGKKQSRKAENSKNQSTSSPPKDHSSSPAREQNWMENEFDKLTEVSFRRQANAERFYYHQPCLTRAPQGSTKHGSSYPISPDFYKLIENKSTNIALLVFLAARGCVGDQILDQSDAPPYFESRHSSEKNKKGTVLSGSGNNQFIDLQELCPVTTAGSIGGGDPEDHQDDAGIGGSNEGQSSTDYNSTFCVNHKGVEKLLKAYTGIVGGVQKLLCSGVQAPKSRYLPFSCTGPGSPNPPQAASVIMSCFDSSVELTTQRRQRKFPRIEERKASGRGCRGRATRLLVVLLLFRGRRTCLGKVLAADDGQCNVKVGHKDADKGRNQQCSCHKDEHQIIDTSTGAGQLQEWDQITEEEKPKQKSLLLLVFREAHEKKFIDAGAPHRIGGPHRCSSQMLLTQRCSSLTGASPVSLASPGPLDLKT

SEQ ID NO: 933871 - protein, 209 aa, Homo sapiens
MLFWLFSEFNFLKIPQITTTVIAQWAHEQNGHGGRDGGYVWVQQHVLPLTRADLATATFECPVCQQQRPTLSPPMAPFPRVISQLLGGNIHGERIRLKQFLENEKVEKINLSKKEETQTGNDCDLRDTGRIVGSSSMDEVHQHLGDNACCKANISERQKTQEEIHRGLKMGVEANGQDDEQVPCYGDQGFAALKACGVEGLQIKLNESK

SEQ ID NO: 933872 - protein, 280 aa, Homo sapiens [sequence omitted]

SEQ ID NO: 933873 - protein, 311 aa, Homo sapiens
MENQSSISEFFLRGISAPPEQQQSLFGIFLCMYLVTLTGNLLIILAIGSDLHLHTPMYFFLANLSFVDMGLTSSTVTKMLVNIQTRHHTISYTGCLTQMYFFLMFGDLDSFFLAAMAYDRYVAICHPLCYSTVMRPQVCALMLALCWVLTNIVALTHTFLMARLSFCVTGEIAHFFCDITPVLKLSCSDTHINEMMVFVLGGTVLIVPFLCIVTSYIHIVPAILRVRTRGGVGKAFSTCSSHLCVVCVFYGTLFSAYLCPPSIASEEKDIAAAAMYTIVTPMLNPFIYSLRNKDMKGALKRLFSHRSIVSS

SEQ ID NO: 933874 - protein, 173 aa, Homo sapiens
MRQVDITDNCDSVWMEGKAKYILPTETIYVGEMKDGMFHGEGTLYFPSGSQYDAIWENGLAIKGTYTFSDGLHYDEKNWHYCDGYDRRFYTEILNGLKPAGMAQLTNMDPPRKIPKGYYDCGDGFYNPVTRVVKDYRNRFLRNAGRFLPTLQHVFSSPTYEYVHLYVQMYAHT

SEQ ID NO: 933875 - protein, 144 aa, Homo sapiens
MSGEDVWRGISLEPESQGDVWRGIQEAVEIRPGDIHLGVGRLRLVLSLPAVWILACLWDLEEPGAWSCQLVWALQAPGSLEAMGGAGAGLVGVAPAGVVVPSGICAFHGRGAAGMLLNTLPCTGHPCSTDVSNPECPGVDVEKP

SEQ ID NO: 933876 - protein, 147 aa, Homo sapiens; identical to SEQ ID NO: 744833

SEQ ID NO: 933877 - protein, 155 aa, Homo sapiens
MVPSGGAGGPENPNILEKLRDEGGGHWVRGSWIGPFRSAPVSRGALENALAGSQGLSNALLWLVSPAGERYPASGQIPGAPGGRLRASQALPAAAARAQFRKSQVSSGAQAEASSKRSGDHAGFLPFSADLRSQVAEEHGGGRQLKRAVGRLGKV

SEQ ID NO: 933878 - protein, 138 aa, Homo sapiens
MWLAVKVTLARHMWYQKEERRVAGNKEKLHGLEPSLSLSFCSDKDVDKNQNWSQGRRPGCRDMDRGVTSEGVEGINGDASAMVAIIYSEENRGYGETPDLVTLGPAGALPQAASGAWESFFTSLASISLSVGRKSWAR

SEQ ID NO: 933879 - protein, 175 aa, Homo sapiens
MSAHHNSYVPGSIADLVKPDIPEAVEHQDVLSGLNPSVFLDGESQDVKSIPGKDGKQPQDGVELGLQVPTGSIGLRKEGERRPRRTTEDFACKGSTVSDMKALESDLFQNLVFLDVIMVTQKNTDVCIPFTLSYQLAEFLEKSDNNDIVVLYLTLEFHKHYILSSHQLCEVWLNR

SEQ ID NO: 933880 - protein, 141 aa, Homo sapiens
MKGPPLTHYLDNVEKENLIKCGPRKKLSPGKSSWFFDVYQEWTRSLEKCTCAHQQSDRSFLFLLGAEMQDFLLMIINVECTISGSQPLQLALLGSSWYDPKLLGRTGASGPSEATDFYALPWKTPSVCAVVYRQFPAYCWR

SEQ ID NO: 933881 - protein, 184 aa, Homo sapiens
MGAAHQHNTSLPTLAIFRLISDSHSDREPNTHGPGVGEIEEQDPAIANRATWLVSGPCQQSEAADQQQISSKLCELQQCLVYHSVLLSTREYGCLTSAFQICNTPQGPFDCPLWLLHLASSMNRQQATLTAKQKGGFMAMSSFSGTSDAAAKQVGCKGEAAVGSHAPSKLRRIQSQEMDQKDLW

SEQ ID NO: 933882 - protein, 186 aa, Homo sapiens
MHKPAGDSPATPAPCSENLQRNDAVEKKNPFFEEKFKPAAEICISNRSPMLIPKTMGKMSPGHVRGLHGSPSHHRPKNLGGENGFAGKAQGPHAVVVRKGNVGLEPPHRVPARAPPSGAVRRGPPSSRTQNGRSADKLAPCAWKSHGHSTPACESSWEGGCTLQNHRVELPKTMGTHLLHQCDLDV

SEQ ID NO: 933883 - protein, 143 aa, Homo sapiens
MVSTHVAEATIDILHRTRKRFLNSYGIKKAKAILSKKNKAGVINAKGFQTILQGYSNPNSMVEDIGTGKDFMTKTPKTIATKANIDKWDLIKLKSFCTAKETINRVNRQPTEWEKTFANYASDKSLISSINKELKFTRKEQPY

SEQ ID NO: 933884 - protein, 178 aa, Homo sapiens
MIFFFRWLQKGLINCQTLFYHREGAADLVAGTLEPLQQQRPCQSNLLAALRDQLFQRQSWDTPLERALRSPGWQGAGRNSLVISDDFTFEPSRSWSYVCKLPKHEDQVLGLPQLMFFADCCLQAIELSLKNGELKSWTMKSKTPARIISRIYSRSLLNHRMETSMQEKEGQIIGRWET

SEQ ID NO: 933885 - protein, 159 aa, Homo sapiens
MRNLKASLGNSLREVEACYTVKMEQLDGIVPHLESELAQTWAEEQCQAQQYEALMNIKVKLEAEITTYCCLLKDGEDVNLGDTLDSSNSMQTIQKTTTCQTVDGKVVSETKDTKVLRHYTSRNYNCMAQERRNGKETGSDSYSGEPLEAEDAKALALNI

SEQ ID NO: 933886 - protein, 160 aa, Homo sapiens
MNMRSDLDNSKFSRILGMDDQVAQRHIINSLVHRAVHETQSGQCVKSRNKKEIVGRTPTVRIEYKELLSDVKLKRASEEMSCKTYSQEGRVKGVTIPKNPDSCPQEKDAIPKMVPIKAIYYTNYTHNPVRERRERDMKMASGQASQTSSAVNSPYAIPNP

SEQ ID NO: 933887 - protein, 141 aa, Homo sapiens
MVLGDVTLGHMITLSQFSLPDWYQEVLCSPFVSPTLTLCSFHPDAPPWMRSQILSKYSDHCRGAVTQLDQFLLCQHPSAFAWGFVEASHEKHVGFILFPISEDDKSEGIPLIILGLRTFLVCLLGSQCGSLYQNMKIAHKL

SEQ ID NO: 933888 - protein, 159 aa, Homo sapiens
MPGINIKINYKEILIGQNRRNGKQEEEGKMSLKTLCQAHYRDAVTHNLLSYDHPLTFSSEDTTILMIEEYKSVSSSEFHNQLPEGNIISGIGEGKGRTATGIFLSKYNIDKWQFSYQNGAAFIAHHLSHVTKAWEVQAISECSEFFGDSTDYIIQYLWK

SEQ ID NO: 933889 - protein, 124 aa, Homo sapiens
MVGASGFVTVNPGEDKGKELYFLVCRGHGGLMTLTGQSRKGLKFWLQLKECLGSRAQMGKLERRRDMPKRLRGKLRTGIDVIKLKEIQFRVDHRFSALFNTLSYQDFDSKFRDVWSCTELLNFL

SEQ ID NO: 933890 - protein, 193 aa, Homo sapiens
MAADLTSVTLPYFAFDLPINVQPECLALETVTASVDNSTLGPGGIMRPGAPKHGENIGVSMSLQFHIKNTENYTRMEGNNQHQPVPPFGQVAWGSPAHTTLVVATNTSTILACSTFMPNTWHAPLQNPGVALGRGNHIPIVGAPRGSFFHQSMVGPPGQNTGSASTVNSTIAIMRGLHVPSQQPSSQGHLDND

SEQ ID NO: 933891 - protein, 153 aa, Homo sapiens
MPVPWEEATGWGGKETELPTADQTRASGWDTGILSESQQEIRAGAEEVGEAAEKVAAFGEDLFCLLIGICMGLLACVHHSHNPLGFGEQTFLQLCELEVIFVESGWEIEENNLWGAFSGSRSSALVTRMHFFAVVTASINVLLILKRGKINFK

SEQ ID NO: 933892 - protein, 144 aa, Homo sapiens
MLIGTQSPEEAKQQGAAMSTLAQVHTHPARLQQCLGLTSTLLCTRVGLEQGETREWKHALLSSQRQGGILGPQELGDAQVPSCGCTAEAVPGSAELLSHQLSRGCSAASSWSHQFHRAHSPGNTSPAAAGIFAAATPDGQLLPS

SEQ ID NO: 933893 - protein, 159 aa, Homo sapiens
MWVLWELEFKMGFGWKHSQTISEYPFLNARRRPLESRFSELYQLQAYDWRMSGGGALSQLEQHKWVAERSPVCLCLGSTEAHSNSSGICTYVSDSKQRFEFGAPHAECPPSPPSYPQHGSPDKVAQLSRPTKYQKMCQGSHSHRPGVGGPKVEASVYLQ

SEQ ID NO: 933894 - protein, 155 aa, Homo sapiens
MASDGASPKPWQLPRGVEPGGTQNSRTKVWEPLSRFQKMYENTWMPRQKFASGVGPSWRTSAREMQKGKVGLESLHRVPTGASPSGAVRRGPPSSRPQNGRSTDSLHCVSGKATAADMKIFYVKNRNIKEPIHPPANIHYFMLALLWILAIPINV

SEQ ID NO: 933895 - protein, 125 aa, Homo sapiens
MFKVAHSPGWQLIRSVGWELSWGFEVVSEGMWSLLVVWASCDLTEKEKDELAYYVDKPKNYGCSKSSPNRDSFERQQIGKITDMGKVSGRVGREVANGIQNQPRLLEAERLGVVINSVYHWRLYE

SEQ ID NO: 933896 - protein, 142 aa, Homo sapiens
MKNLGECCKVSYDVTSEVLRTSLPLYFTSQEPHKGLHRFDGKKIDSGKEIASAAHWEVYQSVATERTVYMNLLAAVLRIDLQGGRAEVAHKEGGISFGVNHGEDGVDSNKTVEDCTGVGLGGEGLGIPFQTTKWRNKEISWS

SEQ ID NO: 933897 - protein, 190 aa, Homo sapiens
MNSDFGVNAEIEELPLAFLVGQADEPLPVGTTTTDPWRVLPGHCLCSHKAQGLFGQVVVNAARPETHPLGQWAFLWSREGPEMLFKSKSLGLDRGTPRACLALYPTVAELVPKEQQQNCQDKSEELKQDTEICERIKGKRARRKRKSAGPPDVLDSPAPWVMVGERRNKRRPLTEHFPEKISPKEKQVAT

SEQ ID NO: 933898 - protein, 221 aa, Homo sapiens
MSHFSSRTCEGNATNCHSCEGGHVLHHGVCQENCPERHVAVKGELPTGEQGSAEPPVGGRLSEGGWQRAVGTSLPTIPERYVSVPVIRETEECTPEFFLHDDMCHQSCPRGFYADSRHCVPCHKDCLECSGPKADDCELCLESSWVLYDGLCLEECPAGTYYEKETKECRETQGLWIHSNHPDYPVIDSTDTSKSPIPFLKHWSRSSKAVAKVLGSTPDTT

SEQ ID NO: 933899 - protein, 152 aa, Homo sapiens
MNLMSKVKRLKSLSLYYADNSTGRCERCNRSCKGCQGPRPTDCLSCDRFFFLLRSKGECHRSCPDHYYVEQSTQTCERCHPTCDQCKVSSITPFEAASRSPQLSILPPHQVIWYTNARTEAHEETPEVALHLLNSSHGVQSEGEQMVNCSEF

SEQ ID NO: 933900 - protein, 167 aa, Homo sapiens
MCPEFLPSGGLLVLLTSGVKLQTFAVSGRRIWSCSQREKFSRSPPNPKAQLASPLNGTGRQDFWAPTPGIPATQRELVPGSSPAGAECGTRSQPAPTWNPCWPTSATAPAAALASASTPPCEQREPAPASASPREGPPQHSCGLKGSWSVARADAEAKEAPGVSKGC

SEQ ID NO: 933901 - protein, 146 aa, Homo sapiens
MRRPGPPGWEEKGFGEPWGSIGYSIHQAIMTNLEAEERGLKTNSLLLNVAKGCPVQNGSHWSQQAQWFSDATGAAVNSSGFPWHIHDHKGEINLEPIKSLLIIKEAQEGATKTQQAWQEAEAQDLVFIFGAVCFIVHQKDLFQSLR

SEQ ID NO: 933902 - protein, 139 aa, Homo sapiens
MQYIRKKKQIIDKTCSLKDRRVDSSAQMERLAINRKDDASSLREVEEIATDARNEESDVKNSEEGYEERRSYGYLFLQHTLICHRRYTSLTPQKLKITLTLMNEVLTEDEFQEEFLLLFIPMRAIYYIEFCLSIPITSE

SEQ ID NO: 933903 - protein, 140 aa, Homo sapiens
MGKKGSLPQLSVQENQPPGLLIHLPGLDSRTGLQDVSLEELNGPKEYIYRLRHLGPPQVSPTCTEIPVSMLVPHSEISMHSHKPLDLGHSSIGLLWFAGGPLQIRVTSVPPWTYHQRRLRNSKDGSLLLPLGAPSQGAPT

SEQ ID NO: 933904 - protein, 138 aa, Homo sapiens
MEAAKAYGLHILELEQKLELYLGPFEPQQELELEQLGCGEQCPKAAQGSRALSLAHKTVLPSLASGPMLGGPAVKPSNTSNLYPLPSSKAASKFSAMSNCFTDEKLMSRETGLPNIMEYVCLYIISVDNKEKIPTLEN

SEQ ID NO: 933905 - protein, 148 aa, Homo sapiens
MCTLVTWVYFVMLSNLINCLSTSNQLPLYLTSPPHLAIMDFSFKQHPEFILEPLHAAFALSNSGDVIHILVLRVPQLSLAMSYVASQGLDQGRPHDPKIVPPNCSGPILNSREVWQWVSNAPQGIFGNTWRHFWFLQLGKRVLLAFKE

SEQ ID NO: 933906 - protein, 142 aa, Homo sapiens
MVNAPPRTKLKHPRLTSDCCAGSDNVVKKQLCMSVHISAKGNMLQAAEYSRMFAALMTFESCNGEEIIQKQNTKQREELTLWDGSGGSSAMSVPCPCSLKLNSSVHADPTSYCQHLHFFAWEISLAMIVYSCIPQNIPVYFS

SEQ ID NO: 933907 - protein, 530 aa, Homo sapiens
MCHLPLRPLGLTTEHGHRQLLLCPLGLTTERGHHHLPLRPLRLTTEWGHRQLLLCPLGLTTERGHHHLPLRPLGLTTEHGHRQLLLCPLRLTTEWGHHHLPLRPLRLTTEWGHRQLLLCPLGLTTERGHHHLPLRPLRLTTEHGHRQLLLCPLRLTTEWGHHHLPLRPLGLTTEHGHRQLPLRPLGLTTEHGHHHLPLRPLRLTTEWGHHQLLLCPLGLTTEHGHHHLPLRPLRLTTEHGHRQLLLCPLRLTTEHGHRQLPLRPLGLTTEHGHHHLPLRPLGLTTEHGHHHLPLRPLGLTTEWGHHHLPLRPLRLTTEWGHRQLLLCPLGLTTERGHHHLPLRPLGLTTEWGHHHLPLRPLRLTTERGHRQLLLCPLGLTTERGHHHLPLRPLGLTTDHGHHHLPLRPLGLTTEHGHHHLPLRPLGLTTEHGHHHLPLRPLGLTTDHGHRQLPLRPLGLTTEWGHHHLPLRPLGLTTEHGHRRHAATFLDTQQCCPLQPAQADPSLAFHTLHNSSCWDSAPVFSKLLLGC

SEQ ID NO: 933908 - protein, 145 aa, Homo sapiens
MCTCVHRVYMYIVCMCALCVHVCIVCECACVGRVYMYIVCVCVVCARVRVADGAKDRSFLHFLEKPPLKILIGIPGIEASGVGHQEARTTPDKDFGFFFSLVYAFAVLSLLTHRIPRGRLGVIPGASWFEFHGTLEDMNSEIRGF

SEQ ID NO: 933909 - protein, 958 aa, Homo sapiens
MYRSPEAAVFRSPEAAVYRSPEAAVFRSPEAAVYRSPEAAVFRSPEAAVYRSPEAAVYRSPEAAVFHSPEAAVFHCPEAAVYRSPEAAVYRSPEAAVFHCPEAAVYHSPEAAVYHSPEASVFHSPGAAVFHSPGAAVYHSPGAAVYHSPGAAVYHSPGAAVYHSPGAAVYHSPGAAVFHSPGAAVFHSPGAAVFHSPGAAVFHSPGAAVYHSPGAAVYHSPGAAVFRSPGAAVFRSPGAAVYRSPEAAVFRSPEAAVYRSPEAAVYRSPEAAVFHCPEAAVYHSPEAAVYHSPEASVFHSPGAAVFHSPGAAVYHSPGAAVFHSPGAAVYHSPGAAVYHSPGAAVFHSPGAAVYHSPGAAVFHSPGAAVYHSPGAAVFHSPGAAVYRSPGAAVFRSPGAAVYRSPGAAVFRSPGAAVYRSPGAAVFRSPGAAVYRSPGAAVYRSPGAAVYRSPGAAVYRSPGAAVYRSPGAAVYRSPGAAVYRSPGAAVFRSPGAAVYRSPGAAVFRSPGAAVYRSPGAAVYRSPGAAVYRSPGAAVFRSPGAAVYRSPGAAVYRSPGAAVYRSPGAAVYRSRGAAVYRSRGAAVYRSRGAAVYRSPGAAVYRSREAAVFRSPEAAVYRSPEAAVYRSRGVAAVYRSPGAAVYRSPGAAVYRSPGAAVYRSRGAAVYRSRGAAVYRSRGAAVYRSPGAAVYRSREAAVFRSPEAAVYRSPEAAVYRSPEAAVFHCPEAAVYHSPEAAVYHSPEASVFHSPEAAVYHSPEAAVFHSPGAAVFHSPGAAVFHSPGAAVYRSPGAAVYRSPGAAVYRSPGAAVYRSPGAASRGRGPGAAVFLSPGAAVYRSPGAAVYRSPGAAVYRSPGAAVYRSPGAAVYRSPGAAVYRSPGAAVFRSPGAAVFRSPGAAVYRSPGAAVFRSPGAAVYRSPGAAVFRSPGAAVYRSPGAAVFRSPGAAVYRSPGAASLQP

SEQ ID NO: 933910 - protein, 153 aa, Homo sapiens
MGPVYLGTAQIEARRNQNGTYKRGGEGATAPRATTCADPSWNGSRSWRSGVGPNPMTESLEEKGNLDTGEHPWEDRDTQGDPHLMTQTKVVTMQLQAKECQELMATTRSQEFCYGNTEWMKAETNATAMADYLGEPLTSSSPSPPLHYHFVLP

SEQ ID NO: 933911 - protein, 137 aa, Homo sapiens
MTSEGGSLRLWQLPRGVEPVNAQKSRTEVWEPPPRFQKTYENAWMSRQKFAVGQGPYGELLLGQCRREIWGGNPIQSFPGECFQLLPIQYDVGYRIAIDGSYYFEILDIWILDVFQMYNLQIYSQLLDIDGAGGYYS

SEQ ID NO: 933912 - protein, 177 aa, Homo sapiens
MQDKVLPTLSSSLLECRVGVYFGVKSCTSWSYGRASPFSSFRSQFTASYSENVSLTTRFKEVSMDENQLQLRHVGTCNNTMVDKSPIFDRSGCGGFQWNTLCDLDIPIRQAPLSICRNANILCKEAVRLSTLHASLSPEDTSPMKMQLPQSAPRKAVNRCNNADLPWGSPSCDCSGK

SEQ ID NO: 933913 - protein, 152 aa, Homo sapiens
MRTRGHREGNITHQGLLGVGELGGLPRLPLARKGKCPGPLCFQGEKMPRPASASPPWAAPTVQPVPVRRTRCLSWKCRNHPSSVSITLGAADRSCSYSAILEESAPRINFKCLLNWRSKPSVLPSKSNSTNYEFLFGVKSFGINGNDGFTVL

SEQ ID NO: 933914 - protein, 166 aa, Homo sapiens
MTPCEAKKDNSATNKDAAQSCGPLKISRKEVNRLYSNYTTVKGTSVHTDEKKQCNNSGNPKSQSVLFLPDNRTTSSARVLTKADMAEMSEIELRIWRGMKRSLTFRRKKKQTDQIQLKNTLKEFHNKITNINSRLQQAEKRIAELEDWFSELTQSDKGKEKRIKND

SEQ ID NO: 933915 - protein, 159 aa, Homo sapiens
MTETWKKVHRHQIQKSHWCSSSPKAGKQRPWRVDVQVCCSFLEVRSRPCSPGYHQRKLQNSKDFCLLLPLEASSQRGTGLMPAGALLYETFQKIEEKGLFPNSFYEASISLMPKSERDAITKKENFRPISLMNIDANCKNLQQNTSKPNTTANQKANPM

SEQ ID NO: 933916 - protein, 159 aa, Homo sapiens
MRTLFWFYMNFKVVFSNSVKKVIAAGLLEFTGGPLQTLFAWVSQRRLQNSKYCCLILPLEASYALPTDVETTEAAGLALLWWALPSSSFPGRFVYLLKTQHWWMPLPLPGCCLAGTVCHGFPWLGKGNTPTPCAFWVRRCPTLLRLTLHGLHPLPNQSQ

SEQ ID NO: 933917 - protein, 158 aa, Homo sapiens
MAKVSSGIKWNLGVWACLALLHYRYSLTKPVSWFAAPTTALSSCPCQFKCLWWSRGHLLESQRPMICHLCPLEGQPKWPTLYLDTVESHLELLRRYAPEYEQQKLEAVPGSECSGSENIEGYSFGNSYVPHFFILFTCDGSGNSNDLGNDISFIFLFS

SEQ ID NO: 933918 - protein, 273 aa, Homo sapiens
MPFSASLYILTLNSCLPLKILQTQRLNSPGLFYPKGLKLSKGTTALSEECIQPKLAYPHPRTLKQLRAFLGITGFCQMWIPRYSKIARPLYTLIKETQKANTHLVRWTPEAEAAFHTLKKALTQAPVLSLPTGQDFSLYVTEEKGIALGVLIQVRGTSLQPVAYLNKENDVVAKGDLTLWTSHDVNSILTAKGDLWMSDNRLLKYQALLLEGPVLQLRTCATLNPATFLPDNEEKKEHNCQQVHDYKPYAETLQDRTLENNTESGTGKKTSSE

SEQ ID NO: 933919 - protein, 148 aa, Homo sapiens
MYSMLVYIKKSSIAGCDEKEWTGPQITSRNLRMEQAEHLSRRSLWEDHRGRSSGSDNCQKLVAASGNWSLRGTVLWPSCPSGSGAAALWARRWQAPIWQGAAEVGSCGACSLPTTIRYLSCGICAGGMRKCSHLLVLSLAWQQQGIGQ

SEQ ID NO: 933920 - protein, 138 aa, Homo sapiens
MAYKAIYDLTIIYLIPSALLLFIHSASDTLYYCVNDTCLHKLPFFALFLPAVLNIHMTRFLSSFSREKTIFLSGIYLDVTFTAIQKGNKEAARIHAENAIHQKNQAIDFLRMSARVGAVAVRGQNAVTMGRVTSPCEA

SEQ ID NO: 933921 - protein, 355 aa, Homo sapiens
MSEIRFTNLTWDQVITLDQVLDEVIPIHGKGNFPTMEVKPKDIIHVVKDQLIGQGIIVKDARLNGSVASYILASHNGISYKDLDVIFGVELPGNEEFQVVKDAVLDCLLDFLPKDVKKEKLSPDIMKDAYVQKLVKVCNGHDCWSLISLSNNTGKNLELKFVSSLRRQFEFSVDSFQIVLDPMLDFYSDKNAKLTKESYPVVVAESMYGDFQEAMTHLQHKLICTRKPEEIRGGGLLKYCSLLVHGFKPACMSEIKNLERYMCSRFFIDFPHIEEQQKKIESYLHNHFIGEGMTKYDYLMTLHGVVNESTVCLMSYERRQILHLITMMALKVLGELNILPNTQKDSGSCAFDCAS

SEQ ID NO: 933922 - protein, 166 aa, Homo sapiens
MGKNQCKKAEKSKNQNTSSPPKDDNSSPAGEQNWMENEFDELTEVGFRRWVITNSSELKELLKKKREKNQIDAIKNDKRDITTDPTDIRTTLREYYKHLYASHRINVHHQMFWYQDDVGLIENHQASDGALNGSKNETTLLPGTFKLIRGGALAAIPHTTPLSSRK

SEQ ID NO: 933923 - protein, 303 aa, Homo sapiens
MVPAPPQLNEKVLKDKRKKLRETFGILRLYEKENPNIYKELRKLEVEYKQKRAQLSQYFDAVKNALHVEMESIPLSDMPHIPSNILIQDIPLPGAHPPSILKKTSAYGRPTRAVSILALLGHGVPRSPHGRKPLCPLSGPPPSQVVQMYGRKVCFALDLPPCRRDEDIFYSPALAQRGHDDDVSSTSEDDGYPEDMDQDKHDESTDDSDTNGSDGESEEDEFVHHDDGERDNNEEKKSGPSIQAPPMPGPPPLGPPPALPLRPPGPPTGLPPGPPPGAPPLLRPSEMPGLQGPLPQLLPPGPP

SEQ ID NO: 933924 - protein, 785 aa, Homo sapiens
MVASHLLAYFFKELNHDQVQKVDQYLYHMHLSDETLLEISKRFRKEIEKGLGSTTHPTAAVKMLPTFVRSTSDGTEHGEFLALDLGGTNFRMLWVKLFDHIVEWLANFMDKLQIKDKKLPLGFTFSFPCRQTKLDESFLVSWTKGFKSSGVEGRDVVALIRKAIQRRGDFDIDIVAVVNDTVGTMMTCGYDDHNCEIGLIVGTGSNACYMEEMRHIEMVEGDEGQMCINMEWGAFGDDGSLNDIRTEFDQEIDMGSLNLGKQLFEKVISGMYMGELMRFILVKMAKEELLFRGKLSPELLNTGHFETKDISDTEGEKDGIRKAREVLMRLGMDPTQEDCVATHRICQIVSTHSASLCTATLAPVLQRIKENKGEEQLRSTIGVDGSVYKKHPHFAKRLHKTVWRLVPDCYVCFLRSEDGSGKGAAMVTAVAYRLADQHRARQKTLEPLQLSHDQLLEVKRRMKVEMERGLSKETHASAPVKMLPTYVCATPDGTEKGDFLALDLGGTNFRVLLVCIRNGKWSGVEMHNKIYGIPQEVMHGTGDELFDHIVQCIEDFLEYMGMKGWTKGFKESGCEGEDVVTLLKEAIHWREEFDLDVIAVVNDTVRTMMTCGFEDPHCEVGLIDDFHTEFDVAVDELSLNPGKQRFEKMINGMYLGEIIESDCLALLQHLGLESTCDDSIIVKEVCTVVARRAAQLCGAGMAAVVDKIRENRGLDALKVTVGVDGTLYKLHPHFAKVMHETVKDLAPKCDVSFLQSEDGSGKGVALITAVFCRIQIFLGQHSMGC

SEQ ID NO: 933925 - protein, 169 aa, Homo sapiens
MWAFSAINFPLNTALAVSQRFWLSSASLLEFAGGPLQVIFAWVSPVEAAEQQRLLLASSSGSFIPEGHLHDASQSSPVLSVCRPLLGRVSQSGGMGVRDPLEEEVCPLAELECCAGRSAALFRAGRQECLSVLKLCPQPPLPPGALSQGDGSFMYKPLTGAAAFLSEMP

SEQ ID NO: 933926 - protein, 151 aa, Homo sapiens
MLDLFTSAYGECCQAWAPFWPREAPEMLSKSQHLELGTPNACLVLYPTVAELVPKLQDKVPFYSSLFISQAEIIPAATATRAGNVLGHIWSQHVSESHSKPTLATPTRMHRAACGDSHHELLLQELLQENTRKAKRIHRPFEGTGSLLQAP

SEQ ID NO: 933927 - protein, 341 aa, Homo sapiens
MQNEYLCYPDSLLLKVKEFSDSIHNTFDHMWRNKEYNEVGLLLLSSLDKVTKEKDELRDSNSWLWKHILSLKSSKIALKETASPPPVVSTTSPPPMLPSAFPPLSEEINPALPEATVTTSPEHIARKNNADSLQDLPSTPLLPPRPVTRLKSQQTPRGDLQKSVYALSQRPLYGTVSPIVRIHGSRNQGVEVEVVPFTITPSDPLVKFLLPFPATLSSAGLGILVPERGMLPPEDTTMIPLNWKLRLPPGNFGVLLPLSQQAKKGVTVFVGVTDWDYQDEISLLLHNRGKDGMCGIQDPLGHLLVLPCPVIKVNGKLQLNPVRAMGIRIAIKQSHDRCDND

SEQ ID NO: 933928 - protein, 145 aa, Homo sapiens
MGYYICLCLQGYLSDRDQNTDRNMDTKVPFDEDLHGREKYLIRNWKEGHTCYKVAKNLAEVSTPTVAKVGPCTAQSVALKGTSHKPWQLPCVAKSEGAQSCGDMATPPEFQRMPPRALGLRQRNAAKVGPSQRIFSGAMPSGLTA

SEQ ID NO: 933929 - protein, 143 aa, Homo sapiens
MARTKQAEDEITLLAEFFGFLLFPVLDAPPALGYKTPGSLAFGLWELHQWLSRASWAFGHRLKDALSASLVLPQNKSGTMGLPRFEGFRLRLSHYRLLSSPDCGTLLANHRNCQYDSSIPMRTGKNIHLLHDQYYSDPVGTPF

SEQ ID NO: 933930 - protein, 169 aa, Homo sapiens
MGRFFFGLKFCFPVLHYLTFLTLGVPEKQPKMDDFDDCVTDEETVGMAAKFTTHAPPEEFNEAFNDKEASDPQPEEVDGGLKSWRESCHCALRAYVKDYYSNSFSQTAKEFIKIIENAENEYQTAISENYQTLSDTTFKALCRQLPVTCTKIDWNKIVSYKIGKDMQNA

SEQ ID NO: 933931 - protein, 150 aa, Homo sapiens
MGQKTKYRGRKVGPEDRRLAYGGPAPAPVSEFPQLWVGPQSSQHFLSFVLNYRGKWRGRVRSGLSQVGQCSGSPHAEPSSAPVGYEGWFSGYWGNIPEGTVNAYAAQKSLHRECGLAGGSKPHLDPMHLARQISLPQCFASSSKLSSSSI

SEQ ID NO: 933932 - protein, 135 aa, Homo sapiens
MRAAPLELFTGQPQSTNVEAMVQTTRATATTLHAGMARSDSSPRAKVSYGSKLSLGGWLYLAMLCYRCSSTKPSGLHISWLAAPTTSLSSSPCQPVCLWWSRSHPLIGLQMPVATAICSLPDQLTHSPGAVEGQE

SEQ ID NO: 933933 - protein, 135 aa, Homo sapiens
MPLPPTKLEHPRLTSDCCAGSENFKPVDLSLLCSIGVGFTELDHLVLWLQPPFQGSEQTVSLEFQAPLRYEKKLLLLAGCLPKWLPSFVLETQGAGGVGTQGNLLDVFYNQVRVIIFYFLTIAKTPQSDITCYKP

SEQ ID NO: 933934 - protein, 295 aa, Homo sapiens
MSGALDVLQMKEEDVLKFLAAGTHLGGTNLDFQMEQYIYKRKSDGIYIINLKRTWEKLLLTARAIVAIENPADVSVISSRNTGQRAVLKFAAATGATPIAGRFTPGTFTNQIQAAFREPRLLVVSDPRADHQPLTEASYVNLPTIALCNTDSPLHYVDIAIPCNNKGTHSVGLMWWMLAREVLRMRGTISREHPWEVMPDLYFYRDPEEIEKEEQAAAEKAMTREELQGEWTAPAPEFTATQPEVADWSEGVQVPSVPIQQFPTEDWSTQRATEDWSAAPTAQATEWVGATTDWS

SEQ ID NO: 933935 - protein, 170 aa, Homo sapiens
MHLTCFSCLIVIAVTSSTMWNNSGDSGYPFYVPDLRGKAFIFSLFSMILAVGLSYMADMIWLCPYPNLILNFNPHNSPIPHVSLGGTQWEVTGSRGPFPACSSRDSERVLMRSDGFISLWHFPCSHLLSLLPPCKEAACFCFAFCHYCKFPEASPAIQNYVGTYSYKIPS

SEQ ID NO: 933936 - protein, 328 aa, Homo sapiens
MIAAGKFLNLAAEAVLQAGAARQGPCDRATDWGVLRSGSPHRMEVHGKSGLLHAYLLTPSPGAAQGQEWVLGLGSSMKGFQLPPFLAQDLCPPSIHYQRLLFDDLFGVDQVHLNSSNAVVLADSEQYHLDDLGQYLSKVFVMVNIECQLDRIEGCKVLFLAFGPLDLHWWFSKGSHVFSHRLKAAPDRAEIVKNQTQTPMMQVADLQGNVYAQPCPLSTVKVRALIGKEWDPATWNGDMWKDPDETGGIELLNSDEPFLPEEIATPLPEVAASPPPPMLPSAFPPLSEEVSHSLPEATVVASPESVARQDNADSPRDSPSIPRLLLDL

SEQ ID NO: 933937 - protein, 169 aa, Homo sapiens
MGSSPVLLLSALHESCCFLDESQCILLDDPDEELVFTCHSISSVNTKFNNYLHQKRHLRKNQKPGPVPRRKATCTGSVHQQDNRSKKRAGRKTPTLAGRHIPRKMEKEAVWDSNQYKNLTDGISELTLGQRRSHFPEGSQHLSPFEYLENIPNKDVSKQAHTDKTTIST

SEQ ID NO: 933938 - protein, 159 aa, Homo sapiens
MGSSPVLLLSALHESCCFLDESQCILLDDPDEELVFTCHSISSVNTKFNNYLHQKRHLRKNQKPGPVPRRKATCTGSVHQQDNRSKKRAGRKTPTLAGRHIPRKMEKEAVWDSNQYKNLTDGISELTLGQRRSHFPEGFPTTEPESLTTYLDLPEKQGN

SEQ ID NO: 933939 - protein, 165 aa, Homo sapiens
MKSIYYFTTESCFFQVPDHPAKPLATAYESVYNLKSCNFSFNVKCSTRSSSHWEDFSSLLSFRDVLESGYSAAAVHFRVMPEYHSGGKADGSVGRGGDVATNGDGEIVSSGTKRFIRVYKLSVPSFIKVFPHVPIPSCRVQFFSNQCPHFNSRHLVRLCLHLSLQ

SEQ ID NO: 933940 - protein, 173 aa, Homo sapiens
METECKSLENLQPGIVIEKQRAFSVEELKWAVEQPLARDICMTKRDPSANIQDNSIKTSKTSQRSLRQTLLSKAQRTKDKRMVLWARFKAPLPCADLEHCSMHPCCSSSSHGSEGLGITQAAALQSSSHKPWQLPCGIYPAGAQNEKVKEAWHLQPRFQRTCRKASGPGRNLS

SEQ ID NO: 933941 - protein, 149 aa, Homo sapiens
MIDPPTACTVCLEKTQTLNTTCKSSWEGTVPCKATRAELPKAMEAHLWHQHDLVGRDSHSPKVVPEVPRTRVKNIKIYLVFYCTIPELALRPDDAVLLTLPSPFQRKRSLTPWLLPQQVPKEPSALQSACDEYCLAYDSTSGQWTPLWP

SEQ ID NO: 933942 - protein, 143 aa, Homo sapiens
MLPALEHWTPSSSVLGLGLAFLAAQLGTLEFSVDKVIKENDELRDAVSRLQKQTLSLKSAKIALSENRERAEIAVKQTQTIIMQVADLQRNVHAQNHQVSTVKVKALIGKEWDPATWKGDIPITGQKSRRAPRCEVESVTHDS

SEQ ID NO: 933943 - protein, 139 aa, Homo sapiens
MWEDPDEAGDTEFVNSDEPFLSEETASPSPVVATSFPRPMLRSAFPPLSEKINPALPEATVMASPEAVARQDNVDSPQDTPPTTLFASRSITRQKFQQAPVEENIQMLREIGKVEWIHHFRSTHPSCEGPEDIPLTNAL

SEQ ID NO: 933944 - protein, 134 aa, Homo sapiens
MRKGLRALRPQNGRSPGSLQLQYGKATDAQQPERIPESPSPAPSLEENHRPGSQTSSHTSSSVSSSPSQMDHHLERMVSFSPFFSKPRCTQNSFIRTVFEHNITEKEMSPISNDICIFPRKHQGRRVPTRNAGW

SEQ ID NO: 933945 - protein, 151 aa, Homo sapiens
MTKSDQHTAQAVASEDASPKPLWLPHDVKPLGAQKSRTEVWEPPPRFQRMYRSSWMSRQKLAAGAGLSWRTCTTRAVQKGNGGWDPPHRVPTSALPSGTLSREPLSSSLQNSSSTDSLHHVPGKATDTQHQPMKVARSGAIPSRLLEELPE

SEQ ID NO: 933946 - protein, 146 aa, Homo sapiens
MAKNMILFFFMAVQYSMVYRHINIRSLCMHSPGLISGCHSHFYWLIVLTASFFPKLSCTFQFFGCPLFSLLAGCLRLSYPTISCTSTPVCAFKFKWWEVREQKQNKTKNQCAWPHFLYAIAPVVREGDSCAPVSTLEITWNLGHRQ

SEQ ID NO: 933947 - protein, 145 aa, Homo sapiens
MGSRRSERIDDKKAKQAFADVKKVCVVWLDQISHNIPLSQSLNQSKALPLFNSMKAERGVTSNGSSKTCSSDLGELLSTDLPDLIAKRAEVEGKTVGVPPPTVLPPWSLGPSTIIATLWLQMTINLKVQVEVDKSKHRQKVPLKT

SEQ ID NO: 933948 - protein, 151 aa, Homo sapiens
MFHRIYVYHIVFIHSLIDGHLGWFHIFAVANCAAINMRVQVSFSYNDLFSSGWVPSSGIAGSNGSSTFSSLRNLRTVLHNDFTSLHSHQQHRSVSFSLRPCQYLFIIYFFIVATLAGVRWYHIVVLICISLIISDVDHFFHMFVGHLYIFF

SEQ ID NO: 933949 - protein, 139 aa, Homo sapiens
MAVGEGNGGGLHSCCGSGRAECMHTLFWLAGKETKTRLYTHMLAKRCAGLLWAQGKLQCGEGAGGLVHGHGGPSAGALHQSGMICNTEAQLPCLPSVRSQCPPSEDLLVRQLSHSLGGSCFNWLHLVGHLAPNIQFKFI

SEQ ID NO: 933950 - protein, 201 aa, Homo sapiens
MSFPIEKASRLTVFCHLMELAVVIQFLQRVCGFSWLSWYISVTVLGAKIHSVVPLQVQWHQGCGLTLGFSPRRNTGMPLIEVVRWGQGGCAGVPGWAALASEENRGLGPAWRKAQRLFLEVGAWCWESRPAPGPCRLSRAWRQQGQGLRDSKYGNPRLPLGPLTQGLAELLLDQPWWETAGDPGEVICEKLTVLGIQIWKE

SEQ ID NO: 933951 - protein, 127 aa, Homo sapiens
MALKSSGVTIPLKLKEQIEPREMGFPGLTPLQMLPHKTLWAPPQLACCPYHFSKHLSLPTQVFMVVEGSPTAEIPEAHGKIGLLLASSTHPFPGVTGGQKQVLTQSFRNKMICLWDSLFCMFTIIEK

SEQ ID NO: 933952 - protein, 136 aa, Homo sapiens
MLLILSRIYTQHVSPEGLNIQTGNGQTIYNNRILTYNLYSNKHGKPNHNLSSNQPRWPNDLEKKTTWVMCPSREQSFVIEKALSVFQNGNLNPLTLLPSSCQKREGIVFRSSSEDLLGFLEQASTDSISSFICSLY

SEQ ID NO: 933953 - protein, 449 aa, Homo sapiens
MRDQHHPGKCHPTAGQPDSLAERVDGLQVKVTQLDPKEEEVSLQVINTRKAFRSSTIQDQKLFDRNSLPVPVLETYNTCDTPPPLNNLTPYRDDGTEALKFYTDPSYFFDLWKKKMLQDTRDIMKEKRKHRKEKKDNPNRGNVNPRKIKTRKEEWEKIKMGQEFVESKEKLGPFGYPPTLVYQNGSIGCVENVDASSYPPPSQSDSASSPSPSFSEDNLPPPPAEFSYPVDNQRGSGLAGPKRSSVVSPSHPPPAPPLGSPPSSKPGFAPPPAPPPPPPPMIGIPPPPPPIGFGSPGTPPPPSSPSFPPHPDFAAPPPLPPPPAADYPTLPPPPLSQPTRGAPPPPPPPPPGPPPPPFTGADGQPAVPPPLSDTTKPKSSLPAISDAHSDLLSAICQGFQLRRVEEQQEQEKWDVVGNDVATILSRRIAVEYSDSEDDSSEFDGDDWSN

SEQ ID NO: 933954 - protein, 163 aa, Homo sapiens
MHNSFICACPKYCPGHAFLSRGGSRHNPKVLRGPRENEMLALAASKPHAHSSSSIPSMCLPHAGEAPTAGMPLGEAKEQTCRNSSAEAPGQSSGAENSTSQSFHRNLHVTCEMQTFQGELGVTRTLWLLSWNTSAPECLPAQVQRWWPWMWPRQTSASPSATL

SEQ ID NO: 933955 - protein, 146 aa, Homo sapiens
MTTCRYFTYMIFFKETIILTEALWGRVRVSAVGPRMLVGAMWVMMTQRDKSSQRPPETPLERPNTNMCSKGRRQDQYFFAKLRVNTQRETKLRQKNRTGTNEKDPGPSSWLDSGICLYKGSTVVKSMDSGTGPLTFKFWLIRFPAV

SEQ ID NO: 933956 - protein, 151 aa, Homo sapiens
MRECRGNVRRVEEELGTLEVLVLGPLGSRPWDLCQWHPSSQALGLRLVDTPGRRGKAPIYDQSQSEEEFNGKECFHHDWYWLDREQMAFKRDISHARQYNIPDLLLAKLNQPSFSAIGKSVIQQFVSNALKVPGPLSLPLTSVAWGPPPFS

SEQ ID NO: 933957 - protein, 150 aa, Homo sapiens
MICPTWENCCRGMAVQELGQGTLTTKKKENKPPIKYITFGLSRDVNFAKLHRNPTAPYGNTFRNACSLPKQLKNTDTPFFPLDKAVVFVPQVATMWECCGVRKYQHPKCRSHLLSISYEGAINHSPPSYLSPVFVTDKLFLQILRSISGW

SEQ ID NO: 933958 - protein, 176 aa, Homo sapiens
MWENYTHHSLVDKDKSKAVCSPFSGPFSLVSELPDLKLKAGPGPSWSFTPDSDYPCPAGCRRKLSLSLAPQLGADALTPNVTAFGDSAFEEVMEVKQGHKGGAITTGVLIRKGRDTRALSPLSSMHRGKAICKGEAVELSDSCWYCAVVPSWALFIVGLQMVNTEKGVMGLETGNG

SEQ ID NO: 933959 - protein, 169 aa, Homo sapiens
MVSLLSSLCILHKRTSADARGLSPRSERGPSRGDLGEYWKDGAKETHALPIRQHAFHGSLNALLLLKACSESFSFGKGLRDFMLLSPQKAGNKDPTLHNPNHTGKRQSRAFTKNSDVQCGGQTSLYRLQIPNELCLIPPVLSHHLGPAQKRISFGFFADHTIALHNLSL

SEQ ID NO: 933960 - protein, 148 aa, Homo sapiens
MTVKHTFLFGVEGGCGQSGATRVCPNPWRALYKPLNYLVGWDTCANCGMSVGEILAHHRPGVGEFRDDPAQPSLRMQNMRLRDVCIEELDTHTQTHAHKHMHACTHARVHALTCTQARTCTTLRTLYYFLLASTVSDENPIVIQIGVP

SEQ ID NO: 933961 - protein, 183 aa, Homo sapiens
MPIVIPVEDASHKVVLGMQNQQGLMMEETGVRVTDTWFSDLGDRVGGGVVTEIEVPRKRSRFGAGNDKCLNYLVGWDTCANCGMSVGEILAHHRPGVGEFRDDPAQPSLRMQNMRLRDVCIEELDTHTQTHAHKHMHACTHARVHALTCTQARTCTTLRTLYYFLLASTVSDENPIVIQIGVP

SEQ ID NO: 933962 - protein, 193 aa, Homo sapiens
MSIMQKGIGRGRSCVGVNVKKTVRYGQRQIRKTEFVAKNQIFCGNGSQEDKVKTSEKSYQRMEQRKYEKDGDSQVIDGKTVRDEQSQIMCEYELQKDSKDRGKSCAGRNVKQTVKDGERQIICEDICQEDWKRWAKLIMCKYECHEHSEAATGRLCDQGCGWPHAPHPDHEQGKEGVSLIHWEIKVFASGHGG

SEQ ID NO: 933963 - protein, 177 aa, Homo sapiens
MDRDRSCVSMSLTKPVRDGQRQVMCGMNVRMTVTDGQRQINVVSMSGSKKTEFVAKNQIFCGNGSQEDKVKTSEKSYQRMEQRKYEKDGDSQVIDGKTVRDEQSQIMCEYELQKDSKDRGKSCAGRNVKQTVKDGERQIICEDICQEDWKRWAKLIMCKYECHEHSKRWAEADHVCV

SEQ ID NO: 933964 - protein, 141 aa, Homo sapiens
MSDGPVQDRYAEEGKQVQKSRTARVTEKLPCPQWSQLPARLKWVSLKVISRGCWQTPHLPPADAQKPVLCSHQKEAASPHLPPPQIRAQGLLGQNLRIQVYWQRSVASVASRLYASKDREEPRRAGMVASTNNVQPFRTHQ

SEQ ID NO: 933965 - protein, 178 aa, Homo sapiens
MPPFFSGTRGGLERGQHIEWGKENGASIGQACQKQVTGPRKAHGSKGTHHSPFEIQRNVIHSNFKRLDFNGSINSLSVTQQTCDVNTPNMSYFQNTGAGAIAESKEQLPPFPLQLLHCQPTLQLTARGGKAFIMRLTYSLLQLCRLLYCTLVINGMDHEAKLPDFEYQLYHLRASLYL

SEQ ID NO: 933966 - protein, 160 aa, Homo sapiens
MMVHSVLPYCAACEQGKDNEHLKIALQLEVQLGLTPLLEGWGLRYQLPEEQFTFRSQGKAGMLSAGPCEKGSSSEKPHPFPGEAQSHWAARLEDGSLDRGPSFAPSHGYPSLALHPLVETPGQLGEEPLPGQQEGGASLSEGGRLQLMVKRPPGMEIGRD

SEQ ID NO: 933967 - protein, 157 aa, Homo sapiens
MQVRIASICPSVYYVYSVGKFVKKSFIWLMVLQPYKKHGANHLLLVRASGCLQSWQKTKGSQNVQRSSGEKTREKEGREIVEKYVNGHTVVIELHWKTRVKSWPGEGLVISWRRKLKALLYSLCYVLSGFSYLLLPTPPHPTPSFAYFLCTYCVLFA

SEQ ID NO: 933968 - protein, 141 aa, Homo sapiens
MRKNQCKKAENCKNQNTSSPPKDHNSLPAREQNWMENKFDKLTEVGFRSHVQEITQSCSICHSVSPPGSLWPPPFPTHQAQGQVPRQYWQVDFTHMPPNKRICYLLAFVCTFSWWVEAFPATSGGANVVTQTLIMHIISHF

SEQ ID NO: 933969 - protein, 213 aa, Homo sapiens
MISCMVVVLRVDVAEVALQASPSGPWCHAGPSKPEFQACTSGPRHQATCADKSSSYTPRPGQLPLIQVPGLLWQHFYPNGPGLHAQPSDKPVQADLSSKFAPVVPNTSLPSADRDHRPTSDAGWSPQTQALDTFQCQNGPCGPILQAQFCPSIREATTDPGLPLWIHAPSLPQWTPVPCWPHRPRHQFYPGLTVCRQTLAAGPSTVPTYYVCP

SEQ ID NO: 933970 - protein, 148 aa, Homo sapiens
MGWALFWKACPKGAWSQLCYGHTVLDSYAPPGNIRSHCDREASPDAVGGTIQGFLRRGHLSRDSQVTWELCEVVGEVFKGPANSVHGSRGQREGNLESGRGRRRVQGSEGRECFMEEDTAACRYKASPEWSLVRVLKPAALQGLSVKQ

SEQ ID NO: 933971 - protein, 164 aa, Homo sapiens
MPVAEQTVVGTGATSHAFPPEPAMSFPLEPGLLVLLHGAEHLFLEHFISKNSGLPLPPGWLTKYILPNILTVEGVQVLGVLEKVLDKMHKQSKEGTKGLIESESALHSVGVGLSIVAQRPCYRVLLANKPPGRENKKGCYQKNWSPIMGSIPVWYHEANTQNRK

SEQ ID NO: 933972 - protein, 166 aa, Homo sapiens
MKLLPGLTAKSLSTRSCAGISADQSRYSFLALWYCLVDLLLPPFHPAGFSLPDPEDLPLTFQEFCELDDVTLGACSWPWWEYLYDGNQQTLEIRFFVVVKSCLLNIYQCTTSHTIPSSMNSKKDKLKDIHTNTYHNQIVQSQRQNIESSKEKQLIMHKRSSIKINS

SEQ ID NO: 933973 - protein, 154 aa, Homo sapiens
MLNKLPADSYYQPALGPTALHYGLTEGTIEREWELAIGHGARAVVDKEIALEEDVAVRGVRQDGCVIKKVSHLLHVGCLQWFTLQGGRPPWYQPGYRLLQRFVKNRLRRQPSEMMTFKGESDNGAGEVYLGIMGFMVLEKADIYGVLTNCRPVY

SEQ ID NO: 933974 - protein, 152 aa, Homo sapiens
MEGLMDMDMSPLRPQNYLFNCELKADKDDHFKVDNDENETSGSKFPRKKVKLAAGGEEEDDDNEDDDDDFDDQKTEEKAPVKKSNPLPSVAPGESWPKEKFVQDLEDRNEVAISLSEGRCYMQRELDIEVPADSSLFLLFSIQNSALLPNCQ

SEQ ID NO: 933975 - protein, 714 aa, Homo sapiens
MAMNFGDHASGFRHNDVIRFINNEVLMDGSGPAFYVAFRSRPWNEVEDSLQAIVADSQVPRAIKRACTWSALALSVRVATRQREELLHHVRRLQRHAEERQATSWALTSQLQQLRLEHEVAATQLHLAQAALQQALNERDGLYGRLLQIERFPQAAPLAHEIMSGPQAEQNGAAACPLATEQQSDMVAMGTHANAQMPTPTDVLYVPGPLSPWAQGMQPPLPVPHPFPHPPPFPMKFPSLPPLPPAVVTGAEAAAVPLQMPPTEIHPPCPWPAVGFQEEMAPLWYQRSYIQEEDSKILQGSFPLGDSRSHSQGEGSERSQRMPLPGDSGCHNPLSESPQGTAPLGSSGCHSQEEGTEGPQGMDPLGNRERQNQKEGPKRARRMHTLVFRRSHKSEGPEGPQGTVPQGDSRSYSQEGCSDRAQEMATLVFIRRCKPEGPKRPQWTVPLGDSRSHIKEEGPEGPQRIVLQGDNRSYSQEGSPERAQGMATLVFSRSCKPEEGPERPQDTPLGDSRSHIKEEGPEGPQRIVLQGDNRSYSQEGSPERAQGMATLVFSRSCKPEEGPERPQDTPLGDSRSHIKEEGPEGPQRIVLQGDNRSYSQEGSRERAQGMATLVFSRSCKPEEGPERPQGTPLGDSRSHGVRESPKKWQPQRQKAKKPKVNKVSGSQQQEKPASFPVPVNWKCPWCKAINFSWRTACYKCKKACVPFESGGQTQ

SEQ ID NO: 933976 - protein, 158 aa, Homo sapiens
MVWLLLIVLMADTLSKVCLWKLASVKENCLFQGDGISLPQEGIFPIGPDVRPINTDCTQSDEVLDPTLSGNHCGMNYFGECESQGCFHLYADSVEQGSPTPEPQTGTGPWPVKNLAAQQEVGNRRMSEVSPVFTATLHPLHYHLSSASCQIRGCIRFS

SEQ ID NO: 933977 - protein, 140 aa, Homo sapiens
MCSLMREHVSEQVQDPASHSGHRHRSKLCAGPVARPGIWLPPVTITKTARPTPLLPPPPQPQCEDDEDEDLYVDPLHSMNISYHYAKMSIIDFPREDSDFLPPRQFEMFYVRNSGQNFIVFDRTSNCFLYHDGSSPAFVF

SEQ ID NO: 933978 - protein, 175 aa, Homo sapiens
MAGICTVCSWNVGKGVGKDSGTHVQACHMVDILLHGKESRKYFYGNLTLKLRPDGRIQLNLEKKKGEISEEGIVLTKRFVQRKHDVLRKLKMSALLLRQKDEEISSSGKTQNIKYSPPLNNTSLNFTGPLIHGFSSASATPETARPSPALPPPPQPQQEDDEDEDLSDDPLPLNE

SEQ ID NO: 933979 - protein, 163 aa, Homo sapiens
MGTARFSSPKHNTEYNFDATQNVSVEENNIGLWSKLKDYKENGDKYKFSFKIPTDWFISGDANSQSPCFPVMTAKNVSKYYQMSTGDTIAPGESPHLPCELDTNTSILERRKLSMLTKNKIRSVQCGKLHTGLPNVTGLSDLGCPETDINQSRRNVEKPRSPV

SEQ ID NO: 933980 - protein, 273 aa, Homo sapiens
MGVRASRTQGMKIQKSLIQFSLRGHGGFHGVRGLTPLIFSWLLDVLEESTAATLVLHLQETLVALALFLSQFAEEVAHAFQSHMIAVEIEAQREVGVGGLQVQIDQAVDGCVHVSGIILTNLGAHEGANHKNGAGRSQKQEMAKKMVLEVASGEEIGGRSEAGRKSPRNCSVQTLLKQETDPWDRRAAIQDNFPIRAPEEQDVRFWFMDHIMDPSLTLLNAKIPPFRFRHQMGFRDQLGYVLGQHDIFNGHSPVKSSSRVFHIAEASSIPPGS

SEQ ID NO: 933981 - protein, 157 aa, Homo sapiens
MAVSAKQHQQPASHSLENAVPPPCDASAPPSPSTMIVSVRPLSPSQAIASPVTCTYTSRWPKVTEDPQKKESANSVPHVHKLCSRVSPVCGNIGCQHTQGAIDEPQSRKTTFVLMVSPLTGAQTQNCYLLIINSLSCHYDMVFFINGNILCSEVYCV

SEQ ID NO: 933982 - protein, 137 aa, Homo sapiens
MEYYSAIKTNRLTFANKKKKRKKMKEEEEESAAKVKKKRKPARKFGLEGNISRLISESDLFEEDVAAKRTCSLPVVSKLTRECGPLLVCRRDHQGRKVVGGGGAWEGWSCSEATDSGEIMVWRCSWSLSALVSDLLQ

SEQ ID NO: 933983 - protein, 135 aa, Homo sapiens
MVNAIATQRRDTGGEIHMQATLWSLLPMRGHTGYTFFPAIKTQQHVCDYFCSGKPFLDSMLRAFIESWSHRYPPPSMFRNSKHTKRKYVLSVSYVVCTNCPGRVIRPYELGNIENTLRIEVPRCQPKTNLPSRPF

SEQ ID NO: 933984 - protein, 137 aa, Homo sapiens
MGKKIIGLAKSEKSPLETFWLLYKQSPIYKELFFYTFSYEVGCLEFQVLSPNWNEMIKDVLSQELDQQFSKVEQEKKNSKIKRVQDLVVPFHLLNLTNILQIEEWAYRRGHLDQKGRHTENIKTWRKNTVVVYITRA

SEQ ID NO: 933985 - protein, 133 aa, Homo sapiens
MSQGFQLLPRRCSVEALCWLLVEVLFNPCGPGKPKDWTSLKGYILEVYLSKVGSCRWVLGLTNFKNEAADFHGHPNCCWELGNDRSNYFLLDRGKEGALQLKPAGLRIFDRKATGCQWPQCFRATLLFTLTVR

SEQ ID NO: 933986 - protein, 254 aa, Homo sapiens
MKSTVEVGKILEWGRRGGKVSAQGLWYSLATTPAHSSCAGSSRRDVSHQRSLQGMSALFQADTRRAKLLSNHSLRCPAASSLYCPEFISKLLSDRSFHYPAASFPLNVQLLLSSMCCPATPHQSAALPVELGVFTGTGWEHGGPKGNIQLSGLVWGTSWTKSLSNFSFSFSLWLDESLALWFWTADFPAGHSCCGTWKIEVVRDQPKLCLDKKQLLSKNQCETGNEDECVTVNSLLAVAVPKWLSVNHLSGESG

SEQ ID NO: 933987 - protein, 155 aa, Homo sapiens
MSCSVPANNSDIFRWPWVLVEVSLRRKGLCTLEELIYQSIQNQVFLLEKYWQAASFWKLSYCPHPFIATPIIHQTGDDPFRTNPEMKTCGAEPQPKCNMSERRLRKLVTVDTSDISAMKKVCKLLMKPGLILSTSGYLAISGEIFDIQIFWYNKG

SEQ ID NO: 933988 - protein, 137 aa, Homo sapiens
MLVKTKNPDFRAEAELWGHLEHSSHPEDTATRSHLGSRDSSLHQTTKPASALILGFLTVRNKTVLYQLLGVSQSVNLSSKSGHRNLPQPLRKHKVNTFCEVRDGLSSGDSHRRSLLSRRFLSHARGRHIHHFLKMVN

SEQ ID NO: 933989 - protein, 138 aa, Homo sapiens
MSSVKAGTGHLDVNTVKEMKNAFNELITRLDMMEKRISEPDSIGIETSLTEKQREKRLKKSSRVVKNCWTIAKEVKDLYNENYKTLIKEIKQHTKKWKDISCSWIRSINIIKMSILPKALEGFNAIPIKILNTFFTKI

SEQ ID NO: 933990 - protein, 138 aa, Homo sapiens
MVAAAASPRAQFEAAAAISTRTWPNGRVQPSIKLSKSHLGPATRECGASPRQASLARSCEECCPLESQLSLTAARGRVVGIVLNTHRISRFPCPSLGGWQLQLCQSELKVRCISALNSQNDTLGLGPEDTWESKYQGD

SEQ ID NO: 933991 - protein, 170 aa, Homo sapiens
MIWAYCVGKVCFIDLSIMLKAIGGMWANAAVQLQKCVYSVSREGPHEALILLMESTSSSDMSAQFRTSAIHNLGYGPKTRPSNLNTQRQGAWKCVQLVNCTVKYGGIPRSHSRNYLMIPQVPFKCTPGYGCIPFLSMILPNLFSQKTWKFPARTLRLCFMFGFLDCIQSD

SEQ ID NO: 933992 - protein, 134 aa, Homo sapiens [sequence omitted]

SEQ ID NO: 933993 - protein, 139 aa, Homo sapiens
MLMLIMLMRATPLRVEVESQARPQTHWKEETPDTSEHLKEQTPDTSSLRTVTLTARDVHFLIPVICEYVISHCKGDFANVTEVKDWRRRDYLGLSNKFQPNYEPLKAENPSWLWSKDMMAKGLETCNDTHFEDGGKGHE

SEQ ID NO: 933994 - protein, 172 aa, Homo sapiens
MPKPVQLFLYLTSVFWWRDHPIKLVEKTEKERRRRRRRRKEEEKEEEEEEEGEGGGGGKKKKNKKEEEEEEEKIRRRRVTRDLSLFMQLKRQGQIQEVHVQICYTGILHDAQVWNTDSYPTEEHNTAKLKMPSNPLIQQVLLHLSRNNEKVTSSHMRVELLESKDREKFKNS

SEQ ID NO: 933995 - protein, 138 aa, Homo sapiens
MERSCPLSVSSELLWVTRKREERMREELWPFREPRPMSSPNQGCDTFFRTFQFLVSPSFWVPHCDPHHQLWKLLIVCLVSHSLAGSQRPCPCLDLPALLRLACLAVCSAWTPHLFTHPLPLCTWLALVRHGIQASSGS

SEQ ID NO: 933996 - protein, 162 aa, Homo sapiens
MIVRPLQPYETVSQLNLFPLKITQSQGSEEGRKMWESLELSRDLLNGFDQKLDSNMDNKIQVEVVSDRDEELVGNWNTVDSCYVLAKRLVAFYPCPRDLWNFELKRGDLGYLAEDSSKQQSIQEVTWLLSKAFSFIRETEHKSLENMQPDNLIEKKNPFSEE

SEQ ID NO: 933997 - protein, 152 aa, Homo sapiens
MNYSKINLAALLVTYEVLWITNCLHNTNLCQISSVSPSTITFHPAFCPRGFLSPLASDWVQPVGSPSRIPEEGTRVGLGYLFSWLFLYEVTSAEIYTRNHMSKHKASWAKQITRQVNNGRSLGMKLSKCSNPFLLPPVATRRSYNGYSEIEK

SEQ ID NO: 933998 - protein, 180 aa, Homo sapiens
MPEPPTHSMGSCAAPASPRSTTPCSTAPSPIDHPRAEECERTAQDWQAAPPAAPVPDPLGGASWAPESGGDVETVTLTAKICSFTPEASETMSPPGGTNNSRRAALRAVTLTARVCSFTPEPARPRTHQKEETPDTSETSEGTNSRCATLRAVALTARVHGLILEVSETKNPPIPDTLGL

SEQ ID NO: 933999 - protein, 164 aa, Homo sapiens
MNQGDSNPAATPHAAEDIQGDDRWMCQHNRFVLDCKDKQPDVPFAGGSVVQLLQPYEIWRELFSPLHALNFGTGGDTTRHVLWRLKSGELGNTKPKVIVFWLGRNNHENMAEEVAGGMAAIVQLINTRQPQAKIIVFDLLPQVMNVLCSTGKANGSAFVCWRRG

SEQ ID NO: 934000 - protein, 136 aa, Homo sapiens
MRNGIDSYPVCSLLPCEDSEFGKSFEGETSCAFSILQDSNFVITVCQKFCQGPSVDSYLSAGSRSAKGGWKMWLCVAVKKSISSSSPPRPSSNSQAQIHVQNQDIFSETAVEPQFTSERLSSFWNCIPSSLAYFYT

SEQ ID NO: 934001 - protein, 264 aa, Homo sapiens
MQLPDLLFIQLPEEVDLVSQPVQARLQLYLVHVSFIHILLEEDKCICHRFTHIDLILILVLEVLHQPMNVANLRLQLQLLLAQSLQLPPKVVDVTLEHVVHVALSHLLLLQEAPLGLQHLVLLLQERYLVDEGDKFAYERLDMLLLLGAHGLDVGVHLQVKAAQQTLVDHDGGDASDAAGPTIASAQATPEAAAAHSGEAGEADAGTGPTRVEAAAEGPCARGGHLVRLLGHPDGHGGGRSGGSSVEVFPNRRIHVNVYCFLIL

SEQ ID NO: 934002 - protein, 183 aa, Homo sapiens
MDLCPFKQGLHQRTGLLQAGRPRGPSAAGLLEFARGPLQTLFAWVSPAEAAEQQILQNSRCCCLILPLEALSQRGTWLYEVSVGPYWEVSPRQQLQGLCVCMPAAEGQPPFSRQTLCAPQRQKSCPCQLPMKLSLPAQMSVGVMGSPPVRIPEVYGESGLLHAYLTHPFSMSYSGPGMSPGAQ

SEQ ID NO: 934003 - protein, 147 aa, Homo sapiens
MQSFINRKMWGSFELPRDSLNGFDQNADSNMYNKVQAEVVSDGNKELVGNWSKDDFCYALAKRPVKFCPCPSDLWNFEFERDDLGYLVEEISKWQSIQEVTEHKSLENLHTGNVMEKKKPFSGKKFRLAAEICISNKEQNVIYQDNG

SEQ ID NO: 934004 - protein, 157 aa, Homo sapiens
MLRGQESGKSRSEDTREEAVAEVQGTLTFGQTSRRRRSSSKREEATNRLKTGRGLWNQLTKIGATPFHIQGWSCEHEDLYRSWKIVGFGPGLGIELPPTWSPEPGQITQQAHLLMNAREKEEQSYFVSWPSREYDCRGTYRVENEIFVMLSLSHTTP

SEQ ID NO: 934005 - protein, 745 aa, Homo sapiens
MSSSGGSSVTFFLALFLADKCSGCTWRMTEKTNGVKSSPANNHNHHAPPAIKANGKDDHRTSSRPHSAADDDTSSELQRLADVDAPQQGRSGFRRWVPPLPCCFPFLCMEPVRVATTALLFTVPPVLSTKTSKEHCHWIVRLVGIIREWANKNFREEEPRPDSFLERFRGPELQTVTTQEGDGKGDKDGEDKGTKKKFELFVLDPAGDWYYCWLFVIAMPVLYNWCLLVARACFSDLQKGYYLVWLVLDYVSDVVYIADLFIRLRTGFLEQGLLVKDTKKLRDNYIHTLQFKLDVASIIPTDLIYFAVDIHSPEVRFNRLLHFARMFEFFDRTETRTNYPNIFRISNLVLYILVIIHWNACIYYAISKSIGFGVDTWVYPNITDPEYGYLAREYIYCLYWSTLTLTTIGETPPPVKDEEYLFVIFDFLIGVLIFATIVGNVGSMISNMNATRAEFQAKIDAVKHYMQFRKVSKGMEAKVIRWFDYLWTNKKTVDEREILKNLPAKLRAEIAINVHLSTLKKVRIFHDCEAGLLVELVLKLRPQVFSPGDYICRKGDIGKEMYIIKEGKLAVVADDGVTQYALLSAGSCFGEISILNIKGSKMGNRRTANIRSLGYSDLFCLSKDDLMEAVTEYPDAKKVLEERGREILMKEGLLDENEVATSMEPTLLPPSSQHPKQQTPGTSLWIQWYMKREKGRQQQFDQWKGKLDWDKAAQGRWLELFSFCPCYKLGSTELFPIRQPTRSSQ

SEQ ID NO: 934006 - protein, 136 aa, Homo sapiens
MKLSQAPIFTSHENSNLFPNFCDFLGGWKERYLLIEALYSGFLLPHTHPRICNESQPLLQLSSKHTTLMQPSQCSITNTAKYSGVPRVYFSHLYVCEYTMFSSHLELTHYQKVIIKPLMNDLPHDPNTFHQAHYRH

SEQ ID NO: 934007 - protein, 225 aa, Homo sapiens
MASISFHVAAKDIISFFFMESYFPFTAICGEAATKLQIFVKTLRGKTITLEVEPSDAIENVKAKIQDKEGIPPDQQRLIFAGKQLEDGRTLSDCNIQKEPTLHLLLRLCGVAKKRKKSYPTPKKNKHKRKKVKLDVLKCYKVDENDKISALLTNVELECFCMEVKTNLEFLQRKFQAPGWPREVNEQLAYVPELFFRNPDPTNRICWHGPQTVSVSQENVFKLPS

SEQ ID NO: 934008 - protein, 179 aa, Homo sapiens
MCAGISTPSHLQKPIATLTLSLAKENRLKIKVKDDEGIQPAGPNLITWCEELFLAVRLDCTGNGDNGNDGDGGDADDGDDDGDGDDGNDGYGNDGNNDSNDGDNSDDNGDDGNNVDDGGDDDVGDDGDDDRDDGDNDNDDGDGDDDDGDDSDGVGDDGGNDDKDDDDDFISVLLIYFKF

SEQ ID NO: 934009 - protein, 744 aa, Homo sapiens
MALVSQSTEDIRRKLQKQPEFVEKAVRKANARPGENADLLATAIRGIPPKGVGKGGSGKNTQSNRPRLQRNQCTYCKEIGHWKDKCPQLKEKQGTKDYRSVQDLRLVNQATVNVHPTVPNPYTLLGLLLPAEDSWFTCLDFKDAFFSIRIAPESQKLFAFQWEDPESGVTTQYTWTQLPQGFQDSPASFGEALARDLQKFPAKDLGCVLLLYVDNLLLGHSTAVGCAKRTDALLQHLKDCGYKVSKKKAQICRQQYQSLLCENPHITIEVCNTLNPATLLPVSESPVEHNCVEVLDSVYSSSPDLRDQPWASVDWELYVDGSSFINPQGERCAGYAVVTLDAVIEAKPLPQGTSAQKAELIALTRALELSEGQYFYISHLPALAKAVAQQCVTCQQHNERQGPSVPPGIQAYGVAPFEDLQVDFTEMPKCGGNKYLLVRVCTYSGWVEAYPTPTEKAYELPMSTVFEMRLRTEGWWGLINDTSKVLVRTEEKGVPKHITLKFDACAVINSSELLGFPVYASHEKRSIAVGNWKDDEWPTQRIIHYYGPATWTQDGSWGYWIPIYMINQIIRLQAVLEIITNKTVRALTILARQETQMRNSIYQNRLAFDYLLAAEGGICGKFNLSNCCLHIDYQGQVVEDIVRDMTKLAHVPMQVWHGFDPGAMFGKWFPVLGGFKTVIIGVIIVIGTCLLLPCLLTVLLQMIKSFIAILVHQNASAQVYYMNHYRRVLQEDMGSENESENSHY

SEQ ID NO: 934010 - protein, 167 aa, Homo sapiens
MRAAMGATPYIATGLELPKALGAHFLQDALDTGLGTCCIGKIKVFRTNGHNTLKRGVSQSAFLGNESGICDHSHMIAGAAIQQGACLSIGILDTLIKMLPWQHSFILLDDPDLLENALHSLGGFQENETLIEMFLMGEIYEKNLVVRDMLSSNVVPQQGVLVIRRTI

SEQ ID NO: 934011 - protein, 264 aa, Homo sapiens
MAKVGGGVSELKVSLLQSLPFGLDQQGLAEGEHLLLGSHHIAFQHDKVIGHFATVDKATQRVDALVRQVIVNGGIVLDQFAVHDRVALADLIDLLVDLTFALGHPDDFDHLILPKHLVDRYLLLEPLLGPVQLLSHSASVHLDLHQVGFLVQRKQAYLGVGNDADDLAVLLHAAEVLLHLLFAILFLPFLAVLGKGLLLRFMSVLIETPFALTADVLSKDGLESPDASKGFPISHNAHNHHGWLSPQWPQPLPPPSYSPWILAY

SEQ ID NO: 934012 - protein, 178 aa, Homo sapiens
MTQAAPHHLFCSHLYSFVSLSSCGTRKTGSRAVQKGIVGREHHTESHTGALPSGAVRREPPSSRPQNSGFTNRLHRAPGKATDTQRQPMKAARSGAVPCKAIGVELPKAVGAHLLHQHDLDVRLGVRSDHFGTLWFKDCPAGFRNCTGPVAPLFWPISLIWNECVYPMPVPSLYLGSN

SEQ ID NO: 934013 - protein, 319 aa, Homo sapiens
MAHVYKNLTKKKQTHRHINILFNYSHSYLEDVNMLEILQHLALKPTGNEDEREKTHFGSLSGVTVHWGKGNDQTFQGLVDTGSELTLIPGDSKRHCGPPVKVGAYGGQPFVHKIGHAQQHSIIRWKRYICDQARAVLEGTTVHLVVHFARKEKWPVVRSYTDSWAIDNDWLDSQGLGRSIIGKLVTKKFGEEAKKGVTVLVGVTDPDYQNEISLLLRNGSKEELCPGNFAFSQNCYEVHLEVSFSLWSFPNSTGIPSQGALQDKVRNGFPGERECQQGSSCCFLYPCISLGSLNSSQLQELKIKSHIKDIMNEGMNGTK

SEQ ID NO: 934014 - protein, 213 aa, Homo sapiens
MQDCPCRLMFQAYPNGPRAPGQPPWLWASGQPAAVTSSSIPVLQTQALHLPQHQASQRLQVDPHGPRCQWACFSKPKVQANFNRPWSQSCPKHLGSRYTQEDPGFRPHGLRLQVNLNARLILADSGLRPTQVPGQPMPDRFKDSPHEYRLQALPCKPVPPQWIQAPDPILWNTHQAHQAAALGTRSTCLNSSSKPIHGPGQMAAPEFPDSLTN

SEQ ID NO: 934015 - protein, 292 aa, Homo sapiens
MLVSFDLHDSFASVPSAAGLLEFFGGPCETCLPGYHQWNLQISKHCCLFLPLEALSQRGTRQMPSGALLYEVSVDTCWQVTPSQEAWGACRQERLSLLKLRPQPPLPPGALSQGDGSFIYKPLNGAAFFLLEKLCPERRNLERQSSYSGYAESCGSISLPSPPEQVFYNTVLYGKMVLHSSPADLSRAVHKGNGGWVPPNRVHTGAVPIGAMGREPPSSRSQNGRSTNSLHNAPGKTTDTQCQPMKAATKSKGQNFPRPWEPNSCISMTQMLDLGSKKIRYFLTSSSLIKDE

SEQ ID NO: 934016 - protein, 158 aa, Homo sapiens
MQFFALYSHIITRKPFCFGARIHGFRNQGVEVEVAPLTIIPSDPLAKFLLPIPTTFHSAGLEVLVPEGRTLPPGDIMIPQITRVCEGEREEHTLSLFSPCTPLIPLTLAGTAMGTKAACTNEARGPRGQELSTLARVHPISPAVSSLEFPRLHLCHGY

SEQ ID NO: 934017 - protein, 165 aa, Homo sapiens
MNFCGSTPVHIPSAQAGWNYARDPLPPGCLISNLEGSADRKMWEELPRDLLNGFDQNADTEMHNTIQAEVVSDGDEELVGNWSKCHSCYAKILVAFCPWSSDLWNFELERDDLGYLVEHISMQQSIQEVREHKRLKNLQLDDAVEKKNQFSGRKFKPAAEICLSN

SEQ ID NO: 934018 - protein, 148 aa, Homo sapiens
MKIRKNQHKKVENAENQNASSSPKDHNSLPAREQNWMEKEFDKLTEVGFRRWVITNSSELKEHVLTQYKEAKNLDKRLEELLTRITSLEKNINDLMELKNTAQELREAYTSINSRMDQAEERISESEDQLNEINVLYSGDPSHMQRHT

SEQ ID NO: 934019 - protein, 126 aa, Homo sapiens
MVSVSLSHFIPFLSVIYYLLIWTSCTNNCKVSGSYYFYLERSYFSSCRRTEYGQITWILLKLVCLHFVLSLRCIPFRVLPAGFCHLPGCFFLLTEQNGKRIMFQTTKVKTMKNNGQLSNPCIITEC

SEQ ID NO: 934020 - protein, 151 aa, Homo sapiens
MGQELGTRQTNGRTKRAGCNPHPNTTGHIVGDEKERSREELQFFGDCKPRSSLSQGCETFFRALHFRASSPSFQVPPHSLVPEAEATCDTLGLATALQGAGACASAWSCPPHHSQRAWPCAVAGPHFCFFTHPSPLCAWPNLGRHGIRVFN

SEQ ID NO: 934021 - protein, 161 aa, Homo sapiens
MGPLLSDWAPLLFLTLTFLLWAWECGSQSSGVIFPGGLWLPLLSHTCRHGSGGKLAVTGFTLLPQSPQSQRPVSLPPCPINSTKSISRQPVARAENLPQTISLPVEKANRLRVFRHLREPARVIQVLQSVCGFSQLSWNKMNILALTTGIHHCTGGASHGN

SEQ ID NO: 934022 - protein, 143 aa, Homo sapiens
MNILYKNPYELGVSPEDIRNHYNPWVWLFYTNTCFLETVISFNSFYLFLSGWVHLKALSSSSKIISSPWSNLLLKLSTAFYSSLNVSFISIRFDCFFFKISISRKCLIYILDLKNSLGCFSCFYCISLSSLIINILNSLSGLP

SEQ ID NO: 934023 - protein, 164 aa, Homo sapiens
MWNFELESDDLGYVAGEICKQQSIQEVKECKSLENLQPDNAMEKKNPFSRDKFKPAAEICRSYKEPNINHQDNGKISPRNVRNLHGSPTHHRPEGLERKMVSWARTRAPPDVSSLKTRCPASQLLQLQPWLKEAKGSRLPSGPGQDQKCCPGTKAWNWESQEPT

SEQ ID NO: 934024 - protein, 141 aa, Homo sapiens
MAGCGSLEAGLSEWYQLYFPLGHLWGIAPGSLEVYREKLAIGKALGNLVPKLSGGERLTCILVGQIKVATREEMSVSVAMEHRNQTKNKPQGWFCRYFLYKRCENAQMKGQNLIHCLRCFSLLVYEKGINEFYVKCLRTKR

SEQ ID NO: 934025 - protein, 146 aa, Homo sapiens
MLRGCCGPGGSCSVRREWVGLCMAAGATLLEFSTSQAWSASTRARHGQFFLPTLVSLVIEEPPPAGTPEAHGKSKLLLSSSTHPLHRSHWGQEQVLVQGSPVQGCQLPFPSAQLLCLSSFHPWCLPSEDQLGVFQSSQPLSGSSST

SEQ ID NO: 934026 - protein, 155 aa, Homo sapiens
MDHKVQAEVVSDGDKELVGNWSKGDSCYVLTMRLVAFCPCPRDLWNFELERDDLGYLVEEISKQQSIEEVTWVLLKLFSLKRETEHQSLEILQPDDTLEQKNPFPEEKFKPAAEICISNEVPNINPQDNGENVSRACQRSSWQPLPSQAWRPRRK

SEQ ID NO: 934027 - protein, 225 aa, Homo sapiens
MGFRDLKSPAGLQVLNDYLADKSYIEGYVPSQADVAVFEAVSSPLPADLCHALRWYNHIKSYEKEKASLPGVKKALGKYGPADVEDTTGSGATDSKDDDDIDLFGSDDEEESEEAKRLREERLAQYESKKAKKPALVAKSSILLDVKPWDDETDMAKLEERVRSIQADGLVWGSSKLVPVGYGIKKLQIQCVVEDDKVGTDMLEEQITAFEDYVQSMDVAAFNKI

SEQ ID NO: 934028 - protein, 252 aa, Homo sapiens
MGISQPMPVALCWGPEERIKRALSPPAQSFDLKYATALHFSLVIKEDEQDHALGKAIQGNEAGMQSESRRKCSQQQGGGKEWPGTRRGLSQQETTKADCGSKPSPLFVKRIHNKAWTPTDKLWFSVTQALRVQELCDMAVPIHGHGFLLDDLTRAELQPLRIHMTSLTLYLPQNEGLYFPKMVTIMSLVPQSSVSAEPLTLLEPSHHAVKKLKLVHMERPHGKMEKPCLQVVAFCGPKVLGELDPKVQVTEA

SEQ ID NO: 934029 - protein, 154 aa, Homo sapiens
MNRNDDRGLISHGHVTITRLVAELKKKSYNRRRPFSRHVKLESGNVCMECGKWTWPKCQTILDHEDKDSIRYHRRNLGFCNGKLSGSSDFSLSILPIYCTTQDLVPPYCKEALDWFWEARCKGTKLLSGALEKHKKEFIRILQCKRTDLYRTRC

SEQ ID NO: 934030 - protein, 155 aa, Homo sapiens
MPISHPTACFERTKACYHSPHNSRKNTRALPADRVRLISQTSIPYKTTTPFLPRHGKVEWTKSLSKTHLTKLSHQLKKDWTILLPLCLLRSQTCPQNATRDAFTMKPLKLKLQGPSIAEASSMPLAEHEQCALIFEGIEKTNNNCNPVVLDAKLS

SEQ ID NO: 934031 - protein, 188 aa, Homo sapiens
MTRYYPIEGVPRKLLSHGFSQHGRKLRASITPWTILIILTGCHRGKRVVFLKQLGSGLLPVTGPLVFNRVPLRRTHQKFVIATSTKIHISNVKIPKHLTGIYFKKQQLQKPRHQASEIFDTEKEKYEITEQCKINQKAVDSQSLPKIKAIPQLQGYLRSVFAPMNGIYPHNIFHLLYSAVISFCLELP

SEQ ID NO: 934032 - protein, 156 aa, Homo sapiens
MAICSHHGHSGLYVFCGFSAGLLLLGSSVEDGHTKKLLGATIYIVVYANGIPGILERTAPVIYGNGPPKACFIQNNTYSYWMTLLILNLQVETVLRLCADQYKHLLEFCENQRSLGKELREISGNQGLTLIGHEKLNSANNHLTHLTELGSRSIPS

SEQ ID NO: 934033 - protein, 207 aa, Homo sapiens
MSSDRQRSDDESPSTSSGSSDADQRDPAAPEPEEQEERKPSATQQKKNTKLSSKTTAKLSTSAKKIQKELAEITLDPPPNCSAGPKGDNICEWRSTILGPLGSVYEGGVFFLDITFSSDYPFKPPKVTFRTRIDHCNINSQGVICLDILKDNWSPALTVSKVLLSICSLLMDCNPVDPLVGSIATQYLTNRAEHDRIARQRTKRYAT

SEQ ID NO: 934034 - protein, 140 aa, Homo sapiens [sequence omitted]

SEQ ID NO: 934035 - protein, 152 aa, Homo sapiens
MVDAPLPAKLLCPRSISDCCTSSEQGSVGNEEKNLLKCDINGLQEALVCKDRKKKNPLLQVYCREEHFILAKMGIAKGEAEFCFLSGSIDGLFSWDGWDGWDGWDGWDGWDGWDGWDGWDGWDDWGLSPYSFSSSIWLTCTVYEAAEYESLN

SEQ ID NO: 934036 - protein, 152 aa, Homo sapiens
MQASWWKCGLLWVTHLPFPHISKRNNMSHINLYRNVHNSIIYKSPKWKQSKCSSIEGLHASLKKMTYLNGFDKHRAEADFQIKLLKSSQGQFKGEFKLSYVINNKGNHSEDTEAQLSSIHIEKAAICKPRKEASGKPNSAGTLTLDFQSPEL

SEQ ID NO: 934037 - protein, 179 aa, Homo sapiens
MGAEVVKGPERPHLIGTHVPLISSGCGKHLSLTLYQEGLSAAGLLEFAGGPLQTLFAWVSAAEACRTTDIGEQQMLLPDRSSGSFVSEEYPATLQVATPSCPPQFWGDLRVYVSSSTKTAEEGTLAVIVAQGPFTCHLGLHPRQTQAISRKQQPVEHITKEQQAAKFFITGLLAANLKL

SEQ ID NO: 934038 - protein, 134 aa, Homo sapiens
MIRMKSQCKCVLSRECMASSGIGDQEEAKAQWDELGKNAEPREKTLRKAQPIKTHQSWHPLGRIPENWNKKEVQLTSQQERSSLLIGLNLITTKLMDPGHCAKETNFCLIYRTLEHSFKRYFNWFVKRNTRKNP

SEQ ID NO: 934039 - protein, 138 aa, Homo sapiens
MAATTKDPCWQAGTLSLLKLRSQLPLPPGALSQGDGSFIYKPLTGAAAFLSEMPCPEMKNLDRQSGYSSFSQLQWAPSISNFPASLFTQCGKNCLLKPQWELNNEITWTQEGEHHTLGTVVGWGEGGGIALGDIPNAR

SEQ ID NO: 934040 - protein, 137 aa, Homo sapiens
MALVAPPEDQQQCGLMGGLKELPIILEIEGKIKHFTKPEKEEKRERRGATHFYMTRSNKNSLTIATKGNSAKPFMRNSSHDPITSHQDLPPTLGITTRHEIWVYGFTGPAIGVLPGTTEGYILQLSSGRRGIPEVEV

SEQ ID NO: 934041 - protein, 135 aa, Homo sapiens
MPLILQLLLEMVSIVVSRCFSLIAVKRDKEHIRVQLKAAVWLCFGRTAVLWWGIPSIPEYFDLDSPKPTSCNSCHPNRKDGSQALSQGTLSHPSSTVVKDADDACSKENEEDSKKVAVLLAFEDEGAICQVKSKV

SEQ ID NO: 934042 - protein, 140 aa, Homo sapiens
MFRCVWSFFLPVGLWSHLTSGVKPQTFSVSVTALKGGASRVVCSSLWVRGLADFRGEAADLHRMVAGESFSAILFCLSSLASPTDFSRLRPWIKFSGRQTAAAVCLRMSSSITKLKGKVKLETAYGQPDSYSVQSRPSAH

SEQ ID NO: 934043 - protein, 149 aa, Homo sapiens
MNLKPEGKEERVTSYVDGNRQNENLCKETTVFKTIGSHQTRSLSQEQCGKVLPPFTGYMRSFVIWACSSDMSQSQEEAVPYFSLEVSLDQSLSEGDEHPWGVSPYCWALLELSHAQMSLALCLLQLHLCLISEEIPLPAKMSVDAAGIL

SEQ ID NO: 934044 - protein, 196 aa, Homo sapiens
MPQCLLFLSLYPVVISPRSVADLQMPSGNKGHESETLGIYLVHYASVAELSPKPQVKVFPIFSPVSSSIEVYSLSHHHPWLTASTAWLPLMVKQSPRVLLSERQNVTLFGNLIFTEIIKLRLWWALIHYDLHYKKGNLDTEAHTGKCHVTIKAEIRVTLLHTKEHQRLPANHQKLVEKHATDASSHPPEGTNLPTP

SEQ ID NO: 934045 - protein, 323 aa, Homo sapiens
MGHKSKLSSGFTHFHFQKQILSLTSAKIALSESLISCRESTEVVEKQTQALIMRVADLQRKVHAQPCQVPTVKVKDKLLHLAPPTTKKEAQHLVGLFGFWREHIPHLGVLLQPMYQVTRKAASFEWGLEQEKALQQVQAAVQAALPFGPYDSADPTVLEMSVADRVAVWSLWQAPIGESQWRPLGLWSKALPFSADNYSPFERRLLACYWALMETEGLTMGHQVTMQPELPIMNWVLSDPSRHKVGHAQQHSIIKLKWYICDQARAVPEGTSVKGNLPSGQNFKQCTWLCTLHGRRNGQVCDYILINGHSQWFGWMVRNLEEA

SEQ ID NO: 934046 - protein, 147 aa, Homo sapiens
MGMSESIKGLMSLEICIMIFIILETIKLRIREVRWLSQGHMARRWQIWALSNACLSGFQAGALFAMEYSLPLWQSFLLLTPLSSRLTDLCPWDFISAIKTGFCGRRDLEKKETQRQSIEKEKWAQGTGVQHMEDPRRHRPLSSLSIC

SEQ ID NO: 934047 - protein, 147 aa, Homo sapiens
MVAAEGEMGSQNKNTEAGPPFARGSQNKHLPIVDISSEDLTATAKALAIACKSLLALKLIASSLCLYLVEYMRDEDRLEQQAPHLEISLPIFFKRDPLLGTYSMPSFKPITFTQIIDLSQPLCEKSIVIIPILVMREPRLGEAELLS

SEQ ID NO: 934048 - protein, 238 aa, Homo sapiens
MLEKKVDELVKFLSVKYTTKQPITEAEMLKGVIKEHKDHFPPIFMQAHECMEIVFGTDMKEVDPISHSCVLLKSLDLTYDRRLSDDQGMPKTGLLILTFGVILMEANCASEEKIWEVLNIIRVYAGWKDFIYGEPRKLITRDLVQEKYLECCQVSNSDPPRYKFPWGPRAHAETTKMKVLEFFSRVSGSDASSFPLLYEEALRDEKEKAQAIIATMGGTTLMASAHSWAKSSSFSCPE

SEQ ID NO: 934049 - protein, 146 aa, Homo sapiens
MRNMRGSKCPCQYFGCCKDGEHNVWVCGSILPELSCHNGSIKEPLREGESQNFMESQIRFPCKGQWSLREKEHNSNYNTYPPTLSPSSTPTFSRVYFCASNSGHVPKPLEFGIRYKAREHKNYRNTSSTMQGAFLLSKSCDSKLPA

SEQ ID NO: 934050 - protein, 152 aa, Homo sapiens
MAELCICDLTPLVFEHGLGCICKLNNPCSLAFEEDRDWNSLEDSGDDRKMWKGLELPTRDLLNAFDQNADSDMDNEVQAEVVSDVNVELIGNWSKDESYYALAKRLVAFFPCPRDLWIFELERDDLGYLAEEISKQQNFQELKLESHDPFFL

SEQ ID NO: 934051 - protein, 146 aa, Homo sapiens
MRDQMMSQEGVSAEGIPGWLAICMCGGVAQMLNRFEPPSETSNEHETIPPAKGILLNHPNNAEITQFTSIQAGQDPHNSTVLPVKKPDGIWTITVDYCKRNKVMIPVHAIVHNIVQLLGKVVLKLGSVHAIIDLVNTFFSIPLSGD

SEQ ID NO: 934052 - protein, 188 aa, Homo sapiens
MLNSMSVISTLSAWFRTIAWGTSMVIRSDSRIHAPTCVPIAVMMQQGAHALAGMGQQQGDKALVNPYLIVVDKLLDVLQDSVCQYFVEDFCIDVHQSNMTLKQGTAEHWPVFVVVVVVVVVVIVVVSPEDDCADHTACTHPIGSPSGVCSRSRPNQLGFFPSLPCPDCWAFSSVPGHGLSKAEAVPGQ

SEQ ID NO: 934053 - protein, 161 aa, Homo sapiens
MRQGVKGDHFEALRFDCPAGFQTCMGPGIGKKDVKKEMLQLGFEGRGDVTLPISFKLSYLQWVWQGYSESSDRGEKGSDPTYIYNHRSLSVSMIVKTLAPSSIGGLGISISSDHFMSKSFTFQTQADGPTKPQEATEKNNLRGPKVLDQLCFPLLEDRQEH

SEQ ID NO: 934054 - protein, 132 aa, Homo sapiens
MPSDFPRESKPPKYYKTKLERFYSKLLMKSRNGVSSAILEEVRGLPSVHYYPSNFISIHEENGVNRSGNLETVSVAPTLCLCAYSKTTKADIFVVVVLAFLSWTYKDSNCLLAKVSSKGEDFSSRKKAGNRR

SEQ ID NO: 934055 - protein, 166 aa, Homo sapiens
MKDFTITRGKAHAEDPQEHIHTQWVDDDKNVSKGVVSPIDGKSMETITNVKIFYGSECKANGKVIRWTEVFFPENPDQHNCLSDPADHSRLTEHVTKAFCLALCPHLKLLKEDGMTKLGLRVTLDSDQVGYQAGRNGQPLPSQCMNDLDSALVPVIHGGACQLSGN

SEQ ID NO: 934056 - protein, 213 aa, Homo sapiens
MKLEMERCFISLSRNPGCVTRPSQASNYQSSTSRDGYSSILWQYNSEMKDFTITRGKAHAEDPQEHIHTQWVDDDKNVSKGVVSPIDGKSMETITNVKIFYGSECKANGKVIRWTEVFFPENPDQHNCLSDPADHSRLTEHVTKAFCLALCPHLKLLKEDGMTKLGLRVTLDSDQVGYQAGRNGQPLPSQCMNDLDSALVPVIHGGACQLSGN

SEQ ID NO: 934057 - protein, 155 aa, Homo sapiens [sequence omitted]

SEQ ID NO: 934058 - protein, 145 aa, Homo sapiens
MVPAHIGEGRSLLSPLIQMPISSGTTFTDISRNNALSGYLNPVKLTPKINHHNYHLDADNCNNPPALGFASSDRQMITNGLKPNQLHLKRLQPKWLVENEFNEPTAVFISLDALLTLFKIADLRTIQQFLPKSSVQETAPQFQLS

SEQ ID NO: 934059 - protein, 136 aa, Homo sapiens
MVLPTAGPIAIACGYVFPWTIVCPPLLPVVPPFQTEPMFILHMLIDVSCFLKMYKTQLCSDHLRHMSSDPPEVVSLDSPEALVGPLRSCLTVLTLNRFIQLLSAKPYRKAQWLLIGLLWFIGNWWSALQLCLSENY

SEQ ID NO: 934060 - protein, 145 aa, Homo sapiens
MRSFPSNSQAPLLQVCWSLLEVHSRPCLPEYHQQRLRNSKDCCLLLPLEASPRGSPTRCQPKLSCMRCLSTPAGRCLPLRRMGVRDPLEEAVCPLAELECCAGKSAALFRASRQERLSPLKLHPQPLLPPGALSQGDGSLNIKTL

SEQ ID NO: 934061 - protein, 139 aa, Homo sapiens
MQYPNWLLLSWSINIISLIVPLLLLNYEESEPAGLEAKSTFPKAPPHTSSWGTDIWMSLKSKNTYSAHIWREREDTGGLTTLKHLPIQKNSWYLFPSTSLAFFLSPAGRLVSVAEASSHPTPSTPYYPPSCPKVQLQTP

SEQ ID NO: 934062 - protein, 185 aa, Homo sapiens
MRSDGFIRGFCFCFLLILLLLLCKKCLSPPAVILRPPQPCGTNEKELNKNTAEGENATNYDAKKWFCKEVLWRNLTGDLDVISTAYSSLHLQSLAEGVLNWLLKINRPTSKSTGYITRQAELLCPYLFGTPDKFDQSYKWRWIGSGKKLYNVVMVKMKRDGYKRHEELRIPMKQMCTCTPECKIK

SEQ ID NO: 934063 - protein, 151 aa, Homo sapiens
MTCYKPQKEDLPGSISPIKLRAERLVRKCILIISFNVSCIVGYRNKPFEKYYQWRFAGLPLNGHLLVNMATEEAEASEHADHFPKKLHHFTSPLAVYEGSDFSTSSPTLVIVYLFDHSHPIGNEVILHCGFDVHFPMTIKHFFMCKNRHFV

SEQ ID NO: 934064 - protein, 127 aa, Homo sapiens [sequence omitted]

SEQ ID NO: 934065 - protein, 144 aa, Homo sapiens
MEFSGQIANLTVAGLALAVLRGDHTFDGMAFSIHSYEEGTDPELLLLLLPPPPPLLLLLLLPLLLPPPPPPPPPLLLLLLLLLLLLLLLPPPPPPLPPPPPPSSSPSPSSSFSSSFKMRNCLLLVIFQCLQVVVTLYCCYMQES

SEQ ID NO: 934066 - protein, 150 aa, Homo sapiens
MRSYWIRVSPNPMIGALIRREKFRHRHTGRRPRDKRGRVMHLQPRNAKYCHQRPKVSTGGSWNVFPMDKEVLHKNVREFIIACSCIFMICVLKRLSDNSNIWVISVSAFVDCSHSSVIVLTFGVMSDFLLYPGHLGYCVRRIWFLFNPPY

SEQ ID NO: 934067 - protein, 146 aa, Homo sapiens
MNNKKASPLPLTGQAGPVKEALKGLLANHQASLNTTIYHILTRNKPFKQKSADKGPGAKFNPTSPDKTAPPPQTRQPHLPRQDNSTSPDSSLIKAQQGQFLVRTLLLAYERERENELSDVSSYKDTNPIRKHINISAVKCVYLHIK

SEQ ID NO: 934068 - protein, 141 aa, Homo sapiens
MPGLHPKLIKSEYPAHSNAHLISGAFMLYTSPPYLNLESQLHFDHLVAMDCPTTPSVKPTGSQEPISEKGISFPANCLPNVRPQTWPLDETFTFTHHPLTDSTRATSTIASSIRGLTELILIIPPLFATEPETYPYLQFAI

SEQ ID NO: 934069 - protein, 216 aa, Homo sapiens
MQARESSHGGCILQSHRGELPKAVGAHLLHQCGLDYPWKLSICLLDDPAVLPLQAEEQGSQSESQNLKSREADSRLWSVAEGLRAPGKPLKSYSAFGLLVALKIEGFKGKGPERWRGPGHLWDLGAHCLGSLQVSVPHILAQCSPAALVVTQAGPGASQAALPEARREHPAVHLKTLELISHKTEGVWVFEGNHIPRNIVFRSLFVTVAGVADPNW

SEQ ID NO: 934070 - protein, 139 aa, Homo sapiens
MQPGLRTTALLISVCNFMWMKSPLCEVWWEERERQEVEGSENWEPQEEQRCEESCEMEKMGKLTILHTMQLCPGLSWRASTSEDLERSDHDTVSMTVNSQVMLMLLDQRSHSEKEWTSVVLEQVYRHSSIALPRTDLAI

SEQ ID NO: 934071 - protein, 209 aa, Homo sapiens
MTSPPQPWMATLPWAVGLPSGTLLVTSPLQPWMAALPFQPWAVGPPSGALVVISLQQLWVATSPSQPWAVALCSKILVMTLPPQPWMAALHSQPCLGWQHPPPPLLSPGQQHHLWNLGSVSTHWNPAIIPTPSGLGSGPGIPGGRPVPFGPGERSHPLRPGQWPCSLEYSRSKWLSYLHKTIQPNPLTFYNEDHLSSNAQYQEAHQKYL

SEQ ID NO: 934072 - protein, 357 aa, Homo sapiens
MAAAELADTQLMLGVGLIEKDTNGEVLWVWCYPSTTATLRNLLLRKCCLTDENKLLHPFVFGQYRRTWFYITIIEVPDSSILKKVTHFSIVLTAKDFNPEKYAAFTRILCRMYLKHGSPVKMMESYIAVLTKGICQSEENGSFLSKDFDARKAYPAGSIKDIVSQFGMETVILHTALMLKKRIVVYHPKIEAVQEFTRTLPALVWHRQDWTILHSYVHLNADELEALQMCTGYVAGFVDLEVSNRPDLYDVFVNLAESEITIAPLAKEAMAMGKLHKEMGQLIVQSAEDPEKSESQVIQDIALKTREIFTNLAPFSEVSADGEKRVLNLEALKQKRFPPATENFLYHLAAAEQMLKI

SEQ ID NO: 934073 - protein, 147 aa, Homo sapiens
MEVDPRGCRCWLGPHLVYLGVPCNTLSSDFLPEAPGTELIGGGGDCVKMLRGNRGLLCTWTRTMTQLKGEDFDEGVFGPQEPAPVEEIWPQEGVNKGELLEAPHSTPHKRFPLFYIGNQAISFRAPLHCTEGPAEKTYLHGACILWI

SEQ ID NO: 934074 - protein, 335 aa, Homo sapiens
MESSFSFGVILAVLASLIIATNTLVAVAVLLLIHKNDGVSLCFTLNLAVADTLIGVAISGLLTDQLSSPSRPTQKTLCSLRMAFVTSSAAASVLTVMLITFDRYLAIKQPFRYLKIMSGFVAGACIAGLWLVSYLIGFLPLGIPMFQQTAYKGQCSFFAVFHPHFVLTLSCVGFFPAMLLFVFFYCDMLKIASMHSQQIRKMEHAGAMAGGYRSPRTPSDFKALRTVSVLIGSFALSWTPFLITGIVQVACQECHLYLVLERYLWLLGVGNSLLNPLIYAYWQKEVRLQLYHMALGVKKVLTSFLLFLSARNCGPERPRESSCHIVTISSSEFDG

SEQ ID NO: 934075 - protein, 161 aa, Homo sapiens
MLTRPAPNAFPSGAALGQVESVTVRHSVNKHILNAFLLVPGFLLGPGTTEMKKPSLLLIHPSPLQPQVSWHLSPFKARLDVHFILLSEGRANGFESSLVIRSLMEQQGTLLERATLRTSNGALSHGLWVSQNSRGNASLFRLLFVHTFENSGDKIMQSALC

SEQ ID NO: 934076 - protein, 152 aa, Homo sapiens
MIPFHPHCSPMSEALLLSYRSLHPQHSSPERLHGTDSFCESRGEPLGIDPGPVTATNSHEPSWQGSGGFPTSEFPDMGEAIWPLLLPTNPIPTHTYAHTCPQQYLQRPLLLRSPCPEASPLEQDKISPGELHAWYHNNVCTCICYPRVGTLP

SEQ ID NO: 934077 - protein, 196 aa, Homo sapiens
MCQRTRPHLPVDISAQKTGHDTSLSGVTASQKEPPNAPSCIPSTLEPVYGKRLQACAMRTGDTSGCSAEAEAVTDPLLVPPFDFQCPLAADVATATIRKRSLLFKARATVRGRGNSMLHGAASEVHSQDGTFAAQLCQQLEDRCLRVRGRGQACDVRELRFKTNPLAYLSMVSKPSYVDILKPRLPMMPPSRGDCY

SEQ ID NO: 934078 - protein, 134 aa, Homo sapiens
MGKKTKQEESGGSARRGGKGICGGKISRPWSDEDNTWEPEENLDCLDLIAEFLQSQKTAHETDKSEGGKHKADSDSEDKGEESKPKGKKEESEKPRGFARGLEPERIIGATDSSGEVLEPRWPNRNNSSLQLPT

SEQ ID NO: 934079 - protein, 243 aa, Homo sapiens
MAKEVQQWAPPHEIHWPYHVPHHENGLVEWWNGLLKSQLQCQLDDNTFQGWGKVLQKAMYALNKRPIYGTVSPIARIHGSKNQGMEVEVAPLTIIPSDLLAKFLLPIPVTLLSAGLEVLVPEGGRLPPGDTMIPLNWKPRLPHGHFGLLLPLSQQAKKGVKVLTGVIDRDYQDETSLLFHNRGKKEYAWNAGDSLGCLLVLPFRVTKVNGKLQQAQSNRTTNGPYPSGIKAWVTPPGEKNMTC

SEQ ID NO: 934080 - protein, 159 aa, Homo sapiens
MHTSITSLQRQLDFLVGVILQNWRVLDLLTTEKGGTCIYLQEECCFCVNESGIVHIAMINDALFPFYTKVRNKNVSPNCTILQTPTILQTGQSGKFHQGLSCEKHPVRQVPGLTPGCTKFLHYQQPNTPPPPHFHNNPRPLLPGTVTGPAYQTTSFNSD

SEQ ID NO: 934081 - protein, 134 aa, Homo sapiens
MGKKQSRKAENSKNQSTSPPPKKCSSSTATEQSWRENDFDKWREEGFRRSNFSELKEEVQTHHKEAKNLEKKIKRMANYNNQKYRERHKDNPREEQLQEHTCQIHESRNEGTNVKGSQRQRSGYPQREAHQTNS

SEQ ID NO: 934082 - protein, 138 aa, Homo sapiens
MTVLTQTSSQHSTGCHAKPAITTPWLLAVFFQGPGVLQSVGGKASQADIILGLSPVSAIFQLYDVSFPPGKQGRPGLGTALSSMPHNCCVLSPRPQEALCTMQLLLGGRGGWASVIQGCFFYLFSASFSNMKLTPDGC

SEQ ID NO: 934083 - protein, 181 aa, Homo sapiens
MKLPEERSGSSICCSAIFAALQPLLLIPRQTGSGVDLQQTPTDLQLGVLTVRRKTNKQKGHPHQNPTSTEQSWMQNDLDELREEGFRRSNFFKLKAEVRTQCKETKNLEKTLDKWLTRKTSVEKSLNDLMELKTMVQGLRDKCTNFSNGFDQLEERVSVIEEQMNEMKQEKKYREKKGNKK

SEQ ID NO: 934084 - protein, 155 aa, Homo sapiens
MADGLLPTKLECPRSTSDCCAGSKNFKPVDLGLLGSVWVGPTESDHLAPWFQPPLQGSELFSVAGVPSATGALGGIFFHSIYSGGSIPDVLDFVFPRVLGAARAWEPVMWLHYWVQWVPQHSGPLSRYSEFYVFHFSSFSLVKSHCWGASVVIWR

SEQ ID NO: 934085 - protein, 174 aa, Homo sapiens
MGLELPARVPTGALPSGAVRRGTLSSRSQNGRSTNSLFHAPGKATSTQCQPLKEASEGVPPCKATGAELPKALRANPLHQPALDACCNHFLATQPMFTQGPGAIQLLCGKAIFDCVFSFKVGSSPRLRVGPEVLQRSQELGLKILEVYLGSQGSFLELGAFQPGVEGGVMPVLP

SEQ ID NO: 934086 - protein, 150 aa, Homo sapiens
MKAIQTPTHDTLKQRRHGGKKGRWRSRSFGFVLFKESESADKVMDQKEHKLNGKVIDPKRAKVMKTKEPSKKIFVGDLSPDTPEEKIREYYDGFSEVESIELPMDNKTNKRLGLSFIIFKEEEPVKKIMKRKYYNVGLGKCELKVAMSKE

SEQ ID NO: 934087 - protein, 144 aa, Homo sapiens
MWQLLQSASKCKDACFPVDVHHSGRGKAAWQVEPNGIAVPGCGPLQTLQHQTLWDPYLLACCATMLLVSWVFYPGEMQAINCSWQSAQDGDSVLWAQARGSFSGYEHWSVYGTHRRWTVLLSLGRLQLIRDVDKAFKFLAPSLV

SEQ ID NO: 934088 - protein, 172 aa, Homo sapiens
MTHSLAITQPLSPANHVIAKWDHEKSGHGGRRGGYTWVQKHGLPLTKADLATVNFPGAETNSKPSIWHHSLGIDIYSRYWFAYPDCNASAKTTIRGLTECLIHRYDIPYSIASHQGTHFMAKEVQQWAHAHEFTGLTIFPITLKQLDWPDIFKYDPAELCTMMSAVVKGRAV

SEQ ID NO: 934089 - protein, 134 aa, Homo sapiens
MVELVYSPTNNSCFHLSVRSQTAVLATSEAPWAWDPPRQVWDIISWYHLSRLLLARKGNSPTPCTSWVRRYPALLCGLHPLSDKPQPLFCMSAAVCWRFTPETVCLGNTSGGYRIAKIVACSILWNLHPRGAPA

SEQ ID NO: 934090 - protein, 149 aa, Homo sapiens
MTSSVWLLPMFTQGPSALQSAFVESCQALNFLFRADLGPGMGASSLYLLPYPTVAELVSKLQDKVLFTVPSPPLKQKEGLPPGAAYCTAWSCGIGVASTVLVTLASVLLGHMPCKCAGTKPSTAPGLAQEFQSLWSRLPFTYVEDHRAL

SEQ ID NO: 934091 - protein, 142 aa, Homo sapiens
MAASPPGGFIPGRDQSSVCIILAGVAEIPTGRSPLSRLPGPTGFSRLEWLIQPNHRNGSRPSHQKFICFKNIFEKGPFLQYMFLGNLDVHMQKKENSLPSLAIYENQITMDKRLKCKTRNYKTRRKHWGNSPVCQSGQRCFE

SEQ ID NO: 934092 - protein, 156 aa, Homo sapiens
MLTGPSEEEVATTLDLLVDYIGLLLPGKEQNFVLTGIITNRFAFPTLNATAKTTIHGLTECLVSTIMVFHTALLLIKELTSQQKKCSNGPGHSSVVLLQFAGVPLQTLVASVFFLPGGITSEGCEIAKMAACSFLWKFHPRRLLPYCQPEHAYRSG

SEQ ID NO: 934093 - protein, 168 aa, Homo sapiens
MKEGPPIPPKPGSMTSIKTSLFKELDKILQEYTTQQSNKLQRGKSKVPLTINNAVSWCSERIKYKKNEVFIDVIESANLLVNAKGSILLSEIFGTIKLKVFLSGMPELRLGLNDSMLFELTGCHKNKLKQSVANSVEMSVPIPNDADSPHLKTSVCSAKYVLEKNIVI

SEQ ID NO: 934094 - protein, 155 aa, Homo sapiens
MVTPTESLEPQPFQDCLIFFPFQVLYGQTAKVLDQVLQSFLPENPDSSEEVPGSTCETCTPTSEGPRAGKALLSGAQLICDKTEPLLPGGQAGTREAKHPHQSPFQVSSRKERLSRVAQAFPGTHRPPEEAMVPPGKERAPEVTQGTSWRCPGTT

SEQ ID NO: 934095 - protein, 148 aa, Homo sapiens
MPNNADIKIGTDGPSAAGLLEFAGGPLQTLFAWVSPVEAAEQQRLLPVPSSGSFVPEGHLPDTSRSSPGSEEGKCGVDPPHRVSTGALPSGAVRRQPPSSRPQNGRSTDSLHHALGKAAGTQCQSMKAAEGAFPEASSAMLPVQPVEP

SEQ ID NO: 934096 - protein, 186 aa, Homo sapiens
MPKDLALESNPSDHPRASTIFLRKSQTDVREKRKSNHLNHVSPGQLTKNAAQLTAECAIVTLVYLEKLLTYAETNICPTNWKRIGLRAILASKVWNHQAVWNMDYCQIFKDITGEDMNEMERHFLMLLQFNLNVPASVYAKYYFDLRSLADDNNLNFLFAPLSKKRAQNLEAISRLCEDKDLWRAL

SEQ ID NO: 934097 - protein, 154 aa, Homo sapiens
MGRESPNLLVAKTPGKSAVFVQECTIPPGLWPQIESYAISSLGSQAFRLGLRSLTCCVTSGITFFIFETAMDTCTCSSGGIRAVKRTLCGTLVVVLFTVLVFSSAGCAGSKIVMSIDSGPLGLYPVSGSLHPIAIIWLSQWSYLVRSCGSGPAD

SEQ ID NO: 934098 - protein, 144 aa, Homo sapiens
MAGEISGNLQSWRKGKQTHPSSQGGRKRYESQVKGEAPLKPSDLKRSHSLAQEQHDQHGKLLEGLYFLEVEAVHVYHFQMTGLPSSSAPVVAAGSEDRTAKLLALLCNLNSHFNGHSEKSLSKLNYENICFRITLVGYSWAISH

SEQ ID NO: 934099 - protein, 178 aa, Homo sapiens
MFYLGRCTSRGINPLETPRGPWSPKGAFQLEGEKCPFSLEAKFQPDAESCKELIANYQVNGENCLQEVGVPENQTTVHAAAPLGLAAQWGCHTPEVYLRVPGRGDHHPRLRLHDHLESDGLNARREKLGYLKTYQNETKGRHNTLAVLKQLFLYQQDQHQCNLGIVKNANSQTRFHIY

SEQ ID NO: 934100 - protein, 166 aa, Homo sapiens
MCLIECHLRECCLTQNLSSTIYSSPVDHVPRETRHHADAHFEYVTAKLLDSGNHAVFPLVHSVSQSLDFRVYIAGKKCNPVGKQELGKDKKEELVNSKQMVTQAIMMAEGSGISFSRFSDLESQMGLLRNKGEIREFVVGNLGRYHWPFWQEKHQLGTFLYWLYHL

SEQ ID NO: 934101 - protein, 140 aa, Homo sapiens
MGIHLLHQHDLDVRHGAKGNHFGALRFDCPAGFWTCLGPVAPSFLPIYHIRNGYIYPTPIPPLYLGIPTGALPSGAVRRKPPSFRPQNGRSTDSLHCTPGKAAGTQLWKQLGMFCVNFTIVCILLFLYGIFHNCQVDQAD

SEQ ID NO: 934102 - protein, 161 aa, Homo sapiens
MVPGAEKLQEVWEVWGATNFKCSSHASQLCAPGSAVCFQVCVCRNASGNRGSDSIGPGRDQEKRYTFVSLKNCLQEHKKEVESELVSSEKNEKNNSFLEHSAPYSPTDSPHASLAVPTSTLITVKKITCIIGQIPFTRGRNYLIWQSYYISTKGSYFSFAY

SEQ ID NO: 934103 - protein, 158 aa, Homo sapiens
MGSSGHQTTCRDLLRAQNTYLVQLSSSGLWQSLVLLPEDDEQLLRNYFPSSLGTLFYIADLTPCTGETMDTLIEMQNALQSLSNRIEQSKERTSVLEDKVVKLTQSNKDKEKRIRKYEQSLQEVWDYVKQPNLRIIGTLVEEEISSIRFQPICTDINI

SEQ ID NO: 934104 - protein, 196 aa, Homo sapiens
MSETFTAAPPITGPEAYEGKMVSWERWFPGLGPGPSCCVQPRDLITCVLSTPAMAKRGQGIARAMASEGASPNLGSFHVVLNLAVWQGNVELEPPHRVPTGMLPSGAVRRGPPSSRPQNGRSTYSLHCTPRKAANTQNQLMKAARRRAVPCKATGVGLLKAMGSHLFHQCTLDVRHGVKGDYFRTLRFDCFAGFQT

SEQ ID NO: 934105 - protein, 143 aa, Homo sapiens
MKFNLLIFTFMDDTFGVVSISSLPNPKSPRFYLILSSKRFIVLHFTVRAMIHFELIFVKGDFLGCHFPHRPKVPRLGEQKDVKRDASQEHRTSELTAHYCLKSLLPAFQCSAPWLSQLWLKRIQVQLRLPLWKGVNNVNMAHY

SEQ ID NO: 934106 - protein, 149 aa, Homo sapiens
MGAFTHCLYLYCILEVVSAKTHCTALTITSIFVCICKPQKQRQHGGPMLLHFGRVLAGAEMPGSKQAFTTVAEVTRLWDQGIPAVDGCDDDDICTGTGRPESLHSFGLVLGLVCTESYNVNRLCVSQLWISTPVPVEVVGGVGGVQWTL

SEQ ID NO: 934107 - protein, 187 aa, Homo sapiens
MNIIECALTNLDGIAYYNCIATIAYSIQYGKHSKEGEEEDEDEDLSKYKLDEDEDEDDADLSKYNIDVSEEGDSNKKKSNRKSHSISQSSHSLSSSCSFSLSNSRSRSRFPSRSSSSQSRSCFSSREHLRSSGLKSRSSSRSHRGSLNNPEPRANPYRTHYFTQAPQVIFWIIPFWFPFKFKKEIRH

SEQ ID NO: 934108 - protein, 160 aa, Homo sapiens
MPPDRETPPSMCQKTPYTGELQLASGRCSSETKLPEEGIGSNICCSVASAGDSQAIGININKKDIHTKTPCELHQHQRPKVDKSTKMRKNLKAKNFKKQNASSLPKVHNSSPAREQNWMKNEFDELTEVGYRKWVITNSSKLKEHVLTQCEKAKNLENRL

SEQ ID NO: 934109 - protein, 144 aa, Homo sapiens
MPHLAAAHAWCTAPTVLHPLSCTHYQTNPSEMNPVPQLEMQKSSVFCITHAGSCRLELSDYGGSSSTRDWITNLIRRTLDGMPNYRRDGIMSVKLSTGLLGSGGGCDRKGQAGPRPPMEYSGRAIMVAFWAFHKEEQAPLRTNI

SEQ ID NO: 934110 - protein, 160 aa, Homo sapiens
MCVCTQQLLRGASGWLGACFHAGIRHSGGGNASHGWEYGGVPANDCAVPLVVAFAQGLGVGRPRLVHDHGGHLTGALHWISTVHQHRSYYVIPQGTQNCPTSSCGQPATPVEASRPSSAQVRLATSDGNKDTRQRDRRKDSWAWGTTTTKTRRPVVAPNA

SEQ ID NO: 934111 - protein, 145 aa, Homo sapiens
MAWPSWTAHHSSGAISGFMFPSQLKGSRGRDFSSGCGRGSFTYFLELDPREMCSNDQQQGQDHRCSSGSGGCQLHLGALPQEIQSHDQYICSAIGFTFVNITTTVFPMSLKSYYLIKLHNGLSSQQSSLLDIVGKILEEPYLLYC

SEQ ID NO: 934112 - protein, 182 aa, Homo sapiens
MECYEDNHTQEEEGEGEGEGEEEEEEEEEEEEEEEEEEGRRRRRRKKKKKKKKKKKKKKRKKKESSLAVGSLLIQGRSKNAVQEPNPGIRDLKSPLGAIPNSGRAGTYTQDKTGPSAVGLLEFAGVPLQILFAWVSAVVAGEQQILVNCRCCCLIIPLEVLSQRSTRPCEVSVHPYWKVPPS

SEQ ID NO: 934113 - protein, 154 aa, Homo sapiens
MNAFGVFFHSIRVYHNGRGNVVQQVWDPLLVTVCTDALLVVLAQGGALADAGSCTLCALQKESFLVATTAVNLLGYPESQYVSQPKAHGVQPMYHYRVVGGANLPRGWVRRVHTLALLVCSKAAAPMGIRKWFSGPRGNVPERSAAASAVQKSL

SEQ ID NO: 934114 - protein, 148 aa, Homo sapiens
MGRNQSRKTENFKNQNSSSPTKEHNSSLAREQNWKENEFNELTEVGFRKSVITNFPELKEHVLTHRKEAKNLEKREKSVKRNEQSLQELWNYVKRPNLHLAGVPESDGENGIKLENILQDIIQENFPNLARKANIQIQEYRIFNLYLL

SEQ ID NO: 934115 - protein, 182 aa, Homo sapiens
MAIMLGKAKWKPLELPLPRKVIHQRQYHIPGGNAEVSAAIKDLKDIEVLIPITSQFNSPTWPVQKTDGYWRMTVNYHKLNQVVTPIAAAVPDVVSLLEQINASPGTWYAAIDLANAFSPFLSISPTRNILPSAGKASNIPLLSYLRDILTLQLCVIILLGETLDTFRFHKISHWSITLMTIC

SEQ ID NO: 934116 - protein, 171 aa, Homo sapiens
MAHVYLRNKHACPAHLLMSFVPFFVAMCIRCLAPPALKEDSCFMNTHFRTERSRGAPRDAWVWVIEPKRTGMPDIPGLTAGWPPKGCRFPGKEKENIYKAAFCCKDNLHLADATYLMVTTAVPMQDPGWDYTTQRGIQARNNMLLCLAEAKPQSSNGFELKWSSSPAVSEI

SEQ ID NO: 934117 - protein, 164 aa, Homo sapiens
MYMLSKVSRGRTAVAVVAVAKGLLVASGSTSPGKHRTLAVEMLSLGEVAIRKITRSMQYHGAQEKKIIKIWLSFKNEYINFPYVVSETTLHKVSEIKGTRYNKDPSILIYISKVPKSNNEIRHILGTMAVEKTIFGGEYANIHTFEWHKEKSTVKSLKYFRVKN

SEQ ID NO: 934118 - protein, 141 aa, Homo sapiens
MAGPSHWLQLIIQSYNESVSLQIIANAAEMRFEDYSVVGLRQRAKALPKAKLAPKVMVTVGSAPNLTHYSFLNPGETIKSEKYTQQIRENYEHLYEHKLVNLEKIVKYLETYHCQRLNKKEIKTLNRLIMSSKNELLIKKI

SEQ ID NO: 934119 - protein, 137 aa, Homo sapiens
MLLLSQTLTAAEKQAVLQTAENFRHEQYVSYSRPKRKSENKEGDKIGEQSFPTGRDRVLLHNPDSTEKEREHKRKTEALMAALRACKVQDPQGAFTNCYQCGKSGHFKKDCSGSKKKPPRPSPTCGRDYWRSDCLQR

SEQ ID NO: 934120 - protein, 187 aa, Homo sapiens
MKEGKGVNSRQKYLQAGTQFYFPFSPWRFQRMYGNAWMSRQKSAARAEPSWRTSTRAVQRGNVGLEPVHRVLNGALPNGAMRIGPPFSRPQNNRSTKSLYCVPGKAKGTQCQPLRAGMGAETCKATRAELPKSLGAHPLNQCALDLGHGCCYLAIMQTSLCGYFSVSVSYAFNCVLAVAGLFSSVYS

SEQ ID NO: 934121 - protein, 135 aa, Homo sapiens
MESVNYLSSPARSAGKLFTSQPHSCSSVSAIQIRQEPLFLYKNVDVPSREESSLCLSCGLNLKCVPPVGLHSPWIVPEKLSLLTHCYTSLIPLSVLTKGPNERVRDGFPRLELENESANKALSAAASTFIFYAVL

SEQ ID NO: 934122 - protein, 135 aa, Homo sapiens
MTALNCLIQTVGVLLGKIGVISSLRSLCGRLGGGFLKLSIGWKLVDEVCHPPIAAILRTEEYITKRSPTKLFLGSLIIAPSLADCACPLESSSRVASTDTSPSVPSKHRSHPYAMNIWASSQRLRFRACSTGVLS

SEQ ID NO: 934123 - protein, 160 aa, Homo sapiens
MRTHQISRGQYQGDSIKSFMRNLLQDSISFYQASPPTLAIMLLCFNISFLAIQILNCMSVISVIPDWIKAIAGELLDEFGGNTLWDKRNPMRGPEHQILPLEESLLQQRHSLSAKLTKECLQLSSSRQTALVHVKGLGKEEVFPYLSTKISTAVASPMGV

SEQ ID NO: 934124 - protein, 145 aa, Homo sapiens
MIVVQNDGYPKSPDLIIAYPMNISKYHSLQVYLASIFDAADVWMEFLWGLFVDAVVAFCLFVFLLTGPSSLGLLQFAGGPLQIQFAWIPPAPGGLLPLHLPPRVKASRGPHQEGLFSLQNCEPNKPFFLINYPILGIPLQQCKMD

SEQ ID NO: 934125 - protein, 154 aa, Homo sapiens
MNLYDLPALILIHCDSIIITDSSTGLCISVSGVNSILLEKMVIVYPEAVAKQNNTDFPQNPPPPSLFAYRPIARLKSQQAFKDEVKSVTHEGMCYSMKEILEFSKNKCEGNTCGNKYHGGRNGFTRRHNNNFIELEIETATLPLWAFHASEPTG

SEQ ID NO: 934126 - protein, 168 aa, Homo sapiens
MHQSSRHTPSWLFLARGGRCCPGHQKPSIKHIHNLKIKFELFLKVFRVQDGNKSPRKPPKSQNIGFMIELFMLKEKLKLGGFLLNSNELEGGRKNVKVYGQVLRGKEREKRQDLSKHPWEETVMQRKKEAKVWLKSTPKELKAQWKGNLLPLSHCTTTPPAAIPHNPL

SEQ ID NO: 934127 - protein, 134 aa, Homo sapiens
MVRLWTTEGLFTSPFPAVGNLLRLLLILDKLVTHFLLPLFISLQTISAGAGLWAESMSTSLVAESVISSWEDLNILWVISYTVNLTTLSRESLREYECSPVGDSSGEAVIRSLTVTGPYHWLVPTVHLISVLPE

SEQ ID NO: 934128 - protein, 144 aa, Homo sapiens
MLLYKLVILASSAGLLQLAGVPIQTLFTWVSPVEAAEQQRLLPAPFSGRFVPQGHQPDASQTSSFDYPRSTSDCYTGSENFKPVVLRLLGSVGVGPAWRDLLALWLQPPCQRNKQFCLSGVPGTTGKILPHYDQDNITYVLQQQ

SEQ ID NO: 934129 - protein, 134 aa, Homo sapiens
MYYLYAFLSKNHFVEIKGCDAFRDFIYILVVDDTREYEEDLECQRNESIDIMFRQKRGTEWEGGLPRGWAAKWLGSPPSALSGIPLGIHVVLPLMACRHLLVCSAGVFLSTSSCWCVCVRLRSLAYMGTGWGVW

SEQ ID NO: 934130 - protein, 135 aa, Homo sapiens
MHSPTICHGLAATDLAAWKCPKEVHLFHYIDDIMLTSNSLADLEVTAPLLRQHLATCDGLSMNPRSKGLDCLPNSWELTGQKPPPPLPLSPLFQLGTLRGQCLNMEETSGFSPRPVKLKVFQWLFPSSSLEIKGN

SEQ ID NO: 934131 - protein, 207 aa, Homo sapiens
MKWGNNSLFIKPIFYNTPLGTCKLHGSPAMRSSGVSANGLPFALVAAASGSTQPWAKDLKGSEDRKMWEGLELPRDLMKGFDQDADSDMDNKVQAEEVSDGDEELTGNMSKAPAMAERSQCTVKGVAAESASPKSWQLSLDVGPVVEQKSRFKGSAKDKYGVEPPHRVPTGVLPSEAVRRRSPSSRLQNGRSTKSLHYAPGKASDAI

SEQ ID NO: 934132 - protein, 146 aa, Homo sapiens
MSSQKFAAGVEPPWRTSAQAVQKGNVVLDPHTGLQNSRSTNNLLRAPGKATDTQCQSMKADRRGAVPCKAATAELPNAMGAHIWHQCDMDVRHRVKRYYFRALRFDCPAQFWTCMGPVAPLFWPVCLIWNGCIYPMPLLPLYVECN

SEQ ID NO: 934133 - protein, 198 aa, Homo sapiens
MNYIYIRFIVQTAFYIFIKNSDDKKDTSEKGMKPVRRVSKLTKAEQRQFISDRFYNSGMSCDLCHTAQLENRNLQNPYKLAEIVMRGEKRNNGVGKEFQREPLRDLLNGFDKNADSDMNNKVQAEEVSNGEELGESDDYVSWGRLSCAVPFRGSLYFLNLNIGLSNYKPVVLEKLKCPQSTGHNTLMGDSSQATSSGQ

SEQ ID NO: 934134 - protein, 150 aa, Homo sapiens
MLLAEAELVSSMPANALMTMVMEQGKWMSYDAGSQKVPRGCTVSRHGEAGALREASLPKGAQVGPAPLMGKTSLQGSGAQFKLSMYLPVWGLEESGPLLTAPLGSDPVGNMCGGSNPTFVLHTALVEVIHEGSDSAADFFLDIQAFLYIL

SEQ ID NO: 934135 - protein, 124 aa, Homo sapiens
MMQDFSQPLHWTHGRDILSTWPTLFNLLQKLCVGTTARPCVSPQEEWSDANVRMPMTLNPQRVCDIASLVPLSTDKIVLAAQLAPCLIALGSLPSPTRAKGWCDSISGYPHSVGPELLSGIQEE

SEQ ID NO: 934136 - protein, 142 aa, Homo sapiens
MAFCETSPCDRTAAAAAAAAAAAEEEEEEEEEEEEEEEEEEEEEEEEKEEKQQQHGIVPGFMPVEVLPQGRGAVGLCAHQCSNGSGGAVGKRDALCTHASSSDTAGYTHTWTWAVLLQRQWQRLSVVPEGSAQGVAELLLAR

SEQ ID NO: 934137 - protein, 163 aa, Homo sapiens
MEYQTSYGSGSGEFDVLKGELRQEVEVAAFWSKPFNKSAGSFKLSHIFLSSEPSKSLGSSKISHIFLSSSEPSKLFQPLPITQFQSHFHIFGYPYSSTPVYHYPVYGILLQQPQRTKIKFLCEAIYNVIRNCCIARYSSASSGTYITNSLSEWDLRTKSLFIS

SEQ ID NO: 934138 - protein, 214 aa, Homo sapiens
MSGTEWTMNPIDEWTVEYEKQCCVILSAYQEAACPIIDDATLNYLVKERLVVSPGVSNHKKPWLPEGCLDLVSEGSRSEVASNWSGSSGSSKLQHSPLASIPGGYNTDISRVFNGNNSTSCQQKLLPGPLQIYDIDAITFPFIDDIKGSGHCESFPLSYDGNPEQRHMDPSVGGKQVTPDSNPNPQTQKPKSTGEGSRGNTIGHESLAYFQGAR

SEQ ID NO: 934139 - protein, 133 aa, Homo sapiens [sequence omitted]

SEQ ID NO: 934140 - protein, 171 aa, Homo sapiens
MAALIYILTNSIQEFPFLYTFANTYLFVLIIAILTGGTSGPQCQLLQDNLEGYKPVQHVTLLNTVDNCHTMDFASWHHRELEMIDLHRIKERRGFLFGWERQQTRVLRAELPEKEIPSPFKGLQLLRGLRERVIIDRVSNRENERLPNLPLDMTTINNLVHILFNIKQNHY

SEQ ID NO: 934141 - protein, 147 aa, Homo sapiens
MGSVTKLVVICYGSPGKPIQTASKGRELNRENSRCKGSEADLLPACLGKSKEVCVFGMEGVMGFLQLKQKLKELTGGSSLLTALSTAGQHVLPGRGGIVWFGSVSSTKSHLELCSLVLEERPGNRDLDGSENCDTGRIVECVYPFTS

SEQ ID NO: 934142 - protein, 162 aa, Homo sapiens
MTCRGRFFPAHWILVSFTTKLLIKSGITESEERNTFKTADKYCQIAFIKGILIFLSIDSIGTQKHPIINKVKFTMSSNQYKMIRHAKMQDIVTQNEEKNKFIKTYPRMAEKIELVDKDIKTIINARDKTAIFEMKKTLDGINSTLNFVEEKIGELEDIAVER

SEQ ID NO: 934143 - protein, 139 aa, Homo sapiens
MGHPKPSNTVVLADSWRYTLMVLDKIQKNSPDYQAETFVLFPYALPNKQNLFLFGATWKWECCDTSIPVAITPRTTLEVYLVFYYTVTELTLKPQDAVPSHSSLPFSKAEEPHPMATITRSPYRRERVAFGATSCTFWG

SEQ ID NO: 934144 - protein, 240 aa, Homo sapiens
MLSTEVIGKVAYLVEYLWNKGCLGDKSETPSEEEEEEEEEEEGEGEGEGEGEGEEEERRRRRRGRRRRKKKKKKKEEEERRRRRRKKKKKKEEEEEEEEEEEEEEEEEEEEEEERKKERKKERKKERRQIHSSFMPFRLGLTLERKVGAAPFKQKGQHIHGQGNYSTEVLQSPSTVLLVSITDGLNVTVHYSQKDVISSLLISDSFFSFLSMLQSTCSIYQVHKVDDFYHSIMVSVQVLW

SEQ ID NO: 934145 - protein, 159 aa, Homo sapiens
MAAYMLISCGRALAVVGLPASVQVFTAVAVPALAEGQGHSSLFTRLHWQWCQCRVKALVCARLAAPYAHIHASSSVNAGPLASVHAFTPAAMTAQDWSVGPLASVCAFALAMVAWLSRGWEDSHNDGTFNNRQKKPIGFSIWIITKGKDLEMTVHQSYD

SEQ ID NO: 934146 - protein, 162 aa, Homo sapiens
MDVWYSLKSGNAGLIYSDRNEKGDTTVNWEDNSTGDWEAASTGCGESSSTGKEALSEYRGSKSPALSGSSQTSSFQLTGSHSLPFNALTLTVDILRGWELNLHCNSANLRMKSCILFPAISALQLQEIRFSLGAYLKALKLESQFQKPQNQFRKLIFKIIFL

SEQ ID NO: 934147 - protein, 124 aa, Homo sapiens
MWLYFRVLYSVPLVYVFIFVPNSHAGCDREEWDGSWVTSRTLRQGQEECSGSSRMLRWWEPQKRSQAYGARLSEGLQTTAEMVSTLDARWDGYSHQTSPLPSPAQINAEVPPASQLQLKGTHST

SEQ ID NO: 934148 - protein, 137 aa, Homo sapiens
MVCWRLRMSVSMLFCWCVPLNIQPLVCFSASVFLRQCVPLNIQSLVCSSTGVFLSISSHLCLCPLGSQGFYRHRMGSWRASMVFGNATFRHENRSVCPHLGPWKSQKHHIVLHFIHKKQVSQATPYSSRRRFDFASE

SEQ ID NO: 934149 - protein, 173 aa, Homo sapiens
MLQFPTSSSSPPENTSAWISLPISLSAFWSKPFNKSLGSSKLSHIFLSSSEPSKLFQPLPVTQFQSHFHIFGYLSSSTPLYWYQFTVLICFHAADKDIPETGQFTKERGLLDLQFHVAREASQSWRKARRRKMLSTFPVQYNVVCESVIDGFYYHENGSDLDIVMWDITLMQQ

SEQ ID NO: 934150 - protein, 138 aa, Homo sapiens
MGRNQSRKAENSKNQKASSPPKHHNSLPAREQNWTENEFDEKVGNNKLLRAKGACSNPSQEAKGLEKRLEEWLTRITSVEKNINDLMELKNTARELHEAYTSFNSQFDQAEERISVTENQLNEIKREDKIREKKSENK

SEQ ID NO: 934151 - protein, 166 aa, Homo sapiens
MAYLDVYEDKGLREAGLKFEATGGNSGILHKDRKCDSCRGTWLQMTADSGSINGIVAPRVPLSSSSSSLRGGWDDKLRRRPPWALDEYQTNDSPHYEKQKFKTLEDIQKISSPPSALWLLFFFAAKEAAHVFFPLHIAVDISHTLSMTLYTEATAKVVYKRCQKLF

SEQ ID NO: 934152 - protein, 137 aa, Homo sapiens
MKDVYTNTPSVGHQHQRPKVDKTTRMGRNQRRKTENSKTQSTSSPPKDRSSLPATEQSWTENNFDEPTDIDFRRSVITNFSELKEHVQTDHKEAKNHEKWLDEWLTRINSVEKTLNDLMELKTMAQELRDACTSFNS

SEQ ID NO: 934153 - protein, 141 aa, Homo sapiens
MFHLPSPVPMGLHLLVDFQYYVEEEWNGLLGDPASSQGLSAASSTPVFHSALQIDSAPGKVGNFSRKQTFSFSSGGVCSGEEGLPFLLPQLGHSKFLGVVLGPAVTVHLLQRVCVSSQDCCPFRFLMILLFTDCSDCRFSI

SEQ ID NO: 934154 - protein, 197 aa, Homo sapiens
MARRDVLRRESSRFPASTVLGRNPALVPHPGRPPIASPPSPFHRALGLPQGPRRRSRAAQPPPPPLLSRRLDDRVHLAGAPELPPGLRGGHQPPDQPGALRLLRLPVHTVMTGSGLNEMECALHLEKNVNQSPLELHKLATDKNDPHLCDFIETHYLNEQVKAIKELGDHVTNLHKMGAPESGLAEYLFDKHTPGRQ

SEQ ID NO: 934155 - protein, 151 aa, Homo sapiens
MRKKQCKNAENSKNQNASSPPNDHNSSPARAENWIENGFDKVGFRSLEKNINELMELKNTARELREAYTSINSQINQEEERILGIEDQLNEIRREDKIREKRLKRNEKSLQEIWDYVKRQNLRLIEVPESDGENGTKLENTLQDVIQENFP

SEQ ID NO: 934156 - protein, 136 aa, Homo sapiens
MPKCHILENHVLQPNILFPETSLDKSRTSFFTVNPGTLKKKRKCHRTKLCNTSTGYLTAPHGKGGRFRDTRGLTNEVLGCWGDDGTQRDPTGTMLESMAVPERRGKYLKELGCCDLSSIYFRGHPKPSNAVVVSDL

SEQ ID NO: 934157 - protein, 149 aa, Homo sapiens
MRKKQCKKAENSKNQNASSPPNEELRDAYTSINNQLNRVEERISEIEDQHNEIKHEDKMREKRMKRKEQSLQEIWHFVKRPNLHLIGVRESDRENGSRFTKVEMKDKMLRAAREKGRVSDKEKPMRLTADPSAETLQAIREWEGNIQNS

SEQ ID NO: 934158 - protein, 183 aa, Homo sapiens
MGATIQNKIWGTAPLVAAFMGWHCLRLMVQALGGSIILGLEDGGPLLTTPLVSAPVGTLCLTWKIDTKKRLKNPFWQAQNGCAGSLISCPAPVMSRSSSGGSNVFQYFCGVALMPLCMVLQPSWNLPWQIPGGSPKIRKLKKLVSDVRGQEASSMGGKMKAGRLSKSPHSTLFCLLYSSHAGS

SEQ ID NO: 934159 - protein, 196 aa, Homo sapiens
MVPKCFIGQWQQDPCPFTCGSRSSSTAGCTLVSWSKALASLGLLASIWALETVDSVPGWKGVGAQVHLYSCVLLDEYILWIHAGSSGGVVKGMGLLVSPSMFLPSMGMGISGHAPLQTFLYQTLWAPHRLESCPYHLSKQLSLTVKVSVGVVGYPAARMIEVHGKSELFLACSTHPFTGRLNGQLSHSVEEVPILY

SEQ ID NO: 934160 - protein, 150 aa, Homo sapiens
MLAIAPAEKPGSGSRLSAQGASAMCWGSTSAPSCLGNSEARRLLWLSRANSQDGSPPLPLGALSQGILKPLSTGEHWHVQRCCLGASDWSRKTTAVYLMFYSTVAKLTLTLQYKVLPALPSTFHRQKNLSLWQLPPPVHRFSAGPLLMFT

SEQ ID NO: 934161 - protein, 138 aa, Homo sapiens
MLHLPLDTHRENSQTESPSVVCCLPTCSPFVLPNPQLQASPHSLVLASHKLEIRWNCGSREWEGERFQRQGWMVSLIQPILNALFSLEKGPLGKTYILREQTAKRKKEVPFDKCIGKGKILKKEKFRIMLAKYKQKNK

SEQ ID NO: 934162 - protein, 154 aa, Homo sapiens
MALLGIPWARRETTTLKGESQARQHSPQADIRDLGPYRNISGNLAVLLVAGVGSDYGDSYPGHTDTKKEGLPTALGSSAPVALQGDIPEEGIVITGEDSSMYVNTPKELPVEEDVKVEEIRIDGPDPVCTDTYHCVIVAYNIQYSNRLQVITFP

SEQ ID NO: 934163 - protein, 280 aa, Homo sapiens
MIKAAATFNYLSKRQFAEEIGMDISKPGGILQEIGRITLKVFQRFFRLQCTSQALRKEGFQREPQCAHETLDLAAQGTSSLYSLNSCAVLLTHFSCDTDGPRAHQGQDIWQTRNFNQALNVCQRYGQRLVLVAFPASQCKLLLDLPFWSLEDGGPLLRAPLDSVTVGTLCGGSNPTFPFYIALAKFVHKGSAPAADFYLDFQAFPFIFQNLGGGSQTSILDFCAPVGPTPCGSHQDLGLSPLRQWPELYLDAFSPQLELEWLRCRAASPKATHSSKALGP

SEQ ID NO: 934164 - protein, 149 aa, Homo sapiens
MVLVPPSPKLLGLQDLLRAVSQAMVTYILARNKSLQIFYSLTLFINSHLLKLSFRLPSTTAVCRCCRPAADSHPAADSHPSRSGRVSAVLLIQAITLTAWPKIPFLGIREAKNPRSENMRLATILEAARHHLGSGSPPSWELCEQGTPR

SEQ ID NO: 934165 - protein, 135 aa, Homo sapiens
MWYSATFTKEDEKQNKSLVLKFQSWVSTYPGVGAPPETNRKVVETVLKSSHELDVNWSCSRGVPGERTENEQQTATVKNSKRIQVQYKHGSRATNNSCLFNVNNGGQRPPIREAIFEVWGEMNLESISSKNMLNN

SEQ ID NO: 934166 - protein, 198 aa, Homo sapiens
MDFGDLGGKSGKGQGIKDYKYGASVDNAPSTYTVDNTLSTYTVNNTLNAYTVDNTPGTYTASNVNIYTDNTPSTYTAHSPPSTNIADKAPSSSSIDHVPSISISDTTLSPATSDGILNPSSTNHTPKTATSDRTPRSSDSTRRPSSFDSTPSSSASHSAPNTSISENAPNTSDIGNALSTPTLPVLRLRLDIERNRVL

SEQ ID NO: 934167 - protein, 145 aa, Homo sapiens
MHPCGQHYFDCFGSDLRSAQHCVFPKACCDHSVATAYVRRYCLCSLQALGLYNQQVAKQGMSRNVIEELSPGIRAPSACLVLYYPPVAVLVPKPPYFSFCFSQAEGIFPGNHHSWMVLSPVPHNCCALPPPPPRDALHTMLLLPG

SEQ ID NO: 934168 - protein, 139 aa, Homo sapiens
MHQSALCKMDQSVLCKMDQSAGSVASLLKSARPQTHQEEQTTPDTPTLRAVTLTAKVCGFTPEVSKTTNPLEGRNSGHIQTLRTVTFTVRVRGFILEVIKTKNPPEGTNSGQNSTMRYARICGDAEVNKPTVLPVGIEQ

SEQ ID NO: 934169 - protein, 157 aa, Homo sapiens
MPWWFVAPINPSSTLGISPNAILPLAPHPPTGPGPADKMQHLGRDALNNQWVNEEIKREIKTFLEINENENTTYQNLWDTAKAVLRKKFITINTYIKKEERSQINNLTLNLKELERQEETKPKISRRKEIIKIRAGINEIETRKTIEKINGTKSCCF

SEQ ID NO: 934170 - protein, 194 aa, Homo sapiens
MKCDVDICKDLYANTVLSGGTTMYPGIADRMQKEITVLTSSTVKIKIIAPPVHKYSVWQQEGDVLSKSEKAPYKIIRSRENSLSREQHGGNRPHDSITSHQVPPTTHGDYGNYKMRFGWGHSQTISLKYAFFKRKHTNDQQVYEKMLNITNHQENENQIHNEISSHPLEWLFSKGQLLERMWRKRNPCMLLVGI

SEQ ID NO: 934171 - protein, 164 aa, Homo sapiens
MSAASLLTSARPQTHQKEETPDTSEHQKEQTPDTPSLRTVTLSKRVHGFILEVSETKDLPILDTKGISRIRFRDNTDVGTVWHEIQIAISNMLKAPMEKVDDMHNQRDQNYKKELNEKHSNRDEECVWLISRLDIAKGRSSELEDKSIEMITIEAQSEKKKRKA

SEQ ID NO: 934172 - protein, 148 aa, Homo sapiens
MPGATAAPEGLIAPAAGSAASKQPPAASAYRGCLSFRESPPQRLRPCSRWKKKKEEEEEKRRRRKKKKKEEKEKKEKKEKKEKKGDEKGRGAFDVISIGAWASRPVQGMSLPNKGVGLSGIIKKTCEKSKVPQSQLSGWEKLSSDCLS

SEQ ID NO: 934173 - protein, 154 aa, Homo sapiens
MPTSQLCSLDPQGLESIVMQGAKVWQLQQSASRFRGACPLANVHHSGEGKATGRGNGGATAGDCVHSCTGGGVGLGRGAAQCRSGCLLCAPQAGVITQEHCYTNSGTGASQPSKEPPGRPRTIFAKEVYSASSVLELAMQASIVKATAELRKKG

SEQ ID NO: 934174 - protein, 167 aa, Homo sapiens
MGVNLTIMSKILKCAGNEDIVTLRIEDNVNTLVLVFEASNQEKVSDYEIKLMDLDVEQLGIAEQEYHYVVKMLSGEFAMETLEIENKLSQTSTVDKEEEAVTMEMNEPVQLTFALRYLNFLTKATPLSSMVTLNMSADIHLVVDYKIADVGHLKYYLAPKMEDEEGP

SEQ ID NO: 934175 - protein, 134 aa, Homo sapiens [sequence omitted]

SEQ ID NO: 934176 - protein, 163 aa, Homo sapiens
MVICDQQSLMLQPCPYKTVNLNLVQIGDQTSHTIPLSQSQIKSKALTLFHSMRAKRGEKGSEASRGWFIWFKERSCLSNIKVQGADAEAVASYPEDLAKIINEGDYTKHQIFNVGKTAFCWKKMPCWKKMPSRTFIAEEEKPMLAFKTSKDRHLLLGRGQCSW

SEQ ID NO: 934177 - protein, 148 aa, Homo sapiens
MNRWSIFVSARCSLTAVSTSTTISLHLMAKGRCHHGFRACIQYFHKRNRGDSVYQEMSHALFEILKTFTSRIRATIIITIKHSRTHKTSLTDDMQVDVIAQSLACKVDINTYSAFPSVSNWAICKIGWEVRGLCSQKDLDAYPDITIF

SEQ ID NO: 934178 - protein, 189 aa, Homo sapiens
MSAKYNNPYFHGMTWQRDFPQLCQEAPLPRLQVSSSLVILLPPLALAGPRKQQQEATKTEGEGEEPMTQALRSRSQPVKAGTRTGLSFKGKDIAPVGEAIQGREGWSSFPLRTIPSIGCTQAADTGAYSENWPAGVNPPALQSGTGKRHKNKLRARSGVHVQVCYAESQVGCLRRSLQGDECKLLKNSI

SEQ ID NO: 934179 - protein, 409 aa, Homo sapiens
MGEGYGGVSGMGGITTIMVKQSLLSPLHLEVDPNIQAVHTQEKKQIKTLNKFASFIDKVQFLEQQTKMLETKWSLLQQQKMAQSNMDNMFESYINNLRRQLETLGQEKLKPEAELGNMQACRGWQLYEEGIRELQSQISNTSVVLSMDNSRSLDMDSITTEIKEQYKEIANRSWAEAERMYQIKYEELQTLAGKPGDDLGHTKTEFSEMNISRNISWLQAEIEGGLPWRPPSQMPSSDAKAKLSELEAVLQRAKQDMARPLREYQELMNVKLALDVEIATYRKLLEGEESRLESGMQNMSTHRKTTRGYAGGLSSAYEGLTNPSLSYGLGSSFGSGVGSSSFSRTSFTRAMVVKKIETRDGKLVFQSSDILPKGTAAAAPPSLPLLRLPQSLGGRLLCRGAQGTGGRLT

SEQ ID NO: 934180 - protein, 132 aa, Homo sapiens
MDNEVHAEMISDGDEELVGNWSKGHFCYAKRLAAFCPCCRDLWNFELERDYLGYLAEKISKWQSVQEEAERKSLENLQPDDAVEKKNPFSGEKFRLTAEICISNEEPNVNHQDNGENVRDLHGSPSHHRPEA

SEQ ID NO: 934181 - protein, 186 aa, Homo sapiens
MVAEEVAHSVGDHHQTRKERGSRTLVIRLRALQGRQVNCRRAGDEGEGEEDDCHQPEEDRYEHHPAIGRVQVVRGVCNQGPHQQPQHQLQQHERPRRERTKPRSVRSAYTKAPASCAGLLVARAAVAAPPVVGASSRAALPRGSLSRCGPEHSRRPGCGPWSYGFLASCEGHTGGDIVQGLLNFRV

SEQ ID NO: 934182 - protein, 170 aa, Homo sapiens
MNLFLSHKKSNADFPGLWFSSEQRLGDPSSFSLLGLQRSLMPWLVPPQAFREYCQATANVPLRPKGPSVSLWHMLPGLELILHDKGLPSGPGQFQKCCPRAKSWNWAEGVLPHRHHSWEYAKSHLNPRSLRVSPTTHDILSGYYSLLFRAQGLFSQQVKGPARTGSLPSR

SEQ ID NO: 934183 - protein, 143 aa, Homo sapiens
MTARTLQNVKTRKRRRIQQLRGAASEVDSNLLLWLAGIPSQRVLTCEVPWKWGPQNNTAWLPGFKPLPRDMYRWISCLARDPGARVCETAELGSPRSRCQQDWCLVRAALCFQDGALLQHPLEEMNVVSSQDRRDRRGNVELA

SEQ ID NO: 934184 - protein, 144 aa, Homo sapiens
MLRAPRGTAAGHKNHFAAVWNGPLSDRVSHHFCCSHLALCFSVALLKGHGELAPLATLPFTVFVGRKAKNLREERVWKSFPGANQSVSSNFQNQSTLIFFPKTYLHSQQRRLTPWPPPSQAHREYCQATADASLRPKGSSVNSW

SEQ ID NO: 934185 - protein, 222 aa, Homo sapiens
MGAADWLGMKSQGCGKWSLFTGSASGQGPEDQTPLSWPLAPRSLHEGGHSRMECKILLVKESGTCDSMCLTFENQESIEGGAKNAERQHSLCPTQQTIVPEPVSSPADPSGSIPEEGIVIIGEESSMYIIAFEDLPLGQDAEMEGSDIDDPDPDPVCEEAAEEKLEAGRDWVMRFKKISHLHDIKVQGEAANADGEEATASYPEDLAKIIDEGGYDNNRYSM

SEQ ID NO: 934186 - protein, 137 aa, Homo sapiens
MESYHKAVKVVPWLRYSMKAEWVCMFSCSLVPNDTTLAKVGTDSFSLLPGEDGGSVCCWTPLTLHCGAISKLPAFVWQGVEGQLSAQLYQYLCMGIRAPAAFAWWALEDPTAGKGTDFLLVFGWSRAGYLVLLSHRS

SEQ ID NO: 934187 - protein, 202 aa, Homo sapiens
MGKLLSYQPNRGIKRPRDGKEEEQKMHQKQTSTQDWEEEMIVVEEAEDDKHLLLQIIDTEGEEEEKEEEPLDESSIKFPDNPEKFMESQLDLHDIIQKMHLVATMPDLYLLLELNAVQSLLGLLGHNNTDVSIAGVDLSQELTDIDIFYESGEGAEVLIDALVDGHVIALLVQNVERLDESVKEQVNGVHNTLVIVENMAEF

SEQ ID NO: 934188 - protein, 170 aa, Homo sapiens
MIKPEDVIEDSQNSSIILVHHPFNRHVFRTCCLQAPWGYSNEEDTVLLSSWNLVENTPKPVRVPCDKLYDKVNMGRSPEFWGPGEAPMGSTLFRDSIAAWNDTLSSISSFKNGGTQAWGNEDLKGFVPLKGECEKECENISKSRAWPPAENQGGNRLQSNSCEDLNSANS

SEQ ID NO: 934189 - protein, 255 aa, Homo sapiens
MDTEKQATLQAAERFGNEFCITYSIREGGDYYPSGREGVPVSNSKRDPNDEMEDWKRRHFQVCIMEGLCRTKTKPLNYAKLSIIDQGFDDNSTAYLESLREDLVKRTSLSPDSVKGHLILKEKFITRAAPDIRKKLQKLALGPDSTLEDAPESEHRDPSRQRHKQLEVERNTSVEEDTVAGHQEDTCGRAHRQAIDRRNDMEFGWGRRRRDWTTEQPDSKRIAPSRSISLLAPPSAESYLHSIKPCTHSPSPLVL

SEQ ID NO: 934190 - protein, 134 aa, Homo sapiens
MEDYFVCVVEIYLILFCNTAKLALNLQDIVLPTILPPSQRQIDLILWLPPPPPPNDWDSPFSSLGFPLTQGRSRNAVQEPCPGPQKPIWFSTTLWLRWYLRCKKKIPFTFPITFPKQKTSFLIATTADKVLSLT

SEQ ID NO: 934191 - protein, 348 aa, Homo sapiens
MFCVPPIFVSGTGGFLVSLTSRMKPRTLAAARPELFVPPGGFVVSLASGVKLQTFAGSVTAHKGSVDPKSEQHQDLLQRAKEQSYHSVEGDPSGLPLLARAACFSRYRVPTGVFTIPELDIKVLHVPTRLRSPAGFTQWIPHRGCRWSCLPVPRRAPALLSPWVVDGTGHRGTGGGTRRGGWGSTGAHGEGGEAEAWRAAGPEPCPAGRQLRPSEKLSTAAAGPGAKPLTAWGRWGWLAAPSSGSAEPTPTRNSRWPASNARGPGSRPHFSLHTSRQAEGAGSGLDQPRKGFPQCSGGLKGSSSAAKVGAQAEEAPRASEGCEDCQHTVTSHTVSAVKSTVSSMGFSL

SEQ ID NO: 934192 - protein, 134 aa, Homo sapiens
MTFVFSFQSRYRKTTRPGASPLREEAYSQFFGIWESLQHGSSSFKRSVDSLGFPDKTEPNQNAHHHVSSRENKESWRSYICSCLHHQKSGRLDSKVEDTFFYADSRITLSFSDLRGKDLWTIQTNKNTVDESVL

SEQ ID NO: 934193 - protein, 124 aa, Homo sapiens
MLSRNVFGDYHPSAINIAADEAMMLILNKDTKDSTECNMSQLLDSPSPNSQTCSPHHAVAAEIDVSPSDMMLKPVTMRAHLIFGSYDGVFTSSPSGYSNNRMVQILLWHLRHHDKRMHLCYAQH

SEQ ID NO: 934194 - protein, 220 aa, Homo sapiens
MQPHKERLKASKKKTFWIYYERWKNIPDDHDSVGTQGYDIYQRNKNSSCEGVTSTTLKFRIQLTREVKDLFKENYKPLLNEIKEDRNKWKNTAILPKDTGMGKDFMSKTPKAMATKAKIDKWDLIKLKSFCTAKETTIRVNRQPTEWEKIFATYSSDKGLISRIYKELKQIYKKKTNNPIKKWAKDMNRHFSKEDIYAANRHMKNAHHHWPSEKCKSKPQ

SEQ ID NO: 934195 - protein, 164 aa, Homo sapiens
MRLPQPCGTVLMAELPHRIIKETQRLLAEPVPGIKAEPDESNARYFHVVIAGESKDSPFEGGTFKRELLLAEEYPMAAPKVRFMTKIYHPNVDKLERISLDILKDKWSPALQIRTVLLSIQALLNAPNPDDPLANDVVEQWKTNEAQAIETARAWTRLYAMNSI

SEQ ID NO: 934196 - protein, 160 aa, Homo sapiens
MCGSLIFGCLCAIGVLGWSPTPHTQKCLLPLPGFSPLLTPAPITEVWLRMHTPQSLQELGTSGSPTPFKLYWWEVPGCSCSHPNLAADPGFSVLLGTWVGPRTSRGSEVPVPVAWPLPTTRAHSDLGTKLGLSSGATAAQLGSQLSICISVFSHGYKDTT

SEQ ID NO: 934197 - protein, 140 aa, Homo sapiens
MCASPSNAHVSRGDREKDFPPGTQTCATTYGPCQCDHVTSYVRTGQEIRKVGINKCRNLINYIMEQYAYESHLPLTVLSSQKMNPDYQEEFLLLLHNVNKIEYVRNCLLSTSTLPLNLFIIKRKDYLPYRVIKEKFCASY

SEQ ID NO: 934198 - protein, 141 aa, Homo sapiens
MNQRPEHQKSTEPYAYETIHSSTAVERGQVGLDSPHRVPTGALPSGALRRRPLSSGPQNGRSTDSLHCALRKATGTQHQSMKAVIGPVPCRAIEVELSKALGAYPLSQCGLDVSREAIHFSDILLFQCSSYSDHTGTSFHL

SEQ ID NO: 934199 - protein, 136 aa, Homo sapiens
MPYFTLFSTGNPHTLGQKATCCLERNDQALAAFITGHLNSPWFLNRQQRYPGTASRTLGEPLRHTGFRYQYGLNSWTAFLDLPVTRQVPTALKGGKCGKNGFLWFELWFECRLSCSTVEHQNGYKQAQTVKTTIDT

SEQ ID NO: 934200 - protein, 152 aa, Homo sapiens
MKVQRNKNKPNQNSAAEKKITKIKTELNEIETQKIKKKNKTKSWFFERVNKIDRPLASLTKKKRQKIQTSSTRNETGDITTDTPEIQKIIQGYYEHINVHKLENLAQMDKFLKKYNPPSLNQEESETLNRPITSSKIRMVIQNFRQKNSWAR

SEQ ID NO: 934201 - protein, 139 aa, Homo sapiens
MHHADPAGALGVGGIFSFWLLVITPFSHLFRRREHWKVREGNMVRKVKIGVMEPQAKECWQLPYTGSDKKQILPRCPQKEFALPNIFIQSLLGFIYHMQCKFEMSSRGFIKIICNCFLNLFVEICTTFQSSLGLAKIAK

SEQ ID NO: 934202 - protein, 148 aa, Homo sapiens
MGGTLLVQLVTGTTCTNPTADAKTDICCSTSPMDQGIRGSLIYPGISSNPIKLQFQIKFHQPKDSTREILCLLKPVCKDWKQCLLLQMYRHKLKVTWIMKNQTNRSPSRETNKSPVTDLQEIEIYKFPNKIQMISLKKLNEMEGNTDN

SEQ ID NO: 934203 - protein, 161 aa, Homo sapiens
MDSWARTGVGCTSLHRAGPERLEEVPRHRNDKRQTNSQTVQYGAEVAARVTLEKPARRNEDYLTSFVYISDCLSGWLAQGNGCTTLHSPTPFSVNSLVLCVTPEGLRYKVGEMGRKKSCNDSDSVLPLPGRCGPTKIRCRARKREKERGERLKQDSGQSLR

SEQ ID NO: 934204 - protein, 140 aa, Homo sapiens
MGANPYGSTATSIPACSEEKIRLSGIRPKKTPRKWNNLKHKKFKFPNITRVVCAVNCEGYCQCSLKAQGLFSQLVVNNARRAVGSSVPHGKSKNVVQEPWPGIRDPKSPPRSLAPVAGWHLRCKTKSPLLFLLLFSSRMI

SEQ ID NO: 934205 - protein, 197 aa, Homo sapiens
MALTKMLRWSQMEMRNLLGTGTKVTLVILQQRDWQHFCPCPRDLWNFELDRDDLRHLAEKISKQQSIEDVSRMLIKSFSFMHSQIYGLEFELTFKREAEHKSLKNLQPDNAIKRKNPFSEEKFKLAAEICKSHEEPNVNCQDNGENDMVPCIPAASAPAVAKRDQCTAQSVASECVQAPSLGGFRVLLFLSGERRHP

SEQ ID NO: 934206 - protein, 125 aa, Homo sapiens
MGTRQSPFYFSLYFSQAEEALPHSHHSWECVNSHLKPASLRISPNTQCSTWISLLVIQGPKALYLPSDECCQDWVLPFKAEGSFLAQNVSRNVVQNAFQVYLRPDSILTHGGKAFGNSCLDYWDQ

SEQ ID NO: 934207 - protein, 150 aa, Homo sapiens
MAKAAKGHCTRIMEAETQDVQMCPEFLPSSGFMVSLTSGVKPQTFAVSVTALKGVTSGVVCSSWWVRGLNDFRSEATDLHMSLGEQFSAEIIRALLCGMLNPNCIKDNATNFEGIIKFSVRVSSTFITPCLQCQVVKIMLKPERLWERYK

SEQ ID NO: 934208 - protein, 264 aa, Homo sapiens
MHSYSLLPPCEEGACFPFLHDFLIQEEKWEYNRREKDTRIPGKSIPANSSHGSIQLIKVSEAPVRIWVQGVPPLLYTQANLQTVGVPAHLDQQPEPPHLFCAEIVAKGAVPSSCAENLGLKRFPSPMPGHTNGHLMGALWKPLNTGGWAELLRDMWVCLLSLATPPILDRYPGLSRELRTLCTPQISPLPETTESFFQQIRIRNTTIRFGHSWLVPKSVIYQPGLQMRRSQGKNYGNIKDLNVLTPLKDHASSPAIIPNQNRNS

SEQ ID NO: 934209 - protein, 138 aa, Homo sapiens
MPEPPTHSVGSCAAPASPTSATPCSTAPSPIDLPRAEECGCTAQDWQAAPPAAPVRDPLGEASWAPESASETTNPPEGRNSEHIRTSEGTNSRRATLRAVTLTARVRGFILEVSETKNPPIPDTGEIKIIKIMFRNSI

SEQ ID NO: 934210 - protein, 313 aa, Homo sapiens
MHGRSMRKIVVGLIFLITWTCVVKASTASSHTEDCFQCIHEVTDVGQQVKAIFLFYSYYECLGFPKGACLYDNTQYKVCNPGVTSPMCAMTPLNLPFPVFEIRLRTEDWWGLINDTSKVLARTEEKGVPKRIILKFDACAATLKKVEKDPVWLQKGKGSPSCTSGSCNPLELVITNPSDPKWKKGEYISLGIDGKGLDPKDGLVVLDDNCIMVPQKQLHGGVPVTQKEIHSANFQNCRLFRPTQNSTGTGLSPQGYTGYVDVEPMLSYLISGQKGNIVTMVFQMSTVFSMCVGAIGTCDKSASNSTNSHGTLH

SEQ ID NO: 934211 - protein, 144 aa, Homo sapiens
MQFSLQSSKCYLEASRCSECREICQGMFQRRPPTPGSLHRKGGMAPATDADKLLLPMPGDVLGLGAERPPCAPPSMYKKGEAAQVADTDEWILRMPDDMSGCEAEMACLHQYLCTGGVNEELHPSAFLVSVVLSHPMVALESLR

SEQ ID NO: 934212 - protein, 143 aa, Homo sapiens
MQGSFIINTSLIKTLLKAALLPKEAGVIHCKGHQKASDPITQGNAYADKNLGLSSECYKEWGAAVKIPKNVDMTLELGSKQRWNRFEGSEEDRKMWESLELPRELEGSEDRKMWESLELPRDLWNFELERDNLGCLVEEVSNL

SEQ ID NO: 934213 - protein, 138 aa, Homo sapiens
MLTTVIKKYKDCFPVIFRKAHEFMELMFGIALTEMDTNNHSYVFENTVELCDQGRLSDGQGMSKNHLLILILSVVFIKGSCASEKVIWEVLNSIGVYAGREPFIYGKPRELLTIDWVQRKYLEYREVPYNARPEYELL

SEQ ID NO: 934214 - protein, 270 aa, Homo sapiens
MHTYKVTAFGHRAFEEFNGIIVVSPGGSVSPSGNKTSRPPECNVMGIGSKSVASGSLGVMKIEGPCSKILEPPAVIHQWGPAKRFKQHPYPPLIPQAALDLLDHMAQVAGQLAQQPGPVAEPSPLLNLTQNWQPFGRPVILCKGKSIKVSPNKIMTQSRRVDVPLRYDGKGILLALPAEGNLLLVGLMDRNGEKGICQINGCIPALHNSLSLHNSPHPPSQGANVGVLQAAKYVYANYTFWHWENGHRMSPGTHWIILHLGATNQLHYVP

SEQ ID NO: 934215 - protein, 162 aa, Homo sapiens
MCCRCTKIGKLKADSGSMPAAAGRGHERSLVYIPNMTGCYRNLMRKCGKYRGLWRTEGTQLSWKLGKNSKGNATPSQGCAPLSSITVCILLRLVFRFLSYEKPKPTNKDGFIQPHVHKMMGTCLRNIRSRNLLTGTFITILIRFLAADKDILKTGQFTKDKV

SEQ ID NO: 934216 - protein, 182 aa, Homo sapiens
MRERPGVGYCCSRVAGVREKSGEAVGYCSSRMAEFSEEEEDTVRYCCSTIEDVPEEIKEAIAYFCSKMAEINKEPEGNIGHHCYIIPKVTEEVGEASSDMPEPSTSTSQENPSMKWRKKTTCEAKEGETDELLKAAKKIRSFVQQNSERRKAGKKSTVLIFYYHSNKKRDENQPNEDEDSHE

SEQ ID NO: 934217 - protein, 145 aa, Homo sapiens
MMPPLTIMGNSTRIRHKALDICQDCRIPAPLFKRLNNSKSRIITFVLDPTGSEEDRKMWESLELPRDLLNGFAQNADGEMDDKVQAEVVSDGYEEFVGNWSKGDSCYVLAKRRQHFVPAIEICRTLNFIGGTHPQYFHVGSSYFP

SEQ ID NO: 934218 - protein, 140 aa, Homo sapiens
MATYLFYQCDLDVRHGVKGDNSGILKFDCPAGFQTCMVSIVLTFYDPDRALRDNHIRNLDLGPSFVGCQWVAIVFRLSQLTKQENIEVGAPCSWAFRLRLNYTTGFPGSPTFGHQMVKLRLHKCMTEPMDFLLISRIRHE

SEQ ID NO: 934219 - protein, 243 aa, Homo sapiens
MAEGEEEGGVSSHGRQENKRQGEVLHTFTTTRSCENSLTITRTAKRKLAPMIKSPSTWPLLQLCELQFVMGFGWQHRAKPYHLSNFLMNYCGTSTTTLQYFCQDWTKGNMSEDQPRHLAAQEQWRAPLGASLIRRAEDTLLDLEEWKSMAAVVDGRPSAVVDGRPSAVVDGRPSALVDGRPSAVVDGRPSAVVDGRPSALVDGRLSAVVNGMHLLIRDRGKLNQQLLGMRSVGGTRSPCIISL

SEQ ID NO: 934220 - protein, 269 aa, Homo sapiens
MRIQFQSSTCGLPVFPGPFIEYSVLSPLYVFVSFVEDQLAAFSTDYHQGVGLVGLDPANSVFQYWEVDVGVKGTQTLKKLHRFFPQAALAARIYEVTLVLREVVQKTNVELEPSHRIPTQALPSGAVRRGSPSSRPQNGRSTDSLHHVPGKATETQHQPVKEARRGDIPCKATGADLPKAVEAHFLHQRILNDDNGNIYTVIGDYINQINTSRGKFNSGVLYKFGEDFEAASIQCEVLKYIHQTANNMLYLKLIMNKCSGSNVNFSHNT

SEQ ID NO: 934221 - protein, 187 aa, Homo sapiens
MCLCSSSAFWHDWYPADKISKQQSTQEEAEYKSLENLQPDNGIEKKNPFSGEKLKPAAEICIKSASPKPWQLPHGVEPAGAQKPRIEVWEPPPRLQMMCGNAWMFRQKFAPGAGPSWRTSARAVQKGNLGMVDPLTACTVFLEKPQTLNASHDSSHRGGGGLYPAKPQKQSSPREPTSCISVTWIYY

SEQ ID NO: 934222 - protein, 166 aa, Homo sapiens
MLGCPGRSLLEGQGPHGEPLLGQCRRETWGHDPHTGSLLKHHLGIAGKRGPLSSRPQNGSSSDHLHHIPGKTADTQHQPMRAARREAVPCKATGMKLPKTMATYLFYQCDLDVRHGVKGDNSGILKFDCPAGFQTCMRCLRLPWCSWLIFDFTLPRGKEEALITQR

SEQ ID NO: 934223 - protein, 180 aa, Homo sapiens
MRMFLTALFTIAKILNQPKGPSAADWIKTMWYINSTEYYAAIKKRDHVFCSNMDGAGGHYSKRTHVGTENGIPPFSIYKQELNIGIHGHKEGNNRHPCLLGGKGWGGGNPALTYKANKALEKLASYFVYTDHGHFTDNYPKTSTDGIAPTVNPKNSPSPRQQEMRHELFAGVPLFQCRHL

SEQ ID NO: 934224 - protein, 159 aa, Homo sapiens
MRMFLTALFTIAKILNQPKGPSAADWIKTMWYINSTEYYAAIKKRDHVFCSNMDGAGGHYSKRTHVGTENGIPPFSIYKQELNIGIHGHKEGNNRHPCLLGGKGWGGGSLVRSHFIGKAILHLMVKTLNGTCTSFQKNDTFISYFTTVPGTCKLASNIW

SEQ ID NO: 934225 - protein, 147 aa, Homo sapiens
MDLMPAGTLLYKVSGDPSAVLWGIPPGSKSSRFPGTGRGKMADWSHSDGSHTSLQEFSRRRQLAATVMTATPPPGGSASLAVWPPRICTALCLGPKALVVWAHEGDPLIHRLCRSMAKAWLPDKGSTIAHRLPLLEMVVPLAPCDSQ

SEQ ID NO: 934226 - protein, 143 aa, Homo sapiens [sequence omitted]

SEQ ID NO: 934227 - protein, 136 aa, Homo sapiens
MPFLITTLSAGHFSLDLGPTWVIQDDLISRSLITSAKKTLSQYGAGPLWSEGLMTYSQTRRYPEEGIVIIGDDSSMPVTSPEDLPVGQAVEVEDSEIDNPEPVNLTSMTKMFLELSFPTSSLLQFFRLPDVEDKSL

SEQ ID NO: 934228 - protein, 142 aa, Homo sapiens
MAVSEKGMPVGRRKCESGAQDSAFLMGSQVVLKLLAQGAQSEHSLPRSVSEKLATAGLASSLKQLGKCLTCDITGKLPMNQYPGMTVPETHPPFLPPGNKEEARRAGPKNTNKANLGLVCTSDFAKILMPALGIAKSSHPVA

SEQ ID NO: 934229 - protein, 178 aa, Homo sapiens
MSPCFWLLTGGTGEGQLDGREGFISIGLLLRQDAGALHSGCSGWWQPPTSFRTSRSILLGPVGHTGNSWEAPLPQRPELSLASPPLNPCSQQQPGSPPSSAEGYPATWTQSPTADYGELHSCGDRTQVSWQQICPVEGNPSLIFPPGSKPEVSDEGADFSILASRKECSPADTLILAQ

SEQ ID NO: 934230 - protein, 272 aa, Homo sapiens
MRKSQRQKAENSKNQNASSPPKDHNSSPAREQNWMENEFDKLTEVCFRRCIITNSSQLKEHVLTQCKEAKNLEKRLEELLTRVTSLEKNINDLMELKNIARELCEAYTNINSRTNQVEERISEIEDQLNEIKDEDKIKKNEKEKQSLQEIWDYVKRPNLHLIGVPEIDGENGTKLGNTLQDILQENFLNLARQANIQIQEIQRIPQRYSLRRATPRYIIVRFAKVEMKEKNVKGSQRERSGYPQREAHQTNSGSLGINPTSQKRVGANIQHS

SEQ ID NO: 934231 - protein, 164 aa, Homo sapiens
MSQGHRVNFKSLSKSFMEKFLNLSTTDLLDGMTAVCGCAVHQNATNIPGPYSLDASSIHYPSCDSQNCLQTLANVPCGVNSPWVEKHCPNSTVCFQDERLSVCPFPKNKHLFLFWVWWTLDLQLLRGPGDLTVSSINIPLTLLLLDPHLHSPTPHHEVPGPINS

SEQ ID NO: 934232 - protein, 150 aa, Homo sapiens
MMYDFETFSFGSSILEEANCQIAIWKDLCFEELMPPVNSQTGTEVSCRQQCNMEMQKRRRKKKEREEEGEGEEERKKEEEKKKEKEKEKEREREEEEDRRRRRRRGGGEEGEEEEEEEELLSFSGLSAEFHENFSSTKSKLVDSRLSVRS

SEQ ID NO: 934233 - protein, 128 aa, Homo sapiens
MGIAQRTGVIGRYFKSVRDSHSSITRGKEKVNKLFSVLFMTLYLPSSSCNLGRAPKIHCRRKGLYFLVPLTQRVPEACLAFSDIRLLQHRQFLQYLALAVYSASRIQHKNTFFDFYIQVLANYAVLEM

SEQ ID NO: 934234 - protein, 144 aa, Homo sapiens
MSIFYVNYSLWEHLISNMVIFNKAGEFKIKASGEGCSLFLRWCLEHCLLQKVGMLCPHMAKVSALRVFTLSLAAPCQWSGPGGKPQQLCSSFELKAAPGTVLTELKVLTIPLLNGLRPHSTSRIKVDTGIHFANSLKVIGNKTL

SEQ ID NO: 934235 - protein, 324 aa, Homo sapiens
MSQDQESPRCTHDQHLQTFSETQSLEVAQVSKALEKTLLSSSHPLVPGKLKEAPAAKAESPLEVPQSFCSSSIAVTTTSSSESDEASSNQEEEDSPSSSEDTSDPRNVPADALDQKVAFLVNFMLHKCQMKKPITKADMLKIIIKDDESHFSEILLRASEHLEMIFGLDVVEVDPTTHCYGLFIKLGLTYDGMLSGEKGVPKTGLLIIVLGVIFMKGNRATEEEVWEVLNLTGVYSGKKHFIFGEPRMLITKDFVKEKYLEYQQVANSDPARYEFLWGPRAKAETSKMKVLEFVAKVHGSYPHSFPSQYAEALKEEEERARARI

SEQ ID NO: 934236 - protein, 139 aa, Homo sapiens
MQLLCKDSTPLCVSHPRLWWHGLTRGSPDLWVAKIHGRSVVSWGHAVTNHFSWLGVGVPLALCHSLLGCHPTLPFFFVCLVVFLISPSSIQAAVTKCLRPVTYKPWNLISHSLEGWQVQDQGTSNIWDSKFDRASQTVT

SEQ ID NO: 934237 - protein, 183 aa, Homo sapiens
MSLRHHLSIQSVYSDNALTRRLEETCWCHGPDILRWSDNQMTRKVSVWKLFSVWGIFPSFFIIAFILATLYDKNPQQIGIEEIHLQLIKAIYDELTASIILNGEMLAFPLRTGTKQECPLSPLLFNIVLEVLARAIRQEKVIKGIQIGKEEVKLLLFANDMIIELENPKDLSEKLLDLINEIQ

SEQ ID NO: 934238 - protein, 194 aa, Homo sapiens
MIPRQTGFGVDLQQTPADLQQRGLTVRRKTNKHKGIGATSTKRMSIQTPSKSHQHQRPKIDKSTKIRKNQSKKAENSENQNTSSPPKDHNSLPAREQNWTENEFDKLTEVGFRRWVIINSSELKEHVLTQYKEAKNLEKRLEELLTRITSLEKDINDPMELKNTAQELCEAYTSINSLINQVEGCQRLKINLME

SEQ ID NO: 934239 - protein, 143 aa, Homo sapiens
MCLWCPTSAYLPVTSLLPCRCALTCSFPAHNPCHLWPPPYPLPPCLCALVHGHPAAVHSPVDTLLPCQSAFSGSPHQTVITRDWKHLSPSSTSMQPRSTELSLGPLKESRNKANLLNLTYATIKPTRASNNVKTKLPIERSGT

SEQ ID NO: 934240 - protein, 155 aa, Homo sapiens
MQEALVISSFVFSPQRQSPSQGKLNEKTVKSEWSTANLLQWLKSGTLTTSNVDEVKEQQELSFIAEEFGGFGRRQEDEGKFGISYRLVNGCDQTADRNMDSEGNADEVPDGNEEAIGVKNGRISSSVQPQHGKPVGIRVQPMRAAMWAMSSKSTT

SEQ ID NO: 934241 - protein, 165 aa, Homo sapiens
MQFLLQKYQTKELITKADMLDIVINEYKDEFLEIFKRASECMELVFAVDVKEVDPTSHSYSLVNKLGLTYDARLSGDEDMPKIGLLIITPSVIFMKGNCASEEEIWEVLNMVNLYSKGRYLIFGEPRKSITKDLVQEKYLEYCQVPNSDPPCYEFLWAYLRMYKT

SEQ ID NO: 934242 - protein, 134 aa, Homo sapiens
MLEDPFYPWLAWTLQNLKAGMGKVPKQQRWQPTPPTGISFLGKFNATTSGIPSQWVLSCEVFRNFQYSHENGEVGLSWMRASLDLISLVLSGQVIEEKKVGWWCEYHQVGSYQNTSHSFTESFSIKNECMGFKC

SEQ ID NO: 934243 - protein, 146 aa, Homo sapiens
MLGLLHSHNSASGRGCYSFFTPVVWQVPSPCLMIKSNEIHGHQRVMEIEPAMNGISGLIKGAQRDPHPSTYGYSRRCIYEQKWASQTSTYWCLMLTLISEGLLNLQKPVIPNIFDTRDRFCERQHFHGHVGKWFQDETVPPQIIKH

SEQ ID NO: 934244 - protein, 203 aa, Homo sapiens
MIQPCSSLAHTPSSTCIPSHKAPLAIQSLSYSPKIMSFWPLPVFLTDAGDTKQGLSPRTEFEKDENNSINPVQEEEDEGLDSAEGSSKQDEDLDLPEGLDSAEGSSKQDEDLDLPEGSSKQNEDLGLPEGSSKQDEDLDLPEGSSQEDKDVELPEGSSQEDEDLEKKRSSRSRNEIEISEITEILQGRSQINKYSDFIFLLLQ

SEQ ID NO: 934245 - protein, 140 aa, Homo sapiens
MCVVPPHVSMCSCHSGLLHRSLLNVWSPHGGPLLGQRGGEMWSWSLHRVSTWALPSGAVRRQPLSSRPQNNKSTDSLCCSLAKGTGTYRPPLRAATGTDPCKATRVELPKVLGSHPLHLVVKAAKPRTHPQGSGLPCVTG

SEQ ID NO: 934246 - protein, 146 aa, Homo sapiens
MLTSENMLTVGHQSLQTCKISDEKYAVNLMTFPFNEDPNVTHQENGKNVSRACLRPSWQSLPSQPQRPRRDKWFCGPGPGPPCCLQPLALVPCIQAAPAMAKRGQGTAQAIASEGASPKPWQLPRCVEPVGAQKSRIEIRPWTVDL

SEQ ID NO: 934247 - protein, 165 aa, Homo sapiens
MSHGNVNFCLGLKDCIKLDKKNLKVQRSGGRIVEINLAEEVLCVNLLTKFKKGHSMVFLIRLNNKESTQPPPPDTFLSQTQFQASSQSPRKENWIGGIQRQMTKVVKRHSKGPLCFLDASHFSTHGGTCQGYWDSEMQGWKRKGTLTSSLATGVYRTKETGSFIT

SEQ ID NO: 934248 - protein, 147 aa, Homo sapiens
MRKLRHSKMKLFDQSHVAICMLSGAQCKLFGDLPFWGLEDSGLLLTAPPGSAPVGTLCRGSNPTFPFHTALADFKVPQISKVGAKRHQSLCQNIKRVTFAPVLNKFLISIREHLNLDFIVHIIISILVKAIQQVFRKFQTFPHFPVF

SEQ ID NO: 934249 - protein, 181 aa, Homo sapiens
MADVWIPGDSHSIIISTEWGLHLSPVLDASCPQTSDSKFFGFLTLGLTTVVCQGLSGLQPQTEGCTVSFPTFEVLGLGLSHYWLPISSTCRCSIMGVHLVILGEEKEVCFRRSITAGFLERRPASRTCKCGGMQLPPEKQYRRSFSFKSFIYLDMTPVQGEIQGPSFVLSHVACQFSQHHL

SEQ ID NO: 934250 - protein, 143 aa, Homo sapiens
MLVQSRILSPSLTFGSLVVKCLEKISFSYFCIIEKSSPHPSHEMEGVRGQKFLTKEPRKILNFSRILSRGVALKDMKDNRLWAVFHGGGLESASAKTAVVLVPIVTSGEVFFTLIMGRRSSERGHAYVVLGCKGNDSSFSQSV

SEQ ID NO: 934251 - protein, 380 aa, Homo sapiens
MWRKNVDLEPPHRVSTGALHSGAMRTRGPPSSRPQNGRSTNSLHHAPGKAASTQCQPLKTAAGAVPSKASGMELHKSFGTPAPCTTAAWKQEMEALGGAWSAQGMPRFGTKCEGRECPAERSQPFGMRGQGEEVTKGFPEVVTPQKKLRERRFYANGSKDERGTEHWQHSESESLIPNVPKAQLPLIFPPFLSRLNSSRAFRGAENGSVEHGHREHSSRQTPNLRLAQVPDATQKGHFEEKSPVLSNNGLDGFLCDKSKQRENHCCNGHNYGQTNYTLQDEKRNKRVILANEFVPIFMSYDIGQEGIQNTMMQDAPSVYGFVSYHMLPPLSKNAGEVEAWHLGKKYPFQLNKEVEEMIRKKLKLAHYEKAKNLNIICHSQ

SEQ ID NO: 934252 - protein, 171 aa, Homo sapiens
MSLGLVQHYDLLMSCFCLHHCKGIPEAMQFIKKSLIGSCFCRLYRKYSASICFWFGKYPGTSEEIYSSSLLSTQGPFSIIPLDYGWASCPPIPGLHQPSGNDRPWESERQCPSSSRSAALLPPTGCGQPASPLDWSQNAKAQHLRVPCLQKGLSLRTGMVLVCKILQCIRH

SEQ ID NO: 934253 - protein, 145 aa, Homo sapiens
MASYSAGLLEFAGGPLQTLSASVSPVEAAEQQISQNGKCCYLILPLEASSQRGTWLYEVSVSPYWEISDSVLEEPLLSSKLSDRDAEVCISFCCLLFSYALPPEVESTEAGRPQQTFWKDYSQLTSSSCDVFGPYCSIFAQGGSH

SEQ ID NO: 934254 - protein, 137 aa, Homo sapiens
MDSTYEGDQVLFIVHKWLFTSPLFLRFSPLRAANKNKTFKWQRDLRENSRADTGMADGVNPLCICPWDPWKDQKYFSGPRVALDSEATSGFKGIPEMGLYQLVVKVLATHICQYVLSSAPRIMKWLLVNVHMSSSLG

SEQ ID NO: 934255 - protein, 142 aa, Homo sapiens
MVWSMIVAVVEQAFCSQAIHTGIYDGCNGLCKIVLRPASGMCRPCEGVLQLHCWGQQDPCRCLPLHFSPRGTVSCDGGCGCEMSMGLQRCGDAGAIGPPGRMQSGGHCKCGGCEGPELWEPTLFTGAQTKKQVKAQRKQIEA

SEQ ID NO: 934256 - protein, 145 aa, Homo sapiens
MAEACSFSSCSHLIEDPKVGGRHDKDWEKIFAEDISDKGLLSKIYEELLKLNKKMSNPMKRCAKDLNGHMPKEDIQMVNMHMKRCSTYMSLGNCKIKTTMRYHSTPIRMAKIQNTDNTNVCEDVEQKLFHSWWECKMVQILWKIV

SEQ ID NO: 934257 - protein, 134 aa, Homo sapiens
MRFFGKDIFYFLITLNDDKVATKQAVLIADSSICWLKTLLESTFANSALPPEPSSQPWTLNVFRPPNLACGNSYQALLCSFFAGGAWQELETLSARNCCPFLFYPPRLPQVQILILNIERGLMRANLGTILAKM

SEQ ID NO: 934258 - protein, 148 aa, Homo sapiens
MKPSGPRLFFTGRLFITTWILLLIIDESQFLATTTTSPQGVLPDYRHVTLRPTGLFNLLVNAAWPRTHPSGHSIPFWPRAGPKLLSKSQDLESRIPRVHLVLYLPVAKLMSKGPRALQLASDKSRQAWVLPFKAAGSLLVQGVSRNAV

SEQ ID NO: 934259 - protein, 204 aa, Homo sapiens
MCSHGLGQLCPCGFATYSPLCLTPNPLLSWARVVSASFPGAQCKLFMDLPFWVLEDGGLFLTDPLASAPVGTLCGGSNPTFPFCSALAEVLHDGSTPAANFCLDIQVKTGSCTLQLSSHRSETAGLQALGGISCLASSSRGKVTYPGVWVLPGTTGNCEHWLSSHCRRTTVPECMWGHVLCVLGISLDNRKLYTFAEFTQKQDH

SEQ ID NO: 934260 - protein, 234 aa, Homo sapiens
MSMFKLKTPAFIHLYVNFHNYMWILECHILLCLGSDQNEGFHCREECRILGHSDRCWMPRNPMPIRSKSPEHVRNIIALSIEATAADVEAYDDCGPTKRTFATFGKDVSDHPAEERPTLKGKRTVDVTICSPKVNSVIREAGNGCEAISPVTSPLHLKSSLPTKPSVSYTIALAPPARDLEQYVNNVNNGPTRPSEAEPRGADSEKVMHEVSPILKEGRNKESPGVKRLKDIVL

SEQ ID NO: 934261 - protein, 135 aa, Homo sapiens
MARCSMPSCNLHGKNNMDIGCGVTMEEPPLASASEMLSPLGGLHWDRDVPESTGLGHIVHEFKKRMSSSLLPDSGGLKNRLLQCGGSPCGKVSRHSLELQRADIRLMAEVTKRKTWFGKGTNQSCSEKKMGCLVR

SEQ ID NO: 934262 - protein, 184 aa, Homo sapiens
MGCNLLSAPSMPLLLNVQGHFVTDFDLVAAQPGRFVKDQIVVDKIGFKTKTIRRNKQGHYIMIKGSIQQDDITILNIYAPNTGAQRCIKEILSELKKEIGPKTIITGDFNTLLSTLGRTSREKINKETSDLICTIYHVDLIDIYRTFHPRATEYTFFSSTHGLFSRIDHTLCHKTSSETFKKLK

SEQ ID NO: 934263 - protein, 203 aa, Homo sapiens
MYEPLTFLGILGLQLTEDASMRGWWSALGSVTTRSRGSQKAAWIWLATDSSRSEAASNWSGSSGSSKLQHGPLASIPGRYNTDISRVFNGNNGTSCQQKLLPGSCCKELKDILLLHLQDIKRSGHCESFPLSYDGNPEQRHMDPSSGPSSARLLDFAGSPLQTLFVWVSPAEAIEQQRLLPAPSSGSVIPEGYLSDGRWSSPV

SEQ ID NO: 934264 - protein, 179 aa, Homo sapiens
MRIIGAVLVLLVHQLCHDCDYSFSWRTSVFGQYVKSPRFHSPTSPLCNDLGPLILNNLPVKWVAWSEASKGNSTAEEVAERLSDVPGDSVQGVDTGSVALVGGAWRPYLSGPSAAGLLEFTGGPLQTLFAWVSAAVAAEQWILVNRKCFCLIVPLEVLSQRSARPCEVSVHPYWGGPAG

SEQ ID NO: 934265 - protein, 151 aa, Homo sapiens
MSVEHQPDKCAKKHFLFLVIKYLTPHFARRQVIPDSWVRETNVGNQRVMYLATPVGSLTQSGGTGSGTRLMKYSGCPFAEGVHCTGRNPTHLDCLDSSVQTGKLGSRRQFPVEWLLQRICTALCLGLKALVAWAHKGYLLICGLHRLMDKA

SEQ ID NO: 934266 - protein, 136 aa, Homo sapiens
MQLWGSWGPYLRLWFQGPMVRAGWSLTVQLTRTPEAVVVQNSEKFDRLKPFSLSSSKSFSVQLCYIAGPSAAGLLEFAGGPLQTLFAWVSAAEAAEQRILLNSDCCCLIVPLEVSSQRGTRPCEVSVCPCWGVPPS

SEQ ID NO: 934267 - protein, 383 aa, Homo sapiens
MLLTNEDNPHGNDSVKACQARTKAGDLRDIGIFLDLMPLKKPGGFDISLNPVHFEESSNLEDLLQKVRAKETRKWALSRLKLKLNKDIVISVGIYSLVQKALKPPSIKLYRKTNEPVKTKSRKFNINTGSLLLPSDTKRSQIYGSHQIILEKEETEELKWFDEPALMLMVFKPLVMLKEHHYPRPSLFTYPEESPVNGSSTLFSALLIKCLEKVVIALCRYTPRRNIPPYLVALVSQEEELDDQKIQVTTPGFQLVFLPFADDKRKVPFTEKVMATPEQVDNMKAIIQKLCFTYRSDSFENPVLQQHFGNLEPLILYLMEEQAVDLILPKVEEMNKRLGSMVNEFKELVYSPDYNPEGKITKRKCNNEGSRSKRPKRSIQKRS

SEQ ID NO: 934268 - protein, 144 aa, Homo sapiens
MIDPPTACTVHLEIWQLPGASPSSYPFKNFLCCPSANLEKHLFILVMMMLIKIRRYEKKLPQLLSSHFIQLGIEVKKGVFEAVETLGSSLISLFILDLSSKNFWLCFQIYPDTDYFSSASLLLHGSNHHLLFLGLLQQPLNSFP

SEQ ID NO: 934269 - protein, 153 aa, Homo sapiens
MQPCVNLHLLLTFTSEHSSLRWCVKLRSDSRNLQKSQNAHPQYFKKKIHIIPWHQEATQELQLAELGHREWQVLHEIPEGIVIIGDDNSMCPIVPEDLPVENDVEMKVGDIDDPDPLNAAKYPKMNRKFPPNNYLVENDHNAEVVILCLRIIG

SEQ ID NO: 934270 - protein, 148 aa, Homo sapiens
MVYYHFDELLDSVGAGCKLTLIQPFRSLEDNGPLLTTTVGSAPTLQTVFGKKRSSVGGHKGASQVECGGSGSGEGSTVAMTVSHFSGTIFQSSLLRRPLGSSLAKTKGTTIIKTVDSLWLPSGALEVPQNKSCWSQSMLLETTVISVV

SEQ ID NO: 934271 - protein, 138 aa, Homo sapiens
MAHVHVWVIVLGPVSLTHKTKYFILDCGKLQKAQKGASLKPERTHRPTKGSRLVLQDLGDTPNTQLQQDPPKESLSSYTSSSAPNNGPTHPVTKDKRHTFLGVLGSCPPPVPPYTTIADTFWKAPPPGRRPTSTKIVP

SEQ ID NO: 934272 - protein, 136 aa, Homo sapiens
MYGDTWVSRQKSASGAEPSCRTSTRALQRENVGLEPPHCIPTGALPNGSVRRGPLSSRPQNGRTTESLHHAPGKVAGTQCQSVKPANGSVSCRATVGKLPKTLEAHLLHHRGLDVRHEVKGDCFKSFRFNNCPAGF

SEQ ID NO: 934273 - protein, 193 aa, Homo sapiens
MHNCESIAPLSFVHCPVSAVTERGQCTAWAAASGGGCSKPWPLTHGVEPAGAQNSRIEIWETPPRFQKMHGNDWMPRQMFSSWRISARAVWKGNVGSEPPHRVSTWALPSGAVRRGPLCSRPQNGRPTGSLHCVPGKARNVQHQSVKAAGRKAVPCKATRVELPKIMGTHLLHQCDLDYLKLMYCAATVERLS

SEQ ID NO: 934274 - protein, 136 aa, Homo sapiens
MGQKKKTEGTSSSSTFKLNSVSNKRRLMKLYHSYFCCYCYYYSCWSYYYYYYITITVAAAASNTPLLLLLLLLQDNIAIKDRRKERKKERKKERKKERKKERKKERKKERKEGRRKKETKKEKKERERKREKERLI

SEQ ID NO: 934275 - protein, 215 aa, Homo sapiens
MEKYFQDIIQLQILPYRHKRVGDYSQTPVLYSGCTESLALASAAGEASGNLQSWQKAKWEQVLHIVKAGARERERVGSTCHTHLNDQISQELNIMSTAPSHERNASSFCPFNVVLAYKGGKGSSTAEGVAEKLSVAPGGSVQVVAKLLLAQQLWQGVAAERGNATTHGWLQFQASGSYFIRSHGSGACRLSLLSFLDSACFLGKPLNLLYYIAVK

SEQ ID NO: 934276 - protein, 155 aa, Homo sapiens
MSQWLQPRVFCFSPGDCTPERCRRAIAQCSQTRMENLCCGPKPGVLCLVTNCGGWGMGQTSGRCTGLLSLCKMQLVGVEERRKGFLLEPQAVQTEVKGKDLPMSCSLYGLDCLSSILGDTDVVALDVKVCSKGTKLTTIYTEKPPLSEPKISSPC

SEQ ID NO: 934277 - protein, 139 aa, Homo sapiens
MNLDEDCSAQKEMVLSSRNDSSLNTQKSGNVYHWEVEEAKHREHGKYFYPVRLENQCEDNQARRLDQENIQTSALLEEGALNLATRKLGFDSTLLQVALFCSFFICNMDNIILVIFLLTMTYENLKTQIYSLSTEGFGT

SEQ ID NO: 934278 - protein, 206 aa, Homo sapiens
MRVIYRLPTQQKYLHKDQKSGAFVVDLLNGFDQNAGSDIDSKFQAEVVSDRDEELVRNWNKAHSCYAKGLAAFCPCPRDLWNFELERDDLGYLVEEISKQKSIKDEAEHKNLKNLQPDNIIEKKNPLSGEKFKPAAEICISNKKPNVNCQDNGENVSRASQGSSWQTLPLQAQRPRREKLFHGLAQGPTVLCSLRTCPGYFSFSCG

SEQ ID NO: 934279 - protein, 134 aa, Homo sapiens
MPFTKRRCLFRWFLGLEFYLWFIQAMWEGPQSSHSLSGVATLPEPSCARQLGRSLSSVHLSFCRSFISMAGEGEAVMSFFTWQQQGEVQSEGGEKPFIKPLDLSGPSAAGLLEFSGGPLQTLFAWVSAAEAAEQ

SEQ ID NO: 934280 - protein, 137 aa, Homo sapiens
MNPKEDLKSENRASMESTEQMNKKWEFRQTKVTLESEDTGVNRVLGGRESIYKDLGQRKNCLSMELKEWQCVWGIGNEGELGKRTNQRTCSLKMQKEVDSRALRKEGNNKLGYRLPQKSKPLLTNSTILIEAKHRKN

SEQ ID NO: 934281 - protein, 158 aa, Homo sapiens
MLFFKESSSTCRTDKTPWGDCPHTLPNAVPIQGFGPVPHISGIPTCFFMKLQLSFYIKGIKGIQEIGNTEPVFLHFLWFGNSRSRILKITWVSSLPTPTSSRLSVDNPTVTKLERPLTSNTGANDTLPTDEHIHKMHAWPSLVVQCLTSDSIKTKIHK

SEQ ID NO: 934282 - protein, 162 aa, Homo sapiens
MLYSGASVSRTTLADSWSSKWIAQMLIVTAVGLMGVQVLRPLGSRYGKGYDSTSGRKTLWVPRSSCSSFLFQASRPPGILSGSSLHHEAVVSIPTSSWRCTATLYVETKPTSSQCYTWIVFLHSRELQNKLSLSLNLQTLEAALMCSVVFFHPAPLTILYTK

SEQ ID NO: 934283 - protein, 269 aa, Homo sapiens
MFQLKVLYLLVPSIPFPELKHCAGRSAAVFRAGRQEHLSLLKLQPQLPLPPGALSQGNGSFIYQPLTGAAAFLSEMPCLERRNIERQSLYSGFAVLQWTPLPQPSLSNSGQLQTAVLAARISSQWTLACWSPWGWDLLSKTTWLLGFSPLSRGVNGSVLLAFQVPMRYKKTLLQLAQCLPKWPPSFVLETQGPGGVGIRGNLLVCRLRRPWEKHSIWAGVRCSSRHGPSRLSLARGGSSPSPCTFWVRRSPTLLLLALGGLHPLSDQSQ

SEQ ID NO: 934284 - protein, 287 aa, Homo sapiens
MPPIKTAQELEGLEDRNMWESLEFPRDLLNGFDQNADSDTDNEVQAEVVSDGDGELVGKWNKGDSCYILAKRLEAFCFCPRDLWNFELERDDLGYLAEEISKAVQKENVGSEPPHRIPTGVLPSEAVRRGPQSSRPQNAGSTNSLHHTPGKATDTQYQSMKAAGREAVPCKATGAELPKAMEIHLLHQHDLDVRHGVKGDHFGALRFDCPAGFWTRMGSVAPSFWPIPSTWNGCIYPIPVPPLYLGSPETCTGQEVKGVNLRAGPEVDMEVSKPYKTYRLRQVHFHC

SEQ ID NO: 934285 - protein, 309 aa, Homo sapiens
MLCWENHCSLQSCQTGTFKSAEVVCCLLFSYALPTEVESQGIFLLTGLSATGLLECAGGPLQTLFAWVSPAEAAEQQRLLPVPSSGSFITEGHPPDASRRCPVRGVCPTLLEGVSQSGSTGVRDPLEEAECPLAELEHCAGRSASLFRASRQEHLSLRKLHPQPPLPPSALSQGEGSFIYKPLTAAAAFLSEMPCPERRNLERLQWLCQAAVGSAQFELQGGSVYTTRGKPPMQASVMADAPHPTKLKRPRSSLDCNAGSKNFKPVDPSLLDSIGVGSAELDHLAPWLQPPFQGSKWFCLAGVPSTTGV

SEQ ID NO: 934286 - protein, 138 aa, Homo sapiens
MRQGWSYGPDLAKVPLFLVPNDWSRDEHMIKVRLATVFLLKLLQNTSGVADGHILSLLCLYGEWGYKIIKLGFSSLAESQCSSYLYEIVPSSPGLDFRIFPNSLELINNFLLCPHTANQIPSYKDLIFEVNCIFLISK

SEQ ID NO: 934287 - protein, 166 aa, Homo sapiens
MKIPEEGADNSLCCSAASTGDTQVNRVWSGSPANSSRTAEERPPQRSKVDKSMKMRKNQRKNSENSKHQNASSPPNERNTSPARAQNWTEDETDELTEVDCRRWAITNFSELKDHVLTQCKEAKNLDKRLEELLTRITSLEMDINDLMELKNTAQNLYEAYTRINS

SEQ ID NO: 934288 - protein, 171 aa, Homo sapiens
MCFNASYQMAPLEMMLTLEYLEKNSPESFMHLHLPCIITCRVLPQTKVMLISQMISPWAMQFGQSSVWLLWFAGGPFQTLVASTFPVPGDITSEGCKTASLAACPFFWKLHPREGIDLLLACILWKAPMCYWCLAGISGQWVLSCEVPWGPQNDAAWFPGFWHYPREAKIK

SEQ ID NO: 934289 - protein, 194 aa, Homo sapiens [sequence omitted]

SEQ ID NO: 934290 - protein, 150 aa, Homo sapiens
MELRRDYDLCLQLSGRVDKDYQVAREAGESWQSQASPYFHAACNPKGWSHSHCASPNSTKSISRQLVTRAENLPQTTSLLIEKANRITVFQHLRKPVGVIQFLQRVCGCSWLSRYVPVVVLGAKVHNVSLHTLLCPSERELQTSLASYLF

SEQ ID NO: 934291 - protein, 157 aa, Homo sapiens
MTKIKKIDHTKCGKFQFKQGFERASEFDLHVRRGRCQRNKKQKWTDSRRESRDKVKDIPTATRKRLKKTLKDRLTVPDRGGKEGSNKPVEELGGGGLEGISGDMKETVAIVCSGRDDEVCGTVERGGRSDWLLSHSGSVDQKVHGLNLSLSNVLSCG

SEQ ID NO: 934292 - protein, 149 aa, Homo sapiens
MGLGTVEQGVVLVGEARAALEPMEWVGGSGMMGCRSRALPRGKAAKARREIERSAGGPALLGDSVHPLQPLARVLSPPLPGASRAGWLLRVRGPPSPRPPGTPAGPQAPHAAPVPAHASPSTPPCKLREALSLYGSDALSSPMERYRFP

SEQ ID NO: 934293 - protein, 159 aa, Homo sapiens
MMLFLLIARIHESRNQVMEIGMSPPTIIPSDLLAKFLLPVPMTLCFAGLEVLVPKREMLPPGDKIIIPLNCKLTLPPSHFVFLKPLTQQARKGVTMLAGMIDPDYQGEIGVLHHSGEPRLIQEPNLRPRQGNVVKQEIIRTWLGTEVEEEGLFIGKNQI

SEQ ID NO: 934294 - protein, 180 aa, Homo sapiens
MQGLKNTSNTNFRFPTSDLIYSSNWEGKGEEEDEDEDLSKYKLDEDEDEDDADLSKYNIDVSEEGDSNKKKSNRKSHSISQSSHSLSSSCSFSLSNSRSRSRFPSRSSSSQSRSCFSSREHLRSSGLKSRSSSRSHRGSLNNPEPRANPYRTHYFTQAPQVIFWIIPFWFPFKFKKEIRH

SEQ ID NO: 934295 - protein, 134 aa, Homo sapiens
MCFNASYQMAPLEMMLTLEYLEKNSPESFMHLHLPCIITCRVLPQTKVMLISQMISPWAMQSLEGSNVLLVPAGISGQWVLSCEVPWGPQNDAAWFPGFWHYPRDSEYLLRKIGVERTTPGFRGKRNLAQPIVL

SEQ ID NO: 934296 - protein, 194 aa, Homo sapiens
MIKTIAFGRYDLDTWYHSPYPEEYARLGRLYMCEFCLKYMKSQMILRQHMAKCVWKHPLGDEIYRKGSVSVFEVDGKKNKIYCQNLCLLAKLFLDHKTLYYDVEPFLFYVMTEADNTGCHLIGYFSKEKNSFLNYNVSCILTMPQYMRQGYGKMLIDFSYLLSKVEEKVGSPECPLSDLGLISCCSYWKEVLLR

SEQ ID NO: 934297 - protein, 135 aa, Homo sapiens
MPIVYLSLEHGQAHDANSHKSVYVSPYVFSESPEDSRNLETGPHQTPVCWHQDLGLPSLQNVINEFLLFVSHSLYGILSWQPEWTKTGVSNLWATDQYWEIGQKCQPSSQEMIIRNETKPAKIPGLVICHMSKHR

SEQ ID NO: 934298 - protein, 197 aa, Homo sapiens
MAVCKPGREPLTELDHAVILILDIPASRTVRNKLEGVCLAGGKPTCLSYPDSSELPGGKAKSAGLQRLWPPLPLGAQAQGDPGSVSKPLVRVIGVPAGKPSPNEEGWVRTSLDINRVVRHPIRLHMAATASHGAGSPSPREFGGLKQIPTERLLRVCTFQGWDARPYGVGSQLKLLKQLIVVWAFNTWPLLAMLYEI

SEQ ID NO: 934299 - protein, 290 aa, Homo sapiens
MHNGSSDGSGPSKLKTFWKGFTILDAIKNTHDSWEEVKISRVTEVCMKFILTLMGDFEGFKTSVKEVTADVVQIASIFVEEISKQQSIQEVTRVLLKAFNFIRAAEHKSSENVKPDNAIEKKIPFSEEKSKLAENICISKEELNVNPQDNGENVSRASAPIIAERGQHRAQAVASKGANLKPWQLPCDVELVSAQPPHRVPIGASHSGAVKRGPPSSRTQNGRSTDNLHRAPGKAEDTQCQPMKAAGREAIPCKATGVELPKTMGPHLLHQCDLDCLAYLNSCLLLASFG

SEQ ID NO: 934300 - protein, 139 aa, Homo sapiens
MPSKYQVLESGTPSILLMLYPSVAMLVPKVQDKVTFTFPSTFLKQMEFLHAASTAAINITTIIHGNDYSRHFVIEAVEVMYIVIDTASKMKKVRIQTQIPFISNPLCFLHYIIMMPYLSSNNMNHLTPLNYLSLISPPS

SEQ ID NO: 934301 - protein, 195 aa, Homo sapiens
MTEWETAAPAVAQTLDIKLFGKWSTDDVQINDISLQDYIAVTEKYAKYLPHSSGWYAPKRFHKAQCPIVEPLTNSMMMHGRNNCKKFMTVRIVKYAFEIIHLLTGKNPLQVLVHHQQWSLGGLHTHWASQDCETTGCGRVPTAPCESGHLAAVHRHLNTKRIVMDGCDLLEIKANQTSAPLNLLHGCSLKANVSI

SEQ ID NO: 934302 - protein, 327 aa, Homo sapiens
MNSGNRLHNFLLRKTYENTWSTVKNTLVMMIMMIVMMMVMMVMMMIVMMIVMMMMIIVMMMVVMVMMMMVMIVIMLMVMVMMMMMVIAMIMMMVIIMMMVMFVMMVVMMVMVIMGDDNCDNDSGDGDNNGDGNNDDNGDDGDGMMVIMMMIVMMVVMVMMADDDDCDDDNGDGNDDGDDGDGGDDDGDGDDDCDDDDGYVNDDNDYGDDGDDSDGNDGDADCDDGDGDGEDDDGDEGNDGDGDGEDDDGDEGNDGDGNDDSDGGDGNDDNDDCDDDGDDNYCGDDNDGDGDNDDSDGDDGNYYDDGNKDSDDDNDDNVMTNSQTAYI

SEQ ID NO: 934303 - protein, 153 aa, Homo sapiens
MLRADEPGHLALQEQWQAFSLIGSGNRRLTGSGAQWTPCQIQRDGSQRQVCDGSKQQWWEGTRRRRDNGEEDITEITMTKFTQFVLDIKSATQESQRKTNPDKYDNINCRKDKNTKTPNAVKDIEQQKLSLIAGGNAKWHSQVGRQVGSFLQS

SEQ ID NO: 934304 - protein, 169 aa, Homo sapiens
MSGSTLKPSPEEDAGTMLLVQPVELQLLGSWSPISVLMEEYTSWGQSPVIKSISDLSSPHPEGSQSGYQRLKNLRMNSSEVPPDPQRCPVFRNADSTTAVKSLHSLPCKKQTLGHMLFQEKSTFCIFTEGQDRVTLAADPRPSPLAAQELQGEMELALRGLQRAREWAY

SEQ ID NO: 934305 - protein, 143 aa, Homo sapiens
MAPHMPLEDRGCVIQLINPSEARQPPPLLQSQDQTSYPRPFSATQATPPFQWNPGTLKGQHRALSEGSQQKEQVGAETQATLPSLSPVLWHRDADQRKEYFYFICPDEPLYEVIKLLYEPDQGTVTKASVCEFEKEWKEQVKP

SEQ ID NO: 934306 - protein, 157 aa, Homo sapiens [sequence omitted]

SEQ ID NO: 934307 - protein, 145 aa, Homo sapiens
MDYLVVPDRAINDPDPSKMQVWVTPQDKEPQPAEVLAKGKGNTEGVAEEGGYKDQLGPCDKVHVHNVQSLALLENHCFHHLSAAQDRSILNYGTEKTRMDPPCRQPKTKEGSDPVILNFFSQSSPSSSIILPKEGKLGERLGALL

SEQ ID NO: 934308 - protein, 136 aa, Homo sapiens
MMQALRRYLEAVLQAGGARLGPQERPVGQGMLRLDWPRLMGKTTLQHSDASHKWGTQTTNISIQLTTNSGVSTSHPLRFDNLLELFTGFRKTLYLYLLIYYKEYNSGTAKWNRCIRAVTKETAKKLETYQKVPPRI

SEQ ID NO: 934309 - protein, 139 aa, Homo sapiens
MFLYLFSASFSDMRLKPGPPVVCGGIGYGRQEQSEPKAPGRMLKWGKQWLHCGPAVGEGMWGRRDYWAPEQDAVCWGLVSQNGALLQLLKTWEEDGKMWGSLELPGDLLNAFDQNADSDKDNEVQAEVVSNGDEELVGN

SEQ ID NO: 934310 - protein, 153 aa, Homo sapiens
MLAFGYQSFLLCTQTKLTSPTGSKLNIENTVFAGSKTCVYRGPTFHICGFYRAVTVGLEYARIWEYVGVLEPILGDTEGQLYLCQFHGITGLHLVKENKKPRYYVLGCLTKAKYPFWPESQFFLFILLPFFSSLFLTLSHPPTLKIRQYSKVR

SEQ ID NO: 934311 - protein, 136 aa, Homo sapiens
MSLNKFKNSTQNKYIKGEILGNILQYMTDKSLIIYYESVQGVHVQFYYMGKFCVVGVQCTDNFVTQKDATHMDFPEFSEESQNGESEGALGLVIKRQVSGKIKGEQSFIENVTQCDTSFWHIPKEKYQCANLHSKS

SEQ ID NO: 934312 - protein, 145 aa, Homo sapiens
MPLPVCNPQSLSAQALAQGETTNEGRSSSLVDKQRARGVPSSCESLNLGVLGKDVLALFSFLNEQNRTSSPVLGFVKNFSLWLHHNSCSGTHNMYQEYLDSATGGAVTQYYREMGAQQCGWAHWIQIVKIQSLPIQCNRHQPTQS

SEQ ID NO: 934313 - protein, 177 aa, Homo sapiens
MNVTVYGDEEIWAHKRQQGHAGTEGSKRAAIYKPRRAASEETNSASTLILDIYPPELEAKTLGLVDRTLVSFWELHHYPQMCEAMACLKIGILAQWSQSPLWAPTAQLWLLITGGSLIPSSSSPAGPHPLTVCCPFATAGQADDPLACISSYLWGFLCPALDVALPAFVILGERKGG

SEQ ID NO: 934314 - protein, 282 aa, Homo sapiens
MHRERRGKNVVHQLSVTLEDLYNSATRKLALQKNAICDKCEDRGGKKGGVEYCPNCRGTGMQIRIHQIGPGKVQQIQSVCVECQGHGEQISPKDRCESCNGRKILREKKILEFHIDKGMKYGQKITFHGEGYQEPGLEGEDIIIVLDQKDDAVFTRQGEDLFMCQIVKHGDIKCVINEGMPIYPRPYEKGRLIIEFKVNLPENDFLSPDKLSLLEKLLPKRKEVEETDEMDQVELVDFDPNQERWHHYNGEAYEDDEHHPRGGVRIYRPNLVIDFSYVCGQA

SEQ ID NO: 934315 - protein, 241 aa, Homo sapiens
MHQSVESDIHGLHKIIDDTNVTQLQLEAEVKALKEELLFMKKNHEEEVKGLQSQIASSGLSMELARENQEELDKYGSQQTEESTTMVTTQSAEVGAAEMALTELRHTVQSLEIDLDSMRNLKASLESSLRKVEARYALQMEQINGILLHLESELAQIRAEGQCQAQEYKALLNIKVKLEAKIATYCHLLEDGKDFNLGDALDTSNSMQTIQKTTICRIVDHKVMSDIKPAEAGRRCKGKSL

SEQ ID NO: 934316 - protein, 204 aa, Homo sapiens
MYLLEGITAEPATPLDHRRCMQPHTWCDTSLPLTQIHLPSSCVCRKFSFGLKPNLQKVPTPSSVSLAAFHQTGKKKKSALKGKTGNQILISEDFNCFHKLNFPPGVKFSIYNKDIICPEICPCPPCLDRLILPKHNWYHDILLLRSLSDCPIPAAENPHSSASVHLSLLPSENCSPQPGARKGSCPTGYIKDLNNSMKCFYPQL

SEQ ID NO: 934317 - protein, 184 aa, Homo sapiens
MPGYSSETKLPEERPGSNICCSPISTVLQPPLLIPRQTGSGVDLQKIPTDLQLRVLTVRRKTNKQKGYPHQNPICTSPSSKTKAMEQSWTENDFDELREEGFRRSNYSELKEEVRTHGKEVKNLEKNLDEQLTRITNAEKSLKELMELKTTERELHDKCTSLSSRCDQLEERVSVMEDQMNEMK

SEQ ID NO: 934318 - protein, 154 aa, Homo sapiens
MPVWSCCQVATEWLTLYVPRLKMISCSQSHIWENACNFSWCLSLAESLSLSSTYLQVLGETKCSPLVLVAQIPSGKNEHSSYLAVNIFDFQNTFGIRLDFKTFTIKIFTTHVIGSEESHNQDISNPGIVHALGYLTKMGRTREENGYNHRGVDQ

SEQ ID NO: 934319 - protein, 160 aa, Homo sapiens
MHSSPVDHLFRQIQQNPTPILENFFFNRASQFSISPCLRSSCKLPYASRLALCNLHYHLPPTPSAPTLLLVVLNANCQVLPTSWVRQAATRGGPLVEGHHLVKSFLSGWIPGTSSLAFSMALAPGPWALADQQGCPWMRPFDQATGPFTYIGVLRSQQSE

SEQ ID NO: 934320 - protein, 137 aa, Homo sapiens
MVRCACFPFAFCHDCEFPEASQSCFLLSLWSCESIKCLFFINYLVSGRSLQQCENRLIQSNVFAGNYSSYLLLEMKEKGYQLPVLFPCPHGERTINFNTVRVYQKCFTSLRMRSREKYEPWVKIVRRQISGYINLQL

SEQ ID NO: 934321 - protein, 487 aa, Homo sapiens
MADYLISGGTRYQPEDGLTAQQLFASADDLTYNDFLILAGFIDFLAGEVELTSALTRKITLKTPLISFPTDTVIEADMAIAMALMGGIGFIHHNCTPEFQANKVQKVKKFEQGFITDPVVLSPLHTVGDVLEAKMRHGFSGIPITETGTIGSKLVGILTSRDIDFLAEKDHTPSSVSKKGKLPVVNDHDELVAIIARTDLKKNRDYPLASKDSHKQLLCGAVVGTCEDDKFRLGLLTQAGVDVIVLDSSQGNSVYQIAMVRYIKQKYPHLQVIGRNVVTAAQAKNLIDAGVDGLHVGMGCGSICITLEMMACGRTHGTAVYKVAEYAWRFGVPIIADGGIQTVGHVVKALALGASTVMMGSLLATTTEASGEYFFSDGVPLKKYQGMGSVDAMEKSSSSQKRYFSEADKVKFSQGILGSIQDKGSIQKFVPYLIAGIQHSCQDIGARSLAVLRSMMYSGELKFEKGTVSAQIEGGVHGLHSYERWLY

SEQ ID NO: 934322 - protein, 144 aa, Homo sapiens
MLKRVFLIQAWSHPYWSQQVSSTHDNMFINKHVHQKAALWVMASSWLLSQCPPIAEREKKLRCPHNEILHSSNENKQSTATHNNPEGSHKHNIEWKKPDRKTHSGGGLWLTPVISALLEAKAGRSPEALHLVYNYVNSKVKSIL

SEQ ID NO: 934323 - protein, 138 aa, Homo sapiens
MFNDRKRGGKGQSIFPHATFSSEKKYPSPNLSNRILLLSHWQYLGHIAALSGKGDWESIRFFSFYSGKAARERQQEFVTYHKTAPTPWELDFHSLVEMSPLHLPDTHAKWAVGQKMEGHSMNAGTTERFPGFRYRYIL

SEQ ID NO: 934324 - protein, 148 aa, Homo sapiens
MVELVNSPTNSGTLHSLGPSSLLKAPRSTGPLSPPSPSTTTNSSSPSLAPPFLLTGASQLLLERGPDPDPKSGFLDLTQEGIGEGKPEVVHHGWGRESTNGKSHTDIKLEKTHSLILELKLGHRCKMVKPLMLSYSIGQFPLPFPEGA

SEQ ID NO: 934325 - protein, 318 aa, Homo sapiens
MLHCLKYLVMGQRGLLSVVITISPYETDNRRLKLKNELLEAKRRSGKTQQEASRVCVHCHRNLGLIFDRGDPCQACSLRVCRECRVAGPNGSWKCTVCDKIARQLRIITGEWFFEEKAKRFKQVNVLGTDVVRQSILRRSPGAEEVQSQEQTRQDAEKSDTSPVAGKKASHDGPKRKGKFRSATRGEIITPKTDTGRSYSLDLDGQHFRSLKSPPGSDRGSTGSSDLNDQEPGPRTPKSSRSNGVTPGTQSSPAPSTRTVTSVISREYGFENSMDLAAIEDQSRSELDLSESFTEDSEDTVSIRSKSVPGALDKVMMS

SEQ ID NO: 934326 - protein, 135 aa, Homo sapiens
MCTATSPRFPRPVLLLFKTLNINPEREVGLLNSLGKLGSWQALDTKEPLNNNRPTPGPVVGVSKTLQKHNSTVTQHQAHTYLGMSLKPYDDCFGLLKHPTEQSPRVSVPSSPLLAPGTQEGTQELSDLAASGDSK

SEQ ID NO: 934327 - protein, 167 aa, Homo sapiens
MPRFWCVAVGGYGAKNIYQVAVERESTELPFKNLATLKLPCWREMPKNFWNCFLVPGGLGDLEHVEAYHLAQGPALAHCDDVADLDVPEAGGQVYGHVLVVLLKVVVLAGVVEIVSADDSPLHLHLGHHAKEDPPSNGGITSEGAFLVNVGALNRLFRCLEAQIDVL

SEQ ID NO: 934328 - protein, 138 aa, Homo sapiens
MTFYDPPKNLAVSLYQILLAETVTSWLRFNLGGESDAPSPLVGYQAHDTEEQLNPVLTHRDLLCIDFKGLDEKGEGLFHQPLDLVIEFLALLFASTASNGPIWWLASEAYCIPSIPFHPESQLNIYQHYHWLDPTARS

SEQ ID NO: 934329 - protein, 190 aa, Homo sapiens
MGGWMDGYHLPHPGEYPHWPRPSHWQHQEMQGEFSGAADGCIANVAEKSTCKCRATYFCSLISICCAVISWAPIGPSTQSPLQGTAERSSGVPGAGQSFIAGHSPELHGSNFNLHDGRDLVMPFLSSPISPEPRMAIDRDPQKQILRWKFTCEYLIKGMLPVGDPADTSTGSAHSNQQASKRLTQMHRHI

SEQ ID NO: 934330 - protein, 174 aa, Homo sapiens
MKLAPSSFRECPVGAGKATWHAVGLCLVTCRKQERVQQGILSTDFCWTQAQSRGLHYSDLYTSIQKSAAALSHWRIEVKFMCDVWVEVKQQPFLYSHSWEEGWQALSQLTRVVTDLWTHLAGVGGSRAHSPSSACQSSSFGFSEFWGWRVCGYMVDGTGLACRTGKQKNGRVER

SEQ ID NO: 934331 - protein, 183 aa, Homo sapiens
MTQGKQNGSHFKSFHGPRGFLLFPLLLLHQLIFVINLLHEIWELLLWNAGEDFSRLYPPRVGDEGVCSKSSQCLSPLILQGQISGIQNLSNMARKNCRNTVVCFYWDGCYGDVRSGRFCVYCDTPSTPSFKTSTVAFLGLGLALPATSLKLLHEDPPGFRKLQCCVAHLFPVNASSNWSTEFK

SEQ ID NO: 934332 - protein, 134 aa, Homo sapiens
MQGSLPYAFAFCPLPLLPRVMCASTKNLSQPARVISLRLREVKDESYGQSCGEVARDTSFHIPGLTPFPSAGPSCLSPSHLASMPFPPHLVSSADFEAQLEAALSSIPRHRYCTVSPALTDSWLALLPQCQGWL

SEQ ID NO: 934333 - protein, 154 aa, Homo sapiens
MCQSLSALPMLTQPSQQPVRDVAFNHSDLLPLQCVADISLIFQVQGALNSAYVPSASSRDLNSSSCQTELRIYQGDTKFIKRLSTNKPTQVSARGQYWLEPGWSIWTGCGEGGGGGHGNASGVNHNGAALLLALWWEGLGDSHHPQLWMLPALT

SEQ ID NO: 934334 - protein, 144 aa, Homo sapiens
MPPTSCSQPNIALPMRMPVSSQHHQWSMLSNLEIRFAPEWLFISLGKSGFNCLRAVIQLRNVDIGNESLQGARKHEHGEEIEEVMGRALAATTLMSDYPFHTHRRSAPYKRDMPKADNKRLNSTLNLSLDSHLELRPAAPLQRI

SEQ ID NO: 934335 - protein, 139 aa, Homo sapiens
MEDKSIGRGYREWEHVTLCWSRAIAMPGFKHGLSQHWVLKILLGTRKSMHQPYASFQEWPPDISCLEASQVTKRSQGQQFFTENWARNRKIGNRPVVPRINQRCSLKYEFLKRQWNPCGLSNNLGQVLGNWFTAGPAAG

SEQ ID NO: 934336 - protein, 144 aa, Homo sapiens
MPLDSCRLLHDSVDSESPAPAAETEIYLENCRSPNRVEKDVMSYVLKHFKKKAFHFLLVSMVSDEKFADIQIVIIMSLDMDNPRRLSRKLPLGHSGSLQLRQSLKKLRAKGCLPSVLLAPETTRTSLKRDLDSAPEWPEHLDVQ

SEQ ID NO: 934337 - protein, 208 aa, Homo sapiens
MDQHLQMRPQALTEELAASSDTSELSGSPHIAEVMNCLGVIMPLSFEWGPEQEKALQQVQAAVQAALPLGPYDPVDPMVLEVSVADRVAVWSLWQAPIGESQRRSLGFWSKALPSSANNYSPFERQFLACYWDLVETERLTMGHQVTMRPELPIMNWVLSDPSSHKVGHAQQHSIIKWKWYISDRAQAGPESTSLQNEKVLKLFFTTM

SEQ ID NO: 934338 - protein, 136 aa, Homo sapiens
MLGLGHFGLGTQFLLVEDNPPEKAAAEQECPHVLTSPRSLYLQMSDELVNVPAPPTAVASRMSPVTPHLLYYDWALSHTPNPTLALYGTPQLAFLQAFQTRVQRPVVGVYTGQLVHVARSTWGCEWKFTSSGNFDC

SEQ ID NO: 934339 - protein, 145 aa, Homo sapiens
MCPEFLPSGGFMVSLTSGVKLQTFVVSVAALKGGASGVVHSFRWVRVLNGLRSEAADLRGASEGVKSLPGCLLPLSKGSGSTGSGQFSAIKWRKLLAPLMILLAGVGCGWIVQLRTHYCSCYEYIGFAAIVGCGAGDGLSSNATT

SEQ ID NO: 934340 - protein, 146 aa, Homo sapiens
MAVFTIKKEYTLQRKEVWGHEFSWRTLVGEPRKQAVVKDLKPAAGCYHWAVGKEETVRVGQPLGAHSLATHTELCTPVSCGIRSMTDRMCDRAQDICTTGCKFAKVQENKEILYYHWEAKNEGNLEKSPQKISWHRIIQTDRSEEA

SEQ ID NO: 934341 - protein, 139 aa, Homo sapiens
MGKSSTSFFEYEYPGFPACFVEKTVFTSLNGLSILVKTHLTIPSHKESKDLFLGYLFCFIGLYIYLIPVPHCFDYYSFVHLDSISPLPSGLQVSDEKSAHSITEDSLYLMNHFSLVAFKIPLLSLSFKSLIITCLIESR

SEQ ID NO: 934342 - protein, 142 aa, Homo sapiens [sequence omitted]

SEQ ID NO: 934343 - protein, 134 aa, Homo sapiens
MPRPALAHTRWAAPTVLPPLSDEPHASKCGLQKVPEYFYKSKFDVIDGVRSSARNQWLRHLLLLHPPRIEYQKCQKRFSISTSQVLLVSEISCKWPPQLLLVCARAHTGTLTCFPTPGAAPTKLNPHPSLSLEG

SEQ ID NO: 934344 - protein, 148 aa, Homo sapiens
MLRSGLLGADTFNLVHRVLEWQLSGSGSQTQQHQHHQNLLEVQVLRPKAMAAIDNYSSNGFGQSKLKTFWKGFTILDVLKNICDTREEVKISILTGVWKKLIPALMDDFEGFKTSVEEVTADVMEIARELELDLEPEDDLNVGYSLGC

SEQ ID NO: 934345 - protein, 141 aa, Homo sapiens
MRILCLPWGFEIGIGNLERVQNVIKVLGNRCTEQGLKVQHWTCPIKTQYWAGPYDPRLQALPEIELPKVCHRNQLGSCSPRHQMSCTTTRLTPVAPGSVYQNLWDREKVVLRGKCIPIIAYIKNEEIVYYEFKGYMNIWEI

SEQ ID NO: 934346 - protein, 175 aa, Homo sapiens
MAPPRSPGAQAGQRLSGDPPPYLPPASITLREPSCLFFPCLTAFSNLAGSSGATIAYHTVLIWAKMVRPLCLPLTQPPDVGCPQKYATLIKHGCGGFGKPTIMAEEEVNRSFSTWQQQGEVSSKRGKAPYETFRSRENALSREKQHGDNHPMIQLLPTGSLPQHVRIMGTTIQVP

SEQ ID NO: 934347 - protein, 164 aa, Homo sapiens
MFRLNWSPEGILTPKASDYKCVPRVFSVISGKCQLLIVQEAIIPTQKIVQRKKGRNLVSETKDRKKKAYKEMKIKKYIAKSAMIYIYYLFYIQKINTDIVAYSYSHLSLHLHPYFYPTHICVHIQIHISVLICVYFAFIQMIYSLTHKVISNMVHMLFMNMPDK

SEQ ID NO: 934348 - protein, 789 aa, Homo sapiens
MAGLRYSVKVYVLNEDEEWNNLGTGQVSSTYDEQFQGMSLLVRSDSDGSVILRSQIPPDRPYGKYQETLIVWYEAENQGLVLKFQDPAGCQDIWKEICQAQGKDPSIQTTVNISDEPEEDFNEMSVISNMVVLPDCELNTLDQIADIVTSVFSSPVTDRERLAEILKNEAYIPKLLQLFHTCENLENTEGLHHLYEIIKGILFLNEACLFEIMFSDECIMDVVGCLEYDPALDQPKRHRDFLTNDAKFKEVIPITNSELRQKIHQTYRLQYIYDILLPVPSIFEDNFLSTLTTFIFSNKAEIALQPQSKDALFETLIQLGVLPALKIVMIRDDLQVRSAAAVICAYLVEYSPSRIREFIISEAHVCKDSDLFINVIIKQMICDTDPELGGAVHLMVVLHTLLDPRNMLTTPEKSERSEFLHFFYKHCMHKFTAPLLAATSEHNCEEDDIAGYDKSKNCPNDNQTAQLLALILELLTFCIQHHTFYIRSYILNKDLLRKALILMNSKHTHLILCVLRFMRRMICLNDEAYNNYIIKGNLFEPVVNALLDNGTRYNMLNSAILELFEYIRVENIKPLVSHIVEKFYNTLESIEYVQTFKGLKIKYEKERDRQSQIQKNLHSVLQNIVVFRGTIEEIGLEEEICFMEDAGEVVMPPLEDDDEFMETKRTQEGEAVMPPLEDDDKFTETKRTHQEGEAVMPPLEDDDEFMETKRNQEHEGKVDSPKRTSSGDFKFSSSYSACAAIGTGSPSGSSVVRLVDHPDDEEEKEEDEEEKEEDKEDETSPKKKPHLSS

SEQ ID NO: 934349 - protein, 137 aa, Homo sapiens
MANSKNPVEIEIMVFSSTLNMPDVGDNKVNKSMACSSLIKAVEFCEVVRGIQRRQCHYLYPQRANDVWNQRRRSDSKHDHRRKVFKCSQQIEMINALSQWSPTFLAPENGFVEDNFSTDWVEGWFQDETLPSLIIKH

SEQ ID NO: 934350 - protein, 349 aa, Homo sapiens
MPRGQKSKLRAREKRRQARGGLEDLIDALDILEEEEESPPSASACLKDVFQSSLDGASNNPHGLREAQSTSTSATAASHTRHPEGVNDQMEERPICTQDLEATDSFPRGPVDEKVIILVHYLLYKYQMKEPITKADMLRNVTQMSKSQFPVILSRASEHLELIFGLDLKEVEPNKHIYVLVNKLDLGCDAKLSDETGVPKTGLLMTVLGIIFTNGNCVAEEEVWKVFNTMGLYDGIEHFMFGEPRKLLTKDLVKENYLEYQQVPNSDPPRYQFLWGPRAHAETSKMKVLEFLAKVNDTAPSEFSNWYTEALQDEEERARARVAPRLALVPQPVHVPRLSPASPPNCSKV

SEQ ID NO: 934351 - protein, 215 aa, Homo sapiens
MKEPITKHNMLKYVIKKDKAHFHEILKKTSEVMVLAFGIDVKEVHPTRHYYTLISKLNRTCEARLSGEEIMPKTGLLMTILCVIFMKGNCATEEDILQVLNKEPLFLWGAQEAHHPKFRVKERHLEHRQVLNSDPVRYEFLRGPRAHAETSKMRILEFLAKIHDTVPSSFPSLYEEALRDEEERVRGRFAAMLPTSARASARSRVNSSSFTPREV

SEQ ID NO: 934352 - protein, 156 aa, Homo sapiens
MAESLSLVIGNSTPEKCGATANWNDQLGMEWHITGLSEESLHCEEQGSGKLMGETLWPPVCRTAAACWRCKQSNQGLYSPAQGQQGHVPWQWSRQRGCQVHQGQVSIQRQWQRACWLSLGILPQRNTELPVTEVIRRTVTVPLVIMDETKWIENKE

SEQ ID NO: 934353 - protein, 621 aa, Homo sapiens
MSYFLSYCKAHGGALLTGYQALRAEGFLCDVTLETEGSEFPAHRSLLACSSDYFRALFKSHTQESRARVIHLHVPSAAGLQRLLDFIYTAWLSLSMDTVEDTLEAASYLQVTEALGLCGRYLERQLAPENCCFAANVAARFGLAHTLDAAERCIVSHLQELLARGAGPAGLLELNPTSLRAVLGAPDVARVPEARLLGLALAWLRQEPTTERLAHCTELLERVRFGLVPADVLRRVYSGSGLVLPARVKGLIIQALNYHTTPSRQPLMQGEQTSIRSPQTRILLVGGRRAREVVIEEVAAPQRAARGQVAAPEPEEEEEELEEEEEEEEWELTQNVVAFDVYNHRWRSLTQLPTPLLGHSVCTAGNFLFVLGGESPSGSASSPLADDSRVVTAQVHRYDPRFHAWTEVPAMREARAHFWCGAVGERLLAVGGLGAGGEVLASVEMYDLRRDRWTAAGALPRALHGRTSSLRDLYVLGPEEQVWSKKAPMGTARFGHHMAVLRGAVFAFLGRYEPFSEIERYDPGADQWTRLRPLPYDRFCYGLAVVEETALLLGGLKWRDSRQVPTRNVVGYDLDLDRWEDIGCALPWAWSGLRCAVLQLAEGGDDEREGEVGEALDLVLG

SEQ ID NO: 934354 - protein, 158 aa, Homo sapiens
MATERGKWSSQSKRRPGVALDPKNKLLLFHRSDHVWDGNAGKDKDELFTFYKQKGNSFHLVVQEMRFRKVHIKMLEQESLTLIIEKSISSYNHLGAVCQSCSLFQKAPNTTRNDVWWSSCILILSVGMGWSHLGSCDILLNGDVYQGRELIVQYGTAF

SEQ ID NO: 934355 - protein, 236 aa, Homo sapiens
MAAETWNVAEAEAPQPQKRYYRQCAQSNPMADHTLRYPVKPEEMDWSELYPEFFAPLTQNQSHDDPKDKKEKRAQAQAESADIGCGYGGLLVELSPLFPDTLILGLEIQVKVSDYVQDRIWALRAILEIKHKRQIISPTLLAKYAYVLRVGGLVYTITHVLELHDWMCTHFEEHPLFERMPVEDLSEDSIVGHLGTSTEEGKKVLRNGGKNFPAIFRRIQDPVLQAVTPQTSLPGH

SEQ ID NO: 934356 - protein, 151 aa, Homo sapiens
MNISAQNISTIVLKTCEDVALRDKRDFADVIRLGILRSWGDDPGWPQWAQCRHKDHYKREAGGSESEKIGNGSRDQRGRFEAATLLALKMEDRAISEQMQVASRSWKRPGNRISPLAYGRNTALLALDFSPFTPSLDFYPPEKEKDEYVLF

SEQ ID NO: 934357 - protein, 247 aa, Homo sapiens
MSLAAQGLREKLSWAVTLEEDLAEITDGSRAGYPLAFTPRGSMSCERGSGSRGLWQDHRPQNVQKQAELKGRAENRIPQGTVKLVPRTHEDAPTIDFQAAPKLAQRPLPLGRHPRLREEGPQAGSSAAAGAVRAALLSQRCGAAGPCPSCLLPRAQLSPRKPTTVPSGIWNSESFPLDWPRCIRGIALYGGYSFMKWTSSTIRLERGDDPWSHGLQNACCARRPENNVNLPGALPQSSWVTRCLVNG

SEQ ID NO: 934358 - protein, 228 aa, Homo sapiens
MFLALSSTRLVYFLEFNDRIHEVPSIQYPLLPPGRFQIPDLALHFQNNGMIYPEYSRINSVNVPGPACKHKLPVSLFQAVRMKKDSRKQWCSSQLDPDVSNGWAIECFNNTQLKRNKAFRKFLLSNNETGPNLGPIASTLYFRDQTRLGAFTVLEPDVVRVQPDTRNSFIFLSKSFHMESNPWAEPQIFFSTSHVLSLACSRSLFMLQHTKALDSSSTIRLHETSFLI

SEQ ID NO: 934359 - protein, 604 aa, Homo sapiens
MFLALSSTRLVYFLEFNDRIHEVPSIQYPLLPPGRFQIPDLALHFRNNGMIYPEYSRINSVNVPGPACKHKLPVSLFQAVRMKKDSRKQWCSSQLDPDVSNGWAIECFNNTQLKLNKAFRKFLLSNNETGPNLGPIASTLYFRDQARLGALNHNTRRQYGCSWSNGWAIECFNNTQLKRNKAFRKFLLSNNETGPNLGPIASTLYFRDQTILGAFTVALSSTRLVYFLEFNDRIHEVPSIQYPLLPPGRFQIPDLALHFRNNGMIYPEYSRINSVNVPGPACKHKLPVSLFQAVRMKKDSRKQWCSSQLDPDVVSVQPDTRNLNHITKRQYGCSWSNGWAIECFNNTQLKRNKAFRKFLLSNNETGPNLGPVASTLYFRDQTRLGAFTVSNGWAIECFNNTQLKRNKAFRKFLLSNNETGPNLGPIASTLYFRDQTRLGAFMVALSSTRLVYFLEFNDRIHEVPSIQYPLLPPGRFQIPDLALHFQNNGMIYPEYSRINSVNVPGPACKHKLPVSLFQAVRMKKDSRKQWCSSQLDPDVSNGWAIECFNNTQLKRNKAFRKFLLSNNETGPNLGPIASTLYFRDQTRLGAFTVSDMAIDYSRRF

SEQ ID NO: 934360 - protein, 201 aa, Homo sapiens
MLLNLHSEAFKSCLGSFNRSIKDSRNHRHDGGDICGGDFPGKALGEPAGLEETTFGRLCVGEILSYVTDFSDMGNRTHKLCFLQLGFVCGFSDSSPNLLKREMASVFRLADSFVGDGINDPSSEDEQKAYVLTITVYNWTCPKLQPGLAHGCQNHLGCCGDGYGVGAFAIDITIRALLCTLIIRSSITGIFEKLLEGVRDL

SEQ ID NO: 934361 - protein, 172 aa, Homo sapiens
MIKDTSRGQEWEGDRAWDAGENIGSQHQPCLDCVYLGHFHYEKKKLQRPLNNTGLNCTSPLIRNFSSASVTPETRPAPPLPPPLQPTQQEDDEGEDLRDDPHPLREYKVYFLFLRIFFMTISFLWFTVFPLTSSWEEHRAYSQKVWCESCFCHSTANTDVPQFLYHPSVKEH

SEQ ID NO: 934362 - protein, 131 aa, Homo sapiens
MSQFCHYSKNLAIAPNKGRVVDDSDELQNFTEFQREPEKWYLNSEEDRVNDALFKNVLKIAGNFDPLGGFATTGRPPGIFRAYMRVEGRRRVRIEKLSTGYYADYLDDEIIWTANPRDTQFTRVTYLHMYP

SEQ ID NO: 934363 - protein, 139 aa, Homo sapiens
MKWWLAISLIAESNQRWGLWVAITSSLCRSPTLHATALLTFRIHNCEEKHFGNCHEDSTLEKGDYKMTADDGGSFQANWGQAKGRQGQTRHRWHRQPEQWWLQKSPSPTGLWNTDDMIGPIQDYAYPSKNFQAKFFQIS

SEQ ID NO: 934364 - protein, 197 aa, Homo sapiens; identical to SEQ ID NO: 882456

SEQ ID NO: 934365 - protein, 208 aa, Homo sapiens
MGLGAVEQGVVLVGEAGAAQEPMEWVGGSGMAGCRSRALPRGKAAKAQREIQHSAGGPALLGDPVHPPQPLATGLGAKSLIARGRQGRPAAPSAGPAKPTPTQNSSWPASAARSPGSCSRLSLHTSLQAEGPGSGLGQPRKGLPQCSGGRKDSSSAAKVGTQAEEAPRASEGSEDCQHAAAAFAIFELETDIIHADREESCLLSGDEN

SEQ ID NO: 934366 - protein, 134 aa, Homo sapiens
MIVRPPQPCGTKHEIEKMFTQKSTFIRTKKSGHKHCNPWAIPIALLGLEQVDWMGMQSSKTPAGVAKGVLVLPLSQPQGAQLATLGETPSLCLRRGEVKAVLHLGHLVRLRGVLDSNVTQHILSCGGYGKRLML

SEQ ID NO: 934367 - protein, 189 aa, Homo sapiens
MSAYAFFAQTCREEHKKKNPEVPVNFVEFSKKCSEKRKTMSGKEKTKFDEMAKVDKVHYDQEMKDNGPVEGGKKKDPNALKRPLSGFFLFCSEFHPKIKSTNPGISIGDMAKKLGEMWINYSDREKQPYITKAADLKEKYEKDVADYKSKGKFDSAKGPTKIAWKKVKEKDKEDEEEEEEEEEKKEEGE

SEQ ID NO: 934368 - protein, 144 aa, Homo sapiens
MVEGQALTTNGQRNGKQWLTSARICGETPCGWGSLTIMVGGKEEQVPSYMDGSRQRENEEDAKAETPDKTIRSRETYSLPREQYRGNCPHDSIISHWVPPKTYGNYGSTIQHEIWVGTQSQTISFCPWPLPKNQSCLPNSPPKS

SEQ ID NO: 934369 - protein, 144 aa, Homo sapiens
MLNTGPLSLLAYRVSAEKSAARMKGFPLAAVVCWKPTPDPVHLGPSHTWRCHQWRLQNSKADSLLLPRATLFQWGTNLMPVGMLLSGLVRQSGHSVPQLLYCAVGNSSWVQTTQSPLHWQGKMADWSCSGGCRPSRKELSPLRQ

SEQ ID NO: 934370 - protein, 138 aa, Homo sapiens
MKIPCCELPQGRPKWQETKEDPQPTVKEELIPENNNDGQSTNSLHHAPGKAIDTQCQPMKANRTRAVPCKARGAELLKTIGTYLLHQCDLDESHRIRILTECFHCKCTYYKIRGLYFPCQLFLQALKCAGTSIAPLLT

SEQ ID NO: 934371 - protein, 169 aa, Homo sapiens
MKQASLWWVRTCSVSSEKFVITNLLKPTSVSSSKSFSIQLSWVADEELRSFGGRGTLVFKIFKFSSLVSSHLCGFIYLWSLMLVTYQWGFGVDVLFVDVDAIPFCLLVFLLTVRSLSCRSVGVCWRSTPDPVCLGITIGGCRTANIAEQQILLPVPSSGSFVPERHPPV

SEQ ID NO: 934372 - protein, 171 aa, Homo sapiens
MLVLGLSQSIVDPNLTQKCSDLLFCSAVTFHEAYTQEHHQDTTFRQCFITTQTPVAGDIQFTEKSIDMTAGVNFFNSRPKTSSMHSEILLRISGKWSLHFLLITFSNAAFVMGSLILHFSSRNCITKLPFLNRRSLCELQWWLLLERFLAFPHFGSWHVHQILCMKHLQNK

SEQ ID NO: 934373 - protein, 226 aa, Homo sapiens
MKPHNKTSLACTTRKFIDILKSAPGGVLSLSQVAAKLAVHRRRIYDIISVLQGVKLIEKTSKNHIQWIGPDFNSGATPEEKKLEEEVSKLSATEDALDKLIEDCSQQLCELTNDKELGKLAYVTLEDIHNLERFQEQTVFVAKLPVEITLEIPISEDSFSLRLSNNDGPVDAYLCLSKKDYEANYTSESAGTSSESTGTSSESRHPEHPEEEENPQQGEELLDMSN

SEQ ID NO: 934374 - protein, 242 aa, Homo sapiens
MWRNQRKKAENSKNQNTSSPPKDHNSSPSREQNWTENERWVITNSSKLKEHVLTQRKEAKDLEKGFDELLTRITSLEKNMDDLMELKKTARELREAYTSINSRINQVEERISEIEDQLNEIKREDKIREKRVKRNEQSLQEIWDYVKRPNLRLIGVPEGDGENGTKLEDTLQDIIQENFPNLARQANIQIREIQRTPQRYSSRRANPRHIIVRFTKVEMKEKNVKAQPERKAGLPTKGIPSD

SEQ ID NO: 934375 - protein, 140 aa, Homo sapiens
MKIIQSVFLDHNGIKLKIRNRKVAEKEPSTWKVNNSFPYNPDVKRDVVEPKGFGAGTSVVEHSSSASRWCQTSRVLQQRGPTVKHQPTQALPQLWPPSCHFACMHSPRVNKEPLGPLTLQLCKNITISFQKVFKLKLCTH

SEQ ID NO: 934376 - protein, 394 aa, Homo sapiens
MSQDFQDYVESSGKIAHPCHVPDLRGKAFTISPFSKKLAVEDLQPFTRVTLHWGKGNDQTFWGLVDTSSELTLTPNDPKHHYGPPIKVGAYGGQVINGVFAHIQLRVNPMGHWTRPLVIFPVPERKISIDILSSWQNHIGSLIGRYHIKDLKDAGVVIPTTSSFNSPIWPMQKTDGSWRMTVGYRKLNQVVTPIAAAVPDVVSMLEQINPSPASPFITQWVHEQSGYGDRDGGYTWAQQHRLPLTKNDLAMATPSAQFPSSETNTEPLTWRHPRGDQPATWWRVDYIAPLPSWKGQRFFFTRIDTYSGYKFIYPAPNASAKNTIWCLLVLPCPVIKVNGKQQQPNPSRTTNGPDPSGMVWVTPPSKKPRTAEVLAEDKGNTEWVVEESSHQYQL

SEQ ID NO: 934377 - protein, 182 aa, Homo sapiens
MRKSNCQKFDISKSQSVFFPPNDHTSSPAVFLKEMEMTEMTEIAFRILIGTKIIKIQENIETQFKKAKNHNKMIQELTDKIANSPRSDERKNLLKAAGEKRQAPLLQVCCSLLEVHSRPYLPGYHQWRLQNSKDCCLLLPLEASPQRSTSLMPAGALLYEVSDDPCWESLSLCLSHLQQGLE

SEQ ID NO: 934378 - protein, 418 aa, Homo sapiens
MMCENVGHIENQGQDWTGPYNWASTMAGTKNKTRAQAKTEKKAAIQAKAGAEREATGVVRPVAKTRAKAKAKTGSKTDAVAEMKAVSKNKVVAETKEGALSEPKTLGKAMGDFTPKAGNESTSSTCKNEAGTDAWFWAGEEATINSWFWNGEEAGNSFSTKNDKPEIGAQVCAEELEPAAGADCKPRSGAEEEEEENVIGNWFWEGDDTSFDPNPKPVSRIVKPQPVYEINEKNRPKDWSEVTIWPNAPAVTPAVLGFRSQAPSEASPPSYIVLASAEENACSLPVATACRPSRNTRSCSQPIPECRFDSDPCIQTIDEIRRQIRIREVNGIKPFACPCKMECYMDSEEFEKLVSLLKSTTDPLIHKIARIAMGVHNVHPFAQEFINEVKGSRRSWMAVTYIIGNAKSRFTSRHHTLF

SEQ ID NO: 934379 - protein, 199 aa, Homo sapiens
MDYSSDNFLHLHVGCAGFPFPFCHDCKLPETIQAMLPIQAVELKLPNSSYDDVSLRMMFWTASNPLLPPLAVGFHSDYIAVEFYDNFGPEEKVVEIEQASLQVYLGPQSTLACSGVDCRETQVLRPGMGESPLARSGPDAPSVSGHWLSPARLCSLVWQGSTEFNVKFPSHCLLLLPSVQTLWAAQLLPGYGGGVASAI

SEQ ID NO: 934380 - protein, 305 aa, Homo sapiens
MFHTLYDVHTFTGSLGCHFSGRKPLWPVAPLLEFFLGPLGSFHPLDLAGCAQLMLPAWITRLPWETAWSSEGCVSKCVVQPLHSQKCRLLQRVGSSRCQHGCQLSTGLPLDQVRHGFHSWHQGTLWCLEAWRRQELQCLKDRVTALAQQVNPTSVQLSAERVAPLCSWSSHHLHSSQQRGGPREWVAPLCRQVIPSSPHCLFIISAALSREEALEWVAPLRSWSSQRLLSSGLSQGFYGPRRGGSACQLLHGWPWAGPERAPQVPTPVRRTGSPTPAQVWSRSGPWDWQPRLWAPTSIGGKSRGG

SEQ ID NO: 934381 - protein, 123 aa, Homo sapiens
MQGRLAGWRPNEELQFKSEGILLAEFPLPQGSTGVTGGWDHKECCMEGNSEIINGMMPLRPHEQTTRMNGIHVCKDQQQLCSRAEGRSYRQEPWGECAKAQGKEQSSCGWTLLAVAAVCSFLS

SEQ ID NO: 934382 - protein, 136 aa, Homo sapiens
MPHSSQALRPWLQLLVWLGSNSPGRSEGPEVQASSTCQPAPGGCHPMPSSIGFDHLDLRTLTNTPYNAKYTCSPTEESGKVQNYPIKNHCFRSQALIKVRGKCYYSSLSEKQNNNEHKETGSQCASLIPHICSLFL

SEQ ID NO: 934383 - protein, 168 aa, Homo sapiens
MAPPHSSFSSSHVRQTCFPFTFQDDSKFPKASSEAEQMPASCFLYSLQNHEPIKPLINYPSGPSAAVNSFGVYWRSNPDHACLGISRGGCRTADIGELQMLLPDRSSGSFVSEEYLAVSQAACWENHYSLQSCLTGTFKSAEIIAPLFVCALPPEMETAEGVINVEKA

SEQ ID NO: 934384 - protein, 182 aa, Homo sapiens
MAFIQKTDINEFWQERGTLVYYLVRTHSLSGEQYGEMAPMIKLSPLGPNVDSWGVLQFKMRFEWGHRAKPYHSAAGPFKISCPHISKHNCALPTVTVMQKMGSHRHGQLHPCDFAGYSPHHGCFHGLALSVAFPGARCKLMVNLSFWDVEDGGPLLTASLGYTPVCTLCLWACDGKACWEDL

SEQ ID NO: 934385 - protein, 154 aa, Homo sapiens
MTTCESCQEEGFSCKATGMELPKAVGAYLLHQCDLDMKHGVKGDHCGILRFNDCLVRFQTCMGVPTGVMPSRAVRRRPPSSRPQNGRFTSILHPVLVKAAESQCHPMRVATGAKSCKATRAELPKTLGAYPSHYSALDVGHKVKALRFNDCPAG

SEQ ID NO: 934386 - protein, 159 aa, Homo sapiens
MGAAHQHGTRIHIFWTLGLTPVVCQGFLVLCPQAEGCTVSFPTFEVLGLGLASLLLSLQMAYCGTSPCDPPRQRFGVAAARGERDTDRTKRKKAVDFIEQTDSIKLPQRGRGPKRVAGVRFFDYLLNFLRREIRVAGRCYQSKKQRQLTCLRSRGKQEL

SEQ ID NO: 934387 - protein, 377 aa, Homo sapiens
MRPARGIWELSRFNWGPIRDIRQKVPSEFGSSEVQVPFSLQDLKQCNGDLGKFSDNPARYIEAFHNFTQIFELSWGDVMLLLNQTLTDAENQATLQAAERFGDKLCITYSIREGGKHYPTGREAVSRDDPKWDPSDKTENWKRRHFQVCIMEGLRRTRTKPLNYTKLSMIDHGFDDNTTAFPEMLREPLLKYTSLSPDPLNGQIILKDKYITQGAPDIRKKLQKQVLGPDSALENLLKVATSVFYNRDREAQERERKYRKETEALMATSKPTNPRIPRVHLIATDVASQVETNINPEIWATQGKIGGTTTAIPVQVHLKDPTSFPNQKQYALKPENGPPLGDTSCSPQDGYNRRTISFIYQLPTNGKYLKAFTRPST

SEQ ID NO: 934388 - protein, 307 aa, Homo sapiens
MNTNEAESRNSNFATVVAGSEDWANAIEFVPGQPYCGRTVPSCTEAPLQGSVTKEESEEEQTAVETKKQLCPYAAVGQCRYGENCVYLHGDLCDMCGLQVLHPMDAAQRSQHIQACIEAHEKDMEFSFAVQRSKDKVCGICMEVVYEKANPNEHRFGILSNCNHTFCLKCIRKWRSAKEFESRIVKSCPQCRITSNFVIPSEYWVEEKEEKQKLIQKYKEAMSNKACKYFDEGRGSCPFGENCFYKHMYPDGRREEPQRQQVGTSSRNPGQQRNHFWEFFEEGANSNPFDDEEEAVTFELGEMLLML

SEQ ID NO: 934389 - protein, 151 aa, Homo sapiens
MRVTIPMIQLPPTGSFPRHVGIMGTTIEDEIWVGHSKSYWRPFKRITLAFPVLKETVVVIIGNFVSDFQKCIFKCLEGLASSSPFRLWELCYPYDRPTAKENKMQSALQQEMSGDHVYKEEDMKHVIMKQCYSRTCCTPFHLKLQFPRMYQ

SEQ ID NO: 934390 - protein, 161 aa, Homo sapiens
MGLSLILFRITFAYHRSWMFPRQLQAQLEATSNLDGKFPMELEVTTTDKDSMKQKTSCHAAVTISIGSQPRFAFTSEGTQFTFTRLLMGHLSSPAVPHNFTGKILATSIFLKEHRYDIKLMTSSSDGIHLTYLFRPYKHKGTLEKGMDHCLTHSTRPCYLS

SEQ ID NO: 934391 - protein, 146 aa, Homo sapiens
MVEGEGGAMFLLLTTKYIDLLGIIRNKYMKSDMTIENPSTENVTKVADSVKNEPCEKYAIIEKGHGCSCRSLSLANNPGTENQILHVLTYKWELNDENTWRHGGEQYTLGPVGERRASTYVVPSTWNTLHETCSYFIWFVEILPSL

SEQ ID NO: 934392 - protein, 146 aa, Homo sapiens
MAFFCFSGHVGRTREPQMVPLALKSALSYKSISCTGMVCMYGGFAMKGGSSILEDEGTTRSGTSNGRSKFPLFELRFSSKRALTFENLASWNGITPLIGFKQKIAQLVLLRVDSDIPPSPKQGGQQWKRGVVSAERSAVSVMGFLL

SEQ ID NO: 934393 - protein, 155 aa, Homo sapiens
MDRNKDHQDAGILSCHTDLPATHNYSYWAYVPFPPLIRPLTWIDAPAEIYTNDSVWMPRATDDRCPAQPGEEGTAFNVTMGYKYPSLCLGDAPGCIHLETQVWAAYLPERSATEEPGHLVSGLSLSPLKQMKGGTGCYLAWRSGNESRTSHANAV

SEQ ID NO: 934394 - protein, 180 aa, Homo sapiens
MLTIVSQLPTVFSTVTCCTGLQRRTSQRPVNFINEMDMLTWNLKQYELGTLLKFPGKSSPYLYLSVVAGETVYVRESEGNLWRQTDLGSFPLYHLLACVTSSQVSGGHTDEKVFRSQLYVDFGDPSRNPGTTTCYIGRLGVKDGFDESQALEPGGENEANGTSDGNNAKSNQRRSQNERW

SEQ ID NO: 934395 - protein, 136 aa, Homo sapiens
MSMCSHHLAPTYNLPAEASDTVEQSGTQISCPQKILPKLKIPLCNPQGLEDPTHEPMPLGPSVPTLEHADVQTLNSFSAEICLSLLNFLVEKQPAPWLWLPAPNTLAVAVSFQSASSGLTLTHPFSVGGASLQEVQ

SEQ ID NO: 934396 - protein, 139 aa, Homo sapiens
MWSNLKTLAQKISSGIRFSQECEPIVNCIYEGSRLHAPYENLIPDDLRWNSCILKPSLLLPLFVEKLCSLKLVFGAKKVGDHWILGNQKKKNTQCGPKYGKTESHELLVGVKTEEELVASLTPTTVPYEKSLPAGSQTP

SEQ ID NO: 934397 - protein, 156 aa, Homo sapiens
MPSLSRAPLVLPLPPPASQHQDNSITYSSGSPNMGPGPAASTSPKNLLKVYILEPHPRPTDLEIVGLGPSNLCSTCPPGDLLLPLSQQAKKGVTVLVGVIDLDYQDEIRLLLHNGVLPYPVIKINEKLQQPNPGRTTGGPDPSGMKVWVTPPGEKP

SEQ ID NO: 934398 - protein, 145 aa, Homo sapiens
MAGYSSETKLTAERSGSNICCSPKSAVLQPPLLIPSQTGSGVDLQQTPTDLQLKVLTVRRKTNKQKGHPHQNPICMSPSSEIKVMEDQMNEMKQEEKFREKRIKRNEQSLQEIWDYVKRPNLSDGEKGTKLENICRILSRRTSPI

SEQ ID NO: 934399 - protein, 141 aa, Homo sapiens
MQGARMCLATTISDKATEFGDADALRMIEWINNSYSLSDLRSHWEAQRKQAAEGDIKWCSLQFPAVTLNGTACITMVPAGTTAQLIVSGSVDTGYPHFSYPYLVSQQQMVMVVTFFQLSTLQRRTQVCLYTPFPHFEESEG

SEQ ID NO: 934400 - protein, 126 aa, Homo sapiens
MSLVGKGFGMFLNYSFFLGGFITHKVNGDTLKDQQEYPQESDNAEYRDTESQLYIMLATCTRSTLEGRGQEAPTGHMGSNITLLKGDSQSLYPLVPGSDLIKAPGHSQNPRMKQWPSSGWNQRSYT

SEQ ID NO: 934401 - protein, 210 aa, Homo sapiens
MSSILFSSISSGRGEFRYLSSFCRVFRRSFSSASLASRLQFLINAENLAKMSIPAVFDSGCFGESFKYLGGHKTSSRNSSILLTSVLTSLLKLTNGGWVLGAKFCRSAGFHFRSTVVTLNTTPLSQRIMKNLWEKGQFPMLSPSLPALTRSSMRGSLSSSFSPFNGIDNAMAGSAALRKRRRLLLLLLLLLQGCSDCRLPPQCSLDILMC

SEQ ID NO: 934402 - protein, 119 aa, Homo sapiens
MACLSPVNEGLAHQQALPTAHKYTFLGPLLKSSFFTLHPNSPLLPPNPSECLLDIHISFAEVWIVNALVSYFPEGLAFNGWKIAHQVPGDRKLVAPYLLDESSDGDDIITVNYPFAKSA

SEQ ID NO: 934403 - protein, 137 aa, Homo sapiens
MVILSKRHQLQPESWAAAASQDEEPLTPKAMGRAGPPGPWGKHATLPPGANQGALGLTVPVNVIPANDHIPAATWAGPRPPFMNGLMLLLQEWGSRNVPRLLMVAARPSDMVKADPESGWRQPFPGHALCYAPIRQP

SEQ ID NO: 934404 - protein, 136 aa, Homo sapiens
MAPMQKTSNQSPQSFITKSRIRTGLRRKKNAGTRSRLNCWLLCKPPASIPGCPKDTPPDNCHQCRSPGHWKANWPYGMNDEKPPHGLPPLPQARPLEMGLPWRAKGTSQKALMSKSESPCHKWSVQVVRRFAKEKL

SEQ ID NO: 934405 - protein, 161 aa, Homo sapiens
MTVVAALCSGIGALLLSVCLFAPEMVLAQGWCAGWHRTVCAFMHVFKLAAAAAKFGVSMLIKALMAMKVHQGSGVVCTNINSYDIVGCTYMCTSREGVVRSTCMHTHWQSNGEGGCGQVPAGKEAQGRMWWGDRMYGLVHIHGSALLGSPSVKYGSPAHKL

SEQ ID NO: 934406 - protein, 140 aa, Homo sapiens
MPAPNPLCPAPDFKCCPYPFSKQLSLPTQASMVVKKSPSAGIPEACAQLTCSSRVNGDQKHALVHFCLCHFQFHLPLMQLPCLPSVHSQDLPSEDLLGRHQSVPWWQLFHLAASSWLTVPAPTKKHFRGHGTTVDFPIDC

SEQ ID NO: 934407 - protein, 124 aa, Homo sapiens
MKFITECLLYSHLWRKEKKKDWPKKKFGFYSVPIKGSADPVGIFQTEMIQQYFHSRGQGLGLKFVRQQRFQPLREINRSALKGENGLEMIDNGHRMGSKDKQELLDKLHKECIHINFVDQIMFI

SEQ ID NO: 934408 - protein, 199 aa, Homo sapiens
MNTVGSSRFCWALFFFLDWTADDQLLNRCKDWCGFLLLAGRAPNGSLGMRVSEKQTAVTVIFLLNLATQQRALSCGYQHLLQWRQQESEVDYATSLSAEKTSRLTVLWLSVEPVAAIHLFQRVCGSSRLSWYVPAVVFEVHDGHQQCRLQSVAEGLRAPGKPLMEVSSPRLQVGPQSEENEVGHEENTKKKPQSHKSHK

SEQ ID NO: 934409 - protein, 144 aa, Homo sapiens
MPASIMCCFASVLASMMLLASQNEKTAFNLWDSFRCLVYSTINTYDCILKLLCVFQLYQDVLICCQPESTCRRWLETLFGSSHSDRRNGIRDSLKEAVWLLFCKAAVLFWGYLQPLIVLGFPRPTATNKIKNLVINQRSKKSLQ

SEQ ID NO: 934410 - protein, 149 aa, Homo sapiens
MGTTCLQIGATHSGCNTNRAETRPSSTTLQVMRRREERRREERRREEVQPFREPRLRSSQSQGYDILFGALWFMAPPCFLVPTVEAACGTPDPTAAGSQHLCQCLELPAPPQQLVCLAVHSSQIPCLLIHTSLTTPCLAHPWQARDPGW

SEQ ID NO: 934411 - protein, 140 aa, Homo sapiens
MGLVGHQKNQLIGNFTPATDFWEAAGLLDFVGGPLQTLFAWVSPAEAAEQQILQNGKCCCLILPLEASFQRGTRPYEVSVGPYWEVPPSQATWDVSFAGLHIEDDEPLILKTNCDKRILYCYKTDGAYQSIENLHFVKYP

SEQ ID NO: 934412 - protein, 167 aa, Homo sapiens
MDPSSVSGKHTPEGAAVATAYPRAHSDPPAEGAVLPLLCTAVPPPLCTAVHRCYWASFAESSPSAVSQLIEGPNRTKRLTPNREFYCLSVFKLQHQFFLVLQHPADLQTQTGISTLQIFDLPASIIRLKWLTVCTVTCEKVHVRVGVQVWVWKEACMEASGTRGTFS

SEQ ID NO: 934413 - protein, 211 aa, Homo sapiens
MPEPSSPCLAVAIQKQRGELSRGSVLKVWAEDLRDPDDLDFSNLAFDARIARINALKESTYAMPDGFLAAQNDANELLCLVRATKEKREESRPEAYDLTLSQYKQLLSIESRQLGSACRKMAMAEKSPEEMLLAMTSSFQVLCCLTEACMRLVKVVNSETQRQEIVGKIDEVVINYICLLKAAEAATGKNPGDPNVGLSARHSTTMAALID

SEQ ID NO: 934414 - protein, 143 aa, Homo sapiens
MLSVAVAEGKREPWRVVGLQSVLSLEMTLVTSIFSGPYSVNMVSAKDKINPSHINTNPYSITVQASSRPYVWYLPGVANIWKHDIDKEYAGLRGKKKWKNLGLTEPKIYEANPRRAGAQASEEVALTQSAGAGTFKGRKIMQL

SEQ ID NO: 934415 - protein, 166 aa, Homo sapiens
MTTKLSSDFVEFLFPDSLSLMRNGYPAPLPIQLGKQGTTVSSKPFSFLPMPTLPLILILANVVSLFVMLFCVFSILEIFHENITKEANGIGKLGNGRIFKVGTDYSHTTLNVPDLIKVEIERGLVKTQILILQDLGEAQESAFLTRCSQLPEDADAADAAGLWPML

SEQ ID NO: 934416 - protein, 136 aa, Homo sapiens
MALRETPSLGKEPRMPPTVMKTASTHNSEGPFDMGAPIHSAFSKFAAKTVFVGFVAKLYDKKDTNRIPFLKDYAGFCSPWLCSDNKCMLRGSPCHETDTFSCLLNRQPSPVGSYPHDSCPLLLPLSETHLPCEPLS

SEQ ID NO: 934417 - protein, 149 aa, Homo sapiens
MAPTTQYLGLPDQTRRVLVTQPQDVLTTCAQGGWGTAWFYTFLGDMRHQSISVRSTLILPERGDNSKQGGGFQVTGELSVTGILCSGLMACVSSLLPGGTGELQECKSKLWPMEFMHLLTLSCTVCSVNCSAGEGVSNQLPQAPTILNT

SEQ ID NO: 934418 - protein, 815 aa, Homo sapiens
MIAKIQEDDFNNLNQLQILDLSGNCPRCYNAPFPCAPCKNNSPLQIPVNAFDALTELKVLRLHSNSLQHVPPRWFKNINKLQELDLSQNFLAKEIGDAKFLHFLPSLIQLDLSFNFELQVYRASMNLSQAFSSLKSLKILRIRGYVFKELKSFNLSPLHNLQNLEVLDLGTNFIKIANLSMFKQFKRLKVIDLSVNKISPSGDSSEVGFCSNARTSVESYEPQVLEQLHYFRYDKYARSCRFKNKEASFMSVNESCYKYGQTLDLSKNSIFFVKSSDFQHLSFLKCLNLSGNLISQTLNGSEFQPLAELRYLDFSNNRLDLLHSTAFEELHKLEVLDISSNSHYFQSEGITHMLNFTKNLKVLQKLMMNDNDISSSTSRTMESESLRTLEFRGNHLDVLWREGDNRYLQLFKNLLKLEELDISKNSLSFLPSGVFDGMPPNLKNLSLAKNGLKSFSWKKLQCLKNLETLDLSHNQLTTVPERLSNCSRSLKNLILKNNQIRSLTKYFLQDAFQLRYLDLSSNKIQMIQKTSFPENVLNNLKMLLLHHNRFLCTCDAVWFVWWVNHTEVTIPYLATDVTCVGPGAHKGQSVISLDLYTCELDLTNLILFSLSISVSLFLMVMMTASHLYFWDVWYIYHFCKAKIKGYQRLISPDCCYDAFIVYDTKDPAVTEWVLAELVAKLEDPREKHFNLCLEERDWLPGQPVLENLSQSIQLSKKTVFVMTDKYAKTENFKIAFYLSHQRLMDEKVDVIILIFLEKPFQKSKFLQLRKRLCGSSVLEWPTNPQAHPYFWQCLKNALATDNHVAYSQVFKETQR

SEQ ID NO: 934419 - protein, 341 aa, Homo sapiens
MSPEQRNQHCEPEESLEAEGDEALGLVGVQAPLAEEQEAASFSSPLTVGTLEGLPAAGSPGSPQSPQGTSTSPTTIDNTLWSQSNEGSSSQEEAPGTSPDPADLKTLFQEALDGKEVDTTGHSYILVTSLGLSYDGLLGDDQSKPNAGLQIMVLCTIIMEGNCTPEEVIWETLSVMGLYAGKKHSVYGKPRKLLTQDWVQENYLEYHQQDAWVCSDGLGGCSCTQGSEAPVCSMKREACIQSCDLGSCSCTQGSEAPVCSMKREACIQSCDLGGCGCTRGAPTPPTRKGQGSHLSLPHAGSKECAALAAPPCCSSYDGSIHSRLATAAFSETYWETFHIAL

SEQ ID NO: 934420 - protein, 154 aa, Homo sapiens
MPYSTVQCCTAGANSGDLCLGCLVQPLLWRDGREHGTKAEYGYIYFEEHVFVIEIVTVMVWWVPRHGSWLQIPFPAFWILEKTTLWLEAKYAGSNTALLLFATLSCLGKEKHKSSLRAHPGTVPFLELIHDTDSFAHVSLLTFSPPVALLHSPR

SEQ ID NO: 934421 - protein, 142 aa, Homo sapiens
MLIAVGIHLLLLMFEVLVCDRIERGSHFWLLVFMPLFFVSPVSVAACVWGFRHDRSLEESRVAYAQLGLLCSRKAKLETDVRTNHEGGGGKGDRRNYQNTPEGSKTVWWDLDGQEEGSKKERVIHSISRMPVEVFLLPPGYR

SEQ ID NO: 934422 - protein, 143 aa, Homo sapiens
MNSYGPVVALPTASRSTLAMDTTGLPAPGMLPFCHLWGVQRAPTPTHQNPEVSLPVIFNLTVGGRVLGDVGRGHKRMQTWEWINPESSHGLQVDLPVSACSLTNGCSFTNRCESHFIICELLSFQEVQFSHVFLGLYAYASRV

SEQ ID NO: 934423 - protein, 375 aa, Homo sapiens
MSLEQRSPHCKPDEDLEAQGEDLGLMGAQEPTGEEEETTSSSDSKEEEVSAAGSSSPPQSPQGGASSSISVYYTLWSQFDEGSSSQEEEEPSSSVDPAQLEFMFQEALKLKVAELVHFLLHKYRVKEPVTKAEMLESVIKNYKRYFPVIFGKASEFMQVIFGTDVKEVDPAGHSYILVTALGLSCDSMLGDGHSMPKAALLIIVLGVILTKDNCAPEEEHMFYGEPRKLLTQDWVQENYLEYRQVPGSDPAHYEFLWGSKAHAETSYEKERLQMLIHIFDLLFPGHKGRIHNQHFCLASARSRVTVPFPGHYHVSSLLTLRPDLLLALHCCLPLEAGQTPLPFLQHGAFLALEVVPWFSHGSPLVQSHSRNHSGR

SEQ ID NO: 934424 - protein, 256 aa, Homo sapiens
MAACGASLPMPWRQQRGEGFGSQRTGRPGGQKPQEAPEEHRRRRSICGFLPIAQLLPALQPAALTRVIMSSEQRSQHCKPEDGLEAQGQEALGLVGVQAPATEEHEAASSFTLIEGTLEEVPAAGSPTTTLYGANPVRAPAAGKRRGQPPRHTPLTWRPCSNGKVAELVRFLLHKYRVKELLRKLLTQDWVQENYLQYRQVPSSDPPCYQFLWGPRALIETSYVKVLEYAARVSTKESISYPSLHEEALGEEEEGV

SEQ ID NO: 934425 - protein, 135 aa, Homo sapiens
MPYKSQVLELGTPKACLVLYPPVGILVPETRKSQEAHPKPLMYLGVVAVYSGPTTQRISLHHVFQLEVASAILDCFFYLFSASFSDVKLKPETMGVHQIFGSYEGTWMELETLMLSKLMQEQKTKNHIFSLISGS

SEQ ID NO: 934426 - protein, 187 aa, Homo sapiens
MALKLQEAILLILLSTFQKQGSLTPWLSPPQANGEYFQTTTDVLLKPKGSSSPRALKSTVVRHAGTQVLTTGICSSPLARAGLNAPSMGACQLSLVWFSFLLQRDSSELSASQLLYSPSPPQPPAPSTENCSLRHASNAGGSGSGSIGNSRLFFYVFSASFSDMKLKPGACLSLAPAVTNYYFRETV

SEQ ID NO: 934427 - protein, 146 aa, Homo sapiens
MLCSRKHKHSITAIFNLINGDVYKVTNSLNRRYTRKRDDSGPRWDRLLPKYNGGTGFGEIHLFQMRKIGPNKGATGPMQVQNRCQILKFQNDLLSLHVSHLVHADARDGFHDLRQLCPCGFAGYSFPPSCFQGLVLTVCSFSRCMV

SEQ ID NO: 934428 - protein, 183 aa, Homo sapiens
MRSFMLQPWLNGAKVQLRLWLQRVKDPHLGSFNMVLSLQVHRSQLIEVWEPPPRFQRMYGKAWISRQKFAAKVEPSWRTSARTVQKENVGLEPPNRVPTGALPSGAVKRGPPSSRPQNGRSSVSLHHVPGKAIDTQCRPVKAARRGDVSCKATEAELPKAMASCISVIWFICATMQRSQFIPS

SEQ ID NO: 934429 - protein, 155 aa, Homo sapiens
MAGVAGTQCLGCTEHGNAGPGPQNHFFLLGRQACDGRGSAEGKCGFAASTHSPYWALPSGAVRREPPSSRPQNGRSTDSLHHAPGKAADTKCQRMQAARREAIPCKATVAELPKTTGTHFLHQCNLDVRLGVKRDHFGALKFDYPTGFWTCMGPM

SEQ ID NO: 934430 - protein, 164 aa, Homo sapiens
MAHDTALNIQIRPEFLPSGGFVVSLASGVKLQTFTMSVTAIKAVHLELSIPPGGFMVLLSSGVKLPSGVKLQTFVSPPDSGAQLASPNGSHTGAVGRAAGQSRTVRLHSSALGRLMGLGTMEQGAAPVGEAWAVREPTAGGLGHGWLPGPKPCPAGRWQRPHEH

SEQ ID NO: 934431 - protein, 140 aa, Homo sapiens
MLNPELIHELKKSYFKDIIGKISEIFINFGLQSQIFFLPLDRFGYRYFVASRQGRLSLLKLRPQPPLTPGALSQGDGSFIYKPLTGAAAFLSEMPCPERRNLERQSGYSSFAELWLPPLSSNFQAALITLVTFNQNYGPS

SEQ ID NO: 934432 - protein, 136 aa, Homo sapiens
MTVVATGDWLHRGGVTSLEAAGKGSLAAVVVNATPLVLGLQPREMSDGTDPLLWQWQRGCQLALGAPTHSNSEPLPVGMLSNGWGGCSAFLSQGTYLVKRGHGGSQGRETGLLYVCWLHCTGGASVMTIVFVLFPA

SEQ ID NO: 934433 - protein, 175 aa, Homo sapiens
MDLSVLHTVFFDMYISISINSVLLNIGLHNLLKIPEWLICWQLALCFWKSCRAYKKQLWGLNLEIHKCGAVQGLGSTPFAPVCPVFSRSTLRETPTGVEGQTTPTGGSLPKWPRATSKMVASLVFSDMGFLASRIPTKEILGHANEPGHLAVQEQWRAFSPIGSSNGRLTGSGAQ

SEQ ID NO: 934434 - protein, 162 aa, Homo sapiens
MVGKCLLVPCHFRKNVREDKYTSSIDKPSIILEKCICENKDMSELDNHFEEIGDNIRRSNAKSTIYSFTVLNYIFISIVYPADMLKALISQYLVNNGHFIKGLCCFLYLGKIGRNTIYSVKILRTIFTENSVIITENLRAPERAQTNIQQHLASFTSHLALI

SEQ ID NO: 934435 - protein, 174 aa, Homo sapiens
MKGIEIKRRERLKCSTKIERRKRLRDREKLRADGIAGKDSFMTNKQPSELLIQRNLDHFLLPQDFTLAHYIDDIMLIGSSEQEVANTLDLLVRQTVPNEAKGAGTFHAIGIVPSSRACGGNFCMAECQHRQSPGRKPHHGHRSGTANSHDIGIAPLSLPDVVCMLITSESHVEM

SEQ ID NO: 934436 - protein, 135 aa, Homo sapiens
MLCIPDASAPAMAKGGQGIARAIASAPSLGSFHVVLILQVCRRQELRTVRKKNVGLEPPHRVPTGALPSGAVRRGPPSSRPQNGRPTDSLHCAPEKAADTQHQTMKAARKGAVEGTCLVSDETLDLDVWVNAGMS

SEQ ID NO: 934437 - protein, 140 aa, Homo sapiens
MKVLDVIIFQQKAVFVYNENLLFKETASPSPVVARSPPRPMLPSAFPPLSEEINPALTEATVMASPEAAVRQDNVDSPQYPPRTPLCASRPITRLKSQWAHREEGIKRLVEIGMEEWISHFRPTHPSWEGPEDISLNNAL

SEQ ID NO: 934438 - protein, 141 aa, Homo sapiens
MSRGCESWESSEEDRRMRENLKLPRDWLSGCNQNADKDMDNKVQGDEVSDGDEEDIGNKNKATVLHCGEFLLDPNHPVSLLPAGEKVADWHCGDGCRPSCKELSRLRQQAAAVLTANSFPQGLGSLRQSPAKKFNWQEFRY

SEQ ID NO: 934439 - protein, 134 aa, Homo sapiens
MLKLLVAVLFLHLQYPNGRNFGVHAIVSSKNYPEQAKSHRKLQTDCSRLLLGRAIKTAKCCSVVAKALSFPNGDMSSGPWLDTTFKHPWSHLPALTASNRPRPTERSTASLSAVKSYRRLTFVHFLQIIGVLGS

SEQ ID NO: 934440 - protein, 169 aa, Homo sapiens
MCLELVPAGGFVVSLTSRMKPQTFACVRGPEWVATAGRGGQFLFPYLSPPMILLIGAFYRALTGAFYRALIGVFYNPVASYRVLIACQFYCFPQRLHNKADNSTQELICDQHIQVITSPSLAEYSLILSLGKSQIPVDCPQLKEKGFIFIYSTCEVPTGHSKVRVLAKT

SEQ ID NO: 934441 - protein, 158 aa, Homo sapiens
MLGVPVFPVPGVRYNNVKKNYYRKLVSSEKWGFALKIPENVEMTIKLGNGQRMVHPPTACTMHLEKLQALNAVCEISPGDCTLQSNRGGATQGQGAQPLHQCGLDVRHGVKENYFEALRFNDFNLYITHYLPYTGNYSYPMLSNNRSNLRSHGALDED

SEQ ID NO: 934442 - protein, 133 aa, Homo sapiens
MVFKACKSCDPQKGTKLLSGDWDRYSKDDLYLFWESLHTLGVKIIPRFWTSCLRSCALALDTLYPLSVRKFSVWTRCWIPNSLVGEQINRSSTYCRRCPPHSSIRSCKALVKACPNKWELSLKPCESTVQVSY

SEQ ID NO: 934443 - protein, 235 aa, Homo sapiens
MKYLEKYRQMWEGLKLPRDLLNGFDQNADNDMDNEVQDEVVSDGGEEVVGDCKIHKNVEATLELGNRQRMEQLGGLRKRQEDVEGLELPRVLLNGFDQNADSDMSNEVQTEVVLGEEEGNLQPLWELRDSYLTTDVMYQSGEKLPLLHRIVCARSGAQQTSVSPTQIPCTWQVNTDRLAPVSKKKEIILPDTIPVTLGSVDSLDVGVKDPGHPQSSIVSASSEEISSCNGEGASL

SEQ ID NO: 934444 - protein, 141 aa, Homo sapiens
MQQYGNLSDAKPSYCQLVSERSVKDSFHIHAQMTENEEYSSSGGDGGSEEDFSTNTKAVSRKTICTVDQKGRKIESNEDYCPITMSDAWQALKGPSTGESSNEGLTSVFSTSGSPTDGPWISHVPYSKSAHILMYEVYFAA

SEQ ID NO: 934445 - protein, 165 aa, Homo sapiens
MVFVNCYGTGGSVAEDDQRTMEHGELLLPKRGNMRANGTAENDPFVTNKQLPEFLVKYCCNGDTETQTAKDGHVKTKAEIGVMHPLANKHQENKPIDFTQSTLQIKEHPHTDMRKNQCKNSNNSNGQSVVCPSNDCTSSLTRVLNQAKLAGMTNRIQSMDRNKDH

SEQ ID NO: 934446 - protein, 164 aa, Homo sapiens
MVDPLTACIVSLEKPQTLNPSSRKQPGGVELHKTVETHLLLQHDLDVRQGVEGDNLGPLRFDCPTGLWTCMGPCAFVDFVDQLAVVFWSKPFDKSLGSSKLSHIFLSSEPSKSLGNFKLFHVFLSSSESSKLFQPLLVTRFQSHFHILGYLYSSSPLPGTNLLY

SEQ ID NO: 934447 - protein, 166 aa, Homo sapiens [sequence omitted]

SEQ ID NO: 934448 - protein, 146 aa, Homo sapiens
MEQFHPQAITCYPQVHGKIVLHETSPWCQKGETWGTKGPIQPVGVEQIKFPKKKLLPKCKAEMPWCQEAPGWRLPSSARGSTWQIVSHRDYSSKGTLVLWVPQNTNNFAPMVLHDWKSLPLPQTITGQETDYNASIYNTYSQVKAT

SEQ ID NO: 934449 - protein, 136 aa, Homo sapiens
MEDIPLKSSPRGWHLMRWDPLSQAPEGISWFAGGKVHGKSAVSGPECTVPSSHAVSHGFQWLGTGNPQTPCTSHSIKNLEKYDERTLFGEGSQLKKEITVFQSKTVSETVRIPEINHTKTSVKIHFSPENDPCTYF

SEQ ID NO: 934450 - protein, 134 aa, Homo sapiens
MAESQNHYVEDKKTDARVTYCMIPLMQNSRIAKRSHVEGSLFSQWSHPKQTVVLDHLAEGKEYLYQIKSEFTSKDIPFYETVCRKDAALTMQPESGVSVIKMYLNKENGKRPRENSKADQRFALIKGIFHLRVS

SEQ ID NO: 934451 - protein, 214 aa, Homo sapiens
MTPPEQTRGEKKQKVQEKLEKSLKHESTEDKEEEMKSSASRSGPLTNTSPSTYPWYQSHWPIYTEIINSPKYQKDPVCQILQRRLQNSKDCCLFLPLQTSSQRGTCQMPAGALLYEVSFDTCWEVSPHQEAWGAGRQERFSLLKLRPLPPLLPGALSQGDGSFIYKPRKGAAAFLSEMPCPERRTLERQSGYSSFAKLWWAPSSLNFPVALFTL

SEQ ID NO: 934452 - protein, 470 aa, Homo sapiens
MHKPTGGVSCLQEAAVLPHQRTVTMKAKKKASSSDSSEDSSKEEEEAQGPPESSSSEASSDDEEDDKKKKSVQKGVKPQAKTAKAPLKKAKSSDSDSDSDSSSEDEAPKKQKPKTSVAAKARAKVPATPGTPAQAAPKVANGKAASCNSSSSSSSSSSADSKEEMAAAIPKKTIPKVQCPRPAPPSKKSLGTQSPKKAVEKKQPSESSEDSSDESDSTKKAAESSSDSSYSNSSEDDEALSKLASTSKNSSDKPAATTKSPAAEPAATLKQPASSGQEPLMRKADSNSSEKESSSSEEEKTKMTVAPPKPKVTDKAAPYLPAKQAPERGKDSSSHSDSSNSEEEEEEEKTSKSLVKKKLQKAAGGTAPSKPASTKKGKVKSSSNSSSDDSSEEEEAKPKGKDSPRPQVPKASGTSALTAQNGKAAKNSKEEEEEEDKKKKAAVVVPKLGSGKKWKQLRLPKRQRLLQPRK

SEQ ID NO: 934453 - protein, 144 aa, Homo sapiens
MNRSSNVPRKGILKSGTRSLQKVCRVHFANARNARSLLSNQYPDQSAVIHIKYRSFFDEAPAFSGGRNNSWRKLNLENIPRTMLMYDIVHYSESGVISNRLRNEMKFLLQRPVTQEIHKHQLRIVSEIRNDSLKPGARTIGISR

SEQ ID NO: 934454 - protein, 134 aa, Homo sapiens
MKETTLMIQLSPTWSFPQHVGIMGATIQDEIWMGRQLNHDFFDLLTLVHLTSIGGLMHLVLVRFHTADEDLPETGQFTKERGLIGLTVPRGWGSLTIVAEGKEDQVTSYMDGSRQRERESLCRKTPPYNNHQIS

SEQ ID NO: 934455 - protein, 320 aa, Homo sapiens
MVKTSEFYRYSRQLRYEVDQALNYFQNVHQQPLLDMKSSRIRSAKPQTTVFRGMIGHSMVNSKILLLKKPRVWWELEGPQVPLRPDCLAIVNNFVFLLGGEELGPDGEFHASSKVFRYDPRQNSWLQMADMSVPRSEFAVGVIGKFIYAVAGRTRDETFYSTERYDITNDKWEFVDPYPVNKYGHEGTVLNNKLFITGGITSSSTSKQVCVFDPSKEGTIEQRTRRTQVVTNCWENKSKMNYARCFHKMISYNGKLYVFGGVCVILRASFESQGCPSTEVYNPETDQWTILASMPIGRMRIGVVYDKFWPCSMQALLKSI

SEQ ID NO: 934456 - protein, 311 aa, Homo sapiens; identical to SEQ ID NO: 788931

SEQ ID NO: 934457 - protein, 152 aa, Homo sapiens
MIRNIYVFCIFTLLTCIDNKTFYLYTCSHGPRSPVMRSLNNKNHQLKVGILHLVRREIRVQLRFKVLGRERKNVYGGEEAYVCIMPYVMTSNRRKENIRKGSQTLAEMPDLETDLQELSESKTGDECRDGPDVQEKILLNLEQFKMPEGGAC

SEQ ID NO: 934458 - protein, 149 aa, Homo sapiens
MALRSVERLAEVYSEEGPVLCGNFSTPLWRFEWVGLCVPTKLDFRGETGLANGWVTKEPSDEEPQQEEPPTESRDPTPVPDLETDLQELSQSKTGDECRDGPDDKGKILPKSEQFKMPEGVIDETESDHVRFYFTNGNTFKCKKRDSSY

SEQ ID NO: 934459 - protein, 164 aa, Homo sapiens
MTISLIHLTFTPFPHISFFPVPHPGHTWFNDGSSTRPNRHSPAKAGHAIVFSTSIIEATALPPSTTSQQAELIALIQALTLAKGLHGNAYADKVAKEAASVPTSVPHGQFFSFSLVTPIYSPNEFLVIASIRGPPEEVKKVESDLKGKFFPNIAIWGKVVLRKI

SEQ ID NO: 934460 - protein, 154 aa, Homo sapiens
MKSLTFLLAFTCASSQLACLCLQLDFTDFSLLENDLRLLFIKKKSLTEDSHTLNICLNDFFLTPISSARYFFQRVCESFQYSWYVFAVVLGAKVHDVSLHTMETQTKWELFSSFCAEVLLVVSEGVLYFCRVDDNVSFIISDCTYLVFLSFTFY

SEQ ID NO: 934461 - protein, 148 aa, Homo sapiens
MAVQLLVRLIEQCVETHFVNFCSQELPQEHTRKAKKIQRSFEGTGLPLQTPETLKNCEPACSLNREVRGLGRVLSPGHRLPRNRLSVPHFPGYLYDSAEAAIIPREYNTIRQGTTPQPLQQPQQARPKDRLSSDMPISAPTWWSFSTC

SEQ ID NO: 934462 - protein, 135 aa, Homo sapiens
MVDKLFDVLLHSVCQYFIEDFASMFSGPSAAGLLEVAGGPLQTLFAWVSAVEAAEQRILVSSKCCCLIIPLEVLSQRSTQPFWMKGWVAPPHLWVFLIRWNKRLGKEKDTETKYRERNKGTWGTSVQHMEDPASL

SEQ ID NO: 934463 - protein, 155 aa, Homo sapiens
MQNSLVDDMEFYCLHGRSNQPQHSFMPRSNPEKVPQLQVCWSLLEDDSRSCAPGYHQWRLQNSKYCCLIIPLEALSQRGTPLYEVSFGSYWEVSPTRLQPCWSISECCASRHQGSMDMGPAKPGTGENRLICGLLRLWEKHSIWMGVSHFFQDFE

SEQ ID NO: 934464 - protein, 157 aa, Homo sapiens
MRFFVINFSSTIIFSVSVFYVFLMTWLEHLDADTKYLPELFSYDKVKALCPHLNCILNCNPQVLRERLTKRLEAFCPCPRDLWNFELERDYLKLELMFKRKADLKSLENLQPDNAIEKNNPFSGKKFKPAAEICISNQEPNVNCQDNGENEKGAESL

SEQ ID NO: 934465 - protein, 149 aa, Homo sapiens
MKVVGYRWIIVHLGFVCAVDPKLSLDEWTWRRGKATGTDAEAGIAEGTLDSTWPYGWVWGLILEVKDLDLSVADTQGRLPKDKEHNPSHVFLWLSGHSRKSEIIKSKGVGNGKEYFIWKRVRMRALDKNSDAVTSFKFSTKCMWEQLPL

SEQ ID NO: 934466 - protein, 138 aa, Homo sapiens
MRDIAILKEKQEKEIQTLQEETKKVQAETAAKTREVQAQLLQEKRLLEKQLSEPDKRLLGKRKRRELNMKAQALKLAAKRFIFEYSSGIKRENQQFKKELLQLIEQAQKLTATQSHLENRKQQLQQEQWYLEKPVFNF

SEQ ID NO: 934467 - protein, 161 aa, Homo sapiens
MSEFHEHGPIATLLLLQSEVLNQKQCRVETMAVCKAFCKSMDGSKSVSNLITLGNGFKPGAQCLLLGDWALSHGYSQAREPKFQESITDFDDCSRTHVLMASRSQSDVEDKVLISTLNPPNNHPGPLPLPLPPVAPAHPPPYGTCGAGGGHPQSLMGEKSG

SEQ ID NO: 934468 - protein, 142 aa, Homo sapiens
MHFFDPPTPAPSSKPSSKTSHNGIIAPPPSNDKTKIAIVKVKDLKQTLAIKTGYQLEWIKYSIHTLNKSNCYACAHSRPEAQIVPFPLRWSSSRPGMGCMVALFQDSTAWNSKSCQALSAISRSLAPCGSAPEGHPASVSQH

SEQ ID NO: 934469 - protein, 134 aa, Homo sapiens [sequence omitted]

SEQ ID NO: 934470 - protein, 142 aa, Homo sapiens
MVSNGVPKPLLIPWSPRGSGCIRKGYRLKMNGYPSRKRGAGIPGSLLCLTDTRAKVRGNRWHMENWVTSTLILCFSDGLSKRHTRRLDPVPGLEGPMPTEPHSLLTQQSEIKLQGGSEAGGGDTFKAVCRGKFIALNAPKRK

SEQ ID NO: 934471 - protein, 143 aa, Homo sapiens
MSEIWVGTQPNHDANADAHKNLDELRKPYAEQKKTDKKVTKEPGECNKTEAKRGEDFKGGMVNSKRIHREFEDHNVKGKILDEKPDLCRFLCQRGYGELRAKPKGLTGFCSGSLKQEKKQTAKASNVNLFHTFTWAIWGNPLS

SEQ ID NO: 934472 - protein, 252 aa, Homo sapiens
MSATGDQDLIQEDQEAPVNQEGAQAEAGGDREGGDSGPDSGNTVAGVAGPMRGLGEEEGEQAAGLAAAPGGGNAEEDSEIRIVVEMVEEEEDEEEEEEEEEEERNEADNFDLVAAARRYPIRGFRMEFLDMVHSLLLRIYHNDHILIRMQEPRLLLVHERLGVGAAGPEGEGLGLLQEAALVPEPEVPADLAEMAREPAEEPTEEASEKPTEEAAEEELSEEAAEEPRKEESAAEEESAQEPATQEGAPLKV

SEQ ID NO: 934473 - protein, 136 aa, Homo sapiens
MIQLDVIRAGPENREHLISTGLIGSNGRWKEPQVSQSLSNCEVGPDRSSGGKGGLRSSPNTGVICPFYHAAHTKANPSGESGKQLRAEENLPWCPERLPPLKEGRQRKETWRAHTNEDDLRIHIMKTRMMTIPLPA

SEQ ID NO: 934474 - protein, 217 aa, Homo sapiens
MILNTGCVPLIFRALKKKPLATTILFFTSMRFTVLAPIYEDVDEAGNHHSQQTNTGTENQTPRVLTHKWELNNESTWTQGGEHHTPGPNVTIGENRSKENKNLGANDGDSRKKEGSIKIVHIAANTVAKYQHEKLRQHGLQGQCLSLDDYAYTEFPSVKRISTEVPQNQNFRLRFQPTFRRNMDGAECYYPQQTNTGKENQILRVLTYKWKLNDESL

SEQ ID NO: 934475 - protein, 140 aa, Homo sapiens
MRLHGPNSITQDFLEGFKEAEEFGWFVVFMTQPTHFTSNQNEHGFSLHLLSREGGIQTSRSATVASATTASASPMPILATKIPRLRSRPNGAEMLLGGETKSAGPHRLWPPLPLGAKAQGDPNSVPEPLDGVIGDPEGKP

SEQ ID NO: 934476 - protein, 148 aa, Homo sapiens
MENLCQGSMEGKCGVGASTQSSTGVLPSGAVRRGPPSSGNQNDRSTDSLHCVPGKAADSKCHPKKASGRKAVPCKATEVELPKTLGIHILPQCDLDARPGLLPMFTQDPRALQSANGKASQACVFPFRVSRFPRSHMGPDVLSRGQGL

SEQ ID NO: 934477 - protein, 157 aa, Homo sapiens
MARPCSKILEAFAVIHLWGPAKGSKQHLYLPLTPQALLDLLGHMAQVAEQLAQQPEPVAELSPVLDPTQNWQLFRQGPNVVILPAAQYIYANYAFWHWENDNRMSLGTHWTYFNALTLTVDTWKGCACTFCCRHSQDRYFASFNPIKLTFNINHHSP

SEQ ID NO: 934478 - protein, 140 aa, Homo sapiens
MWRIAVGLEKAVLWGVIRRAGAWLWGCPTGALCQPGIIRQCRSYDAETLGTQGCPASRHYQAGASVEASITRDAQARLVLSNGQDCSTEFRFDSSPSAKVFYGNKLSLITGSGLALLSEKITKLENTDKILSADVGKHVA

SEQ ID NO: 934479 - protein, 175 aa, Homo sapiens
MLQGCTAAAGQRRSSLLRRWGGQGEALLTFQTVAQWCRGISQVRPPGRGASHFPGRTAAGQRCSSLPRRCGSQAEALLTSQTVGQPNRGAPHFTDGRASRQRCSSRPSRGGGRAEAHLTSQMVGRPGRCAPHFPDSGAVGQRGSSLPRWWGVWVEALLTSQMDATIAIEEEEPEG

SEQ ID NO: 934480 - protein, 846 aa, Homo sapiens
MQTFASQNIFGLDVIETPEGDKMPQLIVQKELDREEKDTYVMKVKVEDGGFPQRSSTAILQVSVTDTNDNHPVFKETEIEVSIPENAPVGTSVTQLHATDADIGENAKIHFSFSNLVSNIARRLFHLNATTGLITIKEPLDREETPNHKLLVLASDGGLMPARAMVLVNVTDVNDNVPSIDIRYIVNPVNDTVVLSENIPLNTKIALITVTDKDADHNGRVTCFTDHEIPFRLRPVFSNQFLLENAAYLDYESTKEYAIKLLAADAGKPPLNQSAMLFIKVKDENDNAPVFTQSFVTVSIPENNSPGIQLMKVSATDADSGPNAEINYLLGPDAPPEFSLDRRTGMLTVVKKLDREKEDKYLFTILAKDNGVPPLTSNVTVFVSIIDQNDNSPVFTHNEYKFYVPENLPRHGTVGLITVTDPDYGDNSAVTLSILDENDDFTIDSQTGVIRPNISFDREKQESYTFYVKAEDGGRVSRSSSAKVTINVVDVNDNKPVFIVPPYNYSYELVLPSTNPGTVVFQVIAVDNDTGMNAEVRYSIVGGNTRDLFAIDQETGNITLMEKCDVTDLGLHRVLVKANDLGQPDSLFSVVIVNLFVNESVTNATLINELVRKSIEAPVTPNTEIADVSSPTSDYVKILVAAVAGTITVVVVIFITAVVRCRQAPHLKAAQKNMQNSEWATPNPENRQMIMMKKKKKKKKHSPKNLLLNVVTIEETKADDVDSDGNRVTLDLPIDLEEQTMGKYNWVTTPTTFKPDSPDLARHYKSASPQPAFQIQPETPLNLKHHIIQELPLDNTFVACDSISNCSSSSSDPYSVSDCGYPVTTFEVPVSVHTRPVGIQVSNTTF

SEQ ID NO: 934481 - protein, 217 aa, Homo sapiens
MIISSKPGNYISCIDNESSLEDKLFTEAKKQASGSIKYLAAILKCVLLFPACPGEIDSSLQLLVHFLVNEAAKLCPVIHISVKLEFISLAANCKVALGHSGLCSLKIHLVAGQPALVTQHQSSPDGRPSNEVAMAGAAVRRQRTKWSQLRGPTPVFKTIRSQETHSLSGEQYGKDPPPYSVISHQFPPTTYGNYGSYKMRFGWGHRAKPYQPPIKPI

SEQ ID NO: 934482 - protein, 263 aa, Homo sapiens
MVNGLTRIDGFKNGSFPTQALSLPAAIHRHDLGYRVEEISKQQSIQEVTQVLLKAFNFIREAEDKSSENLEPDNAIEKKNPFSEEKFKRAAEICESNEEPNVNPQDNRENVSRACQRLGLSWRTSARAAQKGNVGSDSPHRVPTVAPPSGAVSKGPQSSRTQNCRSTDSLHSVAGKAAYTQHQPMKIARREAVPCKATGVELPKTMGTHLLHARHGIKRDNFGALRFDCPGGFRTFMGPVAPLFWPISPIWNGCIYPMPVPPL

SEQ ID NO: 934483 - protein, 136 aa, Homo sapiens
MYDTNISPCEDRRKLSIMAEDKGHADTSDGRLPVEQASLWEPRLFHTFSEIQGSSRFFYPQQGYVKINAMDACGVQVQENIAFGVPKEGGCLTSMSDSACQFLQREPAGIFDKKCVEFVNVFSRYYHHSSNKTFNS

SEQ ID NO: 934484 - protein, 176 aa, Homo sapiens
MPHNFCVLPPQYPEMPSVPCLCCQGVREGWSGNSRLFFKNIFSISFSDMKTKTDTMRTQLIFGSYEDVQMCLEFLPSGGFMVLLTSGVKPQTFAVSVTALKGGVKLQTFPVSVTALKGGASGVVRSSHPEVFVLPSGFVVSLASGVKLQTFAVSVTACKGSVDPKIIIHFNSRIFT

SEQ ID NO: 934485 - protein, 167 aa, Homo sapiens
MASYSLLRHLCVPSFHLKPWNGTPDIRQITVGFEGHSTGQGGPESWGPGCWSHELQCGLVMPILGPPMAAHGFPWTTRAGQRMVRGLTGQRDDGTTSYREELPSLLIAGGDGKSSCREELPCLLRAAETTCPHGGATLSRASSLPRMADIMTASCSEELHSSGLPLC

SEQ ID NO: 934486 - protein, 657 aa, Homo sapiens
MTDSKYFTTNKKAEIFELKAELSNEKKEKRKEAVKKVIAVITVGKDVSSVFPDIVNCMQTDNLKLKKLVYLYLMNYANSQPDMAIIAVNSFVKDCEDPNLLIRALAVRTMGCIWVDKITEYLSEPLLKCLEDEDPYVRKTAAVCVAKLHDINAQMVEDQGFLDSLWGLIADSNPMVVANAVAALSEISESHPNSNLLNLNTQYINKLRTALNKCTEGARFSCWTACLITTLKMIGRLRASDSDYYNMLLKKLAPPLVTLMSGESEVHYVSLRNINLIVQKRPEILKQEIKVFFVKYNDPIYVKLEKLDIRIHLASQANIAQVLAELKEYATEVNVDFVRKAVWATGRCAIKVEQSAEHCVSTLLDLIKTKVNYVVQEVIVVIRDIFRKYSNKYESIIATLSDPVMAKEVVLSEKPLISQETEPIEPTALEELICHIGSLASVYRKPSSAFVEGSHGIHRKHLPIHHGSTDTGDSPVGTTTATNLEQPQVIPRQGDLLGSLLNLDLSLPVNVPQVSSMQMGAVDLLGGGLDSLVGQSFIPSSVPATFAPSPTPAVVRSGLNDLFELSTGIGMAPGGLTGVIPSTPLAIHTPLMPNQSIDVSLPLNTLGPVMKMEPLNNLQVAVKNSIDVFYFSCLSPLNVLFVEDSKMEHQYSLVVCN

SEQ ID NO: 934487 - protein, 172 aa, Homo sapiens
MIPEKPLDKKEKKKGSQLNTVNLYLYASGGSLHGTGCYIGGGNKHVGETNPTPPGGYPKSSGDKGVRKKQNKSSKGGSRGPECWRLAQGPELLGSAYLLVYKLFVLRADGKEAAHGSLWVSRTGKTNSSGTLETLFPTSQLLGRLRLEDCLSLTSEAEMCQDHVTVLQPEEQ

SEQ ID NO: 934488 - protein, 408 aa, Homo sapiens
MAEKEFKMGCKAVETNRNINNAFGPGTANERTVEQPMMTSSVVGLRRSSKAAPKAKLAPKKMAMVTVWWPTASLIHYSFLNPSKTITSEKYAQQIDEIHQKLQWLQLSLVNRKCSILLQDNCQPHVTQPLLQKLNELCCEVLFRPPYSSDLLPTDYHFFKHLNNFLQGKRFHNQQDADNASEEIRAKSEENNKEEKPDSKKVEEDLKADKPSSEESDLEIDKEGAIEPDTHAPQEMGDENAEIMEEMMDKANNKKLAAIEALNDGELQKAIDLFTDAIKLNPHLALLYAKRAKEHERAQREEEARRQSGAQYGCFPGGFPGGMPGNFPGGMPGMGGGMPGMAGMPGLNEILSDPEVLAAMQDPEVMVAFQDVAQNPANMSKYQSNPKKETIPMTSTAPGPQQVLLFYH

SEQ ID NO: 934489 - protein, 150 aa, Homo sapiens
MSHNCCVLPPPVPRNMLHTKLQLQEEFVPTVMEANKFHVRCLQAEEPRKAGGVIHSESEGLRMGVSTLMSMQFERDFDKPKIVQNGVTKEEKVTLAFPFLDKGILCQDIELKKAFSCYSLVKSCVHFGCWYHKIFQKVKLGFHKEKRNNL

SEQ ID NO: 934490 - protein, 497 aa, Homo sapiens
MTLMVPREEEWKLFLTESGQEIRPALAKWWPRVWAEDNPPGLAVNQAPVLIEVKPRAQPVRQKQYPVPREALQGIQVHLKCLRTFGIIVPCQSPWNTPLLPVPKPGTKDYRPVQDLRLVNQATVTLHPTVPNWYTLLGLLPAEDSWFTCLDLKDAFFSIRLAPESQKLFAFQWEDPESGVTTQYTWIRLPKGFKNSPTIFGEALAQDLQKFPTRDLGCMLLQYVDDLFLGHPTAVRCAKGTDALLRHLEDCGYKVFKKKVQICRQQHDCVEVLDSVYSSRPDLRDQPWASVDWVLYVDGSSFINPQGERCAGYAVVTLDTVVEARSLPQGTSAQKTELIALIWALELSEEARKAASAPFRASVTAPLLPQAPDLVPTYSKEENDFLQAEGGQVMEEGLIRLPDGRVAVPQLLGAAVVLAVHETTHLGQESLEKLLGWYFYISHLSALAKTVTQRCVTCRQHNARQGLAVPPGIQAYGEAPFEDLDPGGLHRDAKVWR

SEQ ID NO: 934491 - protein, 168 aa, Homo sapiens
MVVWGRYTHNGPQWGRPLLHPQQSTGPMSYNPSEGEQTSRDPHSNYPDARVGAQSCTQVQGKSYPGDVTGGSWMDNAERKMSADSGLAMDLGAQCVVTWWYPTVMMSTPLCDERQKWLWGMTSRRQNSSDTELKKEGVYSAAGIGKTPVSRAELPERAIPVPFKGSQL

SEQ ID NO: 934492 - protein, 139 aa, Homo sapiens
MQLFPKMLLSHSLVGFSCEEAILHDHSTASIWTYDISYVHYDVEEYIPEAEGPRAPRRPPVPSLRVQKPKNLESYVQGRREKCIPFQKGMRKQRKRIPLLLIVFPNRAHSLFDCTFSHWGCVYSHTNQPWKQPHKDRDT

SEQ ID NO: 934493 - protein, 146 aa, Homo sapiens
MQTNSRISVGAQVAALLRLHSSVFGSKTLMVWAHEGISLPACCKDPCAKCGFPGGVTQLLTTSFRWGWELPWLCATPRWAIAPLSFSSFSMGQAVQLISPNARAWILQLKVQNSLAVFFPLPLKLPYQLLVALTQTGTSELNYYLA

SEQ ID NO: 934494 - protein, 150 aa, Homo sapiens
MAHVYLWLRRRKMLESLELPRYFLNGFDQNAESDMDNEVQANVVSDKDEELVWKWSKGDICYVLAERLAAFSPCPKDLWSFELKRDNLGHLAQEISKHQSIQEVTWVLLKAFSFVYLQIHGLELRSSFPISSSGNTCLPTHAAINLSTFF

SEQ ID NO: 934495 - protein, 138 aa, Homo sapiens
MLEEPFCPLLHCGSPSLGWPRLEPTPSACGEAVSSLLYWPAGIPSQWVFVCKVPWKWGLLSEAAWLSGFSPLPTAMDGSPASLKFPEPKYAKTPVSQCLLDRPPTLAAVISLPSSVLGTQGPDGKFDSKLALFSSQNC

SEQ ID NO: 934496 - protein, 245 aa, Homo sapiens
MITLILSPAKSWNFEVYWGLEAKFICGIKGTRISMLALAKCLVVRKKSAAEAEPSWRTSTRAVKRENVGLVSPHRVPTGELPSEAVRRKQPSSRSQNGSSTDSLHQAPGNDSGIQHQPMKADMGTVLRRATGAELPKALGANLSHQHSLDEPFSLPLGCGGPSLGLAKAGAGSLCLPGPVEAEAWAEAGAARACRDRFRVRKDLAGPSHLACQCLLGFIGGMSSLWAAGVPRLGATKSRASAIES

SEQ ID NO: 934497 - protein, 145 aa, Homo sapiens
MLASSSPSAMIVKNLKDNIPGINFKKYGIAISGVGAKESVHNLQLFWRKCASYAANRHVNVLTDGQLCLGFITRFSHHLYIFFLDYPNCSHCYHQQSNSSSNTSSYILLSNPTAYFTSSRSLDLICLKQKRLSSLPNMICCYINR

SEQ ID NO: 934498 - protein, 134 aa, Homo sapiens
MEVEVALLTIAPGDPLAKFLLPVPTTLEEPHLMATATSGSQGILPDYHQCFLKVQGLFSQLVLNAAGLGLTLQGSGSPLPYRHKKVFSTMLPVPVDVGGVTSAIQHCFCYLFSASFSEVKTRYSSDKLVQPDDG

SEQ ID NO: 934499 - protein, 257 aa, Homo sapiens
MRDRQTKRSRGLGFVTYSCVTEVDAAMCARPHKVDGHVVEPKRAVSREDSVKPGAHLTVKKIFVGGIKEDTEEYNLRDYFEKYGKIETIEVMEDRQSGKKRGFAFVTFDGHDTVDKIVVQKYHTINRHNCEAKRPFLNKKCSLLDHREVVEVGLAILWVAEEALEMVEVILALVETLVEEEAMVVEVVAAEVVMGEVMVDIIDLEVMVATMAVVLVVVVEGAMAVVDQDMETKVVGMVEVVEDMMVTMKEEILAVRP

SEQ ID NO: 934500 - protein, 201 aa, Homo sapiens
MYSSTRFQRMYGNNWLPRQNFAAGVGPSWRTSARAVQKENMGFEPPHRLSTGPVPSGAVRIGPPSSRPQNDRSTNSLHHVPGKATDIQCQPMKAASSGGWTLQNHRGRDAQYHGKPPLASANIWGVICQSPWEPVGDWLQKWPLPPTENNNSNTGFMREGIESGRRKDTETRLKGEKAGNPAQGYHELGLISGPQWLQGNR

SEQ ID NO: 934501 - protein, 216 aa, Homo sapiens
MFLKEMEMTEMTEIAFRILIGTKIIKIQENIETQFKKAKNHNKMMQELTDKIANSPRSDERKKLLKTAGEKRQSGPSSAGLLQFAVGPLQTLFAWVSPAEAAEQQRLLPAPSSGSFVPEGHRPDASRSSPQSSSAVPVKPSLSGSAALFRAGRQEHLSLLKVHLQLPLPSGALSQGDGSYIYKPLTGAAAFLSDMPCPVKRNLERQSGHSHFAVLC

SEQ ID NO: 934502 - protein, 370 aa, Homo sapiens
MGPLHFFADMNLVICVLLLSIWKNNCMTTNQTNGSSTTGDKPVESMQTKLNYLRRNLLILVGIIIMVFVFICFCYLHYNCLSDDASKAGMVKKKGIAAKSSKTSFSEAKTASQCSPETQPMLSTADKSSDSSSPERASAQSSTEKLIRPSSLQKPSIPNSAGKLTRPSYPKRSSKSSCSKKLSKSSHLEKAHKKGSLEKLCKLDYACKLASSDKPVRPPQLFKPLYSSHPQNEISPSKPFGPQELAKPPKHFNPKRSVSLGRAALLSNSELAETCQPYKKKHLVAKTYRPLVNDISEAKEKNTQNLHVSSKVKSSSRSFRKLDSRNNAYGDHVNDSDTMKYYSEVDSDKVIIITCDRGYNQVTSEVTLND

SEQ ID NO: 934503 - protein, 135 aa, Homo sapiens
MSTQKYHNSSLAREINWMENEFDKLTEVGFRKWVITNSSKIKEHVLTQCKEAKNLEKRLGKLLTRKTSIEKNISDLMEQKNTAQELREAYTSINSQINQVEERISEVEDQLNEINHEDKIREKRMKRNKQSLQEI

SEQ ID NO: 934504 - protein, 164 aa, Homo sapiens
MQVTDGARPNPERHSRTASDPYSGIPGCEDCEDGVFSPQDPPRRGHGFETPEETWGHVRDEDISGTPGAASPGHLGLTLVPAQNQLSRAHSGKVYELNEEVSRPHRRGIPIVGRVGGIREQLLFKQLCTVAAEVLLLMEQGCPIGSQPRVAAQRQFCTHIYTHL

SEQ ID NO: 934505 - protein, 276 aa, Homo sapiens [sequence omitted]

SEQ ID NO: 934506 - protein, 126 aa, Homo sapiens
MLHRAGLSHLRGCLDHPLITSLPSQGTKKCSRTSRRQNPSDIELKKETVYSARSISKTSVSRAELPNVEHNDESEHQCCVPDLKALGANNSGGDCYGFCIKVFYHVKKIRIFSLLVVFIIKYVDYL

SEQ ID NO: 934507 - protein, 144 aa, Homo sapiens
MGHKAAETTRSINNAFGARTSNERTVQWWFKKFCKGDKSLEHEEHSGRPLEVDNEKLRAIIKADPLTTTREVAEEIKVVHSMIIWHLKQIGKVKKLNTWMPNELSENQKNCRFEVSSLILHNNEPFLNQIVMCNEKWILYDNQR

SEQ ID NO: 934508 - protein, 160 aa, Homo sapiens
MIRGSHRKDPKQHGILHWKLRCRREPDKGGLKLTPWQTTAALQKRDLTIERKINKQKATTTASTKVPTETSSKGQQSQRLKLDKLMKMRKNQQNKQNAENPKGQSASSPPNNCNTSQQGQANAKEIHHHKACLQELLKEALNMERKNQYQPLRNSPKHKN

SEQ ID NO: 934509 - protein, 141 aa, Homo sapiens
MFFTVTERPCTESPLGHCLVELWEWGHHPLDPRIWQNHWQFAIPAWKGHRHLTPIHESSYRVTLQSRRGRATQGLGSPPLALVCPGCGHGVKDYSGALRFNDCPAGVSDLHGACCPFHLDDLSLLEWESLLNACTTIVSWK

SEQ ID NO: 934510 - protein, 139 aa, Homo sapiens
MFLYHFLLNAPGFISSSAALCTAASTSSRKLLKSACSSGDTSSGEDGDVTETLTFFFGWAIPVSFWLGADSGSGCFSLDIWPFGKGHRGRLCTLSGPLGPDLAGTDASALNRCLYIQSRRILTDSAGKFPLRFFLCSVH

SEQ ID NO: 934511 - protein, 152 aa, Homo sapiens
MWLCSSKCRPLGGVYGLWGYTFRRNAQVKAGQQCCGPLTAETRSPQLEQQRLAAVGCVAHLHFPPTKVALGFINTLGGMHMCWASLLSLWPWSGKDLASSSGSCKGLVSDLWECALRGTQSHSCSVQMKVGQVHWRPKDDKAHLAGSSEDLA

SEQ ID NO: 934512 - protein, 148 aa, Homo sapiens [sequence omitted]

SEQ ID NO: 934513 - protein, 153 aa, Homo sapiens
MFPSPDPFKGLGGPSSNHWRLYDYILGKQRQFEFFFTDLDGLYFFLFSALARNSSSMLTRSGESGHLCLLSVFRVLPGGHCSQSSQDGGGPLPKWWRATSNMVASLVFSDLGFLASGIPRNGILGHAVSVIALLEALGHGRELWNPVTNVQLD

SEQ ID NO: 934514 - protein, 151 aa, Homo sapiens
MIGSFLRPRQKQILLCQQWPWQCVWTLSLGNLLVCSHLDAYGVGVALSSLRQANLRLWRPHALASFVVGTVSPGHCTAFFPGCRTLCGLECWGPFCTVGSSQNCASAVLQVYVGECLWGSEDVEMLVLLGLKANYNQVFTVTSLLNFSALS

SEQ ID NO: 934515 - protein, 142 aa, Homo sapiens
MGFEVIGIRLCRGNFVFCQNCYKVQLEVSFSLWSFPNSTGGLTQGSFSLSSSQLQVKSNPSPMMWTLRFPSEDVCLGADDPPFTFSRFGHSEFFGHFLEPEVAIHFFQRVCGFLWLSWYGPAVVLQAKVLDMGLHTPLCPCL

SEQ ID NO: 934516 - protein, 144 aa, Homo sapiens
MAKRCQGTTQAIASGDASLKPWQLPLVLSLHVQRCQELRCIHIEDYHVFLEDCSVYVMPHIIADNFPCTEACFVIITTPYFLVLLTKRVKLYKIFEDIYFEPNVSDQWLMPQPSGDCKNMCPRWPGYSLVLYVLERQKTSINAY

SEQ ID NO: 934517 - protein, 136 aa, Homo sapiens
MQGVHGWVWERMPISLRDPVHPFKPGDSVWVMKWNPTTLGPIWVGLHTVILSTPSIVKVAGIVPWIHHSWLKPEIQDKWTSQQNPDHPSRLILRREPVATEDNSPALGTPFTCVWGWAHRKVPPLHSHHVVGEHSN

SEQ ID NO: 934518 - protein, 161 aa, Homo sapiens
MLGPFLLTDLYIFLVEEQYYMLDADSKHIRQSGKPCPTPIRYFHLPGAVTESSKGNSAFYQGSCFRIVWNMVRPVNSISICPLPHFFSREVISLFKSNAVYNTMTVDKAYCKSMDDSFNRSISCRKGGARCNNLSFILDELLHVPHHLFPRNFTEVEDPLI

SEQ ID NO: 934519 - protein, 140 aa, Homo sapiens
MFKKAHCVQRPGPNFKAGGESFQNGSFHSINASPHKTPVYYKSKQVTLQWRKLADITSIKQYNYLEIKNNVLMNDFWVSNKIKEEIKKFFDTNENKEWENIFANYASNKGLISKIYKKLKQIYKQKTNNPIKTGAKDRNR

SEQ ID NO: 934520 - protein, 151 aa, Homo sapiens
MSEERSGAQRLLLQAVLFPCWSQGGWTTWSKDLSPTAQHTDCGRLKPQCLFRLDSDSSFLIGNSNNSSQRLRERTWISLGLRLQGRGGHSLCRPADIAFSPGSSEESRQPRLVGFSPVKHTPSTKGQTKCFIKWVLFPVPPNWVGPSNRDC

SEQ ID NO: 934521 - protein, 144 aa, Homo sapiens
MGCKLNLKIFQTLTKPPTWDGGQWKNMGLPPPMHAIAETSSVVETLTRGARGIKDTYTQKYSVWSGKSGDSQPSELRASNRDLHTYLLTASQKPTTFIVGVMAITNMSQCCRDFIYGQLRGQFKARCWGLSPASHTPPGHRAAQ

SEQ ID NO: 934522 - protein, 177 aa, Homo sapiens
MWCLVKVYFLVLRWLSSHCVFTWQKGYDQSGDVIGASRPRSAQVEPASSDVQNCPAEIRSDSSPRAKVSHGSKSSLEDCHPWPHFATDASTPNPLGFTSAALLPRPFFLSLRKYTPERCKSAIVQCYQPRMVGLCCGSKSGVFCLVMSSGGCVGAMGDRLASPWVDSSLLELWTRDI

SEQ ID NO: 934523 - protein, 218 aa, Homo sapiens
MSCDPPPPPTPGPLSLGLIQHQDSPKSLLPALLEGLRCSHSAGNSTLMGCSGQSTSVGQRQRLPVKELWWWLLANASSGKLRLRCKRMWPGRDAGIGQQTAGHSDQTDPIPWPRLPCCVQVQQPANTKATERSVLSRQFSLQSQMSVGVMGSPAAWIPEVHGENEPLYACFTRPFPRSHSGPKMSPGPQQPDAGFPASSPFSSGPLSPSCHSYAFAPS

SEQ ID NO: 934524 - protein, 177 aa, Homo sapiens
MFKSAEVSAAFCSAMPCPQMWSLHRQAGLLQLRWAPPSSSFLAALFTYSSLSNSGRPPPASLPPCSLISDCCASSEQGSLGVGLSEPGTGYNVLEREFPDPLHFPGEAMPRPRRPLQLTLRGLHPLSNKPQCDEPGTSVGNAEIRNHPSSASLTLGAVDCISSYSVILEPPPSGISL

SEQ ID NO: 934525 - protein, 162 aa, Homo sapiens [sequence omitted]

SEQ ID NO: 934526 - protein, 182 aa, Homo sapiens
MFVGCFLMCFPFIRYLVFLSGCSEHFFLHYDFENLKILCLKVDLLVEQLTGVLWISQTLFHRAAAACWGSTPDPISLSPSHPWKDHQWRLQTSKNGRIILLLAGLSQRGTDLLLAGTVLYEVTIRQKRLRPLIYNTAAAPLPRGSSQEDQSSVHKPLAGDTEISAGKPHLRLQCDHMVEEDL

SEQ ID NO: 934527 - protein, 159 aa, Homo sapiens
MKLSLAGYEILVTRTFLSRFLPSLNCVKTCYFSSEEFVITHLLKPTSVNSSNSFSIQFCVLAGEELQSFEGEEAFWPLFCWSLLEVHSRPCLLGYHQQGLQNSKDYCLLFLLEASSQRSACPMPARALLYEVSVNSCWEMSSSQEAQGSGIHLRREYVP

SEQ ID NO: 934528 - protein, 160 aa, Homo sapiens
MFTNTLLHLMSVDPTVFLLLACVKDHSQHLMKHFGWQHPLECCGQQLETTMATPQEQQVSNFKGPENKMLLKLVHVSRSSRAMVFSSIKSLKVFSMLFILVSHSSNLFSRFLASLQWVRTSSFSSEKFVITDRLKPSSLNSSKSFSIQLCSITGEELHYF

SEQ ID NO: 934529 - protein, 312 aa, Homo sapiens
MPLENMQDSTLPMKAATGAVPCKSTGLELPNALGYLEGSEDRKVWESLKLPRDLLNGFDQNANSDMDNKILAEVVSDGEEELNFELDRDNLGYLAEEISKQQSVQEEAEHKILENLQSNNVIEKKTPFSGEKFKLAAKICISNEEPNVNHQDNGENVSRCPPPTVPNVALPSGAVKRGPPSSRPQNGISTNSLHCAPGKTADTQCYPLKAAKSWATPCKATGVELPKKMGTHLLHQHDLDVRHGVKGDHFGALRFDCPSGFWTFMGPVAPSFGNCVYFAHEQDYRLFVGIAHGQFDHKRSLQVSVWLLFFMK

SEQ ID NO: 934530 - protein, 136 aa, Homo sapiens
MMLAVGQGEKDHQVRAGISFSELSLSLGAVAVKDGGVVPIPVEFVFSGGLWLSLLSHTGLHESGGKPAVRGLALLLCSPQPLRLISLPSLPTPNSTESISRQLVTRAENLPQTKDSTEFSDSQFLALFPLEPREAP

SEQ ID NO: 934531 - protein, 148 aa, Homo sapiens
MFSWMLLMSVDAHQYPGIEELDDRLEALLLHLIYLEIAKLCVEINAVDFYPRRNTGAQYKNKGNFRYFEKHGRQQTMPWVWQKTGSDSPVHKKGRKCLSDTYFHWRARQSRPQGSSLTLPSTESDLRSSGETVRRSGSGKSFAHVSRP

SEQ ID NO: 934532 - protein, 151 aa, Homo sapiens
MQAVNVQIPIPGIGGFICPHEVFSRAYVLKGPTAAALLEFAGGPLQTLFTWVSAAEAAEQRILLNSKCCCLIVPLEVLSQWSTRLCEVSLGPSAAGVLQFAVGPLQTLFSWVSPEEAVEQQRLQPLPSSGCLIPEGHLPDASWCSSVRGVC

SEQ ID NO: 934533 - protein, 142 aa, Homo sapiens
MSGMGWLKSQAWRMHLMRRYESGHSRNFFIGLLQHAGGLLQFLLTLDFAVPGGGCNIAIGGWLEFQVNGSYLVRCHGSGAFRLSLLRPKELEASTALDLAHGLSLQSDNFSLALRMFRDVFWEPGLGVKNFTSLPDALFYDD

SEQ ID NO: 934534 - protein, 146 aa, Homo sapiens
MVVLGEVLCAGEANLYLETCLSPITYRPLPLDNGMRLCMPTLWLDGQEAKVGAPPAAKYVYANYTFWHWGNDHRMSLETHWTHYKGIKADGNVSWGEDVSTTEYGKAVSSGKKGSSKFTSSVSPALLRSSHTSPFKVGGSHSFSNQ

SEQ ID NO: 934535 - protein, 148 aa, Homo sapiens
MATKATNIASETYKGNEDFKSNDLRKKGSAKRTLSCRRVGVCRRSTPDPVCLGISSRGCRTADIGEQQMLLPDRSSGIGERLEESTGAWLGQHSTSGFDWGQMLPLWIAADFPLLPRLMQAKGEDQYYVEKLARDLCLANMQIMLPAE

SEQ ID NO: 934536 - protein, 261 aa, Homo sapiens
MSLPVEKATRLTVFQHLRTPAAVIQFLQRVCGFSWLSWYVPAVVLGAKVYDEKLIVPVAEEEATVQNNKITVVSVGQVGMACAISILGKSLADEFAFVDVLEDKLKGEMMDLQHGSLFLKKLKIVADKDYSVTASYKIVVELNPEIGTDNDSENWKEVHKMVVENAYEVNKLNGYTHWDIGLSVADLIESMLKNLSRIHLVSTMVKGMYGIENEVFLSLPYILNARGLTSVINQKLKDDEVAQFKKSTDTPWDIQKDLKDL

SEQ ID NO: 934537 - protein, 152 aa, Homo sapiens
MKNAQYPLIMHSSYSGIPVQNMQIRLLEILQIGSKQSKRVSREKGTVNVTGVRYLSYHQQRIQTRRSVCDTLLHYSKAKPHNDLIQKDKIPGPIEQGGQREGRPQRRRKPDFPIPLGSWGGQWKKAFNLSAQGPNLTAFVFHAGALALPDPA

SEQ ID NO: 934538 - protein, 153 aa, Homo sapiens
MFTSGRIHLELSMLKQILAERCLRICTAMGWGLGPSGVGLRVGSSDLWVAQFCGKSMVSLAGWDTYHHSWLGCGGSYASCCSQVATAGRCSFFLSMDHASCFISSGEGTWISWLLVKDSHANYGSFRWETLIAAVSRQPSWPHSSNFLLIPPQ

SEQ ID NO: 934539 - protein, 196 aa, Homo sapiens
MGDRTGPDPKLGNMWELTVLKAGVSLHERSLCLPPSTVMINTECQLDWIEGYKVLILWVSPDNAIEKKIPFSGEKFKQAAEVCISDKEPNVNLQDNGQNVSRACQRFSQQPHQSQGQRPRSKMWFCGPGPGSLSCVQPRDFVPCIPAAPAMAERGQHRARAVALDGASTKPWKLPYGVEPTGTQKSRIEDLQYNDE

SEQ ID NO: 934540 - protein, 145 aa, Homo sapiens
MADKYGHRCGLFLFSSYDLATYLTETRSTGGTGTDWNLPGFCVLRLVDDHSSYIMVEQQNSNSSGAGRMKVAKALSARYKLSLDLPFWGPEDCGPLFTAPLGSSPVGTLFGGSDSTFPFCTALVDVLHEEPLQQNICLDIQVCHT

SEQ ID NO: 934541 - protein, 140 aa, Homo sapiens
MSHGTWEHPFPGPLAGESKFFLELFLSAPIGVSRLPVSSAPSLGSVRQKENPQKPPLSSSMDPEAVGTTQGEQAEAEWGVASHEKCKELGDLPTPPAKGSREGLCYLAWVLCFSRGFCNLQIRRYPRVSNYQDRGFLAQN

SEQ ID NO: 934542 - protein, 632 aa, Homo sapiens
MVSMVVGGQKTDLMIDTGAEHSVVTQTIGPLSKDYVNIIGATGRDLLHKLQAQISFTPSGDMTLSLGLKEAMVLTLTIQKTEEWRLYESNCQECGKRYTVAKGEKLFTDLLLKLPGVWAEDNPTGLAVNRAPAVVELLRRTYPVRIRQYLIPMEAYWGIEKHLKRLLEFWIIEECTSSWNTPLLPVLKPSAKPLYEATKVGIKEPLLWGKEQDMAFKEIKKALIQALALGLPDLTKPFYLYVHERKEMATGVLVQMLGSWYLPVAYLSKQLDWVATGWPPRFKVLAVTALLAEDANKLTFGQKLIIQVPHTVVTLMEQRGGHRWLSNPRMLRYQWLLCENPYITLETVNTLNLATLLPIEYAEHGKPPLCAPGYHCCVETVDEVFSSRKDLKDQPLKDPDIEYFTDGSSFISEGIRKAGYAVATLNSVAEACPLPVGTSAQKAELIALIRALLLAKGKSVNIYTDSKYAFATLHAHGAIYKEKGLLTTEGKEIKNKKEIEQLLEAVWTPKKVALIHCNGHQTGGSNEATGNRKVDREAKRAAITKMTEKRETYVMPLLEPPLAETPNYTSSEKAWFAQENGDYQRKEAGGSFQTGGLPSQKPFDHKRWPPPEAAILEAYPQGCVLFLRDVPC

SEQ ID NO: 934543 - protein, 226 aa, Homo sapiens
MESPAVKLNLIGNTMSPDLAADFQELSQSKTGVKAEMVLMSRGRFCQNQSNLKSHKENCDYGTAGVTQLPNIPHRTLSDVIHACEEEKLVSMSTLNLLPSNSLPKSKTQMNCLDWKRNPKGKGPSVGGHTGGLGQLLPDECMTCWGCPNKSRFLVPRSTTYALWDCFYVCALTIHHCLIPGRHSHQLHLPGQSCAEPEMVAHAGQKWLTQNLRKEVPCLSKIDLHH

SEQ ID NO: 934544 - protein, 135 aa, Homo sapiens
MPCLAVQEEMAATQALPAVVYVRKNCPIPKSSSPPQPPGPWLVRSLMGSLTLLSRRLSHRCSFAWRLSGLFYSLCITGSTVHASSSSLCVPQMTISSVSPPTYSQMDRPSPRTRKWFRERRPRCPNTCCRILLQD

SEQ ID NO: 934545 - protein, 217 aa, Homo sapiens
MAAVPHIKNEDLEALLPLSLPPTGDPPEAHWLLLTLTHTSTPSWIGLWTYLLHLRSKCMVVSLTSSRRMRLSVRPRTKWPNPWEVCPLSLTLTHTSTSGRTDLWTHLMCHSQQERSHNISSHSSAGTEGRQQDPQAAGTCIGRNMHIEPGTFRDSQSFLTVTMIAAAAAITLAAAGRPSQGCTLCGGSRSQGQVGSPSFTSWGGSSWVHLQLPKQQL

SEQ ID NO: 934546 - protein, 147 aa, Homo sapiens
MVSNTILFITYGELSISNEEDSLENGQSLSSSQLSLPALSEMEPVPMPRDPCSYEVLQPSDIMDGPVSEESPSASESGVLLSQDPSAKPVLLLPPKKPAAFPGDHEETPVKQLPLLKQPPALPPKPTTRIANHLTGEIDSMSTFLQR

SEQ ID NO: 934547 - protein, 162 aa, Homo sapiens
MRASINQHKTEPISLALLTTREQEGISGGEYSKGPEERRSVVIGKSRGQSGRERYPGAPVKLPCLPVKLSPPLPPKKVMICMPVGGPDLSLVSYTAQKSGQQGVAQHHHTVLPSQIQHQLQYGSHGQHLPSTTGSLPMHPSGCRMIDELNKTLAMTMQRLER

SEQ ID NO: 934548 - protein, 136 aa, Homo sapiens
MDVQHMPIYISSDTQLTTVQGVVTSFCGDYGVIDESIYFSSDVVTGNVPLKVGQKVNVVVEEDKILYGLRAIKVRITHIRGRSGVIKNTIFFTLDSVKLPDGYVPQVDDIVNVVMVESIQFCFKWRAVSITPVQKS

SEQ ID NO: 934549 - protein, 143 aa, Homo sapiens [sequence omitted]

SEQ ID NO: 934550 - protein, 135 aa, Homo sapiens
MVLTSAFGEGLRKLTIMAEGEGQPACHMVRERKKELFTAQRGEDEQRISVLLLQPLHRCDRNCPPNITGLNPLNHGHIDDIISLSQSKGEAQDLLNNWSCSQLLSERQSSTQPFFLQNNNNNNNDNNNNLTVIHE

SEQ ID NO: 934551 - protein, 148 aa, Homo sapiens
METKYSHACTSVWYIGRAAYMELAVVICKTEAPLRVLLPMKTTDIYPASSAPCSSICYVPALSGREGVADTEGLRKRREKRKQKVGGILPISIVSGFGKALSVCACTFGFLQPLKQASCCCVSSQVPPGGKLKEKSLATFLPPLHSFL

SEQ ID NO: 934552 - protein, 176 aa, Homo sapiens
MGALANKEHLSRPLPTPPLRVTKSINVHITCCAWALGRREPLRRIVLGVWLPLINRCLDLTSALWAPQHCHHPSPLISPSLIRFQKGDFLSMGRTSVRRHITANSGPIQSYKMGYPRPVFCGLREPSLHAWMTHSHHPLSGPSASCSPAGQCPGFLCFSASELVPCWASSNAFLGS

SEQ ID NO: 934553 - protein, 145 aa, Homo sapiens
MPWSLHPFNGENNAGSKESVTSNRTLQTSQPTPPEEVYTFGCVFINNGQIQASPLQTSQPTPPEELHTVGYVFTNDGQQMRSDEVNQVATGHQSKQKRSRKSKRHSSSKRGKSMSLRLDKQEGEGESNLWASTMSKDICSHVLEG

SEQ ID NO: 934554 - protein, 706 aa, Homo sapiens
MAFIDASITHNVHEEKVKNGQPAPGNVITTVPPVLINMAAAGISSMSTRDQYAAVTHSIREERINNGQPAPDNTLSTARLLVIWQQLEFHPRAREICLNLFHWFPDVTITHNVREERMENDQPQTDNVLSTAPPQLGYMAAAPSTSIRDLYATVTFTVPEEKMENGQPQSENPLSTAPTGFINMAGAVIPSMSTNDLYSTVTHNVREEKMENDQPQPNNMLSTVQPVVIYLAAAGILGMSTRDQYATVTHNVCEERVENNQPLPNNGLSTVLPGLTYLAAAGIPAMSTRDQYATITHNVREETTENGQCQTDNVVSTVPPQLGHMAAAGIPSMSTRDLYFTITHNVCEEKTKNDQTAPDKFLSTVTAGLMNFAGAGIPPLSTRDKYATVTQNVREERMENNQPSSNNVLSTLLPGLTYLATAGILAMSTGDQYAAVTHIVCEKINNDQPAPDNILSTVPPWIGNMAAAGISSTSTRDLFSFLETEHDRDIPVELPKCTYLTAQHFPLVSRCYRQSKLSIRRIYLWGYHSTLILQLNLFIWFPDATVTHHVRGEKINNGQPAPDNFLSSVTPGLINVSVDGIPPMSTRDQYVTVTHNAHEEKMENGQQAADNILSAVPLGLINTPEAGIPAMSTNDLYATVIHNIQEEEMENGQTPPNGFLLNSAPPELINMTGDHMPPNALDSFSYNFTSLSRYKLLYKPDSNDLW

SEQ ID NO: 934555 - protein, 147 aa, Homo sapiens
MWFPFFCWLSSRNCTKHLEPSYTFLGALLYPQSGPAVSHPSCTLIPLPLLLLLGKENALLLKDSPARDPNIMNTSKPNYLPKAPPPNIIPLGVRVSSYEFSEDTNIQSVHNACLPQKPEADSFITTGPTGIALKDSGEGKSSKREDA

SEQ ID NO: 934556 - protein, 440 aa, Homo sapiens
MHLPHSSTSSFEQRMENGQPQTDNILSTAPPQLGDMAATGVSSTSTRDLYATITHNVGEERMENSQPQTDNVLSTIPPQVRHMAAAGIPSMSTIYQYATVTHNVYEQKIENGQPAPDNVLLTLPPELINMTATDISSMNATITYYVPEEKMEDGQPQSDNVFSTAPTGLNMTGADIPAMSTNDLCLNLFIWFPDATVTHNVCEERMENNRPQPNNVRSTLPLRLSYLATAGIPAMSTRDQYATVTHNVHEEKTKNGQPAPDNVIATVPPALTNMAAAGVSSMSTRDQYATFTHNVHEEKMENGQPAPQNILSNVLPGLINMEATGIPSMSTRDLLALTLRVIEPMWGFCQSLSMIPTMHSETGKQPEGGFMDQLSPLYVGPDVKPHGLPDVKSHDYQKLQLLLEEHSDILGILELAPVQSHYQVIPENSDYLLLHHDLPH

SEQ ID NO: 934557 - protein, 395 aa, Homo sapiens
MCDDGVEIRVFNSNSHLHFFRIFELNHFIWFPDAAVTHIVCEEKINNDQPAPDNVLSTAPPWLRDMAAAGISSTSTRDLYATVTHNVCDERMENDQLQLNNVLLTFPPERVNMAVADFSAMNATINHNVYEVRMENNQPQFNNVLSTVKPGHINMAAAGIPAMSAKGLCATVTHNAYEEKMENGQQAADNILSAVPPGLINTSEAGIPAMSTNDLYATITHDVSEKKIKNSQPATDNFLCTVTPGLINLAEAGILATSTRDLYATVIHNIQEEEMENGQMPPDGFLSNSAPLELINMTEDCMPLNALDSFSYDFTSLSREELLYKHDSNEFAVGTKNYSVSAGDPPVTAMSSVETPQISPAMAKKINQDIKCQLMKEVQRFGQTHSWAALDLYVI

SEQ ID NO: 934558 - protein, 158 aa, Homo sapiens
MVQGQWKEGKPQDTACPAPTEHGDLCRAPESLGEGSRSVGASLENQEAQPSPSLTLAPSKGGLPTTQRSLDDKRMPRSLHPFNGENNAGSKESVTSNWTLQTSQPTPPEEVYTFGCVFINNGQIQASPLQTSQPTPPEELHTVGYVFTNDGQSVVCVE

SEQ ID NO: 934559 - protein, 171 aa, Homo sapiens
MSQLTEMDFGVFHNRNLNEEEGRVQCKNRGRLTKHQALLLDCPKVTIKTCDTLNPALLMPVNSSENLTHSCIKTIEQIYLGRRDLRDTSLKNPDDEYSFLHSDGSSFLKNGKIRVGCTVALDLGQGKALNIYADSKNAFFVLQPHAEHKNLDFKTALTVNSGICSCLIKKY

SEQ ID NO: 934560 - protein, 172 aa, Homo sapiens
MKRRRRPFGCRFGLAINLQISFSALSAEMVKYLYKKKTKSETLKNFSAQVYADGDTQLTTVQGVVTSFCGDYGVIDESIYFSSDVVTGNVPLKVGQKVNVVVEEDKILYGLRAIKVDVVPHPLNDDGPSDSKIRVLNGCVTSISEDTVYISNIIYFPMDIVSEVCLFKYVQK

SEQ ID NO: 934561 - protein, 151 aa, Homo sapiens
MTFHIIYPPVCSTCSWKEYVFCSIWTECSVDVVPRHLYGAGPSDSGTRVLIGCVTSICEDIIYISNCIYFFIDIVSEGGAWTWVSLQSTPGVSNGPTRLEINDLHRSDLHSCRTQGEEVQSWLQCLLGFSIIISIIYTHRSALLAYMEEMG

SEQ ID NO: 934562 - protein, 170 aa, Homo sapiens
MNPTGHTRHSWKVIPLILQKRSQCSFPGMSFLKAFPSEHHGKSEHWLKQLLPMEVQREEVSLGAQRLAWRFSFWLTSPGNMSMLLCPSAPASLSAPWAQRFMKRKQRSQCLLTFETDRPVSLPLPSFSLSVTFPGDSNSPHTCHLGMTAGLMSNLIKCQIILPWESQQNV

SEQ ID NO: 934563 - protein, 159 aa, Homo sapiens
MDTVEPEQTVQNSQTSKSNLILYEVIGITEASPWKPYLINPAVKKDGVTHLPFTRGLQARGGKGAVSSGIVWSCFLEVEAKGLWWESCPGHSAFKGVFPTPFSMPGTTTKHIVECNVRSIPFGKDRTFMMGIEPYFPLSLRIPDLATGEGLASVYTLSL

SEQ ID NO: 934564 - protein, 153 aa, Homo sapiens
MRQQEMGHADPVGRGGTWQGASDRWGQSPAGKGGLPPCSAARISSSPGGLPPVLSRVHPSVPRSVSQRSLMEALGSGHYVGGSIRSMAAAALSGLAVRLSRPQGTRGSYGAFCKTLTRTLLTFFDLAWRLRKNFFYFYILASVILNVHLQVYI

SEQ ID NO: 934565 - protein, 158 aa, Homo sapiens
MWKRKSAFLWENAGSASAQEETLGKSSLESPLLFRSTKVVKLRDSLRNSSRKRKLDLNGKRHFFSQLRQVESECYFSIKRPLCGHNVTGHYTLVVEKNLEVCAEENETLVFEVGLVLNSISGTQGASWGQKRRVRAPPAGHQRQCEILSAHCVAVAIS

SEQ ID NO: 934566 - protein, 138 aa, Homo sapiens
MELPEEGTGCHLYCLAAFTVATFRYWKIQGDRGLEWTPIILQHSYGEVDRHFVTWVPDPVSLHSTGPPGLGLQPTATRAIEPAAILQLPKTELPGPEAGEDPQYRASTSWKKGQTLLYAGPDPHFSLLGRNAQSGTPA

SEQ ID NO: 934567 - protein, 167 aa, Homo sapiens
MIWLCLHPNLILNCKSHNSHVLWERPSGSSGHGFRVCKPQAFHVVLSLQVHRRIEVGNLCLGFRGCMEMPECPGRSLLQGRGPHGEPLLEQCGREMGWMPHTESLLGHCLVKLWEVGHCPPDPRMVDPVKACTMHLEKPQTLMPAHESSQERDCTLQSNRGGAAQDP

SEQ ID NO: 934568 - protein, 236 aa, Homo sapiens
MDFRQTPTNLQLRVLTVRRKTNKQKGHPHQNPICTSPSSKTKGMQLRTSNEHRWMENDFDELREEGFRRSNYSELKKEVESMTKKITNAEKPLKDLMELKTMARELRDECTSLSNRCDQLEERVSVKEDQMNEMKREEKFREKRIKRNEQSLQEIWDYVKRPNLRLTGVPESDGENGNKLENTLQDIIQENFPNLARQANIQIQEIQRMSQRYSSRRATPRHIMVRFTKVEMRKKC

SEQ ID NO: 934569 - protein, 194 aa, Homo sapiens
MVGKTKWKPLELPLPRNTINQKQYHIPGGIVISATITDLTDAAVVIPTTSSFNSPIWPEQKTDGFWRITVDYLTEKAASFELGPEQEKALQQVQAAVQATLPLGLYDPADPTVLELSVADRDAVWSLWQAPTDGGTLPPGDTTIPLNWKLRLPPGQFGLLLPLSQQAKNGVIVFPGVTDPDYQDEINLLLHNGV

SEQ ID NO: 934570 - protein, 142 aa, Homo sapiens
MTWHSWAAHWSSGVILVLMFLPQRRGSRGGDLSSGCDQGEDEQDWELLKKQSDPVLIEQLRCAGGPLQPLVTSHSEAQRLEWGSAMLLLLADWNSKPVGLILAVSSTLALGRYRNAIQESRPRIGEPKSLLGALPHCGQAGT

SEQ ID NO: 934571 - protein, 142 aa, Homo sapiens
MGKKQSRKTGNSKKQSASPPPKERSSSPATEQSWTENDFDELREEGFRRSNYSELREDIQTKDYVKRPNLRLIGVPESDGENGTKLENTLQDILHENFPNLARQANIQIQEIQRMPQRYSTRRVTPRHIIVRFTKVEMKEKM

SEQ ID NO: 934572 - protein, 157 aa, Homo sapiens
MCSHDEAVLALVLLECGVSCTFSQQNMIRGRLFLMAQISSGMFHFDQGEPLIWLHGELRQQRGEGLRGFWGMARKRMRANGRSEVQTMLTSKESLKVPNLFYGVHVGEVDLPVLPCQVPSGLMCGERRSFDNFLRQVEVGNPQSEVSHKAQEGEEVL

SEQ ID NO: 934573 - protein, 161 aa, Homo sapiens
MDPNQKEIPDLPEKECGRSSINLIKEAPEKDPRIISVPEEEEKSKSLKNIFGGIIEENFPSLAGDLDVQIQKAQRTPGKFTTKRSLSRYIIIRFSKVKTKERILRALRQKHQGTYKGKSIRITQISQQKPYKLEGIGVLLLTSLNKLSAKNFVCSKTKHHK

SEQ ID NO: 934574 - protein, 142 aa, Homo sapiens
MAKKLKTEKKLDEWITRITNAEKSLKELMELKAKARELCEECRSLRSCCNQLEERLSVTEDEMNEMKQEGKISYPAKLNFIREGEIKYFTDKQMMRDFVTTRPTLKELLKEALNMERNNQYQPLQRHAKLYRPSRLGRNSIN

SEQ ID NO: 934575 - protein, 142 aa, Homo sapiens
MLNIGPHSLLACRVSAERSALRLMGFPLWTGPSAAGLLEFARGPLQTLFAGVSAAVSAKQWFFVTRECCCLIIPLEVLSQRSTQPCHESSTLMIVIGALIKEAYRSPFAFLPCEDTVKGHSEKVPFLKQRVTPHQSSNPLVT

SEQ ID NO: 934576 - protein, 170 aa, Homo sapiens
MVCLETRKLSGPFPLLPLPSYFTWLSKLTQLQDVEHLELLHAASGNVNWYNHFGKQFGSFLERTKVRRDKLTKFRKQGPSAGGDWKYRNSHAGESVDLYYYSRELTESRQLNLSHAPCPSNFVPESVSQRNSPMNSGTESTECKDKPFTTALRAGGKKDMTVNLLRVPRY

SEQ ID NO: 934577 - protein, 158 aa, Homo sapiens
MLLISAEESHTLTTTTPGHEEYCQTIANVPLRPKVSYVSLSLAQGPRCTWLSLLVIQGPRALQLAGDECWQDWVLSFRAAGFLLAQGVSINVILELGPGMEARRKGSLLELQAELFPHCNQIHALRVNSTQLVETVPEAALSPRELSSPLHGLWIDCQ

SEQ ID NO: 934578 - protein, 133 aa, Homo sapiens
MNPGPWSSMHNQPTVPHQGIEASDSTLWAQVSGPPTYCPRCLASLPKDSDGNLAIGSKHSKFGERCEYPGTGKAKFFNPNKTTPRHLIIKLSIIKDKRRILKATREKKQIKYKGLSIKLVGDFLAETLQARRE

SEQ ID NO: 934579 - protein, 155 aa, Homo sapiens
MNLIIMCLGVALLEEYLCVFLLTVRTLSCRPVGVCWRSTPDPVCLGISSGGCRTADIGEPQMLLPDHSSGSFVSEEYPAVSQAACWENHYSLQSCQTGTFKSAEVTAAFCLSVPCPQRWSLQRQAGLLSCGDDSLCFGSRMLWPTVLHPLSGTPQ

SEQ ID NO: 934580 - protein, 142 aa, Homo sapiens
MTYRCGFGPSAAGLLEFAGVPLQTLFAWVSPVEAAEQQILQNSKYCCLILPLKASSQRGTHLYEVSVGPYWEVTPSFWSKPFNKSLGSSTFHIFLSSSEPSKLFQPLPVTQFQSCFHIFGYLYSSTPLFQYQVTVISLFSCC

SEQ ID NO: 934581 - protein, 212 aa, Homo sapiens
MPQNNREDRKMWESLELPKDLLNGFDKNADSDMNNKVQAEVVSGGDEELVWNWSKGMEVWEPVPRFQKMYVYGTTWMPMQKFAVGVRSSWRTSARAVQKGNVGWESPHRVPTGAPPSGAVRTGPPSSRPQNGTSTDSLHCVPGKATDTQCQPVKVAGREAVPCKTTGAKLLKTMGTHLLNQCDLDVQHGVKGEHLGALRLDRPAGFQTCIGP

SEQ ID NO: 934582 - protein, 188 aa, Homo sapiens
MSYPSARIPEAFGERVFMQSQFTGFDLTKGFPGVVLDPGFSGTGLDLGPLEPRFDLMLTLAWSRFLWGLLWRAGLWVLAWILCPLMLAWGLVVQNWNGSFQELLLANEVSKDEFITGYIHRVTNAFYKNESKAFVFCRRKQNSVFTQEEEIHSLGEEGTWMKLEIIILSKLSQEQKTKHCMFSLIGGN

SEQ ID NO: 934583 - protein, 167 aa, Homo sapiens
MHTLWLFWASLPACSRMLAVRLTGAATVFVSSHDVCWVLPRLSQLDFSAGLSLSRCQCLLQPTIPLCSSPSLVISCLSDNLHFVMSLVSTGPSFSRIDSPFYYALTEGLTPRLGPPYIMQHQPCIPNHAYPPMLPPTIHLPPDFTLRWMHPHLLIYLTYFFPRRESL

SEQ ID NO: 934584 - protein, 164 aa, Homo sapiens
MGLVPTPQGLRYSHPWLSGVTVATNTHLSPFSKISFSHRKTSHPMATHIPSFPLPSGNPHPVDGQCRDMKVDQCPVHSLIGRLVTKTGQETCGWSYGSEHKREHSKKSSIKLQSCGCFPGVSGLLYQERSRKGTGSILAGEMDPDHHEQVRLRLYKGRIHLVPR

SEQ ID NO: 934585 - protein, 159 aa, Homo sapiens
MEKTALFSPGLAAYICTITFSTTRRCTTRRKHDDYEEDTDQDQALSCLDSITEQSSILDDADTYGNFNNLRFWYNLEIHSTPGPPIEIMEMTCIALPEMAEEFWYLLKLTIELPKPTTMPEIQCDLGKLRDKQSSGAGGKERNLANFPQGEAEVSNEQL

SEQ ID NO: 934586 - protein, 230 aa, Homo sapiens
MTVGIDYKGAARWNFGGDHTFLYGNVMADVIPSERWIVNFDKDLSDGLVFATQLGAYCPFLDSAQITPKFLQKSHITPSYSSVWGWLSGVFSCASLFPEGVNLTGLKDAKMTGNVLFLGVSEGVSKGDGCRSQWPEKGRYALSVGCYHPIGCGSGQNKETEEGGYSATDICDPNPILMLMLCVYMYERLPTYLPKKVVSFECTLHDTVLNKEKQEFTAKEQDGDQWVGND

SEQ ID NO: 934587 - protein, 129 aa, Homo sapiens
MLSCMGLISLKKEEQVLVLSRVVPYCSNNMPPICVQNTPKVNPCFASSNIYSDSERILLSWMNINYENTRHVIWKNCHKDLKAEKSKIKVLAGSMSDKGCCLFPRWCLDDAHSKQEEHCVLTWQKAQKR

SEQ ID NO: 934588 - protein, 312 aa, Homo sapiens
MLAVLWLDAPEIQASACYAQLFFIHTFTFLESSVLLAMAFDRFVAICHPLHYPTILTNSVIGKIGLACLLRSLGVVLPTPLLLRHYHYCHGNALSHAFCLHQDVLRLSCTDARTNSIYGLCVVIATLEPLRYAAILTNDVIIGIGLAIAGRALALVFPASFLLKRLQYHDVNILSYPFCLHQDLIKTTVSNCRVSSIYGLMVVICSMGLDSVLLLLSYVLILGTVLSIASKAERVRALNTCISHICAVLTFYTPMIGLSMIHRYGQNASSIVHVLMANVYLLVPPLMNPVVYSVKTKQIRDRIFNKFKKHEV

SEQ ID NO: 934589 - protein, 453 aa, Homo sapiens
MLQMKTLHKASTLWKHRENNYTDCTQPILQLKGHLHTEMGKNQFIKAEQTLREPMFYFLAILSTIDLALSTTSVPRTLGIFWFDVHEINFGACVAQMFLIHAFTGMEAEVLVAMAFDHYVAICNPLHYTNILTCRVLNERSEEDAEEKFEVSKVTFFLIGIPGLEDFHMWISGPFCSVYLVALLGNATILLVIKVEQTLREPMFYFLAILSTIDLALSTTSVPRMLGIFWFDAHEINYGACVAQMFLIHAFTGMEAEVLLAMAFDRYVAVCAPLHYATILTSQVLVGISMCIVIRPVLLTLPMVYLIYRLPFCQAHIIAHSYCEHMGIAKLSCGNIRINGIYGLFVVSFFVLNLVLIGISYVYILRAVFRLPSHDAQLKALSTCGAHVGVICVFYIPSVFSFLTHRFGHQIPGYIHILVANLYLIIPPSLNPIIYGVRTKQIRERVLYVFTKK

SEQ ID NO: 934590 - protein, 323 aa, Homo sapiens
MHGTASEFHPSSFLLLGIPGLETLHIWIGFPFCAVYMIALIGNFTILLVIKTDSSLHQPMFYFLAMLATTDVGLSTATIPKMLGIFWINLRGIIFEACLTQMFFIHNFTLMESAVLVAMAYDSYVAICNPLQYSAILTNKVVSVIGLGVFVRALIFVIPSILLILRLPFCGNHVIPHTYCEHMGLAHLSCASIKINIIYGLCAICNLVFDITVIALSYVHILCAVFRLPTHEARLKSLSTCGSHVCVILAFYTPALFSFMTHRFGRNVPRYIHILLANLYVVVPPMLNPVIYGVRTKQIYKCVKKILLQEQGMEKEEMLEIKF

SEQ ID NO: 934591 - protein, 148 aa, Homo sapiens
MFYFLAMLATIDLGLSTATIPKMLGIFWFSLREIICDACLIQMFFIHNFTGMESAALVGMAYDHFVAICNPLRYSIILTKKAVSVIGLGVLVRSFMSVIPFVFLILRLPFCGDHVIPHTNCEHMGLAHLSCSSIKINIIYGLGAISIL

SEQ ID NO: 934592 - protein, 157 aa, Homo sapiens
MWLIHTFQGIESGVLLAMALDRCVAICYPLRRAIVFTRQLVTYIVVGVTLRPAILVIPCLLLIKCHLKLYRTKLIYHTYCERVALVKLATEDVYINKVYGILGAFIVGGLDFIFITLSYIQIFITVFHLPLKEARLKIIIFKLFTEVYHTIRKVHQS

SEQ ID NO: 934593 - protein, 250 aa, Homo sapiens
MIELIYSPTNHVKTFLFLHNFTGMPCQRGVIWLSGHSSLAELQWAPPSSDFLTAAVLAANFKIVACLAPWVWDQPSQTTWLPGFSTPFQGSEEFCLTGAPGTTGKINPVLPEATVMVSSEAVERQDNVDSPQEPPTTSLFASRPITRLKFWLAPRGEVQSVIHKGVCDTRKKLLKFFNLYKQKSREQAWEKILRVWDKGGRNIELDQAEFIDLGPLHKHSAFNIAALEVKKCSKTVCAWLAKIWIKRWAT

SEQ ID NO: 934594 - protein, 150 aa, Homo sapiens
MSFLFVSFPSNSQDPQLQVCWSLLEVHSRPCFCVSAVEAAEQQILVNSKCCCLIVPLEVLSQRSTRSYSIWHKNLVRICWNLKEVLSYELVPLGCAPNHQPVYSAFGNRKKHNITTAQRACWAKAKILELDELNQKTEHWGRSSMKVARE

SEQ ID NO: 934595 - protein, 149 aa, Homo sapiens
MKLKKDYGYCAFPMVFAICRSKDSLVCLHHQGSGFQTQNWVAVWTDTELAEGVFIIHQWCLEIQQFSTDSAKEDGRFGLGGIQHSVAKQLWPDCFSRFLLTGQGVSEGKAAVRFRGLQIKLSSPWDKAPNGRGSCAYSFSILNLSCLSE

SEQ ID NO: 934596 - protein, 157 aa, Homo sapiens
MMKVSFFSRGWWRNTEGKRGIPSISSRGRVSEWCGQGDQLELCHNHWPRTQGPSVTMQPPSGNDLSTVVLIQKPGPRRLPIHRSNSAIPLNTPTLQGLSPGPVHVKASLLAQSSDSLDCKPAPAWLTRQLLYQTSGLNYNLCHERSFQLFPSLRTFP

SEQ ID NO: 934597 - protein, 134 aa, Homo sapiens [sequence omitted]

SEQ ID NO: 934598 - protein, 177 aa, Homo sapiens
MKLPEEQSGSNICCSAIFTVLQPPLLTPRQTGSGVDLQQTPADLQLRVLTVRKKTNKQKGHPHQNPICMSPSSKTKAMEQSWTENDFDELRQEGFRRSNLSELKEEVRTHCKEAKNLEKRLVEWLTRITSVEKSLNDLMELKTMTRELCDKCTSFSGLFDQLEERVSVIEDQMNDMK

SEQ ID NO: 934599 - protein, 152 aa, Homo sapiens
MASAWHLCLISSCTWHSGPQHIDLPSDDPTDQFPDHCQKPILITPCSKFEDFRADPRKDMIMTSGDLLRQWHGATAQKGKRAMELLVEKGIGEGVMCQGDVAQQQDGESVSESSEGQQQLGVFYSPRICFIYGRQRLGAVLQGMQSREVLNG

SEQ ID NO: 934600 - protein, 225 aa, Homo sapiens
MAQEPQGLHGLSQWRSALSFRASSLQPASDAFLNAIWTNTGILKQEKWAIYKLRRDTWKRSFPLSTQKEPTQLTLSFGLPSSITVNNKFLLFKPPANLQTVWHREQGHQSQSALLEPAVKGMQETGKLAKERVTGRKFTLILICVLESLICEQEETLSLALHHAGEVIFESQQASGVGNLFAGKWRDFVLFRVCQALSRVCHKKSRPEGALSSLTLLPRAGITNP

SEQ ID NO: 934601 - protein, 193 aa, Homo sapiens
MLGGPAGLGCCHGNPSYTAPLTHQFCQKVQATGLGHHLDINPPGAEEVAEAKKGAARTGKTQAVSLAGQSAPGAMNGDDAFAKRPRDDAKASEKRSKAFDDIAKYFSKEEWEKMKFSEKISCVHMKRKYEAMTKLGFNVTLSLFMRNKRATDSQRNDSDNDRNRGNEDRPDSTISHNHYKRSENPVLEYLPSF

SEQ ID NO: 934602 - protein, 164 aa, Homo sapiens
MEPWWPQSQQVLPHQRTVNRGSAHTVSDHSCLWGTEKAPRSEPASTLPQANITSEVTAYTVSSSGPLLPAPHSCFASAAVLLHLDPPSTVDSKHQGAREQSWGPIQVPQRYSMQSRGWELNIGPLVSSRNEARWMNPPYTTIKPPRSSNRIKEKKHPKVSNLKS

SEQ ID NO: 934603 - protein, 146 aa, Homo sapiens
MVTVIIRIIPLEVCSPFITHERNLITPHCPLGHCSAPSRSPHLLHVLWYLRTNPGSPCKGVVSIRGTGSNLTCKRNSLSLSSCRTFGPVEGEISEVRPHSVTWNQVLHFSIQGLSVQSLDEGQSPRLGPSQKQDSEEPDSSLVKGQ

SEQ ID NO: 934604 - protein, 133 aa, Homo sapiens
MKLSIFSYNQTLCFFPRGLGNLNPKSGQFLTLFHMEVSFLFPESKKTAVSILGDYGLNNLALHVWESRAQQGFSGSPVLTYHDNPCGRGSCDGGSDGIHDGNSGDDIDCSDGVDGRDGGDGCEGNNGGGVRVS

SEQ ID NO: 934605 - protein, 145 aa, Homo sapiens
MTIYLKAEAQLLVLRSTGIRGKKLFHPWELRGWCPVCGGSSGGGGFTVLDSGGVRKNKIADMIDTFSALLTFGQYEFCRQKREVCELGEASGEVNRIPLSLQRQTRWSHISEDMWDVNPAAWPQSPWSSWQQHVCRLSCVQVNEE

SEQ ID NO: 934606 - protein, 182 aa, Homo sapiens
MGLRKQDWESSTYAAPVCCHFNESCCLTPLAYQELSLAKPQFWGSTALHHLATNEGIKAVKMAAMDGETAPSEDPLLAGSPRRPMPFPESPQSPNSEGGPASALTKDSSSRSSDTPPPHPTSPSLYPHFPQNKPNQYYQEWSLILAPKVKSVSIAGAKGPSPSGHQHHQPLGNSARPPPMFT

SEQ ID NO: 934607 - protein, 200 aa, Homo sapiens [sequence omitted]

SEQ ID NO: 934608 - protein, 152 aa, Homo sapiens
MLAGGAEGTQGFLKDISSKCRSVREHILPHISAHLCQVVKQFLSNGAEAVARLACHVSTDSAAKEMASCLAHFLEKNHRTFCQDSSQTSVNTERLTPVSKRKEIILPDTIPITLGSVDSLGMGVKDPGHPQSSVVSASSEEISSCDGQGALL

SEQ ID NO: 934609 - protein, 172 aa, Homo sapiens
MPFFLLICKVFNTRILQPFYNSESNHLHEKLFTEDSGIFLPTNEFFASITTSHSLITVTMMLYFLIFPGFFLLWVPAPYCPADKRAVRACGQGKEELVDPQIAPSSPPLPFCLEVPGSVFTDIWGKKRSRKLPRTELSRKQQQHHAKTLQRKRRKAKVQRAKEGGKTPVWRI

SEQ ID NO: 934610 - protein, 300 aa, Homo sapiens
MVLFCLQFYKSYNCMQGEKEENCPGFLQERQRREHLNMEKLYKENEGKPENERNLESEGKPEDEGSTEDEGKSDEEEKPDMEGKTECEGKREDEGEPGDEGQLEDEGNQEKQGKSEGEDKPQSEGKPASQAKPESQPRAAEKRPAEDYVPRKAKRKTDRGTDDSPKDSQEDLQERHLSSEEMMRECGDVSRAQEELRKKQKMGGFHWMQRDVQDPFAPRGQRGVRGVRGGGRGQKDLEDDVKKVIMFPWMTNLKNKAHNGIAASIINALERHFHTNSQLDYTGPEIVNCFCSECGYSDKW

SEQ ID NO: 934611 - protein, 246 aa, Homo sapiens
MLKEGPRCALACLVGSARTLALCLPGAEHLMPEPAQALKHRRPQPPDIRLLGQTENVLSTTIIAVNSIIIIIIIIIIIIKGWCSVNIQWILVTFTLKWLHGYINDKLPLPKSINLNCFSKLLLLTKVSKVKYRTMTKKCERRVIAVKEEKGKTTFDMENSHQENEESVHNVEEELHLEEMEGQEARGNNLQEQAPPTQEDGDGLPHRHVNNNEGRGRKRMRRRKEMGRRRKRRRKRRRRKVSRRDF

SEQ ID NO: 934612 - protein, 167 aa, Homo sapiens
MASRCETKHREKWTRPCPKRPLLPAGPLTKGANTTTSVNRHTVAVWALSPPGPHSRAVNASRCCEGPHRGQQHNTHQYPVAADENETSQLNYTTMKPARSSNRIKEKKNIQRTATSKIEETSTHKDEKEPNVMAEMTEIELRIWIGAKMIEIQENVETQSKEAKSHN

SEQ ID NO: 934613 - protein, 140 aa, Homo sapiens
MASGSRRQQRKKAVSKCLLLLCSSNAAPRCQEEEAPVQMSPGGFCLCSPSDTCMVVICQLCPGPMPFQSKLTLVELLEVIKHNCLHVKAREVEAQSGVASRGEDDDKPKVTWQVRQAPRSRTVWKETLGPTRWTPFPSPE

SEQ ID NO: 934614 - protein, 144 aa, Homo sapiens
MISFDSKSYIQVMLMQEVGSHGLGQLCPCGFAGYSPPSWLLSQAGIEYLQLFQVHNASCQWIYHSGSPQALPAEPLGQGLMVPGPSSGHLTDLPPQSALTSNSKGAIDRSGQLCPQCPGACEGVGGDLGSQYRGWVMKCDHSVV

SEQ ID NO: 934615 - protein, 237 aa, Homo sapiens
MNGIPSLWIIVLLRPNNLITNPSYNLKSLCFSCAHRILVSSCSSGESIEPITAFQCPTCRYVISLNHRGLDGLKRNVTLQNIIDRFQKASVSGPNSPSESRRERTYRPTTAMSSERIACQFCEQDPPRDAVKTCITCEVSYCDRCLRATHPNKKPFTSHRLVEPVPDTHLRGITCLDHENEKVNMYCVSDDQLICALCKLVGRHRDHQVASLNDRFEKLKVRDLGSIPYTTLSHKCS

SEQ ID NO: 934616 - protein, 124 aa, Homo sapiens
MSLKCPGDIFLIVLVINIWLLITYANFCSQLEFLPRKWSFLFLLGCKFYKFLCCASPSMLCRLEISSTRYSKSHLSSSKDGRVEENSCISGHMQFRPVVQGSTVICNDEKMISSCQKVRDWEMG

SEQ ID NO: 934617 - protein, 185 aa, Homo sapiens
MSQGLFDTSLLGLDESCHYWTQLCILNRVAVKSMKYKNKLIQKIGIKEWDIAIKIPENVEAALELGNGQRLEQFGGLRKRHEDPRMVDLLTTCTVHLEKLPMKAATGAVSYNAREAELFKALGAHPLHQYALDESQEDPQTIRRKWTVPAGPGRHPKYFEYPSWGSGKGRSSTPEHTPPLGKLKV

SEQ ID NO: 934618 - protein, 146 aa, Homo sapiens
MQPDCFLMQVPGPVPPHGVGSPDRGPQPLPSVCLDWQQELEQILSILQQPYKKPGQTVCYEGPESHIFSLEDLCGLGLHPPPGTIKPVAFLLWRVCRPKGFSGHPEEHPPHGKVVRLFSTQFPVLNSPHWAGLPDLGRQENHSAPT

SEQ ID NO: 934619 - protein, 144 aa, Homo sapiens
MRKNQRKKSENSKNQNSSSLQRITIPCQQGKKNCTENEFDELTEVGFRTWVITNSAELKVHVLTQCKQAKNFEKWLEELLPRITSLEKNINDLMELKNTTRELHEAHRSINSPIDQAEERISEIEDQINEIKQIWDYVKDETYV

SEQ ID NO: 934620 - protein, 164 aa, Homo sapiens
MLLAQSEELITDVQANHIQSMVKSHQKTEEPHPMAITTTVPGVELPDYLFCSLKAQKLFSQLAVNAAWPWTHLSWQWALLWPRPSPGMLSKSQALELGTPKTGLVLYPSVAELVPKGPRALQLAGNESHQDWVFPFKAVASLLAQSVSRNVIQELVPEKVASGL

SEQ ID NO: 934621 - protein, 179 aa, Homo sapiens
MSEMTEVDLRMQIKANLAELEEHIATQCKEAKDHDKTMQEQKPEYKILQEEIITETHNCQILQGPNERKNVKDSQRESPEKFNHLKPSSLNLSESFSIQFCSIAGPSAAGLLEFAGGAIQTLFAWVSAAEAAEQRILLNSKCCCLIVPLEASSRRGTQPSHAATLWLLMEIFIYIQCHY

SEQ ID NO: 934622 - protein, 206 aa, Homo sapiens
MPYFGTWRTVGIRCPRRKPRSADSSAPKDKTCNYKFPLLPNLLPGASGPNGQTDTHWQHMGHLSKLKPWWGRENYPMDRDSCYALEDNQIPYCWLQMTSNIYAYAVVLPFPYLRKFLPSPMSIIPRLVDHPIPGNPHPTAGRTNNVLLGLPITPAKPIPHSWEHINAIYYWQSTGNSSTMHNSHSKEEHAIANYTKRAYSLSHSNI

SEQ ID NO: 934623 - protein, 195 aa, Homo sapiens
MFNIGPQSPMACNVFAQWSTVILMCFVGNCTLLLNSHRNREAGPETLAGPPAWLQVADTDEVMCSDLQVFPMTTGSCSLQLSSHRSKASGPEGLAGIAPAGYQGQGQVVLCFAVQVLPVTTGSYDLQLSSHSSQSTGPEGLVGFAHLATSGSDVQGVFPMATGSCALQLSSHKCGTAGWLATSARGGRRGWLSSC

SEQ ID NO: 934624 - protein, 193 aa, Homo sapiens
MVPYPPVAKLGPGPRRMLSMVVAAIAEAAALVAAGAVATGTRIPCGGSTGTGDRRWTCLSLKPDPMESTQILTLHSEYKDKNNLHSGIKLSQALPRALPCPLCLVTTTVFCLGQQMICVSGRGPSSSIALHSQGTKALQLAGNECCQDWALSFKGVGSLLAQGVSRNVVWELEPRRALTTATGALSAVAELVF

SEQ ID NO: 934625 - protein, 163 aa, Homo sapiens
MPCHPHRVTSEGCFLYCGAESMTECYPRKYPIGLDLALSSGAVRGGQERGRLFRQHAETDTAAASCASCLGRGAQGILTFDHPLTENFNFHVLSFIESAWQNSLPSSTIFLQKTIQPLAGWNCCKFTFFNFKHVLNSVKQSFYASLRSFPVHTKDNSTCHHFL

SEQ ID NO: 934626 - protein, 138 aa, Homo sapiens
MAFAAPWMESETIILSAVIQEWKTKRRKFSSVSRTGWHMKCGAKSIPDRGNSVCKGLEAEKSLDVERQNSWRNASGLKFSDPFYKKTHEEYLSREDHQKRARQGKPYLYKLKHVFIQMTPEGSDSNAYSEMLIYQWSS

SEQ ID NO: 934627 - protein, 160 aa, Homo sapiens
MVDAPTPTKLDDPKSTSDCCAGSENFKPVVLSLLGSVGVGPTELDHLAPWLQPPFQGSERFCLTGVPGATGHSTRSYSRPAVTTLRLWPMFVQGPGTLQSANCKAIQALFLPFMMGPRALQLAGCESCQDWFLPFKAAGPLLSQEPRNAFCTMLPLLEDE

SEQ ID NO: 934628 - protein, 153 aa, Homo sapiens
MFVSTEPNSGLAQISVLHIVSIHSDPRGACAGRSNAVTNMFDNCYSSPVVLKEWPQTTTTTAIAIIIIMPGNLLETSVLRPHSKSTELETLGMRPSRFCFNKLSSLNGNLIQNGSLQNGTNRPNRPLSSNIRKEKLTLTSHVYKMSKEPDLLF

SEQ ID NO: 934629 - protein, 2974 aa, Homo sapiens
MESKLMDWNRMDSTGTDSNGMESNGRESNGMDSKGKDCNGKVSNGMEINGMEWNRMKWSQKEWNRMARNRIEMESNHKEWTGIEWSRIEWNRMEWHQTEWNGQPRNGMHSNAMESKLMDWNRMDSTDGIGWDWNEMYWKGLEFHETEWNELERNGLEWNGMSWDGIKWNGIKWNGIECNGMLWNGMECIGMECPLMEWIRGSKGMESNGMVWNGMNTNVMQPNRMESNGMEYKEMESKRMETNGMELNGMELNGMGTNGVKLYAVEENRMECKRKERNGLEWNGIHWNGRECSSEMESNHKEWTGIEWSRIEWNRMEWHQTEWNGQPRNGMHSNAMESKQMDWNRMDSTGTDSNGMESNGRESNGRESNGMDSKGKDCNGKKGFEWNEKELNGIEQNGIKSNEMEWNRKEWNEMEWKGFEWNAIEWNGIERNGIKWKKTGKKWNRNEWSVMERTQKELNMGLDGIGMKCTGKDSNFMKRNGMNWNGMDSNGMECHGMASNGMTSNGMESNAMECYGMEWNALEWNRSKGMESNGMVWNGMNTNVMQPNRMESNGMEYKEMESKRMETNGMELNGMELNGMGTNGVKLYAVEENRMECKRKERNGLEWNGIHWNGRECSVMDRPGIKWNATVSNGIKMYGMECNETESNVIECNGCKKMNPKSLTGKAGCRKELTPMEWNRMEWNEMESNHKEWTGIEWSRIEWNRMEWHQTEWNGQPRNGMHSNAMESKLMDWNRMDSTGTDSNGMESNGRESNGMESNGMDSKGKDCNGKKGFEWNEKELNGIEQNGIKSNEMEWNRKEWNEMEWKGFEWNAIEWNGIERNGIKWKKTGKKWNRNEWSVMERTQKELNMGLDGIGMKCTGKDSNFMKRNGMNWNGMDSNGMECHGMASNGMTSNGMESNAMECYGMEWNALEWNGSKGMESNGMVWNGMNTNVMQPNRMESNGMEYKEMESKRMETNGMELNGMELNGMGTNGVKLYAVEENRMECKRKERNGLEWNGIHWNGRECSSEMESNHKEWTGIEWSRIEWNRMEWHQTEWNGQPRNGMHSNAMESKLMDWNRMDSTGTDSNGMESNGRESNGRESNGMDSKGKDCNGKKGFEWNEKELNGIEQNGIKSNEMEWNRKEWNEMEWKGFEWNAIKWNGIERNGIKWKKTGKKWNRNEWSVMERTQKELNMGLDGIGMKCTGKDSNFMKRNGMNWNGMDSNGMECHGMASNGMTSNGMESNAMECYGMEWNALEWNGSKGMESNGMVWNGMNTNVMQPNRMESNGMEYKEMESKRMETNGMELNGMELNGMGTNGVKLYAVEENRMECKRKERNGLEWNGIHWNGRECSSEMESNHKEWTGIEWSRIEWNRMEWHQTEWNGQPRNGMHSNAMESKLMDWNRMDSTGTDSNGMESNGRESNGMDSKGKDCNGKVSNGMEINGMEWNRMKWNGIGWDWNEMYWKGLEFDETEWNELERNGLEWNGMSWDGIKWNGIKWNGIECNGMLWNGMECIGMECPLMEWIRGSKGMESNGMVWNGMNTNVMQPNRMESNGMEYKEMESKRMETNGMELNGMELNGMGTNGVKLYAVEENRMECKRKERNGLEWNGIHWNGRECSSEMESNHKEWTGIEWSRIEWNRMEWHQTEWNGQPRNGMHSNAMESKLMDWNRMDSTGTDSNGMESNGRESNGRESNGMDSKGKDCNGKVSNGMEINGMEWNRMKWSQKEWNRMARNRIMESNRMKWNGIERNGMKWNGKDSNGMQSNGMESNGMEENGRKLARNGIEMNGMGLDGIGMKCTGKDSNFMKRNGMNWNGMDSNGMECHGMASNGMTSNGMESNAMECYGMEWNALEWNEWTGIEWSRIEWNRMEWHQTEWNGQPRNGMHSNAMESKLMDWNRMDSTGTDSNGMESNGRESNGMDSKGKDCNGKKGFEWNEKELNGIEQNGIKSNEMEWNRKEWNEMEWKGFEWNAIEWNGIERNGIKWKKTGKKWNRNEWSVMERTQKELNSNQWNQIKWNGKELNGVDGIGWDWNEMYWKGLEFHETEWNELERNGLEWNGMSWDGIKWNGIKWNGIECNGMLWNGMECIGMECPLMEWIRGSKGMESNGMVWNGMNTNVMQPNRMESNGMEYKEMESKRMETNGMELNGMELNGMGTNGVKLYAVEENRMECKRKERNGLEWNGIHWNGRECSSEMESNHKEWTGIEWSRIEWNRMEWHQTEWNGQPRNGMHSKAMESKLMDWNRMDSTGTDSNGMESNGRESNGRESNGMDSKGKDCNGKKGFEWNEKELNGIEQNGMKSNEMEWNRKEWNEMEWKGFEWNAIEWNGIERNGIKWKKTGKKWNRNEWSVMERTQKELNMGLDGIGMKCTGKDSNFMKRNGMNWNGIDSNGMECHGMASNGMTSNGMESNAMECYGMEWNALEWNGSKGMESNGMVWNGMNSNVMQPNRMESNGMEYKEMESKRMETKGMELNGMELNGMGTNGVKLYAVEENRMECKRKERNGLEWNGIHWNGRECSSEMESNHKEWTGIEWSRIEWNRMEWHQTEWNGQPRNGMHSNAMESKLMDWNRMDSTGTDSNGMESNGRESNGRESNGMDSKGKDCNGKVSNGMEINGMEWNRMKWNGIGWDWNEMYWKGLEFHETEWNELERNGLEWNGMSWDGIKWNGIKWNGIECNGMLWNGMECIGMECPLMEWIRGSKGMESNGMVWNGMNTNVMQPNRMESNGMEYKEMESKRMETNGMELNGMELNGMGTNGVKLYAVEENRMECKRKERNGLEWNGIHWNGRECSSEMESNHKEWTGIEWSRIEWNRMEWHQTEWNGQPRNGMHSNAMESKLMDWNRMDSTGTDPNGMESNGRESNGMDSKGKDCNGKKGFEWNEKELNGIEQNGIKSNEMEWNRKEWNEMEWKGFEWNAIEWNGIERNGIKWKKTGKKWNRNEWSVMERTQKELNVIEWSGVDSNIMDWNGMKSHGMGTNGMEWKGMESNGKESNGRE

SEQ ID NO: 934630 - protein, 3022 aa, Homo sapiens
MECTRMQWSRNKWTGIEWTRLSEMESNHKEWTGIEWSRIEWNRMEWHQTEWNGQPRNGMHSNAMESKLMDWNRMDSTGTDSNGMESNGRESNGRESNRMDSKGKDCNGKNGMESSGMELNGMEQYEMEWNGMEWNALELNGLEWNGLKQSGMESVEIEWNELLWNGVVCNAIDWQGIKRNKGFEWNEKELNGIEQNGIKSNEMEWNRKEWNEMEWKGFEWNAIEWNGIERNGIKWKKTGKKWNRNEWSVMERTQKELNMGLDGIGMKCTGKDSNFMKRNGMNWNGMDSNGMECHGMASNGMTSNGMESNAMECYGMEWNALEWNGSKGMESNGMVWNGMNTNVMQPNRMESNGMEYKEMESKRMETNGMELNGMELNGMGTNGVKLYAVEENRMECKRKERNGLEWNGIHWNGRECSSEMESNHKEWTGIEWSRIEWNRMEWHQTEWNGQPRNGMHSNAMESKQMDWNRMDSTGTDSNGMESNGRESNGRESNGMDSKGKDCNGKKGFEWNEKELNGIEQNGIKSNEMEWNRKEWNEMEWKGFEWNAIEWNGIERNGIKWKKTGKKWNRNEWSVMERTQKELNMGLDGIGMKCTGKDSNFMKRNGMNWNGIDSNGMECHGMASNGMTSNGMESNAMECYGMEWNALEWNGSKGMESNGMVWNGMNTNVMQPNRMESNGMEYKEMESKRMETNGMELNGMELNGMGTNGVKLYAVEENRMECKRKERNGLEWNGIHWNGRECSSEMESNHKEWTGIEWSRIEWNRMEWHQTEWNGQPRNGMHSNAMESKLMDWNRMDSTGTDSNGMESNGRESNGMDSKGKDCNGKKGFEWNEKELNGIEQNGIKSNEMEWNRKEWNEMEWKGFEWNAIEWNGIERNGIKWKKTGKKWNRNEWSVMERTQKELNVIEWSGVDSNIMDWNGMKSHGMGTNGMEWKGMESNGKESNGNGIGWDWNEMYWKGLEFHETEWNELERNGLEWNGMSWDGIKWNGIKWNGIECNGMLWNGMECIGMECPLMEWIRGSKGMESNGMVWNGMNTNVMQPNRMESNGMEYKEMESKRMETKGMELNGMELNGMGTNGVKLYAVEENRMECKRKERNGLEWNGIHWNGRECSSEMESNHKEWTGIEWSRIEWNRMEWHQTEWNGQPRNGMHSNAMESKQMDWNRMDSTGTDSNGMESNGRESNGRESNGMDSKGKDCNGKVSNGMEINGMEWNRMKWNGIGWDWNEMYWKGLEFHETEWNELERNGLEWNGMSWDGIKWNGIKWNGIECNGMLWNGMECIGMECPLMEWIRGSKGMESNGMVWNGMNTNVMQPNRMESNGMEYKEMESKRMETKGMELNGMELNGMGTNGVKLYAVEENRMECKRKERNGLEWNGIHWNGRECSSEMESNHKEWTGIEWSRIEWNRMEWHQTEWNGQPRNGMHSNAMESKQMDWNRMDSTGTDSNGMESNGRESNGRESNGMDSKGKDCNGKVSNGMEINGMEWNRMKWSQKEWNRMARNRIMESNRMKWNGIERNGMKWNGKDSNGMQSNGMESNGMEENGRKLARNGIEMNGELNGVDGIGWDWNEMYWKGLEFHETEWNELERNGLEWNGMSWDGIKCNGIKWNGIECSGMLWNGMECIGMECPLMERIRGSKGMESNGMVWNGMNTNVMQPNRMESNGMEYKEMESKRMETNGMELNGMELNGMGTNGVKLYAVEENRMECKRKERNGLEWNGIHWNGRECSSEMESNHKEWTGIEWSRIEWNRMEWHQTEWNGQPRNGMHSNAMESKLMDWNRMDSTGTDSNGMESNGRESNGMESNGMDSKGKDCNGKKGFEWNEKELNGIEQNGIKSNEMEWNRKEWNEMEWKGFEWNAIEWNGIERNGIKWKKTGKKWNRNEWSVMERTQKELNVIEWSGVDSNIMDWNGMKSHGMGTNGMEWKGMESNGKESNGNGIGWDWNEMYWKGLEFHETEWNELERNGLEWNGMSWDGIKWNGIKWNGIECNGMLWNGMECIGMESPLMEWIRGSKGMESNGMVWNGMNTNVMQPNRMESNGMEYKEMESKRMETNGMELNGMELNGMGTNGVKLYAVEENRMECKRKERNGLEWNGIHWNGRECSSEMESNHKEWTGIEWSRIEWNRMEWHQTEWNGQPRNGMHSNAMESKLMDWNRMDSTGTDSNGMESNGRESNGMESNGMDSKGKDCNGKKGFEWNEKELNGIEQNGIKSNEMEWNRKEWNEMEWKGFEWNAIEWNGIERNGIKWKKTGKKWNRNEWSVMERTQKELNMGLDGIGMKCTGKDSNFMKRNGMNWNGIDSNGMECHGMASNGMTSNGMESNAMECYGMEWNALEWNGSKGMESNGMVWNGMNTNVMQPNRMESNGMEYKEMESKRMETNGMELNGMELNGMGTNGVKLYAVEENRMECKRKERNGLEWNGIHWNGRECSSEMESNHKEWTGIEWSRIEWNRMEWHQTEWNGQPRNGMHSNAMESKLMDWNRMDSTGTDSNGMESNGRESNGMESNGMDSKGKDCNGKKGFEWNEKELNGIEQNGIKSNEMEWNRKEWNEMEWKGFEWNAIEWNGIKWKKTGKKWNRNEWSVMERTQKELNELNGVDGIGWDWNEMYWKGLEFHETEWNELERNGLEWNGMSWDGIKRNGIKWNGIECNGMLWNGMECIGMECPLMEWIRSEMESNHKEWTGIEWSRIEWNRMEWHQTEWNGQPRNGMHSNAMESKLMDWNRMDSTGMESNGMVWNGMNTNVMQPNRMESNGMEYKEMESKRMETNGMELNGMELNGMGTNGVKLYAVEENRMECKRKERNGLEWNGIHWNGRECSVMDSEMESNHKEWTGIEWSRIEWNRMEWHQTEWNGQPRNGMHSNAMESKLMDWNRMDSTGTDSNGMESNGRESNGMESNGMDSKGKDCNGKKGFEWNEKELNGIEQNGMKSNEMEWNRKEWNEMEWKGFEWNAIEWNGIERNGIKWKKTGKKWNRNEWSVMERTQKELNVIEWSGVDSNIMDWNGMKSHGMGTNGMEWKGMESNGKESNGRE

SEQ ID NO: 934631 - protein, 172 aa, Homo sapiens
MQPEAVLRESKSLILCCLKPGPSEFILVVVQTGDKVHCAGLKPGAVGSGLALRQKAVQINASVRRQSLESAIVSVVGSFQWILGLADFKNEAADLCGHPNCCWELGDDHSSYFLLDRGEEGALQLARRRVIARWMSRDLERGEAMSPNSRGWYKSLKGLYGPVLMDLSSEGH

SEQ ID NO: 934632 - protein, 526 aa, Homo sapiens
MDSRHCAQAHSIQIMKVEEIAAGKCRRPSVKQFHDSKVKFPLPHQVLRRDVSTTWHSNNDDVYRVPPIDRSILPTAPRAAREPNIDRSRLPKSPPYTAFLGNLPYDVTEESIKEFFRGLNISAVRLPREPSNPERLKGFGYAEFEDLDSLLSALSLNEESLEIGILTKQIRTGGLVLLQTALMTRRGDDSFGDKYRDRYDSDRYRDGYRDGPRRDMDGYGGRDRYDDQGSRDYDRGYDSRIGSGRRAFGSGCDDRRPPQRPKLNLKPWSTLKQDDSSASTSQSTRAASIFGGAKPVDTAAREREVEERLQKEQEKLQRQLSEPKLERRPRERHPSWRSEETQERERSRTGSESSQTGTSTTSGRNARRRESKKSLENETLNKEEDCHSPTSKPPKPDQPLKVMPAPPPKENAWVKRSSNPPARSQSSDAEQQSPTSGGGKVAPAQPSEEGPARQDENKVDGMNVPKGQTGNSSRGPGDGGNKDHWKESDRKDGKKDQDSRSAPEPKKPEENPASKFSSASNYAALS

SEQ ID NO: 934633 - protein, 147 aa, Homo sapiens
MIGMDKENVIYIHNGILFRHKKNESMSFAETWMELEVIMLSEISQAQKDKYCMFSLIVTEAFEEPTEEPKTQRVGSHSTKEEMTNPLPLFPTPISTLVRIQIGTGKWREKEENLSLLLFQRHLATTTGLSMGLVGNKASPLSEDGES

SEQ ID NO: 934634 - protein, 135 aa, Homo sapiens
MESGEIKMYLAGGKKYRSQYSKKLSASYVQGRHSTVTRDPRRSESQAKPPTLCLLSPELHPDPAQIFKSCGMVSSCTNPLGSERIKRANYAEKKGSKRAKRKQGYVPSYGDGSLPCRIPQTMPGELQLPISLLEE

SEQ ID NO: 934635 - protein, 135 aa, Homo sapiens
MAPASASGEGLWLLPLMAEDEGSWHVQGSHGGREEARERSGMEVPASFKEPAHMGTNRRIPLPESHCNWQHSIVIKGMAFGARQQTLESQVSPLLGVIWCSGVYVQVCYIGKLHVTRVWCTDYYITHVISIVPDR

SEQ ID NO: 934636 - protein, 142 aa, Homo sapiens
MGSMKGRVQGAVTKSWGLVLIMERQGRPSRGNDTEVKFVITDLLKPTSVNLSNTFSSQLCSLGGEELQSFGGEESCQTGTFKSAEAVCCLLFYYALPPEVESIEPVGLAELWLREVKKLQKKSLKLAEVGSWGLRKEANSTT

SEQ ID NO: 934637 - protein, 195 aa, Homo sapiens
MLVTFRWGFGVDVLFVDVESIPFCLLLLLKQSGPSAAGLLKFAGGPLQTLFAWVSPVEAAEQQSLLPVPSSGSFIPEGHLPDACQTSPQAVCPLAELEHCAGRSTVLFRAGRQECLGLLKLHPQPPLPPGALSQGDGSFIYKPLTEAAAFFSEMPCSERRNLERQSGYSSFAKLPWAPPNSNFLVALCTLYYLQY

SEQ ID NO: 934638 - protein, 139 aa, Homo sapiens
MVVVFDGGSSLPVHVTYYCPLILLDLNPGVQFLSYDGLLLGQTDFMPWIQTNHSIDYFYDGAGAPGAASFLRVKACQCLIPLIWQQVWTLVEAAQIIYEVFYILHSHPRIESQLEHQGLPSVAPCYVSSTYELLWICIN

SEQ ID NO: 934639 - protein, 1026 aa, Homo sapiens
MASDQDKCRASSRKSSVALISGVDITPKAVCGVDIVPGPEALISGVDIPLESVAVICGMDIPMPHPEAVALGSGMGIDPETEALINDVDLAPEAEALIGAVAILPDTVYVVCDKDIDLEFATLVCNVDVAPEAMVSISGIDISPEAMADIKGMGIVPEAGALINGLDIPPETMAVVCAVDICPEAEALINSVDTVSQAEGLLSGVDIVPEAGALTSGEDTPPEAGARTGSVHMSPEAVGIICDVDVTLESGALISGMDIPPEAVDLVSGMDIAPEMGAFTCGMDDIIPEAVAVISGDLRGVAISPEAGALISGRDISPEDEALVSSEGLSPGSEVLISGVDIVSEVQALTVGVDITSEVGEFICIPPAVMDFMGDMDIPPGSWTVAVICDVDIAPEAVSLISDADNPPEAVSVICGMDRAPETVSLISSVGIASEAVVVIFSVNIVPEALGVISGLDNAPEARDLICGQDITPEAVSLINSVDVDPEVWAVISGVDIAPEVMAFICAADVNPEAMVLICGMDIASETGALICSMDIDPEAGTVNCGMDIVSEAVAVTGWVDIAPEVGALLSGVDIFPEAVALLYCFATAFIEPVGIAPEVLAIVNCADITLEAVADICSVDITPELGTVISEVVMAPEAGTVFCNVDIFPEAGAPISGVDIAPESKALTGGADITPEAVALTGGLDIISESTFCVDHGDIAPEPGAGIVWVGITPEGRAVISAGDIASASGAGFGNVDISPASGTDSSGVDITSEPGDDIKSDDIIPESRSDMSGVGIPPEFWVLVGWGDVPPEATADIISEDIASESVPDISSEDISPEARAVISTLDIASVSSSVICNGDIASELGAGTGCVDITPGFISCIRIGDNSPESGASINGVDIASEDEVLIIGVHTTPEDGAGIANGDISAESGATISVADIVPKSGIVIIPGDITPYSEVDSNGDNVPESKAGISNGDSAPESEAGISNGESAPESEAGIRGGDNAPEFGTPIRGADMVSKTGDVINCVDVPPGSEAEVETIGNCT

SEQ ID NO: 934640 - protein, 159 aa, Homo sapiens
MQRKTSFELASGVEEMEQPDKSRGESEPTEQLKEEQVHLASALDTRRGRPVPTMSPHLDPNQLGILLKVLRKEKEDGDYPDMMATHPSSRYEACSSGITLEKPEKLRSGKVKEEETLLERAYKFSQGFQMKVPTRDPTRLSFLREKYPGMVAAARKFEK

SEQ ID NO: 934641 - protein, 199 aa, Homo sapiens
MQLLYWPEINLGPTAQKADLPTWTGYGVGSSQLGVMKDVLLRAGRTTTLFKAVRQGHISLQRILLPFIWLCPAPRGGVYRGRQASLSCGGLHPVQASRLLCLPTQALAMAGTPPPALLPPCSLISDCCASNVRGSVGVVPSEPGMGYNLLVCHLLRPLEKCSIRVGVTQFSRCHLSPLSLTTKGNSLTPCPSQQVAETL

SEQ ID NO: 934642 - protein, 124 aa, Homo sapiens
MRCFYFFCGSSVTSGHLDVYVQVTGDAMAWPGLRGLTQSSQICQTNLKHTALSLHIYHSPYPDFPFISFIFVCFLQYPSQVTSSRKAFPKDVIFAHHKVCKFTLQGLIFQACNILNKPEWEIES

SEQ ID NO: 934643 - protein, 146 aa, Homo sapiens
MREPRRRRLLHGGLIGGQSPNVGGVEGMGPFWVKTTPGPAAAAAYEVQTPLAGSKQHTDNYAGKEGRDFQFLATKDSHFPARLNNHLGRLAKRKATSTAYKPITVHTAQTHWAYKDAGPAPECAFNPKLGKLPQNVQEISYKTFLV

SEQ ID NO: 934644 - protein, 156 aa, Homo sapiens
MAAAAHVQWLLRRCWLQQGRHGWGYLFCGAGEIQEQAGVLLPTKLSEWEPRIPRHICSLPAVALDPGIPVLSRVQEAPAPAGSEVPAPAMQMVTAEAACSTSGPSAASCGASTCAGTWSYPSRCSSQNAWLCTVARPSACWPTHPSLLRAWLALDS

SEQ ID NO: 934645 - protein, 145 aa, Homo sapiens
MRRLVTYVYMCHAGVLHPLTRHLALGFKSDELGYLAKEIFKQENVEAAAWLLVIVYSKKRVQRNNLKMKFLIKMEVEHKDLKSFQPDFVNNKKVCLEEKTKSVAKLLFDKVSMDRMNPDDIHQDNGRMTPKAFQRSWRMLCPLQA

SEQ ID NO: 934646 - protein, 130 aa, Homo sapiens
MFSGRLRARALIKVVNSGKSQRDRKGSSFPDILAPSSSRDHVGRHCYSPSRDLLTLMDCKPESYQSFSNRRNKVESRKTLEYGKQTALCTWMMFCPIYHCSFLRAGTMSYSLLHLTPWPSPLPNTVPDIL

SEQ ID NO: 934647 - protein, 156 aa, Homo sapiens
MSKSSLGLPEKQMMLCFLYNLQNMIQLNLFLQITWSQSGPSAAGLLEFAGVSLQTLFALVSPVEAAEQQILQNSKYCCPILLLEASSQRGSYLYEVSVSPYWEVTPKWNFQFPTKLPVILPWLKEASSDTTAAEKSRNTSLLLGASGSPRFPCSLH

SEQ ID NO: 934648 - protein, 162 aa, Homo sapiens
MTFKSDSICNSEMTHQYGVSEWTSFLLMLMHFFVFVSFPSNSQAPLLQSYGIFIYKPLTGAAAFPSEMPSPERRNLERQSGQSGLAELQWAPPSSNFLVAFLHCEAKIAYSSLSNCRRPTPTKLEHPRSISDCCAGSENLKPVDLSFLVSIGKLTPITRSLY

SEQ ID NO: 934649 - protein, 159 aa, Homo sapiens
MDKTTKNCRGYYEHLYANKPENLKEIDKFLEAYDLLRLKHEEVILELHQAGTTVCRPAVSLQLSALWRLALLSLPLACEPGDLKSLSDPRVWAHPCLSTTQDSKSHLARRFGCGCGHLICPHASQGNMGLCLPTEFRQKQYHWTGSSSGCGPSGYERQT

SEQ ID NO: 934650 - protein, 178 aa, Homo sapiens
MGKDVTTKTPKAMATKAKTDKRDLIKLKSFCTTKETIIRVNRPPTEWEKIFAIYPSDKGLISRLYKELKFTRKKTNNRIKKMAIIKMSGNYTEYYAAIRMNEIMSFAATWMAAIMLSELTQEQNLIPHVLTCSHAPSQCSESVDSFPTSVLATDLGLALPVCALQAWGKLRLFAYSSA

SEQ ID NO: 934651 - protein, 172 aa, Homo sapiens
MNPSGPGLFLVGPSSAGLLQFAGGPLQTLFAWVSPVEAAEQQRLLPAPSSGSSLPERHWPDASRSSPQSWCTVLAECLLSGSAALFRASRQERLNLLKLHPQPPLPPGALSEGDGGFVCKPLTGAVTFPSEMPCSVRRNLEKQSGHSHFAAPIPDLTASLALSGENLLLKPQ

SEQ ID NO: 934652 - protein, 167 aa, Homo sapiens
MKHSSHTPALDCPTLTLTLENLGNMAKPCLCQKKNNNKKEISWVWWHVPVVSATLKGEVGGSPEPRRLSLGDRVRPCQKKERRKRKKERKRKKERRERERQRKKEERKKERKKERKKERKKEKKKEREKERKQEKKKERERKKERKKRKVKFFLPKPRLKSHYPGVT

SEQ ID NO: 934653 - protein, 137 aa, Homo sapiens
MLHFPRPLCAHTPHPVPIKPQDPSGQTTTSGWTSRDAHQQKENKWLDVERSTAVEEHADRHQQTPAHQEAIHWRNDTEFGPGDLGPHQLRCQIRHSIKSRKLTRSEKGMTGESRYSLCGNSLKKNNLVVQTGFKKRL

SEQ ID NO: 934654 - protein, 165 aa, Homo sapiens
MCALTVVISLQNLKVAWQAGTQEWEWVVIKPGNIRVWVLFTCACFSFDLFCHVLSSKKALTRSQADMGAMPLVQPTELGCTGLQPLCMAMRAHPLHQCSLNVKHGVKGNHFGALIFNDFLVGFQTCMGPVAPLLWTVSPIWNRVFIQGLYLHCILEVTSTTQWLY

SEQ ID NO: 934655 - protein, 165 aa, Homo sapiens
MAIIRKNQTDQIELKNTLQECHNAITSINCRIHQAGEESQRDQIYDSLVSLKEGEKASNLENIFQDVIYENFPNLFGEANIQIQEMPRTSASYYTGRPSPRHIVFRFTKVEKEEKMLKAAREKGQVTYKGNPIRLTADLSAETLQARRDWGLYSAFLKKRIQPRI

SEQ ID NO: 934656 - protein, 159 aa, Homo sapiens
MIPSPKKWTEHSIGPSAAGLLEFAGGPLQTLFAWVSAAEAAEQQILQKGTCCCLILPLEALSQRGTQLYEVSVGPYWEVSSSLATWGCRLLRLSFAGKGNSPTRCASQVAKMSQAASLTIWEKPQLQQLSSHSSPMMGERLIPVPTAEALSTLITQFWL

SEQ ID NO: 934657 - protein, 154 aa, Homo sapiens
MGRNQSRKAENSKNQSDSSPPKECSSSPATEQSWTENNFDELREEGFRRSVITNFSKLKEDVRTHCKEAKNLEKRSDEWLARINSVEKTLNDLIELKTMARELRDASRSFSSRFDQVEERVSVMEDQLNEMKREEKKYRERHKDTPREEQLQDT

SEQ ID NO: 934658 - protein, 127 aa, Homo sapiens
MTRLRCLHCELWMDSLSSDQGLCFALTKSTKYTELLVCHNASFWECQITKGLQIYCSFQQPYQIDQASKYYYPHNIDGKASEIERDKVMIPRSHSSTYYKGHFSQKILPEIAMFLLKSGFAFILRIP

SEQ ID NO: 934659 - protein, 166 aa, Homo sapiens
MDSGQAGRQERLSLPKLSPQPPLPPSALSQGDGSFSSKPLNGAAAFVSEMPCPERRNLERQSYYSSFVELRWAPPSPNFPEALFTLLLGSMGVGSTELDHFAPWLQPPFQIGVPGVTGVRTLRLREFNDLSQDCKVSKFYIQGLKPGLFESPYTNNSPIFNVTSNI

SEQ ID NO: 934660 - protein, 195 aa, Homo sapiens
MTTATPMSPFLLAQEEQVFCPPYSLHLVPPHSPGPVSVNDYVTFGNVDLLRGPMVILHKPQRSNGPKPLGPQSLYCEIAEGLPKPWVVELQVLLLPELGAQTPRSHRDSKDWVLLKPLYSPEQALFRGGPAVWGMVATGKGRPGERSRLSFKEAALRLKDPGTPDSTAIREQLLETPWIRKCFWSCQMKERKKDE

SEQ ID NO: 934661 - protein, 141 aa, Homo sapiens
MPTRALLCEVSVGPYWEVSPSQDTWGAVRQRPCPEKRNLAVWPQQPCRAAVDFTQFELPSGFVYTVNIKPPTQASAMADTPSPTKFEFPGLISDCCCAGSGNFKPVDLSLLGSVGINKSLKSSLPLELRYKKCLRDSFRMK

SEQ ID NO: 934662 - protein, 139 aa, Homo sapiens
MRFRKGKPDSYCSSFSNLASPQSMERVLVEPKLSTSSSGKENTEKLHNPISRSKVHSGFVLLSYEVVVSGAWKAALEQWLQGPSAVIGLSVDISHQDPYPGSCTLEDRLWPHQAKELELDITEFEDRYCLVPFPVIDLY

SEQ ID NO: 934663 - protein, 284 aa, Homo sapiens
MVDKTFYESPDGCYWKKHYRKGRQIHIQNSHSNFCNLTNANIPVQIWVLLATSSPVLTDASADSTPLHPNSNVFPYSPPDSSKRGPDPSGSSARFLAGMHQPCPLATQCATVLQVTLKRQNLQAIGVEYCISTLDSHKYFRRASYCQISQIEDLAAFEDDNKANRKTKAFDVKGDVGHVCSRHCLLSASPFLLLSLLQHLPNWTSNPRDITGSTALFRAGRQRCLSQLKLCPQLPFPPGALSLGDGSFIYKPLTGAAAILSQMPCPVKRNLERQSYHSHFTMLC

SEQ ID NO: 934664 - protein, 142 aa, Homo sapiens
MGMEKITPHCGLTFKAQTASCLFGKHSDGWRKKLTDIARVHNFVYLILSQSVSILSHLSTYFFPRLPHIHTADPLHSTSCMKQQSPLSPAMSFHRPLLKTCQLHPYFSGAWQSKIKSEAEDTLVKTPNSSSAPTLMATKLYS

SEQ ID NO: 934665 - protein, 178 aa, Homo sapiens
MILINNLVRSESFGVYSRVVKENFFDDVIFKWAQVAAGCHTGQHSSKEKGGKTGPIFDPLWQLKGFQDPQVRQKGRGAWARGEEEDMFLMSSTKALAVIGHHLALFLHVVIGLGCVYTDPLSQAGGLNVKYELQRHRFYIPHSSPAPTVLVQLTLEACAERHSIYLPGLGHFRDDGNY

SEQ ID NO: 934666 - protein, 148 aa, Homo sapiens
MSWEILQWWSQVRTNTGAAVILGQKCENTDCPDAEQVTFIKSSPSNEHKRKLMPHEGKQLVSGHLPGRKSHLYGSQAVTPHSYPLSLIRNDSLVTGSMLGEVQQTAGPGSIFVHLHVDVDLTQNHLLKRLLLTVPSLPHSSHAWGNFQ

SEQ ID NO: 934667 - protein, 213 aa, Homo sapiens [sequence omitted]

SEQ ID NO: 934668 - protein, 160 aa, Homo sapiens
MATGWCSDCADGVWHQEGNQGPLNIQCSCSCFSIWDLNMGKIANMEESQEMEFPVDTEVKMGQQLGLYISGKQARGVKPAAFLLKGSGSCIQEVQDTEAQNWDGVQGISRETLMLVAWSIDQQHRHHLELIGNAEPQAPYQIYGIWIFLLTKFPDDLYTH

SEQ ID NO: 934669 - protein, 146 aa, Homo sapiens
MHLAWSAPLQITFSPVSAVRTNISNAGPHEDQKPRREPEKFLMLKGWPEEERSEETVKKWFIEVGEGRNTLVKAGETVLNIWSKGQVKPPSVKGIMRSEAERVRSDVAQAKKCQELMATTRSFKETRKYSTQSHKGSVVLLMIPCF

SEQ ID NO: 934670 - protein, 180 aa, Homo sapiens
MRPERKVILWSSVGGVMRPKGCSDLLSANFQIMFSLFPRKLVAAAYIGIGVKYEPFKKMSEHLHFYRKVKQSLKRIPPRVYSSRSSEIPGCSLQKKAYLQRGLSSLPVQRLRSVEGGVQICAHIGEECSEHPHSQIGWCGENSVTRDGENIVKRQPFTNQEESLYHSPTILAPSSQVSSL

SEQ ID NO: 934671 - protein, 594 aa, Homo sapiens; identical to SEQ ID NO: 791873

SEQ ID NO: 934672 - protein, 648 aa, Homo sapiens
MYQCPVLNTMKGLPVPLSLPEGINPEVWATEGQYGRAKNAHPIQVKLQDSASFPYQRQYSLRPEADQGLQKIVKDLKAQGLVKPCNSPCSTPILGVQKPNGQWSEERIQPIPAYPHPKTPKQLRGFLGITGFCRIWIPRYSEIARPLYTLIKKTQKADTHLVEWTPEAEVAFQALKEALTQAPVLSLPMGQDVPLYVTEKTGIALGVLGVLTQKRKEREIEGNCQADIEAKRAARWDPPLQMLIEGLLVWGNPLQETKPQYSAEEIEWGTSRRHSFLPSGWLATEEGKIILPAANQWKLLKTLHQTFHLGIDSTHQMAKSLFTGRGLFKTIKQIVRACEVCQINNPLPYHQAPPGEQRTGHYSGEDWQLDFTHMPKSQGFQYLLVWVDIFTGWAEAFPCRTEKDQDVIKALIHEIIPRFGLPRGLQSDNGPVFKATVTQGVSQALGIQYHLHCAWRPQSSGKVKKMNEALKRHLKKLTQETHLAWPALLPTALLRIQNSPQKAGLSPYKMLYGWPFLTKDLVLDREMASLVADITSLAKYQQVLKTLQGTFKLCILPKEPENPGDNASYSCEPLEDLHLLFKRQPIEAVKLQMLLKIEPQMQSMAKIYHGPLDRPASPCSDVDDIEGTASEEISTARPLLHPNLAGSN

SEQ ID NO: 934673 - protein, 157 aa, Homo sapiens
MTAATAINTNMGEEIPELQRPQGEAYGLLLCEPLMTLYLCECLGKFRHQHEYTLVLAQRDATLPCFPRPLATRKVLHCTVMYKVPFEIMYCRTFVLGPTPLADSEPLGSYLPSLIQTRYFIREAVNEAMPLPVDTSLSSQHNCLAGTDVFICQPDPQ

SEQ ID NO: 934674 - protein, 138 aa, Homo sapiens
MYADGEIEQALTRNWASLTSLNYSGSSGQRLDANMTKVISKCKNLLLARPDRANSCQKSGHRKLSGGASVEENFQGPVQGLCPLSPVPAPVPQKMVQANSPCSGAIEPELLILLALGNRGTRLLVSLRPPAAVRCHLE

SEQ ID NO: 934675 - protein, 146 aa, Homo sapiens
MRVHNSYPYMRYLTFYYKTGFMLDDFSQCYINVNVLGMLWSSLINSLELPDCFTSPFPVIHGKSHPAVYGMALHLRLEEVEKPDLVLKLHKEGSAGGSLDLSPGEAMSVVDIWRQSDSGDSQTSLLSKQPRVWQAKDSSCVNRIGV

SEQ ID NO: 934676 - protein, 134 aa, Homo sapiens
MKDPVKIQFILSHLEVCFLLTVALYPKQAFSWLSVIFPRCNPESFTPCLKPYCLQEKVRLFKLAYRAIHDLIPAHPDFSPSNPFIQLQEYDNLSPISFPLHKLFSLDAPLLCLQADLAVFSFLLSQYFVYILEV

SEQ ID NO: 934677 - protein, 154 aa, Homo sapiens
MMFILCVGGGGSSFASPSLDTSPSFLFLLFLFLLNFLGYSKFVDFSYMILHCLINFLKAAEILNSIFMSAYIKFGRIDIFNDIKSSFHEPGILNLFRSSSVSLAVFCSFHCTDLIKNFVKFIPNCFLCLHAVVNRIIFLTSFFIFFIATIQKYN

SEQ ID NO: 934678 - protein, 168 aa, Homo sapiens
MLRKHKGTLERSETTTDLPPTYLEVSVGQKSGHSLAGPLLKVLKETFKAVKSMERVLVEPKLSTSSSGKENTEKLHNPISRSKVHSGFVLLSYEVVVSGAWKAALEQWLQGPSAVIGLSVDISHQDPYPGSCTLEDRLWPHQAKELELDITEFEDRYCLVPFPVIDLY

SEQ ID NO: 934679 - protein, 139 aa, Homo sapiens
MLTSLFSAQLSQNLKGPKGATVKALARPLKGLLCPHSLGPVPSRLDDGPSLAPILHIKARGSVLAQMPGHFSSQPPSVAPRGLKDKVQLHGPEPSGSCSLPRSPLPDFLQAHIPAPTRALQCQCGKGLCPQDPAASLAS

SEQ ID NO: 934680 - protein, 155 aa, Homo sapiens
MIKVIIISNGTRGLVSWPPDAIHREGSSTSELFPWKVQNLDGIMRKHQPSPNTQKCCKITGPYAPENCRKPRRTKSWSRLKETKELGQLHRTCDQRCSFSGKNIIEKILLAQSINSKGVSSCKHWPRLPSILPWKFFILFLLYDAFKQDEIQLHR

SEQ ID NO: 934681 - protein, 176 aa, Homo sapiens
MRSIPIATACTIYHKFFCETNLDAYDPYLIAMSSIYLAGKVEEQHLRTRDIINVSNRYFNPSGEPLELDSRFWELRDSIVQCELLMLRVLRFQVSFQHPHKNWLNRHSWQRTPVAVTAWALLRDSYHGALCLRFQAQHIAVAVLYLALQVYGVEVPAEVEAEKPWWQIYTMDTEIP

SEQ ID NO: 934682 - protein, 126 aa, Homo sapiens
MALRPHSPHFIGLLFPFSTWQHRKTHFPGRLPREEKNGFKVIQSIRVHASKTGKKTNQAGHAGPSWRDIMLPQKNRKFVSVNPLSTSFCFKHDTGSTGENRNSVKQLSPGSKGLRRGLGEARVQVV

SEQ ID NO: 934683 - protein, 141 aa, Homo sapiens
MVLDQIQAHQGPRHSTWVSLFAIQDPRALQLAGDECWQDRILFFKAAQIPENCQEERLSLLLHRDCGYPSSYGLMPRDIRVLSLSLWMELFKFLQGGTTQPEEVVWLQSATAGVLSCGENLLGPSHLSSLAPAGEKSGLEL

SEQ ID NO: 934684 - protein, 181 aa, Homo sapiens
MMDAPPPTKLEHPSRAPLLKVCWSLLEVRSRSCLPGYHQRRLQNSKDCCLLLPLEALSQRGTHQMSAEALLYEVSVDPCWEVSPRQEAQGNVVSVFRPPKSCHCNEEDKVCCGLNVSSQIHVLKHNGQCDSIKSMEPLKGLEYGCNMIRPVFLEVYSSWQDWSIERLEQRNQLRGSMREYM

SEQ ID NO: 934685 - protein, 213 aa, Homo sapiens
MRSIPIATACTIYHKFFCETNLDAYDPYLIAMSSIYLAGKVEEQHLRTRDIINVSNRYFNPSGEPLELDSRFWELRDSIVQCELLMLRVLRFQVSFQHPHKNWLNRHSWQRTPVAVTAWALLRDSYHGALCLRFQAQHIAVAVLYLALQVYGVEVPAEVEAEKPWWQLPFRGPGCRTGVLASTDVAGVPGGGLPQRRTAFTELSGNLTVITGY

SEQ ID NO: 934686 - protein, 146 aa, Homo sapiens
MRVRARCGAQGAGCGALPAGLGPRGDARPQCRKDTQARRGAQVPRAGTRVPLPAAAPPAGSSSHPHPRLCPRRARAHPGGARAPRAPLTRAWARPPPRPRLRRALSLRAGVRRATIRSKDGKAWARGGLAGGAGRDPLRRARAAAE

SEQ ID NO: 934687 - protein, 141 aa, Homo sapiens
MVVGSFAHLLEPPPQRMQSMGGKGSSTAEVVAERLSVAPGGFVQGAFDQRTPVGVTGDPGWKSPPGYEEWDEEPTVQCCYRWLAGIPSQGVLSCKFLWKWDLQAFTAQPFDSASFLEVHQGEPVTGMGPELESAGSGKVLR

SEQ ID NO: 934688 - protein, 139 aa, Homo sapiens
MGVSPKAYYNHFLATAYVSSRPWASTISQQSLTLHLPHYPEMSVSEVHLTDELTRHQLVIQTSRAWVEGRPILKERPLMPGSTSNHGLHTSYTITVLPSCLRCSSDRPQSSMHCARQSCGHGCLHIDFKGCPQRAVELL

SEQ ID NO: 934689 - protein, 158 aa, Homo sapiens
MGQGHEGLIRYPRSLNFIFKILDTNENVPQLSWGSMVIFTVLMSIHGHGCVSICLVFRLIGDPESSQGLSASSSTPVFHLALQIDSAPGPSSAGLLQFAGGPLQTLFAWVSQMGAAEQKRLLPATSSGSFVPEGHWLDASWSSLVEQKIQPARSYLNS

SEQ ID NO: 934690 - protein, 240 aa, Homo sapiens
MYPHFLAFDTGASRSSADRAAASTTNVSTHASNIPTNLGFHSLLYHVEHDPLENDKLQVRSPPEPRCADHFDPSLQSSPDRKRKCLGARGEPGQTPLWGGRGAGRHPSAPRMLHAPPTTRPVPTLPPPRPRPLPARSSAHQTETPLQDALRERYPEAKSRQAQEPPPPARVSWGRGLGGLLGGGGGLGLGPAGSRKGGRLPRLPAEPSHRSRGWLKSILSLICLVLLSSDARSSAHLGVI

SEQ ID NO: 934691 - protein, 369 aa, Homo sapiens
MALAMLRDWCRWMGANAERSLLILGIPDDCKEHEFQEAVRAALSPLGRREQPGCEEESFESWVEHAKDMLQLWCHASEREKKRWLLESLGGPALEVVSGLLEEDTNLSALDCLAALGQVFRNQDTRMTSRLKFLTCTQGPQEGLFAFVVRLEGLLQRAVEKGAVCPALANYLRLQQVLSWARPSEALQDTLRGMQLEKRPPGFLGLLRLIREMEAWAAFPARSQQGVAWAAAPVESEDPAAAQASPAQGNASEAGPGAEDAAEAASATKEAARGAPAAGEGESAPAGPEGLGQARPIEVPWGSSPARMSSAVWVFPRGLSWGPEGLIQVRGQEARKPPLEGLQTILEEPENEDEDGAGDEGQPKSSQGK

SEQ ID NO: 934692 - protein, 172 aa, Homo sapiens
MLEEREQKYNLRTISILWLTVIIHVEWSLIVVNVVLVYYTDDICTGPDDLESLNLSKVFRWSGPRWVFNMLLYRLPPTTQKEARHLVWMFEFCRQHMLHLIVPHQCTQQVICRVACFRGEIQGKKRLCDRSRPLDPYDHVDSTGTGPLTHWEATRSLWQVPVGETHSKALEF

SEQ ID NO: 934693 - protein, 134 aa, Homo sapiens
MFKGGKDGSRKTEMMVGSSGGGVKWQDSGYVLRESMEPQKLLIIGFLLCSLTCLLLETVASSPLPLSALGIQEKTGSKPRSGGNHRSWLNNFRDYLWQLIKSALPPAAIVAFLLTSALMGILCCFTILVVDPVH

SEQ ID NO: 934694 - protein, 136 aa, Homo sapiens
MSTRLFYAIFQAIIRIFQNEETEALRAYITSLRSYNCVRKINLAEVSIDCGARVKQDQSSRERAEYNGKIEGSNDCPPSQRHHYNNYLHKNSTFIRTKNQSRKENQTQLSWQPPTALKPVLSEGNCQFQQPELEFM

SEQ ID NO: 934695 - protein, 315 aa, Homo sapiens; identical to SEQ ID NO: 791953

SEQ ID NO: 934696 - protein, 152 aa, Homo sapiens
MGLSKPFYPRLAQSLAGGLSEKLCSPGGLSLAELWGVRLDAGRVSLEEFFKATLTDLCVDLGPGSIALVIAPSRTRTSYIMSIQLKDVGLNNPRKYLEQATKKYVTQQDKMHYTQIKQRDPRDKSSEKMVEPEAGLEPQIYARKSSLQEDFH

SEQ ID NO: 934697 - protein, 144 aa, Homo sapiens
MPRSQLQAQSPLNVFLLSKYTVPTALYPKNNWACLSPGEALHESQRPALQKGPPGLSKSIKKLKLTRPPHLDNEIPGPSFIMIALLPLPSSCFPTRSYICSLPYKLLISVGQRDGFETDLSSPRLQQPIKDFSGNTCLSDWLAV

SEQ ID NO: 934698 - protein, 138 aa, Homo sapiens
MYIKYTLKYNQEAIRGATVTMTDHVRGCRKCGAAGTLRQCCLNKYYLSSVNITGLMVDSGDGVTCTVHIYEGYSLPHAVTELFVAGRDIIKHLTWLLFASGCTFPCILYKALVNNINGKLCNIALEPHKKLCERPETS

SEQ ID NO: 934699 - protein, 155 aa, Homo sapiens
MGTHLLHQHDLDVRHGVKGDHFGALRFDCPTGFWTCMGPPDNVIEKENSFFKEKFKLAAEICINNEEPSVNLQDNDKNVSRACQRPVCQFLPSQDWRPRRKNGFMGQAQGPCSMQSQDWVPCISVAPAMAKKPRYSSGHGFRGYKPQALAVFTWC

SEQ ID NO: 934700 - protein, 151 aa, Homo sapiens
MFLAVDSHPISTNTTGPEGILPGYHRCSLKAQELFNQLVVNAARRGTCPSGKWAPLLPTEGAEMPSNSQILELGTPTQNESHYSHHSWEYAGSHLKAAHLKISPKTYGLLPEYDCWLFRAQGYYTINYVRYSTLYYKIGFVLDDFAQLKAN

SEQ ID NO: 934701 - protein, 159 aa, Homo sapiens
MASKWCSFQKRFLWVSAQLFPKKWPPDCFLPLSSYLYLPVSRPPARGGYRSRPLPPAGIVGEAKLHELALLVSLVASTQRLFHWGAVVRCMVGLGGQFHSAVAAAQPQPQAAQDDFGLAIAVHEGHVQLGVATLQESVHGRGAGRCVHDQSMLVQHRVC

SEQ ID NO: 934702 - protein, 166 aa, Homo sapiens
MHSARTGSFPSRQQVCFWPKESLEMSSRSKTKRILVEQIVTQLKDNFSAFFACVHVTKFWLMRLKWSRYVILFEESPLKGRDHTFPFFFLQYTVRNMDVMAGIPIFILRHEGTYLRNGRVHTEKESGSLKISWYCHTSSGLLTFEILSYLSQPYFMSMLTEEIGFF

SEQ ID NO: 934703 - protein, 144 aa, Homo sapiens
MEEADLELDLESFKSAYQRLKELERRGYIWQRDQCEQIHTDRRRRKEERKKRRRRKEKEEKKKKKKKKKKKKKKKKKKKKKKKKKEEEEEEEEKEEEEEEEEEEEEEEEGGGGGGGGGGGGGGGEGEEKKKEKKKKKKRKKKEK

SEQ ID NO: 934704 - protein, 144 aa, Homo sapiens
MWGQSPHTESLLGHCLVELCEEGYHPPDSKMVDPLTACTVPTGKVTDTQWQLVKAARRGAVPCQATGAELPKFVGAHLLHQCDLGVRHGVKGDHVGALRFDCPAGFQTCIGFSYISIFIFDQHKYFERPSIQQVLCYRYLEYLY

SEQ ID NO: 934705 - protein, 144 aa, Homo sapiens
MMKPELNRKVQCEEGTLGRKSYICKSMDRKYRYSDDCYEEKWKEIGWSCKYPPRTLNVTLEYVDEGTKKGLADYSIDHLCCVLHLKPEKAGHQYWDDDDDNNDNEDDDGVHPIKIKDMQVCYIGKCVPWQFAAPINLSLDLLYR

SEQ ID NO: 934706 - protein, 170 aa, Homo sapiens
MKLNPGLVPASTGVDLEPVSTGAGLDLGFMVASLTVRLTEVVLMRYPAQRGEIWQPGHSGYAKLWWALPSLNFQVALFTLRVKPPTQASVMADALPPPSSISQVDLSLLLFWQREFQASGSSLLGSMGQQSLPAQVSLGVMVFPATRIPDVHGKSMTLFACSTYPFPRSH

SEQ ID NO: 934707 - protein, 143 aa, Homo sapiens
MLSLPPSPTPQQAPVFNVPLPVSKCSHCSIPTYEAMSQQSGESNTLKDQTTEKQTQQLVKRSMSEEPQAMTRQNELENTLEEYEEYEEAIPVPNEGKKGTRNTEGYKEQRKDLPVRPQTLLDLIRTLSQFCCCQSQIKCKEGL

SEQ ID NO: 934708 - protein, 157 aa, Homo sapiens
MSQERGPDPMSQERVLGSHTRKNFRASPQCKVKASLLRKFTRTVLKRSPQISPPGNLVVSECEGEPAGFGQVLRHRNHSPWLLREKGLAVDVRLLPGRDAPWAFVVVSGPGRRRKVDRRGEESREDGASAGRAVGVDIKEQDPDLEKEEMIKTLIIQ

SEQ ID NO: 934709 - protein, 150 aa, Homo sapiens
MGSAFGCVGGYIASTRDLVDMVRSYAAGFIFTTSLPPMVLSGALESVRLLKGEEGQALRRAHQRNVKHMRQLLMDRGLPVIPCPSHIIPIRVGNAALNSKLCDLLLSKHGIYVQAINYPTVPRGEELLRLAPSPHHSPQMMEDFVGLPPL

SEQ ID NO: 934710 - protein, 141 aa, Homo sapiens
MCAPSCAPKEEGAVSGKALRQEHADKFKEQERDGFQREYFQLLSIQCDVGCGFVIDGSYYFEVYDCSRTSHRQNPSDTELKKEAVYSAGSMGKTPVSRAELPESASAAAISQEYSLHSRILRVLWSSRLHLYSCTIVKWKQ

SEQ ID NO: 934711 - protein, 143 aa, Homo sapiens
MEEKTQNGSAEQRVEVSIRQNLFSLPGSRGNRLGEIDHDNSNYEDEDDERPGVKPTWSLGRFPQQQRESLLATRLAEARLGFGAALAERPRACKTEPERSAARLGVPGSAGTEGSAFLAFAARTASSGSLGCGSAERCKDPTV

SEQ ID NO: 934712 - protein, 196 aa, Homo sapiens
MWLGNLRSSRKIQEQTGKDNCLKSWKESGPSAAGLLEFAGSLLQTLFAWVSPAEAAEQQRLLTVPSSGSFVLEGHPPAGALLYEVDALPKEENSREAVWLKRLCQVAVGSTQFELPSGFVYTVRGKKPTQASVMADAPPPTKLEHPRSTSDCCVGSENFKPVDLSLLGSVGMGSTELDHLSCWCSRRHWGMKRDSL

SEQ ID NO: 934713 - protein, 165 aa, Homo sapiens
MWESLELPRDLLNGFDQNADSDMDNEIQAEVVSDGDEEPIRNWSKGDSCYVLAKRLAAFCPHPRDLWNFELERDDLGFLVEEIYKQQSIQENMPPQNIATWYTKYFKLKEIEKTEAGRPLSHLLSPFFSEASHKEFSGLPSQKVGHKTFIPEVSCSIPTDQEEAK

SEQ ID NO: 934714 - protein, 239 aa, Homo sapiens
MVNDGVCWGLIDTWGLHSSEVVLLDVNTAQAVLAHVFVQVQEELQGGLVGGAILDVGHFHGDSLFELDLENVRGSGGFGRVLGLRGETWKCLVLRVLQDSSLIADLHEVLVHVPQVLGSDWDGNPVLLCVFHKVISDLEPVVELGHPPGSNDLYLGGPESSRPGERGAQEVVVLIQCAGLDGQPDELLHKLLADFLNEHLFAPKLQCLLPGFLKVFLLASVGHVGNDVIALFLHYDFLT

SEQ ID NO: 934715 - protein, 290 aa, Homo sapiens
MSSKGSVVLAYSGGLDTSCILVLLKEQGYDIIAYVANTGQKEDFEEARKKALKLGGKKVFIEEVSKEFVKEFIWLAIQSSALYEDHYLLGTSLTRPCIARKQVEIAQQERAKMPKFYNRFKVRNDLMEHTKQHGIPIPVTPKNLWNMDENLMQISNEAGILENPKNQAFPGVPMKVTNVKDGTTHQTSLELFLYLNEDVGKYSLGRIDIKENHFTGMKSPGIYETPADTIVYHAHLDIRAFTMDREELVSMNVQVDYEPIDATILEDGKSKIKVLTSCEGFVLLHFMEEG

SEQ ID NO: 934716 - protein, 128 aa, Homo sapiens
MLTVGNLESYMHFMRKSLEYFQTFLLASNLEWISTHTLLVTWANPEAKVQQTLACCAVYQVLMIMFYLSKVLGAGRDKGTRNGADIVGSKEDDTGEGILPQLVQSLEHSSDEIAAHEGLSEFFREATL

SEQ ID NO: 934717 - protein, 141 aa, Homo sapiens
MILNSGPQQLSNGIMNIKKERKKIQINTIRNKKDATTDPTETQITTREYYEFLYAHELENVEEIDKFLGTYTLLRLNWKEIKSHHPHTKIWRRQKTKQKQTNKKTFRPISLLSINAKILNKILANLIQQQIKKPHLHVKNC

SEQ ID NO: 934718 - protein, 220 aa, Homo sapiens
MTYFLLNGDEEFIEGWSKGDTCCILAKRLVAFFPCPRDLWNFELERDDLGYLVEEISKQQRIQKVPWVLLKAFHFKRETEHKSSENLQPDNAVEKQKQKQKPCFEEKSKLAAEICISSKEPNGNPQDHGESVSRPCQRPSWKPLPSQAQRPRREKWFGGLGPRSLYCVQPRDLVPSVPDTPDVAERGQYRALAMASEGRSPKPWQLPCGVEPMGTQEIKN

SEQ ID NO: 934719 - protein, 158 aa, Homo sapiens
MSFFAFRPITRHKSQQALKASAFLFTSVNKDHQKQLTFRRQDRQYPFTVILHGYINAPALCHHRCRTTSSQDPTRMKVCVTHQTKNHGQLTFLLRTKNASNGKWEKHDILFRRNDLSAVIDNCIKITLKSGLQGQLHFPGTNMSSPDRCSDHIILLCM

SEQ ID NO: 934720 - protein, 161 aa, Homo sapiens
MRSPRCPGDNLYFQFNEIIAVSPGKIIPPFGAKTSGPTEYKVMGIRNKNFPSGSLSLLSQEDLGRSQRALGQSSRVSESGYQVSWTVRFPEGSHTDGTRLRSSPGLQAFLGLVARFLALVASFWERRAWRNAWPLRFRRLEFLCAGDVTGVCLTVEVGIEQ

SEQ ID NO: 934721 - protein, 138 aa, Homo sapiens
MRTLTNTDFGPGVVLEEQNFKDGFLQLVLGFLGWLLNMIRLQNAKDSISNSMENTDSHWCKLFREICRINAFDTSDSPLLRGKKFSDSIHNIFDRMWKIKGYNEVVWLLLSSLDKVMNENLSEGMVAAPSCTSGRIWL

SEQ ID NO: 934722 - protein, 141 aa, Homo sapiens
MKNAVDGITPIIQDYLKKLLAHYSLHKPPQLPYIPRKETKWERMEVFAGLAKDLQETPLDNAEIEWYTDGSYIREEDGNFTAGYAVVLLLEVIEASPLPQARSAQAAKLIALTRACQLAKDKTANIYTDSHYGVAHDFGIL

SEQ ID NO: 934723 - protein, 143 aa, Homo sapiens
MIITVNLSSTLTIGCSPPGNVKNFSKQNFSFSSGGVCSKNGGLPFPLPQLGHYQYLRCLLGPAGAVCCLQRVCGYSQDCWFVLAVDLELKFTVQAFAMLLYLELQSSPTSCLPLSAEAPGLHYNVTFGGDKYPNDKNHFFNFC

SEQ ID NO: 934724 - protein, 147 aa, Homo sapiens
MAEGKGGEKSLLTWWQSREKGKAKGEKPLTKPSDLIDGTACGDSHCELLLQGLPQEHSRKTKRIHRTFEGSSLPLQASCDSQKTVSAQGVREERSTSEHKSSLGNLKIHIMEKDLIFPRAKTNLECEAKYKGRRSSRKSPVGTRNPQ

SEQ ID NO: 934725 - protein, 145 aa, Homo sapiens
MEQNSLAGRGGDSMRAWRGTPASRAGPLGHLSQPGQEEESDCSPVCPKKGRKRPWKGWVGLKPTFLTPRSNRGWGTVASTLRRNPRDPKLRSKREKGFFVCASGIFTENQLDADAWNYFVQFIHVFGFMPVACCFGYFVVYFEVR

SEQ ID NO: 934726 - protein, 237 aa, Homo sapiens
MEMLNTKCLPRDLLNGFQQNADNDVDNEIQAEVISDGDEELVAAPAVPERSKCRAWVMASEGASPKPWQLPCGVEPASAQKSRIVVWELPSRFHKMYGNAWIPRQKIAAGAGPSWRTSALTVRKGNVGLESPHRVPTGVLPSGAVRKGPPSFRPQNGRSTDSLHRAPGKAADTQRQPSRQPEGGCTLQSHVGRAAQEHGNLPLASAREWTNTIIIHKCKIAAKLEVNRSCVEVIDQG

SEQ ID NO: 934727 - protein, 142 aa, Homo sapiens
MCLSSCLSETLGSSVCQTEGPGGVGSQGYLLTLGLQRSIEEAWFPKAAHLFTTSLGCGGSINSMSLPGKMYNLVWLCEETHSLCINSPNYSDFSIQLKLKGELSHTSITVLYKDTIADSVIPILWNCREEIFLFKFIMFSNV

SEQ ID NO: 934728 - protein, 154 aa, Homo sapiens
MIELMYIPTNSSDDGKGSSTAEAVAERPSVAPGGSAQGVTCVLMVLVEDGWNLKPGAPAWCPNSKDGGPPFPLGSSFLGKGNATTSGWLEFQASGSYLVRCHGSRAFRLSLLSPLDSASFLGNRCGDHDYTFSQQRTYTRLHDPYSQLNQKGWC

SEQ ID NO: 934729 - protein, 142 aa, Homo sapiens
MWVGSDKGIKAGCLSQQLQPPWVLFHAVEALFFHSSAVTLTLKVCSFTPEASETMNPPVARPRTHQKEETPDTSEHQKEQTPDTPSLRTVTLTMRVHSFILEVSETKNPPILDTGSKTTEVMEGYRMPYFSDCQCLTQKKTN

SEQ ID NO: 934730 - protein, 136 aa, Homo sapiens
MISKAPPIAAHYPQQGHQFNNYLHRKKHPYKNRNSGVEEEIKRNTPSSDKWQRKTLNSDLTLMSVLLTIVLVSCGCHNKLPQIGLHKTAAIYSLTVLEARSFKSRCQQGHAPSRGSRGKSIPYLFQLLMASVFLGL

SEQ ID NO: 934731 - protein, 248 aa, Homo sapiens
MGKKQSRRTGNSKTQSASPPPKERSSSPATEQSWMENDFDERREGFRRSNYSELLEDIQTKGKEVENFEKNLEECITTITNTEKCLKELMELKTKAQELPRQANIQIQEIQRTPQRYSSRRATPRHIIVRFTKVEMKEKMLRAAREKGRVTLKGKPIRLTADLSAETLHARREWGPIFNFLKEKNFQARISYPAKLSFISEGEIKYFTDKQMLRDFVTTRPALKELLKEALNIERNNQYQPLQNHAKM

SEQ ID NO: 934732 - protein, 143 aa, Homo sapiens
MQFRKLQGLKLGVTFQREKQMAQPQGDPGSVSEPLDGVIGVPAEKPHPLRKNESGSSLKRHSVCSLPRQCVELWRTNLSSSGVWTLGPGGIGSLVGSSDPWVAQFHGRSTVSPVLVTYDNALSSKKKQRNFKLYDSVKMIHHQ

SEQ ID NO: 934733 - protein, 187 aa, Homo sapiens
MILSRSAYPRTLSNTLMKSRDVASYKQDCSDYYFSPGSSHPAELMGSGLVLGSVCKKSCDVICLQVSQLWITAPAPVEVSLAVAAVGDGSVFLRPMELRSQGNYGCLCCILQVTREMGNQAELSGFAPPGRSFYAPICTFCLPPYLQILPWKICAQSKLLQSSAGIFLLSVVFSQFHWPPSSRTPVR

SEQ ID NO: 934734 - protein, 140 aa, Homo sapiens
MYTVSFNYLNTVRRSRSIQPHHMVPCVPAAPSRAIAKRGEGVQKTGVEVWEPLPRFQRMYGNAWMSRQKSSAEAETSWRTSAMAVQRVNMSLEPPYRVPTGHCQVELLEKGHHPPGPRMVDLPTACTMHLEEPQTLNTSP

SEQ ID NO: 934735 - protein, 250 aa, Homo sapiens
MQTLPKGDGLPSVAHQPSSRSPEADPEAKAQQHEGTSAEPRAAGHSLGAQPPRVQQVCSYLRTDPRILGDFCVGVLSQNSPCTWTSRAHGFYSAALSRHAELLFLPHLLWTSPGPMDRPIPATPAGLQQPDPAHPTENPESHGAAIQPKPSPTKALREKGPRGAMGAPETAKMDTQGTEFLGHWPELDCGPRQGKPLKAVCGYAGPVHAWQSQASDVTRLKEQPSTTAMVGQEQVHFATGKSQKRWPQSM

SEQ ID NO: 934736 - protein, 137 aa, Homo sapiens
MWTNIAILSSAFSQSQYSVCRVKYELEPSVPEPQQEEPPAESWDPTPGQKREEDQGAAEIQGAGKGKKECLLGEGGLYGHHGLCHDQEEDWGPPQVEEILPPPCPWIWALISPLPWLSSLTSCSGRFGLASRNSCMS

SEQ ID NO: 934737 - protein, 141 aa, Homo sapiens
MGICCIDDFVTQGSVEAKCGVEPLHRVPTGTLPSGAVRRGPLSSRPQNGRSTNSLHHATGKATDTQCQPVKAAKRKALHCKAIGVELPRAVGAYPLHQCDLDVRHGVKGDHFRTLRFNDCPIGFYTCMGLVAPLFWPISPI

SEQ ID NO: 934738 - protein, 153 aa, Homo sapiens
MDYKALCDLVISCFHPHLGLSKCSTVKSQATGKYLPPSIFSILFFHSFSANEKGLGEFLSRDSSFFLPISKPFDLYWEDHGVVAGNGKQDTFFQGSEAAEACTRSCMATKILFKTHKQKIVVFISAEIEEVGLKETLDLQKLDAVQGEVPDLT

SEQ ID NO: 934739 - protein, 172 aa, Homo sapiens [sequence omitted]

SEQ ID NO: 934740 - protein, 134 aa, Homo sapiens
MTTITNPVSIYQVVGQFWRRLSHEHTVLMNKVSVLTKEIEGNALPCFTSSNVRMMEKLPMRNGSSLDIKSAGAFSLDFLASRIQRKLSGTERFFNVKSGNSPQRPKCAKYTPIKEQNFKLYNTKLIELKEKNTH

SEQ ID NO: 934741 - protein, 179 aa, Homo sapiens
MLDVNLELPRSRFSPVSSHAEEVFHSSHHSWECAASPKSQHVSEPKAHSTPWILLLVIQGQRALYSGVDQFCQNWALAFKAVCSLLAQEISRNVILGIGPGKGTSHLCLVPYPTMAKLVSKMQNKILFTLFSSTKAEGKSHLCYCELHCLGLEEGGQEHSHSHASWCLPRSCATLVHWL

SEQ ID NO: 934742 - protein, 143 aa, Homo sapiens
MSHKYLKFNLFNSKPIISPPPMYCLSMSPVTVLKALQWLPVNIKQEVSQCATQKIRESSSEINNAGILIPNLQTSELASPFCLQACKIKKQVSYFLETMEVQVLGKYNYSQWEKLARIKELKAPYKSKIQRGSQILKLQNDLL

SEQ ID NO: 934743 - protein, 135 aa, Homo sapiens
MLNIGYQFLLACRVSAERSTVSLMGFPFFECGPEREKALQQVQAAVQAAGQAALPLEPYDPADPMVLAVSVEDRNAVWSLWQLPIGEPQKGSLGFWSKALPSSADNYSPFERQLLARYWALVETECLTTGHQVTM

SEQ ID NO: 934744 - protein, 138 aa, Homo sapiens
MRSDGFIKGSFLHMLSWLLPCKMCLCSLFTFHHNCEASPATWNLSFTVPLPVNLRWVEKKYFPSLHYNVQQSLPTRKNYPTLNVNNAMILFAWSLPHLEVSPVEAAELQRWLNAPSSGISFPEGHRPDAGMNTPVKDQ

SEQ ID NO: 934745 - protein, 225 aa, Homo sapiens
MYYVGHTYIKQLFIVHLKFIFNWASCILSSSCIPAAHVVNLRTVSVCDSHYSLETPTPPAGRPSCVLGATAASSGSLRNHTLSPPPGSSLSLKPGRKAAAPCGCPGAWAVWPDQSCKAQIQVRAAVETKPFPVAVKLRPDRVLFHLPRQRVTYLLTQFYRCSLQNGLGFVNIFLYQAVVIEMSKSSGKGKTTGIRTPYPCPVPLTANLATASLHFLERAAPAIHY

SEQ ID NO: 934746 - protein, 163 aa, Homo sapiens
MAWLGLRGLTLITSIIDGHSSLPLHEGVRTTSQHKVAKNQRRRQLMQDFQSAALSPGTALEKFSLLYLFFPQLFRVSNASFLNAIADAEGNVVMMVKGNAHWSILDFEFSDQACSNNWNVEKLGEQERTIMALVTRQLTEVQYLVAPYDWSFSFQHWESTNLF

SEQ ID NO: 934747 - protein, 155 aa, Homo sapiens
MDGSYYSAKKTKKRESLELTRDLEGSEDKMWETLELLRDLLNVFDQNTDSDMDNKVQAKVVSDGNEELVGNWSKDHSCYRERLAAFCLCPRDLWNFKLERVDLGYLAEEISKQKSVEEEAEHKNLENVQPDYVIKKKTPFSGEKFKLAAEICMSD

SEQ ID NO: 934748 - protein, 129 aa, Homo sapiens
MGVVTILGACKLELGCLGIQGPWAPWRPEQQLFPASMQLSIQSGGPGRREQGRISYAQDCKSLWQKCQSLGVLTHSFPTVKKKGTSSTYCIYEKPTNVIIHNGEGLNAVPQDQEEEKYVHSFHFHSTLY

SEQ ID NO: 934749 - protein, 136 aa, Homo sapiens
MHLSQPPISCLELEKHFSHGNNVTNGEKVPRPVHKGLFNQEYGWTIGPIALESQPPLRLLFLWENVLPGLIVDASSNSIALSSLWQLEPGLPQSPLSFRLARWKGEKSQGNQRESVGELLSFKIHYKATVTTTAWY

SEQ ID NO: 934750 - protein, 160 aa, Homo sapiens
MGLPESQNAVIVISLLAVDTSTCSGGGGRGVKWTLRGTLVVVLFRVLVFSNAGCPGSKVVVWTDSGPLASQDVTGVEVAGEQGWEFAPGYKPPHRTFRLHSLHGMASVLIPALPIRPEPPDSALENSRPVKIIIKFNWKFPSPCGLSPIPLEASQRIPVR

SEQ ID NO: 934751 - protein, 139 aa, Homo sapiens
MASHWMQAAPEKGKALLNWISALIKEATESLLAIFLLCEDTRRQHSVTKKRVLTRIQPCWHPDLRLPDSGTGTWECWYGLELSCHKTRRKWDPHAHLQPWKKLSTRGNAERNTFRQFLKAGHSGQILLACSLSHVFLKR

SEQ ID NO: 934752 - protein, 135 aa, Homo sapiens
MFSVIPDLHSLDASSTTLPSVITTKNVCRHCSVSPESFASHSAVTIIIIITGMEEISGFEDYLFSRARPHYLSGCLGFNYSQIERKGVKHQEDWVLILCNFGQILALLCTSFGHVCKEKVFYYGLTNTDSDVSPK

SEQ ID NO: 934753 - protein, 174 aa, Homo sapiens
MQETKNCKFWPLAVLSLAWLTYDWNTHSQGGRRSAWVRNWTLWKYFRNYFPVKLVKTHDLSPKHNYIIANHPHGILSFGVFINFATEATGIARIFPSITPFVGTLERIFWIPIVREYVMSMASSQGTVTNVSLSGQIVILLDTRKQLKPNIQSMALEQEYFSMARVWRQFLPSQ

SEQ ID NO: 934754 - protein, 135 aa, Homo sapiens
MGWSLSQGSTEKVAQEVAVGAGPYDKKLSTLCTLRIVGNGCWKCEQLFSTCVSQTVIFVCLPNGVPSTWNALAFSIAHLNLSWPFKSPHFPCSVIPPPQAGPGHPHFISSSSYWTTALTVGPWIGGHLDLCWSHL

SEQ ID NO: 934755 - protein, 135 aa, Homo sapiens
MRCCSLFGSSMMLNGKRELKFAGSSSTEQTRSPQPVLTVALFHLTGSNRRSRLTSASASPPPFAFFSAFGHCVSMATPPQVLGHLLGHPQMPSARIGCWETGSMSPLDPTAKVFGGIQIWPSCNVCGSWACRVFR

SEQ ID NO: 934756 - protein, 142 aa, Homo sapiens
MPDLDLGLPFKKRPGPDGFTHKFYETLKKEIMSVVHNLKKKKKKKKKKKKKKKKKEEGGGRGEGQEQEGELPNSLPCGARSEEEKAAPFKRVSESEDLRGEFDFSKAQKMKGTYKEAVVDTGEWGLPSIFLVVQVVMNSFGY

SEQ ID NO: 934757 - protein, 143 aa, Homo sapiens
MGLGAMEQGVKLAWQAAGSEPCPAGRQLRPVEKSSTAAAGPGAQPLTARGLRASRLLRVLGGQAHAHPELALAPVPTCASPSTPPHNLREPAPALAGPKGLPQCSGGLKGSSSTARVGAKAEEALRASEGCEDCQQLSLLNTT

SEQ ID NO: 934758 - protein, 119 aa, Homo sapiens
MPGQKPQGNRVLQLNPKNNCLKNCPSMKLERKEIVSAPLLEMCEQGLDSHIVDIQRVEADGLLASSGDPVMRLPGSMNEVTHLCEMQPKERALTPWSSPRDGDLSLYLPRHLARCDNIM

SEQ ID NO: 934759 - protein, 143 aa, Homo sapiens
MQKIAERHDSLHLLDLGCKAEAQVAVKPVAGDDDTQARGLRVQVKLQLSLKVNPRGQGAGSVATAVAIRGCRPKKPGGALLALADDDPGPHLLCPIVPGLPIPLVVPKDSVPFLKALSFETFPTQPATPSQPGLCGGLRPRPL

SEQ ID NO: 934760 - protein, 135 aa, Homo sapiens
MGHRAHTHLLTPGPRPGERETYIARDQGDPGLTGVGRSHLVWRHANTYAHALRHPNELERTVGGLVTSYVTVPHKDALAQVSRVLMNTGKDKRELGALGLQRSGGDQAFCVLLRITDNLGVQDGIKAQGPVAAAK

SEQ ID NO: 934761 - protein, 147 aa, Homo sapiens
MSWHYATSLLLGLLRPCIGHSSSSVIRGHADLTRERLDLIKLLACVGHRAGMSEILQSSCSEPIVLDEYSGPDWKDPKISLQATEAQSRGGMWPQSGSLSVAYLGLKLGDTVFQSSAYITTSLPRPTLWPLASPTLLGTYTCLWWWP

SEQ ID NO: 934762 - protein, 153 aa, Homo sapiens
MGSPVPTHRLITEGSLRQENRLGHVPDTPGGTSCTTHRLPFSLVFHSSWPSPKPANRPSRAGWGRLKGEGGAERPPCSQHGCLPAGYGFLQPRLLRNTRFPGPCCRDPCLLGTVLQEKEQRGLFGVLFRGSCSPLPHPGHVITIRNIRHFNSN

SEQ ID NO: 934763 - protein, 156 aa, Homo sapiens
MYQALWMKTNMVPPSRSFQKTGVDPQGSQHGGRTGKPQCGDPLWSRTPLSSLSWGHRARAQKPFVSDHSYPPGFPSPCLLTLPTLVEPTAQPRIADKIPSLFFPLIVARKAEEGVCVSKTLFVCMYMLVSSRGEDRSRRGRGCASVGLLGRGIANI

SEQ ID NO: 934764 - protein, 162 aa, Homo sapiens
MNGKMPTANATHLVATQPSFLVSAIQGMACWETSKFLLGNLQLIKHMLGGLRLNSGSRGGWYVVPTNELQAAAACCGSPHEEELTGLSFVGGGQAGPMLTWGRRTHVRKKAIHAGLRAVRPQTLSPCHAGREYHQYLQLSKLSTQQKPDSDFSLAGAGKPCP

SEQ ID NO: 934765 - protein, 209 aa, Homo sapiens
MCGGVSEAVCLHRVEKGWFMCGCVMGASDKEIETWGGKRIAQGHAAAQGLLGVKTGEATAWPESDGKAARKQQEDECPELHCIWDMLHRALWIEHPESQGAGKRAQAPAPDAKQARQPGSAVTDIPYSLNESSQKALSDSRPLNAILPSILGKAAETPALLLSFQEAYLNARPSMALTQGISNPCLPQRREERAGDVKKRETYLLFVGL

SEQ ID NO: 934766 - protein, 134 aa, Homo sapiens
MWEVLLFLIPDLAGPLGEGYNDQSLVSGFWKESQPHPGLRASSYPAHWALPAWEGTEILPSVTGGVESEREKFTEGARSRHQEEEAPATERKKEGEREEKMWKNRNQADKNREIVRVGESLRDTCAMERERVCA

SEQ ID NO: 934767 - protein, 243 aa, Homo sapiens
MFSPDCSGYQAPAAGEEMAVPFLVAFGDHGSLRGQKEGEVSGGISVSAQGHFSLRGRAGPPRAWTLGTWNLDFREAKEKNEGQYPREKRPSLYPYPSEAARKPAPTPATSSSLDTSEYPEPSPRLLTFLDPPKKQAGGRSIEVAADKLEQLNKLLLINYRGREERRPEASLLPERHLHLCPGAPGCPLSQSAYLAWLPGEPQAFLQSQEVPLGLEREASQTLGLVELQQGLLTAPWDVITAAS

SEQ ID NO: 934768 - protein, 166 aa, Homo sapiens
MLDFIKCFFCVYSYDYVIFALYSDNTSQNELGSIISLYQSGFTRETIGERSCVQERLIYYKESAHVIRVHEEEVKSLHDIYSSSNIQKIKYYDVKLPQRIPERPKPLLSCFYLLAAGSGPVTVKEAERGRKYRRSAGSSLGYERVNPLRWPTGEIKREVEQAQQIR

SEQ ID NO: 934769 - protein, 152 aa, Homo sapiens
MQLGLCFGRLPLDAVWVVDWRGREKQQGDGEIDYCHCPGRRNESPAHSKGAAWVAMALEPVSSLNWAQSMHPEACPYSRTEPLDQASFTLEALVAFSTQTSATSQDLLQGPDLKSDLNSSRKLSLVFFPNLSLWSVPLCFLHVALTPLHFHH

SEQ ID NO: 934770 - protein, 139 aa, Homo sapiens
MDAELQITLTVEDTSTPSLATDHAPLTIPLKPHHPYPAQCQYPIPQHALKGLKPVITRLLQHGLLKPINSPYNSPILPVLKPDKPYKLVQDLRLINQIVLPIHPVLPNPYTLLSSIPASTTHYSVLDLKRAFFTIPLHP

SEQ ID NO: 934771 - protein, 166 aa, Homo sapiens
MRAHLLHQNNLDYGLIYLIFWALLLGATLPGSRQYLHLSFSSLNVLLISKVYFVPETQVKMNFPASMMMDGNSFLKFQLTSNRNGEFEFFLLLRLYRAVFSQGFILRSMTSETSQGNRGSCLNRFTGESKAALWTKLQTSQIKLILGTLCPQGISLWANLPSEQKI

SEQ ID NO: 934772 - protein, 144 aa, Homo sapiens
MGSGIKHGSLYPPSFWNSGKANQHSLKHGCRKTSKVGKPIDSAAFSLWPKAREPLANHWYTCCKCVHSSLRRYWSRTLSVLPEVLHPDSGYGRQLKHTEKSQDQTVLVLSKALDGPRTLKGCQWFSSSWFLHMSFIFQFVQYTD

SEQ ID NO: 934773 - protein, 137 aa, Homo sapiens
MWARVQRLESSRQDPIVDWLSNWHWRWPWWSVRDRQPTLEPRLLLPGLVKLPPWSEELDMREEKWTDDAKMYALEEKTKTYYEVFKNYIAITNFILINMKIDEMDTWKVVKLLKKKQKPSIDPQSGEKLMGSAGGKS

SEQ ID NO: 934774 - protein, 147 aa, Homo sapiens
MQDIVRDDDDSVDDSNDDSDGDGDDDNDGDVSGDDGDGDDDSDGDDADDADNYWDDDDDGDNGDDDGDDNSDVMVVMIMIMMAKMMMMIVVMMVMMMIVLMVVMIIIMMVVMRMMVMDDGGWLNSRKKSFIGDNWFANWEEIVSGVD

SEQ ID NO: 934775 - protein, 139 aa, Homo sapiens
MSLFIRLWSPNVSGIGGFLVSLTSRMKLRTVTVSVLQFLKMVCPEFVPSDVRTCPEFLPSGGFVVSLTAGVTLQTFEVSGTVHKDGASGVVRSSPWVRGLADFRSGAADLHVLQLIKAARTQRVSSSKFYCEEERTKPP

SEQ ID NO: 934776 - protein, 174 aa, Homo sapiens
MVEASTSLATAATSCKYGSMLGRAFWLCFCRRMHFCQQVLCWVCGMTYKPVDGAMGKSWLLPVLLAVYFILVYWEELSVAPGNGLKSRVHINLSSLSPRGRGIGGTRWVQPDREDSPSVVLLPVQVWENAGSVSLCLSPTKSPSLFSNELQGLGKTISSSARVAWISSGKGGLL

SEQ ID NO: 934777 - protein, 148 aa, Homo sapiens
MLDNSGKSGNPHCVLDRREKLFICSPFSTVLTVGWQVLLASRWIQRCCLGIRARSKSVKVYLVFYCAMAVAQTTRCSPSHSFHHCPKAEEHQSMANSNTGHGGLLPDYHQCSHKAQRLLSQFVVNAPVILKCFFFFLAGGGGGWSLAL

SEQ ID NO: 934778 - protein, 175 aa, Homo sapiens
MLLAVQLGQEAFATILLPNGADPNIMDFFGRTALHYAVYNEDTSMIEKLLLHGTNIEECSKAQIAFLQGERKGQENLKKDLVRRIKMLEYALKQKRVRYHVVRRPMNEPPGKKPWGPLGADGNPQLTARTRQGPPSYGFRTYPPKKPLADEDWEASTEMIETVQIRGECAQDMEN

SEQ ID NO: 934779 - protein, 138 aa, Homo sapiens
MVGLIYASTDGIMHWYLNECLESSTSLKWLAYPEQTVCPEGFLDPGVSCLGVAEELAHTWAWRVSAGFIEWKLSADGWGARRETEREGGFPLKWGRIRVTTWKMETQRACPAGMESLWKHTLLRRKATQTGFSHLFVL

SEQ ID NO: 934780 - protein, 138 aa, Homo sapiens
MADFNARELDPGCRRCTSPSGHIMLTPSLTQMDSLSSLHGVGWKCYSWCPSRCFKLQRLTSRPLSPCPPVQVISIEIVLAYTDLLITDFLMALAERLPDPNSPLIIITVYTCSGITGKEHLILLLSCVGSHTQANVLC

SEQ ID NO: 934781 - protein, 168 aa, Homo sapiens
MVEADCHGKLFIGGLNREANEKVLKEVFAKHGPLLEGRTSKSRDFVVIIFENAADAKNAARDMNGKEAAMRKSGENILGPEITAEVSRGAIPIKRGPSSRSGGPPPKTSAPSAMARSNSWMGGQDRGCHYIVKTDIKASGSSSPAVSAFHTDSHCELLSLTIQLLRPQ

SEQ ID NO: 934782 - protein, 204 aa, Homo sapiens
MLKGYNLSLGRILEVNKPHSDHSQGFCIFLGEKKIKEKILLFPHFSVKKPWSSRESHEVQIFSCYRPSGCTRAGHKGYDGLAWAQRPDTSFSVGPRREWLTFRMNLGSNCITLSLLYPGNSYWRPAACSHSIIVSDTACVEVFTDGHSTWVQGTTVESIGCVRGITAGDTAWAHGVTVEVPASVNGFTVGDSACVHRIMVSDSG

SEQ ID NO: 934783 - protein, 143 aa, Homo sapiens
MTLSVGAICFLPGSQLLLTDAQIILDVGDVINRSPVTQGAPLGELQPGGEISHFVTSCPYQAVQWYLMGYRTIPGTAHFRNHSKVITGNPTQRCCRPQEWFTNSEETYTSTNTACDSGSLNQLRRKLEVVKVTRHPNQEHENW

SEQ ID NO: 934784 - protein, 215 aa, Homo sapiens
MSPAEEIVKANAKQGSYSHSQTPENGECLVQMTTGFSQAETEFTESLDRAVSVFQADDEEDPSCSHRTESVNAGIQQPRREGDIEAWQLPVRIHAPGQQGNIITTFEPFPFKLLKEFKPAINQYGPGSSLVMVLLKNVAVPSQMIPTEWDALTGKAHLIDYIKACDGIRGNLHKATLVVQAMTGLKVGKGNTPFPGACFNCGKHGHTGKECEKNQ

SEQ ID NO: 934785 - protein, 130 aa, Homo sapiens
MNEVETVILSKLTQEQKSKHYLFSCISGNGTMRTQWGLSGSRGYGKVGCISLPLREMTAWINPPQISEIFQGYHQRVHGADALSLQTNSLRSRLSSQNSISTIENTVSDELDDRSKMRNKIVRGAIILTY

SEQ ID NO: 934786 - protein, 152 aa, Homo sapiens
MGLANHQFHLEAEERNIFLEHTGLLVYGSGSSAAGLLEFAGGPLHSLFACVSAAEAVEQRMLLNSKCCCLIIPLFLTSLRWVQASCFNSEKFDHLKPSSFILSKSFCVQLCSIADEELHSFGVGEALDFSNFQLLCSVFSPSFWFLSTFGLC

SEQ ID NO: 934787 - protein, 138 aa, Homo sapiens
MGKDKLAKLGSGSMFMTKRVQKSKDCCLFLPLKVSSHRGTCQVPARALLYEVSVDPCREESPSQEAWASWTHLRKVNCHCPQLTGMQGSLCPQHRSRISAPNPDDQDVLDGHKTCPTEDAPLFPHSTGSMYQQVGIEQ

SEQ ID NO: 934788 - protein, 144 aa, Homo sapiens
MWKNKDGPGVQNYRMRFQVETGNQRQCAAIGWSHGNEQEVHVHNVQVELMSPFPRTAESVFLLLSPGTLPSFVGNLHKSLSIKKILDDFDCGAHLLSAWIPVAAARCTDYIRSWVCHQKQIICHVLKMVYQFQQIQLGHANSLL

SEQ ID NO: 934789 - protein, 143 aa, Homo sapiens
MVRISVLLAWGSGPSTVQNCLGQYSHILSTYSSHTVHQLLDLLLVEEKLRNKTSSFWLFPGEHAQCLGNPWTLEESSDSVIISYYRMKRMGVNSEMKTKTKKICSKTWLCIATKDPTTNVINIPKETFTEIIMPKALQAQCIS

SEQ ID NO: 934790 - protein, 199 aa, Homo sapiens
MVRISEKLRNKTSSFWLFPGEHAQCLGNPWTLEESSDSVIISYYRMKRMGVNSEMKTKTKKICSKTWCLSKFLMSSHQHCPRSLCKDFFKVLSADVLSQEVKFLISHFSWPSHSCLFNQKPIRCCYGNEGGKHFPVWDFWHHKGCWLLDFHTPQTSDWTTFRLDQWWIQNSYPADLFADIFYHPITFPVPLRRELGRET

SEQ ID NO: 934791 - protein, 158 aa, Homo sapiens
MLKRAAAHLKACPCLNPATFYQGKLEKMNMIVNSSFVLVIPISHGFIYLGYFMPMVFGLGFCMSALFVDVDQSGISSAGLLEFARGLLQMLLYWGISWSVGCKNPVKSAGYGLDDTAPDGFPWLWEEVSSPLRFLGEATITLLLLAFCGPHSMSNQSQ

SEQ ID NO: 934792 - protein, 136 aa, Homo sapiens
MLVDEVFSVSTDGSLGRSIGCRIGKRISSVSTLRNGAIWTDQCWTLLLANGACSSGHSQVSFVWNTKIRGQLWPFRVHRLRGSRCHDCDTLLGALHFLASPSFWAPLRFTVSAVDAACSMPGPAAASQNENIKYTI

SEQ ID NO: 934793 - protein, 136 aa, Homo sapiens
MAGYSSEAKLPEEQSASNICCSPISAVLQAPPLIPRETGSGVDLQQTPTDLQLRVLTVRRKTNKQKGHPHQNPICMSPSSKTKEDLDHYEMKEEPTSEKKLEDEGTEKENWAILEKIRKTERQGHLNVCINIWTFW

SEQ ID NO: 934794 - protein, 135 aa, Homo sapiens
MCREYSKSNITSEVRLQRDYDACLGHPSPALSIAPSDGSQLPCDEVPYGEAHMTRSFVSPPFCWFYTNFKACEDEVVCDSYHKGYYKQTNFQQVYHHYHPHHKTVSSKGNTIEGSQFTGFHQALRDLFVLSMTSS

SEQ ID NO: 934795 - protein, 209 aa, Homo sapiens
MSSNPLAQGHLLLGEPYPTATRPDREGTLPEPKWWSYKGWLAGVVARGPSGPSENPGSSEGPWGRHGGQPILFKEKLTMKMDSLVEEKLECSLWCCLSDPSSLVAAVFWKGALYPGCGRLYNLPKHLDVAMPDQPLPMGQSGPSAAGLLEFTGGPLQTLFAWVSAALAAEKQILVNCKCCCLIVPLEVLSQRSTWQYEVSVCPYWGGAS

SEQ ID NO: 934796 - protein, 150 aa, Homo sapiens
MTHTNQLKSINAPQGGFLLSQNKTNVQSGFTRRHSIPRGIQEMEAFLLLILLNTDPLWVSDWKTVRSFLSHKAISQTISVGKNLGQYLDFLGQRSLKLSAVYCAPDTRLPFPWSSQTFCGILSKPLVLSGPLQTQGALPTCSALLLSATS

SEQ ID NO: 934797 - protein, 153 aa, Homo sapiens
MSLTLTLQGYTLSLWTTADKEKHLDSPGSLVWEEERVEIWAESEDTWILSSDPELSAFTINTTEPGSPFKSTSPYKQEELCEYFLVNDLVIHQPNFLDNIIFIAMRKMMREIKWLTQSHPESGYETVPSGSRDHMVDNGRNNQYQDEKMRVIL

SEQ ID NO: 934798 - protein, 204 aa, Homo sapiens
MPIPWGIGCCMISITMDPTTLLHPADIMTLRPLGGQEGMSARTQDTEMQGILDPWAKGSLMQDSSQPHDMQIQAVKFVMHDVCRSYFQGGSTDIDFSPEQAREKVVQTACFLLLHCQSRTSFFQEEPARQISCCGKAEKKARRPERGSLSHLYFTKNLSRENSRRDLLLEQACEASLLCLVTEGECYLFHSGFQRSNCLIFSGE

SEQ ID NO: 934799 - protein, 326 aa, Homo sapiens
MIYLCTHHLGDMTLLSCPDTLHNMPTKIIVTYFCVHLIGDVTFLSGMGPAQRKAHHFGDMTLLTCLDIVHKRHYAIELGLAPKFSDFSITEEIVPYVEQASEQYVTHPLALSMKGTITYHWDHYPDDANYLPENCLPRELCLICDVTLFFGMGPARRKDSDILQCQSHSKHKIVHTGEKPHIHEECGKAFTRSSTLINHKRIRMEERPYKYKECGKTFKCFSDLTSHKTIHTGEKPHKCEECGKALSSFSHLIRHKITHIERSSTSVQNVEKPSISHQSLGAVSPGWKICAFSQVRGSLSGEEHWGVCEPHGGWSNLLSLGIMQLV

SEQ ID NO: 934800 - protein, 146 aa, Homo sapiens
MKTSQDPPGEGDLNHQAPEELLGGEVVSRHFSVVSATHSLYADGIPPFRQQIPPSVAPMGESPWGENSEEIRTRASPWCAVGVWLLSCLGLVQALRVRKHTASRPKAHPVWSNTVKQREKNLLDSMQMQQLPVALGVARLAGFLKA

SEQ ID NO: 934801 - protein, 165 aa, Homo sapiens
MLIPYLVLEQLHCAQKKKKSYSCVEHGWLNSWLTRWGQKDKCGAEFRSFDRVNGSGISPWLLSSKFSVVLFSIPHQTPGLFGAAWTGALLASGKLLAGLRMEIPEEKKKEEEEEEEGEEEEKEAEEEEEEGEEEEEEEAEEEEEEEEEEEERKACFSGYSQEVGV

SEQ ID NO: 934802 - protein, 149 aa, Homo sapiens
MLCARHVQPRPLVVNPPPPPQFQNVWRNPNTETYLQPQITPNPVTQHVQIPLHWPVGAQRSYVVPPAFPAYPNSPFQVATGYQFPVYNYQAFPAYPNSPVQVTTGYQLPVYNYQAFPAYPNSPFQVATGYQFPVYNYQVFMCLSNGRST

SEQ ID NO: 934803 - protein, 165 aa, Homo sapiens
MVRSVDVQGVDRGAQKKKKSYSCVEHGWLNSWLTRWGQKDKCGAEFRSFDRVNGSGISPWLLSSKFSVVLFSIPHQTPGLFGAAWTGALLASGKLLAGLRMEIPEEKKKEEEEEEEGEEEEKEAEEEEEEGEEEEEEEAEEEEEEEEEEEERKACFSGYSQEVGV

SEQ ID NO: 934804 - protein, 159 aa, Homo sapiens
MWLYSFPWVSSCNIKLVGSEFIPVLDKSIKFKKEPRKEQLERDFPLCGALGGENTAGEEDSTTWAQLSLKTLNPVNTGQAVALVHLGLRRSSDQISSNYPSFHSGEPKIGFYLPLEWGGPGAPTKEAVVGLSSHEFCAYAHKDKGSSSSRHARKAYGSQ

SEQ ID NO: 934805 - protein, 152 aa, Homo sapiens
MQDWYLCTTCRFVTYVYMCHVCVLHPLTRHLALAKPVNLINKAKLLSCAQTSLNIKKVLVETSAENVKNVAKTFHPREMQCCYQWLAGILSQYILPCEALRKCVLQTINAKRPEFCLFPMDMFKIVTSCFAGVPANFSGKAGKNYESDFDKM

SEQ ID NO: 934806 - protein, 150 aa, Homo sapiens
MPHCCHSIIYLTKIQGFVGKIGPNGLGCIARVGLLMPECFPSERENGPLFLFVCFSTCPRTHNGSWTLLIRIVVLTDAAAETLVFLLDHNKTCSLACPPRPQRGLRKIGFRSLSHSSLFLYSFPHEGGSHTSFTDCLTQWAPTADLAMGE

SEQ ID NO: 934807 - protein, 191 aa, Homo sapiens
MDDERFEGGYVKEFKEDMKTGDGSSIERDQSSQLELAQNQKEFSTVGERKTAFAILDAENPLGPVRTDPKPNNRDLPDVHTTTLSQRGNSCKTRCPQRPTLLVHGPVLRVILSKRLSRTYIREPFAQGSNIPCISVSWVLADMPSCPPRGLSVMMSAGCSNVVGSMVMEIMQHPIPQGIGIPAYLSGCVKT

SEQ ID NO: 934808 - protein, 148 aa, Homo sapiens
MPPGQRLFPTGQIAWSQIDKKEKNKIAITPLTLKGMALLSIHYVPATAVGTLCVLSHDIHHHSNPNEAAAVIVSTLHVKRRLVFHVSAPVASTVQQASGLLGLLPHLSSLALQPERSLLPPLGSHGAEVSKKMALRSQTAVEEYPGLG

SEQ ID NO: 934809 - protein, 138 aa, Homo sapiens
MMREIKWLTQSHPESGYETVPSGSRDHMVDNGRNNQYQDEKNPSKPQLSFAAWRIQMDKCLHRKGGFDVPLTSLEVTYVDTLCGLRDLMGPVAQRVGSMNFTVWSPANPHGILSWGCEDTVGYQGPVCASLIPGRPGP

SEQ ID NO: 934810 - protein, 159 aa, Homo sapiens
MEAFLLLILLNTDPLWVSDWKTVRSFLSHKAISQTISVGKNLGQYLDFLGQRSLKLSAVYCAPDTRLPFPWSSQTFCGILSKPLVLSGPLQTQGLVPDLHPVIISCHLAPYGVLQGTLRPRRDHWLRPLSEVWRPSICPRASSPPPFLQAPVSATVPWR

SEQ ID NO: 934811 - protein, 145 aa, Homo sapiens
MTVSASGPLTFRGLNEIIRGNIRHVAHLADGGWLPLLFHQSLVYSLNAGKKDGWSKGPRPGQATEPHGALATLLMGQESGSQPPHALMPRVFRQVKLKSQEAPSLRQQQDQYLCTALGALIPQELGELFISSICGLPSSARSITL

SEQ ID NO: 934812 - protein, 136 aa, Homo sapiens
MVIELRPNSCNSASASLDKPATGLSPKPIAPNEEFPWRYSKEIIFEICYDGRYTECAYQESALYPLKARNNTVKLCLARVFERMAYSALILLLWKYEGEKNSKLKFPVECNLKIWPMIALFFSSKVGHSDLLGVLL

SEQ ID NO: 934813 - protein, 140 aa, Homo sapiens
MYTFFTVHEVLLWFPSVILFVITFPPNQILCIPIFILSFVNNSFNLKLLGSHEERHGIGTVAVPPLFQLRLHIDTSFCLQLFTRFCVWMNLFYFVTTGVVKIVRNSSYAMCLNLSILTAWWDSLGFVSWCMTTCSVASGS

SEQ ID NO: 934814 - protein, 182 aa, Homo sapiens
MPQNHEERRLTCLIENLFGTVRLRVLSTLAPHLGQRHVSEARDSPSSWPCSLDWAVNSAHSGASEAAWEAASDWRKLAPDDSGIHNCPSSGTSRNEVLLIVLNTPFPARPLRVSPETSDLFSSGSSAAGLLEFAGGPLHSLFACVSAAEAVEQRMLLNSKCCCLIIPLYQLELMDDYIIRTN

SEQ ID NO: 934815 - protein, 150 aa, Homo sapiens
MRIKPPSLLDMSRSGRCYKSPGATTRVRIKTSPQDPPRRVHGIETSGGQEVKQFWNALDQKEGSIQMAVVGGGTGENSISTIENTVSDELDDRSKMRNKIVRSDRSHHAGIKTLVAFLLVECPYGTFANTWLIVTNKQQQQQKVKFSSLY

SEQ ID NO: 934816 - protein, 137 aa, Homo sapiens
MTRAWFDSLLYDQPQGNCPAETGSRSGLTEWFPKRIYSGISKIKLLKIPCLFKMKYFGPKRKEPGCLLIPETKDKAPTLVGIKGQERPMGGTGGFYWAFETNKSHLPMRLTRLKLVQITSNQCPCVVVYFSNRWYKN

SEQ ID NO: 934817 - protein, 152 aa, Homo sapiens
MGFLAGNSAWFQVITGVYFAWVHSLTVPGRGYNQKLIAGDFVCVHIMTVSARASLLGIITRDTAMYCSVTIPGTATVKGFIAGNRSWAHDVFTDGHSTWVQGTTVESIGCVRGITAGDTAWAHGVTVEVPASIFGKNKRFGSNLNVHQQIKR

SEQ ID NO: 934818 - protein, 225 aa, Homo sapiens
MVEADCHGKLFIGGLNREANEKVLKEVFAKHGPLLEVLLIKGRTSKSRDFVVIIFENAADAKNAARDMNGKSLDGKEIKVEQAKKPSFPSGGRRRPPPSSRNRSPSGSLRSARGSSGGTRPWLPSHEGHLDDGGYALDLNTSSSRGAIPIKRGPSSRSGGPPPKTSAPSAMARSNSWMGGQDRGCHYIVKTDIKASGSSSPAVSAFHTDSHCELLSLTIQLLRPQ

SEQ ID NO: 934819 - protein, 139 aa, Homo sapiens [sequence omitted]

SEQ ID NO: 934820 - protein, 173 aa, Homo sapiens
MAWLGSNLVPELKELTQLNYTIAFIHTHTDQCLVCTTHPYVFLTGTNISITPGNATFVTRVQGQAWFASCITGHDMSSLKTSSVVVLRRQSEALLPANLTCNWQDSSALATLESALSQVRHKRFTFTLMVFTGSAIVIMATVSIAVVSITESVQTTAFVDNLAKNICDELLLQ

SEQ ID NO: 934821 - protein, 160 aa, Homo sapiens
MHVHPDPPSHTRIAEEVCGLKVAKWPLTGCCVQQYHSIPHVEKVSQGIRAKTPTEWDEDMSKYPLWLWHRQDSSIIRLLGPPVCNNSLFIQCRSRSVTSSVCKSSKFFFVGTVQIKTGESHDLNAVLSNMSQFHHLKGPGRERESCQLGYGLRDMSQCPH

SEQ ID NO: 934822 - protein, 139 aa, Homo sapiens
MAGPLNDRPYHQRKAFPAYPNSAVQVTTGYQFHVYNYQAHLAFSVTGRFCCFQKPPASLSVARPRPDCLFISVPMDPTNIIQGPDCSSPFPEQDHTHFTPPGHYDMLNKTLKLWFTVTRLRLRFKRQNCQLGALFSLSF

SEQ ID NO: 934823 - protein, 142 aa, Homo sapiens
MWPFDLVIWEVTGQEKMTLSVGAICFLPGSQLLLTDAQIILDVGDVINRMPQQSPTESRHSLSNPPDQKFRSPVTQGAPLGELQPGGEISHFVTSCPYQAVQWYLMGYRTIPGTAHFRNHSKVLGPKAGHIPQGPKGSLITS

SEQ ID NO: 934824 - protein, 217 aa, Homo sapiens
MEMSPAEEIVKANAKQGSYSHSQTPENGECLVQMTTGFSQAETEFTESLDRAVSVFQADDEEDPSCSHRTESVNAGIQQPRREGDIEAWQLPVRIHAPGQQGNIITTFEPFPFKLLKEFKPAINQYGPGSSLVMVPLKNVAVPSQMIPTEWDALTGKAHLIDYIKACDGIRGNLHKATLVVQAMTGLKVGKGNTPFPGACFNCGKHGHTGKECEKNQ

SEQ ID NO: 934825 - protein, 155 aa, Homo sapiens
MVPSTPDRDRGPGREGALPHTLRALAKLQGVSLHAHPIIRRLLDQRQIVRHTEMLAGITNDDEVLLSYVRDGFAGKGRKATLPGTGSRMKFSFYHSLYFHNEVIIQEYCLGILASSCRPYSSYLTFFSWLADHDCPGSGRIAEEPPTSTSRSLTP

SEQ ID NO: 934826 - protein, 121 aa, Homo sapiens
MVPSTPDRDRGPGREGALPHTLRALAKLQGVSLHAHPIIRRLLDQRQIVRHTEMLAGITNDDEVLLSYVRDGFAGKGRKATLPGTGSRMKFSFYHSLYFHNEVIIQEYCLGILAAGRTAPT

SEQ ID NO: 934827 - protein, 153 aa, Homo sapiens
MPFKFLLAPPSKLPSYLQDPGLSSLRYPPSPASWLSPCAPCLAPLLPTPRSQMPTPCCQSFRMGSCKDVPLAQKLEMPWLMAPAPCQASPQPPPGPCHDVVHHQHLLLPQECLRTLRPGCPLLQSLQFEWGASFGGPTDHDLHCPLTVHSTSR

SEQ ID NO: 934828 - protein, 461 aa, Homo sapiens
MSQLVLSAKPREELHHVGDQCRDMSKCPCEQSLDKIYITWVISAETCYNVHKGMECNGVKWNGMEWSGVEWNAMEWSGVEWNGVEWNGMEWSGVEWNGEEWSGVEWNAIEWNVMEGNGMEGNGMEWNGMKWNGVEWRGVEWNGIEWNGVEKSGMECGGMKWSGVDWSRVEWNAVEWNGVLGDTVISCRKKGMECNGVKWNGMKGSGVEWSGAEWSGMQWNGMEWSGMEWHGMEWSGMEWNGEEWSGVEWNAMECNNGTVSNGMESNGMQSSGMEWTRMERNGIKRNGNGMDSNGMDWNGRQSNGMESNGMESNVMDWNGMDSNGMDSNGMNLMEWNGMDWNGKELNRIKCYGIKWKETEWNGMDSKGMEWNGMTWNGMEWNGMTWNGMEWIRKEWNGMDSKGMDWNGMESNGIECNGMQWNGLEWNGMERNGMDWNEMELNGMEWTGMEWTQMEWNRKEWN

SEQ ID NO: 934829 - protein, 314 aa, Homo sapiens
MESNGMESNGMYWNGMDCNVMEGKNGIEQIGTERNGMEWKGQKWNGVEWNGIKWNGLELSGNERNRMEWSVTEIYRMEWNGVESNVMELNGLEESDGTEWNGNRTEFNGMECIGIDLNGLLSTVMEPNGMESNGMEVNGIERNRMEWNNGIVSNGMNWNGMDSNGMDRSGMDSNGMEMNGMEWNGMEWNGMEWNGMQWNGKDYHGMESDEKKLNGMELNGMASNGMEWNDSNGMDSNGVEFCGIQSRGMEGNGMVWTQMEWNRIEWTQIQCTRKERSQMEFIRNEWNQMECNSMEWNRKELTRMEWTRTERTRM

SEQ ID NO: 934830 - protein, 327 aa, Homo sapiens
MEWNGMEWNGMEWNRPKKWNAMEWNGVKSSGTELNGIESNGLELIGIDRNAMDLNGIYWNKMESNGLELNETEWNQIYRIQWNGMEWTRMEWNGMDSNGMEWNGLEWNGLEWNGLEWNGKEWNGMEWNGMEWNGMEWNGMEMNGMEWNRMELNGMEWKWNGIKWNGTEGSVKARYRMEWNGMEWNGMEWNGIDSNGMDWNGMDYNGMARSGMDSSGIDWNGIDLNGTEWSGMESKEIELNGMQSNGMECNGLEWNGLAWNRIEWNGMEWNGIEWNAINAKEWNQVEWNGMEWNGMEWNGMEGNGPKWNGFEWNVTDEWNGIECNRNE

SEQ ID NO: 934831 - protein, 252 aa, Homo sapiens
MRQKCVSHSSRDSEVQGQVVCPGVTVSAAYGWSHNPVLLEVGTAFAFGKNKMQKVGLGRQTDAVPSPAQKMWPVELTTCWSWTPRSTSSSDTGWLLLAGPCGAEKRDGPPPTSGLAFLEWGPQIYAGYAWSFAVSEEGDVFFWEATNTSHESIMYLKAVLNIQGTHKPTSPTAVQDMKTLHGVFSEQAAMGYSRSLVMAALSPRIQAFQAHDCLTLPGEIELSESNDNTFDEEAVHTASSPSHPWFRNGAYR

SEQ ID NO: 934832 - protein, 130 aa, Homo sapiens
MGFPGCVVLRILLQQTLWALFQLLCCSYHLSKQLSLPTQVSVVVKGSPPARIPEAYGIRLTMGEAEILIYSVDTLTSKALAKAQESPRSDASGNEVEVKVEALVDGGAQSENKSHTLILHSSTSIDNAKN

SEQ ID NO: 934833 - protein, 126 aa, Homo sapiens
MLPLRAVTLTAKVCSFTPEASETTNPQEGNYSEHVRTSEGTNFRHTILRKVTLTGRFCGFVLKVRETKNPPILDTVSQNTMDGVDYKQQTLFSHSAGGWKSGIKLALIPFRRLFLNLQSKNFNIEF

SEQ ID NO: 934834 - protein, 217 aa, Homo sapiens
MAHGPGVSADPNSWELAPPIPDAMSSKGSMVLAHSGGLDTSCMLVWLKEQGHVVIAYLANIGQKEDFEKDRKKACKLGAKKVFIEEVSREFVEEFIWPAIQSSALYEDYYLLGTSLARLCIAHKQVEITQQEGAKMPEFYYWLNGCNDLMEYTKQHRIPIPVTLKNPWIMDENLMCISYEAGILEKHKYHKHLQIEFKKEVPVKVTNVKDGATHQTS

SEQ ID NO: 934835 - protein, 1632 aa, Homo sapiens
MCFSPKKLYKHEIHKLKDLTCLKPSIESPLRQNRSRSIEEEQKQEENGDSQLILEKIQLPQWSISLNMTDEHGNLVNLVCDIKKPMDVYKIHLNQTDPPDIDINAMVALDFEYPMTQENYENLWKLIAYYSEVPMKLHRELMLSKHPRVSYQYRQDADEEALYYTGVRAQILAEPEWIMQPSIDIQLNRPQSTAKKVLLSYYNQYSQTIATKDTRQARGRSWVMIEPSRAVQKDQTVLEGGRCQLSCNVKASESPSIFWVLPDGSILKVPVDDPDSKFSILSSGWLRIKSMEPSDSGLYQCIAQVRDEMDRMVYRVLVQSPSTQPAEKDTVTIGKNPGEPVMLPCNALAIPEAHLSWILPNRRIINDLANTSHVYMLPNGTLSIPKVQVSDSGYHRCVAVNQHGADHITMREDIVEDEGVSGTGDEENTSRRLLHPKHQEAFLKTKDDAINGDKKAKKGRRKLKLWKHSEKEPETSVAEDLRVFESRRRINVANKQINPEHWADILAKVFGKNLPTGTEVSPIIKTTSSPFLSLVVTPPLPAVSPPLASPIQTATSAEESSADVPLLSEGKHILSTISSASMGLEHHNNGVILVEPEVTSTPLEEVVDEYSKKTEEMTSTEGDLKGTAASTLISEPYEQSPTLHTLDTVYEEPTHEETETEGWSAADVGSSPDPTSSEYELPLVVVSLAESKPVQYFDPDLETNSQPHEDNIKEYSFAHLTPTAIIWFNDSSTSLSFEDSTVGEQGVPGKSHLQGPTENIQLVKSSFSTQDTLLIKKGMKEMSQTLQGGNMLEGDPTHSRSSENEGQESKSITLPDSTLGITSSTSPVKKPAETTVVTLLHKDTTTETTPRQKVASSSTMSTHPSRRRPNGRKLHPHKFHHRHKQTPPTTFAPLETFSTQPTQATDIKISNQMESSLVPTSWEINTVNTPKQLEMEKNVELISKGTPRRKHGKRPNKHRYTPSTVSSRASASKPSPSPENKHRNIVTPSSETTLLPRNVSLKTEGVYDSLDYTTTTRKIHSSHHKVQDTLPVMYKPTSDGKEIQDDVATNVDKHKSDILVPGESITNVTQTSRSLVSTMGEFKEESSPVGFPGIPTWNPSRKAQPGRLQTDIHVTTSGETPTDPPLVNELEDVDFTSEFLSSVTVSTPFHQEEAGFSTILSSIKVEMASSQVETTTLGQDHHETTVAILHSETRPQNHILTAAWMKEPASLSPPMILLSLGQTTTTKPELLSPRTSQICKDSKENVFLNYMGNPETEATPVKNEGTQRMSGPNELSTPSSDHDAFNLSTKLELEKQVFDSRSLTRGPDSHHQDGRVHASHQLTRIPAKPILPTGTVRLPEMSTQSTSRYFVTFQPPHHGTNKPEITTYPSRALPESKQFTTPRVASTTPLLSHMSKPSISSKFADLRTDQSNGSYKVFGNSNIPEARNSVGKPLSPRIYHYSNGRLPFFTNRTLSFSQLGVTRRPQIPSSPVPVMRERKVNPGSYNRIYSHSTFHLDFGLPAPPLLHTPWTMVSPPTNLQNIPMVSSTQSSVSFITSSVQSSGSIHQSGSKFFAGGPPASKFWPLGEKPQILTKSPQTVSVTAETDAVFPCEAIGKPKPFVTWTKVSTCKIFKHLLFFGSIFILLASNITIH

SEQ ID NO: 934836 - protein, 162 aa, Homo sapiens
MRHDSSSSSSSSPSSSSSSSSFLLSSSSSSSSSSPSSPSSSSFLLPLLLLFFLSFSFFFFLLLPLLSSSFLLSSSSPSSSSSSSSSSSSSSSSSSFFSLPLPILLLLSSSSSSSSSSSSSFFNLCRDGICYVAKYDLEHLTSSSPPALTYQSAEMTGLSHRA

SEQ ID NO: 934837 - protein, 133 aa, Homo sapiens
MPGFGEKGVLFLGSTLGRRDSSFYGALDENGTEILKMVVEGVYADSSSFQGGTGFSRSKFPSICDSLKPAGGKTGSHSVTQTGQSQLTEASTFWAQVILLSQPPKEDECSQIVKTSMKHEQEKNKEIIFFWEE

SEQ ID NO: 934838 - protein, 118 aa, Homo sapiens
MEPWSITQAEIQSPLVFMSLVCALLNTCQAHRVHDNKPNIILIMVDNLGIGDLGCYGNDTISEVWIRTMYSDQIRVISASSVSTINEDGQSKSVAVRTQVLALYLLPLKSWRKKALYP

SEQ ID NO: 934839 - protein, 138 aa, Homo sapiens
MCDCRLQKTKRRSTDGNRANPPGQKRNPSFTDPSSNCADSYRMRFTCVLTSHNKAGKKHLQGEVKTAAPLTQIPNPDPVLLHPRLSSGTPTWFWPYKTLQSLLLAKLLLPESARDPRISYSFSIASNNIQHRGRVRPE

SEQ ID NO: 934840 - protein, 151 aa, Homo sapiens
MGRRQPRCRPQAWKSTRLPKDGASVLRVRDEDLFPPTAPGRRSAGPRPLRAAPRTMSGSHSVTQAGVEWYNHSSLQPQTPRLKYPPTSASQVAVTTVTDQAFVTLATDDIYCQGALVLGQSLRRHRLTRKLVVLITPQVSSLLRVSLVAQA

SEQ ID NO: 934841 - protein, 146 aa, Homo sapiens
MQSSKNLLIYICCKRSLLDTFLDILSTKAAVCADLGIDATVTLAVARMTVAETKKALSPQPVAAAGWADLPTYTSCPSLGDQFQPTEPSCPMPPLPRRLSSQEYLLAPGPLPHCLLLFAINLAAAHFLATLYFYELMIFFNTYSLF

SEQ ID NO: 934842 - protein, 427 aa, Homo sapiens
MALLTSRMKLQTFTVHGLAHFKKEAEDLYDVFRVSSFWQVHGLAHFKNEAADLYDVSGLSSFWQVHGLSHFKNEAADLSDVSGVSSVWQVHGLAHFKNEAADLSNVSRYSSFWQVHGLAHFKNEAADLSDVSRVSSFWQVHGLADFKNKAADLYDVSRVNSFWQAHGPAHLKNEAADLTDVTGVSFFWQVHGLAHLKNEAADLSDVSGVSSVWQVHGLAHFKNEAADLSDVSRYSSFWQVHGLTHFKNEAADLSDVSRVSSFWQVHGLADFKNKAADLYDVSGVSSVWQIHGLAHFKNEAADLSDVSRYSSFWQVHGLAHFKNEAADLSGESHSTEKVLCPEFVHSDVSGVSSFWQVYGLVLFKNEAAEISDVSRVSSFWQVHGLADFKNKAADLYDVSRVNSFWQAHGPAHLKNEAADLTGECYRT

SEQ ID NO: 934843 - protein, 930 aa, Homo sapiens
MKMQTVTVSVTAYKGVVDGVWSFRCIQSFFFEQVHGLAQFKNKAADLGDISRVSSIWQVHGLGHFKNETADLSDVSRVSSFWQVHGLAHFKNEAADIYDVSRVSSFWQVHGLAHFKNEAADLGDVSGVSSIWQVQGLAHFKSEAAEFSDVSRVSFFSQVHGLVQFKIESPDLYDISRVSSISHVHGLGHFKNEAADLSDVSRVSSFWQVHGLAHFKNEAAELYDVFRVSSFWQVHGLAHFKNEAADLSDVSRVSSFWQVRGLAHFKNEAADLSYKSRDSSFWQVHGLAHFKNETADPYDVSRVSSFWQVLGLAHFKNEAADLSEALDSDVFGVSSVWQVHGLAHFKNEAADLSNVSRVSSFWQVHGLAHFKNETADLDDVSRISSFWQVHGLPYFKNEAADLYDVSRVSSFWQVHGLAHFKNEAAEFDDVSRVSSFWQVHGLAHFKNQAADLSDVYRVSSFWQVHGLAHFQNEAADLYDVSRVSSFWQVHGLAQFKNEAADLYDVSRVSSFWLVHDLPHFNNEAADLSDVSRVSSFWQIHGLAHFKNETADPYGECYSTETCHVQSLFLQICPEFLPSGRFMVLLTSRMKLHTFMVHGLTAFKNEAADLGDVSRVSSFWQVHGLVLFKNEAADLSDVSGISSFGQVHGHAHFNNEAEDLGGECYSSYSCYVHGLAHFKNEAADLSGECHSTLRCYVQSLFIQMCPEFLPSGRFIVLLTSRKKLQTFRVHGLAHFKNEAADLSDMSRVSSFWQVHGLVLFKNEAADLSEFVPSDVSRVSSFWQVHGLAHFKDDAADLSDVSRVSVFWQVHGLAHFKNEAADLSGMKLQTLAICPEFLPSGWFMVFLTSRMKLQTLVVHGLSHFKYEAADLGDVSRFSFFLQFHGLAHFKNEAPDHEPARRKKLRTHLNEQSLDITPLSAATLTTNVCSFIL

SEQ ID NO: 934844 - protein, 4261 aa, Homo sapiens
MCPEFLPSGRFMVLLNSGMKLQTLVMCPDFFPSGMFMVLLTSRNKEDAELYDVYRVSSFRHVHDLAHFKNEAAEVSYVSGVSSVWQIHRLAHFKNGAADRSDVTGVSFFWQLHGLAHLKNEAADLSDVCRVSSFWQVHGRAHFKNEAADLYDVSRVSSFWQVHGLAHFKNEAADLYDVSRVSSFWQVHGLAHFKNEAADLSGVSRVSSFSRFMVLLTSRMKLQTLVKCPEFLPSDKFMVLLTSRMKLQTFTVSVTALMVLCTEFVPSDVSRVSSFWQVHCLAHFKNEAADLSDVSRVSSFWQVHRVAHFKNEAADLSDVSRVSSFWQVHGLAHFKNDAADLYDVSRVSSFWQVHGLAHFKNEAADLSDKSRDSSFWQVHGLAHFKNETADPYDVSRVSSFWQVHGLAHFKNEAADLSDVSRVSSFWQVHGLAHFKNEDADLYDKSRVSSFWQVHGLAHFKNEAADLSDKSRDSSFRQVHGLAHFKNETADPYGMKLQTLAVSVTALKGFMSRVVPSDVSRVSSFWQVHGLALFKDEAADFSDVSKVSSIWQVHRHAHFKSEAAEFSASSWSCSVQERMKLQTLVVHGLAHFKNEPADLGRECYSTYRCYVPSLFHQMCPEFLPFGRYMVLLISRMTLQILVMCAEFLPSGRFMVLLTSRMKLQTLVVHGLAHFKNEPADLGRECYSTYRCYVPSLFHQMCPEFLPFGRYMVLLISRMTLQILVMCLEFLPSGRFMVLLNSGMKLQTLVMCPKFLQSGRFMVLLTSRMKLQTFRVHGLAHFKNEAADLYDVSRVSSFWQVHGLAHFKNEAADLSDVSRVSSFWQVHGLAQFKIEAADLSDVSRVSSFWQIHGPGHFKNETADHYHVSRVSSFWQVQGLANFKNEAADIYAECYNVSRISSFWQFHGLAPFKNEAADISDVARVSSFWQVHGLAHFKNEAADLCDVSRVSSFWQVHVLAHFKNEAADLGDVSRVSSFWQVHGLAHFKNETGDHYDISRVSSIWQDHGLGHFKNEAADLSDVARVSSFWEVHGLAHFKNEAADLGEFLPSGRFMVLLTSRMKLQTLVVIVTAVKGVCPEFVPSDVYRVSSFWQVDGLAHFKNEAADLYDVARVSSFWQVHGLAHFKNEAADLGDVSRVSSIWQVHGLAHFKNEAADLSDVSRVSSFWQVHGLAHFKNETADDYDISRVSSIWQDHGLGHFKNEAADLSDVSRVSSFWQVHGLAHFKNEAAELYDVSGVSSIWQVHGLAHFKSEAAEFSGSRSCSLQERMKMQTFTVSVTAYKVVMYGFSPSDLSRVSSFGHVHGIAHFKNKAADIGVHGLVHFKNEAADLSDVSRYSSFWQVHGVAHFKKELRCKPLRFMVLLTSRKNEAAHLYCECYSIERCYIESLVLQMCPEFLSSGRFMVLLNTRMKLQTLVLSVTTLKGVMSQSLFHADLHRVSSLWQVHGLAHFKNEAADLSEFLPFGKFVVLLTSRMKLQALVHRLAHFKNEAADLSDLSTVSSFWQVHGLALFKNEAADLGDECCSTYRRYVASLFHQMCPEFLPFGRFMVLLTSRMKLQTSVMCPEFLPSGRFMVLLTSRMKLQTLVVHGLPHFKNEAADLSDVSRVSSFWQVHGLVLFKNEAADLSVLQHITVLSPEFGPSDVSRIFSYGLVQGLAHFKNEAADLGDVSRVSSFWQVHCLAHFKNEAADLGDFVPSIVYRVSSFWQFHGIAHFKNEAADLSDISRVSSFWQVHGLAQFKNETADLPVHGLAHFKNEAADLGDVSRDSFFWLVHGLAHFQNEVPDLIDVSRVSSFWQAHGLAHFKNEAADLSDVSRVSSIWQVHGLAHFKNEAADLSDVSRVSSFWQVHGLAHFKNEAADLSDILPSGRFMVLLTSTMNEAADLYEFLPSGRFMVLLTSRMKLQTFRVHRLPHFKNEAVDLYDVSRVSSFWQVHGLAPFKNEAADLSDVSRFSSIWQVHGLAHFKSEAAEFSERMKLQTFKMCPKFLPSGRFMALLTSKNDAADLSGEVHGIADFKNLAADLSDVSRISSFWLVHGLVLFKNEAADLIDMSRVSSFWQVHGLAQFKNEAADLSGECYSTLRCYVQSLFLQMCPEFLPTGTFMVLLTSRKKLQTLVMCEEFLPSGRFMVLLTSRMKLQTLVVHGLAHLKNEAADLGVECYSILRCYVQSLFHQMCIEFLPSGRFMVLLTSRVKLQNLVMCPEVLPSGRVMVLLTSRMNLQTLMMCPVSSFWQVHGLTHFKKESVDLYDVSRVSSYWQVHGLAHFKNEAADLSDVSRVSSFWQFHGLAQFKNEAADFSDVSRISSFWQVHGLVLFKNEAADISDVSRVSFFWQVQGLSHFNNEAPVLYDVSRVSSFWQVHGLPHFKNEAAELSDVSRVSSFWQVHGLAHFKNEAADLSDVSRVSSLWQVHGLAHFKNEDADLYGSWFAHFKNEAADLSDKSRVSSFWQVHGLAHFKNEAADLSDVSRVSSFWQVHGLAHFKNEAADLSDVSRVSSFWQVHGLAHFKNEAADLSDVSRVSSFWQVHGLAHFKNEDADLYDVSRVSSFSRFMVLLTSRMKLQTLVVSVTAVKFLCPEFVPSDKSRVSSFWRVHGLAHFKNEAADLSDKSRDSSFWQVHGLAHFKNEAADLYDVSRVSSLWLVLGLAHFKNEAADLYDVSRVSSFWQVHGLAHFKNEAADLSDVSRVSSFWQVHGLAQFKNETADLYDVSRVSSFSRFMVLLTSRMKLQTLVISPEFLPCGRFMVLLTSRMKLQTLVMCPEFLPSGMFMVLVTSRKNEAAEHYDMSRVSSFWQVHGLAHFKNEAADLGAADLYAECHSNLRCYVQSLFIQMCPEFLPSGRFMVLLTSRMKLQTLVLSVTAVKGVCPEFVPSDVSKVSSFWQVDGLAYFKNEAADLYDVSRVSSFRQVHGLAHFKNEAADLGDVSRVSSNWQVHGLAHFKNDVADLYGRGLAHFLNEAADLYMCPEFLPSDRFVVLLTSRMKLHTLVVSVTALKFLSPEFVPSDVSRVSSFWQVHGLADLKNEAADLYDVSRVSSFWQFHGLAHFKNEAAERSDVSRVSSFSPVHALAHFKNEAADLSDVSRVSSFWQVHGLAHFQNEAADLYDVCRVSSFWQVHGLAHFKNEAADLSDVSRVSVFWQVHGLAHFKNEAADLSDVSRVSSFWQVHGLAHFKNEAADLSDILPSGRFMVFLTSTMNETADLYDVSRVSFFWQVHGFAHFKNEAPELYDVSRVSSFWQVHGLAQFRNEAADLSDVSKVSSIWQVHGLAHFKNETADLSDVSRVSSFWQVHGLAHFKNEAADLYDMYRVSSFWQVHCLSHFKNEAADLYGECYSPERCYVQSLFLQMCPEFIRSGRFIVLLTSRMKLQNLTMCPEFLPSGWFMVLLTSRMKLQTLVVHGLAHFKNEAADLSDMSRVSSFWQVHGLVLFKNEAADLSDVSRVSSFWQVHGLAHFKNEAADLSDVSRVSSFWQVHGLADHKNESADLYGVSRISTFWQVYGLAHFKNEAADHHEIVPSYVSRLSSFWQFHGLAYFKNETADHYGERYSTERCYVQSLFLQMCPEFLPTGRFMVLLTSRMKLQILVMGPEFLPSSRFMVFLPSRVKLQTFKMCPEFLPSGKFKVLLTSRMKLQTFTVSVTVHGPAHFNNVAADLYDVSRVSSFWQVHGLAHFKNEAADLSDVSRVSSFRQVHGLAHFKNEAADLGDVSGVSSIWQVHGLAHFKSEAAEFSDVYRVSCDWQVHGLAHFKNEAADLGDVARVSSFCQVHGLTPFKNEAADLGDVSKVSSIWQVHGLSHFKSEAAEFSDVSRVSFFWQFHGLAHFKNEAPDLYDVSTVYSFWQVHGLAHFKNETADLYGMKLQTLAMCPDILPSSKFMVLLSSRKNEAADLSDVSRVSSFWQVHGLAHFKDAAADLSDVSKISSIWRVHGLAHFKSEAAEFTGECYSTKRCHVQSFLLQLCPDILPSGRFMVLLTSRKNEAADLYDVSKFSSIWQVHGLAHFKSEAAEFSDVSRVSSFWQVHGIAHFKNEAADLSDVSRVSSFWQVLGLAHFKNEAADLYDVSRVSSFWQVHGLAHFKNEAADRSDVSRVSSFWQVHGLAHLKNDAADLYVSSFWQVHGLAPFKNESVDLYGECYSNERCYVQSLFLQMCPVFLPSGRFMVLLTSRMKLQTFTLRHLKVLCPEFVPTDVSRVSSFWQVLGLAHLKNEAADLYDVSRVSSFWQVHCLAHFKNEAADLGDVSKVSSIWQVHGLAHFKNEAADLSDVSRVSSFWHVHGPAHVK

SEQ ID NO: 934845 - protein, 932 aa, Homo sapiens
MKLQTLVVHGLVLFKNEAADLSDVSRIFSYGLVQGLAHFKNEAADLGDVSRVSSFWQVHCLAHFKNEAADLGDVSRVSSFWQVHGLAQFKNEAADLSDVSRISSFGQVHGLAHFKNEAADLGDVSRISSFWLVHGLVLFKNEAADLIDVSKVSSIWQVHGLAHFKSEGAEFSDVSRVSSFLHVRGLAHFLNEAADLTDVSRVSSFWQVRGLAHFTNEAADLTDVSSVSSFWQVHGLPHFKNEAADLTGPEFVSSDVSRVSVFWQFRGLPHFKNEAADLTDVSRVSSFWQVHGLAHFTNEAADLTDVSSVSSFWQVHGLPHFKNEAADLTDVSRVSVFWQFRGLPHFKNEAADLTDVSRVSSFWQVHGLTHFKNEAADLTDVSRVSSFWQVRGLAHFLNEAADLTDVSSVSSFWQVHGVAHFKNEAADLTDVSRVSSFLQVRGLAHFLNEAVDLNDVSRVSSFLQVRGLAHFLNEAADLTDVSRVSVFWQVHGLAHFTNEAADLTDVSRVFSFWQVRGLAHFLNEAADLTDVSRVSSFLQVRGLAHFLNEAADLNDVSRVSSFLQVRGLAHFLNEAADLNDVSRVSSFLQVRGLAHFLNEAADLTDVSRVTSFWQVHGVAHFKNQAADLTDVSRVSSFWQVHGLAHFTNEAADLTDVSRVSSFWQFRGLPHFKNEAADLTDVSRVASFWQVRGLAHFLNEAADLTDVSRVSSFLQVRGLAHFLNEAADLNDVSRVSSFWQVRGLAHIFNEAADLTDVSRVSSFWQFRGLPHFKNEAADLTDVSRVSSFWHVHGLAHFKNEAADLTDVSRVSSFWQFRGLPHFKNEAADLSDVSRVSSFLQVRGLAHFLNEAADLNDVSSVSSFWQVHGLAHFKNEAADLTDVSRVSSFWQFRGLPHFKNEAADLTDVSSVSSYWQVHGLAHFKNEAADLTIQC

SEQ ID NO: 934846 - protein, 4258 aa, Homo sapiens
MKLQTLLVSVTAVKVLCPLFLPSDVYRVSSFWQVHGLAHFQNEAADLYDVSRVSSFWQVHGLAQFKNEAADLYDVSRVSSFWQVHGLAHFKNEAAELSDVSRVSSFWQVRGLAHFKNDAADLYDVSRVSSFWQVHGLAHFKNEAADLSDVSRVSSFWQVHGLAHFKSEAADLSDVSRVSSFWQVHGLAHFKNEDADLYDVSRVSSFSRFMVLLTSRMKLQTLVVHGLAHFKNEAADLSDKSRVSSFWQVHGLAHFKNEAADLSDKSRLSSFWQVHGLAHFKNEAADLYDVYRVSSLWLVLGLAHFKNEAADLYDVSRVSSFWQVHGVAHFKNEAADLSDKSRVSSLWQVHGLAHFKNEAADLSDVSRVSSFWQAHGLAHFKKEAAELSDVSRVSSFWQVHGLAHFKNEAADLSDVSRVSSFWQVHGLAHFKNEDADLYDVSRVSSFSRFMVLLTSRMKLQTLVVSVTAVKFLCPEFVPSDKSRVSSFWQVHGLAHFKNEAADLSDKSRLSSFWQVHGLAHFKNEAADLYDKSRLSSFWQVHGLAHFKNEAADLYDVYRLSSLWLVLGLAHFKNEAADLYDVSRVSSFWQVHGLAHFKNEAAELSDKSRDSSFWQVHGLAHFKNETADPYDVSRVSSFWQVHGIAHFKNEAADLSDVSRVSSFWQVLGLAHFKNEAADLYDVSRVSSFWQVHGLAHFKNEAADRSDVSRVSSFWQVHGLAHLKNDAADLYVSSFWQVHGLAPFKNESVDLYGECYSNERCYVQSLFLQMCPVFLPSGRFMVLLTSRMKLQTFTLRHLKVLCPEFVPTDVSRVSSFWQVLGLAHLKNEAADLYDISRVSSFWQVHGLAQFKNETADPSDVCRVSSFWQVLGLAHFKNEATDLYGRGLAHFLNEAADLYMCPEFLPSDRFVVLLTSRMKLHTLVVSVTALKFLSPEFVPSDVSRVSSFWQVHGLADLKNEAADLYDVSRVSSFWQFHGLAHFKNEAAERSDVSRVSSFSPVHALAHFKNEAADLSDVSRVSSFWQVHGLAHFQNEAADLYDVCRVSSFWQVHGLAHFKNEAADLSDMFRVSSFWQVHGPAHFKNEAADLYDVCRVSSFWQYHGIAHLKNEAAELSDVSRVSSFWQVHGLAHFKNEAADLYDVSRVSSFWQFHGLAHFKNDAADLYDVCRVSSFRQVHGIAHFKNEAADLSDVCRVSSFRQAHGIAHFKNEAADLSDVCRVFSFRQVHGISHFKNEAADLSDVSRVSSFWQDHGLAHFKNEAADLSDVSRVSSFWQVHGLAHLKNEAADLYDVSRVSSFWLVHGLAHLKNEAADIYDVSRVSPFWQVHGLAHFKSEAADIYDVSRASSLWQVLGLAHFKSEAADLYDMFRVSSFWQVHGRAHFKNEAADLYDVCRVSSFWQYHGIAHLKNEAAELSDVSSISSFWQVHGLAPLKNENADLYDVSRVSSFWQVHGLAHLKNEAADLYDVSKVSSFWLVHGLAHLKNEAADLYDVSRVSSFWQVHGLAHFKNEAADIYDVSRVSSLWQVLGLAHFKNEAADIYDMFRVSSFWQVHGPAHFKNEAADLYDVSRVSSFWLVHGLAHLKNEAADIYDVSRVSSLWQVLGLAHFKNEAADLYDVCRVSSFWQVHGVAHFKNEAADLSDVSRVSSFWQVLGLAHFKNEAADLYDLSRDSSFWQVHCLAHFKNEAADLSDVSRVSSFWQVHRLAHFKNEAAELSDVSRVSSFWQVHGLAHFKNEAADLSDVSRVSSFWQFHGLAHFKNEAADLYDVCRVSSFWQVLGLAHFKNEAADLYDVSRLSSFWQFRGLPHFKNEAADLSDVSRVSSFWQFRGLPHFKNEAAELTDVSRVSVFWQVHGLPHFKNEAADLSDVSSVSSFWQVHGLPHFKNEAADLTDVSRVSSFWQVRGLAHFFNAAADLTEVSRVSSFWQFRGLPHFKNEAADLTDVSRVFSFWQVRGLAHFLNEAADLTDVSRVSSFLQMCPECLPSGRFMVLLTSLMKLQTLLVRGLAHFLNEAADLTEFDPSDISRVSSFWQVRVLAHFFNEAADLTDVSRVSSFWQFRGLPHFKNEAADLSVECYSTVSSFWQVRGLAHFFNEAADLTDVSRVSVFWQVHGLPHFKNEAADLSDVSRVSSFWQVRGLAHIFNEAADLTDVSRVSSFLQFRGLPHFKNEAADLTGECYSTLRCYVQSLFLQLCPECLPSGRFMVLLTSRMKLQTLLMCPEFLPSCRFVVLLTSLMKLQTLLVRGLAHFLNEAADLTDVSRVSSFLQVRGLAHFLNEAADLNDVSRVSSFWHVHGVAHFKNEAADFSVECYSTYRCYVQCLFLQMCPEFLPSCRFVFLLTSLMKLQTLLVRVLAHFFNEAAELTDVSRVSSFWQFRGLPHFKNEAADLSDVSRVSSFWQVRGLAHFFNEAADLTDVSRVSSFWQVRGLAHIFNEAADLTDVSRVSSFWQFRGLPHFKNEAADLSVECYSTVSSFWQVHGLAHFKNEAADLTDVSRISSFRQFRGLPHFKNEAADLSVECVSRVSVFWQVHRLAHFKNEAADLCDVSRVSSFLEVRGLVHFLNEAADLTDVSRVSSFWQLHGLAHFTNEAADLTDVSRVSVFWQVHVMAHFKNEAADLSDVSRGSSFWQVHGVAHFKNEAADLSDDSRVSSFLQVRGLAHFLNEAADLTDVSRVSSFWQFRGLPHFKNEAADLTDVSRVSIFWQVHGVAHFKNESADLSDMSSVSSFWQVHGLAHFKNEAADFYDVSRVSFFWQVHGVAHFKNEAADLTDVSRDSSFWQFPGLPHFKNEAADLSDVSRVSSFWQVRGLAHIFNEAADLTDVSRVSSFLQFRGLPHFKNEAADLTDVCRVSSFWQVLGLAHFKNEAADLYDLSRDSSFWQVHCLAHFKNEAADLSDVSRVSSFWLVHGLAHFKNEAADLYDTSRVSSFWQVHGLAHFKNEAADLYDVSRVSSFWQVHGLAHFKNEAAYLSDVSRVPSFWEVHGFAHFKNEAADLSGEFYSNVKVLCPEFVPSDVSRVSSFWQVHGLGHFKNEAAELSDVSRVSSFWQVHCLAHFKNEAADLSDVSRVSSFWQVHGLAHFKKEAAELSDVSRVPYFWEVHGLVHFKNEAADRSDKSRVSSFWQVHGLAHFKNEAADLSDVSRVSSFWQVHRLAHFKNEAADLYDVSRVSSFLQVHGLVHFKNEAADLYDVCRVSSFWQDHGLAHFKNEAADLSDVSRVSSFWQVHGLAHFKNEAADLYVSSFWKVHGLAHFKNETIDFYGECYSTERFYVQSLFLQMCPEFLPSGRFMVLLTSRMKLQTFSMCPEFLPAGRFMVLLTSRMKLQTLVLSVTAVKFLCPEFVPADKSGVTSFWQVHGLAHFKNEAADLYDVSRLSSFWQVHGLAHFQNEAADVSDMSRVSSFWQVHGITHFKNEAADLYDVSRDSSFWHVHGLAHFLNEAADLTDVSRVSSFLQFRGLAHFLNEAAGFTDVSRVSSFWQVHGLPHFKNEAADLTEFVPSDKSRVSSFWQIHGLAHFKNEAADLSEVSTVSSFWQVHGLAHFKNDAADLYDVSRVSSFFQVHGLAHFKNEAADLYGPEVVPSDVSRVSYFWQVHGLAHFKNEAADLSDVSRVSSFWQIHGLGSFNNEAADLYDVSRVSSFWQVHGLPHFNNEAADLSDVSRVSSFWQVRGLVHFKNDAADLSGECYSTKRCYVQSLFLQKYPEFLPSGRFMVLLTLRMKLQTLLVHGLAHFKNEAADLSDVSRVSSFWQVRGLAHFKNEAADLTEFVPSDMSRVSSFWQVHGLAHFKNEAADLCDVSRVSSFWQVHGLPHFNNEAADLSDVSRVSFFWQVHGLAHFKNDAADLYDVSRVSSIWQVHVLAHFKNEAAELSDVSRVSSFWQVHGLPHFNNEAADLSDISRVSSFWQVRGLVHFKNGAADLSDVSRVSSFWQVHGLAHFKNEAADLSDVSRVSSFWQVRGLAHFKNEAADLTDVSRVSSFWQVRGLPHFLNEAADHTDMSRVSSFWQVHGLAHFKNEPADLCDVSRVSSFWQVHGLAHFKNEAADLYDVSRVSSFWQVHDLAHFKNEAAELCDVSRVSSFWQVRGLSHFLNEAADHTEFVTSDMSRVSSFWQVHGLAHFKNEAADLCDVSRVSSFLQIHGVAHFKNEAADLSDECYSTLRCYVQSFFLQMCPAFLPSGRFIVLLTSRMKLQTLLLSVKALKAVRGLAQFLNEAADLPDVSRVSSFWQVRGLVHFKNDAADLSDMSRVSSFWQVRGLAHFFNEAADLTGECYST

SEQ ID NO: 934847 - protein, 486 aa, Homo sapiens
MKLQTLVLSVTALKAVMSRVCSFRSVQNVFLLADVSSVPSFWQVHGLAHFKNEAADLTDVSGVSSFWQVHRLAHFKNEAADLTYVSRVSSFWKVRGLVHFKNDAADLSEISRVSSFWQVYGLAHFKNEAADLTDVSRVSSFWQVRGLPHFLNEAADHTDVSRVSSFWQVRGLAHIFNEAADLTDVSRVSSFLQFRGLPHFKNEAADLTDVSRVSSFLQVRGLAHFLNEAADLTDVSSVSSFWQVHGLAHFKNEAADLTDVSRVSSFWQFRGLPHFKNEAADLTDVSRISSFLEVRGLAHFLNEAADLTDVSRVSSFWQLHGLAHFTNEAADLTDVSRVSSFWQIHGLVHFTNEAADLTDVSRVSSFWHFRGLPHFKNEAADLTDVSRVSSFWQFRGLPHFKNEAADLTDVSRVSFFWQVHGVAHFKNEAADLTDVSRDSSFWQFPGLPHFKNEAADFTDVSGVSSFWQVHGLAHFKNEAADLTIQC

SEQ ID NO: 934848 - protein, 145 aa, Homo sapiens
MPVLPLYFRKVSPVKTEKQQRCQHAPSSRSFTPDGYWFVTHSNLAVESGWGFYLEGLTLLGGIESGTYLKKQFCCFLVEQPCCIRDPFTPQLLQSSSLDSSLASCTCHGINCLLVGTSINGTTLTLKLGNKPFAVCTPLDCILNP

SEQ ID NO: 934849 - protein, 140 aa, Homo sapiens
MRKLIMGLIFLKIWTCTVRTSTDLPRTEDFSQCIHQVTEATWKKDEKDTVHLQKGKSNSSCTSAHCNPLELLIANPLDLCWKTGEYVTLGINGTGLDPQGNILVQGYVHRCCPKPVFQTFYDELNLPAPELLKKTTYFPS

SEQ ID NO: 934850 - protein, 141 aa, Homo sapiens
MNRKESCFVTTSSCLGTAGLLDLAGGPLQTLFAWVSPVQAAEQQILQNSKNCCLILSPEASSQRGTQLYEVSVSHYWEVSSTMLCPQGWIQWRQQALPYCSELHPLRASSDTLFTYSSLSNGGQPTTCPAAALQVDLRLLH

SEQ ID NO: 934851 - protein, 176 aa, Homo sapiens
MCSFLFPIYCCLSILWWILLGKGIWCHGCHLCHGCCLCGCCTGLLLRELLSELLLLRLHHVRSHGVCQGQGLYGSAVEHHHPGEATQGTAINSRGDSQQGCDCASLGDIMQCLETLLVVATKRGCVVLASVFQWLFPCGSLEIEGNCLRSIVSNCYGVFYPKFWFTAFIGLSIGAQ

SEQ ID NO: 934852 - protein, 232 aa, Homo sapiens
MQHFLKIDGKVRVDITYPAGFIDVISIEKTGEHFRLVYNTKGCFAVHRITVEEAKYKLCKVRKITVGTKGIPHLVTHDARTIRYPDPLIKVNDTVQIDLGTGKITSFIKFDTGNVCMVIAGANLGRVGVITNRERHPGSCDVVHVKDANGNSFATRISNIFVIGNSRAVLLSSGLVLPQNQSCWMICVLLTGPLVLGSQLQLAVANPGYDSCNFNSSGSRQDYSVGPIPCGP

SEQ ID NO: 934853 - protein, 162 aa, Homo sapiens
MMHQTMGLLGPNPEIKKMTLQDPQLRLYLLHLYWAHLLHPSFFRLVTWADTPFPASNNVTAWLGGIDLLPLGFLINGTHWTKVRGNTTYHPTILPLYVNCKSSTPYCVPAQTQVWLHHGKGNVLTGLLAYSLKLGNAINATFSNIPHCAKEQKQESNGFHFS

SEQ ID NO: 934854 - protein, 126 aa, Homo sapiens
MGKKQNRKTGNSKTQSASPPPRNSVPHQQWNKAGWRMTLTSCKEVENFEKNLEECITRITNPEKCLKELMELKTNARELREEFRSLRRQCDQLEERKPYKPEESGGQYSTFLKKRIFNPEFHIQPN

SEQ ID NO: 934855 - protein, 366 aa, Homo sapiens
MGSICGTIPSQLSMGNGWKHQPAEEGALLPDCHGGRCPPEASCPAGYEDAWGASLAPWQMRLFQRDFRTRCFGCRGVPERLLGLPSSSPAPALCYSGRRSTERRESVSSCRGQWQWKSLLEVRSRPYLPGYHQWRMQNNKDCCLVLHLEASFQRGTCQMPTRAFLYKGSVSSYWKASSSLDTQWVMDPLDEAVCPLLELGCYAGRTTALFKAVRQGPLSLLKLRHSHPFPQMLCPRELWWVLSSPNTLAALFTLLMSAVVVMAGCVSQCLNPGRSNWAEQLIGLGCTGITRICQQTCSQAPWLYIQLLTVTERKECSSGHRQSAHLSAVPAMLQGCHWEVSSKSFSIQLCSIAGEELHFFGGGEAL

SEQ ID NO: 934856 - protein, 169 aa, Homo sapiens
MRDDTVSCLLRGMKKYTKKPFNCEKVKEVSQHKCENPDLFQGLLIEKIRQNPQLQVCWSLLEVHSRPCLPGYQQQWLQNSDSCRTADLGECKRCCLIVPLEVLSQRSTRLCEVSVCPYVGVPPPACWESHYSLQSSLTGTFKSAEVTAVCLFFCALPPEVEPTEAGSPP

SEQ ID NO: 934857 - protein, 140 aa, Homo sapiens
MILAVVCQSHSPSSFVPLLVGICVPLEEERTVDFGEQQMVLSDHSSGSFVSEDYPAMWGVSLPLRGDASHLGYSVFRDPLEEAVCLFSDLQLRAGRTTTLFKDVRQGHLSLQRILLPFVWLCPATRGEAYRGRQASLSSG

SEQ ID NO: 934858 - protein, 147 aa, Homo sapiens
MNPVHRPVCDLCTYSRHTGGVDSHTSNQDMCGILKILSLNLPAGYVMLHFCLHPVHRKIVTYGLTKQQGVVIVFHLQEKIVTPKQCYSFALPLHSEDIVIYYGAQNPGDVALAGPYPKGALGHMVGPTTQVQRPDDVSVLFCQDLTH

SEQ ID NO: 934859 - protein, 199 aa, Homo sapiens
MVKTGLLLPLQIQLTASAQESKHAASGPRSSQPLIKQNIISVTLINMLCLSSYSHNSVEEDYWFLGADNYYSAVKSRNFDPSGECDPSVLANKFGIKMNNPHVVLQRPTMEISWVGTGNSFYVKKRVFYDDYSKSLGKTPSYDQPRHPYIKHGESSMISRQQETSKLRCIGKNATYFDPLAWKEGIHQKGTYTNKGGTR

SEQ ID NO: 934860 - protein, 138 aa, Homo sapiens
MVPSWKTSPRTVWKGNAVSEPTHRIPTKALPSVTVRKGSPSSRLHNGRPTDSLQHAPGKATDTQPQPVKSDRWVAIPCKATEVELPKTMGTYLLHQCDLDLRPGVKRDHFGTSKLYFPTGFHTSMGPVTPLFSPISPI

SEQ ID NO: 934861 - protein, 146 aa, Homo sapiens
MSSWRIVYTPISTLSSSGNPLESTSGSGSFVLLLFAVNLAAAHSLGLHCLYELLTLTTKVCSFTPEASKTTNPLGGVNNSRCSTLRAVTLTVKVCNFTPEASETMNPPEGRNSEQSEHQKEQTLDTPSLRTVNTHCEAPWLHSSSQ

SEQ ID NO: 934862 - protein, 146 aa, Homo sapiens
MMLHHLKIMDTMTTVVLVGVNNPLEDIVFPADINKRFLNLMTVMATKGAVVEIILNIQVEVLTEMHIRVMDTIAQVMEHLQEVVGEADVKKETEADIKGDIKNNTYRGIQQGRWKNDERFEGGYVKGFKEGKGKIEGSERRNKKHE

SEQ ID NO: 934863 - protein, 227 aa, Homo sapiens
MVSELLVALTSKHGYTSQNLFSLITVTLITVVQNWNLTVKSPGGNCYNGSNYGNDYFSAPVLTDLGEDGTSVFLPKCCISQDHPGLPHLHPATPPSCDIRNPQILAGSDTAAGRLEGPLAEKDTATGPREDTGGRRAQRLRLQGIHRRRTLSFEELWEESADLSHSKGKLPSRSICLLGPHLSADNLYLMKPCTYSPSPRVSQFFRYTKAINPGIQIAFCLCKAPLS

SEQ ID NO: 934864 - protein, 257 aa, Homo sapiens
MILAVAVNLWTHSVCDEAKFWNQEEFPALLPLTEPIAKTVPQWIQDRFPAMNPWAKTMAETVIPLTLDEMTPVEFPAIHSWKQLETDIITLGTQAESLVMNSWIHSPISDMVTMCIQAESLLLHPWTQSETDILTTWILAETLGVIPWEQDIFQPWTHAEHPPVSWTQSLIPGKTPAMNPWRDVTADMVLPWNQAEFIVGNAWTQSETYTVTQGILNGPPARYSWTQQIADVDKLWTKPEFPTINPWTKSVGDTTIQ

SEQ ID NO: 934865 - protein, 200 aa, Homo sapiens
MAPHGCLTQGRPIHLAFLKLSFPQKVNDWTQPIPATVIPPNQAESVGVNPSTNLETEIVILWTQAHSKINNPCTYTLFDRVTPLAKNVCVADLLPGINPLTVAETGIVTLQYMAVSLVMIPRREALSDTVIIWTQTKPPAITFWLQSLPDAGKLQTQMKYPSVNTWNEAEFQAVNSMMESKSPVVNIWTDPESPAPSPLL

SEQ ID NO: 934866 - protein, 218 aa, Homo sapiens
MTSSCIHVAAKDMILFFLWLWTIPAFICTAFSLSHPRWMGSYVDAMGLIPVKRGPSSRSGGPPPKKSAPSAVARSNSWMGSQEIIEVPEKLGIMLHHLEAMHTVIMVILVGMKVILEDTEIVEVPEKLGSMLHHLEAMDTVIMVILVDMKVILEDIETRDYAPPHRDYAYRDYGHSSWDEHSSRGYSYHDGYGEALGRDHSEHLSGSSYRDALQRYGV

SEQ ID NO: 934867 - protein, 157 aa, Homo sapiens
MEHSPPAWEDQEAFEWGSQQEQAFYELKEKLMSAPALVLPDLTKPFTPYVSGREKMAVGVLTQNVGSWLRPVAYLSKKLDRVSKGWSSCLRVLAATALKAQEADKLTLGQNMNIKAPHAVVTLLNTKGYHWLMNARLSKYKAFSVKIPTQSMKFVTT

SEQ ID NO: 934868 - protein, 155 aa, Homo sapiens
MQHYPRELGPQRGNREEAREAAQGWGMRGLWVLEPGYIAKPRLKEETEALGMDESLPLHDHWHSKSCGKKQLCYVPQALHIYSMVGQLRLLFKVPRWLARTAIIRSSNWCPSLPEIWRTEFFLFILALASCSRSSRKATSVLGNQERKLNQRLLG

SEQ ID NO: 934869 - protein, 149 aa, Homo sapiens
MEKARKAAQASQAANHPTMHSKSFSPTKLYEYKMPKSRNCKVPKKVSQPALRSERSPFSSYLCLPQCDEQGASFIPVCVAGHSALTFNRSKTVVLHQERKSTNSLGQSKSSPVLPVVAALKERTMDFPFDQGKLLALPQLGVVPGADPS

SEQ ID NO: 934870 - protein, 188 aa, Homo sapiens
MTQHCGQPPGVDFSVFYKKTWNEESQKIQGGHKRMKEPVVETSESKNDPSDICHQSNVFSPDCSAGIMGPRLYSHCDTEDPSNSGGAAVKLEVSLVAQEEKLMKWLLEGLHKGGRAKIIVWPRTSQTQTASEKQTALHATREIQGQLHVVYSQRKIQKDSGTATAKRDDAKERQRLVTQLQAYKIQDI

SEQ ID NO: 934871 - protein, 148 aa, Homo sapiens
MTVSFSFRNRGFLRPNANPKANTVGMGTPFWFPSGTQRRASSALKSQVILQTQECGAGIEPGSHSRSFFSPMFGITGCCSHQCHHHHGYDGRHNFCYHIACRSGEKASSSEKKIWLQENCLNIRLVQKLLRFLPLKVMTKTAITFAPI

SEQ ID NO: 934872 - protein, 137 aa, Homo sapiens
MATSRVNTHFIHISSTIAQVSRDDVTGEHFMFFLFLMNNGATSFPSFPPCPRGCAVAVCAWQAESILANSVGTKWCFTVVVIYICLIPHFAFNICYLVQLLHLLHTPYSSVKLPQPSLHKHQFKDIASVFPAKESLT

SEQ ID NO: 934873 - protein, 164 aa, Homo sapiens
MRKLPDLFLFGHPKNPIPERVPPHTQKEGVLLREAKKNLDTQVWLGFPTQTISIGSGPFCPTLFLHSCPDLVELKHKNGPSPLVSGVFILNAPVKSSGAMTPQNQYNKQQFCKAECCCWNNNYTMSRSMPTEHYLPPGNGCHIAQKSNQPTPKPPLPIELFTSI

SEQ ID NO: 934874 - protein, 144 aa, Homo sapiens
MKKVQFRWFLSPKSFSIQLCSIAGKELCSIAGKELCSIAGKELRSFGGGEVEKPPEALFAHMEHNEQVRFLSIPSLALAALAHCDILLFSPFPHGRGLYRADFSSYRGSEALGFGSGCQLSSSVFFHVPFAGAKYANDFFPSCV

SEQ ID NO: 934875 - protein, 147 aa, Homo sapiens
MPTWMKFGFRVTEEVSGGGPHYTMLHKLREEMVGWMDEWMSGWMGRRIQPCRKLPFCFPAAPSLVPTQELPLAREAARTNSTCQVCIPPGQLSKPHQAPSYHTAHHHLTDVFLPQAFSHVAFEACPWEHVCPLGKFKFLCVHFCASS

SEQ ID NO: 934876 - protein, 262 aa, Homo sapiens
MTKQGSLTPTKITLVHQQWIQTKKKSLIYLKKSLEGESIGVYPVSKHYLSTLRVTSGWRFEVKPGDTSYDGLKEKCKLAVPGGTAIDEPSVIRMRNRKEGNMGKLNECQVDQRDTVMGVRCGICNNVGSRIEVQARNNGNCGRLSKGEPWARVSGALGVAAGRVGQSSFQWGPAQMGRGLGGILGCRHSLAQWPDFWHLKQDPGGGVPEGMPDCCGLGVLKFLCAGDVAGVSLTVEARNCKSEICCYFAAPTLLVHLGGEVN

SEQ ID NO: 934877 - protein, 158 aa, Homo sapiens
MLTIVNPPSLRNKNINSFWDYRSAASFLKSARPQIHRKEQTLVTSWQLRRDYHQAAFWERANNPRLFGIDIVGFPGTSFHFSCTSELSQRSTERKAHLQGPNKNLVDPVAMSRTLRATMPKRKTSVFAAALVSAIIPISRVQKLLWVLGQEGDQLLHQ

SEQ ID NO: 934878 - protein, 145 aa, Homo sapiens
MVHTGPAGAALAHAKRRSKGEGARRRWVLMEEESGQGGVPFTFHHEWKQTEASPEADAGTVLPVQPVELKKNCGIKPVDYDKVREIAQEKDENPTLIQGCLYEALRKYTNIDPDPLEVVMRQHTSSAYEDDEIKRVKTGIGNYDY

SEQ ID NO: 934879 - protein, 146 aa, Homo sapiens
MWGPQLPSYLASASSSTFRVLALKICSTCAGVIEIPVALCGSALPGCIWFVRAEEHTIQLLAVCCRGPSAAGLLEFTGGPLQTLFAWVSAVVAAEQRTLVNRKCCCLIVPLEVLSQRSTRPCGLQVTRECPNCRGSLTMYLCPEIL

SEQ ID NO: 934880 - protein, 152 aa, Homo sapiens
MAQASTSAEGFRLLPLMAEGASEGARTPYFLLGSRGSKDKCSNSYNYESVISGLLELSSQRKTKLQLQCSGVGLSEKHKAIAVVFRQVQVTCAGGLKQARHIWGSKDKCSNSYNYESVISGLLELSSQRKTKLQLQCSEADPGAMLIQSVEP

SEQ ID NO: 934881 - protein, 143 aa, Homo sapiens
MRAAICFSLVPPYEKHPQHVPGPSSNNMLGTNVLTLPNLPFSKIFNSQDHGLFTNNYPKPSTDSIASAVNPRPENRSSPCQQEVTRMKTPSLLLFSMIRSGLTEQEHCHLGQAPNSKVHFNKNHLNPKGISLMAKVGMTINHK

SEQ ID NO: 934882 - protein, 211 aa, Homo sapiens
MVLILTVPEAEEWQLSELCARKIPELDLHTRPLFEASKGKEREPLLWEKEEEKAFKDIKEALIQAPALGLPDVKKPFFLIRQWSCICGRSSTTADSAFKDQMETGHSLLTTEFREDRTDELDTQTATKKVLPGNSLTMGSGLAHGPPPGVTPWIHHSWLKAAAAVTPMTTSGLANKTQITPPEWSYNEIQPLDRQHYYELMDKEQDLELQY

SEQ ID NO: 934883 - protein, 152 aa, Homo sapiens
MAYASALEAGLCLWVVDVNEDPGMRRSCPYWSGKLGYTLDNLNDSCGGKKAQCWNARSGDLRRTLWCSVEGTVAKSNHTASKYFVENFLLPDTHFHHSQVWPSTKTVDLDIEVPFVNTATLSVKFNLSFGRDKYLNYRNSKLLYVNKSRNLD

SEQ ID NO: 934884 - protein, 158 aa, Homo sapiens
MPGQTQVQASLQRTQDADLILQTQRQGLIQQIPVFLASLQWVQTSSFSLEKFVITDHLKPTSINSSKSFSIQLCSIAGEELYSFRGEESDPSAAGLLEFAGCPLQTLFACVSPAEATEQEILQNSKCCCLILPLEASSQRGTQLYEVSVSPYWKVSPS

SEQ ID NO: 934885 - protein, 173 aa, Homo sapiens
MHNTFEPMNIVKLWKTKEYSEVGCWHLNSLDEVTKEKDKLRDYISWLQKHIPSLKYFKIALGESLIFCKQRAGIVENQTQALIMTKGQKMNLYDEVRESQPFSQFQDLSQFTNLEPLKRRDVSQFTDPVPLRKSLTTLLTIYAVNLSLILPQGERWPFTRVTVHWENKNNQTF

SEQ ID NO: 934886 - protein, 134 aa, Homo sapiens
MEQASHLDPTDHTPQLTWTILPQGFKDSPHLFGQALAQDLGHLSSPGTLVLQYIDDLLLATISEASCQQATLDLLNFLANQGYNVFGYQVLLLEGPVLQICTCMVLNPATFLPEDGEMIMHDCEQNSPDVCCPR

SEQ ID NO: 934887 - protein, 148 aa, Homo sapiens
MAVFVCGSPGCGGLRANSGPSNNCLHPTSSNECPKLKGLSLDLTEPYKQISNTPSTDSEATRYTDGSSFMIGGTQLSGYATINLTEITESGPLPGSSTSAQKAELIALTCALQLGAGLRLNIYTDSAYVYHAVHAHAAIWQERGLLMA

SEQ ID NO: 934888 - protein, 134 aa, Homo sapiens
MLENGNRTCFSSLKHTPKYNFDITQNASAEKNGIAISASSLQIKNKAFLKKDGASSLKNMVLHVTPDTHAQGPSSSKQGDILASLIHTDWCLLLVLLHSGVTIPLQEDFLLKECFEDEGSERLIIESLRAMMLE

SEQ ID NO: 934889 - protein, 270 aa, Homo sapiens
MKSLVLSLEEEEKKKKKKKKKKKKKKKKKKRRKKKNNNNNNNNNKGGGGGRKKKNEEEEGEGRGRRGEKEEKKEEEEKEEDEEEEEEGEGGEKKRKKKEKKKEEEEKKKEDEEEKEEEEKEEDEDDKEEEEEEEQVGGGERRKRKKEGGGERRRRQTGGRERRRRKKKKKKKKKKKEEEEEEEEEEKKKEKKKKKKKKKKKKKKKKKKKKKKKKQKKEGGGGEEDEEDEEEEEGKKEEEEKEKKKRNKKKRRRRRGGREEEEKSMDGARY

SEQ ID NO: 934890 - protein, 160 aa, Homo sapiens
MWVGPDKRIKAGCLSQQWQPALVPFHTVEALFFHCLQSILLLLTIWVYTAFMSYNTHRKGLQGKFNLAAEIFITTKDTNVNSKDHGEIVARSCQTPSQQPLPSQAKRPMRKKWLCGPGLGSPYCMQSRELVPCIPATPGVAERDQHSTQAVASEGESPKP

SEQ ID NO: 934891 - protein, 211 aa, Homo sapiens
MLRPHRSPRRGWEAQAWRAAGPETCPVGRQPRPGEKSSSAQSPIARGQQGWLAAPSAGPTKPTPTRNSSWLTSAARSPGSRSCLSLHTSLQAEGVGSGLGQPRKGLPQCSGGLKGSSNATKVGAQAGEVPRASEGSEDCQHAVTSHCHTEWIRVGPGQDRSPGQYPGPMPCSEFPGVSRIYNEEGERWVSQDGRIGRAPVTAPSTSDAEDG

SEQ ID NO: 934892 - protein, 148 aa, Homo sapiens
MCLFLSFVICKLRSQVPKPQKCGNQQCSLQSVAEGRRAPGKPLDSMYLQIATGLRAYTQFRQHIMQMEGKALVSLPNNSGSRVFKDKLVSGGTPVSGEGIGQELNHRELKLSSCAESVPVQGPQVEEWVLATSIMACAENLSFFWCHF

SEQ ID NO: 934893 - protein, 136 aa, Homo sapiens
MFNMAAPSSLLFANHMCDFQPPGLSESKCVCLQAIQLQCGHRHTQKDDPVRTRGEDDVYKPRREASGGANCGNILILDFQPAGLKAENSKNQSSSTPPKECISLLATEQSWMENVFDELTEEGFRQPNFSEIKKEV

SEQ ID NO: 934894 - protein, 140 aa, Homo sapiens
MPKFLHDRVRLHLKRRKKERKKERNEGRKEGRKEGRKEGRKKERERKKKEGGREGGRKEREREGERTEERKKERKKERKKERKKERKKERKKGRKKERKKERKKERKKERKKEKERKKEKERKKKKGKFCQEKLSFTHQM

SEQ ID NO: 934895 - protein, 159 aa, Homo sapiens
MKGNIFKGILNVLVFANVMSDNRFCYVILIYNYSPFINSMVFYFSNLSVSVSLSPSLFLTFFSLEVLRWSQRFIFESISLIYFSLFHPLNFICVLRSFLLLPKKKFSNIYAFKKLHNYNLSHCNIDGPGGHYLKGNNLETGSQMPHFLISKRELNNVYS

SEQ ID NO: 934896 - protein, 166 aa, Homo sapiens
MINQIIWLQAILEIITNKTDRALTILAQQETQMRNAINQNRLALDYLPAAEGGICGKFNFTNCCLHIDDQGQVVEDIVREITKLAHVPLQVGHGFDPGAMFGKWFLVLGGFKTLIIKSYHNIVWKGTVKIPVLFCSILITGACSPQSRTPYSLNGSRPSHVDPLEL

SEQ ID NO: 934897 - protein, 138 aa, Homo sapiens
MSTKPNCKTRTCNPLNFTVLKPELPFWSTGQTALLRVDRQAAGLGVPLLIVKKTRRTQMHPNLQFQVDKSFYKQFDQSVPELPPSTKNLFAQSENKTDSLRISNNGRAVMKITARMHKLAHVPVQTWSNQSTIEAIVT

SEQ ID NO: 934898 - protein, 316 aa, Homo sapiens
MTFKETSHLHNIKMQGEAASADGKAAASYPGELAKITNESGYTKQIFNVDKTAFYWKKMPPMTFRAREKSMPGLKASKDRQNFVLGLNADGDFKSMLTLIYNSENPSALKNVAKSSLPGLCECNSKAWMTVYLFTVLFTKYLKPTINNYCSETQISFKIFLPSDSVPGHPRALMEMYKEIHIVFRPANTVSILQPMDSGVNSTFKSYYLRYEFLKATAAIDSDSPDSSRKSKWKTFWKGFSTPDVIHNLHDPWEKTTISTLTGVSKKLIPILMDDFEGFKTSVQEVTADVLEIARELELDVKPGDLTKLLQSQDKT

SEQ ID NO: 934899 - protein, 137 aa, Homo sapiens
MDTTGDASILGLYSVLHHIHQEGCPLALPTEASLLESLQEELLSLAEVKAEGISRLILAGGAPPLGGGVGTPRSLPAGGASSTDGGDRQDKIKVPATLCSPRASRCYSKFSACWWNSVLRGSGTEVPTFLLLKVLGH

SEQ ID NO: 934900 - protein, 178 aa, Homo sapiens
MVANNSGEQQAKAQLKQAQTLCLENRCSLQSCQTGMFKSSKVSAAFCSAMPCPERWSLLKQAGLLELRWALPSLSFPDALFTYSSLSNGRCPTPSQTAASQFNLGLLASSEQGSVGVRPTEPEAESHAASRPNIILVMVDDLGIGDPGCYGNRTLRLERQLLSKHINHNVEENLLHKT

SEQ ID NO: 934901 - protein, 148 aa, Homo sapiens
MSLLFVSFPSNSQDPQLQVCWICWKSIPDAVCLGISIRGCRTVNIAEEKMLLPDRSSGRFISGGYLAVLTQCSTHFPGLTQQVLNCVPWTVWYWTTSWIESVMDCVFQTMGIFGCHPPSSTVFLGVTMSFTIFHSGGIFMPSCYQCFP

SEQ ID NO: 934902 - protein, 155 aa, Homo sapiens
MAPPLATAYQELKRYTSGNDDCDVDGDDGDGDEDDCDDDGDDDCGGDHGDGGDDDGNGNDDDNGDDNDGDDFGDGDDCDDNGDGEVGDRDDNDEDDGNDVGDDGDGNEGNDVSDGDGNVGNDDCDDDDSDGDDDDDGDDGNMMAIGGVMMTIMIV

SEQ ID NO: 934903 - protein, 290 aa, Homo sapiens
MVHLKICKENISHSKCYYHKISADQLQEETSNPERTYTPSEGSGLLLQDWGDNSNTVSAPTVEVAKRQTFLCDPPSGKKVNHGSLLISELCFYTEYRMSAYWSLHYHYCHHHSPYCHHITIIPIIIIITITIVIITIIITNIAITIRNIITLIAITIITNIITVVFIIIIPVTNFTITIIITIITITKIITIIIITIIIIIAITIIIITTITMITTTIIITVIITIIFITITIITIYITIIITTCVSFTVDQVLSYVFLLEMNFMNFCLQEIVCKMNRQVETETQAMNKS

SEQ ID NO: 934904 - protein, 169 aa, Homo sapiens
MTSLQSQCTLSDDEEESNFSLFSPQEEEHGDDPLPPPPIMEPVYVNSSSTKLLPPLPEEDVCHSSEWSVSHSSHPFGPLPSFKPTVSFDAPGPLLSETWNPASPHSTSWSSHSPSLSSSAPARPVRTSIQEAMCRAMASSGLDVWQLPIAIASKCEGAGGWGKGTAKGR

SEQ ID NO: 934905 - protein, 140 aa, Homo sapiens
MGKKQSRKTGNSKKQSASLPPKERKECITRITNAEKCLKELMELKAKARELHEECRRLRSQCNQLEERNFISSQTKFISEGEIRSFTDKQMLRDFVTTRPAIKELLKEALNMERNNWYQPLQNHAKMKPISRADTQIGSK

SEQ ID NO: 934906 - protein, 166 aa, Homo sapiens
MQLQLKRSFADSLQNIQQHTLIQIQLVFFYFYLKSYPSLCQACNSHKVFLLNKNVPWASPSSKIPFDPADEPTLYYYPPASAPHLSEPSAMVALPASKPSAPNSTPPPSPPVTHSKTTSAILSLGVKGNTCIRVHFSTSELLQIKAVLEAIFIALFLKGLTRIPLF

SEQ ID NO: 934907 - protein, 138 aa, Homo sapiens
MKVALSGKRDETVTERESNLPLGTVGLLTKATLSSCPCEVKLHLSDGHGCNWLGPASWAINEFTKTVVDKEEGRRGSGRCSRRYPEEGIIIMGQDSSMHVIAPEYLPVEQDVEVEDNGIDVPDSQDIGHKRKNKLIPD

SEQ ID NO: 934908 - protein, 148 aa, Homo sapiens
MSASHSSHSKPGSGGKNKCINIYTDSRYTFATVHVHRAIYQEHGLLTSEGKTIKNKEEILALLEAVWFPQQVAVIHCEGQQKEDMVIACGNQRADSAAKKTAQFPVMPLTLLPSISFLQPDFRDHPEYSLEEEKEASDLQASKNQEGW

SEQ ID NO: 934909 - protein, 141 aa, Homo sapiens
MMSLVPLYSDGFLVWVSFLFVSFPSNRQDPQLQVCWSLLEVHSRPCLPGYQQPWLQNSGGSRTVDICEPQMLLPDRSPGSFVSEEYPAVTWRVWDGKTARAQELESSLHNMVNPCLYQKYKNYIGITVHACGPSYWRQRLR

SEQ ID NO: 934910 - protein, 183 aa, Homo sapiens
MQQQKHLLPMNPQWSLGPADWNSCTHQRSSGNTSCPRTHNSPYALLIGIVVLTGTEAETLVFLLDHKEDRGRISYLLTEEEKLTDPVGLDLMGETQWNHQKGEVGKAEGNHPADDEAKIASSWNLPLEIPTEGPLIWNNPVQEIKPQYSTNETEWRLSQGHGFLPSGWLMTEERKVRILKASQ

SEQ ID NO: 934911 - protein, 163 aa, Homo sapiens
MESVHFSQPRESQFRLKQEATQSMVFSLLQPKVDETLDVPSINFTWNLLDTLLTEEKCTELENNFGSPSSSRCQPGFWRELSSWFVDGQFLTLSSHSIAAQWVHLARCLKRANFSRQGTYNRERVFYAELAVWETEVLLLLKLVSLSIWGSEYLRIIWWVVQQ

SEQ ID NO: 934912 - protein, 146 aa, Homo sapiens
MWSPHHTNSSPRPYPSTLSHRGLCFNMSFGADKYSKHSGFENSDDVCTALGRRKRGKRCNSHSEAKGLRTCEINFENLGTREADGIILILRTKARGPVEHPHLFCPYGMSDCPNGTDFVEDNFSMDLWVECRWFQAETAPPKIIRC

SEQ ID NO: 934913 - protein, 168 aa, Homo sapiens
MLTGLDGKEDGTNEKKVDALFSINQASSDLCNLLIVVIDDGDDGDSDVDDGDDDGYNDDSDGDDGNDGDAHGSDYDVNGDGDDGGGDINYGYGNDNNGSDDGNNDNDNVDDHDGGAGDNDSNDGDGDDGGDGDGNGNDNYDDDNNNGNGMIMMMMMVTMLVMIMIKMR

SEQ ID NO: 934914 - protein, 154 aa, Homo sapiens
MISFCLMTASCRISFFKKASFGAYIIGHVGYVTFPLPPKGQPWRNPLFAENFSMGFTDTTFVLDKSRQRKVEELDWLSFLASIFLPCWMLHGLKHQATSFWTFELTPVVCQGLSGPWPQTEGCTVGFPTFEIFGIQNGFFAPPLADGLLWDFTL

SEQ ID NO: 934915 - protein, 186 aa, Homo sapiens [sequence omitted]

SEQ ID NO: 934916 - protein, 138 aa, Homo sapiens
MEKQEECREQETPEVYPVKWKNRKCVLHGGERGSISLTGEKKEVCLALGRWRNCVLHSGDTGSVSSTQEEQKVCAAQERNRVTYFLCLLCKGHTSFFSPVQHTLSVFPCVGHTSCVSPVWDILPVSSLQDALTVLPLW

SEQ ID NO: 934917 - protein, 158 aa, Homo sapiens
MSKGHQTGIQLPAQGKKSAICKSRRDFSPILIQTGGKEILASWQYYTVIYWQKPHPQAWKFVGLNGNRHSCFLSQMLPFCPPYPPILNPYTPQTPGSMSRIAEEQKNGVEEKECLNIERSLAGDAPHHPTESHLHWAMKSPTFTIIRFVHVTWILPGR

SEQ ID NO: 934918 - protein, 164 aa, Homo sapiens
MKWTNLLYKTEDVMIHHDDCLLQEALKPKENHSAQQHSEWEKRNSGVVEKMHQCQDLLAAEPAQEEGGPHPAPNAQSPQELYPAAGPGACRPSRRAWPGPAWAFPMLGCHLPSCLQSQEGGTTVTAPSPPACVLRGHRTEEGGLCCQATLVHSSPERRTTLRCV

SEQ ID NO: 934919 - protein, 135 aa, Homo sapiens
MEHYAAMRKDECMSFLGTWMKLETIILSKLSQGQKTKHRMFSLTAGHMSEVFLNPVPQTSHHLKQLNKCPNVTTQRVHLALLLDRANLSTGQLQWRKSNSHRAGCVEDQSFNITHISLPEHSEIEVFRDNWTEYE

SEQ ID NO: 934920 - protein, 134 aa, Homo sapiens
MSVTVVFFHIHTYTEMDEKKTGHSNIENSCGKTFCFRYEINMKPPYVFTTQSVVLESATAAIAGGGFHCQTSGPESESAFLHDLKGVIPGHFSVSHFHSSVHQEVVGGQWSSEINLIHACNPSTLGGQGGWVTR

SEQ ID NO: 934921 - protein, 159 aa, Homo sapiens
MKEKKRSICTVKAGESRVPMSEDELKRGVRNMKEREFMGPECESRSGHPTDVIGWWCHCYCKGIEIDKANGDPRMSLPVADISVVNNTVQSPWFLEEGMLDVELGEQVGRNLKQHQKSLKRRKRRKHHLPYHLLFPQPQYQPAKIAKRKQRSYLILHFQ

SEQ ID NO: 934922 - protein, 162 aa, Homo sapiens
MDRQGHQRAPWSSGNASLWEDAIAKWTMLSLSLHKIFLVPTRETGDRLRELKKHPQDDVWGELNSSGGDSSPWVSCPPYLMGVIRKNDRLRPPFTRSISHGCCSTPCSTLKEEVTYSSRTRAGSAYWGLQSGRVFPSSVYPSCNAAHGRCRFLSKFIRSTPL

SEQ ID NO: 934923 - protein, 138 aa, Homo sapiens
MPMLHRPNIGQRVLSKHLESLADAKISYKGLAVREKFGIQVRQNPATPRNFLSCCLVTGVGNARTASLHALLSLRWPWDTMNSRYSTSKIRLLPCPWTLSNQLHKAGEEGSLFLRGISPSWGQRRANHQCVVIAHNCH

SEQ ID NO: 934924 - protein, 184 aa, Homo sapiens
MRNPVATSTKTVLVHISGITLRDFKRYYSTTVTKTAGHPYKNRGTHQWNSVESPEIRPHTYNYLMFDKAGKNKQWGKVSLYNKCCWDSWLAIRRRLKLDLFLTLYTKINSRWIKDLNAKPKTIRALEDNLGNTILDIKTGKDFMIKTPKTITTNANIDKWGLIKLKSLCSAKEIIDRVKRQPTE

SEQ ID NO: 934925 - protein, 129 aa, Homo sapiens
MHIRRGGGNRKGEPRNVESGYPRWRSPSWSLHRSPITEYSSYCSGIGVGHKGRNPTWKPFWVVMAVSAQGAFLSHLWYGLENPLFFHSPYFNAGPCWQQQASVLHQRKQSVTRLKHCVNLLCGTLQRHS

SEQ ID NO: 934926 - protein, 143 aa, Homo sapiens
MTDSPEFQSLTTCTCQEKPPPFLFPLKHMVMVGQMGFPRLDDKRGLAWTDLPWTTLQFLWVPLAKWAQPEKLRQQSVMTHSNLGNPVRKREKKEGKKERERKKERREKERKKERNKCGQITTSGHQDHPEQHSEILSLLKIQN

SEQ ID NO: 934927 - protein, 148 aa, Homo sapiens
MGSSGTSIPPERKEDHGGTGGILQTHDLRVANTCHNGTKSVKSTLPDTAWISQRGQLTPNSLLCRALPRTGVSGPTVEQNTPCGIQAYTRTISPSSWGLRSVDSHEDRSQKHICLFFYSSASDELRFQMKLQRVEGKALSLLPCFCEW

SEQ ID NO: 934928 - protein, 160 aa, Homo sapiens
MDKLFDVLLDSVCQYFIVNIHIDGVLSQGVGSFTYKSLTQAAAFLSEMPYPVRRNLESQCGHTCFACFLIVVEPLPTELYHSRLTSGFYVGSENLKPVDLSLLCSMEVGPAQWDHLAPWLQPLSRGVTGFVSLVFQVPLGYENYFAASSASVKAATQFCA

SEQ ID NO: 934929 - protein, 211 aa, Homo sapiens
MQDGMGKGVALVDGHRVGDPVSTVHDNASGAPKGIEGQHIPDGHVHGRGIEGLKHNLSHFLSVVLGVQWVLGQQHWLLLRGPMQLIVEVVPDLLHVVPVGDDAMLDGVLQRQNAALALGFIAHVGVLLAHVHHHALVSGEPNGGGKHGLGSIVPCKASFAHARAIVNDERSDLFFYCDGQRSGTEERQKNKALTRLPWVKTGIILLPGNPK

SEQ ID NO: 934930 - protein, 145 aa, Homo sapiens
MEMLGKWRFAEHNSMSLRKAAYLMKIPWISCVVMVESGSQRYCAAIGWSHGNEQEYQLQLTDDYIIRTSRVIEEERKNKDTLNKSLFIKKFLDDFDCGDHLPSVWIPAASYRCTDYIGSRVCHQKVDQIAPCVYGRGQKQAFRLT

SEQ ID NO: 934931 - protein, 291 aa, Homo sapiens
MPHVRISVYSPMNKGELANDSFINRTVKKEKKKMQKKVFPRERRRRRRRRRRRRRRRRRRRRRRRRRRRRRRKKKKKKERRRKKKKMKKEEEEEEEEEEEEEEEEEEEEEEEEEEKCPLKHTEAPCVKGIETIFWKAHKEAQERQKKQEADRGISDAITGLQNPGVLSWTAESLASSRTLQEEQQRKENNASSTLSSQWWRPLEGGMPAETYFALQGPILDNQPLGSSGSRTKGGQKATALHRNAVQLLSHISTTAEKQAAVQTAKEFEDEQLTSYSQSENKQKRKMKMDE

SEQ ID NO: 934932 - protein, 163 aa, Homo sapiens
MAGSPLSDIYISCECSTTVTSEEEKFCKQMDRINHPVETTQSLSRASAVITQRAHKQSGHDCRGEDYARVQQNGLLLTKANLAMATAACPICKQQSPTLIPRIIGYRNQGVEVKMSPLTVTPSDPLAKCLLPVSFTLCSAGLQVLVPGGEMLPPGDRMTFPLN

SEQ ID NO: 934933 - protein, 155 aa, Homo sapiens
MIDLTPVTQITSTDVCLNCLKNSQVTVAGADRGRQTVIDIELMEFNGNVILSPGGNISPPGTKTCKPAEHNVKETGSKHFASGSLGVTRNVISVTDKCDILQPPKEIKISLKKIKAQRSGSKCGVLPAAKCVYANNAFWHWENDLRMTLGTRSTH

SEQ ID NO: 934934 - protein, 186 aa, Homo sapiens
MAADPKFSCLFPVPTQKVQFLCLNAVFSCITAFVEFTDLGYMSKINCLQLTIVDNCRERRRRRRRRRRRRRRRRRRRRRRRRRRRRRRRKKKKKKERRRKKKKMKKEEEEEEEEEEEEEEEEEEEEEEEEEEKCPLKHTEAPCVKGIETIFWNLFVSIYLCTKNKVLSMSDCVSSCEWAEAVAGDF

SEQ ID NO: 934935 - protein, 141 aa, Homo sapiens
MGGSWRLLTQEYTTAPRRGQSNLLLMSDVLSQDELREKLHQTLKDRGVLGTLKYQLQLTDDYIIRTSRVIEEERKNKDDFDCGDHLPSVWIPAASYRCTDYIGSRVCHQKFQDLRIFSASFYPDLYFADIYFQSVAYLSIS

SEQ ID NO: 934936 - protein, 164 aa, Homo sapiens
MPEDNRCLQVSVGTEKKRIMSLSVSGWRLGMECGRGTPQSLASSRSLSHQVVSGPRENSQAIPTTSDQSPTEDTAYVSAHGIFWNFHSPREKRGPRGHGVANTCHNGTKSVKSTLPDTAWISQRGQLTPNSLLSSGQFSLLKYPFLSRVPQSPLCRESFKNLVQ

SEQ ID NO: 934937 - protein, 137 aa, Homo sapiens
MEDAESWAFSGEPTYYCGEGEKKKKNSGGESVAKKKFLQCEKRGGNSHTQSKVKINEQLLRQAIIACEHPAHRLLMKTIPFSVFKSFNTFDITTADYSPSYPVSTLHLYTVMQTQAPYPMKTSKYSQGPRFEGKELD

SEQ ID NO: 934938 - protein, 162 aa, Homo sapiens
MAHRNPRRAPGTGGRHPDIVTRMGKVLTYGDDDGGGGGGDNGDGMKVVMKMMVVMVMGDGDGAGDYGDGDDGGGDDSDDSDDGDVMVMMMVVTVMMVVMVMVVMVIVIMVMMVVEMMVMIGYGDDVGDGGDGDFVMVMVMMMVVIVMVMEDDDDDDDDDGDI

SEQ ID NO: 934939 - protein, 162 aa, Homo sapiens
MLSRACAPLSGESIPVCLVLRKEKRALQGRSPTFFGFNVGLSQMLGVTNCMASTTSFDQPPIDFQLSAAELLLRLYLSARQSYFTVSNCPILWLLIYTYMFFNYLFWFSVYESFNLCYFEGNTDAYLNFKSVFHPGCRHLVNNFSGDRKTHHHENVATFILQ

SEQ ID NO: 934940 - protein, 151 aa, Homo sapiens
MGSSSWSLVPAGYSGQLKPQITVAAPPSLRELGPSPAVSSLLPLASWNSKSVGLNLGMHGYVSHFAGILGAEYAKLLDFHACPSEPASTRLRLHTALCFRPKPWCLGLRGDLLIYRLQRSVGEAWFARQSRTITHRLTWLRDFPYYFEEEW

SEQ ID NO: 934941 - protein, 163 aa, Homo sapiens
MKFNVVVSAVVTRITKEFIKKQLILYYVKELHLTKKTKLLPQHSTECSQNGVLVPPQSRTAWGQAHHILGMYSSHTIHQLLDLLPVKVSVTAVKSIMVCSNINSCLLRRKNLAEGNKVAKETEKSFTANPAVADMPMLHRPNIGQRVLSKHLESLADAKSGLG

SEQ ID NO: 934942 - protein, 140 aa, Homo sapiens
MVLPGSEKADSCSPCWQPEELQDPHGQGEAAVRPLLAELRHQIKAEFRLFSAIILEIQTEMLPIILFRKLLFILGSGVHVKLCYVGALSQGDGGFICKPLTGAAIICFENTLPGEKKSGSLATSALLSCSSNFSEALFTP

SEQ ID NO: 934943 - protein, 156 aa, Homo sapiens
MQCDSCNLALFFSRSPSLYPPSNLKSLQMGLANHPFHLEAEERNIFVEHTDLLVSWGSLSAAPFSEGGKMEIRGKWSFAEHTSFSLRNAAYLIGDSVVLLCSEDDFDCGAHLISAWIPTAAGECTDYIESRVCHQKVDQIAPSVHGRGEKEVFRLI

SEQ ID NO: 934944 - protein, 137 aa, Homo sapiens
MLCICLKLIEKLVTDSDVICHELYCCAGPIVSVCIQGDQTKYCQDIQKIIQKHCDIVRHKPSPYWLGPYYPEPSEHFTFHFPLKSEECVLNSIVKCLQLPSTIKKVTEHRLSGYTTQRMQTTKIALEGCYTSKQPTN

SEQ ID NO: 934945 - protein, 191 aa, Homo sapiens
MEMLKDWSFAEPNLFDVRMAAHLTADSGLILHSEGKQRRGQVTATPGGMHISVQTGHLSTVNGCMWLESPSLLKEVGLDQLAHEIVVFQKELQKAENAIIAEHEEFKNHRPALQYNCNMHCKATSYARLQVTGITGNPTKKGCRQRECLTNSEETYNPTNRACESSLLSQLRRKLDVGKVAHHPNWEHGNW

SEQ ID NO: 934946 - protein, 145 aa, Homo sapiens
MVFAVTVPCIGFSLLMYWNPQWFLHPADRYSCAHRNSSRNTSFPPRTQRGPSKRSTADTVCLGNSSGFCRTADFHEPRMMLSDHSSGNFVSEEYPAVSEKFDRLKPSSLNSSKSFSIQLHSASGPSAEGLLEFAGGPLQTLFPEV
